United States Patent Application Publication US 2024/0327476 A1 - sequence listing, part 51

SEQ ID NO: 95777 - DNA, 2946 bp, synthetic construct
  misc_feature 1..2946: note = Description of Artificial Sequence: Synthetic coding sequence
  source 1..2946: mol_type = other DNA
atgttcagacagttctacctgtggacctgcctggccagcggcatcatcctgggcagcctgttcgagatctgcctgggccagtacgacgacgactgcaagctggccagaggcggcccccccgccaccatcgtggccatcgacgaggagagcagaaacggcaccatcctggtggacaacatgctgatcaagggcaccgccggcggccccgaccccaccatcgagctgagcctgaaggacaacgtggactactgggtgctgatggaccccgtgaagcagatgctgttcctgaacagcaccggcagagtgctggacagagacccccccatgaacatccacagcatcgtggtgcaggtgcagtgcatcaacaagaaggtgggcaccatcatctaccacgaggtgagaatcgtggtgagagacagaaacgacaacagccccaccttcaagcacgagagctactacgccaccgtgaacgagctgacccccgtgggcaccaccatcttcaccggcttcagcggcgacaacggcgccaccgacatcgacgacggccccaacggccagatcgagtacgtgatccagtacaaccccgacgaccccaccagcaacgacaccttcgagatccccctgatgctgaccggcaacatcgtgctgagaaagagactgaactacgaggacaagaccagatacttcgtgatcatccaggccaacgacagagcccagaacctgaacgagagaagaaccaccaccaccaccctgaccgtggacgtgctggacggcgacgacctgggccccatgttcctgccctgcgtgctggtgcccaacaccagagactgcagacccctgacctaccaggccgccatccccgagctgagaacccccgaggagctgaaccccatcatcgtgaccccccccatccaggccatcgaccaggacagaaacatccagccccccagcgacagacccggcatcctgtacagcatcctggtgggcacccccgaggactaccccagattcttccacatgcaccccagaaccgccgagctgagcctgctggagcccgtgaacagagacttccaccagaagttcgacctggtgatcaaggccgagcaggacaacggccaccccctgcccgccttcgccggcctgcacatcgagatcctggacgagaacaaccagagcccctacttcaccatgcccagctaccagggctacatcctggagagcgcccccgtgggcgccaccatcagcgacagcctgaacctgaccagccccctgagaatcgtggccctggacaaggacatcgaggacaccaaggaccccgagctgcacctgttcctgaacgactacaccagcgtgttcaccgtgacccagaccggcatcaccagatacctgaccctgctgcagcccgtggacagagaggagcagcagacctacaccttcagcatcaccgccttcgacggcgtgcaggagagcgagcccgtgatcgtgaacatccaggtgatggacgccaacgacaacacccccaccttccccgagatcagctacgacgtgtacgtgtacaccgacatgagacccggcgacagcgtgatccagctgaccgccgtggacgccgacgagggcagcaacggcgagatcacctacgagatcctggtgggcgcccagggcgacttcatcatcaacaagaccaccggcctgatcaccatcgcccccggcgtggagatgatcgtgggcagaacctacgccctgaccgtgcaggccgccgacaacgccccccccgccgagagaagaaacagcatctgcaccgtgtacatcgaggtgctgccccccaacaaccagagcccccccagattcccccagctgatgtacagcctggagatcagcgaggccatgagagtgggcgccgtgctgctgaacctgcaggccaccgacagagagggcgacagcatcacctacgccatcgagaacggcgacccccagagagtgttcaacctgagcgagaccaccggcatcctgaccctgggcaaggccctggacagagagagcaccgacagatacatcctgatcatcaccgccagcgacggcagacccgacggcgaggagcccaagaagatcaagaagcccaaggtggagatcagagagcccagcgaggaggaggaggtggtggtgaccatcgagaagccccccgccgccgagcccacctacaccacctggaagagagccagaatcttccccatgatcttcaagaaggtgagaggcctggccgacaagagaggcatcgtggacctggagggcgaggagtggcagagaagactggaggaggaggacaaggactacctgaagctgaccctggaccaggaggaggccaccgagagcaccgtggagagcgaggaggagagcagcagcgactacaccgagtacagcgaggaggagagcgagttcagcgagagcgagaccaccgaggaggagagcgagagcgagacccccagcgaggaggaggagagcagcacccccgagagcgaggagagcgagagcaccgagagcgagggcgagaaggccagaaagaacatcgtgctggccagaagaagacccatggtggaggaggtgaaggaggtgaagggcagaaaggaggagccccaggaggagcagaaggagcccaagatggaggaggaggagcacagcgaggaggaggagagcggccccgcccccgtggaggagagcaccgaccccgaggcccaggacatccccgaggagggcagcgccgagagcgccagcgtggagggcggcgtggagagcgaggaggagagcgagagcggcagcagcagcagcagcagcgagagccagagcggcggcccctggggctaccaggtgcccgcctacgacagaagcaagaacgccaaccagaagaagagccccggcgccaacagcgagggctacaacaccgccctgtag

SEQ ID NO: 95778 - DNA, 3453 bp, synthetic construct
  misc_feature 1..3453: note = Description of Artificial Sequence: Synthetic coding sequence
  source 1..3453: mol_type = other DNA
atgcccagctaccagggctacatcctggagagcgcccccgtgggcgccaccatcagcgacagcctgaacctgaccagccccctgagaatcgtggccctggacaaggacatcgaggacgtgccccccagcggcgtgcccaccaaggaccccgagctgcacctgttcctgaacgactacaccagcgtgttcaccgtgacccagaccggcatcaccagatacctgaccctgctgcagcccgtggacagagaggagcagcagacctacaccttcagcatcaccgccttcgacggcgtgcaggagagcgagcccgtgatcgtgaacatccaggtgatggacgccaacgacaacacccccaccttccccgagatcagctacgacgtgtacgtgtacaccgacatgagacccggcgacagcgtgatccagctgaccgccgtggacgccgacgagggcagcaacggcgagatcacctacgagatcctggtgggcgcccagggcgacttcatcatcaacaagaccaccggcctgatcaccatcgcccccggcgtggagatgatcgtgggcagaacctacgccctgaccgtgcaggccgccgacaacgccccccccgccgagagaagaaacagcatctgcaccgtgtacatcgaggtgctgccccccaacaaccagagcccccccagattcccccagctgatgtacagcctggagatcagcgaggccatgagagtgggcgccgtgctgctgaacctgcaggccaccgacagagagggcgacagcatcacctacgccatcgagaacggcgacccccagagagtgttcaacctgagcgagaccaccggcatcctgaccctgggcaaggccctggacagagagagcaccgacagatacatcctgatcatcaccgccagcgacggcagacccgacggcaccagcaccgccaccgtgaacatcgtggtgaccgacgtgaacgacaacgcccccgtgttcgacccctacctgcccagaaacctgagcgtggtggaggaggaggccaacgccttcgtgggccaggtgaaggccaccgaccccgacgccggcatcaacggccaggtgcactacagcctgggcaacttcaacaacctgttcagaatcaccagcaacggcagcatctacaccgccgtgaagctgaacagagaggtgagagactactacgagctggtggtggtggccaccgacggcgccgtgcaccccagacacagcaccctgaccctggccatcaaggtgctggacatcgacgacaacagccccgtgttcaccaacagcacctacaccgtgctggtggaggagaacctgcccgccggcaccaccatcctgcagatcgaggccaaggacgtggacctgggcgccaacgtgagctacagaatcagaagccccgaggtgaagcacttcttcgccctgcaccccttcaccggcgagctgagcctgctgagaagcctggactacgaggccttccccgaccaggaggccagcatcaccttcctggtggaggccttcgacatctacggcaccatgccccccggcatcgccaccgtgaccgtgatcgtgaaggacatgaacgactacccccccgtgttcagcaagagaatctacaagggcatggtggcccccgacgccgtgaagggcacccccatcaccaccgtgtacgccgaggacgccgacccccccggcctgcccgccagcagagtgagatacagagtggacgacgtgcagttcccctaccccgccagcatcttcgaggtggaggaggacagcggcagagtgatcaccagagtgaacctgaacgaggagcccaccaccatcttcaagctggtggtggtggccttcgacgacggcgagcccgtgatgagcagcagcgccaccgtgaagatcctggtgctgcaccccggcgagatccccagattcacccaggaggagtacagacccccccccgtgagcgagctggccaccaagggcaccatggtgggcgtgatcagcgccgccgccatcaaccagagcatcgtgtacagcatcgtgagcggcaacgaggaggacaccttcggcatcaacaacatcaccggcgtgatctacgtgaacggccccctggactacgagaccagaaccagctacgtgctgagagtgcaggccgacagcctggaggtggtgctggccaacctgagagtgcccagcaagagcaacaccgccaaggtgtacatcgagatccaggacgagaacaaccacccccccgtgttccagaagaagttctacatcggcggcgtgagcgaggacgccagaatgttcaccagcgtgctgagagtgaaggccaccgacaaggacaccggcaactacagcgtgatggcctacagactgatcatcccccccatcaaggagggcaaggagggcttcgtggtggagacctacaccggcctgatcaagaccgccatgctgttccacaacatgagaagaagctacttcaagttccaggtgatcgccaccgacgactacggcaagggcctgagcggcaaggccgacgtgctggtgagcgtggtgaaccagctggacatgcaggtgatcgtgagcaacgtgccccccaccctggtggagaagaagatcgaggacctgaccgagatcctggacagatacgtgcaggagcagatccccggcgccaaggtggtggtggagagcatcggcgccagaagacacggcgacgccttcagcctggaggactacaccaagtgcgacctgaccgtgtacgccatcgacccccagaccaacagagccatcgacagaaacgagctgttcaagttcctggacggcaagctgctggacatcaacaaggacttccagccctactacggcgagggcggcagaatcctggagatcagaacccccgaggccgtgaccagcatcaagaagagaggcgagagcctgggctacaccgagggcgccctgctggccctggccttcatcatcatcctgtgctgcatccccgccatcctggtggtgctggtgagctacagacagttcaaggtgagacaggccgagtgcaccaagaccgccagaatccaggccgccctgcccgccgccaagcccgccgtgcccgcccccgcccccgtggccgcccccccccccccccccccccccccccccggcgcccacctgtacgaggagctgggcgacagcagcatgcacaagaactacccctggagcctggagctgatcctggccagaaacatggacaagatcatcaccgtgatgagcatgggcatgaagtgcctgaacatgggcgtggccgtggactgctaccaccagctggacagaagaaacatggtgagatggctggtgaagctgagaaagaacatgagaagaaagagaaagagccagagaaagctgaagaaccagagactgaagctggagagcctggtgagaagaaagaagtag

SEQ ID NO: 95779 - DNA, 990 bp, synthetic construct
  misc_feature 1..990: note = Description of Artificial Sequence: Synthetic coding sequence
  source 1..990: mol_type = other DNA
atgttcagacagttctacctgtggacctgcctggccagcggcatcatcctgggcagcctgttcgagatctgcctgggccagtacgacgacgactgcaagctggccagaggcggcccccccgccaccatcgtggccatcgacgaggagagcagaaacggcaccatcctggtggacaacatgctgatcaagggcaccgccggcggccccgaccccaccatcgagctgagcctgaaggacaacgtggactactgggtgctgatggaccccgtgaagcagatgctgttcctgaacagcaccggcagagtgctggacagagacccccccatgaacatccacagcatcgtggtgcaggtgcagtgcatcaacaagaaggtgggcaccatcatctaccacgaggtgagaatcgtggtgagagacagaaacgacaacagccccaccttcaagcacgagagctactacgccaccgtgaacgagctgacccccgtgggcaccaccatcttcaccggcttcagcggcgacaacggcgccaccgacatcgacgacggccccaacggccagatcgagtacgtgatccagtacaaccccgacgaccccaccagcaacgacaccttcgagatccccctgatgctgaccggcaacatcgtgctgagaaagagactgaactacgaggacaagaccagatacttcgtgatcatccaggccaacgacagagcccagaacctgaacgagagaagaaccaccaccaccaccctgaccgtggacgtgctggacggcgacgacctgggccccatgttcctgccctgcgtgctggtgcccaacaccagagactgcagacccctgacctaccaggccgccatccccgagctgagaacccccgacctgggcagcctgtgcagcggcaccaacagctggtgccagggcagaagcggcgtgcactggagcagccccgcctggagatgcctgttccccagaagactgcaccagatgtag

SEQ ID NO: 95780 - DNA, 5046 bp, synthetic construct
  misc_feature 1..5046: note = Description of Artificial Sequence: Synthetic coding sequence
  source 1..5046: mol_type = other DNA
atgttcagacagttctacctgtggacctgcctggccagcggcatcatcctgggcagcctgttcgagatctgcctgggccagtacgacgacggctggagatacatgtactgcaagctggccagaggcggcccccccgccaccatcgtggccatcgacgaggagagcagaaacggcaccatcctggtggacaacatgctgatcaagggcaccgccggcggccccgaccccaccatcgagctgagcctgaaggacaacgtggactactgggtgctgatggaccccgtgaagcagatgctgttcctgaacagcaccggcagagtgctggacagagacccccccatgaacatccacagcatcgtggtgcaggtgcagtgcatcaacaagaaggtgggcaccatcatctaccacgaggtgagaatcgtggtgagagacagaaacgacaacagccccaccttcaagcacgagagctactacgccaccgtgaacgagctgacccccgtgggcaccaccatcttcaccggcttcagcggcgacaacggcgccaccgacatcgacgacggccccaacggccagatcgagtacgtgatccagtacaaccccgacgaccccaccagcaacgacaccttcgagatccccctgatgctgaccggcaacatcgtgctgagaaagagactgaactacgaggacaagaccagatacttcgtgatcatccaggccaacgacagagcccagaacctgaacgagagaagaaccaccaccaccaccctgaccgtggacgtgctggacggcgacgacctgggccccatgttcctgccctgcgtgctggtgcccaacaccagagactgcagacccctgacctaccaggccgccatccccgagctgagaacccccgaggagctgaaccccatcatcgtgaccccccccatccaggccatcgaccaggacagaaacatccagccccccagcgacagacccggcatcctgtacagcatcctggtgggcacccccgaggactaccccagattcttccacatgcaccccagaaccgccgagctgagcctgctggagcccgtgaacagagacttccaccagaagttcgacctggtgatcaaggccgagcaggacaacggccaccccctgcccgccttcgccggcctgcacatcgagatcctggacgagaacaaccagagcccctacttcaccatgcccagctaccagggctacatcctggagagcgcccccgtgggcgccaccatcagcgacagcctgaacctgaccagccccctgagaatcgtggccctggacaaggacatcgaggacaccaaggaccccgagctgcacctgttcctgaacgactacaccagcgtgttcaccgtgacccagaccggcatcaccagatacctgaccctgctgcagcccgtggacagagaggagcagcagacctacaccttcagcatcaccgccttcgacggcgtgcaggagagcgagcccgtgatcgtgaacatccaggtgatggacgccaacgacaacacccccaccttccccgagatcagctacgacgtgtacgtgtacaccgacatgagacccggcgacagcgtgatccagctgaccgccgtggacgccgacgagggcagcaacggcgagatcacctacgagatcctggtgggcgcccagggcgacttcatcatcaacaagaccaccggcctgatcaccatcgcccccggcgtggagatgatcgtgggcagaacctacgccctgaccgtgcaggccgccgacaacgccccccccgccgagagaagaaacagcatctgcaccgtgtacatcgaggtgctgccccccaacaaccagagcccccccagattcccccagctgatgtacagcctggagatcagcgaggccatgagagtgggcgccgtgctgctgaacctgcaggccaccgacagagagggcgacagcatcacctacgccatcgagaacggcgacccccagagagtgttcaacctgagcgagaccaccggcatcctgaccctgggcaaggccctggacagagagagcaccgacagatacatcctgatcatcaccgccagcgacggcagacccgacggcaccagcaccgccaccgtgaacatcgtggtgaccgacgtgaacgacaacgcccccgtgttcgacccctacctgcccagaaacctgagcgtggtggaggaggaggccaacgccttcgtgggccaggtgaaggccaccgaccccgacgccggcatcaacggccaggtgcactacagcctgggcaacttcaacaacctgttcagaatcaccagcaacggcagcatctacaccgccgtgaagctgaacagagaggtgagagactactacgagctggtggtggtggccaccgacggcgccgtgcaccccagacacagcaccctgaccctggccatcaaggtgctggacatcgacgacaacagccccgtgttcaccaacagcacctacaccgtgctggtggaggagaacctgcccgccggcaccaccatcctgcagatcgaggccaaggacgtggacctgggcgccaacgtgagctacagaatcagaagccccgaggtgaagcacttcttcgccctgcaccccttcaccggcgagctgagcctgctgagaagcctggactacgaggccttccccgaccaggaggccagcatcaccttcctggtggaggccttcgacatctacggcaccatgccccccggcatcgccaccgtgaccgtgatcgtgaaggacatgaacgactacccccccgtgttcagcaagagaatctacaagggcatggtggcccccgacgccgtgaagggcacccccatcaccaccgtgtacgccgaggacgccgacccccccggcctgcccgccagcagagtgagatacagagtggacgacgtgcagttcccctaccccgccagcatcttcgaggtggaggaggacagcggcagagtgatcaccagagtgaacctgaacgaggagcccaccaccatcttcaagctggtggtggtggccttcgacgacggcgagcccgtgatgagcagcagcgccaccgtgaagatcctggtgctgcaccccggcgagatccccagattcacccaggaggagtacagacccccccccgtgagcgagctggccaccaagggcaccatggtgggcgtgatcagcgccgccgccatcaaccagagcatcgtgtacagcatcgtgagcggcaacgaggaggacaccttcggcatcaacaacatcaccggcgtgatctacgtgaacggccccctggactacgagaccagaaccagctacgtgctgagagtgcaggccgacagcctggaggtggtgctggccaacctgagagtgcccagcaagagcaacaccgccaaggtgtacatcgagatccaggacgagaacaaccacccccccgtgttccagaagaagttctacatcggcggcgtgagcgaggacgccagaatgttcaccagcgtgctgagagtgaaggccaccgacaaggacaccggcaactacagcgtgatggcctacagactgatcatcccccccatcaaggagggcaaggagggcttcgtggtggagacctacaccggcctgatcaagaccgccatgctgttccacaacatgagaagaagctacttcaagttccaggtgatcgccaccgacgactacggcaagggcctgagcggcaaggccgacgtgctggtgagcgtggtgaaccagctggacatgcaggtgatcgtgagcaacgtgccccccaccctggtggagaagaagatcgaggacctgaccgagatcctggacagatacgtgcaggagcagatccccggcgccaaggtggtggtggagagcatcggcgccagaagacacggcgacgccttcagcctggaggactacaccaagtgcgacctgaccgtgtacgccatcgacccccagaccaacagagccatcgacagaaacgagctgttcaagttcctggacggcaagctgctggacatcaacaaggacttccagccctactacggcgagggcggcagaatcctggagatcagaacccccgaggccgtgaccagcatcaagaagagaggcgagagcctgggctacaccgagggcgccctgctggccctggccttcatcatcatcctgtgctgcatccccgccatcctggtggtgctggtgagctacagacagagacaggccgagtgcaccaagaccgccagaatccaggccgccctgcccgccgccaagcccgccgtgcccgcccccgcccccgtggccgcccccccccccccccccccccccccccccggcgcccacctgtacgaggagctgggcgacagcagcatcctgtactacagatacgagatgccccagtacggcagcagaagaagactgctgccccccgccggccaggaggagtacggcgaggtggtgggcgaggccgaggaggagtacgaggaggaggagtgggccagaaagagaatgatcaagctggtggtggacagagagtacgagaccagcagcaccggcgaggacagcgcccccgagtgccagagaaacagactgcaccaccccagcatccacagcaacatcaacggcaacatctacatcgcccagaacggcagcgtggtgagaaccagaagagcctgcctgaccgacaacctgaaggtggccagccccgtgagactgggcggccccttcaagaagctggacaagctggccgtgacccacgaggagaacgtgcccctgaacaccctgagcaagggccccttcagcaccgagaagatgaacgccagacccaccctggtgaccttcgccccctgccccgtgggcaccgacaacaccgccgtgaagcccctgagaaacagactgaagagcaccgtggagcaggagagcatgatcgacagcaagaacatcaaggaggccctggagttccacagcgaccacacccagagcgacgacgaggagctgtggatgggcccctggaacaacctgcacatccccatgaccaagctgtag

SEQ ID NO: 95781 - DNA, 5889 bp, synthetic construct
  misc_feature 1..5889: note = Description of Artificial Sequence: Synthetic coding sequence
  source 1..5889: mol_type = other DNA
atgttcagacagttctacctgtggacctgcctggccagcggcatcatcctgggcagcctgttcgagatctgcctgggccagtacgacgacgcctacagctacgaggactgcaagctggccagaggcggcccccccgccaccatcgtggccatcgacgaggagagcagaaacggcaccatcctggtggacaacatgctgatcaagggcaccgccggcggccccgaccccaccatcgagctgagcctgaaggacaacgtggactactgggtgctgatggaccccgtgaagcagatgctgttcctgaacagcaccggcagagtgctggacagagacccccccatgaacatccacagcatcgtggtgcaggtgcagtgcatcaacaagaaggtgggcaccatcatctaccacgaggtgagaatcgtggtgagagacagaaacgacaacagccccaccttcaagcacgagagctactacgccaccgtgaacgagctgacccccgtgggcaccaccatcttcaccggcttcagcggcgacaacggcgccaccgacatcgacgacggccccaacggccagatcgagtacgtgatccagtacaaccccgacgaccccaccagcaacgacaccttcgagatccccctgatgctgaccggcaacatcgtgctgagaaagagactgaactacgaggacaagaccagatacttcgtgatcatccaggccaacgacagagcccagaacctgaacgagagaagaaccaccaccaccaccctgaccgtggacgtgctggacggcgacgacctgggccccatgttcctgccctgcgtgctggtgcccaacaccagagactgcagacccctgacctaccaggccgccatccccgagctgagaacccccgaggagctgaaccccatcatcgtgaccccccccatccaggccatcgaccaggacagaaacatccagccccccagcgacagacccggcatcctgtacagcatcctggtgggcacccccgaggactaccccagattcttccacatgcaccccagaaccgccgagctgagcctgctggagcccgtgaacagagacttccaccagaagttcgacctggtgatcaaggccgagcaggacaacggccaccccctgcccgccttcgccggcctgcacatcgagatcctggacgagaacaaccagagcccctacttcaccatgcccagctaccagggctacatcctggagagcgcccccgtgggcgccaccatcagcgacagcctgaacctgaccagccccctgagaatcgtggccctggacaaggacatcgaggacaccaaggaccccgagctgcacctgttcctgaacgactacaccagcgtgttcaccgtgacccagaccggcatcaccagatacctgaccctgctgcagcccgtggacagagaggagcagcagacctacaccttcagcatcaccgccttcgacggcgtgcaggagagcgagcccgtgatcgtgaacatccaggtgatggacgccaacgacaacacccccaccttccccgagatcagctacgacgtgtacgtgtacaccgacatgagacccggcgacagcgtgatccagctgaccgccgtggacgccgacgagggcagcaacggcgagatcacctacgagatcctggtgggcgcccagggcgacttcatcatcaacaagaccaccggcctgatcaccatcgcccccggcgtggagatgatcgtgggcagaacctacgccctgaccgtgcaggccgccgacaacgccccccccgccgagagaagaaacagcatctgcaccgtgtacatcgaggtgctgccccccaacaaccagagcccccccagattcccccagctgatgtacagcctggagatcagcgaggccatgagagtgggcgccgtgctgctgaacctgcaggccaccgacagagagggcgacagcatcacctacgccatcgagaacggcgacccccagagagtgttcaacctgagcgagaccaccggcatcctgaccctgggcaaggccctggacagagagagcaccgacagatacatcctgatcatcaccgccagcgacggcagacccgacggcaccagcaccgccaccgtgaacatcgtggtgaccgacgtgaacgacaacgcccccgtgttcgacccctacctgcccagaaacctgagcgtggtggaggaggaggccaacgccttcgtgggccaggtgaaggccaccgaccccgacgccggcatcaacggccaggtgcactacagcctgggcaacttcaacaacctgttcagaatcaccagcaacggcagcatctacaccgccgtgaagctgaacagagaggtgagagactactacgagctggtggtggtggccaccgacggcgccgtgcaccccagacacagcaccctgaccctggccatcaaggtgctggacatcgacgacaacagccccgtgttcaccaacagcacctacaccgtgctggtggaggagaacctgcccgccggcaccaccatcctgcagatcgaggccaaggacgtggacctgggcgccaacgtgagctacagaatcagaagccccgaggtgaagcacttcttcgccctgcaccccttcaccggcgagctgagcctgctgagaagcctggactacgaggccttccccgaccaggaggccagcatcaccttcctggtggaggccttcgacatctacggcaccatgccccccggcatcgccaccgtgaccgtgatcgtgaaggacatgaacgactacccccccgtgttcagcaagagaatctacaagggcatggtggcccccgacgccgtgaagggcacccccatcaccaccgtgtacgccgaggacgccgacccccccggcctgcccgccagcagagtgagatacagagtggacgacgtgcagttcccctaccccgccagcatcttcgaggtggaggaggacagcggcagagtgatcaccagagtgaacctgaacgaggagcccaccaccatcttcaagctggtggtggtggccttcgacgacggcgagcccgtgatgagcagcagcgccaccgtgaagatcctggtgctgcaccccggcgagatccccagattcacccaggaggagtacagacccccccccgtgagcgagctggccaccaagggcaccatggtgggcgtgatcagcgccgccgccatcaaccagagcatcgtgtacagcatcgtgagcggcaacgaggaggacaccttcggcatcaacaacatcaccggcgtgatctacgtgaacggccccctggactacgagaccagaaccagctacgtgctgagagtgcaggccgacagcctggaggtggtgctggccaacctgagagtgcccagcaagagcaacaccgccaaggtgtacatcgagatccaggacgagaacaaccacccccccgtgttccagaagaagttctacatcggcggcgtgagcgaggacgccagaatgttcaccagcgtgctgagagtgaaggccaccgacaaggacaccggcaactacagcgtgatggcctacagactgatcatcccccccatcaaggagggcaaggagggcttcgtggtggagacctacaccggcctgatcaagaccgccatgctgttccacaacatgagaagaagctacttcaagttccaggtgatcgccaccgacgactacggcaagggcctgagcggcaaggccgacgtgctggtgagcgtggtgaaccagctggacatgcaggtgatcgtgagcaacgtgccccccaccctggtggagaagaagatcgaggacctgaccgagatcctggacagatacgtgcaggagcagatccccggcgccaaggtggtggtggagagcatcggcgccagaagacacggcgacgccttcagcctggaggactacaccaagtgcgacctgaccgtgtacgccatcgacccccagaccaacagagccatcgacagaaacgagctgttcaagttcctggacggcaagctgctggacatcaacaaggacttccagccctactacggcgagggcggcagaatcctggagatcagaacccccgaggccgtgaccagcatcaagaagagaggcgagagcctgggctacaccgagggcgccctgctggccctggccttcatcatcatcctgtgctgcatccccgccatcctggtggtgctggtgagctacagacacttcaagagaagacaggccgagtgcaccaagaccgccagaatccaggccgccctgcccgccgccaagcccgccgtgcccgcccccgcccccgtggccgcccccccccccccccccccccccccccccggcgcccacctgtacgaggagctgggcgacagcagcatgaagggcctgttcctgctgtaccacttccagcagagcagaggcaacaacagcgtgagcgaggacagaaagcaccagcaggtggtgatgcccttcagcagcaacaccatcgaggcccacaagagcgcccacgtggacggcagcctgaagagcaacaagctgaagagcgccagaaagttcaccttcctgagcgacgaggacgacctgagcgcccacaaccccctgtacaaggagaacatcagccaggtgagcaccaacagcgacatcagccagagaaccgacttcgtggaccccttcagccccaagatccaggccaagagcaagagcctgagaggccccagagagaagatccagagactgtggagccagagcgtgagcctgcccagaagactgatgagaaaggtgcccaacagacccgagatcatcgacctgcagcagtggcagggcaccagacagaaggccgagaacgagaacaccggcatctgcaccaacaagagaggcagcagcaaccccctgctgaccaccgaggaggccaacctgaccgagaaggaggagatcagacagggcgagaccctgatgatcgagggcaccgagcagctgaagagcctgagcagcgacagcagcttctgcttccccagaccccacttcagcttcagcaccctgcccaccgtgagcagaaccgtggagctgaagagcgagcccaacgtgatcagcagccccgccgagtgcagcctggagctgagccccagcagaccctgcgtgctgcacagcagcctgagcagaagagagacccccatctgcatgctgcccatcgagaccgagagaaacatcttcgagaacttcgcccacccccccaacatcagccccagcgcctgccccctgcccccccccccccccatcagcccccccagccccccccccgcccccgcccccctggcccccccccccgacatcagccccttcagcctgttctgccccccccccagcccccccagcatccccctgcccctgcccccccccaccttcttccccctgagcgtgagcaccagcggcccccccaccccccccctgctgccccccttccccacccccctgcccccccccccccccagcatcccctgcccccccccccccagcgccagcttcctgagcaccgagtgcgtgtgcatcaccggcgtgaagtgcaccaccaacctgatgcccgccgagaagatcaagagcagcatgacccagctgagcaccaccaccgtgtgcaagaccgacccccagagagagcccaagggcatcctgagacacgtgaagaacctggccgagctggagaagagcgtggccaacatgtacagccagatcgagaagaactacctgagaaccaacgtgagcgagctgcagaccatgtgccccagcgaggtgaccaacatggagatcaccagcgagcagaacaagggcagcctgaacaacatcgtggagggcaccgagaagcagagccacagccagagcaccagcctgtag

SEQ ID NO: 95782 - DNA, 5661 bp, synthetic construct
  misc_feature 1..5661: note = Description of Artificial Sequence: Synthetic coding sequence
  source 1..5661: mol_type = other DNA
atgttcagacagttctacctgtggacctgcctggccagcggcatcatcctgggcagcctgttcgagatctgcctgggccagtacgacgacgactgcaagctggccagaggcggcccccccgccaccatcgtggccatcgacgaggagagcagaaacggcaccatcctggtggacaacatgctgatcaagggcaccgccggcggccccgaccccaccatcgagctgagcctgaaggacaacgtggactactgggtgctgatggaccccgtgaagcagatgctgttcctgaacagcaccggcagagtgctggacagagacccccccatgaacatccacagcatcgtggtgcaggtgcagtgcatcaacaagaaggtgggcaccatcatctaccacgaggtgagaatcgtggtgagagacagaaacgacaacagccccaccttcaagcacgagagctactacgccaccgtgaacgagctgacccccgtgggcaccaccatcttcaccggcttcagcggcgacaacggcgccaccgacatcgacgacggccccaacggccagatcgagtacgtgatccagtacaaccccgacgaccccaccagcaacgacaccttcgagatccccctgatgctgaccggcaacatcgtgctgagaaagagactgaactacgaggacaagaccagatacttcgtgatcatccaggccaacgacagagcccagaacctgaacgagagaagaaccaccaccaccaccctgaccgtggacgtgctggacggcgacgacctgggccccatgttcctgccctgcgtgctggtgcccaacaccagagactgcagacccctgacctaccaggccgccatccccgagctgagaacccccgaggagctgaaccccatcatcgtgaccccccccatccaggccatcgaccaggacagaaacatccagccccccagcgacagacccggcatcctgtacagcatcctggtgggcacccccgaggactaccccagattcttccacatgcaccccagaaccgccgagctgagcctgctggagcccgtgaacagagacttccaccagaagttcgacctggtgatcaaggccgagcaggacaacggccaccccctgcccgccttcgccggcctgcacatcgagatcctggacgagaacaaccagagcccctacttcaccatgcccagctaccagggctacatcctggagagcgcccccgtgggcgccaccatcagcgacagcctgaacctgaccagccccctgagaatcgtggccctggacaaggacatcgaggacaccaaggaccccgagctgcacctgttcctgaacgactacaccagcgtgttcaccgtgacccagaccggcatcaccagatacctgaccctgctgcagcccgtggacagagaggagcagcagacctacaccttcagcatcaccgccttcgacggcgtgcaggagagcgagcccgtgatcgtgaacatccaggtgatggacgccaacgacaacacccccaccttccccgagatcagctacgacgtgtacgtgtacaccgacatgagacccggcgacagcgtgatccagctgaccgccgtggacgccgacgagggcagcaacggcgagatcacctacgagatcctggtgggcgcccagggcgacttcatcatcaacaagaccaccggcctgatcaccatcgcccccggcgtggagatgatcgtgggcagaacctacgccctgaccgtgcaggccgccgacaacgccccccccgccgagagaagcaccggcatcctgaccctgggcaaggccctggacagagagagcaccgacagatacatcctgatcatcaccgccagcgacggcagacccgacggcaccagcaccgccaccgtgaacatcgtggtgaccgacgtgaacgacaacgcccccgtgttcgacccctacctgcccagaaacctgagcgtggtggaggaggaggccaacgccttcgtgggccaggtgaaggccaccgaccccgacgccggcatcaacggccaggtgcactacagcctgggcaacttcaacaacctgttcagaatcaccagcaacggcagcatctacaccgccgtgaagctgaacagagaggtgagagactactacgagctggtggtggtggccaccgacggcgccgtgcaccccagacacagcaccctgaccctggccatcaaggtgctggacatcgacgacaacagccccgtgttcaccaacagcacctacaccgtgctggtggaggagaacctgcccgccggcaccaccatcctgcagatcgaggccaaggacgtggacctgggcgccaacgtgagctacagaatcagaagccccgaggtgaagcacttcttcgccctgcaccccttcaccggcgagctgagcctgctgagaagcctggactacgaggccttccccgaccaggaggccagcatcaccttcctggtggaggccttcgacatctacggcaccatgccccccggcatcgccaccgtgaccgtgatcgtgaaggacatgaacgactacccccccgtgttcagcaagagaatctacaagggcatggtggcccccgacgccgtgaagggcacccccatcaccaccgtgtacgccgaggacgccgacccccccggcctgcccgccagcagagtgagatacagagtggacgacgtgcagttcccctaccccgccagcatcttcgaggtggaggaggacagcggcagagtgatcaccagagtgaacctgaacgaggagcccaccaccatcttcaagctggtggtggtggccttcgacgacggcgagcccgtgatgagcagcagcgccaccgtgaagatcctggtgctgcaccccggcgagatccccagattcacccaggaggagtacagacccccccccgtgagcgagctggccaccaagggcaccatggtgggcgtgatcagcgccgccgccatcaaccagagcatcgtgtacagcatcgtgagcggcaacgaggaggacaccttcggcatcaacaacatcaccggcgtgatctacgtgaacggccccctggactacgagaccagaaccagctacgtgctgagagtgcaggccgacagcctggaggtggtgctggccaacctgagagtgcccagcaagagcaacaccgccaaggtgtacatcgagatccaggacgagaacaaccacccccccgtgttccagaagaagttctacatcggcggcgtgagcgaggacgccagaatgttcaccagcgtgctgagagtgaaggccaccgacaaggacaccggcaactacagcgtgatggcctacagactgatcatcccccccatcaaggagggcaaggagggcttcgtggtggagacctacaccggcctgatcaagaccgccatgctgttccacaacatgagaagaagctacttcaagttccaggtgatcgccaccgacgactacggcaagggcctgagcggcaaggccgacgtgctggtgagcgtggtgaaccagctggacatgcaggtgatcgtgagcaacgtgccccccaccctggtggagaagaagatcgaggacctgaccgagatcctggacagatacgtgcaggagcagatccccggcgccaaggtggtggtggagagcatcggcgccagaagacacggcgacgccttcagcctggaggactacaccaagtgcgacctgaccgtgtacgccatcgacccccagaccaacagagccatcgacagaaacgagctgttcaagttcctggacggcaagctgctggacatcaacaaggacttccagccctactacggcgagggcggcagaatcctggagatcagaacccccgaggccgtgaccagcatcaagaagagaggcgagagcctgggctacaccgagggcgccctgctggccctggccttcatcatcatcctgtgctgcatccccgccatcctggtggtgctggtgagctacagacacttcaagagaagacaggccgagtgcaccaagaccgccagaatccaggccgccctgcccgccgccaagcccgccgtgcccgcccccgcccccgtggccgcccccccccccccccccccccccccccccggcgcccacctgtacgaggagctgggcgacagcagcatgaagggcctgttcctgctgtaccacttccagcagagcagaggcaacaacagcgtgagcgaggacagaaagcaccagcaggtggtgatgcccttcagcagcaacaccatcgaggcccacaagagcgcccacgtggacggcagcctgaagagcaacaagctgaagagcgccagaaagttcaccttcctgagcgacgaggacgacctgagcgcccacaaccccctgtacaaggagaacatcagccaggtgagcaccaacagcgacatcagccagagaaccgacttcgtggaccccttcagccccaagatccaggccaagagcaagagcctgagaggccccagagagaagatccagagactgtggagccagagcgtgagcctgcccagaagactgatgagaaaggtgcccaacagacccgagatcatcgacctgcagcagtggcagggcaccagacagaaggccgagaacgagaacaccggcatctgcaccaacaagagaggcagcagcaaccccctgctgaccaccgaggaggccaacctgaccgagaaggaggagatcagacagggcgagaccctgatgatcgagggcaccgagcagctgaagagcctgagcagcgacagcagcttctgcttccccagaccccacttcagcttcagcaccctgcccaccgtgagcagaaccgtggagctgaagagcgagcccaacgtgatcagcagccccgccgagtgcagcctggagctgagccccagcagaccctgcgtgctgcacagcagcctgagcagaagagagacccccatctgcatgctgcccatcgagaccgagagaaacatcttcgagaacttcgcccacccccccaacatcagccccagcgcctgccccctgcccccccccccccccatcagcccccccagccccccccccgcccccgcccccctggcccccccccccgacatcagccccttcagcctgttctgccccccccccagcccccccagcatccccctgcccctgcccccccccaccttcttccccctgagcgtgagcaccagcggcccccccaccccccccctgctgccccccttccccacccccctgcccccccccccccccagcatcccctgcccccccccccccagcgccagcttcctgagcaccgagtgcgtgtgcatcaccggcgtgaagtgcaccaccaacctgatgcccgccgagaagatcaagagcagcatgacccagctgagcaccaccaccgtgtgcaagaccgacccccagagagagcccaagggcatcctgagacacgtgaagaacctggccgagctggagaagagcgtggccaacatgtacagccagatcgagaagaactacctgagaaccaacgtgagcgagctgcagaccatgtgccccagcgaggtgaccaacatggagatcaccagcgagcagaacaagggcagcctgaacaacatcgtggagggcaccgagaagcagagccacagccagagcaccagcctgtag

SEQ ID NO: 95783 - DNA, 1965 bp, synthetic construct
  misc_feature 1..1965: note = Description of Artificial Sequence: Synthetic coding sequence
  source 1..1965: mol_type = other DNA
atgttcagacagttctacctgtggacctgcctggccagcggcatcatcctgggcagcctgttcgagatctgcctgggccagtacgacgacgactgcaagctggccagaggcggcccccccgccaccatcgtggccatcgacgaggagagcagaaacggcaccatcctggtggacaacatgctgatcaagggcaccgccggcggccccgaccccaccatcgagctgagcctgaaggacaacgtggactactgggtgctgatggaccccgtgaagcagatgctgttcctgaacagcaccggcagagtgctggacagagacccccccatgaacatccacagcatcgtggtgcaggtgcagtgcatcaacaagaaggtgggcaccatcatctaccacgaggtgagaatcgtggtgagagacagaaacgacaacagccccaccttcaagcacgagagctactacgccaccgtgaacgagctgacccccgtgggcaccaccatcttcaccggcttcagcggcgacaacggcgccaccgacatcgacgacggccccaacggccagatcgagtacgtgatccagtacaaccccgacgaccccaccagcaacgacaccttcgagatccccctgatgctgaccggcaacatcgtgctgagaaagagactgaactacgaggacaagaccagatacttcgtgatcatccaggccaacgacagagcccagaacctgaacgagagaagaaccaccaccaccaccctgaccgtggacgtgctggacggcgacgacctgggccccatgttcctgccctgcgtgctggtgcccaacaccagagactgcagacccctgacctaccaggccgccatccccgagctgagaacccccgaggagctgaaccccatcatcgtgaccccccccatccaggccatcgaccaggacagaaacatccagccccccagcgacagacccggcatcctgtacagcatcctggtgggcacccccgaggactaccccagattcttccacatgcaccccagaaccgccgagctgagcctgctggagcccgtgaacagagacttccaccagaagttcgacctggtgatcaaggccgagcaggacaacggccaccccctgcccgccttcgccggcctgcacatcgagatcctggacgagaacaaccagagcccctacttcaccatgcccagctaccagggctacatcctggagagcgcccccgtgggcgccaccatcagcgacagcctgaacctgaccagccccctgagaatcgtggccctggacaaggacatcgaggacaccaaggaccccgagctgcacctgttcctgaacgactacaccagcgtgttcaccgtgacccagaccggcatcaccagatacctgaccctgctgcagcccgtggacagagaggagcagcagacctacaccttcagcatcaccgccttcgacggcgtgcaggagagcgagcccgtgatcgtgaacatccaggtgatggacgccaacgacaacacccccaccttccccgagatcagctacgacgtgtacgtgtacaccgacatgagacccggcgacagcgtgatccagctgaccgccgtggacgccgacgagggcagcaacggcgagatcacctacgagatcctggtgggcgcccagggcgacttcatcatcaacaagaccaccggcctgatcaccatcgcccccggcgtggagatgatcgtgggcagaacctacgccctgaccgtgcaggccgccgacaacgccccccccgccgagagaagaaacagcatctgcaccgtgtacatcgaggtgctgccccccaacaaccagagcccccccagattcccccagctgatgtacagcctggagatcagcgaggccatgagagtgggcgccgtgctgctgaacctgcagcacggcgacagcaacctgagagagagcaccggccagggcaagcactag

SEQ ID NO: 95784 - DNA, 5034 bp, synthetic construct
  misc_feature 1..5034: note = Description of Artificial Sequence: Synthetic coding sequence
  source 1..5034: mol_type = other DNA
atgttcagacagttctacctgtggacctgcctggccagcggcatcatcctgggcagcctgttcgagatctgcctgggccagtacgacgacgactgcaagctggccagaggcggcccccccgccaccatcgtggccatcgacgaggagagcagaaacggcaccatcctggtggacaacatgctgatcaagggcaccgccggcggccccgaccccaccatcgagctgagcctgaaggacaacgtggactactgggtgctgatggaccccgtgaagcagatgctgttcctgaacagcaccggcagagtgctggacagagacccccccatgaacatccacagcatcgtggtgcaggtgcagtgcatcaacaagaaggtgggcaccatcatctaccacgaggtgagaatcgtggtgagagacagaaacgacaacagccccaccttcaagcacgagagctactacgccaccgtgaacgagctgacccccgtgggcaccaccatcttcaccggcttcagcggcgacaacggcgccaccgacatcgacgacggccccaacggccagatcgagtacgtgatccagtacaaccccgacgaccccaccagcaacgacaccttcgagatccccctgatgctgaccggcaacatcgtgctgagaaagagactgaactacgaggacaagaccagatacttcgtgatcatccaggccaacgacagagcccagaacctgaacgagagaagaaccaccaccaccaccctgaccgtggacgtgctggacggcgacgacctgggccccatgttcctgccctgcgtgctggtgcccaacaccagagactgcagacccctgacctaccaggccgccatccccgagctgagaacccccgaggagctgaaccccatcatcgtgaccccccccatccaggccatcgaccaggacagaaacatccagccccccagcgacagacccggcatcctgtacagcatcctggtgggcacccccgaggactaccccagattcttccacatgcaccccagaaccgccgagctgagcctgctggagcccgtgaacagagacttccaccagaagttcgacctggtgatcaaggccgagcaggacaacggccaccccctgcccgccttcgccggcctgcacatcgagatcctggacgagaacaaccagagcccctacttcaccatgcccagctaccagggctacatcctggagagcgcccccgtgggcgccaccatcagcgacagcctgaacctgaccagccccctgagaatcgtggccctggacaaggacatcgaggacaccaaggaccccgagctgcacctgttcctgaacgactacaccagcgtgttcaccgtgacccagaccggcatcaccagatacctgaccctgctgcagcccgtggacagagaggagcagcagacctacaccttcagcatcaccgccttcgacggcgtgcaggagagcgagcccgtgatcgtgaacatccaggtgatggacgccaacgacaacacccccaccttccccgagatcagctacgacgtgtacgtgtacaccgacatgagacccggcgacagcgtgatccagctgaccgccgtggacgccgacgagggcagcaacggcgagatcacctacgagatcctggtgggcgcccagggcgacttcatcatcaacaagaccaccggcctgatcaccatcgcccccggcgtggagatgatcgtgggcagaacctacgccctgaccgtgcaggccgccgacaacgccccccccgccgagagaagaaacagcatctgcaccgtgtacatcgaggtgctgccccccaacaaccagagcccccccagattcccccagctgatgtacagcctggagatcagcgaggccatgagagtgggcgccgtgctgctgaacctgcaggccaccgacagagagggcgacagcatcacctacgccatcgagaacggcgacccccagagagtgttcaacctgagcgagaccaccggcatcctgaccctgggcaaggccctggacagagagagcaccgacagatacatcctgatcatcaccgccagcgacggcagacccgacggcaccagcaccgccaccgtgaacatcgtggtgaccgacgtgaacgacaacgcccccgtgttcgacccctacctgcccagaaacctgagcgtggtggaggaggaggccaacgccttcgtgggccaggtgaaggccaccgaccccgacgccggcatcaacggccaggtgcactacagcctgggcaacttcaacaacctgttcagaatcaccagcaacggcagcatctacaccgccgtgaagctgaacagagaggtgagagactactacgagctggtggtggtggccaccgacggcgccgtgcaccccagacacagcaccctgaccctggccatcaaggtgctggacatcgacgacaacagccccgtgttcaccaacagcacctacaccgtgctggtggaggagaacctgcccgccggcaccaccatcctgcagatcgaggccaaggacgtggacctgggcgccaacgtgagctacagaatcagaagccccgaggtgaagcacttcttcgccctgcaccccttcaccggcgagctgagcctgctgagaagcctggactacgaggccttccccgaccaggaggccagcatcaccttcctggtggaggccttcgacatctacggcaccatgccccccggcatcgccaccgtgaccgtgatcgtgaaggacatgaacgactacccccccgtgttcagcaagagaatctacaagggcatggtggcccccgacgccgtgaagggcacccccatcaccaccgtgtacgccgaggacgccgacccccccggcctgcccgccagcagagtgagatacagagtggacgacgtgcagttcccctaccccgccagcatcttcgaggtggaggaggacagcggcagagtgatcaccagagtgaacctgaacgaggagcccaccaccatcttcaagctggtggtggtggccttcgacgacggcgagcccgtgatgagcagcagcgccaccgtgaagatcctggtgctgcaccccggcgagatccccagattcacccaggaggagtacagacccccccccgtgagcgagctggccaccaagggcaccatggtgggcgtgatcagcgccgccgccatcaaccagagcatcgtgtacagcatcgtgagcggcaacgaggaggacaccttcggcatcaacaacatcaccggcgtgatctacgtgaacggccccctggactacgagaccagaaccagctacgtgctgagagtgcaggccgacagcctggaggtggtgctggccaacctgagagtgcccagcaagagcaacaccgccaaggtgtacatcgagatccaggacgagaacaaccacccccccgtgttccagaagaagttctacatcggcggcgtgagcgaggacgccagaatgttcaccagcgtgctgagagtgaaggccaccgacaaggacaccggcaactacagcgtgatggcctacagactgatcatcccccccatcaaggagggcaaggagggcttcgtggtggagacctacaccggcctgatcaagaccgccatgctgttccacaacatgagaagaagctacttcaagttccaggtgatcgccaccgacgactacggcaagggcctgagcggcaaggccgacgtgctggtgagcgtggtgaaccagctggacatgcaggtgatcgtgagcaacgtgccccccaccctggtggagaagaagatcgaggacctgaccgagatcctggacagatacgtgcaggagcagatccccggcgccaaggtggtggtggagagcatcggcgccagaagacacggcgacgccttcagcctggaggactacaccaagtgcgacctgaccgtgtacgccatcgacccccagaccaacagagccatcgacagaaacgagctgttcaagttcctggacggcaagctgctggacatcaacaaggacttccagccctactacggcgagggcggcagaatcctggagatcagaacccccgaggccgtgaccagcatcaagaagagaggcgagagcctgggctacaccgagggcgccctgctggccctggccttcatcatcatcctgtgctgcatccccgccatcctggtggtgctggtgagctacagacacttcaagagaagacaggccgagtgcaccaagaccgccagaatccaggccgccctgcccgccgccaagcccgccgtgcccgcccccgcccccgtggccgcccccccccccccccccccccccccccccggcgcccacctgtacgaggagctgggcgacagcagcatctacagatacgagatgccccagtacggcagcagaagaagactgctgccccccgccggccaggaggagtacggcgaggtggtgggcgaggccgaggaggagtacgaggaggaggagtgggccagaaagagaatgatcaagctggtggtggacagagagtacgagaccagcagcaccggcgaggacagcgcccccgagtgccagagaaacagactgcaccaccccagcatccacagcaacatcaacggcaacatctacatcgcccagaacggcagcgtggtgagaaccagaagagcctgcctgaccgacaacctgaaggtggccagccccgtgagactgggcggccccttcaagaagctggacaagctggccgtgacccacgaggagaacgtgcccctgaacaccctgagcaagggccccttcagcaccgagaagatgaacgccagacccaccctggtgaccttcgccccctgccccgtgggcaccgacaacaccgccgtgaagcccctgagaaacagactgaagagcaccgtggagcaggagagcatgatcgacagcaagaacatcaaggaggccctggagttccacagcgaccacacccagagcgacgacgaggagctgtggatgggcccctggaacaacctgcacatccccatgaccaagctgtag

SEQ ID NO: 95785 - DNA, 279 bp, synthetic construct
  misc_feature 1..279: note = Description of Artificial Sequence: Synthetic coding sequence
  source 1..279: mol_type = other DNA
atgttcagacagttctacctgtggacctgcctggccagcggcatcatcctgggcagcctgttcgagatctgcctgggccagtacgacgacgactgcaagctggccagaggcggcccccccgccaccatcgtggccatcgacgaggagagcagaaacggcaccatcctggtggacaacatgctgatcaagggcaccgccggcggccccgaccccaccatcgagctgagcctgaaggacaacgtggactactgggtgctgatggaccccgtgaagcagtag

SEQ ID NO: 95786 - DNA, 3453 bp, synthetic construct
  misc_feature 1..3453: note = Description of Artificial Sequence: Synthetic coding sequence
  source 1..3453: mol_type = other DNA
atggccccccccctgagacccctggccagactgagaccccccggcatgctgctgagagccctgctgctgctgctgctgctgagccccctgcccggcgtgtggtgcttcagcgagctgagcttcgtgaaggagccccaggacgtgaccgtgaccagaaaggaccccgtggtgctggactgccaggcccacggcgaggtgcccatcaaggtgacctggctgaagaacggcgccaagatgagcgagaacaagagaatcgaggtgctgagcaacggcagcctgtacatcagcgaggtggagggcagaagaggcgagcagagcgacgagggcttctaccagtgcctggccatgaacaagtacggcgccatcctgagccagaaggcccacctggccctgagcaccatcagcgccttcgaggtgcagcccatcagcaccgaggtgcacgagggcggcgtggccagattcgcctgcaagatcagcagccacccccccgccgtgatcacctgggagttcaacagaaccaccctgcccatgaccatggacagaatcaccgccctgcccaccggcgtgctgcagatctacgacgtgagccagagagacagcggcaactacagatgcatcgccgccaccgtggcccacagaagaaagagcatggaggccagcctgaccgtgatccccgccaaggagagcaagagcttccacacccccaccatcatcgccggcccccagaacatcaccaccagcctgcaccagaccgtggtgctggagtgcatggccaccggcaaccccaagcccatcatcagctggagcagactggaccacaagagcatcgacgtgttcaacaccagagtgctgggcaacggcaacctgatgatcagcgacgtgagactgcagcacgccggcgtgtacgtgtgcagagccaccacccccggcaccagaaacttcaccgtggccatggccaccctgaccgtgctggccccccccagcttcgtggagtggcccgagagcctgaccagacccagagccggcaccgccagattcgtgtgccaggccgagggcatccccagccccaagatgagctggctgaagaacggcagaaagatccacagcaacggcagaatcaagatgtacaacagcaagctggtgatcaaccagatcatccccgaggacgacgccatctaccagtgcatggccgagaacagccagggcagcatcctgagcagagccagactgaccgtggtgatgagcgaggacagacccagcgccccctacaacgtgcacgccgagaccatgagcagcagcgccatcctgctggcctgggagagacccctgtacaacagcgacaaggtgatcgcctacagcgtgcactacatgaaggccgagggcctgaacaacgaggagtaccaggtggtgatcggcaacgacaccacccactacatcatcgacgacctggagcccgccagcaactacaccttctacatcgtggcctacatgcccatgggcgccagccagatgagcgaccacgtgacccagaacaccctggaggacgtgcccctgagaccccccgagatcagcctgaccagcagaagccccaccgacatcctgatcagctggctgcccatccccgccaagtacagaagaggccaggtggtgctgtacagactgagcttcagactgagcaccgagaacagcatccaggtgctggagctgcccggcaccacccacgagtacctgctggagggcctgaagcccgacagcgtgtacctggtgagaatcaccgccgccaccagagtgggcctgggcgagagcagcgtgtggaccagccacagaacccccaaggccaccagcgtgaaggcccccaagagccccgagctgcacctggagcccctgaactgcaccaccatcagcgtgagatggcagcaggacgtggaggacaccgccgccatccagggctacaagctgtactacaaggaggagggccagcaggagaacggccccatcttcctggacaccaaggacctgctgtacaccctgagcggcctggaccccagaagaaagtaccacgtgagactgctggcctacaacaacatcgacgacggctaccaggccgaccagaccgtgagcacccccggctgcgtgagcgtgagagacagaatggtgcccccccccccccccccccaccacctgtacgccaaggccaacaccagcagcagcatcttcctgcactggagaagacccgccttcaccgccgcccagatcatcaactacaccatcagatgcaaccccgtgggcctgcagaacgccagcctggtgctgtacctgcagaccagcgagacccacatgctggtgcagggcctggagcccaacaccaagtacgagttcgccgtgagactgcacgtggaccagctgagcagcccctggagccccgtggtgtaccacagcaccctgcccgaggcccccgccggcccccccgtgggcgtgaaggtgaccctgatcgaggacgacaccgccctggtgagctggaagccccccgacggccccgagaccgtggtgaccagatacaccatcctgtacgccagcagaaaggcctggatcgccggcgagtggcaggtgctgcacagagagggcgccatcaccatggccctgctggagaacctggtggccggcaacgtgtacatcgtgaagatcagcgccagcaacgaggtgggcgagggccccttcagcaacagcgtggagctggccgtgctgcccaaggagaccagcgagagcaaccagagacccaagagactggacagcgccgacgccaaggtgtacagcggctactaccacctggaccagaagagcatgaccggcatcgccgtgggcgtgggcatcgccctgacctgcatcctgatctgcgtgctgatcctgatctacagaagcaaggccagaaagagcagcgccagcaagaccgcccagaacggcacccagcagctgcccagaaccagcgccagcctggccagcggcaacgaggtgggcaagaacctggagggcgccgtgggcaacgaggagagcctgatgcccatgatcatgcccaacagcttcatcgacgccaagggcggcaccgacctgatcatcaacagctacggccccatcatcaagaacaacagcaagaagaagtggttcttcttccaggacagcaagaagatccaggtggagcagccccagagaagattcacccccgccgtgtgcttctaccagcccggcaccaccgtgctgatcagcgacgaggacagccccagcagccccggccagaccaccagcttcagcagacccttcggcgtggccgccgacaccgagcacagcgccaacagcgagggcagccacgagaccggcgacagcggcagattcagccacgagagcaacgacgagatccacctgagcagcgtgatcagcaccaccccccccaacctgtag

SEQ ID NO: 95787 - DNA, 1434 bp, synthetic construct
  misc_feature 1..1434: note = Description of Artificial Sequence: Synthetic coding sequence
  source 1..1434: mol_type = other DNA
atgggcagaaccgtggtggtgctgggcggcggcatcagcggcctggccgccagctaccacctgagcagagccccctgcccccccaaggtggtgctggtggagagcagcgagagactgggcggctggatcagaagcgtgagaggccccaacggcgccatcttcgagctgggccccagaggcatcagacccgccggcgccctgggcgccagaaccctgctgctggtgagcgagctgggcctggacagcgaggtgctgcccgtgagaggcgaccaccccgccgcccagaacagattcctgtacgtgggcggcgccctgcacgccctgcccaccggcctgagaggcctgctgagacccagcccccccttcagcaagcccctgttctgggccggcctgagagagctgaccaagcccagaggcaaggagcccgacgagaccgtgcacagcttcgcccagagaagactgggccccgaggtggccagcctggccatggacagcctgtgcagaggcgtgttcgccggcaacagcagagagctgagcatcagaagctgcttccccagcctgttccaggccgagcagacccacagaagcatcctgctgggcctgctgctgggcgccggcagaaccccccagcccgacagcgccctgatcagacaggccctggccgagagatggagccagtggagcctgagaggcggcctggagatgctgccccaggccctggagacccacctgaccagcagaggcgtgagcgtgctgagaggccagcccgtgtgcggcctgagcctgcaggccgagggcagatggaaggtgagcctgagagacagcagcctggaggccgaccacgtgatcagcgccatccccgccagcgtgctgagcgagctgctgcccgccgaggccgcccccctggccagagccctgagcgccatcaccgccgtgagcgtggccgtggtgaacctgcagtaccagggcgcccacctgcccgtgcagggcttcggccacctggtgcccagcagcgaggaccccggcgtgctgggcatcgtgtacgacagcgtggccttccccgagcaggacggcagcccccccggcctgagagtgaccgtgatgctgggcggcagctggctgcagaccctggaggccagcggctgcgtgctgagccaggagctgttccagcagagagcccaggaggccgccgccacccagctgggcctgaaggagatgcccagccactgcctggtgcacctgcacaagaactgcatcccccagtacaccctgggccactggcagaagctggagagcgccagacagttcctgaccgcccacagactgcccctgaccctggccggcgccagctacgagggcgtggccgtgaacgactgcatcgagagcggcagacaggccgccgtgagcgtgctgggcaccgagcccaacagctag

SEQ ID NO: 95788 - DNA, 1434 bp, synthetic construct; identical to SEQ ID NO: 95787
  misc_feature 1..1434: note = Description of Artificial Sequence: Synthetic coding sequence
  source 1..1434: mol_type = other DNA

SEQ ID NO: 95789 - DNA, 717 bp, synthetic construct
  misc_feature 1..717: note = Description of Artificial Sequence: Synthetic coding sequence
  source 1..717: mol_type = other DNA
atgggcagaaccgtggtggtgctgggcggcggcatcagcggcctggccgccagctaccacctgagcagagccccctgcccccccaaggtggtgctggtggagagcagcgagagactgggcggctggatcagaagcgtgagaggccccaacggcgccatcttcgagctgggccccagaggcatcagacccgccggcgccctgggcgccagaaccctgctgctgggcttcggccacctggtgcccagcagcgaggaccccggcgtgctgggcatcgtgtacgacagcgtggccttccccgagcaggacggcagcccccccggcctgagagtgaccgtgatgctgggcggcagctggctgcagaccctggaggccagcggctgcgtgctgagccaggagctgttccagcagagagcccaggaggccgccgccacccagctgggcctgaaggagatgcccagccactgcctggtgcacctgcacaagaccaagaaccagctgaagtggagacagagccacgacagaaccgtggagtggcccaaggagtaccccggcagaagcagaaagcaggcccccagcatcctgcacgtgcccggctgccagctgctgagatgcagagacagagaccacctgggcgccgtgagcgagcagcccagaagcagcgccgagagcagagtgggcgtggccagcagcaccttcagcaccttccccctgttctag

SEQ ID NO: 95790 - DNA, 1335 bp, synthetic construct
  misc_feature 1..1335: note = Description of Artificial Sequence: Synthetic coding sequence
  source 1..1335: mol_type = other DNA
atgggcagaaccgtggtggtgctgggcggcggcatcagcggcctggccgccagctaccacctgagcagagccccctgcccccccaaggtggtgctggtggagagcagcgagagactgggcggctggatcagaagcgtgagaggccccaacggcgccatcttcgagctgggccccagaggcatcagacccgccggcgccctgggcgccagaaccctgctgctggcctgcggcgagcaggtgagcgagctgggcctggacagcgaggtgctgcccgtgagaggcgaccaccccgccgcccagaacagattcctgtacgtgggcggcgccctgcacgccctgcccaccggcctgagccccagcctgaccctgaaggtggccagcctggccatggacagcctgtgcagaggcgtgttcgccggcaacagcagagagctgagcatcagaagctgcttccccagcctgttccaggccgagcagacccacagaagcatcctgctgggcctgctgctgggcgccggcagaaccccccagcccgacagcgccctgatcagacaggccctggccgagagatggagccagtggagcctgagaggcggcctggagatgctgccccaggccctggagacccacctgaccagcagaggcgtgagcgtgctgagaggccagcccgtgtgcggcctgagcctgcaggccgagggcagatggaaggtgagcctgagagacagcagcctggaggccgaccacgtgatcagcgccatccccgccagcgtgctgagcgagctgctgcccgccgaggccgcccccctggccagagccctgagcgccatcaccgccgtgagcgtggccgtggtgaacctgcagtaccagggcgcccacctgcccgtgcagggcttcggccacctggtgcccagcagcgaggaccccggcgtgctgggcatcgtgtacgacagcgtggccttccccgagcaggacggcagcccccccggcctgagagtgaccgtgatgctgggcggcagctggctgcagaccctggaggccagcggctgcgtgctgagccaggagctgttccagcagagagcccaggaggccgccgccacccagctgggcctgaaggagatgcccagccactgcctggtgcacctgcacaagaactgcatcccccagtacaccctgggccactggcagaagctggagagcgccagacagttcctgaccgcccacagactgcccctgaccctggccggcgccagctacgagggcgtggccgtgaacgactgcatcgagagcggcagacaggccgccgtgagcgtgctgggcaccgagcccaacagctag

SEQ ID NO: 95791 - DNA, 144 bp, synthetic construct
  misc_feature 1..144: note = Description of Artificial Sequence: Synthetic coding sequence
  source 1..144: mol_type = other DNA
atggacatcctgaagagcgagatcctgagaaagagacagctggtggaggacagaaacctgctgagcgagagcatgtgcgccaacgacgcctacctgcagatggccatcggcaacgccccctggcccatcggcgtgaccatgtag

SEQ ID NO: 95792 - DNA, 504 bp, synthetic construct
  misc_feature 1..504: note = Description of Artificial Sequence: Synthetic coding sequence
  source 1..504: mol_type = other DNA
atgatcagaaccttccccggcgagaacaagaagtacttcaagagaagcgagctggccaagaaggaggaggaggcctacttcgagagatgcggctacaagatccagcccaaggaggaggaccagaagcccctgaccagcagcaaccccgtgctggagctggagctggccgaggagaagctgcccatgaccctgagcagacaggaggtgatcagaagactgagagagagaggcgagcccatcagactgttcggcgagaccgactacgacgccttccagagactgagaaagatcgagatcctgacccccgaggtgaacaagggcctgagaaacgacctgaaggccgccctggacaagatcgaccagcagtacctgaacgagatcgtgggcggccaggagcccggcgaggaggacacccagaacgacctgaaggtgcacgaggagaacaccaccatcgaggagctggaggccctgggcgagagcctgggcaagggcgacgaccactag

SEQ ID NO: 95793 - DNA, 750 bp, synthetic construct
  misc_feature 1..750: note = Description of Artificial Sequence: Synthetic coding sequence
  source 1..750: mol_type = other DNA
atgatcagaaccttccccggcgagaacaagaagtacttcaagagaagcgagctggccaagaaggaggaggaggcctacttcgagagatgcggctacaagcccatcaacgagaagcccagcggcgagatccagcccaaggaggaggaccagaagcccctgaccagcagcaaccccgtgctggagctggagctggccgaggagaagctgcccatgaccctgagcagacaggaggtgatcagaagactgagagagagaggcgagcccatcagactgttcggcgagaccgactacgacgccttccagagactgagaaagatcgagatcctgacccccgaggtgaacaagggcctgagaaacgacctgaaggccgccctggacaagatcgaccagcagtacctgaacgagatcgtgggcggccaggagcccggcgaggaggacacccagaacgacctgaaggtgcacgaggagaacaccaccatcgaggagctggaggccctgggcgagagcctgggcaagggcgacgaccacaaggacatggacatcatcaccaagttcctgaagttcctgctgggcgtgtgggccaaggagctgaacgccagagaggactacgtgaagagaagcgtgcagggcaagctgaacagcgccacccagaagcagaccgagagctacctgagacccctgttcagaaagctgagaaagagaaacctgcccgccgacatcaaggagagcatcaccgacatcatcaagtag

SEQ ID NO: 95794 - DNA, 1029 bp, synthetic construct
  misc_feature 1..1029: note = Description of Artificial Sequence: Synthetic coding sequence
  source 1..1029: mol_type = other DNA
atggacatcctgaagagcgagatcctgagaaagagacagctggtggaggacagaaacctgctggtggagaacaagaagtacttcaagagaagcgagctggccaagaaggaggaggaggcctacttcgagagatgcggctacaagatccagcccaaggaggaggaccagaagcccctgaccagcagcaaccccgtgctggagctggagctggccgaggagaagctgcccatgaccctgagcagacaggaggtgatcagaagactgagagagagaggcgagcccatcagactgttcggcgagaccgactacgacgccttccagagactgagaaagatcgagatcctgacccccgaggtgaacaagggcctgagaaacgacctgaaggccgccctggacaagatcgaccagcagtacctgaacgagatcgtgggcggccaggagcccggcgaggaggacacccagaacgacctgaaggtgcacgaggagaacaccaccatcgaggagctggaggccctgggcgagagcctgggcaagggcgacgaccacaaggacatggacatcatcaccaagttcctgaagttcctgctgggcgtgtgggccaaggagctgaacgccagagaggactacgtgaagagaagcgtgcagggcaagctgaacagcgccacccagaagcagaccgagagctacctgagacccctgttcagaaagctgagaaagagaaacctgcccgccgacatcaaggagagcatcaccgacatcatcaagttcatgctgcagagagagtacgtgaaggccaacgacgcctacctgcagatggccatcggcaacgccccctggcccatcggcgtgaccatggtgggcatccacgccagaaccggcagagagaagatcttcagcaagcacgtggcccacgtgctgaacgacgagacccagagaaagtacatccagggcctgaagagactgatgaccatctgccagaagcacttccccaccgaccccagcaagtgcgtggagtacaacgccctgtag

SEQ ID NO: 95795 - DNA, 750 bp, synthetic construct; identical to SEQ ID NO: 95793
  misc_feature 1..750: note = Description of Artificial Sequence: Synthetic coding sequence
  source 1..750: mol_type = other DNA

SEQ ID NO: 95796 - DNA, 1083 bp, synthetic construct
  misc_feature 1..1083: note = Description of Artificial Sequence: Synthetic coding sequence
  source 1..1083: mol_type = other DNA
atggacacccccctgagaagaagcagaagactgggcggcctgagacccgagagccccgagagcctgaccagcgtgagcagaaccagaagagccctggtggagttcgagagcaaccccgaggagaccagagagcccggcagcccccccagcgtgcagagagccggcctgggcagccccgagagaccccccaagaccagccccggcagccccagactgcagcagggcgccggcctggagagcccccagggccagcccgagcccggcgccgccagcccccagagacagcaggacctgcacctggagagcccccagagacagcccgagtacagccccgagagccccagatgccagcccaagcccagcgaggaggcccccaagtgcagccaggaccagggcgtgctggccagcgagctggcccagaacaaggaggagctgacccccggcgccccccagcaccagctgccccccgtgcccggcagccccgagccctaccccggccagcaggcccccggccccgagcccagccagcccctgctggagctgacccccagagcccccggcagccccagaggccagcacgagcccagcaagcccccccccgccggcgagaccgtgaccggcggcttcggcgccaagaagagaaagggcagcagcagccaggcccccgccagcaagaagctgaacaaggaggagctgcccgtgatccccaagggcaagcccaagagcggcagagtgtggaaggacagaagcaagaagagattcagccagatgctgcaggacaagcccctgagaaccagctggcagagaaagatgaaggagagacaggagagaaagctggccaaggacttcgccagacacctggaggaggagaaggagagaagaagacaggagaagaagcagagaagagccgagaacctgaagagaagactggagaacgagagaaaggccgaggtggtgcaggtgatcagaaaccccgccaagctgaagagagccaagaagaagcagctgagaagcatcgagaagagagacaccctggccctgctgcagaagcagcccccccagcagcccgccgccaagatctag

SEQ ID NO: 95797 - DNA, 1095 bp, synthetic construct
  misc_feature 1..1095: note = Description of Artificial Sequence: Synthetic coding sequence
  source 1..1095: mol_type = other DNA
atgagcctggccgacgagctgctggccgacctggaggaggccgccgaggaggaggagggcggcagctacggcgaggaggaggaggagcccgccatcgaggacgtgcaggaggagacccagctggacctgagcggcgacagcgtgaagaccatcgccaagctgtgggacagcaagatgttcgccgagatcatgatgaagatcgaggagtacatcagcaagcaggccaaggccagcgaggtgatgggccccgtggaggccgcccccgagtacagagtgatcgtggacgccaacaacctgaccgtggagatcgagaacgagctgaacatcatccacaagttcatcagagacaagtacagcaagagattccccgagctggagagcctggtgcccaacgccctggactacatcagaaccgtgaaggagctgggcaacagcctggacaagtgcaagaacaacgagaacctgcagcagatcctgaccaacgccaccatcatggtggtgagcgtgaccgccagcaccacccagggccagcagctgagcgaggaggagctggagagactggaggaggcctgcgacatggccctggagctgaacgccagcaagcacagaatctacgagtacgtggagagcagaatgagcttcatcgcccccaacctgagcatcatcatcggcgccagcaccgccgccaagatcatgggcgtggccggcggcctgaccaacctgagcaagatgcccgcctgcaacatcatgctgctgggcgcccagagaaagaccctgagcggcttcagcagcaccagcgtgctgccccacaccggctacatctaccacagcgacatcgtgcagagcctgccccccgacctgagaagaaaggccgccagactggtggccgccaagtgcaccctggccgccagagtggacagcttccacgagagcaccgagggcaaggtgggctacgagctgaaggacgagatcgagagaaagttcgacaagtggcagagaagaagatggctgagacccaccagaagcatcagccccgcctggctgagcagcagcagaagcagagccagaagagtggccctgtgcccccccgagtag

SEQ ID NO: 95798 - DNA, 1500 bp, synthetic construct
  misc_feature 1..1500: note = Description of Artificial Sequence: Synthetic coding sequence
  source 1..1500: mol_type = other DNA
atgagcctggccgacgagctgctggccgacctggaggaggccgccgaggaggaggagggcggcagctacggcgaggaggaggaggagcccgccatcgaggacgtgcaggaggagacccagctggacctgagcggcgacagcgtgaagaccatcgccaagctgtgggacagcaagatgttcgccgagatcatgatgaagatcgaggagtacatcagcaagcaggccaaggccagcgaggtgatgggccccgtggaggccgcccccgagtacagagtgatcgtggacgccaacaacctgaccgtggagatcgagaacgagctgaacatcatccacaagttcatcagagacaagtacagcaagagattccccgagctggagagcctggtgcccaacgccctggactacatcagaaccgtgaaggagctgggcaacagcctggacaagtgcaagaacaacgagaacctgcagcagatcctgaccaacgccaccatcatggtggtgagcgtgaccgccagcaccacccagggccagcagctgagcgaggaggagctggagagactggaggaggcctgcgacatggccctggagctgaacgccagcaagcacagaatctacgagtacgtggagagcagaatgagcttcatcgcccccaacctgagcatcatcatcggcgccagcaccgccgccaagatcatgggcgtggccggcggcctgaccaacctgagcaagatgcccgcctgcaacatcatgctgctgggcgcccagagaaagaccctgagcggcttcagcagcaccagcgtgctgccccacaccggctacatctaccacagcgacatcgtgcagagcctgccccccgacctgagaagaaaggccgccagactggtggccgccaagtgcaccctggccgccagagtggacagcttccacgagagcaccgagggcaaggtgggctacgagctgaaggacgagatcgagagaaagttcgacaagtggcaggagcccccccccgtgaagcaggtgaagcccctgcccgcccccctggacggccagagaaagaagagaggcggcagaagatacagaaagatgaaggagagactgggcctgaccgagatcagaaagcaggccaacagaatgagcttcggcgagatcgaggaggacgcctaccaggaggacctgggcttcagcctgggccacctgggcaagagcggcagcggcagagtgagacagacccaggtgaacgaggccaccaaggccagaatcagcaagaccctgcagagaaccctgcagaagcagagcgtggtgtacggcggcaagagcaccatcagagacagaagcagcggcaccgccagcagcgtggccttcacccccctgcagggcctggagatcgtgaacccccaggccgccgagaagaaggtggccgaggccaaccagaagtacttcagcagcatggccgagttcctgaaggtgaagggcgagaagagcggcctgatgagcacctag

SEQ ID NO: 95799 - DNA, 1353 bp, synthetic construct
  misc_feature 1..1353: note = Description of Artificial Sequence: Synthetic coding sequence
  source 1..1353: mol_type = other DNA
atgagcctggccgacgagctgctggccgacctggaggaggccgccgaggaggaggagggcggcagctacggcgaggaggaggaggagcccgccatcgaggacgtgcaggaggagacccagctggacctgagcggcgacagcgtgaagaccatcgccaagctgtgggacagcaagatgttcgccgagatcatgatgaagatcgaggagtacatcagcaagcaggccaaggccagcgaggtgatgggccccgtggaggccgcccccgagtacagagtgatcgtggacgccaacaacctgaccgtggagatcgagaacgagctgaacatcatccacaagttcatcagagacaagtacagcaagagattccccgagctggagagcctggtgcccaacgccctggactacatcagaaccgtgaaggagctgggcaacagcctggacaagtgcaagaacaacgagaacctgcagcagatcctgaccaacgccaccatcatggtggtgagcgtgaccgccagcaccacccagggccagcagctgagcgaggaggagctggagagactggaggaggcctgcgacatggccctggagctgaacgccagcaagcacagaatctacgagtacgtggagagcagaatgagcttcatcgcccccaacctgagcatcatcatcggcgccagcaccgccgccaagatcatgggcgtggccggcggcctgaccaacctgagcaagatgcccgcctgcaacatcatgctgctgggcgcccagagaaagaccctgagcggcttcagcagcaccagcgtgctgccccacaccggctacatctaccacagcgacatcgtgcagagcctgccccccgacctgagaagaaaggccgccagactggtggccgccaagtgcaccctggccgccagagtggacagcttccacgagagcaccgagggcaaggtgggctacgagctgaaggacgagatcgagagaaagttcgacaagtggcaggagcccccccccgtgaagcaggtgaagcccctgcccgcccccctggacggccagagaaagaagagaggcggcagaagatacagaaagatgaaggagagactgggcctgaccgagatcagaaagcaggccaacagaatgagcttcggcgagatcgaggaggacgcctaccaggaggacctgggcttcagcctgggccacctggacgccgccgccgaccccgccgaggccgagagaagaatctggagagaggtgcaccaccccagacccctgctgggccacggcctgcagagaggcctgcaccccacccccggccccggcgactgcgagcccaccggcggcagagaggagggcggctag

SEQ ID NO: 95800 - DNA, 831 bp, synthetic construct
  misc_feature 1..831: note = Description of Artificial Sequence: Synthetic coding sequence
  source 1..831: mol_type = other DNA
atgagcctggccgacgagctgctggccgacctggaggaggccgccgaggaggaggagggcggcagctacggcgaggaggaggaggagcccgccatcgaggacgtgcaggaggagacccagctggacctgagcggcgacagcgtgaagaccatcgccaagctgtgggacagcaagatgttcgccgagatcatgatgaagatcgaggagtacatcagcaagcaggccaaggccagcgaggtgatgggccccgtggaggccgcccccgagtacagagtgatcgtggacgccaacaacctgaccgtggagatcgagaacgagctgaacatcatccacaagttcatcagagacaagtacagcaagagattccccgagctggagagcctggtgcccaacgccctggactacatcagaaccgtgaaggagctgggcaacagcctggacaagtgcaagaacaacgagaacctgcagcagatcctgaccaacgccaccatcatggtggtgagcgtgaccgccagcaccacccagggccagcagctgagcgaggaggagctggagagactggaggaggcctgcgacatggccctggagctgaacgccagcaagcacagaatctacgagtacgtggagagcagaatgagcttcatcgcccccaacctgagcatcatcatcggcgccagcaccgccgccaagatcatgggcgtggccggcggcctgaccaacctgagcaagatgcccgcctgcaacatcatgctgctgggcgcccagagaaagaccctgagcggcttcagcagcaccagcgtgctgccccacaccggctacatctaccactag

SEQ ID NO: 95801 - DNA, 855 bp, synthetic construct
  misc_feature 1..855: note = Description of Artificial Sequence: Synthetic coding sequence
  source 1..855: mol_type = other DNA
atgagcctggccgacgagctgctggccgacctggaggaggccgccgaggaggaggagggcggcagctacggcgaggaggaggaggagcccgccatcgaggacgtgcaggaggagacccagctggacctgagcggcgacagcgtgaagaccatcgccaagctgtgggacagcaagatgttcgccgagatcatgatgaagatcgaggagtacatcagcaagcaggccaaggccagcgaggtgatgggccccgtggaggccgcccccgagtacagagtgatcgtggacgccaacaacctgaccgtggagatcgagaacgagctgaacatcatccacaagttcatcagagacaagtacagcaagagattccccgagctggagagcctggtgcccaacgccctggactacatcagaaccgtgaaggagctgggcaacagcctggacaagtgcaagaacaacgagaacctgcagcagatcctgaccaacgccaccatcatggtggtgagcgtgaccgccagcaccacccagggccagcagctgagcgaggaggagctggagagactggaggaggcctgcgacatggccctggagctgaacgccagcaagcacagaatctacgagtacgtggagagcagaatgagcttcatcgcccccaacctgagcatcatcatcggcgccagcaccgccgccaagatcatgggcgtggccggcggcctgaccaacctgagcaagatgcccgcctgcaacatcatgctgctgggcgcccagagaaagaccctgagcggcttcagcagcaccagcgtgctgccccacaccggctacatctaccacagcgacatcgtgcagagcctgccctag

SEQ ID NO: 95802 - DNA, 786 bp, synthetic construct
  misc_feature 1..786: note = Description of Artificial Sequence: Synthetic coding sequence
  source 1..786: mol_type = other DNA
atgagcctggccgacgagctgctggccgacctggaggaggccgccgaggaggaggagggcggcagctacggcgaggaggaggaggagcccgccatcgaggacgtgcaggaggagacccagctggacctgagcggcgacagcgtgaagaccatcgccaagctgtgggacagcaagatgttcgccgagatcatgatgaagatcgaggagtacatcagcaagcaggccaaggccagcgaggtgatgggccccgtggaggccgcccccgagtacagagtgatcgtggacgccaacaacctgaccgtggagatcgagaacgagctgaacatcatccacaagttcatcagagacaagtacagcaagagattccccgagctggagagcctggtgcccaacgccctggactacatcagaaccgtgaaggagctgggcaacagcctggacaagtgcaagaacaacgagaacctgcagcagatcctgaccaacgccaccatcatggtggtgagcgtgaccgccagcaccacccagggccagcagctgagcgaggaggagctggagagactggaggaggcctgcgacatggccctggagctgaacgccagcaagcacagaatctacgagtacgtggagagcagaatgagcttcatcgcccccaacctgagcatcatcatcggcgccagcaccgccgccaagatcatgggcgtggccggcggcctgaccaacctgagcaagatgcccgcctgcaacatcatgctgctgggcgcccagagaaagaccctgagcggctag

SEQ ID NO: 95803 - DNA, 1569 bp, synthetic construct
  misc_feature 1..1569: note = Description of Artificial Sequence: Synthetic coding sequence
  source 1..1569: mol_type = other DNA
atggccagcagcagagccagcagcacccaggccaccaagaccaaggcccccgacgacctggtggcccccgtggtgaagaagccccacatctactacggcagcctggaggagaaggagagagagagactggccaagggcgagagcggcatcctgggcaaggacggcctgaaggccggcatcgaggccggcaacatcaacatcaccagcggcgaggtgttcgagatcgaggagcacatcagcgagagacaggccgaggtgctggccgagttcgagagaagaaagagagccagacagatcaacgtgagcaccgacgacagcgaggtgaaggcctgcctgagagccctgggcgagcccatcaccctgttcggcgagggccccgccgagagaagagagagactgagaaacatcctgagcgtggtgggcaccgacgccctgaagaagaccaagaaggacgacgagaagagcaagaagagcaaggaggagtaccagcagacctggtaccacgagggccccaacagcctgaaggtggccagactgtggatcgccaactacagcctgcccagagccatgaagagactggaggaggccagactgcacaaggagatccccgagaccaccagaaccagccagatgcaggagctgcacaagagcctgagaagcctgaacaacttctgcagccagatcggcgacgacagacccatcagctactgccacttcagccccaacagcaagatgctggccaccgcctgctggagcggcctgtgcaagctgtggagcgtgcccgactgcaacctgctgcacaccctgagaggccacaacaccaacgtgggcgccatcgtgttccaccccaagagcaccgtgagcctggaccccaaggacgtgaacctggccagctgcgccgccgacggcagcgtgaagctgtggagcctggacagcgacgagcccgtggccgacatcgagggccacaccgtgagagtggccagagtgatgtggcaccccagcggcagattcctgggcaccacctgctacgacagaagctggagactgtgggacctggaggcccaggaggagatcctgcaccaggagggccacagcatgggcgtgtacgacatcgccttccaccaggacggcagcctggccggcaccggcggcctggacgccttcggcagagtgtgggacctgagaaccggcagatgcatcatgttcctggagggccacctgaaggagatctacggcatcaacttcagccccaacggctaccacatcgccaccggcagcggcgacaacacctgcaaggtgtgggacctgagacagagaagatgcgtgtacaccatccccgcccaccagaacctggtgaccggcgtgaagttcgagcccatccacggcaacttcctgctgaccggcgcctacgacaacaccgccaagatctggacccaccccggctggagccccctgaagaccctggccggccacgagggcaaggtgatgggcctggacatcagcagcgacggccagctgatcgccacctgcagctacgacagaaccttcaagctgtggatggccgagtag

SEQ ID NO: 95804 - DNA, 1566 bp, synthetic construct
  misc_feature 1..1566: note = Description of Artificial Sequence: Synthetic coding sequence
  source 1..1566: mol_type = other DNA
atggccagcagcagagccagcagcaccgccaccaagaccaaggcccccgacgacctggtggcccccgtggtgaagaagccccacatctactacggcagcctggaggagaaggagagagagagactggccaagggcgagagcggcatcctgggcaaggacggcctgaaggccggcatcgaggccggcaacatcaacatcaccagcggcgaggtgttcgagatcgaggagcacatcagcgagagacaggccgaggtgctggccgagttcgagagaagaaagagagccagacagatcaacgtgagcaccgacgacagcgaggtgaaggcctgcctgagagccctgggcgagcccatcaccctgttcggcgagggccccgccgagagaagagagagactgagaaacatcctgagcgtggtgggcaccgacgccctgaagaagaccaagaaggacgacgagaagagcaagaagagcaaggaggagtaccagcagacctggtaccacgagggccccaacagcctgaaggtggccagactgtggatcgccaactacagcctgcccagagccatgaagagactggaggaggccagactgcacaaggagatccccgagaccaccagaaccagccagatgcaggagctgcacaagagcctgagaagcctgaacaacttctgcagccagatcggcgacgacagacccatcagctactgccacttcagccccaacagcaagatgctggccaccgcctgctggagcggcctgtgcaagctgtggagcgtgcccgactgcaacctgctgcacaccctgagaggccacaacaccaacgtgggcgccatcgtgttccaccccaagagcaccgtgagcctggaccccaaggacgtgaacctggccagctgcgccgccgacggcagcgtgaagctgtggagcctggacagcgacgagcccgtggccgacatcgagggccacaccgtgagagtggccagagtgatgtggcaccccagcggcagattcctgggcaccacctgctacgacagaagctggagactgtgggacctggaggcccaggaggagatcctgcaccaggagggccacagcatgggcgtgtacgacatcgccttccaccaggacggcagcctggccggcaccggcggcctggacgccttcggcagagtgtgggacctgagaaccggcagatgcatcatgttcctggagggccacctgaaggagatctacggcatcaacttcagccccaacggctaccacatcgccaccggcagcggcgacaacacctgcaaggtgtgggacctgagacagagaagatgcgtgtacaccatccccgcccaccagaacctggtgaccggcgtgaagttcgagcccatccacggcaacttcctgctgaccggcgcctacgacaacaccgccaagatctggacccaccccggctggagccccctgaagaccctggccggccacgagggcaaggtgatgggcctggacatcagcagcgacggccagctgatcgccacctgcagctacgacagaaccttcaagctgtggatggccgagtag

SEQ ID NO: 95805 - DNA, 3024 bp, synthetic construct
  misc_feature 1..3024: note = Description of Artificial Sequence: Synthetic coding sequence
  source 1..3024: mol_type = other DNA
atggccgccgccgagacccagagcctgagagagcagcccgagatggaggacgccaacagcgagaagagcatcaacgaggagaacggcgaggtgagcgaggaccagagccagaacaagcacagcagacacaagaagaagaagcacaagcacagaagcaagcacaagaagcacaagcacagcagcgaggaggacaaggacaagaagcacaagcacaagcacaagcacaagaagcacaagagaaaggagatcatcgacgccagcgacaaggagggcatgagccccgccaagagaaccaagctggacgacctggccctgctggaggacctggagaagcagagagccctgatcaaggccgagctggacaacgagctgatggagggcaaggtgcagagcggcatgggcctgatcctgcagggctacgagagcggcagcgaggaggagggcgagatccacgagaaggccagaaacggcaacagaagcagcaccagaagcagcagcaccaagggcaagctggagctggtggacaacaagatcaccaccaagaagagaagcaagagcagaagcaaggagagaaccagacacagaagcgacaagaagaagagcaagggcggcatcgagatcgtgaaggagaagaccaccagaagcaagagcaaggagagaaagaagagcaagagccccagcaagagaagcaagagccaggaccaggccagaaagagcaagagccccaccctgagaagaagaagccaggagaagatcggcaaggccagaagccccaccgacgacaaggtgaagatcgaggacaagagcaagagcaaggacagaaagaagagccccatcatcaacgagagcagaagcagagacagaggcaagaagagcagaagccccgtggacctgagaggcaagagcaaggacagaagaagcagaagcaaggagagaaagagcaagagaagcgagaccgacaaggagaagaagcccatcaagagccccagcaaggacgccagcagcggcaaggagaacagaagccccagcagaagacccggcagaagccccaagagaagaagcctgagccccaagcccagagacaagagcagaagaagcagaagccccctgctgaacgacagaagaagcaagcagagcaagagccccagcagaaccctgagccccggcagaagagccaagagcagaagcctggagagaaagagaagagagcccgagagaagaagactgagcagccccagaaccagacccagagacgacatcctgagcagaagagagagaagcaaggacgccagccccatcaacagatggagccccaccagaagaagaagcagaagccccatcagaagaagaagcagaagccccctgagaagaagcagaagccccagaagaagaagcagaagccccagaagaagagacagaggcagaagaagcagaagcagactgagaagaagaagcagaagcagaggcggcagaagaagaagaagcagaagcaaggtgaaggaggacaagttcaagggcagcctgagcgagggcatgaaggtggagcaggagagcagcagcgacgacaacctggaggacttcgacgtggaggaggaggacgaggaggccctgatcgagcagagaagaatccagagacaggccatcgtgcagaagtacaagtacctggccgaggacagcaacatgagcgtgcccagcgagcccagcagcccccagagcagcaccagaaccagaagccccagccccgacgacatcctggagagagtggccgccgacgtgaaggagtacgagagagagaacgtggacaccttcgaggccagcgtgaaggccaagcacaacctgatgaccgtggagcagaacaacggcagcagccagaagaagctgctggcccccgacatgttcaccgagagcgacgacatgttcgccgcctacttcgacagcgccagactgagagccgccggcatcggcaaggacttcaaggagaaccccaacctgagagacaactggaccgacgccgagggctactacagagtgaacatcggcgaggtgctggacaagagatacaacgtgtacggctacaccggccagggcgtgttcagcaacgtggtgagagccagagacaacgccagagccaaccaggaggtggccgtgaagatcatcagaaacaacgagctgatgcagaagaccggcctgaaggagctggagttcctgaagaagctgaacgacgccgaccccgacgacaagttccactgcctgagactgttcagacacttctaccacaagcagcacctgtgcctggtgttcgagcccctgagcatgaacctgagagaggtgctgaagaagtacggcaaggacgtgggcctgcacatcaaggccgtgagaagctacagccagcagctgttcctggccctgaagctgctgaagagatgcaacatcctgcacgccgacatcaagcccgacaacatcctggtgaacgagagcaagaccatcctgaagctgtgcgacttcggcagcgccagccacgtggccgacaacgacatcaccccctacctggtgagcagattctacagagcccccgagatcatcatcggcaagagctacgactacggcatcgacatgtggagcgtgggctgcaccctgtacgagctgtacaccggcaagatcctgttccccggcaagaccaacaaccacatgctgaagctggccatggacctgaagggcaagatgcccaacaagatgatcagaaagggcgtgttcaaggaccagcacttcgaccagaacctgaacttcatgtacatcgaggtggacaaggtgaccgagagagagaaggtgaccgtgatgagcaccatcaaccccaccaaggacctgctggccgacctgatcggctgccagagactgcccgaggaccagagaaagaaggtgcaccagctgaaggacctgctggaccagatcctgatgctggaccccgccaagagaatcagcatcaaccaggccctgcagcacgccttcatccaggagaagatctag

SEQ ID NO: 95806 - DNA, 3024 bp, synthetic construct; identical to SEQ ID NO: 95805
  misc_feature 1..3024: note = Description of Artificial Sequence: Synthetic coding sequence
  source 1..3024: mol_type = other DNA

SEQ ID NO: 95807 - DNA, 2982 bp, synthetic construct
  misc_feature 1..2982: note = Description of Artificial Sequence: Synthetic coding sequence
  source 1..2982: mol_type = other DNA
atggaggacgccaacagcgagaagagcatcaacgaggagaacggcgaggtgagcgaggaccagagccagaacaagcacagcagacacaagaagaagaagcacaagcacagaagcaagcacaagaagcacaagcacagcagcgaggaggacaaggacaagaagcacaagcacaagcacaagcacaagaagcacaagagaaaggagatcatcgacgccagcgacaaggagggcatgagccccgccaagagaaccaagctggacgacctggccctgctggaggacctggagaagcagagagccctgatcaaggccgagctggacaacgagctgatggagggcaaggtgcagagcggcatgggcctgatcctgcagggctacgagagcggcagcgaggaggagggcgagatccacgagaaggccagaaacggcaacagaagcagcaccagaagcagcagcaccaagggcaagctggagctggtggacaacaagatcaccaccaagaagagaagcaagagcagaagcaaggagagaaccagacacagaagcgacaagaagaagagcaagggcggcatcgagatcgtgaaggagaagaccaccagaagcaagagcaaggagagaaagaagagcaagagccccagcaagagaagcaagagccaggaccaggccagaaagagcaagagccccaccctgagaagaagaagccaggagaagatcggcaaggccagaagccccaccgacgacaaggtgaagatcgaggacaagagcaagagcaaggacagaaagaagagccccatcatcaacgagagcagaagcagagacagaggcaagaagagcagaagccccgtggacctgagaggcaagagcaaggacagaagaagcagaagcaaggagagaaagagcaagagaagcgagaccgacaaggagaagaagcccatcaagagccccagcaaggacgccagcagcggcaaggagaacagaagccccagcagaagacccggcagaagccccaagagaagaagcctgagccccaagcccagagacaagagcagaagaagcagaagccccctgctgaacgacagaagaagcaagcagagcaagagccccagcagaaccctgagccccggcagaagagccaagagcagaagcctggagagaaagagaagagagcccgagagaagaagactgagcagccccagaaccagacccagagacgacatcctgagcagaagagagagaagcaaggacgccagccccatcaacagatggagccccaccagaagaagaagcagaagccccatcagaagaagaagcagaagccccctgagaagaagcagaagccccagaagaagaagcagaagccccagaagaagagacagaggcagaagaagcagaagcagactgagaagaagaagcagaagcagaggcggcagaagaagaagaagcagaagcaaggtgaaggaggacaagttcaagggcagcctgagcgagggcatgaaggtggagcaggagagcagcagcgacgacaacctggaggacttcgacgtggaggaggaggacgaggaggccctgatcgagcagagaagaatccagagacaggccatcgtgcagaagtacaagtacctggccgaggacagcaacatgagcgtgcccagcgagcccagcagcccccagagcagcaccagaaccagaagccccagccccgacgacatcctggagagagtggccgccgacgtgaaggagtacgagagagagaacgtggacaccttcgaggccagcgtgaaggccaagcacaacctgatgaccgtggagcagaacaacggcagcagccagaagaagctgctggcccccgacatgttcaccgagagcgacgacatgttcgccgcctacttcgacagcgccagactgagagccgccggcatcggcaaggacttcaaggagaaccccaacctgagagacaactggaccgacgccgagggctactacagagtgaacatcggcgaggtgctggacaagagatacaacgtgtacggctacaccggccagggcgtgttcagcaacgtggtgagagccagagacaacgccagagccaaccaggaggtggccgtgaagatcatcagaaacaacgagctgatgcagaagaccggcctgaaggagctggagttcctgaagaagctgaacgacgccgaccccgacgacaagttccactgcctgagactgttcagacacttctaccacaagcagcacctgtgcctggtgttcgagcccctgagcatgaacctgagagaggtgctgaagaagtacggcaaggacgtgggcctgcacatcaaggccgtgagaagctacagccagcagctgttcctggccctgaagctgctgaagagatgcaacatcctgcacgccgacatcaagcccgacaacatcctggtgaacgagagcaagaccatcctgaagctgtgcgacttcggcagcgccagccacgtggccgacaacgacatcaccccctacctggtgagcagattctacagagcccccgagatcatcatcggcaagagctacgactacggcatcgacatgtggagcgtgggctgcaccctgtacgagctgtacaccggcaagatcctgttccccggcaagaccaacaaccacatgctgaagctggccatggacctgaagggcaagatgcccaacaagatgatcagaaagggcgtgttcaaggaccagcacttcgaccagaacctgaacttcatgtacatcgaggtggacaaggtgaccgagagagagaaggtgaccgtgatgagcaccatcaaccccaccaaggacctgctggccgacctgatcggctgccagagactgcccgaggaccagagaaagaaggtgcaccagctgaaggacctgctggaccagatcctgatgctggaccccgccaagagaatcagcatcaaccaggccctgcagcacgccttcatccaggagaagatctag

SEQ ID NO: 95808 - DNA, 2820 bp, synthetic construct
  misc_feature 1..2820: note = Description of Artificial Sequence: Synthetic coding sequence
  source 1..2820: mol_type = other DNA
atgagacccggcaccggcgccgagagaggcggcctgatggtgagcgagatggagagccacccccccagccagggccccggcgacggcgagagaagactgagcggcagcagcctgtgcagcggcagctgggtgagcgccgacggcttcctgagaagaagacccagcatgggccaccccggcatgcactacgcccccatgggcatgcaccccatgggccagagagccaacatgccccccgtgccccacggcatgatgccccagatgatgccccccatgggcggcccccccatgggccagatgcccggcatgatgagcagcgtgatgcccggcatgatgatgagccacatgagccaggccagcatgcagcccgccctgccccccggcgtgaacagcatggacgtggccgccggcacctacaccctgtacaagagcatgtggaccgagcacaagagccccgacggcagaacctactactacaacaccgagaccaagcagagcacctgggagaagcccgacgacctgaagacccccgccgagcagctgctgagcaagtgcccctggaaggagtacaagagcgacagcggcaagccctactactacaacagccagaccaaggagagcagatgggccaagcccaaggagctggaggacctggagggcaagatgggcaagatcaagtacagcaagcaggaggagtgcaccaccaccagcaccgcccccgtgcccaccaccgagatccccaccaccatgagcaccatggccgccgccgaggccgccgccgccgtggtggccgccgccgccgccgccgccgccgccgccgccgccgccaacgccaacgccagcaccagcgccagcaacaccgtgagcggcaccgtgcccgtggtgcccgagcccgaggtgaccagcatcgtggccaccgtggtggacaacgagaacaccgtgaccatcagcaccgaggagcaggcccagctgaccagcacccccgccatccaggaccagagcgtggaggtgagcagcaacaccggcgaggagaccagcaagcaggagaccgtggccgacttcacccccaagaaggaggaggaggagagccagcccgccaagaagacctacacctggaacaccaaggaggaggccaagcaggccttcaaggagctgctgaaggagaagagagtgcccagcaacgccagctgggagcaggccatgaagatgatcatcaacgaccccagatacagcgccctggccaagctgagcgagaagaagcaggccttcaacgcctacaaggtgcagaccgagaaggaggagaaggaggaggccagaagcaagtacaaggaggccaaggagagcttccagagattcctggagaaccacgagaagatgaccagcaccaccagatacaagaaggccgagcagatgttcggcgagatggaggtgtggaacgccatcagcgagagagacagactggagatctacgaggacgtgctgttcttcctgagcaagaaggagaaggagcaggccaagcagctgagaaagagaaactgggaggccctgaagaacatcctggacaacatggccaacgtgacctacagcaccacctggagcgaggcccagcagtacctgatggacaaccccaccttcgccgaggacgaggagctgcagaacatggacaaggaggacgccctgatctgcttcgaggagcacatcagagccctggagaaggaggaggaggaggagaagcagaagagcctgctgagagagagaagaagacagagaaagaacagagagagcttccagatcttcctggacgagctgcacgagcacggccagctgcacagcatgagcagctggatggagctgtaccccaccatcagcagcgacatcagattcaccaacatgctgggccagcccggcagcaccgccctggacctgttcaagttctacgtggaggacctgaaggccagataccacgacgagaagaagatcatcaaggacatcctgaaggacaagggcttcgtggtggaggtgaacaccaccttcgaggacttcgtggccatcatcagcagcaccaagagaagcaccaccctggacgccggcaacatcaagctggccttcaacagcctgctggagaaggccgaggccagagagagagagagagagaaggaggaggccagaaagatgaagagaaaggagagcgccttcaagagcatgctgaagcaggccgccccccccatcgagctggacgccgtgtgggaggacatcagagagagattcgtgaaggagcccgccttcgaggacatcaccctggagagcgagagaaagagaatcttcaaggacttcatgcacgtgctggagcacgagtgccagcaccaccacagcaagaacaagaagcacagcaagaagagcaagaagcaccacagaaagagaagcagaagcagaagcggcagcgacagcgacgacgacgacagccacagcaagaagaagagacagagaagcgagagcagaagcgccagcgagcacagcagcagcgccgagagcgagagaagctacaagaagagcaagaagcacaagaagaagagcaagaagagaagacacaagagcgacagccccgagagcgacgccgagagagagaaggacaagaaggagaaggacagagagagcgagaaggacagaaccagacagagaagcgagagcaagcacaagagccccaagaagaagaccggcaaggacagcggcaactgggacaccagcggcagcgagctgagcgagggcgagctggagaagagaagaagaaccctgctggagcagctggacgacgaccagtag

SEQ ID NO: 95809 - DNA, 2451 bp, synthetic construct
  misc_feature 1..2451: note = Description of Artificial Sequence: Synthetic coding sequence
  source 1..2451: mol_type = other DNA
atgtgcagcggcagcggcagaagaagaagcagcctgagccccaccatgagacccggcaccggcgccgagagaggcggcctgatgatgggccaccccggcatgcactacgcccccatgggcatgcaccccatgggccagagagccaacatgccccccgtgccccacggcatgatgccccagatgatgccccccatgggcggcccccccatgggccagatgcccggcatgatgagcagcgtgatgcccggcatgatgatgagccacatgagccaggccagcatgcagcccgccctgccccagctgctgagcaagtgcccctggaaggagtacaagagcgacagcggcaagccctactactacaacagccagaccaaggagagcagatgggccaagcccaaggagctggaggacctggagggctaccagaacaccatcgtggccggcagcctgatcaccaagagcaacctgcacggcatgctgaccgagctgaagtacagcaagcaggaggagtgcaccaccaccagcaccgcccccgtgcccaccaccgagatccccaccaccatgagcaccatggccgccgccgaggccgccgccgccgtggtggccgccgccgccgccgccgccgccgccgccgccgccgccaacgccaacgccagcaccagcgccagcaacaccgtgagcggcaccgtgcccgtggtgcccgagcccgaggtgaccagcatcgtggccaccgtggtggacaacgagaacaccgtgaccatcagcaccgaggagcaggcccagctgaccagcacccccgccatccaggaccagagcgtggaggtgagcagcaacaccggcgaggagaccagcaagcaggagaccgtggccgacttcacccccaagaaggaggaggaggagagccagcccgccaagaagacctacacctggaacaccaaggaggaggccaagcaggccttcaaggagctgctgaaggagaagagagtgcccagcaacgccagctgggagcaggccatgaagatgatcatcaacgaccccagatacagcgccctggccaagctgagcgagaagaagcaggccttcaacgcctacaaggtgcagaccgagaaggaggagaaggaggaggccagaagcaagtacaaggaggccaaggagagcttccagagattcctggagaaccacgagaagatgaccagcaccaccagatacaagaaggccgagcagatgttcggcgagatggaggtgtggaacgccatcagcgagagagacagactggagatctacgaggacgtgctgttcttcctgagcaagaaggagaaggagcaggccaagcagctgagaaagagaaactgggaggccctgaagaacatcctggacaacatggccaacgtgacctacagcaccacctggagcgaggcccagcagtacctgatggacaaccccaccttcgccgaggacgaggagctgcagaacatggacaaggaggacgccctgatctgcttcgaggagcacatcagagccctggagaaggaggaggaggaggagaagcagaagagcctgctgagagagagaagaagacagagaaagaacagagagagcttccagatcttcctggacgagctgcacgagcacggccagctgcacagcatgagcagctggatggagctgtaccccaccatcagcagcgacatcagattcaccaacatgctgggccagcccgtgttcagcctgggcagcaccgccctggacctgttcaagttctacgtggaggacctgaaggccagataccacgacgagaagaagatcatcaaggacatcctgaaggacaagggcttcgtggtggaggtgaacaccaccttcgaggacttcgtggccatcatcagcagcaccaagagaagcaccaccctggacgccggcaacatcaagctggccttcaacagcctgctggagaaggccgaggccagagagagagagagagagaaggaggaggccagaaagatgaagagaaaggagagcgccttcaagagcatgctgaagcaggccgccccccccatcgagctggacgccgtgtgggaggacatcagagagagattcgtgaaggagcccgccttcgaggacatcaccctggagagcgagagaaagagaatcttcaaggacttcatgcacgtgctggagcacgagtgccagcaccaccacagcaagaacaagaagcacagcaagaagagcaagaagcaccacagaaagagaagcagaagcagaagcggcagcgacagcgacgacgacgacagccacagcaagaagaagagacagagaagcgagagcagaagcgccagcgagcacagcagcagcgccgagagcgagagaagctacaagaagagcaagaagcacaagaagaagagcaagaagagaagacacaagagcgacagccccgagagcgacgccgagagatag

SEQ ID NO: 95810 - DNA, 2793 bp, synthetic construct
  misc_feature 1..2793: note = Description of Artificial Sequence: Synthetic coding sequence
  source 1..2793: mol_type = other DNA
atgtgcagcggcagcggcagaagaagaagcagcctgagccccaccatgagacccggcaccggcgccgagagaggcggcctgatgatgggccaccccggcatgcactacgcccccatgggcatgcaccccatgggccagagagccaacatgccccccgtgccccacggcatgatgccccagatgatgccccccatgggcggcccccccatgggccagatgcccggcatgatgagcagcgtgatgcccggcatgatgatgagccacatgagccaggccagcatgcagcccgccctgccccccggcgtgaacagcatggacgtggccgccggcaccgccagcggcgccaagagcatgtggaccgagcacaagagccccgacggcagaacctactactacaacaccgagaccaagcagagcacctgggagaagcccgacgacctgaagacccccgccgagcagctgctgagcaagtgcccctggaaggagtacaagagcgacagcggcaagccctactactacaacagccagaccaaggagagcagatgggccaagcccaaggagctggaggacctggagggctaccagaacaccatcgtggccggcagcctgatcaccaagagcaacctgcacgccatgatcaaggccgaggagagcagcaagcaggaggagtgcaccaccaccagcaccgcccccgtgcccaccaccgagatccccaccaccatgagcaccatggccgccgccgaggccgccgccgccgtggtggccgccgccgccgccgccgccgccgccgccgccgccgccaacgccaacgccagcaccagcgccagcaacaccgtgagcggcaccgtgcccgtggtgcccgagcccgaggtgaccagcatcgtggccaccgtggtggacaacgagaacaccgtgaccatcagcaccgaggagcaggcccagctgaccagcacccccgccatccaggaccagagcgtggaggtgagcagcaacaccggcgaggagaccagcaagcaggagaccgtggccgacttcacccccaagaaggaggaggaggagagccagcccgccaagaagacctacacctggaacaccaaggaggaggccaagcaggccttcaaggagctgctgaaggagaagagagtgcccagcaacgccagctgggagcaggccatgaagatgatcatcaacgaccccagatacagcgccctggccaagctgagcgagaagaagcaggccttcaacgcctacaaggtgcagaccgagaaggaggagaaggaggaggccagaagcaagtacaaggaggccaaggagagcttccagagattcctggagaaccacgagaagatgaccagcaccaccagatacaagaaggccgagcagatgttcggcgagatggaggtgtggaacgccatcagcgagagagacagactggagatctacgaggacgtgctgttcttcctgagcaagaaggagaaggagcaggccaagcagctgagaaagagaaactgggaggccctgaagaacatcctggacaacatggccaacgtgacctacagcaccacctggagcgaggcccagcagtacctgatggacaaccccaccttcgccgaggacgaggagctgcagaacatggacaaggaggacgccctgatctgcttcgaggagcacatcagagccctggagaaggaggaggaggaggagaagcagaagagcctgctgagagagagaagaagacagagaaagaacagagagagcttccagatcttcctggacgagctgcacgagcacggccagctgcacagcatgagcagctggatggagctgtaccccaccatcagcagcgacatcagattcaccaacatgctgggccagcccggcagcaccgccctggacctgttcaagttctacgtggaggacctgaaggccagataccacgacgagaagaagatcatcaaggacatcctgaaggacaagggcttcgtggtggaggtgaacaccaccttcgaggacttcgtggccatcatcagcagcaccaagagaagcaccaccctggacgccggcaacatcaagctggccttcaacagcctgctggagaaggccgaggccagagagagagagagagagaaggaggaggccagaaagatgaagagaaaggagagcgccttcaagagcatgctgaagcaggccgccccccccatcgagctggacgccgtgtgggaggacatcagagagagattcgtgaaggagcccgccttcgaggacatcaccctggagagcgagagaaagagaatcttcaaggacttcatgcacgtgctggagcacgagtgccagcaccaccacagcaagaacaagaagcacagcaagaagagcaagaagcaccacagaaagagaagcagaagcagaagcggcagcgacagcgacgacgacgacagccacagcaagaagaagagacagagaagcgagagcagaagcgccagcgagcacagcagcagcgccgagagcgagagaagctacaagaagagcaagaagcacaagaagaagagcaagaagagaagacacaagagcgacagccccgagagcgacgccgagagagagaaggacaagaaggagaaggacagagagagcgagaaggacagaaccagacagagaagcgagagcaagcacaagagccccaagaagaagaccggcaaggacagcggcaactgggacaccagcggcagcgagctgagcgagggcgagctggagaagagaagaagaaccctgctggagcagctggacgacgaccagtag

SEQ ID NO: 95811 - DNA, 2481 bp, synthetic construct
  misc_feature 1..2481: note = Description of Artificial Sequence: Synthetic coding sequence
  source 1..2481: mol_type = other DNA
atggacgtggccgccggcaccgccagcggcgccaagagcatgtggaccgagcacaagagccccgacggcagaacctactactacaacaccgagaccaagcagagcacctgggagaagcccgacgacctgaagacccccgccgagcagctgctgagcaagtgcccctggaaggagtacaagagcgacagcggcaagccctactactacaacagccagaccaaggagagcagatgggccaagcccaaggagctggaggacctggagggctaccagaacaccatcgtggccggcagcctgatcaccaagagcaacctgcacggcatgctgaccgagctgaagtacagcaagcaggaggagtgcaccaccaccagcaccgcccccgtgcccaccaccgagatccccaccaccatgagcaccatggccgccgccgaggccgccgccgccgtggtggccgccgccgccgccgccgccgccgccgccgccgccgccaacgccaacgccagcaccagcgccagcaacaccgtgagcggcaccgtgcccgtggtgcccgagcccgaggtgaccagcatcgtggccaccgtggtggacaacgagaacaccgtgaccatcagcaccgaggagcaggcccagctgaccagcacccccgccatccaggaccagagcgtggaggtgagcagcaacaccggcgaggagaccagcaagcaggagaccgtggccgacttcacccccaagaaggaggaggaggagagccagcccgccaagaagacctacacctggaacaccaaggaggaggccaagcaggccttcaaggagctgctgaaggagaagagagtgcccagcaacgccagctgggagcaggccatgaagatgatcatcaacgaccccagatacagcgccctggccaagctgagcgagaagaagcaggccttcaacgcctacaaggtgcagaccgagaaggaggagaaggaggaggccagaagcaagtacaaggaggccaaggagagcttccagagattcctggagaaccacgagaagatgaccagcaccaccagatacaagaaggccgagcagatgttcggcgagatggaggtgtggaacgccatcagcgagagagacagactggagatctacgaggacgtgctgttcttcctgagcaagaaggagaaggagcaggccaagcagctgagaaagagaaactgggaggccctgaagaacatcctggacaacatggccaacgtgacctacagcaccacctggagcgaggcccagcagtacctgatggacaaccccaccttcgccgaggacgaggagctgcagaacatggacaaggaggacgccctgatctgcttcgaggagcacatcagagccctggagaaggaggaggaggaggagaagcagaagagcctgctgagagagagaagaagacagagaaagaacagagagagcttccagatcttcctggacgagctgcacgagcacggccagctgcacagcatgagcagctggatggagctgtaccccaccatcagcagcgacatcagattcaccaacatgctgggccagcccggcagcaccgccctggacctgttcaagttctacgtggaggacctgaaggccagataccacgacgagaagaagatcatcaaggacatcctgaaggacaagggcttcgtggtggaggtgaacaccaccttcgaggacttcgtggccatcatcagcagcaccaagagaagcaccaccctggacgccggcaacatcaagctggccttcaacagcctgctggagaaggccgaggccagagagagagagagagagaaggaggaggccagaaagatgaagagaaaggagagcgccttcaagagcatgctgaagcaggccgccccccccatcgagctggacgccgtgtgggaggacatcagagagagattcgtgaaggagcccgccttcgaggacatcaccctggagagcgagagaaagagaatcttcaaggacttcatgcacgtgctggagcacgagtgccagcaccaccacagcaagaacaagaagcacagcaagaagagcaagaagcaccacagaaagagaagcagaagcagaagcggcagcgacagcgacgacgacgacagccacagcaagaagaagagacagagaagcgagagcagaagcgccagcgagcacagcagcagcgccgagagcgagagaagctacaagaagagcaagaagcacaagaagaagagcaagaagagaagacacaagagcgacagccccgagagcgacgccgagagagagaaggacaagaaggagaaggacagagagagcgagaaggacagaaccagacagagaagcgagagcaagcacaagagccccaagaagaagaccggcaaggacagcggcaactgggacaccagcggcagcgagctgagcgagggcgagctggagaagagaagaagaaccctgctggagcagctggacgacgaccagtag

SEQ ID NO: 95812 - DNA, 1347 bp, synthetic construct
  misc_feature 1..1347: note = Description of Artificial Sequence: Synthetic coding sequence
  source 1..1347: mol_type = other DNA
atgagacccggcaccggcgccgagagaggcggcctgatggtgagcgagatggagagccacccccccagccagggccccggcgacggcgagagaagactgagcggcagcagcctgtgcagcggcagctgggtgagcgccgacggcttcctgagaagaagacccagcatgggccaccccggcatgcactacgcccccatgggcatgcaccccatgggccagagagccaacatgccccccgtgccccacggcatgatgccccagatgatgccccccatgggcggcccccccatgggccagatgcccggcatgatgagcagcgtgatgcccggcatgatgatgagccacatgagccaggccagcatgcagcccgccctgccccccggcgtgaacagcatggacgtggccgccggcaccgccagcggcgccaagagcatgtggaccgagcacaagagccccgacggcagaacctactactacaacaccgagaccaagcagagcacctgggagaagcccgacgacctgaagacccccgccgagcagctgctgagcaagtgcccctggaaggagtacaagagcgacagcggcaagccctactactacaacagccagaccaaggagagcagatgggccaagcccaaggagctggaggacctggagggctaccagaacaccatcgtggccggcagcctgatcaccaagagcaacctgcacgccatgatcaaggccgaggagagcagcaagcaggaggagtgcaccaccaccagcaccgcccccgtgcccaccaccgagatccccaccaccatgagcaccatggccgccgccgaggccgccgccgccgtggtggccgccgccgccgccgccgccgccgccgccgccgccgccaacgccaacgccagcaccagcgccagcaacaccgtgagcggcaccgtgcccgtggtgcccgagcccgaggtgaccagcatcgtggccaccgtggtggacaacgagaacaccgtgaccatcagcaccgaggagcaggcccagctgaccagcacccccgccatccaggaccagagcgtggaggtgagcagcaacaccggcgaggagaccagcaagcaggagaccgtggccgacttcacccccaagaaggaggaggaggagagccagcccgccaagaagacctacacctggaacaccaaggaggaggccaagcaggccttcaaggagctgctgaaggagaagagagtgcccagcaacgccagctgggagcaggccatgaagatgatcatcaacgaccccagatacagcgccctggccaagctgagcgagaagaagcaggccttcaacgcctacaaggtgcagacctag

SEQ ID NO: 95813 - DNA, 2826 bp, synthetic construct
  misc_feature 1..2826: note = Description of Artificial Sequence: Synthetic coding sequence
  source 1..2826: mol_type = other DNA
atgaacaagaagaagaagcccttcctgggcatgcccgcccccctgggctacgtgcccggcctgggcagaggcgccaccggcttcaccaccagaagcgacatcggccccgccagagacgccaacgaccccgtggacgacagacacgccccccccggcaagagaaccgtgggcgaccagatgaagaagaaccaggccgccgacgacgacgacgaggacctgaacgacaccaactacgacgagttcaacggctacgccggcagcctgttcagcagcggcccctacgagaaggacgacgaggaggccgacgccatctacgccgccctggacaagagaatggacgagagaagaaaggagagaagagagcagagagagaaggaggagatcgagaagtacagaatggagagacccaagatccagcagcagttcagcgacctgaagagaaagctggccgaggtgaccgaggaggagtggctgagcatccccgaggtgggcgacgccagaaacaagagacagagaaaccccagatacgagaagctgacccccgtgcccgacagcttcttcgccaagcacctgcagaccggcgagaaccacaccagcgtggaccccagacagacccagttcggcggcctgaacaccccctaccccggcggcctgaacaccccctaccccggcggcatgacccccggcctgatgacccccggcaccggcgagctggacatgagaaagatcggccaggccagaaacaccctgatggacatgagactgagccaggtgagcgacagcgtgagcggccagaccgtggtggaccccaagggctacctgaccgacctgaacagcatgatccccacccacggcggcgacatcaacgacatcaagaaggccagactgctgctgaagagcgtgagagagaccaacccccaccacccccccgcctggatcgccagcgccagactggaggaggtgaccggcaagctgcaggtggccagaaacctgatcatgaagggcaccgagatgtgccccaagagcgaggacgtgtggctggaggccgccagactgcagcccggcgacaccgccaaggccgtggtggcccaggccgtgagacacctgccccagagcgtgagaatctacatcagagccgccgagctggagaccgacatcagagccaagaagagagtgctgagaaaggccctggagcacgtgcccaacagcgtgagactgtggaaggccgccgtggagctggaggagcccgaggacgccagaatcatgctgagcagagccgtggagtgctgccccaccagcgtggagctgtggctggccctggccagactggagacctacgagaacgccagaaaggtgctgaacaaggccagagagaacatccccaccgacagacacatctggatcaccgccgccaagctggaggaggccaacggcaacacccagatggtggagaagatcatcgacagagccatcaccagcctgagagccaacggcgtggagatcaacagagagcagtggatccaggacgccgaggagtgcgacagagccggcagcgtggccacctgccaggccgtgatgagagccgtgatcggcatcggcatcgaggaggaggacagaaagcacacctggatggaggacgccgacagctgcgtggcccacaacgccctggagtgcgccagagccatctacgcctacgccctgcaggtgttccccagcaagaagagcgtgtggctgagagccgcctacttcgagaagaaccacggcaccagagagagcctggaggccctgctgcagagagccgtggcccactgccccaaggccgaggtgctgtggctgatgggcgccaagagcaagtggctggccggcgacgtgcccgccgccagaagcatcctggccctggccttccaggccaaccccaacagcgaggagatctggctggccgccgtgaagctggagagcgagaacgacgagtacgagagagccagaagactgctggccaaggccagaagcagcgcccccaccgccagagtgttcatgaagagcgtgaagctggagtgggtgcaggacaacatcagagccgcccaggacctgtgcgaggaggccctgagacactacgaggacttccccaagctgtggatgatgaagggccagatcgaggagcagaaggagatgatggagaaggccagagaggcctacaaccagggcctgaagaagtgcccccacagcacccccctgtggctgctgctgagcagactggaggagaagatcggccagctgaccagagccagagccatcctggagaagagcagactgaagaaccccaagaaccccggcctgtggctggagagcgtgagactggagtacagagccggcctgaagaacatcgccaacaccctgatggccaaggccctgcaggagtgccccaacagcggcatcctgtggagcgaggccatcttcctggaggccagaccccagagaagaaccaagagcgtggacgccctgaagaagtgcgagcacgacccccacgtgctgctggccgtggccaagctgttctggagccagagaaagatcaccaaggccagagagtggttccacagaaccgtgaagatcgacagcgacctgggcgacgcctgggccttcttctacaagttcgagctgcagcacggcaccgaggagcagcaggaggaggtgagaaagagatgcgagagcgccgagcccagacacggcgagctgtggtgcgccgtgagcaaggacatcgccaactggcagaagaagatcggcgacatcctgagactggtggccggcagaatcaagaacaccttctag

SEQ ID NO: 95814 - DNA, 2706 bp, synthetic construct
  misc_feature 1..2706: note = Description of Artificial Sequence: Synthetic coding sequence
  source 1..2706: mol_type = other DNA
atgaacaagaagaagaagcccttcctgggcatgcccgcccccctgggctacgtgcccggcctgggcagaggcgccaccggcttcaccaccagaagcgacatcggccccgccagagacgccaacgaccccgtggacgacagacacgccccccccggcaagagaaccgtgggcgaccagatgaagaagaaccaggccgccgacgacgacgacgaggacctgaacgacaccaactacgacgagttcaacggctacgccggcagcctgttcagcagcggcccctacgagaaggacgacgaggaggccgacgccatctacgccgccctggacaagagaatggacgagagaagaaaggagagaagagagcagagagagaaggaggagatcgagaagtacagaatggagagacccaagatccagcagcagttcagcgacctgaagagaaagctggccgaggtgaccgaggaggagtggctgagcatccccgaggtgggcgacgccagaaacaagagacagagaaaccccagatacgagaagctgacccccgtgcccgacagcttcttcgccaagcacctgcagaccggcgagaaccacaccagcgtggaccccagacagacccagttcggcggcctgaacaccccctaccccggcggcctgaacaccccctaccccggcggcatgacccccggcctgatgacccccggcaccggcgagctggacatgagaaagatcggccaggccagaaacaccctgatggacatgagactgagccaggtgagcgacagcgtgagcggccagaccgtggtggaccccaagggctacctgaccgacctgaacagcatgatccccacccacggcggcgacatcaacgacatcaagaaggccagactgctgctgaagagcgtgagagagaccaacccccaccacccccccgcctggatcgccagcgccagactggaggaggtgaccggcaagctgcaggtggccagaaacctgatcatgaagggcaccgagatgtgccccaagagcgaggacgtgtggctggaggccgccagactgcagcccggcgacaccgccaaggccgtggtggcccaggccgtgagacacctgccccagagcgtgagaatctacatcagagccgccgagctggagaccgacatcagagccaagaagagagtgctgagaaaggccctggagcacgtgcccaacagcgtgagactgtggaaggccgccgtggagctggaggagcccgaggacgccagaatcatgctgagcagagccgtggagtgctgccccaccagcgtggagctgtggctggccctggccagactggagacctacgagaacgccagaaaggtgctgaacaaggccagagagaacatccccaccgacagacacatctggatcaccgccgccaagctggaggaggccaacggcaacacccagatggtggagaagatcatcgacagagccatcaccagcctgagagccaacggcgtggagatcaacagagagcagtggatccaggacgccgaggagtgcgacagagccggcagcgtggccacctgccaggccgtgatgagagccgtgatcggcatcggcatcgaggaggaggacagaaagcacacctggatggaggacgccgacagctgcgtggcccacaacgccctggagtgcgccagagccatctacgcctacgccctgcaggtgttccccagcaagaagagcgtgtggctgagagccgcctacttcgagaagaaccacggcaccagagagagcctggaggccctgctgcagagagccgtggcccactgccccaaggccgaggtgctgtggctgatgggcgccaagagcaagtggctggccggcgacgtgcccgccgccagaagcatcctggccctggccttccaggtgttcatgaagagcgtgaagctggagtgggtgcaggacaacatcagagccgcccaggacctgtgcgaggaggccctgagacactacgaggacttccccaagctgtggatgatgaagggccagatcgaggagcagaaggagatgatggagaaggccagagaggcctacaaccagggcctgaagaagtgcccccacagcacccccctgtggctgctgctgagcagactggaggagaagatcggccagctgaccagagccagagccatcctggagaagagcagactgaagaaccccaagaaccccggcctgtggctggagagcgtgagactggagtacagagccggcctgaagaacatcgccaacaccctgatggccaaggccctgcaggagtgccccaacagcggcatcctgtggagcgaggccatcttcctggaggccagaccccagagaagaaccaagagcgtggacgccctgaagaagtgcgagcacgacccccacgtgctgctggccgtggccaagctgttctggagccagagaaagatcaccaaggccagagagtggttccacagaaccgtgaagatcgacagcgacctgggcgacgcctgggccttcttctacaagttcgagctgcagcacggcaccgaggagcagcaggaggaggtgagaaagagatgcgagagcgccgagcccagacacggcgagctgtggtgcgccgtgagcaaggacatcgccaactggcagaagaagatcggcgacatcctgagactggtggccggcagaatcaagaacaccttctag

SEQ ID NO: 95815 - DNA, 7008 bp, synthetic construct
  misc_feature 1..7008: note = Description of Artificial Sequence: Synthetic coding sequence
  source 1..7008: mol_type = other DNA
atggccggcgtgttcccctacagaggccccggcaaccccgtgcccggccccctggcccccctgcccgactacatgagcgaggagaagctgcaggagaaggccagaaagtggcagcagctgcaggccaagagatacgccgagaagagaaagttcggcttcgtggacgcccagaaggaggacatgccccccgagcacgtgagaaagatcatcagagaccacggcgacatgaccaacagaaagttcagacacgacaagagagtgtacctgggcgccctgaagtacatgccccacgccgtgctgaagctgctggagaacatgcccatgccctgggagcagatcagagacgtgcccgtgctgtaccacatcaccggcgccatcagcttcgtgaacgagatcccctgggtgatcgagcccgtgtacatcagccagtggggcagcatgtggatcatgatgagaagagagaagagagacagaagacacttcaagagaatgagattcccccccttcgacgacgaggagccccccctggactacgccgacaacatcctggacgtggagcccctggaggccatccagctggagctggaccccgaggaggacgcccccgtgctggactggttctacgaccaccagcccctgagagacagcagaaagtacgtgaacggcagcacctaccagagatggcagttcaccctgcccatgatgagcaccctgtacagactggccaaccagctgctgaccgacctggtggacgacaactacttctacctgttcgacctgaaggccttcttcaccagcaaggccctgaacatggccatccccggcggccccaagttcgagcccctggtgagagacatcaacctgcaggacgaggactggaacgagttcaacgacatcaacaagatcatcatcagacagcccatcagaaccgagtacaagatcgccttcccctacctgtacaacaacctgccccaccacgtgcacctgacctggtaccacacccccaacgtggtgttcatcaagaccgaggaccccgacctgcccgccttctacttcgaccccctgatcaaccccatcagccacagacacagcgtgaagagccaggagcccctgcccgacgacgacgaggagttcgagctgcccgagttcgtggagcccttcctgaaggacacccccctgtacaccgacaacaccgccaacggcatcgccctgctgtgggcccccagacccttcaacctgagaagcggcagaaccagaagagccctggacatccccctggtgaagaactggtacagagagcactgccccgccggccagcccgtgaaggtgagagtgagctaccagaagctgctgaagtactacgtgctgaacgccctgaagcacagaccccccaaggcccagaagaagagatacctgttcagaagcttcaaggccaccaagttcttccagagcaccaagctggactgggtggaggtgggcctgcaggtgtgcagacagggctacaacatgctgaacctgctgatccacagaaagaacctgaactacctgcacctggactacaacttcaacctgaagcccgtgaagaccctgaccaccaaggagagaaagaagagcagattcggcaacgccttccacctgtgcagagaggtgctgagactgaccaagctggtggtggacagccacgtgcagtacagactgggcaacgtggacgccttccagctggccgacggcctgcagtacatcttcgcccacgtgggccagctgaccggcatgtacagatacaagtacaagctgatgagacagatcagaatgtgcaaggacctgaagcacctgatctactacagattcaacaccggccccgtgggcaagggccccggctgcggcttctgggccgccggctggagagtgtggctgttcttcatgagaggcatcacccccctgctggagagatggctgggcaacctgctggccagacagttcgagggcagacacagcaagggcgtggccaagaccgtgaccaagcagagagtggagagccacttcgacctggagctgagagccgccgtgatgcacgacatcctggacatgatgcccgagggcatcaagcagaacaaggccagaaccatcctgcagcacctgagcgaggcctggagatgctggaaggccaacatcccctggaaggtgcccggcctgcccacccccatcgagaacatgatcctgagatacgtgaaggccaaggccgactggtggaccaacaccgcccactacaacagagagagaatcagaagaggcgccaccgtggacaagaccgtgtgcaagaagaacctgggcagactgaccagactgtacctgaaggccgagcaggagagacagcacaactacctgaaggacggcccctacatcaccgccgaggaggccgtggccgtgtacaccaccaccgtgcactggctggagagcagaagattcagccccatccccttcccccccctgagctacaagcacgacaccaagctgctgatcctggccctggagagactgaaggaggcctacagcgtgaagagcagactgaaccagagccagagagaggagctgggcctgatcgagcaggcctacgacaacccccacgaggccctgagcagaatcaagagacacctgctgacccagagagccttcaaggaggtgggcatcgagttcatggacctgtacagccacctggtgcccgtgtacgacgtggagcccctggagaagatcaccgacgcctacctggaccagtacctgtggtacgaggccgacaagagaagactgttccccccctggatcaagcccgccgacaccgagcccccccccctgctggtgtacaagtggtgccagggcatcaacaacctgcaggacgtgtgggagaccagcgagggcgagtgcaacgtgatgctggagagcagattcgagaagatgtacgagaagatcgacctgaccctgctgaacagactgctgagactgatcgtggaccacaacatcgccgactacatgaccgccaagaacaacgtggtgatcaactacaaggacatgaaccacaccaacagctacggcatcatcagaggcctgcagttcgccagcttcatcgtgcagtactacggcctggtgatggacctgctggtgctgggcctgcacagagccagcgagatggccggccccccccagatgcccaacgacttcctgagcttccaggacatcgccaccgaggccgcccaccccatcagactgttctgcagatacatcgacagaatccacatcttcttcagattcaccgccgacgaggccagagacctgatccagagatacctgaccgagcaccccgaccccaacaacgagaacatcgtgggctacaacaacaagaagtgctggcccagagacgccagaatgagactgatgaagcacgacgtgaacctgggcagagccgtgttctgggacatcaagaacagactgcccagaagcgtgaccaccgtgcagtgggagaacagcttcgtgagcgtgtacagcaaggacaaccccaacctgctgttcaacatgtgcggcttcgagtgcagaatcctgcccaagtgcagaaccagctacgaggagttcacccacaaggacggcgtgtggaacctgcagaacgaggtgaccaaggagagaaccgcccagtgcttcctgagagtggacgacgagagcatgcagagattccacaacagagtgagacagatcctgatggccagcggcagcaccaccttcaccaagatcgtgaacaagtggaacaccgccctgatcggcctgatgacctacttcagagaggccgtggtgaacacccaggagctgctggacctgctggtgaagtgcgagaacaagatccagaccagaatcaagatcggcctgaacagcaagatgcccagcagattcccccccgtggtgttctacacccccaaggagctgggcggcctgggcatgctgagcatgggccacgtgctgatcccccagagcgacctgagatggagcaagcagaccgacgtgggcatcacccacttcagaagcggcatgagccacgaggaggaccagctgatccccaacctgtacagatacatccagccctgggagagcgagttcatcgacagccagagagtgtgggccgagtacgccctgaagagacaggaggccatcgcccagaacagaagactgaccctggaggacctggaggacagctgggacagaggcatccccagaatcaacaccctgttccagaaggacagacacaccctggcctacgacaagggctggagagtgagaaccgacttcaagcagtaccaggtgctgaagcagaaccccttctggtggacccaccagagacacgacggcaagctgtggaacctgaacaactacagaaccgacatgatccaggccctgggcggcgtggagggcatcctggagcacaccctgttcaagggcacctacttccccacctgggagggcctgttctgggagaaggccagcggcttcgaggagagcatgaagtggaagaagctgaccaacgcccagagaagcggcctgaaccagatccccaacagaagattcaccctgtggtggagccccaccatcaacagagccaacgtgtacgtgggcttccaggtgcagctggacctgaccggcatcttcatgcacggcaagatccccaccctgaagatcagcctgatccagatcttcagagcccacctgtggcagaagatccacgagagcatcgtgatggacctgtgccaggtgttcgaccaggagctggacgccctggagatcgagaccgtgcagaaggagaccatccaccccagaaagagctacaagatgaacagcagctgcgccgacatcctgctgttcgccagctacaagtggaacgtgagcagacccagcctgctggccgacagcaaggacgtgatggacagcaccaccacccagaagtactggatcgacatccagctgagatggggcgactacgacagccacgacatcgagagatacgccagagccaagttcctggactacaccaccgacaacatgagcatctaccccagccccaccggcgtgctgatcgccatcgacctggcctacaacctgcacagcgcctacggcaactggttccccggcagcaagcccctgatccagcaggccatggccaagatcatgaaggccaaccccgccctgtacgtgctgagagagagaatcagaaagggcctgcagctgtacagcagcgagcccaccgagccctacctgagcagccagaactacggcgagctgttcagcaaccagatcatctggttcgtggacgacaccaacgtgtacagagtgaccatccacaagaccttcgagggcaacctgaccaccaagcccatcaacggcgccatcttcatcttcaaccccagaaccggccagctgttcctgaagatcatccacaccagcgtgtgggccggccagaagagactgggccagctggccaagtggaagaccgccgaggaggtggccgccctgatcagaagcctgcccgtggaggagcagcccaagcagatcatcgtgaccagaaagggcatgctggaccccctggaggtgcacctgctggacttccccaacatcgtgatcaagggcagcgagctgcagctgcccttccaggcctgcctgaaggtggagaagttcggcgacctgatcctgaaggccaccgagccccagatggtgctgttcaacctgtacgacgactggctgaagaccatcagcagctacaccgccttcagcagactgatcctgatcctgagagccctgcacgtgaacaacgacagagccaaggtgatcctgaagcccgacaagaccaccatcaccgagccccaccacatctggcccaccctgaccgacgaggagtggatcaaggtggaggtgcagctgaaggacctgatcctggccgactacggcaagaagaacaacgtgaacgtggccagcctgacccagagcgagatcagagacatcatcctgggcatggagatcagcgcccccagccagcagagacagcagatcgccgagatcgagaagcagaccaaggagcagagccagctgaccgccacccagaccagaaccgtgaacaagcacggcgacgagatcatcaccagcaccaccagcaactacgagacccagaccttcagcagcaagaccgagtggagagtgagagccatcagcgccgccaacctgcacctgagaaccaaccacatctacgtgagcagcgacgacatcaaggagaccggctacacctacatcctgcccaagaacgtgctgaagaagttcatctgcatcagcgacctgagagcccagatcgccggctacctgtacggcgtgagcccccccgacaacccccaggtgaaggagatcagatgcatcgtgatggtgccccagtggggcacccaccagaccgtgcacctgcccggccagctgccccagcacgagtacctgaaggagatggagcccctgggctggatccacacccagcccaacgagagcccccagctgagcccccaggacgtgaccacccacgccaagatcatggccgacaaccccagctgggacggcgagaagaccatcatcatcacctgcagcttcacccccggcagctgcaccctgaccgcctacaagctgacccccagcggctacgagtggggcagacagaacaccgacaagggcaacaaccccaagggctacctgcccagccactacgagagagtgcagatgctgctgagcgacagattcctgggcttcttcatggtgcccgcccagagcagctggaactacaacttcatgggcgtgagacacgaccccaacatgaagtacgagctgcagctggccaaccccaaggagttctaccacgaggtgcacagacccagccacttcctgaacttcgccctgctgcaggagggcgaggtgtacagcgccgacagagaggacctgtacgcctag

SEQ ID NO: 95816 - DNA, 1392 bp, synthetic construct
  misc_feature 1..1392: note = Description of Artificial Sequence: Synthetic coding sequence
  source 1..1392: mol_type = other DNA
atgatccaggccctgggcggcgtggagggcatcctggagcacaccctgttcaagggcacctacttccccacctgggagggcctgttctgggagaaggccagcggcttcgaggagagcatgaagtggaagaagctgaccaacgcccagagaagcggcctgaaccagatccccaacagaagattcaccctgtggtggagccccaccatcaacagagccaacgtgtacgtgggcttccaggtgcagctggacctgaccggcatcttcatgcacggcaagatccccaccctgaagatcagcctgatccagatcttcagagcccacctgtggcagaagatccacgagagcatcgtgatggacctgtgccaggtgttcgaccaggagctggacgccctggagatcgagaccgtgcagaaggagaccatccaccccagaaagagctacaagatgaacagcagctgcgccgacatcctgctgttcgccagctacaagtggaacgtgagcagacccagcctgctggccgacagcaaggacgtgatggacagcaccaccacccagaagtactggatcgacatccagctgagatggggcgactacgacagccacgacatcgagagatacgccagagccaagttcctggactacaccaccgacaacatgagcatctaccccagccccaccggcgtgctgatcgccatcgacctggcctacaacctgcacagctacagcgaggtgggcagcctgcagcaggccagccacaccaccggcgccaagatcatgaaggccaaccccgccctgtacgtgctgagagagagaatcagaaagggcctgcagctgtacagcagcgagcccaccgagccctacctgagcagccagaactacggcgagctgttcagcaaccagatcatctggttcgtggacgacaccaacgtgtacagagtgaccatccacaagaccttcgagggcaacctgaccaccaagcccatcaacggcgccatcttcatcttcaaccccagaaccggccagctgttcctgaagatcatccacaccagcgtgtgggccggccagaagagactgggccagctggccaagtggaagaccgccgaggaggtggccgccctgatcagaagcctgcccgtggaggagcagcccaagcagatcatcgtgaccagaaagggcatgctggaccccctggaggtgcacctgctggacttccccaacatcgtgatcaagggcagcgagctgcagctgcccttccaggcctgcctgaaggtggagaagttcggcgacctgatcctgaaggccaccgagccccagatggtgctgttcaacctgtacgacgactggctgaagaccatcagcagctacaccgccttcagcagactgatcctgtag

SEQ ID NO: 95817 - DNA, 2727 bp, synthetic construct
  misc_feature 1..2727: note = Description of Artificial Sequence: Synthetic coding sequence
  source 1..2727: mol_type = other DNA
atggccgacggcggcggccccaaggacgcccccagcctgagaagcagccccggccccgcccccagagtgcccagagccgtgggccccagcggcggcggcggcgagacccccagaaccgccgccctggccctgagattcgacaagcccatcaagcaggccttctacaacaccggcgccgtgctgttcgtgtgcctgtgctgcggcgccgccgtgctggtgtacttcatcctggaggccttcctgagacccctgctgtgggccgtgctgtgcggcaccttcctgcaccccttcaagagcagcctgaccagactgggcagacactggctgcagagactgcacagagcccacacccccatcgtgctggccgccctgctgctgcccctgtgcttcgtggactacggcgtggaggccctgggcgagcaggccctgagaagaagaagactgctgctgctgctgggcgccggcggccccctgctgtacggcctgtactgcctgggcagctacctgggcgtgcaggtgctgctggtgcacgccgccaccctgatctgcagaggcctggactacttcagcagcctgtggatctggaccctggtggtgggctacgtgctgaccgtgagcttcaagtggaacgccagcaccgagagatacctgagagccgtgagcatccccgtgtggatcatcctgctgttccacctggccagcctggccggcagctggagaatccccgtgttcctggtgatcgtgttcctgatgagcgtgggcaccctgtacgagaagcagaacggcaaggagagcagcggcgccgagctgcccggccaggtgatcagcatggccgccagcaccctggccaacctggccatcagcatcaccggctacgagagcagcagcgaggaccagcccagcacccagcccgccgaggccgtggacagaggcgagagcgcccccaccctgagcaccagccccagccccagcagccccagccccaccagccccagccccaccctgggcagaagaagacccgagatcggcaccttcctgagaaagaagaagaccagcgacatctacttcgtgagcctggtgtgggccatcgtggtgatgcagatctggctgaacctgtggatcgtgcagctgctgcccgtgcccatcgccgtgtggatcctgaagaagctggtgatccacttcggcgtggtggacttcctggagaagagataccacgtgtggtggggcatcatcgagagcttcctgaaggagagacagggcgccctggccccctggcccatcgtgggcctgggcaagttcctgctgaaggtggacagcaagctgtggcactggctgaacaagaagatgatcatctggctggagaagatgctggacaagatcatcagcatcttcatcatcttcctgctggtgatcggcaccctgctgctggccctgctgctgaccgccaaggtgcaccaggagagcgtgcacatgatcgaggtgaccagcaacctgatcaacgagaccctggccaaccaccccgagtgggccaactggctgcccgaggcccaggtggtgcagagagccctgaacagcgccgccaacaacgtgtaccagtacggcagagagtggatcacccacaagctgcacaagatcctgggcgacaaggtgaacaacaccgccgtgatcgagaagcaggtgctggagctgtgggacagactgtaccacagctggttcgtgaagaacgtgacccacagcggcagacacaagggccagaagctgcacgtgagcagacagaacagctggctgggcgacatcctggactggcaggacatcgtgagcttcgtgcacgagaacatcgagaccttcctgagcatcctggagagcctgtggatcgtgatgagcagaaacgtgagcctgctgttcaccaccgtgaccaccctgctgaccatcctgttctacagcggcaccgccctgctgaacttcgtgctgagcctgatcatcttcctgaccaccctgttctacctgctgagcagcagcgacgagtactacaagcccgtgaagtgggtgatcagcctgacccccctgagccagcccggccccagcagcaacatcatcggccagagcgtggaggaggccatcagaggcgtgttcgacgccagcctgaagatggccggcttctacggcctgtacacctggctgacccacaccatgttcggcatcaacatcgtgttcatccccagcgccctggccgccatcctgggcgccgtgcccttcctgggcacctactgggccgccgtgcccgccgtgctggacctgtggctgacccagggcctgggctgcaaggccatcctgctgctgatcttccacctgctgcccacctacttcgtggacaccgccatctacagcgacatcagcggcggcggccacccctacctgaccggcctggccgtggccggcggcgcctactacctgggcctggagggcgccatcatcggccccatcctgctgtgcatcctggtggtggccagcaacatctacagcgccatgctggtgagccccaccaacagcgtgcccacccccaaccagaccccctggcccgcccagccccagagaaccttcagagacatcagcagaagcgagatcttcagcgtggacgtggtgagcagcgccgtgatcttcagaaagttcaagttcgacagcgagttcagcagcgccgtggccctgtgccccagcagctgcgcctag

SEQ ID NO: 95818 - DNA, 1062 bp, synthetic construct
  misc_feature 1..1062: note = Description of Artificial Sequence: Synthetic coding sequence
  source 1..1062: mol_type = other DNA
atgctgaagagctgcagcagagccagcttcagccccagcgtgagaaagccccccctgatcctgagaagactgctgagcgaggacgtgggcatggacatccccttcgaggagggcgtgctgagccccagcgccgccgacatgagacccgagccccccaacagcctggacctgaacgacacccaccccagaagaatcaagctgaccgcccccaacatcaacctgagcctggaccagagcgagggcagcatcctgagcgacgacaacctggacagccccgacgagatcgacatcaacgtggacgagctggacacccccgacgaggccgacagcttcgagtacaccggccacgaggaccccaccgccaacaaggacagcggccaggagagcgagagcatccccgagtacaccgccgaggaggagagagaggacaacagactgtggagaaccgtggtgatcggcgagcaggagcagagaatcgacatgaaggtgatcgagccctacagaagagtgatcagccacggcggctactacggcgacggcctgaacgccatcatcgtgttcgccgcctgcttcctgcccgacagcagcagagccgactaccactacgtgatggagaacctgttcctgtacgtgatcagcaccctggagctgatggtggccgaggactacatgatcgtgtacctgaacggcgccacccccagaagaagaatgcccggcctgggctggatgaagaagtgctaccagatgatcgacagaagactgagaaagaacctgaagagcttcatcatcgtgcaccccagctggttcatcagaaccatcctggccgtgaccagacccttcatcagcagcaagttcagcagcaagatcaagtacgtgaacagcctgagcgagctgagcggcctgatccccatggactgcatccacatccccgagagcatcatcaagctggacgaggagctgagagaggccagcgaggccgccaagaccagctgcctgtacaacgaccccgagatgagcagcatggagaaggacatcgacctgaagctgaaggagaagccctag

SEQ ID NO: 95819 - DNA, 9267 bp, synthetic construct
  misc_feature 1..9267: note = Description of Artificial Sequence: Synthetic coding sequence
  source 1..9267: mol_type = other DNA
atggaggagttcctgcagagagccaagagcaagctgaacagaagcaagagactggagaaggtgcacgtggtgatcggccccaagagctgcgacctggacagcctgatcagcaccttcacctacgcctacttcctggacaaggtgagcccccccggcgtgctgtgcctgcccgtgctgaacatccccagaaccgagttcaactacttcaccgagaccagattcatcctggaggagctgaacatcagcgagagcttccacatcttcagagacgagatcaacctgcaccagctgaacgacgagggcaagctgagcatcaccctggtgggcagcagcgtgctggccagcgaggacaagaccctggagagcgccgtggtgaaggtgatcaaccccgtggagcagagcgacgccaacgtggagttcagagagagcagcagcagcctggtgctgaaggagatcctgcaggaggcccccgagctgatcaccgagcagctggcccacagactgagaggcagcatcctgttcaagtggatgaccatggagagcgagaagatcagcgagaagcaggaggagatcctgagcatcctggaggagaagttccccaacctgccccccagagaggacatcatcaacgtgctgcaggagacccagttcagcgcccagggcctgagcatcgagcagaccatgctgaaggacctgaaggagctgagcgacggcgagatcaaggtggccatcagcaccgtgagcatgaacctggagaactgcctgttccacagcaacatcaccagcgacctgaaggccttcaccgacaagttcggcttcgacgtgctgatcctgttcagcagctacctgagcgaggagcagcagcccagaagacagatcgccgtgtacagcgagaacatggagctgtgcagccagatctgctgcgagctggaggagtgccagaacccctgcctggagctggagcccttcgactgcggctgcgacgagatcctggtgtaccagcaggaggaccccagcgtgacctgcgaccaggtggtgctggtggtgaaggaggtgatcaacagaagatgccccgagatggtgagcaacagcagaaccagcagcaccgaggccgtggccggcagcgcccccctgagccagggcagcagcggcatcatggagctgtacggcagcgacatcgagccccagcccagcagcgtgaacttcatcgagaacccccccgacctgaacgacagcaaccaggcccaggtggacgccaacgtggacctggtgagccccgacagcggcctggccaccatcagaagcagcagaagcagcaaggagagcagcgtgttcctgagcgacgacagccccgtgggcgagggcgccggcccccaccacaccctgctgcccggcctggacagctacagccccatccccgagggcgccgtggccgaggagcacgcctggagcggcgagcacggcgagcacttcgacctgttcaacttcgaccccgcccccatggccagcggccagagccagcagagcagccacagcgccgactacagccccgccgacgacttcttccccaacagcgacctgagcgagggccagctgcccgccggccccgagggcctggacggcatgggcaccaacatgagcaactacagcagcagcagcctgctgagcggcgccggcaaggacagcctggtggagcacgacgaggagttcgtgcagagacaggacagccccagagacaacagcgagagaaacctgagcctgaccgacttcgtgggcgacgagagccccagccccgagagactgaagaacaccggcaagagaatcccccccacccccatgaacagcctggtggagagcagccccagcaccgaggagcccgccagcctgtacaccgaggacatgacccagaaggccaccgacaccggccacatgggccccccccagacccacgccagatgcagcagctggtggggcggcctggagatcgacagcaagaacatcgccgacgcctggagcagcagcgagcaggagagcgtgttccagagccccgagagctggaaggagcacaagcccagcagcatcgacagaagagccagcgacagcgtgttccagcccaagagcctggagttcaccaagagcggcccctgggagagcgagttcggccagcccgagctgggcagcaacgacatccaggacaagaacgaggagagcctgcccttccagaacctgcccatggagaagagccccctgcccaacaccagcccccagggcaccaaccacctgatcgaggacttcgccagcctgtggcacagcggcagaagccccaccgccatgcccgagccctggggcaaccccaccgacgacggcgagcccgccgccgtggcccccttccccgcctggagcgccttcggcaaggaggaccacgacgaggccctgaagaacacctggaacctgcaccccaccagcagcaagacccccagcgtgagagaccccaacgagtgggccatggccaagagcggcttcgccttcagcagcagcgagctgctggacaacagccccagcgagatcaacaacgaggccgcccccgagatctggggcaagaagaacaacgacagcagagaccacatcttcgcccccggcaaccccagcagcgacctggaccacacctggaccaacagcaagccccccaaggaggaccagaacggcctggtggaccccaagaccagaggcaaggtgtacgagaaggtggacagctggaacctgttcgaggagaacatgaagaagggcggcagcgacgtgctggtgccctgggaggacagcttcctgagctacaagtgcagcgactacagcgccagcaacctgggcgaggacagcgtgcccagccccctggacaccaactacagcaccagcgacagctacaccagccccaccttcgccggcgacgagaaggagaccgagcacaagcccttcgccaaggaggagggcttcgagagcaaggacggcaacagcaccgccgaggagaccgacatccccccccagagcctgcagcagagcagcagaaacagaatcagcagcggccccggcaacctggacatgtgggccagcccccacaccgacaacagcagcgagatcaacaccacccacaacctggacgagaacgagctgaagaccgagcacaccgacggcaagaacatcagcatggaggacgacgtgggcgagagcagccagagcagctacgacgaccccagcatgatgcagctgtacaacgagaccaacagacagctgaccctgctgcacagcagcaccaacagcagacagaccgcccccgacagcctggacctgtggaacagagtgatcctggaggacacccagagcaccgccaccatcagcgacatggacaacgacctggactgggacgactgcagcggcggcgccgccatccccagcgacggccagaccgagggctacatggccgagggcagcgagcccgagaccagattcaccgtgagacagctggagccctggggcctggagtaccaggaggccaaccaggtggactgggagctgcccgccagcgacgagcacaccaaggacagcgcccccagcgagcaccacaccctgaacgagaagagcggccagctgatcgccaacagcatctgggacagcgtgatgagagacaaggacatgagcagcttcatgctgcccggcagcagccacatcaccgacagcgagcagagagagctgccccccgagatccccagccacagcgccaacgtgaaggacacccacagccccgacgcccccgccgccagcggcaccagcgagagcgaggccctgatcagccacctggacaagcaggacaccgagagagagaccctgcagagcgacgccgccagcctggccaccagactggagaaccccggctacttcccccaccccgacccctggaagggccacggcgacggccagagcgagagcgagaaggaggcccagggcgccaccgacagaggccacctggacgaggaggaggtgatcgccagcggcgtggagaacgccagcggcatcagcgagaagggccagagcgaccaggagctgagcagcctggtggccagcgagcaccaggagatctgcatcaagagcggcaagatcagcagcctggccgtgaccttcagcccccagaccgaggagcccgaggaggtgctggagtacgaggagggcagctacaacctggacagcagagacgtgcagaccggcatgagcgccgacaacctgcagcccaaggacacccacgagaagcacctgatgagccagagaaacagcggcgagaccaccgagaccagcgacggcatgaacttcaccaagtacgtgagcgtgcccgagaaggacctggagaagaccgaggagtgcaacttcctggagcccgagaacgtgggcggcggccccccccacagagtgcccagaagcctggacttcggcgacgtgcccatcgacagcgacgtgcacgtgagcagcacctgcagcgagatcaccaagaacctggacgtgaagggcagcgagaacagcctgcccggcgccggcagcagcggcaacttcgacagagacaccatcagcagcgagtacacccacagcagcgccagcagccccgagctgaacgacagcagcgtggccctgagcagctggggccagcagcccagcagcggctaccaggaggagaaccagggcaactggagcgagcagaaccaccaggagagcgagctgatcaccaccgacggccaggtggagatcgtgaccaaggtgaaggacctggagaagaacagaatcaacgagttcgagaagagcttcgacagaaagacccccaccttcctggagatctggaacgacagcgtggacggcgacagcttcagcagcctgagcagccccgagaccggcaagtacagcgagcacagcggcacccaccaggagagcaacctgatcgccagctaccaggagaagaacgagcacgacatcagcgccaccgtgcagcccgaggacgccagagtgatcagcaccagcagcggcagcgacgacgacagcgtgggcggcgaggagagcatcgaggaggagatccaggtggccaactgccacgtggccgaggacgagagcagagcctgggacagcctgaacgagagcaacaagttcctggtgaccgccgaccccaagagcgagaacatctacgactacctggacagcagcgagcccgccgagaacgagaacaagagcaaccccttctgcgacaaccagcagagcagccccgacccctggaccttcagccccctgaccgagaccgagatgcagatcaccgccgtggagaaggagaagagaagcagccccgagaccggcaccaccggcgacgtggcctggcagatcagccccaaggccagcttccccaagaacgaggacaacagccagctggagatgctgggcttcagcgccgacagcaccgagtggtggaaggccagcccccaggagggcagactgatcgagagccccttcgagagagagctgagcgacagcagcggcgtgctggagatcaacagcagcgtgcaccagaacgccagcccctggggcgtgcccgtgcagggcgacatcgagcccgtggagacccactacaccaaccccttcagcgacaaccaccagagccccttcctggagggcaacggcaagaacagccacgagcagctgtggaacatccagcccagacagcccgaccccgacgccgacaagttcagccagctggtgaagctggaccagatcaaggagaaggacagcagagagcagaccttcgtgagcgccgccggcgacgagctgacccccgagacccccacccaggagcagtgccaggacaccatgctgcccgtgtgcgaccaccccgacaccgccttcacccacgccgaggagaacagctgcgtgaccagcaacgtgagcaccaacgagggccaggagaccaaccagtgggagcaggagaagagctacctgggcgagatgaccaacagcagcatcgccaccgagaacttccccgccgtgagcagccccacccagctgatcatgaagcccggcagcgagtgggacggcagcacccccagcgaggacagcagaggcaccttcgtgcccgacatcctgcacggcaacttccaggagggcggccagctggccagcgccgcccccgacctgtggatcgacgccaagaagcccttcagcctgaaggccgacggcgagaaccccgacatcctgacccactgcgagcacgacagcaacagccaggccagcgacagccccgacatctgccacgacagcgaggccaagcaggagaccgagaagcacctgagcgcctgcatgggccccgaggtggagagcagcgagctgtgcctgaccgagcccgagatcgacgaggagcccatctacgagcccggcagagagttcgtgcccagcaacgccgagctggacagcgagaacgccaccgtgctgccccccatcggctaccaggccgacatcaagggcagcagccagcccgccagccacaagggcagccccgagcccagcgagatcaacggcgacaacagcaccggcctgcaggtgagcgagaagggcgccagccccgacatggcccccatcctggagcccgtggacagaagaatccccagaatcgagaacgtggccaccagcatcttcgtgacccaccaggagcccacccccgagggcgacggcagctggatcagcgacagcttcagccccgagagccagcccggcgccagagccctgttcgacggcgacccccacctgagcaccgagaaccccgccctggtgcccgacgccctgctggccagcgacacctgcctggacatcagcgaggccgccttcgaccacagcttcagcgacgccagcggcctgaacaccagcaccggcaccatcgacgacatgagcaagctgaccctgagcgagggccaccccgagacccccgtggacggcgacctgggcaagcaggacatctgcagcagcgaggccagctggggcgacttcgagtacgacgtgatgggccagaacatcgacgaggacctgctgagagagcccgagcacttcctgtacggcggcgacccccccctggaggaggacagcctgaagcagagcctggccccctacaccccccccttcgacctgagctacctgaccgagcccgcccagagcgccgagaccatcgaggaggccggcagccccgaggacgagagcctgggctgcagagccgccgagatcgtgctgagcgccctgcccgacagaagaagcgagggcaaccaggccgagaccaagaacagactgcccggcagccagctggccgtgctgcacatcagagaggaccccgagagcgtgtacctgcccgtgggcgccggcagcaacatcctgagccccagcaacgtggactgggaggtggagaccgacaacagcgacctgcccgccggcggcgacatcggcccccccaacggcgccagcaaggagatcagcgagctggaggaggagaagaccatccccaccaaggagcccgagcagatcaagagcgagtacaaggaggagagatgcaccgagaagaacgaggacagacacgccctgcacatggactacatcctggtgaacagagaggagaacagccacagcaagcccgagacctgcgaggagagagagagcatcgccgagctggagctgtacgtgggcagcaaggagaccggcctgcagggcacccagctggccagcttccccgacacctgccagcccgccagcctgaacgagagaaagggcctgagcgccgagaagatgagcagcaagagcgacaccagaagcagcttcgagagccccgcccaggaccagagctggatgttcctgggccacagcgaggtgggcgaccccagcctggacgccagagacagcggccccggctggagcggcaagaccgtggagcccttcagcgagctgggcctgggcgagggcccccagctgcagatcctggaggagatgaagcccctggagagcctggccctggaggaggccagcggccccgtgagccagagccagaagagcaagagcagaggcagagccggccccgacgccgtgaccctgcaggccgtgacccacgacaacgagtgggagatgctgagcccccagcccgtgcagaagaacatgatccccgacaccgagatggaggaggagaccgagttcctggagctgggcaccagaatcagcagacccaacggcctgctgagcgaggacgtgggcatggacatccccttcgaggagggcgtgctgagccccagcgccgccgacatgagacccgagccccccaacagcctggacctgaacgacacccaccccagaagaatcaagctgaccgcccccaacatcaacctgagcctggaccagagcgagggcagcatcctgagcgacgacaacctggacagccccgacgagatcgacatcaacgtggacgagctggacacccccgacgaggccgacagcttcgagtacaccggccacgaccccaccgccaacaaggacagcggccaggagagcgagagcatccccgagtacaccgccgaggaggagagagaggacaacagactgtggagaaccgtggtgatcggcgagcaggagcagagaatcgacatgaaggtgatcgagccctacagaagagtgatcagccacggcggctactacggcgacggcctgaacgccatcatcgtgttcgccgcctgcttcctgcccgacagcagcagagccgactaccactacgtgatggagaacctgttcctgtacgtgatcagcaccctggagctgatggtggccgaggactacatgatcgtgtacctgaacggcgccacccccagaagaagaatgcccggcctgggctggatgaagaagtgctaccagatgatcgacagaagactgagaaagaacctgaagagcttcatcatcgtgcaccccagctggttcatcagaaccatcctggccgtgaccagacccttcatcagcagcaagttcagcagcaagatcaagtacgtgaacagcctgagcgagctgagcggcctgatccccatggactgcatccacatccccgagagcatcatcaagctggacgaggagctgagagaggccagcgaggccgccaagaccagctgcctgtacaacgaccccgagatgagcagcatggagaaggacatcgacctgaagctgaaggagaagccctag

SEQ ID NO: 95820 - DNA, 9165 bp, synthetic construct
  misc_feature 1..9165: note = Description of Artificial Sequence: Synthetic coding sequence
  source 1..9165: mol_type = other DNA
agaaacctgatgcacagaatgaaggagagcgagaacagaagcaagagactggagaaggtgcacgtggtgatcggccccaagagctgcgacctggacagcctgatcagcaccttcacctacgcctacttcctggacaaggtgagcccccccggcgtgctgtgcctgcccgtgctgaacatccccagaaccgagttcaactacttcaccgagaccagattcatcctggaggagctgaacatcagcgagagcttccacatcttcagagacgagatcaacctgcaccagctgaacgacgagggcaagctgagcatcaccctggtgggcagcagcgtgctggccagcgaggacaagaccctggagagcgccgtggtgaaggtgatcaaccccgtggagcagagcgacgccaacgtggagttcagagagagcagcagcagcctggtgctgaaggagatcctgcaggaggcccccgagctgatcaccgagcagctggcccacagactgagaggcagcatcctgttcaagtggatgaccatggagagcgagaagatcagcgagaagcaggaggagatcctgagcatcctggaggagaagttccccaacctgccccccagagaggacatcatcaacgtgctgcaggagacccagttcagcgcccagggcctgagcatcgagcagaccatgctgaaggacctgaaggagctgagcgacggcgagatcaaggtggccatcagcaccgtgagcatgaacctggagaactgcctgttccacagcaacatcaccagcgacctgaaggccttcaccgacaagttcggcttcgacgtgctgatcctgttcagcagctacctgagcgaggagcagcagcccagaagacagatcgccgtgtacagcgagaacatggagctgtgcagccagatctgctgcgagctggaggagtgccagaacccctgcctggagctggagcccttcgactgcggctgcgacgagatcctggtgtaccagcaggaggaccccagcgtgacctgcgaccaggtggtgctggtggtgaaggaggtgatcaacagaagatgccccgagatggtgagcaacagcagaaccagcagcaccgaggccgtggccggcagcgcccccctgagccagggcagcagcggcatcatggagctgtacggcagcgacatcgagccccagcccagcagcgtgaacttcatcgagaacccccccgacctgaacgacagcaaccaggcccaggtggacgccaacgtggacctggtgagccccgacagcggcctggccaccatcagaagcagcagaagcagcaaggagagcagcgtgttcctgagcgacgacagccccgtgggcgagggcgccggcccccaccacaccctgctgcccggcctggacagctacagccccatccccgagggcgccgtggccgaggagcacgcctggagcggcgagcacggcgagcacttcgacctgttcaacttcgaccccgcccccatggccagcggccagagccagcagagcagccacagcgccgactacagccccgccgacgacttcttccccaacagcgacctgagcgagggccagctgcccgccggccccgagggcctggacggcatgggcaccaacatgagcaactacagcagcagcagcctgctgagcggcgccggcaaggacagcctggtggagcacgacgaggagttcgtgcagagacaggacagccccagagacaacagcgagagaaacctgagcctgaccgacttcgtgggcgacgagagccccagccccgagagactgaagaacaccggcaagagaatcccccccacccccatgaacagcctggtggagagcagccccagcaccgaggagcccgccagcctgtacaccgaggacatgacccagaaggccaccgacaccggccacatgggccccccccagacccacgccagatgcagcagctggtggggcggcctggagatcgacagcaagaacatcgccgacgcctggagcagcagcgagcaggagagcgtgttccagagccccgagagctggaaggagcacaagcccagcagcatcgacagaagagccagcgacagcgtgttccagcccaagagcctggagttcaccaagagcggcccctgggagagcgagttcggccagcccgagctgggcagcaacgacatccaggacaagaacgaggagagcctgcccttccagaacctgcccatggagaagagccccctgcccaacaccagcccccagggcaccaaccacctgatcgaggacttcgccagcctgtggcacagcggcagaagccccaccgccatgcccgagccctggggcaaccccaccgacgacggcgagcccgccgccgtggcccccttccccgcctggagcgccttcggcaaggaggaccacgacgaggccctgaagaacacctggaacctgcaccccaccagcagcaagacccccagcgtgagagaccccaacgagtgggccatggccaagagcggcttcgccttcagcagcagcgagctgctggacaacagccccagcgagatcaacaacgaggccgcccccgagatctggggcaagaagaacaacgacagcagagaccacatcttcgcccccggcaaccccagcagcgacctggaccacacctggaccaacagcaagccccccaaggaggaccagaacggcctggtggaccccaagaccagaggcaaggtgtacgagaaggtggacagctggaacctgttcgaggagaacatgaagaagggcggcagcgacgtgctggtgccctgggaggacagcttcctgagctacaagtgcagcgactacagcgccagcaacctgggcgaggacagcgtgcccagccccctggacaccaactacagcaccagcgacagctacaccagccccaccttcgccggcgacgagaaggagaccgagcacaagcccttcgccaaggaggagggcttcgagagcaaggacggcaacagcaccgccgaggagaccgacatccccccccagagcctgcagcagagcagcagaaacagaatcagcagcggccccggcaacctggacatgtgggccagcccccacaccgacaacagcagcgagatcaacaccacccacaacctggacgagaacgagctgaagaccgagcacaccgacggcaagaacatcagcatggaggacgacgtgggcgagagcagccagagcagctacgacgaccccagcatgatgcagctgtacaacgagaccaacagacagctgaccctgctgcacagcagcaccaacagcagacagaccgcccccgacagcctggacctgtggaacagagtgatcctggaggacacccagagcaccgccaccatcagcgacatggacaacgacctggactgggacgactgcagcggcggcgccgccatccccagcgacggccagaccgagggctacatggccgagggcagcgagcccgagaccagattcaccgtgagacagctggagccctggggcctggagtaccaggaggccaaccaggtggactgggagctgcccgccagcgacgagcacaccaaggacagcgcccccagcgagcaccacaccctgaacgagaagagcggccagctgatcgccaacagcatctgggacagcgtgatgagagacaaggacatgagcagcttcatgctgcccggcagcagccacatcaccgacagcgagcagagagagctgccccccgagatccccagccacagcgccaacgtgaaggacacccacagccccgacgcccccgccgccagcggcaccagcgagagcgaggccctgatcagccacctggacaagcaggacaccgagagagagaccctgcagagcgacgccgccagcctggccaccagactggagaaccccggctacttcccccaccccgacccctggaagggccacggcgacggccagagcgagagcgagaaggaggcccagggcgccaccgacagaggccacctggacgaggaggaggtgatcgccagcggcgtggagaacgccagcggcatcagcgagaagggccagagcgaccaggagctgagcagcctggtggccagcgagcaccaggagatctgcatcaagagcggcaagatcagcagcctggccgtgaccttcagcccccagaccgaggagcccgaggaggtgctggagtacgaggagggcagctacaacctggacagcagagacgtgcagaccggcatgagcgccgacaacctgcagcccaaggacacccacgagaagcacctgatgagccagagaaacagcggcgagaccaccgagaccagcgacggcatgaacttcaccaagtacgtgagcgtgcccgagaaggacctggagaagaccgaggagtgcaacttcctggagcccgagaacgtgggcggcggccccccccacagagtgcccagaagcctggacttcggcgacgtgcccatcgacagcgacgtgcacgtgagcagcacctgcagcgagatcaccaagaacctggacgtgaagggcagcgagaacagcctgcccggcgccggcagcagcggcaacttcgacagagacaccatcagcagcgagtacacccacagcagcgccagcagccccgagctgaacgacagcagcgtggccctgagcagctggggccagcagcccagcagcggctaccaggaggagaaccagggcaactggagcgagcagaaccaccaggagagcgagctgatcaccaccgacggccaggtggagatcgtgaccaaggtgaaggacctggagaagaacagaatcaacgagttcgagaagagcttcgacagaaagacccccaccttcctggagatctggaacgacagcgtggacggcgacagcttcagcagcctgagcagccccgagaccggcaagtacagcgagcacagcggcacccaccaggagagcaacctgatcgccagctaccaggagaagaacgagcacgacatcagcgccaccgtgcagcccgaggacgccagagtgatcagcaccagcagcggcagcgacgacgacagcgtgggcggcgaggagagcatcgaggaggagatccaggtggccaactgccacgtggccgaggacgagagcagagcctgggacagcctgaacgagagcaacaagttcctggtgaccgccgaccccaagagcgagaacatctacgactacctggacagcagcgagcccgccgagaacgagaacaagagcaaccccttctgcgacaaccagcagagcagccccgacccctggaccttcagccccctgaccgagaccgagatgcagatcaccgccgtggagaaggagaagagaagcagccccgagaccggcaccaccggcgacgtggcctggcagatcagccccaaggccagcttccccaagaacgaggacaacagccagctggagatgctgggcttcagcgccgacagcaccgagtggtggaaggccagcccccaggagggcagactgatcgagagccccttcgagagagagctgagcgacagcagcggcgtgctggagatcaacagcagcgtgcaccagaacgccagcccctggggcgtgcccgtgcagggcgacatcgagcccgtggagacccactacaccaaccccttcagcgacaaccaccagagccccttcctggagggcaacggcaagaacagccacgagcagctgtggaacatccagcccagacagcccgaccccgacgccgacaagttcagccagctggtgaagctggaccagatcaaggagaaggacagcagagagcagaccttcgtgagcgccgccggcgacgagctgacccccgagacccccacccaggagcagtgccaggacaccatgctgcccgtgtgcgaccaccccgacaccgccttcacccacgccgaggagaacagctgcgtgaccagcaacgtgagcaccaacgagggccaggagaccaaccagtgggagcaggagaagagctacctgggcgagatgaccaacagcagcatcgccaccgagaacttccccgccgtgagcagccccacccagctgatcatgaagcccggcagcgagtgggacggcagcacccccagcgaggacagcagaggcaccttcgtgcccgacatcctgcacggcaacttccaggagggcggccagctggccagcgccgcccccgacctgtggatcgacgccaagaagcccttcagcctgaaggccgacggcgagaaccccgacatcctgacccactgcgagcacgacagcaacagccaggccagcgacagccccgacatctgccacgacagcgaggccaagcaggagaccgagaagcacctgagcgcctgcatgggccccgaggtggagagcagcgagctgtgcctgaccgagcccgagatcgacgaggagcccatctacgagcccggcagagagttcgtgcccagcaacgccgagctggacagcgagaacgccaccgtgctgccccccatcggctaccaggccgacatcaagggcagcagccagcccgccagccacaagggcagccccgagcccagcgagatcaacggcgacaacagcaccggcctgcaggtgagcgagaagggcgccagccccgacatggcccccatcctggagcccgtggacagaagaatccccagaatcgagaacgtggccaccagcatcttcgtgacccaccaggagcccacccccgagggcgacggcagctggatcagcgacagcttcagccccgagagccagcccggcgccagagccctgttcgacggcgacccccacctgagcaccgagaaccccgccctggtgcccgacgccctgctggccagcgacacctgcctggacatcagcgaggccgccttcgaccacagcttcagcgacgccagcggcctgaacaccagcaccggcaccatcgacgacatgagcaagctgaccctgagcgagggccaccccgagacccccgtggacggcgacctgggcaagcaggacatctgcagcagcgaggccagctggggcgacttcgagtacgacgtgatgggccagaacatcgacgaggacctgctgagagagcccgagcacttcctgtacggcggcgacccccccctggaggaggacagcctgaagcagagcctggccccctacaccccccccttcgacctgagctacctgaccgagcccgcccagagcgccgagaccatcgaggaggccggcagccccgaggacgagagcctgggctgcagagccgccgagatcgtgctgagcgccctgcccgacagaagaagcgagggcaaccaggccgagaccaagaacagactgcccggcagccagctggccgtgctgcacatcagagaggaccccgagagcgtgtacctgcccgtgggcgccggcagcaacatcctgagccccagcaacgtggactgggaggtggagaccgacaacagcgacctgcccgccggcggcgacatcggcccccccaacggcgccagcaaggagatcagcgagctggaggaggagaagaccatccccaccaaggagcccgagcagatcaagagcgagtacaaggaggagagatgcaccgagaagaacgaggacagacacgccctgcacatggactacatcctggtgaacagagaggagaacagccacagcaagcccgagacctgcgaggagagagagagcatcgccgagctggagctgtacgtgggcagcaaggagaccggcctgcagggcacccagctggccagcttccccgacacctgccagcccgccagcctgaacgagagaaagggcctgagcgccgagaagatgagcagcaagagcgacaccagaagcagcttcgagagccccgcccaggaccagagctggatgttcctgggccacagcgaggtgggcgaccccagcctggacgccagagacagcggccccggctggagcggcaagaccgtggagcccttcagcgagctgggcctgggcgagggcccccagctgcagatcctggaggagatgaagcccctggagagcctggccctggaggaggccagcggccccgtgagccagagccagaagagcaagagcagaggcagagccggccccgacgccgtgaccctgcaggccgtgacccacgacaacgagtgggagatgctgagcccccagcccgtgcagaagaacatgatccccgacaccgagatggaggaggagaccgagttcctggagctgggcaccagaatcagcagacccaacggcctgctgagcgaggacgtgggcatggacatccccttcgaggagggcgtgctgagccccagcgccgccgacatgagacccgagccccccaacagcctggacctgaacgacacccaccccagaagaatcaagctgaccgcccccaacatcaacctgagcctggaccagagcgagggcagcatcctgagcgacgacaacctggacagccccgacgagatcgacatcaacgtggacgagctggacacccccgacgaggccgacagcttcgagtacaccggccacgaggaccccaccgccaacaaggacagcggccaggagagcgagagcatccccgagtacaccgccgaggaggagagagaggacaacagactgtggagaaccgtggtgatcggcgagcaggagcagagaatcgacatgaaggtgatcgagccctacagaagagtgatcagccacggcggcagcagaggctactacggcgacggcctgaacgccatcatcgtgttcgccgcctgcttcctgcccgacagcagcagagccgactaccactacgtgatggagaacctgttcctgtacgtgatcagcaccctggagctgatggtggccgaggactacatgatcgtgtacctgaacggcgccacccccagaagaagaatgcccggcctgggctggatgaagaagtgctaccagatgatcgacagaagactgagaaagaacctgaagagcttcatcatcgtgcaccccagctggttcatcagaaccatcctggccgtgaccagacccttcatcagcagcaagttcagcagcaagatcaagtacgtgaacagcctgagcgagctgagcggcctgatccccatggactgcatccacatccccgagagcatcatcaactactag

SEQ ID NO: 95821 - DNA, 783 bp, synthetic construct
  misc_feature 1..783: note = Description of Artificial Sequence: Synthetic coding sequence
  source 1..783: mol_type = other DNA
atcgacatcaacgtggacgagctggacacccccgacgaggccgacagcttcgagtacaccggccacgaccccaccgccaacaaggacagcggccaggagagcgagagcatccccgagtacaccgccgaggaggagagagaggacaacagactgtggagaaccgtggtgatcggcgagcaggagcagagaatcgacatgaaggtgatcgagccctacagaagagtgatcagccacggcggcgacagcggctactacggcgacggcctgaacgccatcatcgtgttcgccgcctgcttcctgcccgacagcagcagagccgactaccactacgtgatggagaacctgttcctgtacgtgatcagcaccctggagctgatggtggccgaggactacatgatcgtgtacctgaacggcgccacccccagaagaagaatgcccggcctgggctggatgaagaagtgctaccagatgatcgacagaagactgagaaagaacctgaagagcttcatcatcgtgcaccccagctggttcatcagaaccatcctggccgtgaccagacccttcatcagcagcaagttcagcagcaagatcaagtacgtgaacagcctgagcgagctgagcggcctgatccccatggactgcatccacatccccgagagcatcatcaagtacgacgaggagagaagctacaagagaagcgtgagaaccagctgcctgtacaacgaccccgagatgagcagcatggagaaggacatcgacctgaagctgaaggagaagccctag

SEQ ID NO: 95822 - DNA, 7155 bp, synthetic construct
  misc_feature 1..7155: note = Description of Artificial Sequence: Synthetic coding sequence
  source 1..7155: mol_type = other DNA
tgattccagagccccgagagctggaaggagcacaagcccagcagcatcgacagaagagccagcgacagcgtgttccagcccaagagcctggagttcaccaagagcggcccctgggagagcgagttcggccagcccgagctgggcagcaacgacatccaggacaagaacgaggagagcctgcccttccagaacctgcccatggagaagagccccctgcccaacaccagcccccagggcaccaaccacctgatcgaggacttcgccagcctgtggcacagcggcagaagccccaccgccatgcccgagccctggggcaaccccaccgacgacggcgagcccgccgccgtggcccccttccccgcctggagcgccttcggcaaggaggaccacgacgaggccctgaagaacacctggaacctgcaccccaccagcagcaagacccccagcgtgagagaccccaacgagtgggccatggccaagagcggcttcgccttcagcagcagcgagctgctggacaacagccccagcgagatcaacaacgaggccgcccccgagatctggggcaagaagaacaacgacagcagagaccacatcttcgcccccggcaaccccagcagcgacctggaccacacctggaccaacagcaagccccccaaggaggaccagaacggcctggtggaccccaagaccagaggcaaggtgtacgagaaggtggacagctggaacctgttcgaggagaacatgaagaagggcggcagcgacgtgctggtgccctgggaggacagcttcctgagctacaagtgcagcgactacagcgccagcaacctgggcgaggacagcgtgcccagccccctggacaccaactacagcaccagcgacagctacaccagccccaccttcgccggcgacgagaaggagaccgagcacaagcccttcgccaaggaggagggcttcgagagcaaggacggcaacagcaccgccgaggagaccgacatccccccccagagcctgcagcagagcagcagaaacagaatcagcagcggccccggcaacctggacatgtgggccagcccccacaccgacaacagcagcgagatcaacaccacccacaacctggacgagaacgagctgaagaccgagcacaccgacggcaagaacatcagcatggaggacgacgtgggcgagagcagccagagcagctacgacgaccccagcatgatgcagctgtacaacgagaccaacagacagctgaccctgctgcacagcagcaccaacagcagacagaccgcccccgacagcctggacctgtggaacagagtgatcctggaggacacccagagcaccgccaccatcagcgacatggacaacgacctggactgggacgactgcagcggcggcgccgccatccccagcgacggccagaccgagggctacatggccgagggcagcgagcccgagaccagattcaccgtgagacagctggagccctggggcctggagtaccaggaggccaaccaggtggactgggagctgcccgccagcgacgagcacaccaaggacagcgcccccagcgagcaccacaccctgaacgagaagagcggccagctgatcgccaacagcatctgggacagcgtgatgagagacaaggacatgagcagcttcatgctgcccggcagcagccacatcaccgacagcgagcagagagagctgccccccgagatccccagccacagcgccaacgtgaaggacacccacagccccgacgcccccgccgccagcggcaccagcgagagcgaggccctgatcagccacctggacaagcaggacaccgagagagagaccctgcagagcgacgccgccagcctggccaccagactggagaaccccggctacttcccccaccccgacccctggaagggccacggcgacggccagagcgagagcgagaaggaggcccagggcgccaccgacagaggccacctggacgaggaggaggtgatcgccagcggcgtggagaacgccagcggcatcagcgagaagggccagagcgaccaggagctgagcagcctggtggccagcgagcaccaggagatctgcatcaagagcggcaagatcagcagcctggccgtgaccttcagcccccagaccgaggagcccgaggaggtgctggagtacgaggagggcagctacaacctggacagcagagacgtgcagaccggcatgagcgccgacaacctgcagcccaaggacacccacgagaagcacctgatgagccagagaaacagcggcgagaccaccgagaccagcgacggcatgaacttcaccaagtacgtgagcgtgcccgagaaggacctggagaagaccgaggagtgcaacttcctggagcccgagaacgtgggcggcggccccccccacagagtgcccagaagcctggacttcggcgacgtgcccatcgacagcgacgtgcacgtgagcagcacctgcagcgagatcaccaagaacctggacgtgaagggcagcgagaacagcctgcccggcgccggcagcagcggcaacttcgacagagacaccatcagcagcgagtacacccacagcagcgccagcagccccgagctgaacgacagcagcgtggccctgagcagctggggccagcagcccagcagcggctaccaggaggagaaccagggcaactggagcgagcagaaccaccaggagagcgagctgatcaccaccgacggccaggtggagatcgtgaccaaggtgaaggacctggagaagaacagaatcaacgagttcgagaagagcttcgacagaaagacccccaccttcctggagatctggaacgacagcgtggacggcgacagcttcagcagcctgagcagccccgagaccggcaagtacagcgagcacagcggcacccaccaggagagcaacctgatcgccagctaccaggagaagaacgagcacgacatcagcgccaccgtgcagcccgaggacgccagagtgatcagcaccagcagcggcagcgacgacgacagcgtgggcggcgaggagagcatcgaggaggagatccaggtggccaactgccacgtggccgaggacgagagcagagcctgggacagcctgaacgagagcaacaagttcctggtgaccgccgaccccaagagcgagaacatctacgactacctggacagcagcgagcccgccgagaacgagaacaagagcaaccccttctgcgacaaccagcagagcagccccgacccctggaccttcagccccctgaccgagaccgagatgcagatcaccgccgtggagaaggagaagagaagcagccccgagaccggcaccaccggcgacgtggcctggcagatcagccccaaggccagcttccccaagaacgaggacaacagccagctggagatgctgggcttcagcgccgacagcaccgagtggtggaaggccagcccccaggagggcagactgatcgagagccccttcgagagagagctgagcgacagcagcggcgtgctggagatcaacagcagcgtgcaccagaacgccagcccctggggcgtgcccgtgcagggcgacatcgagcccgtggagacccactacaccaaccccttcagcgacaaccaccagagccccttcctggagggcaacggcaagaacagccacgagcagctgtggaacatccagcccagacagcccgaccccgacgccgacaagttcagccagctggtgaagctggaccagatcaaggagaaggacagcagagagcagaccttcgtgagcgccgccggcgacgagctgacccccgagacccccacccaggagcagtgccaggacaccatgctgcccgtgtgcgaccaccccgacaccgccttcacccacgccgaggagaacagctgcgtgaccagcaacgtgagcaccaacgagggccaggagaccaaccagtgggagcaggagaagagctacctgggcgagatgaccaacagcagcatcgccaccgagaacttccccgccgtgagcagccccacccagctgatcatgaagcccggcagcgagtgggacggcagcacccccagcgaggacagcagaggcaccttcgtgcccgacatcctgcacggcaacttccaggagggcggccagctggccagcgccgcccccgacctgtggatcgacgccaagaagcccttcagcctgaaggccgacggcgagaaccccgacatcctgacccactgcgagcacgacagcaacagccaggccagcgacagccccgacatctgccacgacagcgaggccaagcaggagaccgagaagcacctgagcgcctgcatgggccccgaggtggagagcagcgagctgtgcctgaccgagcccgagatcgacgaggagcccatctacgagcccggcagagagttcgtgcccagcaacgccgagctggacagcgagaacgccaccgtgctgccccccatcggctaccaggccgacatcaagggcagcagccagcccgccagccacaagggcagccccgagcccagcgagatcaacggcgacaacagcaccggcctgcaggtgagcgagaagggcgccagccccgacatggcccccatcctggagcccgtggacagaagaatccccagaatcgagaacgtggccaccagcatcttcgtgacccaccaggagcccacccccgagggcgacggcagctggatcagcgacagcttcagccccgagagccagcccggcgccagagccctgttcgacggcgacccccacctgagcaccgagaaccccgccctggtgcccgacgccctgctggccagcgacacctgcctggacatcagcgaggccgccttcgaccacagcttcagcgacgccagcggcctgaacaccagcaccggcaccatcgacgacatgagcaagctgaccctgagcgagggccaccccgagacccccgtggacggcgacctgggcaagcaggacatctgcagcagcgaggccagctggggcgacttcgagtacgacgtgatgggccagaacatcgacgaggacctgctgagagagcccgagcacttcctgtacggcggcgacccccccctggaggaggacagcctgaagcagagcctggccccctacaccccccccttcgacctgagctacctgaccgagcccgcccagagcgccgagaccatcgaggaggccggcagccccgaggacgagagcctgggctgcagagccgccgagatcgtgctgagcgccctgcccgacagaagaagcgagggcaaccaggccgagaccaagaacagactgcccggcagccagctggccgtgctgcacatcagagaggaccccgagagcgtgtacctgcccgtgggcgccggcagcaacatcctgagccccagcaacgtggactgggaggtggagaccgacaacagcgacctgcccgccggcggcgacatcggcccccccaacggcgccagcaaggagatcagcgagctggaggaggagaagaccatccccaccaaggagcccgagcagatcaagagcgagtacaaggaggagagatgcaccgagaagaacgaggacagacacgccctgcacatggactacatcctggtgaacagagaggagaacagccacagcaagcccgagacctgcgaggagagagagagcatcgccgagctggagctgtacgtgggcagcaaggagaccggcctgcagggcacccagctggccagcttccccgacacctgccagcccgccagcctgaacgagagaaagggcctgagcgccgagaagatgagcagcaagagcgacaccagaagcagcttcgagagccccgcccaggaccagagctggatgttcctgggccacagcgaggtgggcgaccccagcctggacgccagagacagcggccccggctggagcggcaagaccgtggagcccttcagcgagctgggcctgggcgagggcccccagctgcagatcctggaggagatgaagcccctggagagcctggccctggaggaggccagcggccccgtgagccagagccagaagagcaagagcagaggcagagccggccccgacgccgtgaccctgcaggccgtgacccacgacaacgagtgggagatgctgagcccccagcccgtgcagaagaacatgatccccgacaccgagatggaggaggagaccgagttcctggagctgggcaccagaatcagcagacccaacggcctgctgagcgaggacgtgggcatggacatccccttcgaggagggcgtgctgagccccagcgccgccgacatgagacccgagccccccaacagcctggacctgaacgacacccaccccagaagaatcaagctgaccgcccccaacatcaacctgagcctggaccagagcgagggcagcatcctgagcgacgacaacctggacagccccgacgagatcgacatcaacgtggacgagctggacacccccgacgaggccgacagcttcgagtacaccggccacgaccccaccgccaacaaggacagcggccaggagagcgagagcatccccgagtacaccgccgaggaggagagagaggacaacagactgtggagaaccgtggtgatcggcgagcaggagcagagaatcgacatgaaggtgatcgagccctacagaagagtgatcagccacggcggcgacagcggctactacggcgacggcctgaacgccatcatcgtgttcgccgcctgcttcctgcccgacagcagcagagccgactaccactacgtgatggagaacctgttcctgtacgtgatcagcaccctggagctgatggtggccgaggactacatgatcgtgtacctgaacggcgccacccccagaagaagaatgcccggcctgggctggatgaagaagtgctaccagatgatcgacagaagactgagaaagaacctgaagagcttcatcatcgtgcaccccagctggttcatcagaaccatcctggccgtgaccagacccttcatcagcagcaagttcagcagcaagatcaagtacgtgaacagcctgagcgagctgagcggcctgatccccatggactgcatccacatccccgagagcatcatcaacatcgacctgaagctgaaggagaagccctag

SEQ ID NO: 95823 - DNA, 8193 bp, synthetic construct
  misc_feature 1..8193: note = Description of Artificial Sequence: Synthetic coding sequence
  source 1..8193: mol_type = other DNA
atggtgagcaacagcagaaccagcagcaccgaggccgtggccggcagcgcccccctgagccagggcagcagcggcatcatggagctgtacggcagcgacatcgagccccagcccagcagcgtgaacttcatcgagaacccccccgacctgaacgacagcaaccaggcccaggtggacgccaacgtggacctggtgagccccgacagcggcctggccaccatcagaagcagcagaagcagcaaggagagcagcgtgttcctgagcgacgacagccccgtgggcgagggcgccggcccccaccacaccctgctgcccggcctggacagctacagccccatccccgagggcgccgtggccgaggagcacgcctggagcggcgagcacggcgagcacttcgacctgttcaacttcgaccccgcccccatggccagcggccagagccagcagagcagccacagcgccgactacagccccgccgacgacttcttccccaacagcgacctgagcgagggccagctgcccgccggccccgagggcctggacggcatgggcaccaacatgagcaactacagcagcagcagcctgctgagcggcgccggcaaggacagcctggtggagcacgacgaggagttcgtgcagagacaggacagccccagagacaacagcgagagaaacctgagcctgaccgacttcgtgggcgacgagagccccagccccgagagactgaagaacaccggcaagagaatcccccccacccccatgaacagcctggtggagagcagccccagcaccgaggagcccgccagcctgtacaccgaggacatgacccagaaggccaccgacaccggccacatgggccccccccagacccacgccagatgcagcagctggtggggcggcctggagatcgacagcaagaacatcgccgacgcctggagcagcagcgagcaggagagcgtgttccagagccccgagagctggaaggagcacaagcccagcagcatcgacagaagagccagcgacagcgtgttccagcccaagagcctggagttcaccaagagcggcccctgggagagcgagttcggccagcccgagctgggcagcaacgacatccaggacaagaacgaggagagcctgcccttccagaacctgcccatggagaagagccccctgcccaacaccagcccccagggcaccaaccacctgatcgaggacttcgccagcctgtggcacagcggcagaagccccaccgccatgcccgagccctggggcaaccccaccgacgacggcgagcccgccgccgtggcccccttccccgcctggagcgccttcggcaaggaggaccacgacgaggccctgaagaacacctggaacctgcaccccaccagcagcaagacccccagcgtgagagaccccaacgagtgggccatggccaagagcggcttcgccttcagcagcagcgagctgctggacaacagccccagcgagatcaacaacgaggccgcccccgagatctggggcaagaagaacaacgacagcagagaccacatcttcgcccccggcaaccccagcagcgacctggaccacacctggaccaacagcaagccccccaaggaggaccagaacggcctggtggaccccaagaccagaggcaaggtgtacgagaaggtggacagctggaacctgttcgaggagaacatgaagaagggcggcagcgacgtgctggtgccctgggaggacagcttcctgagctacaagtgcagcgactacagcgccagcaacctgggcgaggacagcgtgcccagccccctggacaccaactacagcaccagcgacagctacaccagccccaccttcgccggcgacgagaaggagaccgagcacaagcccttcgccaaggaggagggcttcgagagcaaggacggcaacagcaccgccgaggagaccgacatccccccccagagcctgcagcagagcagcagaaacagaatcagcagcggccccggcaacctggacatgtgggccagcccccacaccgacaacagcagcgagatcaacaccacccacaacctggacgagaacgagctgaagaccgagcacaccgacggcaagaacatcagcatggaggacgacgtgggcgagagcagccagagcagctacgacgaccccagcatgatgcagctgtacaacgagaccaacagacagctgaccctgctgcacagcagcaccaacagcagacagaccgcccccgacagcctggacctgtggaacagagtgatcctggaggacacccagagcaccgccaccatcagcgacatggacaacgacctggactgggacgactgcagcggcggcgccgccatccccagcgacggccagaccgagggctacatggccgagggcagcgagcccgagaccagattcaccgtgagacagctggagccctggggcctggagtaccaggaggccaaccaggtggactgggagctgcccgccagcgacgagcacaccaaggacagcgcccccagcgagcaccacaccctgaacgagaagagcggccagctgatcgccaacagcatctgggacagcgtgatgagagacaaggacatgagcagcttcatgctgcccggcagcagccacatcaccgacagcgagcagagagagctgccccccgagatccccagccacagcgccaacgtgaaggacacccacagccccgacgcccccgccgccagcggcaccagcgagagcgaggccctgatcagccacctggacaagcaggacaccgagagagagaccctgcagagcgacgccgccagcctggccaccagactggagaaccccggctacttcccccaccccgacccctggaagggccacggcgacggccagagcgagagcgagaaggaggcccagggcgccaccgacagaggccacctggacgaggaggaggtgatcgccagcggcgtggagaacgccagcggcatcagcgagaagggccagagcgaccaggagctgagcagcctggtggccagcgagcaccaggagatctgcatcaagagcggcaagatcagcagcctggccgtgaccttcagcccccagaccgaggagcccgaggaggtgctggagtacgaggagggcagctacaacctggacagcagagacgtgcagaccggcatgagcgccgacaacctgcagcccaaggacacccacgagaagcacctgatgagccagagaaacagcggcgagaccaccgagaccagcgacggcatgaacttcaccaagtacgtgagcgtgcccgagaaggacctggagaagaccgaggagtgcaacttcctggagcccgagaacgtgggcggcggccccccccacagagtgcccagaagcctggacttcggcgacgtgcccatcgacagcgacgtgcacgtgagcagcacctgcagcgagatcaccaagaacctggacgtgaagggcagcgagaacagcctgcccggcgccggcagcagcggcaacttcgacagagacaccatcagcagcgagtacacccacagcagcgccagcagccccgagctgaacgacagcagcgtggccctgagcagctggggccagcagcccagcagcggctaccaggaggagaaccagggcaactggagcgagcagaaccaccaggagagcgagctgatcaccaccgacggccaggtggagatcgtgaccaaggtgaaggacctggagaagaacagaatcaacgagttcgagaagagcttcgacagaaagacccccaccttcctggagatctggaacgacagcgtggacggcgacagcttcagcagcctgagcagccccgagaccggcaagtacagcgagcacagcggcacccaccaggagagcaacctgatcgccagctaccaggagaagaacgagcacgacatcagcgccaccgtgcagcccgaggacgccagagtgatcagcaccagcagcggcagcgacgacgacagcgtgggcggcgaggagagcatcgaggaggagatccaggtggccaactgccacgtggccgaggacgagagcagagcctgggacagcctgaacgagagcaacaagttcctggtgaccgccgaccccaagagcgagaacatctacgactacctggacagcagcgagcccgccgagaacgagaacaagagcaaccccttctgcgacaaccagcagagcagccccgacccctggaccttcagccccctgaccgagaccgagatgcagatcaccgccgtggagaaggagaagagaagcagccccgagaccggcaccaccggcgacgtggcctggcagatcagccccaaggccagcttccccaagaacgaggacaacagccagctggagatgctgggcttcagcgccgacagcaccgagtggtggaaggccagcccccaggagggcagactgatcgagagccccttcgagagagagctgagcgacagcagcggcgtgctggagatcaacagcagcgtgcaccagaacgccagcccctggggcgtgcccgtgcagggcgacatcgagcccgtggagacccactacaccaaccccttcagcgacaaccaccagagccccttcctggagggcaacggcaagaacagccacgagcagctgtggaacatccagcccagacagcccgaccccgacgccgacaagttcagccagctggtgaagctggaccagatcaaggagaaggacagcagagagcagaccttcgtgagcgccgccggcgacgagctgacccccgagacccccacccaggagcagtgccaggacaccatgctgcccgtgtgcgaccaccccgacaccgccttcacccacgccgaggagaacagctgcgtgaccagcaacgtgagcaccaacgagggccaggagaccaaccagtgggagcaggagaagagctacctgggcgagatgaccaacagcagcatcgccaccgagaacttccccgccgtgagcagccccacccagctgatcatgaagcccggcagcgagtgggacggcagcacccccagcgaggacagcagaggcaccttcgtgcccgacatcctgcacggcaacttccaggagggcggccagctggccagcgccgcccccgacctgtggatcgacgccaagaagcccttcagcctgaaggccgacggcgagaaccccgacatcctgacccactgcgagcacgacagcaacagccaggccagcgacagccccgacatctgccacgacagcgaggccaagcaggagaccgagaagcacctgagcgcctgcatgggccccgaggtggagagcagcgagctgtgcctgaccgagcccgagatcgacgaggagcccatctacgagcccggcagagagttcgtgcccagcaacgccgagctggacagcgagaacgccaccgtgctgccccccatcggctaccaggccgacatcaagggcagcagccagcccgccagccacaagggcagccccgagcccagcgagatcaacggcgacaacagcaccggcctgcaggtgagcgagaagggcgccagccccgacatggcccccatcctggagcccgtggacagaagaatccccagaatcgagaacgtggccaccagcatcttcgtgacccaccaggagcccacccccgagggcgacggcagctggatcagcgacagcttcagccccgagagccagcccggcgccagagccctgttcgacggcgacccccacctgagcaccgagaaccccgccctggtgcccgacgccctgctggccagcgacacctgcctggacatcagcgaggccgccttcgaccacagcttcagcgacgccagcggcctgaacaccagcaccggcaccatcgacgacatgagcaagctgaccctgagcgagggccaccccgagacccccgtggacggcgacctgggcaagcaggacatctgcagcagcgaggccagctggggcgacttcgagtacgacgtgatgggccagaacatcgacgaggacctgctgagagagcccgagcacttcctgtacggcggcgacccccccctggaggaggacagcctgaagcagagcctggccccctacaccccccccttcgacctgagctacctgaccgagcccgcccagagcgccgagaccatcgaggaggccggcagccccgaggacgagagcctgggctgcagagccgccgagatcgtgctgagcgccctgcccgacagaagaagcgagggcaaccaggccgagaccaagaacagactgcccggcagccagctggccgtgctgcacatcagagaggaccccgagagcgtgtacctgcccgtgggcgccggcagcaacatcctgagccccagcaacgtggactgggaggtggagaccgacaacagcgacctgcccgccggcggcgacatcggcccccccaacggcgccagcaaggagatcagcgagctggaggaggagaagaccatccccaccaaggagcccgagcagatcaagagcgagtacaaggaggagagatgcaccgagaagaacgaggacagacacgccctgcacatggactacatcctggtgaacagagaggagaacagccacagcaagcccgagacctgcgaggagagagagagcatcgccgagctggagctgtacgtgggcagcaaggagaccggcctgcagggcacccagctggccagcttccccgacacctgccagcccgccagcctgaacgagagaaagggcctgagcgccgagaagatgagcagcaagagcgacaccagaagcagcttcgagagccccgcccaggaccagagctggatgttcctgggccacagcgaggtgggcgaccccagcctggacgccagagacagcggccccggctggagcggcaagaccgtggagcccttcagcgagctgggcctgggcgagggcccccagctgcagatcctggaggagatgaagcccctggagagcctggccctggaggaggccagcggccccgtgagccagagccagaagagcaagagcagaggcagagccggccccgacgccgtgaccctgcaggccgtgacccacgacaacgagtgggagatgctgagcccccagcccgtgcagaagaacatgatccccgacaccgagatggaggaggagaccgagttcctggagctgggcaccagaatcagcagacccaacggcctgctgagcgaggacgtgggcatggacatccccttcgaggagggcgtgctgagccccagcgccgccgacatgagacccgagccccccaacagcctggacctgaacgacacccaccccagaagaatcaagctgaccgcccccaacatcaacctgagcctggaccagagcgagggcagcatcctgagcgacgacaacctggacagccccgacgagatcgacatcaacgtggacgagctggacacccccgacgaggccgacagcttcgagtacaccggccacgaggaccccaccgccaacaaggacagcggccaggagagcgagagcatccccgagtacaccgccgaggaggagagagaggacaacagactgtggagaaccgtggtgatcggcgagcaggagcagagaatcgacatgaaggtgatcgagccctacagaagagtgatcagccacggcggctactacggcgacggcctgaacgccatcatcgtgttcgccgcctgcttcctgcccgacagcagcagagccgactaccactacgtgatggagaacctgttcctgtacgtgatcagcaccctggagctgatggtggccgaggactacatgatcgtgtacctgaacggcgccacccccagaagaagaatgcccggcctgggctggatgaagaagtgctaccagatgatcgacagaagactgagaaagaacctgaagagcttcatcatcgtgcaccccagctggttcatcagaaccatcctggccgtgaccagacccttcatcagcagcaagttcagcagcaagatcaagtacgtgaacagcctgagcgagctgagcggcctgatccccatggactgcatccacatccccgagagcatcatcaagctggacgaggagctgagagaggccagcgaggccgccaagaccagctgcctgtacaacgaccccgagatgagcagcatggagaaggacatcgacctgaagctgaaggagaagccctag

SEQ ID NO: 95824 - DNA, 927 bp, synthetic construct
  misc_feature 1..927: note = Description of Artificial Sequence: Synthetic coding sequence
  source 1..927: mol_type = other DNA
atgagacccgagccccccaacagcctggacctgaacgacacccaccccagaagaatcaagctgaccgcccccaacatcaacctgagcctggaccagagcgagggcagcatcctgagcgacgacaacctggacagccccgacgagatcgacatcaacgtggacgagctggacacccccgacgaggccgacagcttcgagtacaccggccacgaccccaccgccaacaaggacagcggccaggagagcgagagcatccccgagtacaccgccgaggaggagagagaggacaacagactgtggagaaccgtggtgatcggcgagcaggagcagagaatcgacatgaaggtgatcgagccctacagaagagtgatcagccacggcggcaagctgagatactacggcgacggcctgaacgccatcatcgtgttcgccgcctgcttcctgcccgacagcagcagagccgactaccactacgtgatggagaacctgttcctgtacgtgatcagcaccctggagctgatggtggccgaggactacatgatcgtgtacctgaacggcgccacccccagaagaagaatgcccggcctgggctggatgaagaagtgctaccagatgatcgacagaagactgagaaagaacctgaagagcttcatcatcgtgcaccccagctggttcatcagaaccatcctggccgtgaccagacccttcatcagcagcaagttcagcagcaagatcaagtacgtgaacagcctgagcgagctgagcggcctgatccccatggactgcatccacatccccgagagcatcatcaagtacgacgaggagagaagctacaagagaagcgtgagaaccagctgcctgtacaacgaccccgagatgagcagcatggagaaggacatcgacctgaagctgaaggagaagccctag

SEQ ID NO: 95825 - DNA, 1014 bp, synthetic construct
  misc_feature 1..1014: note = Description of Artificial Sequence: Synthetic coding sequence
  source 1..1014: mol_type = other DNA
atgaacggcctgagaaacaagcagctgctgagcgaggacgtgggcatggacatccccttcgaggagggcgtgctgagccccagcgccgccgacatgagacccgagccccccaacagcctggacctgaacgacacccaccccagaagaatcaagctgaccgcccccaacatcaacctgagcctggaccagagcgagggcagcatcctgagcgacgacaacctggacagccccgacgagatcgacatcaacgtggacgagctggacacccccgacgaggccgacagcttcgagtacaccggccacgaccccaccgccaacaaggacagcggccaggagagcgagagcatccccgagtacaccgccgaggaggagagagaggacaacagactgtggagaaccgtggtgatcggcgagcaggagcagagaatcgacatgaaggtgatcgagccctacagaagagtgatcagccacggcggctactacggcgacggcctgaacgccatcatcgtgttcgccgcctgcttcctgcccgacagcagcagagccgactaccactacgtgatggagaacctgttcctgtacgtgatcagcaccctggagctgatggtggccgaggactacatgatcgtgtacctgaacggcgccacccccagaagaagaatgcccggcctgggctggatgaagaagtgctaccagatgatcgacagaagactgagaaagaacctgaagagcttcatcatcgtgcaccccagctggttcatcagaaccatcctggccgtgaccagacccttcatcagcagcaagttcagcagcaagatcaagtacgtgaacagcctgagcgagctgagcggcctgatccccatggactgcatccacatccccgagagcatcatcaagctggacgaggagctgagagaggccagcgaggccgccaagaccagctgcctgtacaacgaccccgagatgagcagcatggagaaggacatcgacctgaagctgaaggagaagccctag

SEQ ID NO: 95826 - DNA, 1155 bp, synthetic construct
  misc_feature 1..1155: note = Description of Artificial Sequence: Synthetic coding sequence
  source 1..1155: mol_type = other DNA
atggccggcaacgccgagcccccccccgccggcgccgcctgcccccaggacagaagaagctgcagcggcagagccggcggcgacagagtgtgggaggacggcgagcaccccgccaagaagctgaagagcggcggcgacgaggagagaagagagaagccccccaagagaaagatcgtgctgctgatggcctacagcggcaagggctaccacggcatgcagagaaacgtgggcagcagccagttcaagaccatcgaggacgacctggtgagcgccctggtgagaagcggctgcatccccgagaaccacggcgaggacatgagaaagatgagcttccagagatgcgccagaaccgacaagggcgtgagcgccgccggccaggtggtgagcctgaaggtgtggctgatcgacgacatcctggagaagatcaacagccacctgcccagccacatcagaatcctgggcctgaagagagtgaccggcggcttcaacagcaagaacagatgcgacgccagaacctactgctacctgctgcccaccttcgccttcgcccacaaggacagagacgtgcaggacgagacctacagactgagcgccgagaccctgcagcaggtgaacagactgctggcctgctacaagggcacccacaacttccacaacttcaccagccagaagggcccccaggaccccagcgcctgcagatacatcctggagatgtactgcgaggagcccttcgtgagagagggcctggagttcgccgtgatcagagtgaagggccagagcttcatgatgcaccagatcagaaagatggtgggcctggtggtggccatcgtgaagggctacgcccccgagagcgtgctggagagaagctggggcaccgagaaggtggacgtgcccaaggcccccggcctgggcctggtgctggagagagtgcacttcgagaagtacaaccagagattcggcaacgacggcctgcacgagcccctggactgggcccaggaggagggcaaggtggccgccttcaaggaggagcacatctaccccaccatcatcggcaccgagagagacgagagaagcatggcccagtggctgagcaccctgcccatccacaacttcagcgccaccgccctgaccgccggcggcaccggcgccaagtag

SEQ ID NO: 95827 - DNA, 1284 bp, synthetic construct
  misc_feature 1..1284: note = Description of Artificial Sequence: Synthetic coding sequence
  source 1..1284: mol_type = other DNA
atgggcctgcagctgagagccctgctgggcgccttcggcagatggaccctgagactgggccccagacccagctgcagccccagaatggccggcaacgccgagcccccccccgccggcgccgcctgcccccaggacagaagaagctgcagcggcagagccggcggcgacagagtgtgggaggacggcgagcaccccgccaagaagctgaagagcggcggcgacgaggagagaagagagaagccccccaagagaaagatcgtgctgctgatggcctacagcggcaagggctaccacggcatgcagagaaacgtgggcagcagccagttcaagaccatcgaggacgacctggtgagcgccctggtgagaagcggctgcatccccgagaaccacggcgaggacatgagaaagatgagcttccagagatgcgccagaaccgacaagggcgtgagcgccgccggccaggtggtgagcctgaaggtgtggctgatcgacgacatcctggagaagatcaacagccacctgcccagccacatcagaatcctgggcctgaagagagtgaccggcggcttcaacagcaagaacagatgcgacgccagaacctactgctacctgctgcccaccttcgccttcgcccacaaggacagagacgtgcaggacgagacctacagactgagcgccgagaccctgcagcaggtgaacagactgctggcctgctacaagggcacccacaacttccacaacttcaccagccagaagggcccccaggaccccagcgcctgcagatacatcctggagatgtactgcgaggagcccttcgtgagagagggcctggagttcgccgtgatcagagtgaagggccagagcttcatgatgcaccagatcagaaagatggtgggcctggtggtggccatcgtgaagggctacgcccccgagagcgtgctggagagaagctggggcaccgagaaggtggacgtgcccaaggcccccggcctgggcctggtgctggagagagtgcacttcgagaagtacaaccagagattcggcaacgacggcctgcacgagcccctggactgggcccaggaggagggcaaggtggccgccttcaaggaggagcacatctaccccaccatcatcggcaccgagagagacgagagaagcatggcccagtggctgagcaccctgcccatccacaacttcagcgccaccgccctgaccgccggcggcaccggcgccaaggtgcccagccccctggagggcagcgagggcgacggcgacaccgactag

SEQ ID NO: 95828 - DNA, 1200 bp, synthetic construct
  misc_feature 1..1200: note = Description of Artificial Sequence: Synthetic coding sequence
  source 1..1200: mol_type = other DNA
atggccggcaacgccgagcccccccccgccggcgccgcctgcccccaggacagaagaagctgcagcggcagagccggcggcgacagagtgtgggaggacggcgagcaccccgccaagaagctgaagagcggcggcgacgaggagagaagagagaagccccccaagagaaagatcgtgctgctgatggcctacagcggcaagggctaccacggcatgcagagaaacgtgggcagcagccagttcaagaccatcgaggacgacctggtgagcgccctggtgagaagcggctgcatccccgagaaccacggcgaggacatgagaaagatgagcttccagagatgcgccagaaccgacaagggcgtgagcgccgccggccaggtggtgagcctgaaggtgtggctgatcgacgacatcctggagaagatcaacagccacctgcccagccacatcagaatcctgggcctgaagagagtgaccggcggcttcaacagcaagaacagatgcgacgccagaacctactgctacctgctgcccaccttcgccttcgcccacaaggacagagacgtgcaggacgagacctacagactgagcgccgagaccctgcagcaggtgaacagactgctggcctgctacaagggcacccacaacttccacaacttcaccagccagaagggcccccaggaccccagcgcctgcagatacatcctggagatgtactgcgaggagcccttcgtgagagagggcctggagttcgccgtgatcagagtgaagggccagagcttcatgatgcaccagatcagaaagatggtgggcctggtggtggccatcgtgaagggctacgcccccgagagcgtgctggagagaagctggggcaccgagaaggtggacgtgcccaaggcccccggcctgggcctggtgctggagagagtgcacttcgagaagtacaaccagagattcggcaacgacggcctgcacgagcccctggactgggcccaggaggagggcaaggtggccgccttcaaggaggagcacatctaccccaccatcatcggcaccgagagagacgagagaagcatggcccagtggctgagcaccctgcccatccacaacttcagcgccaccgccctgaccgccggcggcaccggcgccaaggtgcccagccccctggagggcagcgagggcgacggcgacaccgactag

SEQ ID NO: 95829 - DNA, 1200 bp, synthetic construct; identical to SEQ ID NO: 95828
  misc_feature 1..1200: note = Description of Artificial Sequence: Synthetic coding sequence
  source 1..1200: mol_type = other DNA

SEQ ID NO: 95830 - DNA, 465 bp, synthetic construct
  misc_feature 1..465: note = Description of Artificial Sequence: Synthetic coding sequence
  source 1..465: mol_type = other DNA
atggccggcaacgccgagcccccccccgccggcgccgcctgcccccaggacagaagaagctgcagcggcagagccggcggcgacagagtgtgggaggacggcgagcaccccgccaagaagctgaagagcggcggcgacgaggagagaagagagaagccccccaagagaaagatcgtgctgctgatggcctacagcggcaagggctaccacggcatgcagagaaacgtgggcagcagccagttcaagaccatcgaggacgacctggtgagcgccctggtgagaagcggctgcatccccgagaaccacggcgaggacatgagaaagatgagcttccagagatgcgccagaaccgacaagggcgtgagcgccgccggccaggtggtgagcctgaaggtgtggctgatcgacgacatcctggagaagatcaacagccacctgcccagccacatcagaatcctgggctag

SEQ ID NO: 95831 - DNA, 618 bp, synthetic construct
  misc_feature 1..618: note = Description of Artificial Sequence: Synthetic coding sequence
  source 1..618: mol_type = other DNA
atgagcaagggcagagccgaggccgccgccggcgccgccggcatcctgctgagatacctgcaggagcagaacagaccctacagcagccaggacgtgttcggcaacctgcagagagagcacggcctgggcaaggccgtggtggtgaagaccctggagcagctggcccagcagggcaagatcaaggagaagatgtacggcaagcagaagatctacttcgccgaccaggaccagttcgacatggtgagcgacgccgacctgcaggtgctggacggcaagatcgtggccctgaccgccaaggtgcagagcctgcagcagagctgcagatacatggaggccgagatgcagaaggagatccaggagctgaagaaggagtgcgccggctacagagagagactgaagaacatcaaggccgccaccaaccacgtgacccccgaggagaaggagcaggtgtacagagagagacagaagtactgcaaggagtggagaaagagaaagagaatggccaccgagctgagcgacgccatcctggagggctaccccaagagcaagaagcagttcttcgaggaggtgggcatcgagaccgacgaggactacaacgtgaccctgcccgacccctag

SEQ ID NO: 95832 - DNA, 654 bp, synthetic construct
  misc_feature 1..654: note = Description of Artificial Sequence: Synthetic coding sequence
  source 1..654: mol_type = other DNA
atgagcaagggcagagccgaggccgccgccggcgccgccggcatcctgctgagatacctgcaggagcagaacagaccctacagcagccaggacgtgttcggcaacctgcagagagagcacggcctgggcaaggccgtggtggtgaagaccctggagcagctggcccagcagggcaagatcaaggagaagatgtacggcaagcagaagatctacttcgccgaccaggaccagttcgacatggtgagcgacgccgacctgcaggtgctggacggcaagatcgtggccctgaccgccaaggtgcagagcctgcagcagagctgcagatacatggaggccgagctgaaggagctgagcagcgccctgaccacccccgagatgcagaaggagatccaggagctgaagaaggagtgcgccggctacagagagagactgaagaacatcaaggccgccaccaaccacgtgacccccgaggagaaggagcaggtgtacagagagagacagaagtactgcaaggagtggagaaagagaaagagaatggccaccgagctgagcgacgccatcctggagggctaccccaagagcaagaagcagttcttcgaggaggtgggcatcgagaccgacgaggactacaacgtgaccctgcccgacccctag

SEQ ID NO: 95833 - DNA, 465 bp, synthetic construct
  misc_feature 1..465: note = Description of Artificial Sequence: Synthetic coding sequence
  source 1..465: mol_type = other DNA
atgtacggcaagcagaagatctacttcgccgaccaggaccagttcgacatggtgagcgacgccgacctgcaggtgctggacggcaagatcgtggccctgaccgccaaggtgcagagcctgcagcagagctgcagatacatggaggccgagctgaaggagctgagcagcgccctgaccacccccgagatgcagaaggagatccaggagctgaagaaggagtgcgccggctacagagagagactgaagaacatcaaggccgccaccaaccacgtgacccccgaggagaaggagcaggtgtacagagagagacagaagtactgcaaggagtggagaaagagaaagagaatggccaccgagctgagcgacgccatcctggagggctaccccaagagcaagaagcagttcttcgaggaggtgggcatcgagaccgacgaggactacaacgtgaccctgcccgacccctag

SEQ ID NO: 95834 - DNA, 915 bp, synthetic construct
  misc_feature 1..915: note = Description of Artificial Sequence: Synthetic coding sequence
  source 1..915: mol_type = other DNA
atgttcagcgtgctgagctacggcagactggtggccagagccgtgctgggcggcctgagccagaccgaccccagagccggcggcggcggcggcggcgactacggcctggtgaccgccggctgcggcttcggcaaggacttcagaaagggcctgctgaagaagggcgcctgctacggcgacgacgcctgcttcgtggccagacacagaagcgccgacgtgctgggcgtggccgacggcgtgggcggctggagagactacggcgtggaccccagccagttcagcggcaccctgatgagaacctgcgagagactggtgaaggagggcagattcgtgcccagcaaccccatcggcatcctgaccaccagctactgcgagctgctgcagaacaaggtgcccctgctgggcagcagcaccgcctgcatcgtggtgctggacagaaccagccacagactgcacaccgccaacctgggcgacagcggcttcctggtggtgagaggcggcgaggtggtgcacagaagcgacgagcagcagcactacttcaacacccccttccagctgagcatcgccccccccgaggccgagggcgtggtgctgagcgacagccccgacgccgccgacagcaccagcttcgacgtgcagctgggcgacatcatcctgaccgccaccgacggcctgttcgacaacatgcccgactacatgatcctgcaggagctgaagaagctgaagaacagcaactacgagagcatccagcagaccgccagaagcatcgccgagcaggcccacgagctggcctacgaccccaactacatgagccccttcgcccagttcgcctgcgacaacggcctgaacgtgagaggcggcaagcccgacgacatcaccgtgctgctgagcatcgtggccgagtacaccgactag

SEQ ID NO: 95835 - DNA, 1746 bp, synthetic construct
  misc_feature 1..1746: note = Description of Artificial Sequence: Synthetic coding sequence
  source 1..1746: mol_type = other DNA
atggccgtgagacaggccctgggcagaggcctgcagctgggcagagccctgctgctgagattcaccggcaagcccggcagagcctacggcctgggcagacccggccccgccgccggctgcgtgagaggcgagagacccggctgggccgccggccccggcgccgagcccagaagagtgggcctgggcctgcccaacagactgagattcttcagacagagcgtggccggcctggccgccagactgcagagacagttcgtggtgagagcctggggctgcgccggcccctgcggcagagccgtgttcctggccttcggcctgggcctgggcctgatcgaggagaagcaggccgagagcagaagagccgtgagcgcctgccaggagatccaggccatcttcacccagaagagcaagcccggccccgaccccctggacaccagaagactgcagggcttcagactggaggagtacctgatcggccagagcatcggcaagggctgcagcgccgccgtgtacgaggccaccatgcccaccctgccccagaacctggaggtgaccaagagcaccggcctgctgcccggcagaggccccggcaccagcgcccccggcgagggccaggagagagcccccggcgcccccgccttccccctggccatcaagatgatgtggaacatcagcgccggcagcagcagcgaggccatcctgaacaccatgagccaggagctggtgcccgccagcagagtggccctggccggcgagtacggcgccgtgacctacagaaagagcaagagaggccccaagcagctggccccccaccccaacatcatcagagtgctgagagccttcaccagcagcgtgcccctgctgcccggcgccctggtggactaccccgacgtgctgcccagcagactgcaccccgagggcctgggccacggcagaaccctgttcctggtgatgaagaactacccctgcaccctgagacagtacctgtgcgtgaacacccccagccccagactggccgccatgatgctgctgcagctgctggagggcgtggaccacctggtgcagcagggcatcgcccacagagacctgaagagcgacaacatcctggtggagctggaccccgacggctgcccctggctggtgatcgccgacttcggctgctgcctggccgacgagagcatcggcctgcagctgcccttcagcagctggtacgtggacagaggcggcaacggctgcctgatggcccccgaggtgagcaccgccagacccggccccagagccgtgatcgactacagcaaggccgacgcctgggccgtgggcgccatcgcctacgagatcttcggcctggtgaaccccttctacggccagggcaaggcccacctggagagcagaagctaccaggaggcccagctgcccgccctgcccgagagcgtgccccccgacgtgagacagctggtgagagccctgctgcagagagaggccagcaagagacccagcgccagagtggccgccaacgtgctgcacctgagcctgtggggcgagcacatcctggccctgaagaacctgaagctggacaagatggtgggctggctgctgcagcagagcgccgccaccctgctggccaacagactgaccgagaagtgctgcgtggagaccaagatgaagatgctgttcctggccaacctggagtgcgagaccctgtgccaggccgccctgctgctgtgcagctggagagccgccctgtag

SEQ ID NO: 95836 - DNA, 393 bp, synthetic construct
  misc_feature 1..393: note = Description of Artificial Sequence: Synthetic coding sequence
  source 1..393: mol_type = other DNA
atggccgccgtgctgggcgccctgggcgccaccagaagactgctggccgccctgagaggccagagcctgggcctggccgccatgagcagcggcacccacagactgaccgccgaggagagaaaccaggccatcctggacctgaaggccgccggctggagcgagctgagcgagagagacgccatctacaaggagttcagcttccacaacttcaaccaggccttcggcttcatgagcagagtggccctgcaggccgagaagatgaaccaccaccccgagtggttcaacgtgtacaacaaggtgcagatcaccctgaccagccacgactgcggcgagctgaccaagaaggacgtgaagctggccaagttcatcgagaaggccgccgccagcgtgtag

SEQ ID NO: 95837 - DNA, 393 bp, synthetic construct; identical to SEQ ID NO: 95836
  misc_feature 1..393: note = Description of Artificial Sequence: Synthetic coding sequence
  source 1..393: mol_type = other DNA

SEQ ID NO: 95838 - DNA, 1041 bp, synthetic construct
  misc_feature 1..1041: note = Description of Artificial Sequence: Synthetic coding sequence
  source 1..1041: mol_type = other DNA
atggccctgctgaaggtgaagttcgaccagaagaagagagtgaagctggcccagggcctgtggctgatgaactggttcagcgtgctggccggcatcatcatcttcagcctgggcctgttcctgaagatcgagctgagaaagagaagcgacgtgatgaacaacagcgagagccacttcgtgcccaacagcctgatcggcatgggcgtgctgagctgcgtgttcaacagcctggccggcaagatctgctacgacgccctggaccccgccaagtacgccagatggaagccctggctgaagccctacctggccatctgcgtgctgttcaacatcatcctgttcctggtggccctgtgctgcttcctgctgagaggcagcctggagaacaccctgggccagggcctgaagaacggcatgaagtactacagagacaccgacacccccggcagatgcttcatgaagaagaccatcgacatgctgcagatcgagttcaagtgctgcggcaacaacggcttcagagactggttcgagatccagtggatcagcaacagatacctggacttcagcagcaaggaggtgaaggacagaatcaagagcaacgtggacggcagatacctggtggacggcgtgcccttcagctgctgcaaccccagcagccccagaccctgcatccagtaccagatcaccaacaacagcgcccactacagctacgaccaccagaccgaggagctgaacctgtgggtgagaggctgcagagccgccctgctgagctactacagcagcctgatgaacagcatgggcgtggtgaccctgctgatctggctgttcgaggtgaccatcaccatcggcctgagatacctgcagaccagcctggacggcgtgagcaaccccgaggagagcgagagcgagagccagggctggctgctggagagaagcgtgcccgagacctggaaggccttcctggagagcgtgaagaagctgggcaagggcaaccaggtggaggccgagggcgccgacgccggccaggcccccgaggccggctag

SEQ ID NO: 95839 - DNA, 1191 bp, synthetic construct
  misc_feature 1..1191: note = Description of Artificial Sequence: Synthetic coding sequence
  source 1..1191: mol_type = other DNA
atgcccctgttcgagcccagagtgttcaccgccggcagcgaggagagagtgacctgcctgccccccaagggcctgcccgagcccagcgtgtggtgggagcacgccggcgtgagactgcccacccacggcagagtgtaccagaagggccacgagctggtgctggccaacatcgccgagagcgacgccggcgtgtacacctgccacgccgccaacctggccggccagagaagacaggacgtgaacatcaccgtggccaccgtgcccagctggctgaagaagccccaggacagccagctggaggagggcaagcccggctacctggactgcctgacccaggccacccccaagcccaccgtggtgtggtacagaaaccagatgctgatcagcgaggacagcagattcgaggtgttcctggccaaggcccagggcctggaggagggcgtggccgagaccctggtgctggtgaagagcctgcagagcaaggacgagcagcagcagctggacttcagaagagagctggagatgttcggcaagctgaaccacgccaacgtggtgagactgctgggcctgtgcagagaggccgagccccactacatggtgctggagtacgtggacctgggcgacctgaagcagttcctgagaatcagcaagagcaaggacgagaagctgaagagccagcccctgagcaccaagcagaaggtggccctgtgcacccaggtggccctgggcatggagcacctgagcaacaacagattcgtgcacaaggacctggccgccagaaactgcctggtgagcgcccagagacaggtgaaggtgagcgccctgggcctgagcaaggacgtgtacaacagcgagtactaccacttcagacaggcctgggtgcccctgagatggatgagccccgaggccatcctggagggcgacttcagcaccaagagcgacgtgtgggccttcggcgtgctgatgtgggaggtgttcacccacggcgagatgccccacggcggccaggccgacgacgaggtgctggccgacctgcaggccggcaaggccagactgccccagcccgagggctgccccagcaagctgtacagactgatgcagagatgctgggccctgagccccaaggacagacccagcttcagcgagatcgccagcgccctgggcgacagcaccgtggacagcaagccctag

SEQ ID NO: 95840 - DNA, 3093 bp, synthetic construct
  misc_feature 1..3093: note = Description of Artificial Sequence: Synthetic coding sequence
  source 1..3093: mol_type = other DNA
atgggcgccgccagaggcagccccgccagacccagaagactgcccctgctgagcgtgctgctgctgcccctgctgggcggcacccagaccgccatcgtgttcatcaagcagcccagcagccaggacgccctgcagggcagaagagccctgctgagatgcgaggtggaggcccccggccccgtgcacgtgtactggctgctggacggcgcccccgtgcaggacaccgagagaagattcgcccagggcagcagcctgagcttcgccgccgtggacagactgcaggacagcggcaccttccagtgcgtggccagagacgacgtgaccggcgaggaggccagaagcgccaacgccagcttcaacatcaagtggatcgaggccggccccgtggtgctgaagcaccccgccagcgaggccgagatccagccccagacccaggtgaccctgagatgccacatcgacggccaccccagacccacctaccagtggttcagagacggcacccccctgagcgacggccagagcaaccacaccgtgagcagcaaggagagaaacctgaccctgagacccgccggccccgagcacagcggcctgtacagctgctgcgcccacagcgccttcggccaggcctgcagcagccagaacttcaccctgagcatcgccgacgagagcttcgccagagtggtgctggccccccaggacgtggtggtggccagatacgaggaggccatgttccactgccagttcagcgcccagcccccccccagcctgcagtggctgttcgaggacgagacccccatcaccaacagaagcagacccccccacctgagaagagccaccgtgttcgccaacggcagcctgctgctgacccaggtgagacccagaaacgccggcatctacagatgcatcggccagggccagagaggcccccccatcatcctggaggccaccctgcacctggccgagatcgaggacatgcccctgttcgagcccagagtgttcaccgccggcagcgaggagagagtgacctgcctgccccccaagggcctgcccgagcccagcgtgtggtgggagcacgccggcgtgagactgcccacccacggcagagtgtaccagaagggccacgagctggtgctggccaacatcgccgagagcgacgccggcgtgtacacctgccacgccgccaacctggccggccagagaagacaggacgtgaacatcaccgtggccaccgtgcccagctggctgaagaagccccaggacagccagctggaggagggcaagcccggctacctggactgcctgacccaggccacccccaagcccaccgtggtgtggtacagaaaccagatgctgatcagcgaggacagcagattcgaggtgttcaagaacggcaccctgagaatcaacagcgtggaggtgtacgacggcacctggtacagatgcatgagcagcacccccgccggcagcatcgaggcccaggccagagtgcaggtgctggacggcagcagcctgcccgagtgggtgaccgacaacgccggcaccctgcacttcgccagagtgaccagagacgacgccggcaactacacctgcatcgccagcaacggcccccagggccagatcagagcccacgtgcagctgaccgtggccgtgttcatcaccttcaaggtggagcccgagagaaccaccgtgtaccagggccacaccgccctgctgcagtgcgaggcccagggcgaccccaagcccctgatccagtggaagggcaaggacagaatcctggaccccaccaagctgggccccagaatgcacatcttccagaacggcagcctggtgatccacgacgtggcccccgaggacagcggcagatacacctgcatcgccggcaacagctgcaacatcaagcacaccgaggcccccctgtacgtggtggacaagcccgtgcccgaggagagcgagggccccggcagcccccccccctacaagatgatccagaccatcggcctgagcgtgggcgccgccgtggcctacatcatcgccgtgctgggcctgatgttctactgcaagaagagatgcaaggccaagagactgcagaagcagcccgagggcgaggagcccgagatggagtgcctgaacggcggccccctgcagaacggccagcccagcgccgagatccaggaggaggtggccctgaccagcctgggcagcggccccgccgccaccaacaagagacacagcaccagcgacaagatgcacttccccagaagcagcctgcagcccatcaccaccctgggcaagagcgagttcggcgaggtgttcctggccaaggcccagggcctggaggagggcgtggccgagaccctggtgctggtgaagagcctgcagagcaaggacgagcagcagcagctggacttcagaagagagctggagatgttcggcaagctgaaccacgccaacgtggtgagactgctgggcctgtgcagagaggccgagccccactacatggtgctggagtacgtggacctgggcgacctgaagcagttcctgagaatcagcaagagcaaggacgagaagctgaagagccagcccctgagcaccaagcagaaggtggccctgtgcacccaggtggccctgggcatggagcacctgagcaacaacagattcgtgcacaaggacctggccgccagaaactgcctggtgagcgcccagagacaggtgaaggtgagcgccctgggcctgagcaaggacgtgtacaacagcgagtactaccacttcagacaggcctgggtgcccctgagatggatgagccccgaggccatcctggagggcgacttcagcaccaagagcgacgtgtgggccttcggcgtgctgatgtgggaggtgttcacccacggcgagatgccccacggcggccaggccgacgacgaggtgctggccgacctgcaggccggcaaggccagactgccccagcccgagggctgccccagcaagctgtacagactgatgcagagatgctgggccctgagccccaaggacagacccagcttcagcgagatcgccagcgccctgggcgacagcaccgtggacagcaagccctag

SEQ ID NO: 95841 - DNA, 2823 bp, synthetic construct
  misc_feature 1..2823: note = Description of Artificial Sequence: Synthetic coding sequence
  source 1..2823: mol_type = other DNA
atgggcgccgccagaggcagccccgccagacccagaagactgcccctgctgagcgtgctgctgctgcccctgctgggcggcacccagaccgccatcgtgttcatcaagcagcccagcagccaggacgccctgcagggcagaagagccctgctgagatgcgaggtggaggcccccggccccgtgcacgtgtactggctgctggacggcgcccccgtgcaggacaccgagagaagattcgcccagggcagcagcctgagcttcgccgccgtggacagactgcaggacagcggcaccttccagtgcgtggccagagacgacgtgaccggcgaggaggccagaagcgccaacgccagcttcaacatcaagtggatcgaggccggccccgtggtgctgaagcaccccgccagcgaggccgagatccagccccagacccaggtgaccctgagatgccacatcgacggccaccccagacccacctaccagtggttcagagacggcacccccctgagcgacggccagagcaaccacaccgtgagcagcaaggagagaaacctgaccctgagacccgccggccccgagcacagcggcctgtacagctgctgcgcccacagcgccttcggccaggcctgcagcagccagaacttcaccctgagcatcgccgacgagagcttcgccagagtggtgctggccccccaggacgtggtggtggccagatacgaggaggccatgttccactgccagttcagcgcccagcccccccccagcctgcagtggctgttcgaggacgagacccccatcaccaacagaagcagacccccccacctgagaagagccaccgtgttcgccaacggcagcctgctgctgacccaggtgagacccagaaacgccggcatctacagatgcatcggccagggccagagaggcccccccatcatcctggaggccaccctgcacctggccgagatcgaggacatgcccctgttcgagcccagagtgttcaccgccggcagcgaggagagagtgacctgcctgccccccaagggcctgcccgagcccagcgtgtggtgggagcacgccggcgtgagactgcccacccacggcagagtgtaccagaagggccacgagctggtgctggccaacatcgccgagagcgacgccggcgtgtacacctgccacgccgccaacctggccggccagagaagacaggacgtgaacatcaccgtggccaacggcagcagcctgcccgagtgggtgaccgacaacgccggcaccctgcacttcgccagagtgaccagagacgacgccggcaactacacctgcatcgccagcaacggcccccagggccagatcagagcccacgtgcagctgaccgtggccgtgttcatcaccttcaaggtggagcccgagagaaccaccgtgtaccagggccacaccgccctgctgcagtgcgaggcccagggcgaccccaagcccctgatccagtggaagggcaaggacagaatcctggaccccaccaagctgggccccagaatgcacatcttccagaacggcagcctggtgatccacgacgtggcccccgaggacagcggcagatacacctgcatcgccggcaacagctgcaacatcaagcacaccgaggcccccctgtacgtggtggacaagcccgtgcccgaggagagcgagggccccggcagcccccccccctacaagatgatccagaccatcggcctgagcgtgggcgccgccgtggcctacatcatcgccgtgctgggcctgatgttctactgcaagaagagatgcaaggccaagagactgcagaagcagcccgagggcgaggagcccgagatggagtgcctgaacggcggccccctgcagaacggccagcccagcgccgagatccaggaggaggtggccctgaccagcctgggcagcggccccgccgccaccaacaagagacacagcaccagcgacaagatgcacttccccagaagcagcctgcagcccatcaccaccctgggcaagagcgagttcggcgaggtgttcctggccaaggcccagggcctggaggagggcgtggccgagaccctggtgctggtgaagagcctgcagagcaaggacgagcagcagcagctggacttcagaagagagctggagatgttcggcaagctgaaccacgccaacgtggtgagactgctgggcctgtgcagagaggccgagccccactacatggtgctggagtacgtggacctgggcgacctgaagcagttcctgagaatcagcaagagcaaggacgagaagctgaagagccagcccctgagcaccaagcagaaggtggccctgtgcacccaggtggccctgggcatggagcacctgagcaacaacagattcgtgcacaaggacctggccgccagaaactgcctggtgagcgcccagagacaggtgaaggtgagcgccctgggcctgagcaaggacgtgtacaacagcgagtactaccacttcagacaggcctgggtgcccctgagatggatgagccccgaggccatcctggagggcgacttcagcaccaagagcgacgtgtgggccttcggcgtgctgatgtgggaggtgttcacccacggcgagatgccccacggcggccaggccgacgacgaggtgctggccgacctgcaggccggcaaggccagactgccccagcccgagggctgccccagcaagctgtacagactgatgcagagatgctgggccctgagccccaaggacagacccagcttcagcgagatcgccagcgccctgggcgacagcaccgtggacagcaagccctag

SEQ ID NO: 95842 - DNA, 3045 bp, synthetic construct
  misc_feature 1..3045: note = Description of Artificial Sequence: Synthetic coding sequence
  source 1..3045: mol_type = other DNA
atgggcgccgccagaggcagccccgccagacccagaagactgcccctgctgagcgtgctgctgctgcccctgctgggcggcacccagaccgccatcgtgttcatcaagcagcccagcagccaggacgccctgcagggcagaagagccctgctgagatgcgaggtggaggcccccggccccgtgcacgtgtactggctgctggacggcgcccccgtgcaggacaccgagagaagattcgcccagggcagcagcctgagcttcgccgccgtggacagactgcaggacagcggcaccttccagtgcgtggccagagacgacgtgaccggcgaggaggccagaagcgccaacgccagcttcaacatcaagtggatcgaggccggccccgtggtgctgaagcaccccgccagcgaggccgagatccagccccagacccaggtgaccctgagatgccacatcgacggccaccccagacccacctaccagtggttcagagacggcacccccctgagcgacggccagagcaaccacaccgtgagcagcaaggagagaaacctgaccctgagacccgccggccccgagcacagcggcctgtacagctgctgcgcccacagcgccttcggccaggcctgcagcagccagaacttcaccctgagcatcgccgacgagagcttcgccagagtggtgctggccccccaggacgtggtggtggccagatacgaggaggccatgttccactgccagttcagcgcccagcccccccccagcctgcagtggctgttcgaggacgagacccccatcaccaacagaagcagacccccccacctgagaagagccaccgtgttcgccaacggcagcctgctgctgacccaggtgagacccagaaacgccggcatctacagatgcatcggccagggccagagaggcccccccatcatcctggaggccaccctgcacctggccgagatcgaggacatgcccctgttcgagcccagagtgttcaccgccggcagcgaggagagagtgacctgcctgccccccaagggcctgcccgagcccagcgtgtggtgggagcacgccggcgtgagactgcccacccacggcagagtgtaccagaagggccacgagctggtgctggccaacatcgccgagagcgacgccggcgtgtacacctgccacgccgccaacctggccggccagagaagacaggacgtgaacatcaccgtggccaccgtgcccagctggctgaagaagccccaggacagccagctggaggagggcaagcccggctacctggactgcctgacccaggccacccccaagcccaccgtggtgtggtacagaaaccagatgctgatcagcgaggacagcagattcgaggtgttcaagaacggcaccctgagaatcaacagcgtggaggtgtacgacggcacctggtacagatgcatgagcagcacccccgccggcagcatcgaggcccaggccagagtgcaggtgctggagaagctgaagttcaccccccccccccagccccagcagtgcatggagttcgacaaggaggccaccgtgccctgcagcgccaccggcagagagaagcccaccatcaagtgggagagagccgacggcagcagcctgcccgagtgggtgaccgacaacgccggcaccctgcacttcgccagagtgaccagagacgacgccggcaactacacctgcatcgccagcaacggcccccagggccagatcagagcccacgtgcagctgaccgtggccgtgttcatcaccttcaaggtggagcccgagagaaccaccgtgtaccagggccacaccgccctgctgcagtgcgaggcccagggcgaccccaagcccctgatccagtggaaggacaagcccgtgcccgaggagagcgagggccccggcagcccccccccctacaagatgatccagaccatcggcctgagcgtgggcgccgccgtggcctacatcatcgccgtgctgggcctgatgttctactgcaagaagagatgcaaggccaagagactgcagaagcagcccgagggcgaggagcccgagatggagtgcctgaacggcggccccctgcagaacggccagcccagcgccgagatccaggaggaggtggccctgaccagcctgggcagcggccccgccgccaccaacaagagacacagcaccagcgacaagatgcacttccccagaagcagcctgcagcccatcaccaccctgggcaagagcgagttcggcgaggtgttcctggccaaggcccagggcctggaggagggcgtggccgagaccctggtgctggtgaagagcctgcagagcaaggacgagcagcagcagctggacttcagaagagagctggagatgttcggcaagctgaaccacgccaacgtggtgagactgctgggcctgtgcagagaggccgagccccactacatggtgctggagtacgtggacctgggcgacctgaagcagttcctgagaatcagcaagagcaaggacgagaagctgaagagccagcccctgagcaccaagcagaaggtggccctgtgcacccaggtggccctgggcatggagcacctgagcaacaacagattcgtgcacaaggacctggccgccagaaactgcctggtgagcgcccagagacaggtgaaggtgagcgccctgggcctgagcaaggacgtgtacaacagcgagtactaccacttcagacaggcctgggtgcccctgagatggatgagccccgaggccatcctggagggcgacttcagcaccaagagcgacgtgtgggccttcggcgtgctgatgtgggaggtgttcacccacggcgagatgccccacggcggccaggccgacgacgaggtgctggccgacctgcaggccggcaaggccagactgccccagcccgagggctgccccagcaagctgtacagactgatgcagagatgctgggccctgagccccaaggacagacccagcttcagcgagatcgccagcgccctgggcgacagcaccgtggacagcaagccctag

SEQ ID NO: 95843 - DNA, 1212 bp, synthetic construct
  misc_feature 1..1212: note = Description of Artificial Sequence: Synthetic coding sequence
  source 1..1212: mol_type = other DNA
atgggcagcttcctgagcggcgagaagagacccagcgcccccaccgtgggcagcgccatggagaagaaggagttccccaccccccccggcagagtgggccccggcacccagaccgccatcgtgttcatcaagcagcccagcagccaggacgccctgcagggcagaagagccctgctgagatgcgaggtggaggcccccggccccgtgcacgtgtactggctgctggacggcgcccccgtgcaggacaccgagagaagattcgcccagggcagcagcctgagcttcgccgccgtggacagactgcaggacagcggcaccttccagtgcgtggccagagacgacgtgaccggcgaggaggccagaagcgccaacgccagcttcaacatcaagtggatcgaggccggccccgtggtgctgaagcaccccgccagcgaggccgagatccagccccagacccaggtgaccctgagatgccacatcgacggccaccccagacccacctaccagtggttcagagacggcacccccctgagcgacggccagagcaaccacaccgtgagcagcaaggagagaaacctgaccctgagacccgccggccccgagcacagcggcctgtacagctgctgcgcccacagcgccttcggccaggcctgcagcagccagaacttcaccctgagcatcgccgacgagagcttcgccagagtggtgctggccccccaggacgtggtggtggccagatacgaggaggccatgttccactgccagttcagcgcccagcccccccccagcctgcagtggctgttcgaggacgagacccccatcaccaacagaagcagacccccccacctgagaagagccaccgtgttcgccaacggcagcctgctgctgacccaggtgagacccagaaacgccggcatctacagatgcatcggccagggccagagaggcccccccatcatcctggaggccaccctgcacctggccgagatcgaggacatgcccctgttcgagcccagagtgttcaccgccggcagcgaggagagagtgacctgcctgccccccatggccggcagcaccagaagagccaccagctggtgctggcccatcctgctgaaggtgatgctggtgagcacccccgccaccagacccacctggctggtgagcggcgacagaatgagcaccagcctgtggcccctgtgcccccccggctag

SEQ ID NO: 95844 - DNA, 810 bp, synthetic construct
  misc_feature 1..810: note = Description of Artificial Sequence: Synthetic coding sequence
  source 1..810: mol_type = other DNA
ttcagcgcccagcccccccccagcctgcagtggctgttcgaggacgagacccccatcaccaacagaagcagacccccccacctgagaagagccaccgtgttcgccaacggcagcctgctgctgacccaggtgagacccagaaacgccggcatctacagatgcatcggccagggccagagaggcccccccatcatcctggaggccaccctgcacctggccgagatcgaggacatgcccctgttcgagcccagagtgttcaccgccggcagcgaggagagagtgacctgcctgccccccaagggcctgcccgagcccagcgtgtggtgggagcacgccggcgtgagactgcccacccacggcagagtgtaccagaagggccacgagctggtgctggccaacatcgccgagagcgacgccggcgtgtacacctgccacgccgccaacctggccggccagagaagacaggacgtgaacatcaccgtggccagcgagcacctgtgccccgagggccagggcgaggtggagggcaacaccggcctgggcgtgatggacagaggcttccccgccgtgcccagctggctgaagaagccccaggacagccagctggaggagggcaagcccggctacctggactgcctgacccaggccacccccaagcccaccgtggtgtggtacagaaaccagatgctgatcagcgaggacagcagattcgaggtgttcaagaacggcaccctgagaatcaacagcgtggaggtgtacgacggcacctggtacagatgcatgagcagcacccccgccggcagcatctag

SEQ ID NO: 95845 - DNA, 444 bp, synthetic construct
  misc_feature 1..444: note = Description of Artificial Sequence: Synthetic coding sequence
  source 1..444: mol_type = other DNA
atgggcgccaccggcctgggcttcctgctgagctggagacaggacaacctgaacggcaccgactgccagggctgcaacatcctgtacttcagcgagaccaccggcagcatgtgcagcgagctgagcctgaacagaggcctggaggccagaagaaagaaggacctgaaggacagcttcctgtggagatacggcaaggtgggctgcatcagcctgcccctgagagagatgaccgcctggatcaaccccccccagatcagcgagatcttccagggctaccaccagagagtgcacggcgccgacgccctgagcctgcagaccaacagcctgagaagcagactgagcagccagtgcctgggccagagcttcctgctgagaaccctggagagaggcagaggcttcagagccctgggcgacatctgcggccacgtgcacgaggaggactag

SEQ ID NO: 95846 - DNA, 216 bp, synthetic construct
  misc_feature 1..216: note = Description of Artificial Sequence: Synthetic coding sequence
  source 1..216: mol_type = other DNA
atgggcgccaccggcctgggcttcctgctgagctggagacaggacaacctgaacggcaccgactgccagggctgcaacatcctgtacttcagcgagaccaccggcagcatgtgcagcgagctgagcctgaacagaggcctggaggccagaagaaagaaggacctgaaggacagcttcctgtggagagacggcgtgagcccctgcctgccctgctag

SEQ ID NO: 95847 - DNA, 444 bp, synthetic construct; identical to SEQ ID NO: 95845
  misc_feature 1..444: note = Description of Artificial Sequence: Synthetic coding sequence
  source 1..444: mol_type = other DNA

SEQ ID NO: 95848 - DNA, 216 bp, synthetic construct; identical to SEQ ID NO: 95846
  misc_feature 1..216: note = Description of Artificial Sequence: Synthetic coding sequence
  source 1..216: mol_type = other DNA

SEQ ID NO: 95849 - DNA, 3561 bp, synthetic construct
  misc_feature 1..3561: note = Description of Artificial Sequence: Synthetic coding sequence
  source 1..3561: mol_type = other DNA
atgagcgtggcctgcgtgctgaagagaaaggccgtgctgtggcaggacagcttcagcccccacctgaagcaccacccccaggagcccgccaaccccaacatgcccgtggtgctgaccagcggcaccggcagccaggcccagccccagcccgccgccaaccaggccctggccgccggcacccacagcagccccgtgcccggcagcatcggcgtggccggcagaagccaggacgacgccatggtggactacttcttccagagacagcacggcgagcagctgggcggcggcggcagcggcggcggcggctacaacaacagcaagcacagatggcccaccggcgacaacatccacgccgagcaccaggtgagaagcatggacgagctgaaccacgacttccaggccctggccctggagggcagagccatgggcgagcagctgctgcccggcaagaagttctgggagaccgacgagagcagcaaggacggccccaagggcatcttcctgggcgaccagtggagagacagcgcctggggcaccagcgaccacagcgtgagccagcccatcatggtgcagagaagacccggccagagcttccacgtgaacagcgaggtgaacagcgtgctgagccccagaagcgagagcggcggcctgggcgtgagcatggtggagtacgtgctgagcagcagccccggcgacagctgcctgagaaagggcggcttcggccccagagacgccgacagcgacgagaacgacaagggcgagaagaagaacaagggcaccttcgacggcgacaagctgggcgacctgaaggaggagggcgacgtgatggacaagaccaacggcctgcccgtgcagaacggcatcgacgccgacgtgaaggacttcagcagaacccccggcaactgccagaacagcgccaacgaggtggacctgctgggccccaaccagaacggcagcgagggcctggcccagctgaccagcaccaacggcgccaagcccgtggaggacttcagcaacatggagagccagagcgtgcccctggaccccatggagcacgtgggcatggagcccctgcagttcgactacagcggcacccaggtgcccgtggacagcgccgccgccaccgtgggcctgttcgactacaacagccagcagcagctgttccagagacccaacgccctggccgtgcagcagctgaccgccgcccagcagcagcagtacgccctggccgccgcccaccagccccacatcggcctggcccccgccgccttcgtgcccaacccctacatcatcagcgccgccccccccggcaccgacccctacaccgccggcctggccgccgccgccaccctgggccccgccgtggtgccccaccagtactacggcgtgaccccctggggcgtgtaccccgccagcctgttccagcagcaggccgccgccgccgccgccgccaccaacagcgccaaccagcagaccaccccccaggcccagcagggccagcagcaggtgctgagaggcggcgccagccagagacccctgacccccaaccagaaccagcagggccagcagaccgaccccctggtggccgccgccgccgtgaacagcgccctggccttcggccagggcctggccgccggcatgcccggctaccccgtgctggcccccgccgcctactacgaccagaccggcgccctggtggtgaacgccggcgccagaaacggcctgggcgcccccgtgagactggtggcccccgcccccgtgatcatcagcagcagcgccgcccaggccgccgtggccgccgccgccgccagcgccaacggcgccgccggcggcctggccggcaccaccaacggccccttcagacccctgggcacccagcagccccagccccagccccagcagcagcccaacaacaacctggccagcagcagcttctacggcaacaacagcctgaacagcaacagccagagcagcagcctgttcagccagggcagcgcccagcccgccaacaccagcctgggcttcggcagcagcagcagcctgggcgccaccctgggcagcgccctgggcggcttcggcaccgccgtggccaacagcaacaccggcagcggcagcagaagagacagcctgaccggcagcagcgacctgtacaagagaaccagcagcagcctgacccccatcggccacagcttctacaacggcctgagcttcagcagcagccccggccccgtgggcatgcccctgcccagccagggccccggccacagccagacccccccccccagcctgagcagccacggcagcagcagcagcctgaacctgggcggcctgaccaacggcagcggcagatacatcagcgccgcccccggcgccgaggccaagtacagaagcgccagcagcgccagcagcctgttcagccccagcagcaccctgttcagcagcagcagactgagatacggcatgagcgacgtgatgcccagcggcagaagcagactgctggaggacttcagaaacaacagataccccaacctgcagctgagagagatcgccggccacatcatggagttcagccaggaccagcacggcagcagattcatccagctgaagctggagagagccacccccgccgagagacagctggtgttcaacgagatcctgcaggccgcctaccagctgatggtggacgtgttcggcaactacgtgatccagaagttcttcgagttcggcagcctggagcagaagctggccctggccgagagaatcagaggccacgtgctgagcctggccctgcagatgtacggctgcagagtgatccagaaggccctggagttcatccccagcgaccagcagaacgagatggtgagagagctggacggccacgtgctgaagtgcgtgaaggaccagaacggcaaccacgtggtgcagaagtgcatcgagtgcgtgcagccccagagcctgcagttcatcatcgacgccttcaagggccaggtgttcgccctgagcacccacccctacggctgcagagtgatccagagaatcctggagcactgcctgcccgaccagaccctgcccatcctggaggagctgcaccagcacaccgagcagctggtgcaggaccagtacggcaactacgtgatccagcacgtgctggagcacggcagacccgaggacaagagcaagatcgtggccgagatcagaggcaacgtgctggtgctgagccagcacaagttcgccagcaacgtggtggagaagtgcgtgacccacgccagcagaaccgagagagccgtgctgatcgacgaggtgtgcaccatgaacgacggcccccacagcgccctgtacaccatgatgaaggaccagtacgccaactacgtggtgcagaagatgatcgacgtggccgagcccggccagagaaagatcgtgatgcacaagatcagaccccacatcgccaccctgagaaagtacacctacggcaagcacatcctggccaagctggagaagtactacatgaagaacggcgtggacctgggccccatctgcggcccccccaacggcatcatctag

SEQ ID NO: 95850 - DNA, 2781 bp, synthetic construct
  misc_feature 1..2781: note = Description of Artificial Sequence: Synthetic coding sequence
  source 1..2781: mol_type = other DNA
atgagcgtggcctgcgtgctgaagagaaaggccgtgctgtggcaggacagcttcagcccccacctgaagcaccacccccaggagcccgccaaccccaacatgcccgtggtgctgaccagcggcaccggcagccaggcccagccccagcccgccgccaaccaggccctggccgccggcacccacagcagccccgtgcccggcagcatcggcgtggccggcagaagccaggacgacgccatggtggactacttcttccagagacagcacggcgagcagctgggcggcggcggcagcggcggcggcggctacaacaacagcaagcacagatggcccaccaccgtgggcctgttcgactacaacagccagcagcagctgttccagagacccaacgccctggccgtgcagcagctgaccgccgcccagcagcagcagtacgccctggccgccgcccaccagccccacatcggcctggcccccgccgccttcgtgcccaacccctacatcatcagcgccgccccccccggcaccgacccctacaccgccggcctggccgccgccgccaccctgggccccgccgtggtgccccaccagtactacggcgtgaccccctggggcgtgtaccccgccagcctgttccagcagcaggccgccgccgccgccgccgccaccaacagcgccaaccagcagaccaccccccaggcccagcagggccagcagcaggtgctgagaggcggcgccagccagagacccctgacccccaaccagaaccagcagggccagcagaccgaccccctggtggccgccgccgccgtgaacagcgccctggccttcggccagggcctggccgccggcatgcccggctaccccgtgctggcccccgccgcctactacgaccagaccggcgccctggtggtgaacgccggcgccagaaacggcctgggcgcccccgtgagactggtggcccccgcccccgtgatcatcagcagcagcgccgcccaggccgccgtggccgccgccgccgccagcgccaacggcgccgccggcggcctggccggcaccaccaacggccccttcagacccctgggcacccagcagccccagccccagccccagcagcagcccaacaacaacctggccagcagcagcttctacggcaacaacagcctgaacagcaacagccagagcagcagcctgttcagccagggcagcgcccagcccgccaacaccagcctgggcttcggcagcagcagcagcctgggcgccaccctgggcagcgccctgggcggcttcggcaccgccgtggccaacagcaacaccggcagcggcagcagaagagacagcctgaccggcagcagcgacctgtacaagagaaccagcagcagcctgacccccatcggccacagcttctacaacggcctgagcttcagcagcagccccggccccgtgggcatgcccctgcccagccagggccccggccacagccagacccccccccccagcctgagcagccacggcagcagcagcagcctgaacctgggcggcctgaccaacggcagcggcagatacatcagcgccgcccccggcgccgaggccaagtacagaagcgccagcagcgccagcagcctgttcagccccagcagcaccctgttcagcagcagcagactgagatacggcatgagcgacgtgatgcccagcggcagaagcagactgctggaggacttcagaaacaacagataccccaacctgcagctgagagagatcgccggccacatcatggagttcagccaggaccagcacggcagcagattcatccagctgaagctggagagagccacccccgccgagagacagctggtgttcaacgagatcctgcaggccgcctaccagctgatggtggacgtgttcggcaactacgtgatccagaagttcttcgagttcggcagcctggagcagaagctggccctggccgagagaatcagaggccacgtgctgagcctggccctgcagatgtacggctgcagagtgatccagaaggccctggagttcatccccagcgaccagcaggtgatcaacgagatggtgagagagctggacggccacgtgctgaagtgcgtgaaggaccagaacggcaaccacgtggtgcagaagtgcatcgagtgcgtgcagccccagagcctgcagttcatcatcgacgccttcaagggccaggtgttcgccctgagcacccacccctacggctgcagagtgatccagagaatcctggagcactgcctgcccgaccagaccctgcccatcctggaggagctgcaccagcacaccgagcagctggtgcaggaccagtacggcaactacgtgatccagcacgtgctggagcacggcagacccgaggacaagagcaagatcgtggccgagatcagaggcaacgtgctggtgctgagccagcacaagttcgccagcaacgtggtggagaagtgcgtgacccacgccagcagaaccgagagagccgtgctgatcgacgaggtgtgcaccatgaacgacggcccccacagcgccctgtacaccatgatgaaggaccagtacgccaactacgtggtgcagaagatgatcgacgtggccgagcccggccagagaaagatcgtgatgcacaagatcagaccccacatcgccaccctgagaaagtacacctacggcaagcacatcctggccaagctggagaagtactacatgaagaacggcgtggacctgggccccatctgcggcccccccaacggcatcatctag

SEQ ID NO: 95851 - DNA, 3135 bp, synthetic construct
  misc_feature 1..3135: note = Description of Artificial Sequence: Synthetic coding sequence
  source 1..3135: mol_type = other DNA
atgagcgtggcctgcgtgctgaagagaaaggccgtgctgtggcaggacagcttcagcccccacctgaagcaccacccccaggagcccgccaaccccaacatgcccgtggtgctgaccagcggcaccggcagccaggcccagccccagcccgccgccaaccaggccctggccgccggcacccacagcagccccgtgcccggcagcatcggcgtggccggcagaagccaggacgacgccatggtggactacttcttccagagacagcacggcgagcagctgggcggcggcggcagcggcggcggcggctacaacaacagcaagcacagatggcccaccggcgacaacatccacgccgagcaccaggtgagaagcatggacgagctgaaccacgacttccaggccctggccctggagggcagagccatgggcgagggccccagagacgccgacagcgacgagaacgacaagggcgagaagaagaacaagggcaccttcgacggcgacaagctgggcgacctgaaggaggagggcgacgtgatggacaagaccaacggcctgcccgtgcagaacggcatcgacgccgacgtgaaggacttcagcagaacccccggcaactgccagaacagcgccaacgaggtggacctgctgggccccaaccagaacggcagcgagggcctggcccagctgaccagcaccaacggcgccaagcccgtggaggacttcagcaacatggagagccagagcgtgcccctggaccccatggagcacgtgggcatggagcccctgcagttcgactacagcggcacccaggtgcccgtggacagcgccgccgccaccgtgggcctgttcgactacaacagccagcagcagctgttccagagacccaacgccctggccgtgcagcagctgaccgccgcccagcagcagcagtacgccctggccgccgcccaccagccccacatcggcctggcccccgccgccttcgtgcccaacccctacatcatcagcgccgccccccccggcaccgacccctacaccgccggcctggccgccgccgccaccctgggccccgccgtggtgccccaccagtactacggcgtgaccccctggggcgtgtaccccgccagcctgttccagcagcaggccgccgccgccgccgccgccaccaacagcgccaaccagcagaccaccccccaggcccagcagggccagcagcaggtgctgagaggcggcgccagccagagacccctgacccccaaccagaaccagcagggccagcagaccgaccccctggtggccgccgccgccgtgaacagcgccctggccttcggccagggcctggccgccggcatgcccgccgtggccgccgccgccgccagcgccaacggcgccgccggcggcctggccggcaccaccaacggccccttcagacccctgggcacccagcagccccagccccagccccagcagcagcccaacaacaacctggccagcagcagcttctacggcaacaacagcctgaacagcaacagccagagcagcagcctgttcagccagggcagcgcccagcccgccaacaccagcctgggcttcggcagcagcagcagcctgggcgccaccctgggcagcgccctgggcggcttcggcaccgccgtggccaacagcaacaccggcagcggcagcagaagagacagcctgaccggcagcagcgacctgtacaagagaaccagcagcagcctgacccccatcggccacagcttctacaacggcctgagcttcagcagcagccccggccccgtgggcatgcccctgcccagccagggccccggccacagccagacccccccccccagcctgagcagccacggcagcagcagcagcctgaacctgggcggcctgaccaacggcagcggcagatacatcagcgccgcccccggcgccgaggccaagtacagaagcgccagcagcgccagcagcctgttcagccccagcagcaccctgttcagcagcagcagactgagatacggcatgagcgacgtgatgcccagcggcagaagcagactgctggaggacttcagaaacaacagataccccaacctgcagctgagagagatcgccggccacatcatggagttcagccaggaccagcacggcagcagattcatccagctgaagctggagagagccacccccgccgagagacagctggtgttcaacgagatcctgcaggccgcctaccagctgatggtggacgtgttcggcaactacgtgatccagaagttcttcgagttcggcagcctggagcagaagctggccctggccgagagaatcagaggccacgtgctgagcctggccctgcagatgtacggctgcagagtgatccagaaggccctggagttcatccccagcgaccagcaggtgatcaacgagatggtgagagagctggacggccacgtgctgaagtgcgtgaaggaccagaacggcaaccacgtggtgcagaagtgcatcgagtgcgtgcagccccagagcctgcagttcatcatcgacgccttcaagggccaggtgttcgccctgagcacccacccctacggctgcagagtgatccagagaatcctggagcactgcctgcccgaccagaccctgcccatcctggaggagctgcaccagcacaccgagcagctggtgcaggaccagtacggcaactacgtgatccagcacgtgctggagcacggcagacccgaggacaagagcaagatcgtggccgagatcagaggcaacgtgctggtgctgagccagcacaagttcgccagcaacgtggtggagaagtgcgtgacccacgccagcagaaccgagagagccgtgctgatcgacgaggtgtgcaccatgaacgacggcccccacagcgccctgtacaccatgatgaaggaccagtacgccaactacgtggtgcagaagatgatcgacgtggccgagcccggccagagaaagatcgtgatgcacaagatcagaccccacatcgccaccctgagaaagtacacctacggcaagcacatcctggccaagctggagaagtactacatgaagaacggcgtggacctgggccccatctgcggcccccccaacggcatcatctag

SEQ ID NO: 95852 - DNA, 3567 bp, synthetic construct
  misc_feature 1..3567: note = Description of Artificial Sequence: Synthetic coding sequence
  source 1..3567: mol_type = other DNA
atgagcgtggcctgcgtgctgaagagaaaggccgtgctgtggcaggacagcttcagcccccacctgaagcaccacccccaggagcccgccaaccccaacatgcccgtggtgctgaccagcggcaccggcagccaggcccagccccagcccgccgccaaccaggccctggccgccggcacccacagcagccccgtgcccggcagcatcggcgtggccggcagaagccaggacgacgccatggtggactacttcttccagagacagcacggcgagcagctgggcggcggcggcagcggcggcggcggctacaacaacagcaagcacagatggcccaccggcgacaacatccacgccgagcaccaggtgagaagcatggacgagctgaaccacgacttccaggccctggccctggagggcagagccatgggcgagcagctgctgcccggcaagaagttctgggagaccgacgagagcagcaaggacggccccaagggcatcttcctgggcgaccagtggagagacagcgcctggggcaccagcgaccacagcgtgagccagcccatcatggtgcagagaagacccggccagagcttccacgtgaacagcgaggtgaacagcgtgctgagccccagaagcgagagcggcggcctgggcgtgagcatggtggagtacgtgctgagcagcagccccggcgacagctgcctgagaaagggcggcttcggccccagagacgccgacagcgacgagaacgacaagggcgagaagaagaacaagggcaccttcgacggcgacaagctgggcgacctgaaggaggagggcgacgtgatggacaagaccaacggcctgcccgtgcagaacggcatcgacgccgacgtgaaggacttcagcagaacccccggcaactgccagaacagcgccaacgaggtggacctgctgggccccaaccagaacggcagcgagggcctggcccagctgaccagcaccaacggcgccaagcccgtggaggacttcagcaacatggagagccagagcgtgcccctggaccccatggagcacgtgggcatggagcccctgcagttcgactacagcggcacccaggtgcccgtggacagcgccgccgccaccgtgggcctgttcgactacaacagccagcagcagctgttccagagacccaacgccctggccgtgcagcagctgaccgccgcccagcagcagcagtacgccctggccgccgcccaccagccccacatcggcctggcccccgccgccttcgtgcccaacccctacatcatcagcgccgccccccccggcaccgacccctacaccgccggcctggccgccgccgccaccctgggccccgccgtggtgccccaccagtactacggcgtgaccccctggggcgtgtaccccgccagcctgttccagcagcaggccgccgccgccgccgccgccaccaacagcgccaaccagcagaccaccccccaggcccagcagggccagcagcaggtgctgagaggcggcgccagccagagacccctgacccccaaccagaaccagcagggccagcagaccgaccccctggtggccgccgccgccgtgaacagcgccctggccttcggccagggcctggccgccggcatgcccggctaccccgtgctggcccccgccgcctactacgaccagaccggcgccctggtggtgaacgccggcgccagaaacggcctgggcgcccccgtgagactggtggcccccgcccccgtgatcatcagcagcagcgccgcccaggccgccgtggccgccgccgccgccagcgccaacggcgccgccggcggcctggccggcaccaccaacggccccttcagacccctgggcacccagcagccccagccccagccccagcagcagcccaacaacaacctggccagcagcagcttctacggcaacaacagcctgaacagcaacagccagagcagcagcctgttcagccagggcagcgcccagcccgccaacaccagcctgggcttcggcagcagcagcagcctgggcgccaccctgggcagcgccctgggcggcttcggcaccgccgtggccaacagcaacaccggcagcggcagcagaagagacagcctgaccggcagcagcgacctgtacaagagaaccagcagcagcctgacccccatcggccacagcttctacaacggcctgagcttcagcagcagccccggccccgtgggcatgcccctgcccagccagggccccggccacagccagacccccccccccagcctgagcagccacggcagcagcagcagcctgaacctgggcggcctgaccaacggcagcggcagatacatcagcgccgcccccggcgccgaggccaagtacagaagcgccagcagcgccagcagcctgttcagccccagcagcaccctgttcagcagcagcagactgagatacggcatgagcgacgtgatgcccagcggcagaagcagactgctggaggacttcagaaacaacagataccccaacctgcagctgagagagatcgccggccacatcatggagttcagccaggaccagcacggcagcagattcatccagctgaagctggagagagccacccccgccgagagacagctggtgttcaacgagatcctgcaggccgcctaccagctgatggtggacgtgttcggcaactacgtgatccagaagttcttcgagttcggcagcctggagcagaagctggccctggccgagagaatcagaggccacgtgctgagcctggccctgcagatgtacggctgcagagtgatccagaaggccctggagttcatccccagcgaccagcaggtgatcaacgagatggtgagagagctggacggccacgtgctgaagtgcgtgaaggaccagaacggcaaccacgtggtgcagaagtgcatcgagtgcgtgcagccccagagcctgcagttcatcatcgacgccttcaagggccaggtgttcgccctgagcacccacccctacggctgcagagtgatccagagaatcctggagcactgcctgcccgaccagaccctgcccatcctggaggagctgcaccagcacaccgagcagctggtgcaggaccagtacggcaactacgtgatccagcacgtgctggagcacggcagacccgaggacaagagcaagatcgtggccgagatcagaggcaacgtgctggtgctgagccagcacaagttcgccagcaacgtggtggagaagtgcgtgacccacgccagcagaaccgagagagccgtgctgatcgacgaggtgtgcaccatgaacgacggcccccacagcgccctgtacaccatgatgaaggaccagtacgccaactacgtggtgcagaagatgatcgacgtggccgagcccggccagagaaagatcgtgatgcacaagatcagaccccacatcgccaccctgagaaagtacacctacggcaagcacatcctggccaagctggagaagtactacatgaagaacggcgtggacctgggccccatctgcggcccccccaacggcatcatctag

SEQ ID NO: 95853 - DNA, 3489 bp, synthetic construct
  misc_feature 1..3489: note = Description of Artificial Sequence: Synthetic coding sequence
  source 1..3489: mol_type = other DNA
atgagcgtggcctgcgtgctgaagagaaaggccgtgctgtggcaggacagcttcagcccccacctgaagcaccacccccaggagcccgccaaccccaacatgcccgtggtgctgaccagcggcaccggcagccaggcccagccccagcccgccgccaaccaggccctggccgccggcacccacagcagccccgtgcccggcagcatcggcgtggccggcagaagccaggacgacgccatggtggactacttcttccagagacagcacggcgagcagctgggcggcggcggcagcggcggcggcggctacaacaacagcaagcacagatggcccaccggcgacaacatccacgccgagcaccaggtgagaagcatggacgagctgaaccacgacttccaggccctggccctggagggcagagccatgggcgagcagctgctgcccggcaagaagttctgggagaccgacgagagcagcaaggacggccccaagggcatcttcctgggcgaccagtggagagacagcgcctggggcaccagcgaccacagcgtgagccagcccatcatggtgcagagaagacccggccagagcttccacgtgaacagcgaggtgaacagcgtgctgagccccagaagcgagagcggcggcctgggcgtgagcatggtggagtacgtgctgagcagcagccccggcgacagctgcctgagaaagggcggcttcggccccagagacgccgacagcgacgagaacgacaagggcgagaagaagaacaagggcaccttcgacggcgacaagctgggcgacctgaaggaggagggcgacgtgatggacaagaccaacggcctgcccgtgcagaacggcatcgacgccgacgtgaaggacttcagcagaacccccggcaactgccagaacagcgccaacgaggtggacctgctgggccccaaccagaacggcagcgagggcctggcccagctgaccagcaccaacggcgccaagcccgtggaggacttcagcaacatggagagccagagcgtgcccctggaccccatggagcacgtgggcatggagcccctgcagttcgactacagcggcacccaggtgcccgtggacagcgccgccgccaccgtgggcctgttcgactacaacagccagcagcagctgttccagagacccaacgccctggccgtgcagcagctgaccgccgcccagcagcagcagtacgccctggccgccgcccaccagccccacatcgccggcctggcccccgccgccttcgtgcccaacccctacatcatcagcgccgccccccccggcaccgacccctacaccgccggcctggccgccgccgccaccctgggccccgccgtggtgccccaccagtactacggcgtgaccccctggggcgtgtaccccgccagcctgttccagcagcaggccgccgccgccgccgccgccaccaacagcgccaaccagcagaccaccccccaggcccagcagggccagcagcaggtgctgagaggcggcgccagccagagacccctgacccccaaccagaaccagcagggccagcagaccgaccccctggtggccgccgccgccgtgaacagcgccctggccttcggccagggcctggccgccggcatgcccggctaccccgtgctggcccccgccgcctactacgaccagaccggcgccctggtggtgaacgccggcgccagaaacggcctgggcgcccccgtgagactggtggcccccgcccccgtgatcatcagcagcagcgccgcccaggccggcacccagcagccccagccccagccccagcagcagcccaacaacaacctggccagcagcagcttctacggcaacaacagcctgaacagcaacagccagagcagcagcctgttcagccagggcagcgcccagcccgccaacaccagcctgggcttcggcagcagcagcagcctgggcgccaccctgggcagcgccctgggcggcttcggcaccgccgtggccaacagcaacaccggcagcggcagcagaagagacagcctgaccggcagcagcgacctgtacaagagaaccagcagcagcctgacccccatcggccacagcttctacaacggcctgagcttcagcagcagccccggccccgtgggcatgcccctgcccagccagggccccggccacagccagacccccccccccagcctgagcagccacggcagcagcagcagcctgaacctgggcggcctgaccaacggcagcggcagatacatcagcgccgcccccggcgccgaggccaagtacagaagcgccagcagcgccagcagcctgttcagccccagcagcaccctgttcagcagcagcagactgagatacggcatgagcgacgtgatgcccagcggcagaagcagactgctggaggacttcagaaacaacagataccccaacctgcagctgagagagatcgccggccacatcatggagttcagccaggaccagcacggcagcagattcatccagctgaagctggagagagccacccccgccgagagacagctggtgttcaacgagatcctgcaggccgcctaccagctgatggtggacgtgttcggcaactacgtgatccagaagttcttcgagttcggcagcctggagcagaagctggccctggccgagagaatcagaggccacgtgctgagcctggccctgcagatgtacggctgcagagtgatccagaaggccctggagttcatccccagcgaccagcaggtgatcaacgagatggtgagagagctggacggccacgtgctgaagtgcgtgaaggaccagaacggcaaccacgtggtgcagaagtgcatcgagtgcgtgcagccccagagcctgcagttcatcatcgacgccttcaagggccaggtgttcgccctgagcacccacccctacggctgcagagtgatccagagaatcctggagcactgcctgcccgaccagaccctgcccatcctggaggagctgcaccagcacaccgagcagctggtgcaggaccagtacggcaactacgtgatccagcacgtgctggagcacggcagacccgaggacaagagcaagatcgtggccgagatcagaggcaacgtgctggtgctgagccagcacaagttcgccagcaacgtggtggagaagtgcgtgacccacgccagcagaaccgagagagccgtgctgatcgacgaggtgtgcaccatgaacgacggcccccacagcgccctgtacaccatgatgaaggaccagtacgccaactacgtggtgcagaagatgatcgacgtggccgagcccggccagagaaagatcgtgatgcacaagatcagaccccacatcgccaccctgagaaagtacacctacggcaagcacatcctggccaagctggagaagtactacatgaagaacggcgtggacctgggccccatctgcggcccccccaacggcatcatctag

SEQ ID NO: 95854 - DNA, 291 bp, synthetic construct
  misc_feature 1..291: note = Description of Artificial Sequence: Synthetic coding sequence
  source 1..291: mol_type = other DNA
atgagcgtggcctgcgtgctgaagagaaaggccgtgctgtggcaggacagcttcagcccccacctgaagcaccacccccaggagcccgccaaccccaacatgcccgtggtgctgaccagcggcaccggcagccaggcccagccccagcccgccgccaaccaggccctggccgccggcacccacagcagccccgtgcccggcagcatcggcgtggccggcagaagccaggacgacgccatggtggactacttcttccagagacagcacggcgagcagctgggcggcggctag

SEQ ID NO: 95855 - DNA, 1551 bp, synthetic construct
  misc_feature 1..1551: note = Description of Artificial Sequence: Synthetic coding sequence
  source 1..1551: mol_type = other DNA
atgagcgtggcctgcgtgctgaagagaaaggccgtgctgtggcaggacagcttcagcccccacctgaagcaccacccccaggagcccgccaaccccaacatgcccgtggtgctgaccagcggcaccggcagccaggcccagccccagcccgccgccaaccaggccctggccgccggcacccacagcagccccgtgcccggcagcatcggcgtggccggcagaagccaggacgacgccatggtggactacttcttccagagacagcacggcgagcagctgggcggcggcggcagcggcggcggcggctacaacaacagcaagcacagatggcccaccggcgacaacatccacgccgagcaccaggtgagaagcatggacgagctgaaccacgacttccaggccctggccctggagggcagagccatgggcgagcagctgctgcccggcaagaagttctgggagaccgacgagagcagcaaggacggccccaagggcatcttcctgggcgaccagtggagagacagcgcctggggcaccagcgaccacagcgtgagccagcccatcatggtgcagagaagacccggccagagcttccacgtgaacagcgaggtgaacagcgtgctgagccccagaagcgagagcggcggcctgggcgtgagcatggtggagtacgtgctgagcagcagccccggcgacagctgcctgagaaagggcggcttcggccccagagacgccgacagcgacgagaacgacaagggcgagaagaagaacaagggcaccttcgacggcgacaagctgggcgacctgaaggaggagggcgacgtgatggacaagaccaacggcctgcccgtgcagaacggcatcgacgccgacgtgaaggacttcagcagaacccccggcaactgccagaacagcgccaacgaggtggacctgctgggccccaaccagaacggcagcgagggcctggcccagctgaccagcaccaacggcgccaagcccgtggaggacttcagcaacatggagagccagagcgtgcccctggaccccatggagcacgtgggcatggagcccctgcagttcgactacagcggcacccaggtgcccgtggacagcgccgccgccaccgtgggcctgttcgactacaacagccagcagcagctgttccagagacccaacgccctggccgtgcagcagctgaccgccgcccagcagcagcagtacgccctggccgccgcccaccagccccacatcggcctggcccccgccgccttcgtgcccaacccctacatcatcagcgccgccccccccggcaccgacccctacaccgccggcctggccgccgccgccaccctgggccccgccgtggtgccccaccagtactacggcgtgaccccctggggcgtgtaccccgccagcctgttccagcagcaggccgccgccgccgccgccgccaccaacagcgccaaccagcagaccaccccccaggcccagcagggccagcagcagaccgagttctgcttctgctgccccggctggagcgccatggtgtag

SEQ ID NO: 95856 - DNA, 2964 bp, synthetic construct
  misc_feature 1..2964: note = Description of Artificial Sequence: Synthetic coding sequence
  source 1..2964: mol_type = other DNA
atgaaccacgacttccaggccctggccctggagagcagaggcatgggcgagctgctgcccaccaagaagttctgggagcccgacgacagcaccaaggacggccagaagggcatcttcctgggcgacgacgagtggagagagaccgcctggggcgccagccaccacagcatgagccagcccatcatggtgcagagaagaagcggccagggcttccacggcaacagcgaggtgaacgccatcctgagccccagaagcgagagcggcggcctgggcgtgagcatggtggagtacgtgctgagcagcagccccgccgacaagctggacagcagattcagaaagggcaacttcggcaccagagacgccgagaccgacggccccgagaagggcgaccagaagggcaaggccagccccttcgaggaggaccagaacagagacctgaagcagggcgacgacgacgacagcaagatcaacggcagaggcctgcccaacggcatggacgccgactgcaaggacttcaacagaacccccggcagcagacaggccagccccaccgaggtggtggagagactgggccccaacaccaaccccagcgagggcctgggccccctgcccaaccccaccgccaacaagcccctggtggaggagttcagcaaccccgagacccagaacctggacgccatggagcaggtgggcctggagagcctgcagttcgactaccccggcaaccaggtgcccatggacagcagcggcgccaccgtgggcctgttcgactacaacagccagcagcagctgttccagagaaccaacgccctgaccgtgcagcagctgaccgccgcccagcagcagcagtacgccctggccgccgcccagcagccccacatcgccggcgtgttcagcgccggcctggcccccgccgccttcgtgcccaacccctacatcatcagcgccgccccccccggcaccgacccctacaccgccgccggcctggccgccgccgccaccctggccggccccgccgtggtgcccccccagtactacggcgtgccctggggcgtgtaccccgccaacctgttccagcagcaggccgccgccgccgccaacaacaccgccagccagcaggccgccagccaggcccagcccggccagcagcaggtgctgagagccggcgccggccagagacccctgacccccaaccagggccagcagggccagcaggccgagagcctggccgccgccgccgccgccaaccccaccctggccttcggccagggcctggccaccggcatgcccggctaccaggtgctggcccccaccgcctactacgaccagaccggcgccctggtggtgggccccggcgccagaaccggcctgggcgcccccgtgagactgatggcccccacccccgtgctgatcagcagcgccgccgcccaggccgccgccgccgccgccgccggcggcaccgccagcagcctgaccggcagcaccaacggcctgttcagacccatcggcacccagcccccccagcagcagcagcagcagcccagcaccaacctgcagagcaacagcttctacggcagcagcagcctgaccaacagcagccagagcagcagcctgttcagccacggccccggccagcccggcagcaccagcctgggcttcggcagcggcaacagcctgggcgccgccatcggcagcgccctgagcggcttcggcagcagcggcggcctgaccaacggcagcggcagatacatcagcgccgcccccggcgccgaggccaagtacagaagcgccagcagcaccagcagcctgttcagcagcagcagccagctgttcccccccagcagactgagatacaacagaagcgacatcatgcccagcggcagaagcagactgctggaggacttcagaaacaacagattccccaacctgcagctgagagacctgatcggccacatcgtggagttcagccaggaccagcacggcagcagattcatccagcagaagctggagagagccacccccgccgagagacagatggtgttcaacgagatcctgcaggccgcctaccagctgatgaccgacgtgttcggcaactacgtgatccagaagttcttcgagttcggcagcctggaccagaagctggccctggccaccagaatcagaggccacgtgctgcccctggccctgcagatgtacggctgcagagtgatccagaaggccctggagagcatcagcagcgaccagcaggtgatcagcgagatggtgaaggagctggacggccacgtgctgaagtgcgtgaaggaccagaacggcaaccacgtggtgcagaagtgcatcgagtgcgtgcagccccagagcctgcagttcatcatcgacgccttcaagggccaggtgttcgtgctgagcacccacccctacggctgcagagtgatccagagaatcctggagcactgcaccgccgagcagaccctgcccatcctggaggagctgcaccagcacaccgagcagctggtgcaggaccagtacggcaactacgtgatccagcacgtgctggagcacggcagacccgaggacaagagcaagatcgtgagcgagatcagaggcaaggtgctggccctgagccagcacaagttcgccagcaacgtggtggagaagtgcgtgacccacgccagcagagccgagagagccctgctgatcgacgaggtgtgctgccagaacgacggcccccacagcgccctgtacaccatgatgaaggaccagtacgccaactacgtggtgcagaagatgatcgacatggccgagcccgcccagagaaagatcatcatgcacaagatcagaccccacatcaccaccctgagaaagtacacctacggcaagcacatcctggccaagctggagaagtactacctgaagaacagccccgacctgggccccatcggcggcccccccaacggcatgctgtag

SEQ ID NO: 95857 - DNA, 3195 bp, synthetic construct
  misc_feature 1..3195: note = Description of Artificial Sequence: Synthetic coding sequence
  source 1..3195: mol_type = other DNA
atgaaccacgacttccaggccctggccctggagagcagaggcatgggcgagctgctgcccaccaagaagttctgggagcccgacgacagcaccaaggacggccagaagggcatcttcctgggcgacgacgagtggagagagaccgcctggggcgccagccaccacagcatgagccagcccatcatggtgcagagaagaagcggccagggcttccacggcaacagcgaggtgaacgccatcctgagccccagaagcgagagcggcggcctgggcgtgagcatggtggagtacgtgctgagcagcagccccgccgacaagctggacagcagattcagaaagggcaacttcggcaccagagacgccgagaccgacggccccgagaagggcgaccagaagggcaaggccagccccttcgaggaggaccagaacagagacctgaagcagggcgacgacgacgacagcaagatcaacggcagaggcctgcccaacggcatggacgccgactgcaaggacttcaacagaacccccggcagcagacaggccagccccaccgaggtggtggagagactgggccccaacaccaaccccagcgagggcctgggccccctgcccaaccccaccgccaacaagcccctggtggaggagttcagcaaccccgagacccagaacctggacgccatggagcaggtgggcctggagagcctgcagttcgactaccccggcaaccaggtgcccatggacagcagcggcgccaccgtgggcctgttcgactacaacagccagcagcagctgttccagagaaccaacgccctgaccgtgcagcagctgaccgccgcccagcagcagcagtacgccctggccgccgcccagcagccccacatcgccggcgtgttcagcgccggcctggcccccgccgccttcgtgcccaacccctacatcatcagcgccgccccccccggcaccgacccctacaccgccgccggcctggccgccgccgccaccctggccggccccgccgtggtgcccccccagtactacggcgtgccctggggcgtgtaccccgccaacctgttccagcagcaggccgccgccgccgccaacaacaccgccagccagcaggccgccagccaggcccagcccggccagcagcaggtgctgagagccggcgccggccagagacccctgacccccaaccagggccagcagggccagcaggccgagagcctggccgccgccgccgccgccaaccccaccctggccttcggccagggcctggccaccggcatgcccggctaccaggtgctggcccccaccgcctactacgaccagaccggcgccctggtggtgggccccggcgccagaaccggcctgggcgcccccgtgagactgatggcccccacccccgtgctgatcagcagcgccgccgcccaggccgccgccgccgccgccgccggcggcaccgccagcagcctgaccggcagcaccaacggcctgttcagacccatcggcacccagcccccccagcagcagcagcagcagcccagcaccaacctgcagagcaacagcttctacggcagcagcagcctgaccaacagcagccagagcagcagcctgttcagccacggccccggccagcccggcagcaccagcctgggcttcggcagcggcaacagcctgggcgccgccatcggcagcgccctgagcggcttcggcagcagcgtgggcagcagcgccagcagcagcgccaccagaagagagagcctgagcaccagcagcgacctgtacaagagaagcagcagcagcctggcccccatcggccagcccttctacaacagcctgggcttcagcagcagccccagccccatcggcatgcccctgcccagccagacccccggccacagcctgacccccccccccagcctgagcagccacggcagcagcagcagcctgcacctgggcggcctgaccaacggcagcggcagatacatcagcgccgcccccggcgccgaggccaagtacagaagcgccagcagcaccagcagcctgttcagcagcagcagccagctgttcccccccagcagactgagatacaacagaagcgacatcatgcccagcggcagaagcagactgctggaggacttcagaaacaacagattccccaacctgcagctgagagacctgatcggccacatcgtggagttcagccaggaccagcacggcagcagattcatccagcagaagctggagagagccacccccgccgagagacagatggtgttcaacgagatcctgcaggccgcctaccagctgatgaccgacgtgttcggcaactacgtgatccagaagttcttcgagttcggcagcctggaccagaagctggccctggccaccagaatcagaggccacgtgctgcccctggccctgcagatgtacggctgcagagtgatccagaaggccctggagagcatcagcagcgaccagcagagcgagatggtgaaggagctggacggccacgtgctgaagtgcgtgaaggaccagaacggcaaccacgtggtgcagaagtgcatcgagtgcgtgcagccccagagcctgcagttcatcatcgacgccttcaagggccaggtgttcgtgctgagcacccacccctacggctgcagagtgatccagagaatcctggagcactgcaccgccgagcagaccctgcccatcctggaggagctgcaccagcacaccgagcagctggtgcaggaccagtacggcaactacgtgatccagcacgtgctggagcacggcagacccgaggacaagagcaagatcgtgagcgagatcagaggcaaggtgctggccctgagccagcacaagttcgccagcaacgtggtggagaagtgcgtgacccacgccagcagagccgagagagccctgctgatcgacgaggtgtgctgccagaacgacggcccccacagcgccctgtacaccatgatgaaggaccagtacgccaactacgtggtgcagaagatgatcgacatggccgagcccgcccagagaaagatcatcatgcacaagatcagaccccacatcaccaccctgagaaagtacacctacggcaagcacatcctggccaagctggagaagtactacctgaagaacagccccgacctgggccccatcggcggcccccccaacggcatgctgtag

SEQ ID NO: 95858 - DNA, 3201 bp, synthetic construct
  misc_feature 1..3201: note = Description of Artificial Sequence: Synthetic coding sequence
  source 1..3201: mol_type = other DNA
atgaaccacgacttccaggccctggccctggagagcagaggcatgggcgagctgctgcccaccaagaagttctgggagcccgacgacagcaccaaggacggccagaagggcatcttcctgggcgacgacgagtggagagagaccgcctggggcgccagccaccacagcatgagccagcccatcatggtgcagagaagaagcggccagggcttccacggcaacagcgaggtgaacgccatcctgagccccagaagcgagagcggcggcctgggcgtgagcatggtggagtacgtgctgagcagcagccccgccgacaagctggacagcagattcagaaagggcaacttcggcaccagagacgccgagaccgacggccccgagaagggcgaccagaagggcaaggccagccccttcgaggaggaccagaacagagacctgaagcagggcgacgacgacgacagcaagatcaacggcagaggcctgcccaacggcatggacgccgactgcaaggacttcaacagaacccccggcagcagacaggccagccccaccgaggtggtggagagactgggccccaacaccaaccccagcgagggcctgggccccctgcccaaccccaccgccaacaagcccctggtggaggagttcagcaaccccgagacccagaacctggacgccatggagcaggtgggcctggagagcctgcagttcgactaccccggcaaccaggtgcccatggacagcagcggcgccaccgtgggcctgttcgactacaacagccagcagcagctgttccagagaaccaacgccctgaccgtgcagcagctgaccgccgcccagcagcagcagtacgccctggccgccgcccagcagccccacatcgccggcgtgttcagcgccggcctggcccccgccgccttcgtgcccaacccctacatcatcagcgccgccccccccggcaccgacccctacaccgccgccggcctggccgccgccgccaccctggccggccccgccgtggtgcccccccagtactacggcgtgccctggggcgtgtaccccgccaacctgttccagcagcaggccgccgccgccgccaacaacaccgccagccagcaggccgccagccaggcccagcccggccagcagcaggtgctgagagccggcgccggccagagacccctgacccccaaccagggccagcagggccagcaggccgagagcctggccgccgccgccgccgccaaccccaccctggccttcggccagggcctggccaccggcatgcccggctaccaggtgctggcccccaccgcctactacgaccagaccggcgccctggtggtgggccccggcgccagaaccggcctgggcgcccccgtgagactgatggcccccacccccgtgctgatcagcagcgccgccgcccaggccgccgccgccgccgccgccggcggcaccgccagcagcctgaccggcagcaccaacggcctgttcagacccatcggcacccagcccccccagcagcagcagcagcagcccagcaccaacctgcagagcaacagcttctacggcagcagcagcctgaccaacagcagccagagcagcagcctgttcagccacggccccggccagcccggcagcaccagcctgggcttcggcagcggcaacagcctgggcgccgccatcggcagcgccctgagcggcttcggcagcagcgtgggcagcagcgccagcagcagcgccaccagaagagagagcctgagcaccagcagcgacctgtacaagagaagcagcagcagcctggcccccatcggccagcccttctacaacagcctgggcttcagcagcagccccagccccatcggcatgcccctgcccagccagacccccggccacagcctgacccccccccccagcctgagcagccacggcagcagcagcagcctgcacctgggcggcctgaccaacggcagcggcagatacatcagcgccgcccccggcgccgaggccaagtacagaagcgccagcagcaccagcagcctgttcagcagcagcagccagctgttcccccccagcagactgagatacaacagaagcgacatcatgcccagcggcagaagcagactgctggaggacttcagaaacaacagattccccaacctgcagctgagagacctgatcggccacatcgtggagttcagccaggaccagcacggcagcagattcatccagcagaagctggagagagccacccccgccgagagacagatggtgttcaacgagatcctgcaggccgcctaccagctgatgaccgacgtgttcggcaactacgtgatccagaagttcttcgagttcggcagcctggaccagaagctggccctggccaccagaatcagaggccacgtgctgcccctggccctgcagatgtacggctgcagagtgatccagaaggccctggagagcatcagcagcgaccagcaggtgatcagcgagatggtgaaggagctggacggccacgtgctgaagtgcgtgaaggaccagaacggcaaccacgtggtgcagaagtgcatcgagtgcgtgcagccccagagcctgcagttcatcatcgacgccttcaagggccaggtgttcgtgctgagcacccacccctacggctgcagagtgatccagagaatcctggagcactgcaccgccgagcagaccctgcccatcctggaggagctgcaccagcacaccgagcagctggtgcaggaccagtacggcaactacgtgatccagcacgtgctggagcacggcagacccgaggacaagagcaagatcgtgagcgagatcagaggcaaggtgctggccctgagccagcacaagttcgccagcaacgtggtggagaagtgcgtgacccacgccagcagagccgagagagccctgctgatcgacgaggtgtgctgccagaacgacggcccccacagcgccctgtacaccatgatgaaggaccagtacgccaactacgtggtgcagaagatgatcgacatggccgagcccgcccagagaaagatcatcatgcacaagatcagaccccacatcaccaccctgagaaagtacacctacggcaagcacatcctggccaagctggagaagtactacctgaagaacagccccgacctgggccccatcggcggcccccccaacggcatgctgtag

SEQ ID NO: 95859 - DNA, 3195 bp, synthetic construct; identical to SEQ ID NO: 95857
  misc_feature 1..3195: note = Description of Artificial Sequence: Synthetic coding sequence
  source 1..3195: mol_type = other DNA

SEQ ID NO: 95860 - DNA, 105 bp, synthetic construct
  misc_feature 1..105: note = Description of Artificial Sequence: Synthetic coding sequence
  source 1..105: mol_type = other DNA
atgaaccacgacttccaggccctggccctggagagcagaggcatgggcgagctgctgcccaccaagaagttctgggagcccgacgacagcaccaaggacggctag

SEQ ID NO: 95861 - DNA, 882 bp, synthetic construct
  misc_feature 1..882: note = Description of Artificial Sequence: Synthetic coding sequence
  source 1..882: mol_type = other DNA
atgaaccacgacttccaggccctggccctggagagcagaggcatgggcgagctgctgcccaccaagaagttctgggagcccgacgacagcaccaaggacggccagaagggcatcttcctgggcgacgacgagtggagagagaccgcctggggcgccagccaccacagcatgagccagcccatcatggtgcagagaagaagcggccagggcttccacggcaacagcgaggtgaacgccatcctgagccccagaagcgagagcggcggcctgggcgtgagcatggtggagtacgtgctgagcagcagccccgccgacaagctggacagcagattcagaaagggcaacttcggcaccagagacgccgagaccgacggccccgagaagggcgaccagaagggcaaggccagccccttcgaggaggaccagaacagagacctgaagcagggcgacgacgacgacagcaagatcaacggcagaggcctgcccaacggcatggacgccgactgcaaggacttcaacagaacccccggcagcagacaggccagccccaccgaggtggtggagagactgggccccaacaccaaccccagcgagggcctgggccccctgcccaaccccaccgccaacaagcccctggtggaggagttcagcaaccccgagacccagaacctggacgccatggagcaggtgggcctggagagcctgcagttcgactaccccggcaaccaggtgcccatggacagcagcggcgccaccgtgggcctgttcgactacaacagccagcagcagctgttccagagaaccaacgccctgaccgtgcagcagctgaccgccgcccagcagcagcagtacgccctggccgccgcccagcagccccactag

SEQ ID NO: 95862 - DNA, 3027 bp, synthetic construct
  misc_feature 1..3027: note = Description of Artificial Sequence: Synthetic coding sequence
  source 1..3027: mol_type = other DNA
atgagccagcccatcatggtgcagagaagaagcggccagggcttccacggcaacagcgaggtgaacgccatcctgagccccagaagcgagagcggcggcctgggcgtgagcatggtggagtacgtgctgagcagcagccccgccgacaagctggacagcagattcagaaagggcaacttcggcaccagagacgccgagaccgacggccccgagaagggcgaccagaagggcaaggccagccccttcgaggaggaccagaacagagacctgaagcagggcgacgacgacgacagcaagatcaacggcagaggcctgcccaacggcatggacgccgactgcaaggacttcaacagaacccccggcagcagacaggccagccccaccgaggtggtggagagactgggccccaacaccaaccccagcgagggcctgggccccctgcccaaccccaccgccaacaagcccctggtggaggagttcagcaaccccgagacccagaacctggacgccatggagcaggtgggcctggagagcctgcagttcgactaccccggcaaccaggtgcccatggacagcagcggcgccaccgtgggcctgttcgactacaacagccagcagcagctgttccagagaaccaacgccctgaccgtgcagcagctgaccgccgcccagcagcagcagtacgccctggccgccgcccagcagccccacatcgccggcgtgttcagcgccggcctggcccccgccgccttcgtgcccaacccctacatcatcagcgccgccccccccggcaccgacccctacaccgccgccggcctggccgccgccgccaccctggccggccccgccgtggtgcccccccagtactacggcgtgccctggggcgtgtaccccgccaacctgttccagcagcaggccgccgccgccgccaacaacaccgccagccagcaggccgccagccaggcccagcccggccagcagcaggtgctgagagccggcgccggccagagacccctgacccccaaccagggccagcagggccagcaggccgagagcctggccgccgccgccgccgccaaccccaccctggccttcggccagggcctggccaccggcatgcccggctaccaggtgctggcccccaccgcctactacgaccagaccggcgccctggtggtgggccccggcgccagaaccggcctgggcgcccccgtgagactgatggcccccacccccgtgctgatcagcagcgccgccgcccaggccgccgccgccgccgccgccggcggcaccgccagcagcctgaccggcagcaccaacggcctgttcagacccatcggcacccagcccccccagcagcagcagcagcagcccagcaccaacctgcagagcaacagcttctacggcagcagcagcctgaccaacagcagccagagcagcagcctgttcagccacggccccggccagcccggcagcaccagcctgggcttcggcagcggcaacagcctgggcgccgccatcggcagcgccctgagcggcttcggcagcagcgtgggcagcagcgccagcagcagcgccaccagaagagagagcctgagcaccagcagcgacctgtacaagagaagcagcagcagcctggcccccatcggccagcccttctacaacagcctgggcttcagcagcagccccagccccatcggcatgcccctgcccagccagacccccggccacagcctgacccccccccccagcctgagcagccacggcagcagcagcagcctgcacctgggcggcctgaccaacggcagcggcagatacatcagcgccgcccccggcgccgaggccaagtacagaagcgccagcagcaccagcagcctgttcagcagcagcagccagctgttcccccccagcagactgagatacaacagaagcgacatcatgcccagcggcagaagcagactgctggaggacttcagaaacaacagattccccaacctgcagctgagagacctgatcggccacatcgtggagttcagccaggaccagcacggcagcagattcatccagcagaagctggagagagccacccccgccgagagacagatggtgttcaacgagatcctgcaggccgcctaccagctgatgaccgacgtgttcggcaactacgtgatccagaagttcttcgagttcggcagcctggaccagaagctggccctggccaccagaatcagaggccacgtgctgcccctggccctgcagatgtacggctgcagagtgatccagaaggccctggagagcatcagcagcgaccagcagagcgagatggtgaaggagctggacggccacgtgctgaagtgcgtgaaggaccagaacggcaaccacgtggtgcagaagtgcatcgagtgcgtgcagccccagagcctgcagttcatcatcgacgccttcaagggccaggtgttcgtgctgagcacccacccctacggctgcagagtgatccagagaatcctggagcactgcaccgccgagcagaccctgcccatcctggaggagctgcaccagcacaccgagcagctggtgcaggaccagtacggcaactacgtgatccagcacgtgctggagcacggcagacccgaggacaagagcaagatcgtgagcgagatcagaggcaaggtgctggccctgagccagcacaagttcgccagcaacgtggtggagaagtgcgtgacccacgccagcagagccgagagagccctgctgatcgacgaggtgtgctgccagaacgacggcccccacagcgccctgtacaccatgatgaaggaccagtacgccaactacgtggtgcagaagatgatcgacatggccgagcccgcccagagaaagatcatcatgcacaagatcagaccccacatcaccaccctgagaaagtacacctacggcaagcacatcctggccaagctggagaagtactacctgaagaacagccccgacctgggccccatcggcggcccccccaacggcatgctgtag

SEQ ID NO: 95863 - DNA, 870 bp, synthetic construct
  misc_feature 1..870: note = Description of Artificial Sequence: Synthetic coding sequence
  source 1..870: mol_type = other DNA
atggagaacggctacacctacgaggactacaagaacaccgccgagtggctgctgagccacaccaagcacagaccccaggtggccatcatctgcggcagcggcctgggcggcctgaccgacaagctgacccaggcccagatcttcgactacggcgagatccccaacttccccagaagcaccgtgcccggccacgccggcagactggtgttcggcttcctgaacggcagagcctgcgtgatgatgcagggcagattccacatgtacgagggctaccccctgtggaaggtgaccttccccgtgagagtgttccacctgctgggcgtggacaccctggtggtgaccaacgccgccggcggcctgaaccccaagttcgaggtgggcgacatcatgctgatcagagaccacatcaacctgcccggcttcagcggccagaaccccctgagaggccccaacgacgagagattcggcgacagattccccgccatgagcgacgcctacgacagaaccatgagacagagagccctgagcacctggaagcagatgggcgagcagagagagctgcaggagggcacctacgtgatggtggccggccccagcttcgagaccgtggccgagtgcagagtgctgcagaagctgggcgccgacgccgtgggcatgagcaccgtgcccgaggtgatcgtggccagacactgcggcctgagagtgttcggcttcagcctgatcaccaacaaggtgatcatggactacgagagcctggagaaggccaaccacgaggaggtgctggccgccggcaagcaggccgcccagaagctggagcagttcgtgagcatcctgatggccagcatccccctgcccgacaaggccagctag

SEQ ID NO: 95864 - DNA, 282 bp, synthetic construct
  misc_feature 1..282: note = Description of Artificial Sequence: Synthetic coding sequence
  source 1..282: mol_type = other DNA
atggagaacggctacacctacgaggactacaagaacaccgccgagtggctgctgagccacaccaagcacagaccccaggtggccatcatctgcggcagcggcctgggcggcctgaccgacaagctgacccaggcccagatcttcgactacggcgagatccccaacttccccagaagcaccgtgcccggccacgccggcagactggtgttcggcttcctgaacggcagagcctgcgtgatgatgcagggcagattccacatgtacgagggctaccccctgtag

SEQ ID NO: 95865 - DNA, 375 bp, synthetic construct
  misc_feature 1..375: note = Description of Artificial Sequence: Synthetic coding sequence
  source 1..375: mol_type = other DNA
atgagctacatccccggccagcccgtgaccgccgtggtgcagagagtggagatccacaagctgagacagggcgagaacctgatcctgggcttcagcatcggcggcggcatcgaccaggaccccagccagaaccccttcagcgaggacaagaccgacaagggcatctacgtgaccagagtgagcgagggcggccccgccgagatcgccggcctgcagatcggcgacaagatcatgcaggtgaacggctgggacatgaccatggtgacccacgaccaggccagaaagagactgaccaagagaagcgaggaggtggtgagactgctggtgaccagacagagcctgcagaaggccgtgcagcagagcatgctgagctag

SEQ ID NO: 95866 - DNA, 1194 bp, synthetic construct
  misc_feature 1..1194: note = Description of Artificial Sequence: Synthetic coding sequence
  source 1..1194: mol_type = other DNA
atgaactgcatcagcgacttcttcacctacgagaccaccaagagcgtggtggtgaagagctggaccatcggcatcatcaacagagtggtgcagctgctgatcatcagctacttcgtgggctgggtgttcctgcacgagaaggcctaccaggtgagagacaccgccatcgagagcagcgtggtgaccaaggtgaagggcagcggcctgtacgccaacagagtgatggacgtgagcgactacgtgacccccccccagggcaccagcgtgttcgtgatcatcaccaagatgatcgtgaccgagaaccagatgcagggcttctgccccgagagcgaggagaagtacagatgcgtgagcgacagccagtgcggccccgagagactgcccggcggcggcatcctgaccggcagatgcgtgaactacagcagcgtgctgagaacctgcgagatccagggctggtgccccaccgaggtggacaccgtggagacccccatcatgatggaggccgagaacttcaccatcttcatcaagaacagcatcagattccccctgttcaacttcgagaagggcaacctgctgcccaacctgaccgccagagacatgaagacctgcagattccaccccgacaaggaccccttctgccccatcctgagagtgggcgacgtggtgaagttcgccggccaggacttcgccaagctggccagaaccggcggcgtgctgggcatcaagatcggctgggtgtgcgacctggacaaggcctgggaccagtgcatccccaagtacagcttcaccagactggacagcgtgagcgagaagagcagcgtgagccccggctacaacttcagattcgccaagtactacaagatggagaacggcagcgagtacagaaccctgctgaaggccttcggcatcagattcgacgtgctggtgtacggcaacgccggcaagttcaacatcatccccaccatcatcagcagcgtggccgccttcaccagcgtgggcgtgggcaccgtgctgtgcgacatcatcctgctgaacttcctgaagggcgccgaccagtacaaggccaagaagttcgaggaggtgaacgagaccaccctgaagatcgccgccctgaccaaccccgtgtaccccagcgaccagaccaccgccgagaagcagagcaccgacagcggcgccttcagcatcggccactag

SEQ ID NO: 95867 - DNA, 1191 bp, synthetic construct
  misc_feature 1..1191: note = Description of Artificial Sequence: Synthetic coding sequence
  source 1..1191: mol_type = other DNA
atgaactgcatcagcgacttcttcacctacgagaccaccaagagcgtggtggtgaagagctggaccatcggcatcatcaacagagtggtgcagctgctgatcatcagctacttcgtgggctgggtgttcctgcacgagaaggcctaccaggtgagagacaccgccatcgagagcagcgtggtgaccaaggtgaagggcagcggcctgtacgccaacagagtgatggacgtgagcgactacgtgacccccccccagggcaccagcgtgttcgtgatcatcaccaagatgatcgtgaccgagaaccagatgcagggcttctgccccgagagcgaggagaagtacagatgcgtgagcgacagccagtgcggccccgagagactgcccggcggcggcatcctgaccggcagatgcgtgaactacagcagcgtgctgagaacctgcgagatccagggctggtgccccaccgaggtggacaccgtggagacccccatcatgatggaggccgagaacttcaccatcttcatcaagaacagcatcagattccccctgttcaacttcgagaagggcaacctgctgcccaacctgaccgccagagacatgaagacctgcagattccaccccgacaaggaccccttctgccccatcctgagagtgggcgacgtggtgaagttcgccggccaggacttcgccaagctggccagaaccggcggcgtgctgggcatcaagatcggctgggtgtgcgacctggacaaggcctgggaccagtgcatccccaagtacagcttcaccagactggacagcgtgagcgagaagagcagcgtgagccccggctacaacttcagattcgccaagtactacaagatggagaacggcagcgagtacagaaccctgctgaaggccttcggcatcagattcgacgtgctgtacaccggcgccggcaagttcaacatcatccccaccatcatcagcagcgtggccgccttcaccagcgtgggcgtgggcaccgtgctgtgcgacatcatcctgctgaacttcctgaagggcgccgaccagtacaaggccaagaagttcgaggaggtgaacgagaccaccctgaagatcgccgccctgaccaaccccgtgtaccccagcgaccagaccaccgccgagaagcagagcaccgacagcggcgccttcagcatcggccactag

SEQ ID NO: 95868 - DNA, 1167 bp, synthetic construct
  misc_feature 1..1167: note = Description of Artificial Sequence: Synthetic coding sequence
  source 1..1167: mol_type = other DNA
atggccggctgctgcgccgccctggccgccttcctgttcgagtacgacacccccagaatcgtgctgatcagaagcagaaaggtgggcctgatgaacagagccgtgcagctgctgatcctggcctacgtgatcggctgggtgttcgtgtgggagaagggctaccaggagaccgacagcgtggtgagcagcgtgaccaccaaggtgaagggcgtggccgtgaccaacaccagcaagctgggcttcagaatctgggacgtggccgactacgtgatccccgcccaggaggagaacagcctgttcgtgatgaccaacgtgatcctgaccatgaaccagacccagggcctgtgccccgagatccccgacgccaccaccgtgtgcaagagcgacgccagctgcaccgccggcagcgccggcacccacagcaacggcgtgagcaccggcagatgcgtggccttcaacggcagcgtgaagacctgcgaggtggccgcctggtgccccgtggaggacgacacccacgtgccccagcccgccttcctgaaggccgccgagaacttcaccctgctggtgaagaacaacatctggtaccccaagttcaacttcagcaagagaaacatcctgcccaacatcaccaccacctacctgaagagctgcatctacgacgccaagaccgaccccttctgccccatcttcagactgggcaagatcgtggagaacgccggccacagcttccaggacatggccgtggagggcggcatcatgggcatccaggtgaactgggactgcaacctggacagagccgccagcctgtgcctgcccagatacagcttcagaagactggacaccagagacgtggagcacaacgtgagccccggctacaacttcagattcgccaagtactacagagacctggccggcaacgagcagagaaccctgatcaaggcctacggcatcagattcgacatcatcgtgttcggcaaggccggcaagttcgacatcatccccaccatgatcaacatcggcagcggcctggccctgctgggcatggccaccgtgctgtgcgacatcatcgtgctgtactgcatgaagaagagactgtactacagagagaagaagtacaagtacgtggaggactacgagcagggcctggccagcgagctggaccagtag

SEQ ID NO: 95869 - DNA, 1215 bp, synthetic construct
  misc_feature 1..1215: note = Description of Artificial Sequence: Synthetic coding sequence
  source 1..1215: mol_type = other DNA
atggccggctgctgcgccgccctggccgccttcctgttcgagtacgacacccccagaatcgtgctgatcagaagcagaaaggtgggcctgatgaacagagccgtgcagctgctgatcctggcctacgtgatcggctgctaccacccccacctggccgaggtggagatggagagccccagaagatgggtgttcgtgtgggagaagggctaccaggagaccgacagcgtggtgagcagcgtgaccaccaaggtgaagggcgtggccgtgaccaacaccagcaagctgggcttcagaatctgggacgtggccgactacgtgatccccgcccaggaggagaacagcctgttcgtgatgaccaacgtgatcctgaccatgaaccagacccagggcctgtgccccgagatccccgacgccaccaccgtgtgcaagagcgacgccagctgcaccgccggcagcgccggcacccacagcaacggcgtgagcaccggcagatgcgtggccttcaacggcagcgtgaagacctgcgaggtggccgcctggtgccccgtggaggacgacacccacgtgccccagcccgccttcctgaaggccgccgagaacttcaccctgctggtgaagaacaacatctggtaccccaagttcaacttcagcaagagaaacatcctgcccaacatcaccaccacctacctgaagagctgcatctacgacgccaagaccgaccccttctgccccatcttcagactgggcaagatcgtggagaacgccggccacagcttccaggacatggccgtggagggcggcatcatgggcatccaggtgaactgggactgcaacctggacagagccgccagcctgtgcctgcccagatacagcttcagaagactggacaccagagacgtggagcacaacgtgagccccggctacaacttcagattcgccaagtactacagagacctggccggcaacgagcagagaaccctgatcaaggcctacggcatcagattcgacatcatcgtgttcggcaaggccggcaagttcgacatcatccccaccatgatcaacatcggcagcggcctggccctgctgggcatggccaccgtgctgtgcgacatcatcgtgctgtactgcatgaagaagagactgtactacagagagaagaagtacaagtacgtggaggactacgagcagggcctggccagcgagctggaccagtag

SEQ ID NO: 95870 - DNA, 441 bp, synthetic construct
  misc_feature 1..441: note = Description of Artificial Sequence: Synthetic coding sequence
  source 1..441: mol_type = other DNA
atggccggctgctgcgccgccctggccgccttcctgttcgagtacgacacccccagaatcgtgctgatcagaagcagaaaggtgggcctgatgaacagagccgtgcagctgctgatcctggcctacgtgatcggctgggtgttcgtgtgggagaagggctaccaggagaccgacagcgtggtgagcagcgtgaccaccaaggtgaagggcgtggccgtgaccaacaccagcaagctgggcttcagaatctgggacgtggccgactacgtgatccccgcccaggaggagaacagcctgttcgtgatgaccaacgtgatcctgaccatgaaccagacccagggcctgtgccccgagatccccgacgccaccaccgtgtgcaagagcgacgccagctgcaccgccggcagcgccggcacccacagcaacgacctgctgttctag

SEQ ID NO: 95871 - DNA, 1086 bp, synthetic construct
  misc_feature 1..1086: note = Description of Artificial Sequence: Synthetic coding sequence
  source 1..1086: mol_type = other DNA
atggccggctgctgcgccgccctggccgccttcctgttcgagtacgacacccccagaatcgtgctgatcagaagcagaaaggtgggcctgatgaacagagccgtgcagctgctgatcctggcctacgtgatcggctgggtgttcgtgtgggagaagggctaccaggagaccgacagcgtggtgagcagcgtgaccaccaaggtgaagggcgtggccgtgaccaacaccagcaagctgggcttcagaatctgggacgtggccgactacgtgatccccgcccaggaggagaacagcctgttcgtgatgaccaacgtgatcctgaccatgaaccagacccagggcctgtgccccgagatccccgacgccaccaccgtgtgcaagagcgacgccagctgcaccgccggcagcgccggcacccacagcaacggcgtgagcaccggcagacccgccttcctgaaggccgccgagaacttcaccctgctggtgaagaacaacatctggtaccccaagttcaacttcagcaagagaaacatcctgcccaacatcaccaccacctacctgaagagctgcatctacgacgccaagaccgaccccttctgccccatcttcagactgggcaagatcgtggagaacgccggccacagcttccaggacatggccgtggagggcggcatcatgggcatccaggtgaactgggactgcaacctggacagagccgccagcctgtgcctgcccagatacagcttcagaagactggacaccagagacgtggagcacaacgtgagccccggctacaacttcagattcgccaagtactacagagacctggccggcaacgagcagagaaccctgatcaaggcctacggcatcagattcgacatcatcgtgttcggcaaggccggcaagttcgacatcatccccaccatgatcaacatcggcagcggcctggccctgctgggcatggccaccgtgctgtgcgacatcatcgtgctgtactgcatgaagaagagactgtactacagagagaagaagtacaagtacgtggaggactacgagcagggcctggccagcgagctggaccagtag

SEQ ID NO: 95872 - DNA, 864 bp, synthetic construct
  misc_feature 1..864: note = Description of Artificial Sequence: Synthetic coding sequence
  source 1..864: mol_type = other DNA
atgaccaacgtgatcctgaccatgaaccagacccagggcctgtgccccgagatccccgacgccaccaccgtgtgcaagagcgacgccagctgcaccgccggcagcgccggcacccacagcaacggcgtgagcaccggcagatgcgtggccttcaacggcagcgtgaagacctgcgaggtggccgcctggtgccccgtggaggacgacacccacgtgccccagcccgccttcctgaaggccgccgagaacttcaccctgctggtgaagaacaacatctggtaccccaagttcaacttcagcaagagaaacatcctgcccaacatcaccaccacctacctgaagagctgcatctacgacgccaagaccgaccccttctgccccatcttcagactgggcaagatcgtggagaacgccggccacagcttccaggacatggccgtggagggcggcatcatgggcatccaggtgaactgggactgcaacctggacagagccgccagcctgtgcctgcccagatacagcttcagaagactggacaccagagacgtggagcacaacgtgagccccggctacaacttcagattcgccaagtactacagagacctggccggcaacgagcagagaaccctgatcaaggcctacggcatcagattcgacatcatcgtgttcggcaaggccggcaagttcgacatcatccccaccatgatcaacatcggcagcggcctggccctgctgggcatggccaccgtgctgtgcgacatcatcgtgctgtactgcatgaagaagagactgtactacagagagaagaagtacaagtacgtggaggactacgagcagggcctggccagcgagctggaccagtag

SEQ ID NO: 95873 - DNA, 1278 bp, synthetic construct
  misc_feature 1..1278: note = Description of Artificial Sequence: Synthetic coding sequence
  source 1..1278: mol_type = other DNA
atggacggccccgccgagcagagacccgccctgctgaacagcgccgagaacttcaccgtgctgatcaagaacaacatcgacttccccggccacaactacaccaccagaaacatcctgcccggcctgaacatcacctgcaccttccacaagacccagaacccccagtgccccatcttcagactgggcgacatcttcagagagaccggcgacaacttcagcgacgtggccatccagggcggcatcatgggcatcgagatctactgggactgcaacctggacagatggttccaccactgcagacccaagtacagcttcagaagactggacgacaagaccaccaacgtgagcctgtaccccggctacaacttcagatacgccaagtactacaaggagaacaacgtggagaagagaaccctgatcaaggtgttcggcatcagattcgacatcctggtgttcggcaccggcggcaagttcgacatcatccagctggtggtgtacatcggcagcaccctgagctacttcggcctggccgccgtgttcatcgacttcctgatcgacacctacagcagcaactgctgcagaagccacatctacccctggtgcaagtgctgccagccctgcgtggtgaacgagtactactacagaaagaagtgcgagagcatcgtggagcccaagcccaccctgaagtacgtgagcttcgtggacgagagccacatcagaatggtgaaccagcagctgctgggcagaagcctgcaggacgtgaagggccaggaggtgcccagacccgccatggacttcaccgacctgagcagactgcccctggccctgcacgacaccccccccatccccggccagcccgaggagatccagctgctgagaaaggaggccacccccagaagcagagacagccccgtgtggtgccagtgcggcagctgcctgcccagccagctgcccgagagccacagatgcctggaggagctgtgctgcagaaagaagcccggcgcctgcatcaccaccagcgagctgttcagaaagctggtgctgagcagacacgtgctgcagttcctgctgctgtaccaggagcccctgctggccctggacgtggacagcaccaacagcagactgagacactgcgcctacagatgctacgccacctggagattcggcagccaggacatggccgacttcgccaacctgcccagctgctgcagatggagaatcagaaaggagttccccaagagcgagggccagtacagcggcttcaagagcccctactag

SEQ ID NO: 95874 - DNA, 828 bp, synthetic construct
  misc_feature 1..828: note = Description of Artificial Sequence: Synthetic coding sequence
  source 1..828: mol_type = other DNA
atgcccgcctgctgcagctgcagcgacgtgttccagtacgagaccaacaaggtgaccagaatccagagcatgaactacggcaccatcaagtggttcttccacgtgatcatcttcagctacgtgtgcttcgccctggtgagcgacaagctgtaccagagaaaggagcccgtgatcagcagcgtgcacaccaaggtgaagggcatcgccgaggtgaaggaggagatcgtggagaacggcgtgaagaagctggtgcacagcgtgttcgacaccgccgactacaccttccccctgcagggcaacagcttcttcgtgatgaccaacttcctgaagaccgagggccaggagcagagactgtgccccgagtaccccaccagaagaaccctgtgcagcagcgacagaggctgcaagaagggctggatggacccccagagcaagggcatccagaccggcagatgcgtggtgtacgagggcaaccagaagacctgcgaggtgagcgcctggtgccccatcgaggccgtggaggaggcccccagacccgccctgctgaacagcgccgagaacttcaccgtgctgatcaagaacaacatcgacttccccggccacaactacaccacctacgccaagtactacaaggagaacaacgtggagaagagaaccctgatcaaggtgttcggcatcagattcgacatcctggtgttcggcaccggcggcaagttcgacatcatccagctggtggtgtacatcggcagcaccctgagctacttcggcctggtgagagacagcctgttccacgccctgggcaagtggttcggcgagggcagcgactag

SEQ ID NO: 95875 - DNA, 1518 bp, synthetic construct
  misc_feature 1..1518: note = Description of Artificial Sequence: Synthetic coding sequence
  source 1..1518: mol_type = other DNA
atgacccccggcgaccacagctggggcaacagcttcttcgtgatgaccaacttcctgaagaccgagggccaggagcagagactgtgccccgagtaccccaccagaagaaccctgtgcagcagcgacagaggctgcaagaagggctggatggacccccagagcaagggcatccagaccggcagatgcgtggtgtacgagggcaaccagaagacctgcgaggtgagcgcctggtgccccatcgaggccgtggaggaggcccccagacccgccctgctgaacagcgccgagaacttcaccgtgctgatcaagaacaacatcgacttccccggccacaactacaccaccagaaacatcctgcccggcctgaacatcacctgcaccttccacaagacccagaacccccagtgccccatcttcagactgggcgacatcttcagagagaccggcgacaacttcagcgacgtggccatccagggcggcatcatgggcatcgagatctactgggactgcaacctggacagatggttccaccactgcagacccaagtacagcttcagaagactggacgacaagaccaccaacgtgagcctgtaccccggctacaacttcagatacgccaagtactacaaggagaacaacgtggagaagagaaccctgatcaaggtgttcggcatcagattcgacatcctggtgttcggcaccggcggcaagttcgacatcatccagctggtggtgtacatcggcagcaccctgagctacttcggcctggccgccgtgttcatcgacttcctgatcgacacctacagcagcaactgctgcagaagccacatctacccctggtgcaagtgctgccagccctgcgtggtgaacgagtactactacagaaagaagtgcgagagcatcgtggagcccaagcccaccctgaagtacgtgagcttcgtggacgagagccacatcagaatggtgaaccagcagctgctgggcagaagcctgcaggacgtgaagggccaggaggtgcccagacccgccatggacttcaccgacctgagcagactgcccctggccctgcacgacaccccccccatccccggccagcccgaggagatccagctgctgagaaaggaggccacccccagaagcagagacagccccgtgtggtgccagtgcggcagctgcctgcccagccagctgcccgagagccacagatgcctggaggagctgtgctgcagaaagaagcccggcgcctgcatcaccaccagcgagctgttcagaaagctggtgctgagcagacacgtgctgcagttcctgctgctgtaccaggagcccctgctggccctggacgtggacagcaccaacagcagactgagacactgcgcctacagatgctacgccacctggagattcggcagccaggacatggccgacttcgccaacctgcccagctgctgcagatggagaatcagaaaggagttccccaagagcgagggccagtacagcggcttcaagagcccctactag

SEQ ID NO: 95876 - DNA, 387 bp, synthetic construct
  misc_feature 1..387: note = Description of Artificial Sequence: Synthetic coding sequence
  source 1..387: mol_type = other DNA
atgcccgcctgctgcagctgcagcgacgtgttccagtacgagaccaacaaggtgaccagaatccagagcatgaactacggcaccatcaagtggttcttccacgtgatcatcttcagctacgtgtgcttcgccctggtgagcgacaagctgtaccagagaaaggagcccgtgatcagcagcgtgcacaccaaggtgaagggcatcgccgaggtgaaggaggagatcgtggagaacggcgtgaagaagctggtgcacagcgtgttcgacaccgccgactacaccttccccctgcagggcaacagcttcttcgtgatgaccaacttcctgaagaccgagggccaggagcagagactgtgccccgaggagttcagacccgagggcgtgtag

SEQ ID NO: 95877 - DNA, 921 bp, synthetic construct
  misc_feature 1..921: note = Description of Artificial Sequence: Synthetic coding sequence
  source 1..921: mol_type = other DNA
atgtggcagttcagatacgccaagtactacaaggagaacaacgtggagaagagaaccctgatcaaggtgttcggcatcagattcgacatcctggtgttcggcaccggcggcaagttcgacatcatccagctggtggtgtacatcggcagcaccctgagctacttcggcctggccgccgtgttcatcgacttcctgatcgacacctacagcagcaactgctgcagaagccacatctacccctggtgcaagtgctgccagccctgcgtggtgaacgagtactactacagaaagaagtgcgagagcatcgtggagcccaagcccaccctgaagtacgtgagcttcgtggacgagagccacatcagaatggtgaaccagcagctgctgggcagaagcctgcaggacgtgaagggccaggaggtgcccagacccgccatggacttcaccgacctgagcagactgcccctggccctgcacgacaccccccccatccccggccagcccgaggagatccagctgctgagaaaggaggccacccccagaagcagagacagccccgtgtggtgccagtgcggcagctgcctgcccagccagctgcccgagagccacagatgcctggaggagctgtgctgcagaaagaagcccggcgcctgcatcaccaccagcgagctgttcagaaagctggtgctgagcagacacgtgctgcagttcctgctgctgtaccaggagcccctgctggccctggacgtggacagcaccaacagcagactgagacactgcgcctacagatgctacgccacctggagattcggcagccaggacatggccgacttcgccaacctgcccagctgctgcagatggagaatcagaaaggagttccccaagagcgagggccagtacagcggcttcaagagcccctactag

SEQ ID NO: 95878 - DNA, 387 bp, synthetic construct; identical to SEQ ID NO: 95876
  misc_feature 1..387: note = Description of Artificial Sequence: Synthetic coding sequence
  source 1..387: mol_type = other DNA

SEQ ID NO: 95879 - DNA, 1788 bp, synthetic construct
  misc_feature 1..1788: note = Description of Artificial Sequence: Synthetic coding sequence
  source 1..1788: mol_type = other DNA
atgcccgcctgctgcagctgcagcgacgtgttccagtacgagaccaacaaggtgaccagaatccagagcatgaactacggcaccatcaagtggttcttccacgtgatcatcttcagctacgtgtgcttcgccctggtgagcgacaagctgtaccagagaaaggagcccgtgatcagcagcgtgcacaccaaggtgaagggcatcgccgaggtgaaggaggagatcgtggagaacggcgtgaagaagctggtgcacagcgtgttcgacaccgccgactacaccttccccctgcagggcaacagcttcttcgtgatgaccaacttcctgaagaccgagggccaggagcagagactgtgccccgagtaccccaccagaagaaccctgtgcagcagcgacagaggctgcaagaagggctggatggacccccagagcaagggcatccagaccggcagatgcgtggtgtacgagggcaaccagaagacctgcgaggtgagcgcctggtgccccatcgaggccgtggaggaggcccccagacccgccctgctgaacagcgccgagaacttcaccgtgctgatcaagaacaacatcgacttccccggccacaactacaccaccagaaacatcctgcccggcctgaacatcacctgcaccttccacaagacccagaacccccagtgccccatcttcagactgggcgacatcttcagagagaccggcgacaacttcagcgacgtggccatccagggcggcatcatgggcatcgagatctactgggactgcaacctggacagatggttccaccactgcagacccaagtacagcttcagaagactggacgacaagaccaccaacgtgagcctgtaccccggctacaacttcagatacgccaagtactacaaggagaacaacgtggagaagagaaccctgatcaaggtgttcggcatcagattcgacatcctggtgttcggcaccggcggcaagttcgacatcatccagctggtggtgtacatcggcagcaccctgagctacttcggcctggccgccgtgttcatcgacttcctgatcgacacctacagcagcaactgctgcagaagccacatctacccctggtgcaagtgctgccagccctgcgtggtgaacgagtactactacagaaagaagtgcgagagcatcgtggagcccaagcccaccctgaagtacgtgagcttcgtggacgagagccacatcagaatggtgaaccagcagctgctgggcagaagcctgcaggacgtgaagggccaggaggtgcccagacccgccatggacttcaccgacctgagcagactgcccctggccctgcacgacaccccccccatccccggccagcccgaggagatccagctgctgagaaaggaggccacccccagaagcagagacagccccgtgtggtgccagtgcggcagctgcctgcccagccagctgcccgagagccacagatgcctggaggagctgtgctgcagaaagaagcccggcgcctgcatcaccaccagcgagctgttcagaaagctggtgctgagcagacacgtgctgcagttcctgctgctgtaccaggagcccctgctggccctggacgtggacagcaccaacagcagactgagacactgcgcctacagatgctacgccacctggagattcggcagccaggacatggccgacttcgccaacctgcccagctgctgcagatggagaatcagaaaggagttccccaagagcgagggccagtacagcggcttcaagagcccctactag

SEQ ID NO: 95880 - DNA, 1122 bp, synthetic construct
  misc_feature 1..1122: note = Description of Artificial Sequence: Synthetic coding sequence
  source 1..1122: mol_type = other DNA
atgaccgaggtgctgtggcccgccgtgcccaacggcaccgacgccgccttcctggccggccccggcagcagctggggcaacagcaccgtggccagcaccgccgccgtgagcagcagcttcaagtgcgccctgaccaagaccggcttccagttctactacctgcccgccgtgtacatcctggtgttcatcatcggcttcctgggcaacagcgtggccatctggatgttcgtgttccacatgaagccctggagcggcatcagcgtgtacatgttcaacctggccctggccgacttcctgtacgtgctgaccctgcccgccctgatcttctactacttcaacaagaccgactggatcttcggcgacgccatgtgcaagctgcagagattcatcttccacgtgaacctgtacggcagcatcctgttcctgacctgcatcagcgcccacagatacagcggcgtggtgtaccccctgaagagcctgggcagactgaagaagaagaacgccatctgcatcagcgtgctggtgtggctgatcgtggtggtggccatcagccccatcctgttctacagcggcaccggcgtgagaaagaacaagaccatcacctgctacgacaccaccagcgacgagtacctgagaagctacttcatctacagcatgtgcaccaccgtggccatgttctgcgtgcccctggtgctgatcctgggctgctacggcctgatcgtgagagccctgatctacaaggacctggacaacagccccctgagaagaaagagcatctacctggtgatcatcgtgctgaccgtgttcgccgtgagctacatccccttccacgtgatgaagaccatgaacctgagagccagactggacttccagacccccgccatgtgcgccttcaacgacagagtgtacgccacctaccaggtgaccagaggcctggccagcctgaacagctgcgtggaccccatcctgtacttcctggccggcgacaccttcagaagaagactgagcagagccaccagaaaggccagcagaagaagcgaggccaacctgcagagcaagagcgaggacatgaccctgaacatcctgcccgagttcaagcagaacggcgacaccagcctgtag

SEQ ID NO: 95881 - DNA, 1125 bp, synthetic construct
  misc_feature 1..1125: note = Description of Artificial Sequence: Synthetic coding sequence
  source 1..1125: mol_type = other DNA
atggccgccaacgtgagcggcgccaagagctgccccgccaacttcctggccgccgccgacgacaagctgagcggcttccagggcgacttcctgtggcccatcctggtggtggagttcctggtggccgtggccagcaacggcctggccctgtacagattcagcatcagaaagcagagaccctggcaccccgccgtggtgttcagcgtgcagctggccgtgagcgacctgctgtgcgccctgaccctgccccccctggccgcctacctgtacccccccaagcactggagatacggcgaggccgcctgcagactggagagattcctgttcacctgcaacctgctgggcagcgtgatcttcatcacctgcatcagcctgaacagatacctgggcatcgtgcaccccttcttcgccagaagccacctgagacccaagcacgcctgggccgtgagcgccgccggctgggtgctggccgccctgctggccatgcccaccctgagcttcagccacctgaagagaccccagcagggcgccggcaactgcagcgtggccagacccgaggcctgcatcaagtgcctgggcaccgccgaccacggcctggccgcctacagagcctacagcctggtgctggccggcctgggctgcggcctgcccctgctgctgaccctggccgcctacggcgccctgggcagagccgtgctgagaagccccggcatgaccgtggccgagaagctgagagtggccgccctggtggccagcggcgtggccctgtacgccagcagctacgtgccctaccacatcatgagagtgctgaacgtggacgccagaagaagatggagcaccagatgccccagcttcgccgacatcgcccaggccaccgccgccctggagctgggcccctacgtgggctaccaggtgatgagaggcctgatgcccctggccttctgcgtgcaccccctgctgtacatggccgccgtgcccagcctgggctgctgctgcagacactgccccggctacagagacagctggaaccccgaggacgccaagagcaccggccaggccctgcccctgaacgccaccgccgcccccaagcccagcgagccccagagcagagagctgagccagtag

SEQ ID NO: 95882 - DNA, 1029 bp, synthetic construct
  misc_feature 1..1029: note = Description of Artificial Sequence: Synthetic coding sequence
  source 1..1029: mol_type = other DNA
atgcaggccgtggacaacctgaccagcgcccccggcaacaccagcctgtgcaccagagactacaagatcacccaggtgctgttccccctgctgtacaccgtgctgttcttcgtgggcctgatcaccaacggcctggccatgagaatcttcttccagatcagaagcaagagcaacttcatcatcttcctgaagaacaccgtgatcagcgacctgctgatgatcctgaccttccccttcaagatcctgagcgacgccaagctgggcaccggccccctgagaaccttcgtgtgccaggtgaccagcgtgatcttctacttcaccatgtacatcagcatcagcttcctgggcctgatcaccatcgacagataccagaagaccaccagacccttcaagaccagcaaccccaagaacctgctgggcgccaagatcctgagcgtggtgatctgggccttcatgttcctgctgagcctgcccaacatgatcctgaccaacagacagcccagagacaagaacgtgaagaagtgcagcttcctgaagagcgagttcggcctggtgtggcacgagatcgtgaactacatctgccaggtgatcttctggatcaacttcctgatcgtgatcgtgtgctacaccctgatcaccaaggagctgtacagaagctacgtgagaaccagaggcgtgggcaaggtgcccagaaagaaggtgaacgtgaaggtgttcatcatcatcgccgtgttcttcatctgcttcgtgcccttccacttcgccagaatcccctacaccctgagccagaccagagacgtgttcgactgcaccgccgagaacaccctgttctacgtgaaggagagcaccctgtggctgaccagcctgaacgcctgcctggaccccttcatctacttcttcctgtgcaagagcttcagaaacagcctgatcagcatgctgaagtgccccaacagcgccaccagcctgagccaggacaacagaaagaaggagcaggacggcggcgaccccaacgaggagacccccatgtag

SEQ ID NO: 95883 - DNA, 738 bp, synthetic construct
  misc_feature 1..738: note = Description of Artificial Sequence: Synthetic coding sequence
  source 1..738: mol_type = other DNA
atgcaggccgtggacaacctgaccagcgcccccggcaacaccagcctgtgcaccagagactacaagatcacccaggtgctgttccccctgctgtacaccgtgctgttcttcgtgggcctgatcaccaacggcctggccatgagaatcttcttccagatcagaagcaagagcaacttcatcatcttcctgaagaacaccgtgatcagcgacctgctgatgatcctgaccttccccttcaagatcctgagcgacgccaagctgggcaccggccccctgagaaccttcgtgtgccaggtgatcttctggatcaacttcctgatcgtgatcgtgtgctacaccctgatcaccaaggagctgtacagaagctacgtgagaaccagaggcgtgggcaaggtgcccagaaagaaggtgaacgtgaaggtgttcatcatcatcgccgtgttcttcatctgcttcgtgcccttccacttcgccagaatcccctacaccctgagccagaccagagacgtgttcgactgcaccgccgagaacaccctgttctacgtgaaggagagcaccctgtggctgaccagcctgaacgcctgcctggaccccttcatctacttcttcctgtgcaagagcttcagaaacagcctgatcagcatgctgaagtgccccaacagcgccaccagcctgagccaggacaacagaaagaaggagcaggacggcggcgaccccaacgaggagacccccatgtag

SEQ ID NO: 95884 - DNA, 1134 bp, synthetic construct
  misc_feature 1..1134: note = Description of Artificial Sequence: Synthetic coding sequence
  source 1..1134: mol_type = other DNA
atggccgccgacctgggcccctggaacgacaccatcaacggcacctgggacggcgacgagctgggctacagatgcagattcaacgaggacttcaagtacgtgctgctgcccgtgagctacggcgtggtgtgcgtgcccggcctgtgcctgaacgccgtggccctgtacatcttcctgtgcagactgaagacctggaacgccagcaccacctacatgttccacctggccgtgagcgacgccctgtacgccgccagcctgcccctgctggtgtactactacgccagaggcgaccactggcccttcagcaccgtgctgtgcaagctggtgagattcctgttctacaccaacctgtactgcagcatcctgttcctgacctgcatcagcgtgcacagatgcctgggcgtgctgagacccctgagaagcctgagatggggcagagccagatacgccagaagagtggccggcgccgtgtgggtgctggtgctggcctgccaggcccccgtgctgtacttcgtgaccaccagcgccagaggcggcagagtgacctgccacgacaccagcgcccccgagctgttcagcagattcgtggcctacagcagcgtgatgctgggcctgctgttcgccgtgcccttcgccgtgatcctggtgtgctacgtgctgatggccagaagactgctgaagcccgcctacggcaccagcggcggcctgcccagagccaagagaaagagcgtgagaaccatcgccgtggtgctggccgtgttcgccctgtgcttcctgcccttccacgtgaccagaaccctgtactacagcttcagaagcctggacctgagctgccacaccctgaacgccatcaacatggcctacaaggtgaccagacccctggccagcgccaacagctgcctggaccccgtgctgtacttcctggccggccagagactggtgagattcgccagagacgccaagccccccaccggccccagccccgccacccccgccagaagaagactgggcctgagaagaagcgacagaaccgacatgcagagaatcgaggacgtgctgggcagcagcgaggacagcagaagaaccgagagcacccccgccggcagcgagaacaccaaggacatcagactgtag

SEQ ID NO: 95885 - DNA, 1134 bp, synthetic construct; identical to SEQ ID NO: 95884
  misc_feature 1..1134: note = Description of Artificial Sequence: Synthetic coding sequence
  source 1..1134: mol_type = other DNA

SEQ ID NO: 95886 - DNA, 1134 bp, synthetic construct; identical to SEQ ID NO: 95884
  misc_feature 1..1134: note = Description of Artificial Sequence: Synthetic coding sequence
  source 1..1134: mol_type = other DNA

SEQ ID NO: 95887 - DNA, 1080 bp, synthetic construct
  misc_feature 1..1080: note = Description of Artificial Sequence: Synthetic coding sequence
  source 1..1080: mol_type = other DNA
atgcaggtgcccaacagcaccggccccgacaacgccaccctgcagatgctgagaaaccccgccatcgccgtggccctgcccgtggtgtacagcctggtggccgccgtgagcatccccggcaacctgttcagcctgtgggtgctgtgcagaagaatgggccccagaagccccagcgtgatcttcatgatcaacctgagcgtgaccgacctgatgctggccagcgtgctgcccttccagatctactaccactgcaacagacaccactgggtgttcggcgtgctgctgtgcaacgtggtgaccgtggccttctacgccaacatgtacagcagcatcctgaccatgacctgcatcagcgtggagagattcctgggcgtgctgtaccccctgagcagcaagagatggagaagaagaagatacgccgtggccgcctgcgccggcacctggctgctgctgctgaccgccctgagccccctggccagaaccgacctgacctaccccgtgcacgccctgggcatcatcacctgcttcgacgtgctgaagtggaccatgctgcccagcgtggccatgtgggccgtgttcctgttcaccatcttcatcctgctgttcctgatccccttcgtgatcaccgtggcctgctacaccgccaccatcctgaagctgctgagaaccgaggaggcccacggcagagagcagagaagaagagccgtgggcctggccgccgtggtgctgctggccttcgtgacctgcttcgcccccaacaacttcgtgctgctggcccacatcgtgagcagactgttctacggcaagagctactaccacgtgtacaagctgaccctgtgcctgagctgcctgaacaactgcctggaccccttcgtgtactacttcgccagcagagagttccagctgagactgagagagtacctgggctgcagaagagtgcccagagacaccctggacaccagaagagagagcctgttcagcgccagaaccaccagcgtgagaagcgaggccggcgcccaccccgagggcatggagggcgccaccagacccggcctgcagagacaggagagcgtgttctag

SEQ ID NO: 95888 - DNA, 189 bp, synthetic construct
  misc_feature 1..189: note = Description of Artificial Sequence: Synthetic coding sequence
  source 1..189: mol_type = other DNA
atgagcgagagacagggcgccggcgccaccaacggcaaggacaagaccagcggcgagaacgacggccagaagaaggtgcaggaggagttcgacatcgacatggacgcccccgagaccgagagagccgccgtggccatccagagccagttcagaaagttccagaagaagaaggccggcagccagagctag

SEQ ID NO: 95889 - DNA, 1914 bp, synthetic construct
  misc_feature 1..1914: note = Description of Artificial Sequence: Synthetic coding sequence
  source 1..1914: mol_type = other DNA
atggccagcaacgagagagacgccatcagctggtaccagaagaagatcggcgcctacgaccagcagatctgggagaagagcatcgagcagacccagatcaagggcctgaagaacaagcccaagaagatgggccacatcaagcccgacctgatcgacgtggacctgatcagaggcagcaccttcgccaaggccaagcccgagatcccctggaccagcctgaccagaaagggcctggtgagagtggtgttcttccccctgttcagcaactggtggatccaggtgaccagcctgagaatcttcgtgtggctgctgctgctgtacttcatgcaggtgatcgccatcgtgctgtacctgatgatgcccatcgtgaacatcagcgaggtgctgggccccctgtgcctgatgctgctgatgggcaccgtgcactgccagatcgtgagcacccagatcaccagacccagcggcaacaacggcaacagaagaagaagaaagctgagaaagaccgtgaacggcgacggcagcagagagaacggcaacaacagcagcgacaaggtgagaggcatcgagaccctggagagcgtgcccatcatcggcggcttctgggagaccatcttcggcaacagaatcaagagagtgaagctgatcagcaacaagggcaccgagaccgacaacgaccccagctgcgtgcaccccatcatcaagagaagacagtgcagacccgagatcagaatgtggcagaccagagagaaggccaagttcagcgacggcgagaagtgcagaagagaggccttcagaagactgggcaacggcgtgagcgacgacctgagcagcgaggaggacggcgaggccagaacccagatgatcctgctgagaagaagcgtggagggcgccagcagcgacaacggctgcgaggtgaagaacagaaagagcatcctgagcagacacctgaacagccaggtgaagaagaccaccaccagatggtgccacatcgtgagagacagcgacagcctggccgagagcgagttcgagagcgccgccttcagccagggcagcagaagcggcgtgagcggcggcagcagaagcctgaacatgagcagaagagacagcgagagcaccagacacgacagcgagaccgaggacatgctgtgggacgacctgctgcacggccccgagtgcagaagcagcgtgaccagcgacagcgagggcgcccacgtgaacaccctgcacagcggcaccaagagagaccccaaggaggacgtgttccagcagaaccacctgttctggctgcagaacagcagccccagcagcgacagagtgagcgccatcatctgggagggcaacgagtgcaagaagatggacatgagcgtgctggagatcagcggcatcatcatgagcagagtgaacgcctaccagcagggcgtgggctaccagatgctgggcaacgtggtgaccatcggcctggccttcttccccttcctgcacagactgttcagagagaagagcctggaccagctgaagagcatcagcgccgaggagatcctgaccctgttctgcggcgccccccccgtgacccccatcatcgtgctgagcatcatcaacttcttcgagagactgtgcctgacctggatgttcttcttcatgatgtgcgtggccgagagaacctacaagcagagattcctgttcgccaagctgttcagccacatcaccagcgccagaaaggccagaaagtacgagatcccccacttcagactgaagaaggtggagaacatcaagatctggctgagcctgagaagctacctgaagagaagaggcccccagagaagcgtggacgtggtggtgagcagcgtgttcctgctgaccctgagcatcgccttcatctgctgcgcccaggtgaaggtgagccacctgctgtag

SEQ ID NO: 95890 - DNA, 2130 bp, synthetic construct
  misc_feature 1..2130: note = Description of Artificial Sequence: Synthetic coding sequence
  source 1..2130: mol_type = other DNA
atggccagcaacgagagagacgccatcagctggtaccagaagaagatcggcgcctacgaccagcagatctgggagaagagcatcgagcagacccagatcaagggcctgaagaacaagcccaagaagatgggccacatcaagcccgacctgatcgacgtggacctgatcagagtgatcgccatcgtgctgtacctgatgatgcccatcgtgaacatcagcgaggtgctgggccccctgtgcctgatgctgctgatgggcaccgtgcactgccagatcgtgagcacccagatcaccagacccagcggcaacaacggcaacagaagaagaagaaagctgagaaagaccgtgaacggcgacggcagcagagagaacggcaacaacagcagcgacaaggtgagaggcatcgagaccctggagagcgtgcccatcatcggcggcttctgggagaccatcttcggcaacagaatcaagagagtgaagctgatcagcaacaagggcaccgagaccgacaacgaccccagctgcgtgcaccccatcatcaagagaagacagtgcagacccgagatcagaatgtggcagaccagagagaaggccaagttcagcgacggcgagaagtgcagaagagaggccttcagaagactgggcaacggcgtgagcgacgacctgagcagcgaggaggacggcgaggccagaacccagatgatcctgctgagaagaagcgtggagggcgccagcagcgacaacggctgcgaggtgaagaacagaaagagcatcctgagcagacacctgaacagccaggtgaagaagaccaccaccagatggtgccacatcgtgagagacagcgacagcctggccgagagcgagttcgagagcgccgccttcagccagggcagcagaagcggcgtgagcggcggcagcagaagcctgaacatgagcagaagagacagcgagagcaccagacacgacagcgagaccgaggacatgctgtgggacgacctgctgcacggccccgagtgcagaagcagcgtgaccagcgacagcgagggcgcccacgtgaacaccctgcacagcggcaccaagagagaccccaaggaggacgtgttccagcagaaccacctgttctggctgcagaacagcagccccagcagcgacagagtgagcgccatcatctgggagggcaacgagtgcaagaagatggacatgagcgtgctggagatcagcggcatcatcatgagcagagtgaacgcctaccagcagggcgtgggctaccagatgctgggcaacgtggtgaccatcggcctggccttcttccccttcctgcacagactgttcagagagaagagcctggaccagctgaagagcatcagcgccgaggagatcctgaccctgttctgcggcgccccccccgtgacccccatcatcgtgctgagcatcatcaacttcttcgagagactgtgcctgacctggatgttcttcttcatgatgtgcgtggccgagagaacctacaagcagagattcctgttcgccaagctgttcagccacatcaccagcgccagaaaggccagaaagtacgagatcccccacttcagactgaagaaggtggagaacatcaagatctggctgagcctgagaagctacctgaagagaagaggcccccagagaagcgtggacgtggtggtgagcagcgtgttcctgctgaccctgagcatcgccttcatctgctgcgcccaggtgctgcagggccacaagaccttcctgaacgacgcctacaactgggagttcctgatctgggagaccgccctgctgctgttcctgctgagactggccagcctgggcagcgagaccaacaagaagtacagcaacgtgagcatcctgctgaccgagcagatcaacctgtacctgaagatggagaagaagcccaacaagaaggagcagctgaccctggtgaacaacgtgctgaagctgagcaccaagctgctgaaggagctggacacccccttcagactgtacggcctgaccatgaaccccctgatctacaacatcaccagagtggtgatcctgagcgccgtgagcggcgtgatcagcgacctgctgggcttcaacatcagactgtggaagatcaagagctag

SEQ ID NO: 95891 - DNA, 2154 bp, synthetic construct
  misc_feature 1..2154: note = Description of Artificial Sequence: Synthetic coding sequence
  source 1..2154: mol_type = other DNA
atggccagcaacgagagagacgccatcagctggtaccagaagaagatcggcgcctacgaccagcagatctgggagaagagcatcgagcagacccagatcaagggcctgaagaacaagcccaagaagatgggccacatcaagcccgacctgatcgacgtggacctgatcagaggcagcaccttcgccaaggccaagcccgagatcccctggaccagcctgaccagaaagggcctggtgagagtggtgttcttccccctgttcagcaactggtggatccaggtgaccagcctgagaatcttcgtgtggctgctgctgctgtacttcatgcaggtgatcgccatcgtgctgtacctgatgatgcccatcgtgaacatcagcgaggtgctgggccccctgtgcctgatgctgctgatgggcaccgtgcactgccagatcgtgagcacccagatcaccagacccagcggcaacaacggcaacagaagaagaagaatcaagagagtgaagctgatcagcaacaagggcaccgagaccgacaacgaccccagctgcgtgcaccccatcatcaagagaagacagtgcagacccgagatcagaatgtggcagaccagagagaaggccaagttcagcgacggcgagaagtgcagaagagaggccttcagaagactgggcaacggcgtgagcgacgacctgagcagcgaggaggacggcgaggccagaacccagatgatcctgctgagaagaagcgtggagggcgccagcagcgacaacggctgcgaggtgaagaacagaaagagcatcctgagcagacacctgaacagccaggtgaagaagaccaccaccagatggtgccacatcgtgagagacagcgacagcctggccgagagcgagttcgagagcgccgccttcagccagggcagcagaagcggcgtgagcggcggcagcagaagcctgaacatgagcagaagagacagcgagagcaccagacacgacagcgagaccgaggacatgctgtgggacgacctgctgcacggccccgagtgcagaagcagcgtgaccagcgacagcgagggcgcccacgtgaacaccctgcacagcggcaccaagagagaccccaaggaggacgtgttccagcagaaccacctgttctggctgcagaacagcagccccagcagcgacagagtgagcgccatcatctgggagggcaacgagtgcaagaagatggacatgagcgtgctggagatcagcggcatcatcatgagcagagtgaacgcctaccagcagggcgtgggctaccagatgctgggcaacgtggtgaccatcggcctggccttcttccccttcctgcacagactgttcagagagaagagcctggaccagctgaagagcatcagcgccgaggagatcctgaccctgttctgcggcgccccccccgtgacccccatcatcgtgctgagcatcatcaacttcttcgagagactgtgcctgacctggatgttcttcttcatgatgtgcgtggccgagagaacctacaagcagagattcctgttcgccaagctgttcagccacatcaccagcgccagaaaggccagaaagtacgagatcccccacttcagactgaagaaggtggagaacatcaagatctggctgagcctgagaagctacctgaagagaagaggcccccagagaagcgtggacgtggtggtgagcagcgtgttcctgctgaccctgagcatcgccttcatctgctgcgcccaggtgctgcagggccacaagaccttcctgaacgacgcctacaactgggagttcctgatctgggagaccgccctgctgctgttcctgctgagactggccagcctgggcagcgagaccaacaagaagtacagcaacgtgagcatcctgctgaccgagcagatcaacctgtacctgaagatggagaagaagcccaacaagaaggagcagctgaccctggtgaacaacgtgctgaagctgagcaccaagctgctgaaggagctggacacccccttcagactgtacggcctgaccatgaaccccctgatctacaacatcaccagagtggtgatcctgagcgccgtgagcggcgtgatcagcgacctgctgggcttcaacatcagaatctggaagcacagcagctag

SEQ ID NO: 95892 - DNA, 2154 bp, synthetic construct
  misc_feature 1..2154: note = Description of Artificial Sequence: Synthetic coding sequence
  source 1..2154: mol_type = other DNA
atggccagcaacgagagagacgccatcagctggtaccagaagaagatcggcgcctacgaccagcagatctgggagaagagcatcgagcagacccagatcaagggcctgaagaacaagcccaagaagatgggccacatcaagcccgacctgatcgacgtggacctgatcagaggcagcaccttcgccaaggccaagcccgagatcccctggaccagcctgaccagaaagggcctggtgagagtggtgttcttccccctgttcagcaactggtggatccaggtgaccagcctgagaatcttcgtgtggctgctgctgctgtacttcatgcaggtgatcgccatcgtgctgtacctgatgatgcccatcgtgaacatcagcgaggtgctgggccccctgtgcctgatgctgctgatgggcaccgtgcactgccagatcgtgagcacccagatcaccagacccagcggcaacaacggcaacagaagaagaagaatcaagagagtgaagctgatcagcaacaagggcaccgagaccgacaacgaccccagctgcgtgcaccccatcatcaagagaagacagtgcagacccgagatcagaatgtggcagaccagagagaaggccaagttcagcgacggcgagaagtgcagaagagaggccttcagaagactgggcaacggcgtgagcgacgacctgagcagcgaggaggacggcgaggccagaacccagatgatcctgctgagaagaagcgtggagggcgccagcagcgacaacggctgcgaggtgaagaacagaaagagcatcctgagcagacacctgaacagccaggtgaagaagaccaccaccagatggtgccacatcgtgagagacagcgacagcctggccgagagcgagttcgagagcgccgccttcagccagggcagcagaagcggcgtgagcggcggcagcagaagcctgaacatgagcagaagagacagcgagagcaccagacacgacagcgagaccgaggacatgctgtgggacgacctgctgcacggccccgagtgcagaagcagcgtgaccagcgacagcgagggcgcccacgtgaacaccctgcacagcggcaccaagagagaccccaaggaggacgtgttccagcagaaccacctgttctggctgcagaacagcagccccagcagcgacagagtgagcgccatcatctgggagggcaacgagtgcaagaagatggacatgagcgtgctggagatcagcggcatcatcatgagcagagtgaacgcctaccagcagggcgtgggctaccagatgctgggcaacgtggtgaccatcggcctggccttcttccccttcctgcacagactgttcagagagaagagcctggaccagctgaagagcatcagcgccgaggagatcctgaccctgttctgcggcgccccccccgtgacccccatcatcgtgctgagcatcatcaacttcttcgagagactgtgcctgacctggatgttcttcttcatgatgtgcgtggccgagagaacctacaagcagagattcctgttcgccaagctgttcagccacatcaccagcgccagaaaggccagaaagtacgagatcccccacttcagactgaagaaggtggagaacatcaagatctggctgagcctgagaagctacctgaagagaagaggcccccagagaagcgtggacgtggtggtgagcagcgtgttcctgctgaccctgagcatcgccttcatctgctgcgcccaggtgctgcagggccacaagaccttcctgaacgacgcctacaactgggagttcctgatctgggagaccgccctgctgctgttcctgctgagactggccagcctgggcagcgagaccaacaagaagtacagcaacgtgagcatcctgctgaccgagcagatcaacctgtacctgaagatggagaagaagcccaacaagaaggagcagctgaccctggtgaacaacgtgctgaagctgagcaccaagctgctgaaggagctggacacccccttcagactgtacggcctgaccatgaaccccctgatctacaacatcaccagagtggtgatcctgagcgccgtgagcggcgtgatcagcgacctgctgggcttcaacatcagactgtggaagatcaagagctag

SEQ ID NO: 95893 - DNA, 2130 bp, synthetic construct; identical to SEQ ID NO: 95890
  misc_feature 1..2130: note = Description of Artificial Sequence: Synthetic coding sequence
  source 1..2130: mol_type = other DNA

SEQ ID NO: 95894 - DNA, 2289 bp, synthetic construct
  misc_feature 1..2289: note = Description of Artificial Sequence: Synthetic coding sequence
  source 1..2289: mol_type = other DNA
atggccagcaacgagagagacgccatcagctggtaccagaagaagatcggcgcctacgaccagcagatctgggagaagagcatcgagcagacccagatcaagggcctgaagaacaagcccaagaagatgggccacatcaagcccgacctgatcgacgtggacctgatcagaggcagcaccttcgccaaggccaagcccgagatcccctggaccagcctgaccagaaagggcctggtgagagtggtgttcttccccctgttcagcaactggtggatccaggtgaccagcctgagaatcttcgtgtggctgctgctgctgtacttcatgcaggtgatcgccatcgtgctgtacctgatgatgcccatcgtgaacatcagcgaggtgctgggccccctgtgcctgatgctgctgatgggcaccgtgcactgccagatcgtgagcacccagatcaccagacccagcggcaacaacggcaacagaagaagaagaaagctgagaaagaccgtgaacggcgacggcagcagagagaacggcaacaacagcagcgacaaggtgagaggcatcgagaccctggagagcgtgcccatcatcggcggcttctgggagaccatcttcggcaacagaatcaagagagtgaagctgatcagcaacaagggcaccgagaccgacaacgaccccagctgcgtgcaccccatcatcaagagaagacagtgcagacccgagatcagaatgtggcagaccagagagaaggccaagttcagcgacggcgagaagtgcagaagagaggccttcagaagactgggcaacggcgtgagcgacgacctgagcagcgaggaggacggcgaggccagaacccagatgatcctgctgagaagaagcgtggagggcgccagcagcgacaacggctgcgaggtgaagaacagaaagagcatcctgagcagacacctgaacagccaggtgaagaagaccaccaccagatggtgccacatcgtgagagacagcgacagcctggccgagagcgagttcgagagcgccgccttcagccagggcagcagaagcggcgtgagcggcggcagcagaagcctgaacatgagcagaagagacagcgagagcaccagacacgacagcgagaccgaggacatgctgtgggacgacctgctgcacggccccgagtgcagaagcagcgtgaccagcgacagcgagggcgcccacgtgaacaccctgcacagcggcaccaagagagaccccaaggaggacgtgttccagcagaaccacctgttctggctgcagaacagcagccccagcagcgacagagtgagcgccatcatctgggagggcaacgagtgcaagaagatggacatgagcgtgctggagatcagcggcatcatcatgagcagagtgaacgcctaccagcagggcgtgggctaccagatgctgggcaacgtggtgaccatcggcctggccttcttccccttcctgcacagactgttcagagagaagagcctggaccagctgaagagcatcagcgccgaggagatcctgaccctgttctgcggcgccccccccgtgacccccatcatcgtgctgagcatcatcaacttcttcgagagactgtgcctgacctggatgttcttcttcatgatgtgcgtggccgagagaacctacaagcagagattcctgttcgccaagctgttcagccacatcaccagcgccagaaaggccagaaagtacgagatcccccacttcagactgaagaaggtggagaacatcaagatctggctgagcctgagaagctacctgaagagaagaggcccccagagaagcgtggacgtggtggtgagcagcgtgttcctgctgaccctgagcatcgccttcatctgctgcgcccaggtgctgcagggccacaagaccttcctgaacgacgcctacaactgggagttcctgatctgggagaccgccctgctgctgttcctgctgagactggccagcctgggcagcgagaccaacaagaagtacagcaacgtgagcatcctgctgaccgagcagatcaacctgtacctgaagatggagaagaagcccaacaagaaggagcagctgaccctggtgaacaacgtgctgaagctgagcaccaagctgctgaaggagctggacacccccttcagactgtacggcctgaccatgaaccccctgatctacaacatcaccagagtggtgatcctgagcgccgtgagcggcgtgatcagcgacctgctgggcttcaacatcagactgtggaagatcaagagctag

SEQ ID NO: 95895 - DNA, 2289 bp, synthetic construct; identical to SEQ ID NO: 95894
  misc_feature 1..2289: note = Description of Artificial Sequence: Synthetic coding sequence
  source 1..2289: mol_type = other DNA

SEQ ID NO: 95896 - DNA, 996 bp, synthetic construct
  misc_feature 1..996: note = Description of Artificial Sequence: Synthetic coding sequence
  source 1..996: mol_type = other DNA
tgacagaccagagagaaggccaagttcagcgacggcgagaagtgcagaagagaggccttcagaagactgggcaacggcgtgagcgacgacctgagcagcgaggaggacggcgaggccagaacccagatgatcctgctgagaagaagcgtggagggcgccagcagcgacaacggctgcgaggtgaagaacagaaagagcatcctgagcagacacctgaacagccaggtgaagaagaccaccaccagatggtgccacatcgtgagagacagcgacagcctggccgagagcgagttcgagagcgccgccttcagccagggcagcagaagcggcgtgagcggcggcagcagaagcctgaacatgagcagaagagacagcgagagcaccagacacgacagcgagaccgaggacatgctgtgggacgacctgctgcacggccccgagtgcagaagcagcgtgaccagcgacagcgagggcgcccacgtgaacaccctgcacagcggcaccaagagagaccccaaggaggacgtgttccagcagaaccacctgttctggctgcagaacagcagccccagcagcgacagagtgagcgccatcatctgggagggcaacgagtgcaagaagatggacatgagcgtgctggagatcagcggcatcatcatgagcagagtgaacgcctaccagcagggcgtgggctaccagatgctgggcaacgtggtgaccatcggcctggccttcttccccttcctgcacagactgttcagagagaagagcctggaccagctgaagagcatcagcgccgaggagatcctgaccctgttctgcggcgccccccccgtgacccccatcatcgtgctgagcatcatcaacttcttcgagagactgtgcctgacctggatgttcttcttcatgatgtgcgtggccgagagaacctacaagcaggtgagcggcgagatcagaaagatcttctacctgttcctgtacatgatcttccactag

SEQ ID NO: 95897 - DNA, 318 bp, synthetic construct
  misc_feature 1..318: note = Description of Artificial Sequence: Synthetic coding sequence
  source 1..318: mol_type = other DNA
atggccagcaacgagagagacgccatcagctggtaccagaagaagatcggcgcctacgaccagcagatctgggagaagagcatcgagcagacccagatcaagggcctgaagaacaagcccaagaagatgggccacatcaagcccgacctgatcgacgtggacctgatcagaggcagcaccttcgccaaggccaagcccgagatcccctggaccagcctgaccagaaagggcctggtgagagtggtgttcttccccctgttcagcaactggtggatccaggtgaccagcctgagaatcttcgtgtggctgctgctgtag

SEQ ID NO: 95898 - DNA, 702 bp, synthetic construct
  misc_feature 1..702: note = Description of Artificial Sequence: Synthetic coding sequence
  source 1..702: mol_type = other DNA
atggccagcaacgagagagacgccatcagctggtaccagaagaagatcggcgcctacgaccagcagatctgggagaagagcatcgagcagacccagatcaagggcctgaagaacaagcccaagaagatgggccacatcaagcccgacctgatcgacgtggacctgatcagaggcagcaccttcgccaaggccaagcccgagatcccctggaccagcctgaccagaaagggcctggtgagagtggtgttcttccccctgttcagcaactggtggatccaggtgaccagcctgagaatcttcgtgtggctgctgctgctgtacttcatgcaggtgatcgccatcgtgctgtacctgatgatgcccatcgtgaacatcagcgaggtgctgggccccctgtgcctgatgctgctgatgggcaccgtgcactgccagatcgtgagcacccagatcaccagacccagcggcaacaacggcaacagaagaagaagaaagctgagaaagaccgtgaacggcgacggcagcagagagaacggcaacaacagcagcgacaaggtgagaggcatcgagaccctggagagcgtgcccatcatcggcggcttctgggagaccatcttcggcaacagaagactgctgggcgtgtgggtgatgggctgcctgatgacctgccaggtgaagaagatggtgaagcacggccacagatag

SEQ ID NO: 95899 - DNA, 2760 bp, synthetic construct
  misc_feature 1..2760: note = Description of Artificial Sequence: Synthetic coding sequence
  source 1..2760: mol_type = other DNA
atgaagttcgcctacagattcagcaacctgctgggcaccgtgtacagaagaggcaacctgaacttcacctgcgacggcaacagcgtgatcagccccgtgggcaacagagtgaccgtgttcgacctgaagaacaacaagagcgacaccctgcccctggccaccagatacaacgtgaagtgcgtgggcctgagccccgacggcagactggccatcatcgtggacgagggcggcgacgccctgctggtgagcctggtgtgcagaagcgtgctgcaccacttccacttcaagggcagcgtgcacagcgtgagcttcagccccgacggcagaaagttcgtggtgaccaagggcaacatcgcccagatgtaccacgcccccggcaagaagagagagttcaacgccttcgtgctggacaagacctacttcggcccctacgacgagaccacctgcatcgactggaccgacgacagcagatgcttcgtggtgggcagcaaggacatgagcacctgggtgttcggcgccgagagatgggacaacctgatctactacgccctgggcggccacaaggacgccatcgtggcctgcttcttcgagagcaacagcctggacctgtacagcctgagccaggacggcgtgctgtgcatgtggcagtgcgacaccccccccgagggcctgagactgaagccccccgccggctggaaggccgacctgctgcagagagaggaggaggaggaggaggaggaggaccaggagggcgacagagagaccaccatcagaggcaaggccacccccgccgaggaggagaagaccggcaaggtgaagtacagcagactggccaagtacttcttcaacaaggagggcgacttcaacaacctgaccgccgccgccttccacaagaagagccacctgctggtgaccggcttcgccagcggcatcttccacctgcacgagctgcccgagttcaacctgatccacagcctgagcatcagcgaccagagcatcgccagcgtggccatcaacagcagcggcgactggatcgccttcggctgcagcggcctgggccagctgctggtgtgggagtggcagagcgagagctacgtgctgaagcagcagggccacttcaacagcatggtggccctggcctacagccccgacggccagtacatcgtgaccggcggcgacgacggcaaggtgaaggtgtggaacaccctgagcggcttctgcttcgtgaccttcaccgagcacagcagcggcgtgaccggcgtgaccttcaccgccaccggctacgtggtggtgaccagcagcatggacggcaccgtgagagccttcgacctgcacagatacagaaacttcagaaccttcaccagccccagacccacccagttcagctgcgtggccgtggacgccagcggcgagatcgtgagcgccggcgcccaggacagcttcgagatcttcgtgtggagcatgcagaccggcagactgctggacgtgctgagcggccacgagggccccatcagcggcctgtgcttcaaccccatgaagagcgtgctggccagcgccagctgggacaagaccgtgagactgtgggacatgttcgacagctggagaaccaaggagaccctggccctgaccagcgacgccctggccgtgaccttcagacccgacggcgccgagctggccgtggccaccctgaacagccagatcaccttctgggaccccgagaacgccgtgcagaccggcagcatcgagggcagacacgacctgaagaccggcagaaaggagctggacaagatcaccgccaagcacgccgccaagggcaaggccttcaccgccctgtgctacagcgccgacggccacagcatcctggccggcggcatgagcaagttcgtgtgcatctaccacgtgagagagcagatcctgatgaagagattcgagatcagctgcaacctgagcctggacgccatggaggagttcctgaacagaagaaagatgaccgagttcggcaacctggccctgatcgaccaggacgccggccaggaggacggcgtggccatccccctgcccggcgtgagaaagggcgacatgagcagcagacacttcaagcccgagatcagagtgaccagcctgagattcagccccaccggcagatgctgggccgccaccaccaccgagggcctgctgatctacagcctggacaccagagtgctgttcgaccccttcgagctggacaccagcgtgacccccggcagagtgagagaggccctgagacagcaggacttcaccagagccatcctgatggccctgagactgaacgagagcaagctggtgcaggaggccctggaggccgtgcccagaggcgagatcgaggtggtgaccagcagcctgcccgagctgtacgtggagaaggtgctggagttcctggccagcagcttcgaggtgagcagacacctggagttctacctgctgtggacccacaagctgctgatgctgcacggccagaagctgaagagcagagccggcaccctgctgcccgtgatccagttcctgcagaagagcatccagagacacctggacgacctgagcaagctgtgcagctggaaccactacaacatgcagtacgccctggccgtgagcaagcagagaggcaccaagagaagcctggaccccctgggcagcgaggaggaggccgaggccagcgaggacgacagcctgcacctgctgggcggcggcggcagagacagcgaggaggagatgctggcctag

SEQ ID NO: 95900 - DNA, 1686 bp, synthetic construct
  misc_feature 1..1686: note = Description of Artificial Sequence: Synthetic coding sequence
  source 1..1686: mol_type = other DNA
atggccttcatggagaagccccccgccggcaaggtgctgctggacgacaccgtgcccctgaccgccgccatcgaggccagccagagcctgcagagccacaccatcgtgagaagatacagcgacttcgacctgctgaacaacagcctgcagatcgccggcctgagcctgcccctgccccccaagaagctgatcggcaacatggacagagagttcatcgccgagagacagaagggcctgcagaactacctgaacgtgatcaccaccaaccacatcctgagcaactgcgagctggtgaagaagttcctggaccccaacaactacagcgccaactacaccgagatcgccctgcagcaggtgagcatgttcttcagaagcgagcccaagtgggaggtggtggagcccctgaaggacatcggctggagaatcagaaagaagtacttcctgatgaagatcaagaaccagcccaaggagagactggtgctgagctgggccgacctgggccccgacaagtacctgagcgacaaggacttccagtgcctgatcaagctgctgcccagctgcctgcacccctacatctacagagtgaccttcgccaccgccaacgagagcagcgccctgctgatcagaatgttcaacgagaagggcaccctgaaggacctgatctacaaggccaagcccaaggaccccttcctgaagaagtactgcaaccccaagaagatccagggcctggagctgcagcagatcaagacctacggcagacagatcctggaggtgctgaagttcctgcacgacaagggcttcccctacggccacctgcacgccagcaacgtgatgctggacggcgacacctgcagactgctggacctggagaacagcctgctgggcctgcccagcttctacagaagctacttcagccagttcagaaagatcaacaccctggagagcgtggacgtgcactgcttcggccacctgctgtacgagatgacctacggcagaccccccgacagcgtgcccgtggacagcttcccccccgcccccagcatggccgtggtggccgtgctggagagcaccctgagctgcgaggcctgcaagaacggcatgcccaccatcagcagactgctgcagatgcccctgttcagcgacgtgctgctgaccaccagcgagaagccccagttcaagatccccaccaagctgaaggaggccctgagaatcgccaaggagtgcatcgagaagagactgatcgaggagcagaagcagatccaccagcacagaagactgaccagagcccagagccaccacggcagcgaggaggagagaaagaagagaaagatcctggccagaaagaagagcaagagaagcgccctggagaacagcgaggagcacagcgccaagtacagcaacagcaacaacagcgccggcagcggcgccagcagccccctgaccagccccagcagccccaccccccccagcaccagcggcatcagcgccctgccccccccccccccccccccccccccccccgccgcccccctgccccccgccagcaccgaggcccccgcccagctgagcagccaggccgtgaacggcatgagcagaggcgccctgctgagcagcatccagaacttccagaagggcaccctgagaaaggccaagacctgcgaccacagcgcccccaagatcggctag

SEQ ID NO: 95901 - DNA, 1737 bp, synthetic construct
  misc_feature 1..1737: note = Description of Artificial Sequence: Synthetic coding sequence
  source 1..1737: mol_type = other DNA
atggccttcatggagaagccccccgccggcaaggtgctgctggacgacaccgtgcccctgaccgccgccatcgaggccagccagagcctgcagagccacaccgagtacatcatcagagtgcagagaggcatcagcgtggagaacagctggcagatcgtgagaagatacagcgacttcgacctgctgaacaacagcctgcagatcgccggcctgagcctgcccctgccccccaagaagctgatcggcaacatggacagagagttcatcgccgagagacagaagggcctgcagaactacctgaacgtgatcaccaccaaccacatcctgagcaactgcgagctggtgaagaagttcctggaccccaacaactacagcgccaactacaccgagatcgccctgcagcaggtgagcatgttcttcagaagcgagcccaagtgggaggtggtggagcccctgaaggacatcggctggagaatcagaaagaagtacttcctgatgaagatcaagaaccagcccaaggagagactggtgctgagctgggccgacctgggccccgacaagtacctgagcgacaaggacttccagtgcctgatcaagctgctgcccagctgcctgcacccctacatctacagagtgaccttcgccaccgccaacgagagcagcgccctgctgatcagaatgttcaacgagaagggcaccctgaaggacctgatctacaaggccaagcccaaggaccccttcctgaagaagtactgcaaccccaagaagatccagggcctggagctgcagcagatcaagacctacggcagacagatcctggaggtgctgaagttcctgcacgacaagggcttcccctacggccacctgcacgccagcaacgtgatgctggacggcgacacctgcagactgctggacctggagaacagcctgctgggcctgcccagcttctacagaagctacttcagccagttcagaaagatcaacaccctggagagcgtggacgtgcactgcttcggccacctgctgtacgagatgacctacggcagaccccccgacagcgtgcccgtggacagcttcccccccgcccccagcatggccgtggtggccgtgctggagagcaccctgagctgcgaggcctgcaagaacggcatgcccaccatcagcagactgctgcagatgcccctgttcagcgacgtgctgctgaccaccagcgagaagccccagttcaagatccccaccaagctgaaggaggccctgagaatcgccaaggagtgcatcgagaagagactgatcgaggagcagaagcagatccaccagcacagaagactgaccagagcccagagccaccacggcagcgaggaggagagaaagaagagaaagatcctggccagaaagaagagcaagagaagcgccctggagaacagcgaggagcacagcgccaagtacagcaacagcaacaacagcgccggcagcggcgccagcagccccctgaccagccccagcagccccaccccccccagcaccagcggcatcagcgccctgccccccccccccccccccccccccccccccgccgcccccctgccccccgccagcaccgaggcccccgcccagctgagcagccaggccgtgaacggcatgagcagaggcgccctgctgagcagcatccagaacttccagaagggcaccctgagaaaggccaagacctgcgaccacagcgcccccaagatcggctag

SEQ ID NO: 95902 - DNA, 1638 bp, synthetic construct
  misc_feature 1..1638: note = Description of Artificial Sequence: Synthetic coding sequence
  source 1..1638: mol_type = other DNA
atggccttcatggagaagccccccgccggcaaggtgctgctggacgacaccgtgcccctgaccgccgccatcgaggccagccagagcctgcagagccacaccatcgccggcctgagcctgcccctgccccccaagaagctgatcggcaacatggacagagagttcatcgccgagagacagaagggcctgcagaactacctgaacgtgatcaccaccaaccacatcctgagcaactgcgagctggtgaagaagttcctggaccccaacaactacagcgccaactacaccgagatcgccctgcagcaggtgagcatgttcttcagaagcgagcccaagtgggaggtggtggagcccctgaaggacatcggctggagaatcagaaagaagtacttcctgatgaagatcaagaaccagcccaaggagagactggtgctgagctgggccgacctgggccccgacaagtacctgagcgacaaggacttccagtgcctgatcaagctgctgcccagctgcctgcacccctacatctacagagtgaccttcgccaccgccaacgagagcagcgccctgctgatcagaatgttcaacgagaagggcaccctgaaggacctgatctacaaggccaagcccaaggaccccttcctgaagaagtactgcaaccccaagaagatccagggcctggagctgcagcagatcaagacctacggcagacagatcctggaggtgctgaagttcctgcacgacaagggcttcccctacggccacctgcacgccagcaacgtgatgctggacggcgacacctgcagactgctggacctggagaacagcctgctgggcctgcccagcttctacagaagctacttcagccagttcagaaagatcaacaccctggagagcgtggacgtgcactgcttcggccacctgctgtacgagatgacctacggcagaccccccgacagcgtgcccgtggacagcttcccccccgcccccagcatggccgtggtggccgtgctggagagcaccctgagctgcgaggcctgcaagaacggcatgcccaccatcagcagactgctgcagatgcccctgttcagcgacgtgctgctgaccaccagcgagaagccccagttcaagatccccaccaagctgaaggaggccctgagaatcgccaaggagtgcatcgagaagagactgatcgaggagcagaagcagatccaccagcacagaagactgaccagagcccagagccaccacggcagcgaggaggagagaaagaagagaaagatcctggccagaaagaagagcaagagaagcgccctggagaacagcgaggagcacagcgccaagtacagcaacagcaacaacagcgccggcagcggcgccagcagccccctgaccagccccagcagccccaccccccccagcaccagcggcatcagcgccctgccccccccccccccccccccccccccccccgccgcccccctgccccccgccagcaccgaggcccccgcccagctgagcagccaggccgtgaacggcatgagcagaggcgccctgctgagcagcatccagaacttccagaagggcaccctgagaaaggccaagacctgcgaccacagcgcccccaagatcggctag

SEQ ID NO: 95903 - DNA, 1548 bp, synthetic construct
  misc_feature 1..1548: note = Description of Artificial Sequence: Synthetic coding sequence
  source 1..1548: mol_type = other DNA
atggccttcatggagaagccccccgccggcaaggtgctgctggacgacaccgtgcccctgaccgccgccatcgaggccagccagagcctgcagagccacaccgagtacatcatcagagtgcagagaggcatcagcgtggagaacagctggcagatcgtgagaagatacagcgacttcgacctgctgaacaacagcctgcagatcgccggcctgagcctgcccctgccccccaagaagctgatcggcaacatggacagagagttcatcgccgagagacagaagggcctgcagaactacctgaacgtgatcaccaccaaccacatcctgagcaactgcgagctggtgaagaagttcctggaccccaacaactacagcgccaactacaccgagatcgccctgcagcaggtgagcatgttcttcagaagcgagcccaagtgggaggtggtggagcccctgaaggacatcggctggagaatcagaaagaagtacttcctgatgaagatcaagaaccagcccaaggagagactggtgctgagctgggccgacctgggccccgacaagtacctgagcgacaaggacttccagtgcctgatcaagctgctgcccagctgcctgcacccctacatctacagagtgaccttcgccaccgccaacgagagcagcgccctgctgatcagaatgttcaacgagaagggcaccctgaaggacctgatctacaaggccaagcccaaggaccccttcctgaagaagtactgcaaccccaagaagatccagggcctggagctgcagcagatcaagacctacggcagacagatcctggaggtgctgaagttcctgcacgacaagggcttcccctacggccacctgcacgccagcaacgtgatgctggacggcgacacctgcagactgctggacctggagaacagcctgctgggcctgcccagcttctacagaagctacttcagccagttcagaaagatcaacaccctggagagcgtggacgtgcactgcttcggccacctgctgtacgagatgacctacggcagaccccccgacagcgtgcccgtggacagcttcccccccgcccccagcatggccgtggtggccgtgctggagagcaccctgagctgcgaggcctgcaagaacggcatgcccaccatcagcagactgctgcagatgcccctgttcagcgacgtgctgctgaccaccagcgagaagccccagttcaagatccccaccaagctgaaggaggccctgagaatcgccaaggagtgcatcgagaagagactgatcgaggagcagaagcagatccaccagcacagaagactgaccagagcccagagccaccacggcagcgaggaggagagaaagaagagaaagatcctggccagaaagaagagcaagagaagcgccctggagaacagcgaggagcacagcgccaagtacagcaacagcaacaacagcgccggcagcggcgccagcagccccctgaccagccccagcagccccaccccccccagcaccagcgtggagcacgcccccttctag

SEQ ID NO: 95904 - DNA, 1326 bp, synthetic construct
  misc_feature 1..1326: note = Description of Artificial Sequence: Synthetic coding sequence
  source 1..1326: mol_type = other DNA
atgttcttcagaagcgagcccaagtgggaggtggtggagcccctgaaggacatcggctggagaatcagaaagaagtacttcctgatgaagatcaagaaccagcccaaggagagactggtgctgagctgggccgacctgggccccgacaagtacctgagcgacaaggacttccagtgcctgatcaagctgctgcccagctgcctgcacccctacatctacagagtgaccttcgccaccgccaacgagagcagcgccctgctgatcagaatgttcaacgagaagggcaccctgaaggacctgatctacaaggccaagcccaaggaccccttcctgaagaagtactgcaaccccaagaagatccagggcctggagctgcagcagatcaagacctacggcagacagatcctggaggtgctgaagttcctgcacgacaagggcttcccctacggccacctgcacgccagcaacgtgatgctggacggcgacacctgcagactgctggacctggagaacagcctgctgggcctgcccagcttctacagaagctacttcagccagttcagaaagatcaacaccctggagagcgtggacgtgcactgcttcggccacctgctgtacgagatgacctacggcagaccccccgacagcgtgcccgtggacagcttcccccccgcccccagcatggccgtggtggccgtgctggagagcaccctgagctgcgaggcctgcaagaacggcatgcccaccatcagcagactgctgcagatgcccctgttcagcgacgtgctgctgaccaccagcgagaagccccagttcaagatccccaccaagctgaaggaggccctgagaatcgccaaggagtgcatcgagaagagactgatcgaggagcagaagcagatccaccagcacagaagactgaccagagcccagagccaccacggcagcgaggaggagagaaagaagagaaagatcctggccagaaagaagagcaagagaagcgccctggagaacagcgaggagcacagcgccaagtacagcaacagcaacaacagcgccggcagcggcgccagcagccccctgaccagccccagcagccccaccccccccagcaccagcggcatcagcgccctgccccccccccccccccccccccccccccccgccgcccccctgccccccgccagcaccgaggcccccgcccagctgagcagccaggccgtgaacggcatgagcagaggcgccctgctgagcagcatccagaacttccagaagggcaccctgagaaaggccaagacctgcgaccacagcgcccccaagatcggctag

SEQ ID NO: 95905 - DNA, 1005 bp, synthetic construct
  misc_feature 1..1005: note = Description of Artificial Sequence: Synthetic coding sequence
  source 1..1005: mol_type = other DNA
atgttcttcagaagcgagcccaagtgggaggtggtggagcccctgaaggacatcggctggagaatcagaaagaagtacttcctgatgaagatcaagaaccagcccaaggagagactggtgctgagctgggccgacctgggccccgacaagtacctgagcgacaaggacttccagtgcctgatcaagctgctgcccagctgcctgcacccctacatctacagagtgaccttcgccaccgccaacgagagcagcgccctgctgatcagaatgttcaacgagaagggcaccctgaaggacctgatctacaaggccaagcccaaggaccccttcctgaagaagtactgcaaccccaagaagatccagggcctggagctgcagcagatcaagacctacggcagacagatcctggaggtgctgaagttcctgcacgacaagggcttcccctacggccacctgcacgccagcaacgtgatgctggacggcgacacctgcagactgctggacctggagaacagcctgctgggcctgcccagcttctacagaagctacttcagccagttcagaaagatcaacaccctggagagcgtggacgtgcactgcttcggccacctgctgtacgagatgacctacggcagaccccccgacagcgtgcccgtggacagcttcccccccgcccccagcatggccgtggtggccgtgctggagagcaccctgagctgcgaggcctgcaagaacggcatgcccaccatcagcagactgctgcagatgcccctgttcagcgacgtgctgctgaccaccagcgagaagccccagttcaagatccccaccaagctgaaggaggccctgagaatcgccaaggagtgcatcgagaagagactgatcgaggagcagaagcagatccaccagcacagaagactgaccagagcccagagccaccacggcagcgaggaggagagaaagaagaaggacttcagcagcaaggaggtgaagaccatctgcagctag

SEQ ID NO: 95906 - DNA, 1110 bp, synthetic construct
  misc_feature 1..1110: note = Description of Artificial Sequence: Synthetic coding sequence
  source 1..1110: mol_type = other DNA
atgaagagccccgagaagaagagaagaaagagcaacacccagggccccgcctacagccacctgaccgagttcgcccccccccccacccccatggtggaccacctggtggccagcaaccccttcgaggacgacttcggcgcccccaaggtgggcgtggccgccccccccttcctgggcagccccgtgcccttcggcggcttcagagtgcagggcggcatggccggccaggtgccccccggctacagcaccggcggcggcggcggcccccagcccctgagaagacagcccccccccttcccccccaaccccatgggccccgccttcaacatgcccccccagggccccggctaccccccccccggcaacatgaacttccccagccagcccttcaaccagcccctgggccagaacttcagcccccccagcggccagatgatgcccggccccgtgggcggcttcggccccatgatcagccccaccatgggccagccccccagagccgagctgggcccccccagcctgagccagagattcgcccagcccggcgcccccttcggccccagccccctgcagagacccggccagggcctgcccagcctgccccccaacaccagccccttccccggccccgaccccggcttccccggccccggcggcgaggacggcggcaagcccctgaacccccccgccagcaccgccttcccccaggagccccacagcggcagccccgccgccgccgtgaacggcaaccagcccagcttcccccccaacagcagcggcagaggcggcggcacccccgacgccaacagcctggccccccccggcaaggccggcggcggcagcggcccccagcccccccccggcctggtgtacccctgcggcgcctgcagaagcgaggtgaacgacgaccaggacgccatcctgtgcgaggccagctgccagaagtggttccacagagagtgcaccggcatgaccgagagcgcctacggcctgctgaccaccgaggccagcgccgtgtgggcctgcgacctgtgcctgaagaccaaggagatccagagcgtgtacatcagagagggcatgggccagctggtggccgccaacgacggctag

SEQ ID NO: 95907 - DNA, 1221 bp, synthetic construct
  misc_feature 1..1221: note = Description of Artificial Sequence: Synthetic coding sequence
  source 1..1221: mol_type = other DNA
atggccgccagcgccccccccccccccgacaagctggagggcggcggcggccccgcccccccccccgccccccccagcaccggcagaaagcagggcaaggccggcctgcagatgaagagccccgagaagaagagaagaaagagcaacacccagggccccgcctacagccacctgaccgagttcgcccccccccccacccccatggtggaccacctggtggccagcaaccccttcgaggacgacttcggcgcccccaaggtgggcgtggccgccccccccttcctgggcagccccgtgcccttcggcggcttcagagtgcagggcggcatggccggccaggtgccccccggctacagcaccggcggcggcggcggcccccagcccctgagaagacagcccccccccttcccccccaaccccatgggccccgccttcaacatgcccccccagggccccggctaccccccccccggcaacatgaacttccccagccagcccttcaaccagcccctgggccagaacttcagcccccccagcggccagatgatgcccggccccgtgggcggcttcggccccatgatcagccccaccatgggccagccccccagagccgagctgggcccccccagcctgagccagagattcgcccagcccggcgcccccttcggccccagccccctgcagagacccggccagggcctgcccagcctgccccccaacaccagccccttccccggccccgaccccggcttccccggccccggcggcgaggacggcggcaagcccctgaacccccccgccagcaccgccttcccccaggagccccacagcggcagccccgccgccgccgtgaacggcaaccagcccagcttcccccccaacagcagcggcagaggcggcggcacccccgacgccaacagcctggccccccccggcaaggccggcggcggcagcggcccccagcccccccccggcctggtgtacccctgcggcgcctgcagaagcgaggtgaacgacgaccaggacgccatcctgtgcgaggccagctgccagaagtggttccacagagagtgcaccggcatgaccgagagcgcctacggcctgctgaccaccgaggccagcgccgtgtgggcctgcgacctgtgcctgaagaccaaggagatccagagcgtgtacatcagagagggcatgggccagctggtggccgccaacgacggctag

SEQ ID NO: 95908 - DNA, 939 bp, synthetic construct
  misc_feature 1..939: note = Description of Artificial Sequence: Synthetic coding sequence
  source 1..939: mol_type = other DNA
atggaggaggagtgcagagtgctgagcatccagagccacgtgatcagaggctacgtgggcaacagagccgccaccttccccctgcaggtgctgggcttcgagatcgacgccgtgaacagcgtgcagttcagcaaccacaccggctacgcccactggaagggccaggtgctgaacagcgacgagctgcaggagctgtacgagggcctgagactgaacaacatgaacaagtacgactacgtgctgaccggctacaccagagacaagagcttcctggccatggtggtggacatcgtgcaggagctgaagcagcagaaccccagactggtgtacgtgtgcgaccccgtgctgggcgacaagtgggacggcgagggcagcatgtacgtgcccgaggacctgctgcccgtgtacaaggagaaggtggtgcccctggccgacatcatcacccccaaccagttcgaggccgagctgctgagcggcagaaagatccacagccaggaggaggccctgagagtgatggacatgctgcacagcatgggccccgacaccgtggtgatcaccagcagcgacctgcccagcccccagggcagcaactacctgatcgtgctgggcagccagagaagaagaaaccccgccggcagcgtggtgatggagagaatcagaatggacatcagaaaggtggacgccgtgttcgtgggcaccggcgacctgttcgccgccatgctgctggcctggacccacaagcaccccaacaacctgaaggtggcctgcgagaagaccgtgagcaccctgcaccacgtgctgcagagaaccatccagtgcgccaaggcccaggccggcgagggcgtgagacccagccccatgcagctggagctgagaatggtgcagagcaagagagacatcgaggaccccgagatcgtggtgcaggccaccgtgctgtag

SEQ ID NO: 95909 - DNA, 855 bp, synthetic construct
  misc_feature 1..855: note = Description of Artificial Sequence: Synthetic coding sequence
  source 1..855: mol_type = other DNA
atggaggaggagtgcagagtgctgagcatccagagccacgtgatcagaggctacgtgggcaacagagccgccaccttccccctgcaggtgctgggcttcgagatcgacgccgtgaacagcgtgcagttcagcaaccacaccggctacgcccactggaagggccaggtgctgaacagcgacgagctgcaggagctgtacgagggcctgagactgaacaacatgaacaagtacgactacgtgctgaccgtgtgcgaccccgtgctgggcgacaagtgggacggcgagggcagcatgtacgtgcccgaggacctgctgcccgtgtacaaggagaaggtggtgcccctggccgacatcatcacccccaaccagttcgaggccgagctgctgagcggcagaaagatccacagccaggaggaggccctgagagtgatggacatgctgcacagcatgggccccgacaccgtggtgatcaccagcagcgacctgcccagcccccagggcagcaactacctgatcgtgctgggcagccagagaagaagaaaccccgccggcagcgtggtgatggagagaatcagaatggacatcagaaaggtggacgccgtgttcgtgggcaccggcgacctgttcgccgccatgctgctggcctggacccacaagcaccccaacaacctgaaggtggcctgcgagaagaccgtgagcaccctgcaccacgtgctgcagagaaccatccagtgcgccaaggcccaggccggcgagggcgtgagacccagccccatgcagctggagctgagaatggtgcagagcaagagagacatcgaggaccccgagatcgtggtgcaggccaccgtgctgtag

SEQ ID NO: 95910 - DNA, 2322 bp, synthetic construct
  misc_feature 1..2322: note = Description of Artificial Sequence: Synthetic coding sequence
  source 1..2322: mol_type = other DNA
atgggcaagaacctgaaggaggccgtgaagatgctggaggacagccagagaagaaccgaggaggagaacggcaagaagctgatcagcggcgacatccccggccccctgcagggcagcggccaggacatggtgagcatcctgcagctggtgcagaacctgatgcacggcgacgaggacgaggagccccagagccccagaatccagaacatcggcgagcagggccacatggccctgctgggccacagcctgggcgcctacatcagcaccctggacaaggagaagctgagaaagctgaccaccagaatcctgagcgacaccaccctgtggctgtgcagaatcttcagatacgagaacggctgcgcctacttccacgaggaggagagagagggcctggccaagatctgcagactggccatccacagcagatacgaggacttcgtggtggacggcttcaacgtgctgtacaacaagaagcccgtgatctacctgagcgccgccgccagacccggcctgggccagtacctgtgcaaccagctgggcctgcccttcccctgcctgtgcagagtgccctgcaacaccgtgttcggcagccagcaccagatggacgtggccttcctggagaagctgatcaaggacgacatcgagagaggcagactgcccctgctgctggtggccaacgccggcaccgccgccgtgggccacaccgacaagatcggcagactgaaggagctgtgcgagcagtacggcatctggctgcacgtggagggcgtgaacctggccaccctggccctgggctacgtgagcagcagcgtgctggccgccgccaagtgcgacagcatgaccatgacccccggcccctggctgggcctgcccgccgtgcccgccgtgaccctgtacaagcacgacgaccccgccctgaccctggtggccggcctgaccagcaacaagcccaccgacaagctgagagccctgcccctgtggctgagcctgcagtacctgggcctggacggcttcgtggagagaatcaagcacgcctgccagctgagccagagactgcaggagagcctgaagaaggtgaactacatcaagatcctggtggaggacgagctgagcagccccgtggtggtgttcagattcttccaggagctgcccggcagcgaccccgtgttcaaggccgtgcccgtgcccaacatgacccccagcggcgtgggcagagagagacacagctgcgacgccctgaacagatggctgggcgagcagctgaagcagctggtgcccgccagcggcctgaccgtgatggacctggaggccgagggcacctgcctgagattcagccccctgatgaccgccgccgtgctgggcaccagaggcgaggacgtggaccagctggtggcctgcatcgagagcaagctgcccgtgctgtgctgcaccctgcagctgagagaggagttcaagcaggaggtggaggccaccgccggcctgctgtacgtggacgaccccaactggagcggcatcggcgtggtgagatacgagcacgccaacgacgacaagagcagcctgaagagcgaccccgagggcgagaacatccacgccggcctgctgaagaagctgaacgagctggagagcgacctgaccttcaagatcggccccgagtacaagagcatgaagagctgcctgtacgtgggcatggccagcgacaacgtggacgccgccgagctggtggagaccatcgccgccaccgccagagagatcgaggagaacagcagactgctggagaacatgaccgaggtggtgagaaagggcatccaggaggcccaggtggagctgcagaaggccagcgaggagagactgctggaggagggcgtgctgagacagatccccgtggtgggcagcgtgctgaactggttcagccccgtgcaggccctgcagaagggcagaaccttcaacctgaccgccggcagcctggagagcaccgagcccatctacgtgtacaaggcccagggcgccggcgtgaccctgccccccacccccagcggcagcagaaccaagcagagactgcccggccagaagcccttcaagagaagcctgagaggcagcgacgccctgagcgagaccagcagcgtgagccacatcgaggacctggagaaggtggagagactgagcagcggccccgagcagatcaccctggaggccagcagcaccgagggccaccccggcgcccccagcccccagcacaccgaccagaccgaggccttccagaagggcgtgccccaccccgaggacgaccacagccaggtggagggccccgagagcctgagatag

SEQ ID NO: 95911 - DNA, 2367 bp, synthetic construct
  misc_feature 1..2367: note = Description of Artificial Sequence: Synthetic coding sequence
  source 1..2367: mol_type = other DNA
atggacgccagcctggagaagatcgccgaccccaccctggccgagatgggcaagaacctgaaggaggccgtgaagatgctggaggacagccagagaagaaccgaggaggagaacggcaagaagctgatcagcggcgacatccccggccccctgcagggcagcggccaggacatggtgagcatcctgcagctggtgcagaacctgatgcacggcgacgaggacgaggagccccagagccccagaatccagaacatcggcgagcagggccacatggccctgctgggccacagcctgggcgcctacatcagcaccctggacaaggagaagctgagaaagctgaccaccagaatcctgagcgacaccaccctgtggctgtgcagaatcttcagatacgagaacggctgcgcctacttccacgaggaggagagagagggcctggccaagatctgcagactggccatccacagcagatacgaggacttcgtggtggacggcttcaacgtgctgtacaacaagaagcccgtgatctacctgagcgccgccgccagacccggcctgggccagtacctgtgcaaccagctgggcctgcccttcccctgcctgtgcagagtgccctgcaacaccgtgttcggcagccagcaccagatggacgtggccttcctggagaagctgatcaaggacgacatcgagagaggcagactgcccctgctgctggtggccaacgccggcaccgccgccgtgggccacaccgacaagatcggcagactgaaggagctgtgcgagcagtacggcatctggctgcacgtggagggcgtgaacctggccaccctggccctgggctacgtgagcagcagcgtgctggccgccgccaagtgcgacagcatgaccatgacccccggcccctggctgggcctgcccgccgtgcccgccgtgaccctgtacaagcacgacgaccccgccctgaccctggtggccggcctgaccagcaacaagcccaccgacaagctgagagccctgcccctgtggctgagcctgcagtacctgggcctggacggcttcgtggagagaatcaagcacgcctgccagctgagccagagactgcaggagagcctgaagaaggtgaactacatcaagatcctggtggaggacgagctgagcagccccgtggtggtgttcagattcttccaggagctgcccggcagcgaccccgtgttcaaggccgtgcccgtgcccaacatgacccccagcggcgtgggcagagagagacacagctgcgacgccctgaacagatggctgggcgagcagctgaagcagctggtgcccgccagcggcctgaccgtgatggacctggaggccgagggcacctgcctgagattcagccccctgatgaccgccgccgtgctgggcaccagaggcgaggacgtggaccagctggtggcctgcatcgagagcaagctgcccgtgctgtgctgcaccctgcagctgagagaggagttcaagcaggaggtggaggccaccgccggcctgctgtacgtggacgaccccaactggagcggcatcggcgtggtgagatacgagcacgccaacgacgacaagagcagcctgaagagcgaccccgagggcgagaacatccacgccggcctgctgaagaagctgaacgagctggagagcgacctgaccttcaagatcggccccgagtacaagagcatgaagagctgcctgtacgtgggcatggccagcgacaacgtggacgccgccgagctggtggagaccatcgccgccaccgccagagagatcgaggagaacagcagactgctggagaacatgaccgaggtggtgagaaagggcatccaggaggcccaggtggagctgcagaaggccagcgaggagagactgctggaggagggcgtgctgagacagatccccgtggtgggcagcgtgctgaactggttcagccccgtgcaggccctgcagaagggcagaaccttcaacctgaccgccggcagcctggagagcaccgagcccatctacgtgtacaaggcccagggcgccggcgtgaccctgccccccacccccagcggcagcagaaccaagcagagactgcccggccagaagcccttcaagagaagcctgagaggcagcgacgccctgagcgagaccagcagcgtgagccacatcgaggacctggagaaggtggagagactgagcagcggccccgagcagatcaccctggaggccagcagcaccgagggccaccccggcgcccccagcccccagcacaccgaccagaccgaggccttccagaagggcgtgccccaccccgaggacgaccacagccaggtggagggccccgagagcctgagatag

SEQ ID NO: 95912 - DNA, 2094 bp, synthetic construct
  misc_feature 1..2094: note = Description of Artificial Sequence: Synthetic coding sequence
  source 1..2094: mol_type = other DNA
atgggcaagaacctgaaggaggccgtgaagatgctggaggacagccagagaagaaccgaggaggagaacggcaagaagctgatcagcggcgacatccccggccccctgcagggcagatacgagaacggctgcgcctacttccacgaggaggagagagagggcctggccaagatctgcagactggccatccacagcagatacgaggacttcgtggtggacggcttcaacgtgctgtacaacaagaagcccgtgatctacctgagcgccgccgccagacccggcctgggccagtacctgtgcaaccagctgggcctgcccttcccctgcctgtgcagagtgccctgcaacaccgtgttcggcagccagcaccagatggacgtggccttcctggagaagctgatcaaggacgacatcgagagaggcagactgcccctgctgctggtggccaacgccggcaccgccgccgtgggccacaccgacaagatcggcagactgaaggagctgtgcgagcagtacggcatctggctgcacgtggagggcgtgaacctggccaccctggccctgggctacgtgagcagcagcgtgctggccgccgccaagtgcgacagcatgaccatgacccccggcccctggctgggcctgcccgccgtgcccgccgtgaccctgtacaagcacgacgaccccgccctgaccctggtggccggcctgaccagcaacaagcccaccgacaagctgagagccctgcccctgtggctgagcctgcagtacctgggcctggacggcttcgtggagagaatcaagcacgcctgccagctgagccagagactgcaggagagcctgaagaaggtgaactacatcaagatcctggtggaggacgagctgagcagccccgtggtggtgttcagattcttccaggagctgcccggcagcgaccccgtgttcaaggccgtgcccgtgcccaacatgacccccagcggcgtgggcagagagagacacagctgcgacgccctgaacagatggctgggcgagcagctgaagcagctggtgcccgccagcggcctgaccgtgatggacctggaggccgagggcacctgcctgagattcagccccctgatgaccgccgccgtgctgggcaccagaggcgaggacgtggaccagctggtggcctgcatcgagagcaagctgcccgtgctgtgctgcaccctgcagctgagagaggagttcaagcaggaggtggaggccaccgccggcctgctgtacgtggacgaccccaactggagcggcatcggcgtggtgagatacgagcacgccaacgacgacaagagcagcctgaagagcgaccccgagggcgagaacatccacgccggcctgctgaagaagctgaacgagctggagagcgacctgaccttcaagatcggccccgagtacaagagcatgaagagctgcctgtacgtgggcatggccagcgacaacgtggacgccgccgagctggtggagaccatcgccgccaccgccagagagatcgaggagaacagcagactgctggagaacatgaccgaggtggtgagaaagggcatccaggaggcccaggtggagctgcagaaggccagcgaggagagactgctggaggagggcgtgctgagacagatccccgtggtgggcagcgtgctgaactggttcagccccgtgcaggccctgcagaagggcagaaccttcaacctgaccgccggcagcctggagagcaccgagcccatctacgtgtacaaggcccagggcgccggcgtgaccctgccccccacccccagcggcagcagaaccaagcagagactgcccggccagaagcccttcaagagaagcctgagaggcagcgacgccctgagcgagaccagcagcgtgagccacatcgaggacctggagaaggtggagagactgagcagcggccccgagcagatcaccctggaggccagcagcaccgagggccaccccggcgcccccagcccccagcacaccgaccagaccgaggccttccagaagggcgtgccccaccccgaggacgaccacagccaggtggagggccccgagagcctgagatag

SEQ ID NO: 95913 - DNA, 2283 bp, synthetic construct
  misc_feature 1..2283: note = Description of Artificial Sequence: Synthetic coding sequence
  source 1..2283: mol_type = other DNA
atggacgccagcctggagaagatcgccgaccccaccctggccgagatgggcaagaacctgaaggaggccgtgaagatgctggaggacagccagagaaccgaggaggagaacggcaagaagctgatcagcggcgacatccccggccccctgcagggcagaatccagaacatcggcgagcagggccacatggccctgctgggccacagcctgggcgcctacatcagcaccctggacaaggagaagctgagaaagctgaccaccagaatcctgagcgacaccaccctgtggctgtgcagaatcttcagatacgagaacggctgcgcctacttccacgaggaggagagagagggcctggccaagatctgcagactggccatccacagcagatacgaggacttcgtggtggacggcttcaacgtgctgtacaacaagaagcccgtgatctacctgagcgccgccgccagacccggcctgggccagtacctgtgcaaccagctgggcctgcccttcccctgcctgtgcagagtgccctgcaacaccgtgttcggcagccagcaccagatggacgtggccttcctggagaagctgatcaaggacgacatcgagagaggcagactgcccctgctgctggtggccaacgccggcaccgccgccgtgggccacaccgacaagatcggcagactgaaggagctgtgcgagcagtacggcatctggctgcacgtggagggcgtgaacctggccaccctggccctgggctacgtgagcagcagcgtgctggccgccgccaagtgcgacagcatgaccatgacccccggcccctggctgggcctgcccgccgtgcccgccgtgaccctgtacaagcacgacgaccccgccctgaccctggtggccggcctgaccagcaacaagcccaccgacaagctgagagccctgcccctgtggctgagcctgcagtacctgggcctggacggcttcgtggagagaatcaagcacgcctgccagctgagccagagactgcaggagagcctgaagaaggtgaactacatcaagatcctggtggaggacgagctgagcagccccgtggtggtgttcagattcttccaggagctgcccggcagcgaccccgtgttcaaggccgtgcccgtgcccaacatgacccccagcggcgtgggcagagagagacacagctgcgacgccctgaacagatggctgggcgagcagctgaagcagctggtgcccgccagcggcctgaccgtgatggacctggaggccgagggcacctgcctgagattcagccccctgatgaccgccgccgtgctgggcaccagaggcgaggacgtggaccagctggtggcctgcatcgagagcaagctgcccgtgctgtgctgcaccctgcagctgagagaggagttcaagcaggaggtggaggccaccgccggcctgctgtacgtggacgaccccaactggagcggcatcggcgtggtgagatacgagcacgccaacgacgacaagagcagcctgaagagcgaccccgagggcgagaacatccacgccggcctgctgaagaagctgaacgagctggagagcgacctgaccttcaagatcggccccgagtacaagagcatgaagagctgcctgtacgtgggcatggccagcgacaacgtggacgccgccgagctggtggagaccatcgccgccaccgccagagagatcgaggagaacagcagactgctggagaacatgaccgaggtggtgagaaagggcatccaggaggcccaggtggagctgcagaaggccagcgaggagagactgctggaggagggcgtgctgagacagatccccgtggtgggcagcgtgctgaactggttcagccccgtgcaggccctgcagaagggcagaaccttcaacctgaccgccggcagcctggagagcaccgagcccatctacgtgtacaaggcccagggcgccggcgtgaccctgccccccacccccagcggcagcagaaccaagcagagactgcccggccagaagcccttcaagagaagcctgagaggcagcgacgccctgagcgagaccagcagcgtgagccacatcgaggacctggagaaggtggagagactgagcagcggccccgagcagatcaccctggaggccagcagcaccgagggccaccccggcgcccccagcccccagcacaccgaccagaccgaggccttccagaagggcgtgccccaccccgaggacgaccacagccaggtggagggccccgagagcctgagatag

SEQ ID NO: 95914 - DNA, 1290 bp, synthetic construct
  misc_feature 1..1290: note = Description of Artificial Sequence: Synthetic coding sequence
  source 1..1290: mol_type = other DNA
ctgagcagcaccctgagaagaatcgccgaccccaccctggccgagatgggcaagaacctgaaggaggccgtgaagatgctggaggacagccagagaagaaccgaggaggagaacggcaagaagctgatcagcggcgacatccccggccccctgcagggcagcggccaggacatggtgagcatcctgcagctggtgcagaacctgatgcacggcgacgaggacgaggagccccagagccccagaatccagaacatcggcgagcagggccacatggccctgctgggccacagcctgggcgcctacatcagcaccctggacaaggagaagctgagaaagctgaccaccagaatcctgagcgacaccaccctgtggctgtgcagaatcttcagatacgagaacggctgcgcctacttccacgaggaggagagagagggcctggccaagatctgcagactggccatccacagcagatacgaggacttcgtggtggacggcttcaacgtgctgtacaacaagaagcccgtgatctacctgagcgccgccgccagacccggcctgggccagtacctgtgcaaccaggacgtggccttcctggagaagctgatcaaggacgacatcgagagaggcagactgcccctgctgctggtggccaacgccggcaccgccgccgtgggccacaccgacaagatcggcagactgaaggagctgtgcgagcagtacggcatctggctgcacgtggagggcgtgaacctggccaccctggccctgggctacgtgagcagcagcgtgctggccgccgccaagtgcgacagcatgaccatgacccccggcccctggctgggcctgcccgccgtgcccgccgtgaccctgtacaagcacgacgaccccgccctgaccctggtggccggcctgaccagcaacaagcccaccgacaagctgagagccctgcccctgtggctgagcctgcagtacctgggcctggacggcttcgtggagagaatcaagcacgcctgccagctgagccagagactgcaggagagcctgaagaaggtgaactacatcaagatcctggtggaggacgagctgagcagccccgtggtggtgttcagattcttccaggagctgcccggcagcgaccccgtgttcaaggccgtgcccgtgcccaacatgacccccagcggcgtgggcagagagagacacagctgcgacgccctgaacagatgggtgagaatggccgtgacccccctgagcttccaggtgcccgtgcaccaccaccccacctgctggtag

SEQ ID NO: 95915 - DNA, 1497 bp, synthetic construct
  misc_feature 1..1497: note = Description of Artificial Sequence: Synthetic coding sequence
  source 1..1497: mol_type = other DNA
atggacgccagcctggagaagatcgccgaccccaccctggccgagatgggcaagaacctgaaggaggccgtgaagatgctggaggacagccagagaagaaccgaggaggagaacggcaagaagctgatcagcggcgacatccccggccccctgcagggcagcggccaggacatggtgagcatcctgcagctggtgcagaacctgatgcacggcgacgaggacgaggagccccagagccccagaatccagaacatcggcgagcagggccacatggccctgctgggccacagcctgggcgcctacatcagcaccctggacaaggagaagctgagaaagctgaccaccagaatcctgagcgacaccaccctgtggctgtgcagaatcttcagatacgagaacggctgcgcctacttccacgaggaggagagagagggcctggccaagatctgcagactggccatccacagcagatacgaggacttcgtggtggacggcttcaacgtgctgtacaacaagaagcccgtgatctacctgagcgccgccgccagacccggcctgggccagtacctgtgcaaccagctgggcctgcccttcccctgcctgtgcagagtgccctgcaacaccgtgttcggcagccagcaccagatggacgtggccttcctggagaagctgatcaaggacgacatcgagagaggcagactgcccctgctgctggtggccaacgccggcaccgccgccgtgggccacaccgacaagatcggcagactgaaggagctgtgcgagcagtacggcatctggctgcacgtggagggcgtgaacctggccaccctggccctgggctacgtgagcagcagcgtgctggccgccgccaagtgcgacagcatgaccatgacccccggcccctggctgggcctgcccgccgtgcccgccgtgaccctgtacaagcacgacgaccccgccctgaccctggtggccggcctgaccagcaacaagcccaccgacaagctgagagccctgcccctgtggctgagcctgcagtacctgggcctggacggcttcgtggagagaatcaagcacgcctgccagctgagccagagactgcaggagagcctgaagaaggtgaactacatcaagatcctggtggaggacgagctgagcagccccgtggtggtgttcagattcttccaggagctgcccggcagcgaccccgtgttcaaggccgtgcccgtgcccaacatgacccccagcggcgtgggcagagagagacacagctgcgacgccctgaacagatggctgggcgagcagctgaagcagctggtgcccgccagcggcctgaccgtgatggacctggaggccgagggcacctgcctgagattcagccccctgatgaccgccgccggctggagccactgcggcaccaccaccagatacgactgcgtgagaagcagactgaccaccagactgcccggcagcaccggcgagcaggcccccccctag

SEQ ID NO: 95916 - DNA, 615 bp, synthetic construct
  misc_feature 1..615: note = Description of Artificial Sequence: Synthetic coding sequence
  source 1..615: mol_type = other DNA
atgaccatgacccccggcccctggctgggcctgcccgccgtgcccgccgtgaccctgtacaagcacgacgaccccgccctgaccctggtggccggcctgaccagcaacaagcccaccgacaagctgagagccctgcccctgtggctgagcctgcagtacctgggcctggacggcttcgtggagagaatcaagcacgcctgccagctgagccagagactgcaggagagcctgaagaaggtgaactacatcaagatcctggtggaggacgagctgagcagccccgtggtggtgttcagattcttccaggagctgcccggcagcgaccccgtgttcaaggccgtgcccgtgcccaacatgacccccagcggcgtgggcagagagagacacagctgcgacgccctgaacagatggctgggcgagcagctgaagcagctggtgcccgccagcggcctgaccgtgatggacctggaggccgagggcacctgcctgagattcagccccctgatgaccgccgccggctggagccactgcggcaccaccaccagatacgactgcgtgagaagcagactgaccaccagactgcccggcagcaccggcgagcaggcccccccctag

SEQ ID NO: 95917 - DNA, 642 bp, synthetic construct
  misc_feature 1..642: note = Description of Artificial Sequence: Synthetic coding sequence
  source 1..642: mol_type = other DNA
atggaccccctgttccagcagacccacaagcaggtgcacgagatccagagctgcatgggcagactggagaccgccgacaagcagagcgtgcacatcgtggagaacgagatccaggccagcatcgaccagatcttcagcagactggagagactggagatcctgagcagcaaggagccccccaacaagagacagaacgccagactgagagtggaccagctgaagtacgacgtgcagcacctgcagaccgccctgagaaacttccagcacagaagacacgccagagagcagcaggagagacagagagaggagctgctgagcagaaccttcaccaccaacgacagcgacaccaccatccccatggacgagagcctgcagttcaacagcagcctgcagaaggtgcacaacggcatggacgacctgatcctggacggccacaacatcctggacggcctgagaacccagagactgaccctgaagggcacccagaagaagatcctggacatcgccaacatgctgggcctgagcaacaccgtgatgagactgatcgagaagagagccttccaggacaagtacttcatgatcggcacccagggcagctgccagaccgcccacttcggcggcagaagcgccggcagcagctag

SEQ ID NO: 95918 - DNA, 657 bp, synthetic construct
  misc_feature 1..657: note = Description of Artificial Sequence: Synthetic coding sequence
  source 1..657: mol_type = other DNA
atgacctgctggctgagaggcgtgaccgccaccttcggcagacccgccgagtggcccggctacctgagccacctgtgcggcagaagcgccgccatggacctgggccccatgagaaagagctacagaggcgacagagaggccttcgaggagacccacctgaccagcctggaccccgtgaagcagttcgccgcctggttcgaggaggccgtgcagtgccccgacatcggcgaggccaacgccatgtgcctggccacctgcaccagagacggcaagcccagcgccagaatgctgctgctgaagggcttcggcaaggacggcttcagattcttcaccaacttcgagagcagaaagggcaaggagctggacagcaaccccttcgccagcctggtgttctactgggagcccctgaacagacagtacctgagaaagaagaacgaggagctggagcagctgtaccaggaccaggaggtgcccaagcccaagagctggggcggctacgtgctgtacccccaggtgatggagttctggcagggccagaccaacagactgcacgacagaatcgtgttcagaagaggcctgcccaccggcgacagccccctgggccccatgacccacagaggcgaggaggactggctgtacgagagactggccccctag

SEQ ID NO: 95919 - DNA, 501 bp, synthetic construct
  misc_feature 1..501: note = Description of Artificial Sequence: Synthetic coding sequence
  source 1..501: mol_type = other DNA
atgctgctgctgaagggcttcggcaaggacggcttcagattcttcaccaacttcgagagcagaaagggcaaggagctggacagcaaccccttcgccagcctggtgttctactgggagcccctgaacagacaggtgagagtggagggccccgtgaagaagctgcccgaggaggaggccgagtgctacttccacagcagacccaagagcagccagatcggcgccgtggtgagccaccagagcagcgtgatccccgacagagagtacctgagaaagaagaacgaggagctggagcagctgtaccaggaccaggaggtgcccaagcccaagagctggggcggctacgtgctgtacccccaggtgatggagttctggcagggccagaccaacagactgcacgacagaatcgtgttcagaagaggcctgcccaccggcgacagccccctgggccccatgacccacagaggcgaggaggactggctgtacgagagactggccccctag

SEQ ID NO: 95920 - DNA, 732 bp, synthetic construct
  misc_feature 1..732: note = Description of Artificial Sequence: Synthetic coding sequence
  source 1..732: mol_type = other DNA
atgacctgctggctgagaggcgtgaccgccaccttcggcagacccgccgagtggcccggctacctgagccacctgtgcggcagaagcgccgccatggacctgggccccatgagaaagagctacagaggcgacagagaggccttcgaggagacccacctgaccagcctggaccccgtgaagcagttcgccgcctggttcgaggaggccgtgcagtgccccgacatcggcgaggccaacgccatgtgcctggccacctgcaccagagacggcaagcccagcgccagaatgctgctgctgaagggcttcggcaaggacggcttcagattcttcaccaacttcgagagcagaaagggcaaggagctggtgagagtggagggccccgtgaagaagctgcccgaggaggaggccgagtgctacttccacagcagacccaagagcagccagatcggcgccgtggtgagccaccagagcagcgtgatccccgacagagagtacctgagaaagaagaacgaggagctggagcagctgtaccaggaccaggaggtgcccaagcccaagagctggggcggctacgtgctgtacccccaggtgatggagttctggcagggccagaccaacagactgcacgacagaatcgtgttcagaagaggcctgcccaccggcgacagccccctgggccccatgacccacagaggcgaggaggactggctgtacgagagactggccccctag

SEQ ID NO: 95921 - DNA, 1098 bp, synthetic construct
  misc_feature 1..1098: note = Description of Artificial Sequence: Synthetic coding sequence
  source 1..1098: mol_type = other DNA
atggccagcaccgagagcagcctgctgagaagcctgggcctgagccccggccccggcagcagcgaggtggagctggactgctggttcgacgaggacttcaagttcatcctgctgcccgtgagctacgccgtggtgttcgtgctgggcctgggcctgaacgcccccaccctgtggctgttcatcttcagactgagaccctgggacgccaccgccacctacatgttccacctggccctgagcgacaccctgtacgtgctgagcctgcccaccctgatctactactacgccgcccacaaccactggcccttcggcaccgagatctgcaagttcgtgagattcctgttctactggaacctgtactgcagcgtgctgttcctgacctgcatcagcgtgcacagatacctgggcatctgccaccccctgagagccctgagatggggcagacccagactggccggcctgctgtgcctggccgtgtggctggtggtggccggctgcctggtgcccaacctgttcttcgtgaccaccagcaacaagggcaccaccgtgctgtgccacgacaccaccagacccgaggagttcgaccactacgtgcacttcagcagcgccgtgatgggcctgctgttcggcgtgccctgcctggtgaccctggtgtgctacggcctgatggccagaagactgtaccagcccctgcccggcagcgcccagagcagcagcagactgagaagcctgagaaccatcgccgtggtgctgaccgtgttcgccgtgtgcttcgtgcccttccacatcaccagaaccatctactacctggccagactgctggaggccgactgcagagtgctgaacatcgtgaacgtggtgtacaaggtgaccagacccctggccagcgccaacagctgcctggaccccgtgctgtacctgctgaccggcgacaagtacagaagacagctgagacagctgtgcggcggcggcaagccccagcccagaaccgccgccagcagcctggccctggtgagcctgcccgaggacagcagctgcagatgggccgccaccccccaggacagcagctgcagcacccccagagccgacagactgtag

SEQ ID NO: 95922 - DNA, 987 bp, synthetic construct
  misc_feature 1..987: note = Description of Artificial Sequence: Synthetic coding sequence
  source 1..987: mol_type = other DNA
atggagtgggacaacggcaccggccaggccctgggcctgccccccaccacctgcgtgtacagagagaacttcaagcagctgctgctgccccccgtgtacagcgccgtgctggccgccggcctgcccctgaacatctgcgtgatcacccagatctgcaccagcagaagagccctgaccagaaccgccgtgtacaccctgaacctggccctggccgacctgctgtacgcctgcagcctgcccctgctgatctacaactacgcccagggcgaccactggcccttcggcgacttcgcctgcagactggtgagattcctgttctacgccaacctgcacggcagcatcctgttcctgacctgcatcagcttccagagatacctgggcatctgccaccccctggccccctggcacaagagaggcggcagaagagccgcctggctggtgtgcgtggccgtgtggctggccgtgaccacccagtgcctgcccaccgccatcttcgccgccaccggcatccagagaaacagaaccgtgtgctacgacctgagcccccccgccctggccacccactacatgccctacggcatggccctgaccgtgatcggcttcctgctgcccttcgccgccctgctggcctgctactgcctgctggcctgcagactgtgcagacaggacggccccgccgagcccgtggcccaggagagaagaggcaaggccgccagaatggccgtggtggtggccgccgccttcgccatcagcttcctgcccttccacatcaccaagaccgcctacctggccgtgagaagcacccccggcgtgccctgcaccgtgctggaggccttcgccgccgcctacaagggcaccagacccttcgccagcgccaacagcgtgctggaccccatcctgttctacttcacccagaagaagttcagaagaagaccccacgagctgctgcagaagctgaccgccaagtggcagagacagggcagatag

SEQ ID NO: 95923 - DNA, 987 bp, synthetic construct; identical to SEQ ID NO: 95922
  misc_feature 1..987: note = Description of Artificial Sequence: Synthetic coding sequence
  source 1..987: mol_type = other DNA

SEQ ID NO: 95924 - DNA, 987 bp, synthetic construct; identical to SEQ ID NO: 95922
  misc_feature 1..987: note = Description of Artificial Sequence: Synthetic coding sequence
  source 1..987: mol_type = other DNA

SEQ ID NO: 95925 - DNA, 987 bp, synthetic construct; identical to SEQ ID NO: 95922
  misc_feature 1..987: note = Description of Artificial Sequence: Synthetic coding sequence
  source 1..987: mol_type = other DNA

SEQ ID NO: 95926 - DNA, 738 bp, synthetic construct
  misc_feature 1..738: note = Description of Artificial Sequence: Synthetic coding sequence
  source 1..738: mol_type = other DNA
atggagtgggacaacggcaccggccaggccctgggcctgccccccaccacctgcgtgtacagagagaacttcaagcagctgctgctgccccccgtgtacagcgccgtgctggccgccggcctgcccctgaacatctgcgtgatcacccagatctgcaccagcagaagagccctgaccagaaccgccgtgtacaccctgaacctggccctggccgacctgctgtacgcctgcagcctgcccctgctgatctacaactacgcccagggcgaccactggcccttcggcgacttcgcctgcagactggtgagattcctgttctacgccaacctgcacggcagcatcctgttcctgacctgcatcagcttccagagatacctgggcatctgccaccccctggccccctggcacaagagaggcggcagaagagccgcctggctggtgtgcgtggccgtgtggctggccgtgaccacccagtgcctgcccaccgccatcttcgccgccaccggcatccagagaaacagaaccgtgtgctacgacctgagcccccccgccctggccacccactacatgccctacggcatggccctgaccgtgatcggcttcctgctgcccttcgccgccctgctggcctgctactgcctgctggcctgcagactgtgcagacaggacggccccgccgagcccgtggcccaggagagaagaggcaaggccgccagaatggccgtggtggtggcctag

SEQ ID NO: 95927 - DNA, 987 bp, synthetic construct; identical to SEQ ID NO: 95922
  misc_feature 1..987: note = Description of Artificial Sequence: Synthetic coding sequence
  source 1..987: mol_type = other DNA

SEQ ID NO: 95928 - DNA, 987 bp, synthetic construct; identical to SEQ ID NO: 95922
  misc_feature 1..987: note = Description of Artificial Sequence: Synthetic coding sequence
  source 1..987: mol_type = other DNA

SEQ ID NO: 95929 - DNA, 987 bp, synthetic construct; identical to SEQ ID NO: 95922
  misc_feature 1..987: note = Description of Artificial Sequence: Synthetic coding sequence
  source 1..987: mol_type = other DNA

SEQ ID NO: 95930 - DNA, 987 bp, synthetic construct; identical to SEQ ID NO: 95922
  misc_feature 1..987: note = Description of Artificial Sequence: Synthetic coding sequence
  source 1..987: mol_type = other DNA

SEQ ID NO: 95931 - DNA, 387 bp, synthetic construct
  misc_feature 1..387: note = Description of Artificial Sequence: Synthetic coding sequence
  source 1..387: mol_type = other DNA
atggagtgggacaacggcaccggccaggccctgggcctgccccccaccacctgcgtgtacagagagaacttcaagcagctgctgctgccccccgtgtacagcgccgtgctggccgccggcctgcccctgaacatctgcgtgatcacccagatctgcaccagcagaagagccctgaccagaaccgccgtgtacaccctgaacctggccctggccgacctgctgtacgcctgcagcctgcccctgctgatctacaactacgcccagggcgaccactggcccttcggcgacttcgcctgcagactggtgagattcctgttctacgccaacctgcacggcagcatcctgttcctgacctgcatcagcttccagagatacctgggcatctag

SEQ ID NO: 95932 - DNA, 738 bp, synthetic construct
  misc_feature 1..738: note = Description of Artificial Sequence: Synthetic coding sequence
  source 1..738: mol_type = other DNA
atggccaacaactacaagaagatcgtgctgctgaagggcctggaggtgatcaacgactaccacttcagaatcgtgaagagcctgctgagcaacgacctgaagctgaaccccaagatgaaggaggagtacgacaagatccagatcgccgacctgatggaggagaagttccccggcgacgccggcctgggcaagctgatcgagttcttcaaggagatccccaccctgggcgacctggccgagaccctgaagagagagaagctgaaggtggccaacaagatcgagagcatccccgtgaagggcatcatccccagcaagaagaccaagcagaaggaggtgtaccccgccacccccgcctgcacccccagcaacagactgaccgccaagggcgccgaggagaccctgggcccccagaagagaaagaagcccagcgaggaggagaccggcaccaagagaagcaagatgagcaaggagcagaccagacccagctgcagcgccggcgccagcaccagcaccgccatgggcagaagcccccccccccagaccagcagcagcgccccccccaacaccagcagcaccgaggcctacctgatgaacctgaccctgagcctgaccgccggcagcttcctgagctgcgccgtgtggggcagagacagagagctgagaaacctggagctgagcgccaccgacagcctgagcaccgcccccatctactacacccccatccccttcgcccactag

SEQ ID NO: 95933 - DNA, 1452 bp, synthetic construct
  misc_feature 1..1452: note = Description of Artificial Sequence: Synthetic coding sequence
  source 1..1452: mol_type = other DNA
atggccaacaactacaagaagatcgtgctgctgaagggcctggaggtgatcaacgactaccacttcagaatcgtgaagagcctgctgagcaacgacctgaagctgaaccccaagatgaaggaggagtacgacaagatccagatcgccgacctgatggaggagaagttccccggcgacgccggcctgggcaagctgatcgagttcttcaaggagatccccaccctgggcgacctggccgagaccctgaagagagagaagctgaaggtgaagggcatcatccccagcaagaagaccaagcagaaggaggtgtaccccgccacccccgcctgcacccccagcaacagactgaccgccaagggcgccgaggagaccctgggcccccagaagagaaagaagcccagcgaggaggagaccggcaccaagagaagcaagatgagcaaggagcagaccagacccagctgcagcgccggcgccagcaccagcaccgccatgggcagaagcccccccccccagaccagcagcagcgccccccccaacaccagcagcaccgagagcctgaagcccctggccaacagacacgccaccgccagcaagaacatcttcagagaggaccccatcatcgccatggtgctgaacgccaccaaggtgttcaagtacgagagcagcgagaacgagcagagaagaatgttccacgccaccgtggccacccagacccagttcttccacgtgaaggtgctgaacatcaacctgaagagaaagttcatcaagaagagaatcatcatcatcagcaactacagcaagagaaacagcctgctggaggtgaacgaggccagcagcgtgagcgaggccggccccgaccagaccttcgaggtgcccaaggacatcatcagaagagccaagaagatccccaagatcaacatcctgcacaagcagaccagcggctacatcgtgtacggcctgttcatgctgcacaccaagatcgtgaacagaaagaccaccatctacgagatccaggacaagaccggcagcatggccgtggtgggcaagggcgagtgccacaacatcccctgcgagaagggcgacaagctgagactgttctgcttcagactgagaaagagagagaacatgagcaagctgatgagcgagatgcacagcttcatccagatccagaagaacaccaaccagagaagccacgacagcagaagcatggccctgccccaggagcagagccagcaccccaagcccagcgaggccagcaccaccctgcccgagagccacctgaagaccccccagatgccccccaccacccccagcagcagcagcttcaccaagaaggacgagacccaccccggcgcccagagcagccccgccaacttcagaatcaccagccccaccgtggccccccccctgagcagcgacaccagcaccaacagacaccccgccgtgccctag

SEQ ID NO: 95934 - DNA, 1479 bp, synthetic construct
  misc_feature 1..1479: note = Description of Artificial Sequence: Synthetic coding sequence
  source 1..1479: mol_type = other DNA
atggccaacaactacaagaagatcgtgctgctgaagggcctggaggtgatcaacgactaccacttcagaatcgtgaagagcctgctgagcaacgacctgaagctgaaccccaagatgaaggaggagtacgacaagatccagatcgccgacctgatggaggagaagttccccggcgacgccggcctgggcaagctgatcgagttcttcaaggagatccccaccctgggcgacctggccgagaccctgaagagagagaagctgaaggtggccaacaagatcgagagcatccccgtgaagggcatcatccccagcaagaagaccaagcagaaggaggtgtaccccgccacccccgcctgcacccccagcaacagactgaccgccaagggcgccgaggagaccctgggcccccagaagagaaagaagcccagcgaggaggagaccggcaccaagagaagcaagatgagcaaggagcagaccagacccagctgcagcgccggcgccagcaccagcaccgccatgggcagaagcccccccccccagaccagcagcagcgccccccccaacaccagcagcaccgagagcctgaagcccctggccaacagacacgccaccgccagcaagaacatcttcagagaggaccccatcatcgccatggtgctgaacgccaccaaggtgttcaagtacgagagcagcgagaacgagcagagaagaatgttccacgccaccgtggccacccagacccagttcttccacgtgaaggtgctgaacatcaacctgaagagaaagttcatcaagaagagaatcatcatcatcagcaactacagcaagagaaacagcctgctggaggtgaacgaggccagcagcgtgagcgaggccggccccgaccagaccttcgaggtgcccaaggacatcatcagaagagccaagaagatccccaagatcaacatcctgcacaagcagaccagcggctacatcgtgtacggcctgttcatgctgcacaccaagatcgtgaacagaaagaccaccatctacgagatccaggacaagaccggcagcatggccgtggtgggcaagggcgagtgccacaacatcccctgcgagaagggcgacaagctgagactgttctgcttcagactgagaaagagagagaacatgagcaagctgatgagcgagatgcacagcttcatccagatccagaagaacaccaaccagagaagccacgacagcagaagcatggccctgccccaggagcagagccagcaccccaagcccagcgaggccagcaccaccctgcccgagagccacctgaagaccccccagatgccccccaccacccccagcagcagcagcttcaccaagaaggacgagacccaccccggcgcccagagcagccccgccaacttcagaatcaccagccccaccgtggccccccccctgagcagcgacaccagcaccaacagacaccccgccgtgccctag

SEQ ID NO: 95935 - DNA, 1359 bp, synthetic construct
  misc_feature 1..1359: note = Description of Artificial Sequence: Synthetic coding sequence
  source 1..1359: mol_type = other DNA
atggccaacaactacaagaagatcgtgctgctgaagggcctggaggtgatcaacgactaccacttcagaatcgtgaagagcctgctgagcaacgacctgaagctgaaccccaagatgaaggaggagtacgacaagatccagatcgccgacctgatggaggagaagttccccggcgacgccggcctgggcaagctgatcgagttcttcaaggagatccccaccctgggcgacctggccgagaccctgaagagagagaagctgaaggtgaagggcatcatccccagcaagaagaccaagcagaaggaggtgtaccccgccacccccgcctgcacccccagcaacagactgaccgccaagggcgccgaggagaccctgggcccccagaagagaaagaagcccagcgaggaggagaccggcaccaagagaagcaagatgagcaaggagcagaccagacccagctgcagcgccggcgccagcaccagcaccgccatgggcagaagcccccccccccagaccagcagcagcgccccccccaacaccagcagcaccgagagcctgaagcccctggccaacagacacgccaccgccagcaagaacatcttcagagaggaccccatcatcgccatggtgctgaacgccaccaaggtgttcaagtacgagagcagcgagaacgagcagagaagaatgttccacgccaccgtggccacccagacccagttcttccacgtgaaggtgctgaacatcaacctgaagagaaagttcatcaagaagagaatcatcatcatcagcaactacagcaagagaaacagcctgctggaggtgaacgaggccagcagcgtgagcgaggccggccccgaccagaccttcgaggtgcccaaggacatcatcagaagagccaagaagatccccaagatcaacatcctgcacaagcagaccagcggctacatcgtgtacggcctgttcatgctgcacaccaagatcgtgaacagaaagaccaccatctacgagatccaggacaagaccggcagcatggccgtggtgggcaagggcgagtgccacaacatcccctgcgagaagggcgacaagctgagactgttctgcttcagactgagaaagagagagaacatgagcaagctgatgagcgagatgcacagcttcatccagatccagaagaacaccaaccagagaagccacgacagcagaagcatggccctgccccaggagcagagccagcaccccaagcccagcgaggccagcaccaccctgcccgagagccacctgaagaccccccagatgccccccaccacccccagcagcagcagcttcaccaaggtgaccaaggacaaggacatcaagtag

SEQ ID NO: 95936 - DNA, 1386 bp, synthetic construct
  misc_feature 1..1386: note = Description of Artificial Sequence: Synthetic coding sequence
  source 1..1386: mol_type = other DNA
atggccaacaactacaagaagatcgtgctgctgaagggcctggaggtgatcaacgactaccacttcagaatcgtgaagagcctgctgagcaacgacctgaagctgaaccccaagatgaaggaggagtacgacaagatccagatcgccgacctgatggaggagaagttccccggcgacgccggcctgggcaagctgatcgagttcttcaaggagatccccaccctgggcgacctggccgagaccctgaagagagagaagctgaaggtggccaacaagatcgagagcatccccgtgaagggcatcatccccagcaagaagaccaagcagaaggaggtgtaccccgccacccccgcctgcacccccagcaacagactgaccgccaagggcgccgaggagaccctgggcccccagaagagaaagaagcccagcgaggaggagaccggcaccaagagaagcaagatgagcaaggagcagaccagacccagctgcagcgccggcgccagcaccagcaccgccatgggcagaagcccccccccccagaccagcagcagcgccccccccaacaccagcagcaccgagagcctgaagcccctggccaacagacacgccaccgccagcaagaacatcttcagagaggaccccatcatcgccatggtgctgaacgccaccaaggtgttcaagtacgagagcagcgagaacgagcagagaagaatgttccacgccaccgtggccacccagacccagttcttccacgtgaaggtgctgaacatcaacctgaagagaaagttcatcaagaagagaatcatcatcatcagcaactacagcaagagaaacagcctgctggaggtgaacgaggccagcagcgtgagcgaggccggccccgaccagaccttcgaggtgcccaaggacatcatcagaagagccaagaagatccccaagatcaacatcctgcacaagcagaccagcggctacatcgtgtacggcctgttcatgctgcacaccaagatcgtgaacagaaagaccaccatctacgagatccaggacaagaccggcagcatggccgtggtgggcaagggcgagtgccacaacatcccctgcgagaagggcgacaagctgagactgttctgcttcagactgagaaagagagagaacatgagcaagctgatgagcgagatgcacagcttcatccagatccagaagaacaccaaccagagaagccacgacagcagaagcatggccctgccccaggagcagagccagcaccccaagcccagcgaggccagcaccaccctgcccgagagccacctgaagaccccccagatgccccccaccacccccagcagcagcagcttcaccaaggtgaccaaggacaaggacatcaagtag

SEQ ID NO: 95937 - DNA, 453 bp, synthetic construct
  misc_feature 1..453: note = Description of Artificial Sequence: Synthetic coding sequence
  source 1..453: mol_type = other DNA
atggccaacaactacaagaagatcgtgctgctgaagggcctggaggtgatcaacgactaccacttcagaatcgtgaagagcctgctgagcaacgacctgaagctgaaccccaagatgaaggaggagtacgacaagatccagatcgccgacctgatggaggagaagttccccggcgacgccggcctgggcaagctgatcgagttcttcaaggagatccccaccctgggcgacctggccgagaccctgaagagagagaagctgaaggtggccaacaagatcgagagcatccccgtgaagggcatcatccccagcaagaagaccaagcagaaggaggtgtaccccgccacccccgcctgcacccccagcaacagactgaccgccaagggcgccgaggagaccctgggcccccagaagagaaagaagcccagcgaggaggagaccggcaccaagtag

SEQ ID NO: 95938 - DNA, 399 bp, synthetic construct
  misc_feature 1..399: note = Description of Artificial Sequence: Synthetic coding sequence
  source 1..399: mol_type = other DNA
atggccaccaccgtgaccctggagaagtgcggccacaacaagggctacaagggcctggacaactgcagattctgccccggcagccagtgctgcgtggaggacggccccgagagcatcgacagcatcatcgacatggacgccgtgtgcaagagagtgaccaccctgggcctggacgtgagcgtgaccatcagccaggacgccggcagatacctgtgcgacttcacctactacaccagcctgtaccagagccacggcagaagcgccttcgtgcacgtgccccccctgggcaagccctacaacgccgaccagctgggcagagccctgagagccatcatcgaggagatgctggacctgctggagcagagcgagggcaagatcaactactgccacaagcactag

SEQ ID NO: 95939 - DNA, 630 bp, synthetic construct
  misc_feature 1..630: note = Description of Artificial Sequence: Synthetic coding sequence
  source 1..630: mol_type = other DNA
atggagcagcccagaaaggccgtggtggtgaccggcttcggccccttcggcgagcacaccgtgaacgccagctggatcgccgtgcaggagctggagaagctgggcctgggcgacagcgtggacctgcacgtgtacgagatccccgtggagtaccagaccgtgcagagactgatccccgccctgtgggagaagcacagcccccagctggtggtgcacgtgggcgtgagcggcatggccaccaccgtgaccctggagaagtgcggccacaacaagggctacaagggcctggacaactgcagattctgccccggcagccagtgctgcgtggaggacggccccgagagcatcgacagcatcatcgacatggacgccgtgtgcaagagagtgaccaccctgggcctggacgtgagcgtgaccatcagccaggacgccggcagatacctgtgcgacttcacctactacaccagcctgtaccagagccacggcagaagcgccttcgtgcacgtgccccccctgggcaagccctacaacgccgaccagctgggcagagccctgagagccatcatcgaggagatgctggacctgctggagcagagcgagggcaagatcaactactgccacaagcactag

SEQ ID NO: 95940 - DNA, 609 bp, synthetic construct
  misc_feature 1..609: note = Description of Artificial Sequence: Synthetic coding sequence
  source 1..609: mol_type = other DNA
atgaagaaggccagaaacgacgagtacgagaacctgttcaacatgatcgtggagatccccagatggaccaacgccaagatggagatcgccaccaaggagcccatgaaccccatcaagcagtacgtgaaggacggcaagctgagatacgtggccaacatcttcccctacaagggctacatctggaactacggcaccctgccccagacctgggaggacccccacgagaaggacaagagcaccaactgcttcggcgacaacgaccccatcgacgtgtgcgagatcggcagcaagatcctgagctgcggcgaggtgatccacgtgaagatcctgggcatcctggccctgatcgacgagggcgagaccgactggaagctgatcgccatcaacgccaacgaccccgaggccagcaagttccacggcctgagaaacatccccgtgtacaccatcaacagaatcgtgatcctgcccagcctggacagaagccagaccagcagcctgagctacctgcccgcccaccaggacagctgcgtgcccctggacgccgccctgcacgtggtgctgtacttctgcagcctgctgggcctgcagagctacctgagctgcttctag

SEQ ID NO: 95941 - DNA, 1005 bp, synthetic construct
  misc_feature 1..1005: note = Description of Artificial Sequence: Synthetic coding sequence
  source 1..1005: mol_type = other DNA
atgagcgccctgctgagactgctgagaaccggcgcccccgccgccgcctgcctgagactgggcaccagcgccggcaccggcagcagaagagccatggccctgtaccacaccgaggagagaggccagccctgcagccagaactacagactgttcttcaagaacgtgaccggccactacatcagccccttccacgacatccccctgaaggtgaacagcaaggaggagaacggcatccccatgaagaaggccagaaacgacgagtacgagaacctgttcaacatgatcgtggagatccccagatggaccaacgccaagatggagatcgccaccaaggagcccatgaaccccatcaagcagtacgtgaaggacggcaagctgagatacgtggccaacatcttcccctacaagggctacatctggaactacggcaccctgccccagacctgggaggacccccacgagaaggacaagagcaccaactgcttcggcgacaacgaccccatcgacgtgtgcgagatcggcagcaagatcctgagctgcggcgaggtgatccacgtgaagatcctgggcatcctggccctgatcgacgagggcgagaccgactggaagctgatcgccatcaacgccaacgaccccgaggccagcaagttccacgacatcgacgacgtgaagaagttcaagcccggctacctggaggccaccctgaactggttcagactgtacaaggtgcccgacggcaagcccgagaaccagttcgccttcaacggcgagttcaagaacaaggccttcgccctggaggtgatcaagagcacccaccagtgctggaaggccctgctgatgaagaagtgcaacggcggcgccatcaactgcaccaacgtgcagatcagcgacagccccttcagatgcacccaggaggaggccagaagcctggtggagagcgtgagcagcagccccaacaaggagagcaacgaggaggagcaggtgtggcacttcctgggcaagtag

SEQ ID NO: 95942 - DNA, 918 bp, synthetic construct
  misc_feature 1..918: note = Description of Artificial Sequence: Synthetic coding sequence
  source 1..918: mol_type = other DNA
atgagcgccctgctgagactgctgagaaccggcgcccccgccgccgcctgcctgagactgggcaccagcgccggcaccggcagcagaagagccatggccctgtaccacaccgaggagagaggccagccctgcagccagaactacagactgttcttcaagaacgtgaccggccactacatcagccccttccacgacatccccctgaaggtgaacagcaaggaggagaacggcatccccatgaagaaggccagaaacgacgagtacgagaacctgttcaacatgatcgtggagatccccagatggaccaacgccaagatggagatcgccaccaaggagcccatgaaccccatcaagcagtacgtgaaggacggcaagctgagatacgtggccaacatcttcccctacaagggctacatctggaactacggcaccctgccccagatcctgagctgcggcgaggtgatccacgtgaagatcctgggcatcctggccctgatcgacgagggcgagaccgactggaagctgatcgccatcaacgccaacgaccccgaggccagcaagttccacgacatcgacgacgtgaagaagttcaagcccggctacctggaggccaccctgaactggttcagactgtacaaggtgcccgacggcaagcccgagaaccagttcgccttcaacggcgagttcaagaacaaggccttcgccctggaggtgatcaagagcacccaccagtgctggaaggccctgctgatgaagaagtgcaacggcggcgccatcaactgcaccaacgtgcagatcagcgacagccccttcagatgcacccaggaggaggccagaagcctggtggagagcgtgagcagcagccccaacaaggagagcaacgaggaggagcaggtgtggcacttcctgggcaagtag

SEQ ID NO: 95943 - DNA, 507 bp, synthetic construct
  misc_feature 1..507: note = Description of Artificial Sequence: Synthetic coding sequence
  source 1..507: mol_type = other DNA
atgagcgccctgctgagactgctgagaaccggcgcccccgccgccgcctgcctgagactgggcaccagcgccggcaccggcagcagaagagccatggccctgtaccacaccgaggagagaggccagccctgcagccagaactacagactgttcttcaacatcgacgacgtgaagaagttcaagcccggctacctggaggccaccctgaactggttcagactgtacaaggtgcccgacggcaagcccgagaaccagttcgccttcaacggcgagttcaagaacaaggccttcgccctggaggtgatcaagagcacccaccagtgctggaaggccctgctgatgaagaagtgcaacggcggcgccatcaactgcaccaacgtgcagatcagcgacagccccttcagatgcacccaggaggaggccagaagcctggtggagagcgtgagcagcagccccaacaaggagagcaacgaggaggagcaggtgtggcacttcctgggcaagtag

SEQ ID NO: 95944 - DNA, 1050 bp, synthetic construct
  misc_feature 1..1050: note = Description of Artificial Sequence: Synthetic coding sequence
  source 1..1050: mol_type = other DNA
atgagcgccctgctgagactgctgagaaccggcgcccccgccgccgcctgcctgagactgggcaccagcgccggcaccggcagcagaagagccatggccctgtaccacaccgaggagagaggccagccctgcagccagaactacagactgttcttcaagaacgtgaccggccactacatcagccccttccacgacatccccctgaaggtgaacagcaaggaggacaccgaggcccagggcatcttcatcgacctgagcaagatctgggagaacggcatccccatgaagaaggccagaaacgacgagtacgagaacctgttcaacatgatcgtggagatccccagatggaccaacgccaagatggagatcgccaccaaggagcccatgaaccccatcaagcagtacgtgaaggacggcaagctgagatacgtggccaacatcttcccctacaagggctacatctggaactacggcaccctgccccagacctgggaggacccccacgagaaggacaagagcaccaactgcttcggcgacaacgaccccatcgacgtgtgcgagatcggcagcaagatcctgagctgcggcgaggtgatccacgtgaagatcctgggcatcctggccctgatcgacgagggcgagaccgactggaagctgatcgccatcaacgccaacgaccccgaggccagcaagttccacgacatcgacgacgtgaagaagttcaagcccggctacctggaggccaccctgaactggttcagactgtacaaggtgcccgacggcaagcccgagaaccagttcgccttcaacggcgagttcaagaacaaggccttcgccctggaggtgatcaagagcacccaccagtgctggaaggccctgctgatgaagaagtgcaacggcggcgccatcaactgcaccaacgtgcagatcagcgacagccccttcagatgcacccaggaggaggccagaagcctggtggagagcgtgagcagcagccccaacaaggagagcaacgaggaggagcaggtgtggcacttcctgggcaagtag

SEQ ID NO: 95945 - DNA, 951 bp, synthetic construct
  misc_feature 1..951: note = Description of Artificial Sequence: Synthetic coding sequence
  source 1..951: mol_type = other DNA
atgagcgccctgctgagactgctgagaaccggcgcccccgccgccgcctgcctgagactgggcaccagcgccggcaccggcagcagaagagccatggccctgtaccacaccgaggagagaggccagccctgcagccagaactacagactgttcttcaagaacgtgaccggccactacatcagccccttccacgacatccccctgaaggtgaacagcaaggaggagaacggcatccccatgaagaaggccagaaacgacgagtacgagatcgccaccaaggagcccatgaaccccatcaagcagtacgtgaaggacggcaagctgagatacgtggccaacatcttcccctacaagggctacatctggaactacggcaccctgccccagacctgggaggacccccacgagaaggacaagagcaccaactgcttcggcgacaacgaccccatcgacgtgtgcgagatcggcagcaagatcctgagctgcggcgaggtgatccacgtgaagatcctgggcatcctggccctgatcgacgagggcgagaccgactggaagctgatcgccatcaacgccaacgaccccgaggccagcaagttccacgacatcgacgacgtgaagaagttcaagcccggctacctggaggccaccctgaactggttcagactgtacaaggtgcccgacggcaagcccgagaaccagttcgccttcaacggcgagttcaagaacaaggccttcgccctggaggtgatcaagagcacccaccagtgctggaaggccctgctgatgaagaagtgcaacggcggcgccatcaactgcaccaacgtgcagatcagcgacagccccttcagatgcacccaggaggaggccagaagcctggtggagagcgtgagcagcagccccaacaaggagagcaacgaggaggagcaggtgtggcacttcctgggcaagtag

SEQ ID NO: 95946 - DNA, 699 bp, synthetic construct
  misc_feature 1..699: note = Description of Artificial Sequence: Synthetic coding sequence
  source 1..699: mol_type = other DNA
atgagcgccctgctgagactgctgagaaccggcgcccccgccgccgcctgcctgagactgggcaccagcgccggcaccggcagcagaagagccatggccctgtaccacaccgaggagagaggccagccctgcagccagaactacagactgttcttcaagaacgtgaccggccactacatcagccccttccacgacatccccctgaaggtgaacagcaaggagatcctgagctgcggcgaggtgatccacgtgaagatcctgggcatcctggccctgatcgacgagggcgagaccgactggaagctgatcgccatcaacgccaacgaccccgaggccagcaagttccacgacatcgacgacgtgaagaagttcaagcccggctacctggaggccaccctgaactggttcagactgtacaaggtgcccgacggcaagcccgagaaccagttcgccttcaacggcgagttcaagaacaaggccttcgccctggaggtgatcaagagcacccaccagtgctggaaggccctgctgatgaagaagtgcaacggcggcgccatcaactgcaccaacgtgcagatcagcgacagccccttcagatgcacccaggaggaggccagaagcctggtggagagcgtgagcagcagccccaacaaggagagcaacgaggaggagcaggtgtggcacttcctgggcaagtag

SEQ ID NO: 95947 - DNA, 960 bp, synthetic construct
  misc_feature 1..960: note = Description of Artificial Sequence: Synthetic coding sequence
  source 1..960: mol_type = other DNA
atgagcgtgggcttcatcggcgccggccagctggccttcgccctggccaagggcttcaccgccgccggcgtgctggccgcccacaagatcatggccagcagccccgacatggacctggccaccgtgagcgccctgagaaagatgggcgtgaagctgaccccccacaacaaggagaccgtgcagcacagcgacgtgctgttcctggccgtgaagccccacatcatccccttcatcctggacgagatcggcgccgacatcgaggacagacacatcgtggtgagctgcgccgccggcgtgaccatcagcagcatcgagaagaagctgagcgccttcagacccgcccccagagtgatcagatgcatgaccaacacccccgtggtggtgagagagggcgccaccgtgtacgccaccggcacccacgcccaggtggaggacggcagactgatggagcagctgctgagcagcgtgggcttctgcaccgaggtggaggaggacctgatcgacgccgtgaccggcctgagcggcagcggccccgcctacgccttcaccgccctggacgccctggccgacggcggcgtgaagatgggcctgcccagaagactggccgtgagactgggcgcccaggccctgctgggcgccgccaagatgctgctgcacagcgagcagcaccccggccagctgaaggacaacgtgagcagccccggcggcgccaccatccacgccctgcacgtgctggagagcggcggcttcagaagcctgctgatcaacgccgtggaggccagctgcatcagaaccagagagctgcagagcatggccgaccaggagcaggtgagccccgccgccatcaagaagaccatcctggacaaggtgaagctggacagccccgccggcaccgccctgagccccagcggccacaccaagctgctgcccagaagcctggcccccgccggcaaggactag

SEQ ID NO: 95948 - DNA, 951 bp, synthetic construct
  misc_feature 1..951: note = Description of Artificial Sequence: Synthetic coding sequence
  source 1..951: mol_type = other DNA
atgagcgtgggcttcatcggcgccggccagctggccttcgccctggccaagggcttcaccgccgccggcgtgctggccgcccacaagatcatggccagcagccccgacatggacctggccaccgtgagcgccctgagaaagatgggcgtgaagctgaccccccacaacaaggagaccgtgcagcacagcgacgtgctgttcctggccgtgaagccccacatcatccccttcatcctggacgagatcggcgccgacatcgaggacagacacatcgtggtgagctgcgccgccggcgtgaccatcagcagcatcgagaagaagctgagcgccttcagacccgcccccagagtgatcagatgcatgaccaacacccccgtggtggtgagagagggcgccaccgtgtacgccaccggcacccacgcccaggtggaggacggcagactgatggagcagctgctgagcagcgtgggcttctgcaccgaggtggaggaggacctgatcgacgccgtgaccggcctgagcggcagcggccccgcctacgccttcaccgccctggacgccctggccgacggcggcgtgaagatgggcctgcccagaagactggccgtgagactgggcgcccaggccctgctgggcgccgccaagatgctgctgcacagcgagcagcaccccggccagctgaaggacaacgtgagcagccccggcggcgccaccatccacgccctgcacgtgctggagagcggcggcttcagaagcctgctgatcaacgccgtggaggccagctgcatcagaaccagagagctgcagagcatggccgaccaggagcaggtgagccccgccgccatcaagaagaccatcctggacaaggaccacctgcccctggagctgggcagccccgagggcctgcaccccctgctgctgcagtaccagctggccagagcccccagctag

SEQ ID NO: 95949 - DNA, 1041 bp, synthetic construct
  misc_feature 1..1041: note = Description of Artificial Sequence: Synthetic coding sequence
  source 1..1041: mol_type = other DNA
atggtgggcggcggcagaagagtgggcagagacgagcccgtgcccagcgtgggcgccctgggccagggcagccccgacagcatgagcgtgggcttcatcggcgccggccagctggccttcgccctggccaagggcttcaccgccgccggcgtgctggccgcccacaagatcatggccagcagccccgacatggacctggccaccgtgagcgccctgagaaagatgggcgtgaagctgaccccccacaacaaggagaccgtgcagcacagcgacgtgctgttcctggccgtgaagccccacatcatccccttcatcctggacgagatcggcgccgacatcgaggacagacacatcgtggtgagctgcgccgccggcgtgaccatcagcagcatcgagaagaagctgagcgccttcagacccgcccccagagtgatcagatgcatgaccaacacccccgtggtggtgagagagggcgccaccgtgtacgccaccggcacccacgcccaggtggaggacggcagactgatggagcagctgctgagcagcgtgggcttctgcaccgaggtggaggaggacctgatcgacgccgtgaccggcctgagcggcagcggccccgcctacgccttcaccgccctggacgccctggccgacggcggcgtgaagatgggcctgcccagaagactggccgtgagactgggcgcccaggccctgctgggcgccgccaagatgctgctgcacagcgagcagcaccccggccagctgaaggacaacgtgagcagccccggcggcgccaccatccacgccctgcacgtgctggagagcggcggcttcagaagcctgctgatcaacgccgtggaggccagctgcatcagaaccagagagctgcagagcatggccgaccaggagcaggtgagccccgccgccatcaagaagaccatcctggacaaggtgaagctggacagccccgccggcaccgccctgagccccagcggccacaccaagctgctgcccagaagcctggcccccgccggcaaggactag

SEQ ID NO: 95950 - DNA, 819 bp, synthetic construct
  misc_feature 1..819: note = Description of Artificial Sequence: Synthetic coding sequence
  source 1..819: mol_type = other DNA
atgagcgtgggcttcatcggcgccggccagctggccttcgccctggccaagggcttcaccgccgccggcgtgctggccgcccacaagatcatggccagcagccccgacatggacctggccaccgtgagcgccctgagaaagatgggcgtgaagctgaccccccacaacaaggagaccgtgcagcacagcgacgtgctgttcctggccgtgaagccccacatcatccccttcatcctggacgagatcggcgccgacatcgaggacagacacatcgtggtgagctgcgccgccggcgtgaccatcagcagcatcgagaagaagctgagcgccttcagacccgcccccagagtgatcagatgcatgaccaacacccccgtggtggtgagagagggcgccaccgtgtacgccaccggcacccacgcccaggtggaggacggcagactgatggagcagctgctgagcagcgtgggcttctgcaccgaggtggaggaggacctgatcgacgccgtgaccggcctgagcggcagcggccccgcctacgccttcaccgccctggacgccctggccgacggcggcgtgaagatgggcctgcccagaagactggccgtgagactgggcgcccaggccctgctgggcggctgccaggacgccgccgccctgagaaccgcccccagacccgcccagggccagagacagctgagctggtggggccaccacccctgcctggcctgcgccggcgagtggggcctgcccctgcccgcccaccagagatgcggcggcctgctgcacccccacaccggcgccgccgtgcacggctag

SEQ ID NO: 95951 - DNA, 723 bp, synthetic construct
  misc_feature 1..723: note = Description of Artificial Sequence: Synthetic coding sequence
  source 1..723: mol_type = other DNA
atgagcgtgggcttcatcggcgccggccagctggccttcgccctggccaagggcttcaccgccgccggcgtgctggccgcccacaagatcatggccagcagccccgacatggacctggccaccgtgagcgccctgagaaagatgggcgtgaagctgaccccccacaacaaggagaccgtgcagcacagcgacgtgctgttcctggccgtgaagccccacatcatcagcatcgagaagctgagcgccttcagacccgcccccagagtgatcagatgcatgaccaacacccccgtggtggtgagagagggcgccaccgtgtacgccaccggcacccacgcccaggtggaggacggcagactgatggagcagctgctgagcagcgtgggcttctgcaccgaggtggaggaggacctgatcgacgccgtgaccggcctgagcggcagcggccccgcctacggcgccgccaagatgctgctgcacagcgagcagcaccccggccagctgaaggacaacgtgagcagccccggcggcgccaccatccacgccctgcacgtgctggagagcggcggcttcagaagcctgctgatcaacgccgtggaggccagctgcatcagaaccagatgggcccccgccctgcccgccagcctggtgagcagcccctgcatggccgaggccagcctgacccacatctgcagcttcacccacagcgccgacacctactag

SEQ ID NO: 95952 - DNA, 1590 bp, synthetic construct
  misc_feature 1..1590: note = Description of Artificial Sequence: Synthetic coding sequence
  source 1..1590: mol_type = other DNA
atgctgaagttcagaaccgtgcacggcggcctgagactgctgggcatcagaagaaccagcaccgcccccgccgccagccccaacgtgagaagactggagtacaagcccatcaagaaggtgatggtggccaacagaggcgagatcgccatcagagtgttcagagcctgcaccgagctgggcatcagaaccgtggccatctacagcgagcaggacaccggccagatgcacagacagaaggccgacgaggcctacctgatcggcagaggcctggcccccgtgcaggcctacctgcacatccccgacatcatcaaggtggccaaggagaacaacgtggacgccgtgcaccccggctacggcttcctgagcgagagagccgacttcgcccaggcctgccaggacgccggcgtgagattcatcggccccagccccgaggtggtgagaaagatgggcgacaaggtggaggccagagccatcgccatcgccgccggcgtgcccgtggtgcccggcaccgacgcccccatcaccagcctgcacgaggcccacgagttcagcaacacctacggcttccccatcatcttcaaggccgcctacggcggcggcggcagaggcatgagagtggtgcacagctacgaggagctggaggagaactacaccagagcctacagcgaggccctggccgccttcggcaacggcgccctgttcgtggagaagttcatcgagaagcccagacacatcgaggtgcagatcctgggcgaccagtacggcaacatcctgcacctgtacgagagagactgcagcatccagagaagacaccagaaggtggtggagatcgcccccgccgcccacctggacccccagctgagaaccagactgaccagcgacagcgtgaagctggccaagcaggtgggctacgagaacgccggcaccgtggagttcctggtggacagacacggcaagcactacttcatcgaggtgaacagcagactgcaggtggagcacaccgtgaccgaggagatcaccgacgtggacctggtgcacgcccagatccacgtggccgagggcagaagcctgcccgacctgggcctgagacaggagaacatcagaatcaacggctgcgccatccagtgcagagtgaccaccgaggaccccgccagaagcttccagcccgacaccggcagaatcgaggtgttcagaagcggcgagggcatgggcatcagactggacaacgccagcgccttccagggcgccgtgatcagcccccactacgacagcctgctggtgaaggtgatcgcccacggcaaggaccaccccaccgccgccaccaagatgagcagagccctggccgagttcagagtgagaggcgtgaaggtgagaagacaccaggcccagcccctggccgccgccctgggcagaccctgcggccaggaggccagaagaccccaggccgccgtgaccgcccccaccggccccggcagccccaccctggtgagagtgccccccgccgccagagtgctgagcagcagactgggcggccccagccagaccacccccgagaccagcaccgaggtgagccccaccatcctgctgtag

SEQ ID NO: 95953 - DNA, 3537 bp, synthetic construct
  misc_feature 1..3537: note = Description of Artificial Sequence: Synthetic coding sequence
  source 1..3537: mol_type = other DNA
atgctgaagttcagaaccgtgcacggcggcctgagactgctgggcatcagaagaaccagcaccgcccccgccgccagccccaacgtgagaagactggagtacaagcccatcaagaaggtgatggtggccaacagaggcgagatcgccatcagagtgttcagagcctgcaccgagctgggcatcagaaccgtggccatctacagcgagcaggacaccggccagatgcacagacagaaggccgacgaggcctacctgatcggcagaggcctggcccccgtgcaggcctacctgcacatccccgacatcatcaaggtggccaaggagaacaacgtggacgccgtgcaccccggctacggcttcctgagcgagagagccgacttcgcccaggcctgccaggacgccggcgtgagattcatcggccccagccccgaggtggtgagaaagatgggcgacaaggtggaggccagagccatcgccatcgccgccggcgtgcccgtggtgcccggcaccgacgcccccatcaccagcctgcacgaggcccacgagttcagcaacacctacggcttccccatcatcttcaaggccgcctacggcggcggcggcagaggcatgagagtggtgcacagctacgaggagctggaggagaactacaccagagcctacagcgaggccctggccgccttcggcaacggcgccctgttcgtggagaagttcatcgagaagcccagacacatcgaggtgcagatcctgggcgaccagtacggcaacatcctgcacctgtacgagagagactgcagcatccagagaagacaccagaaggtggtggagatcgcccccgccgcccacctggacccccagctgagaaccagactgaccagcgacagcgtgaagctggccaagcaggtgggctacgagaacgccggcaccgtggagttcctggtggacagacacggcaagcactacttcatcgaggtgaacagcagactgcaggtggagcacaccgtgaccgaggagatcaccgacgtggacctggtgcacgcccagatccacgtggccgagggcagaagcctgcccgacctgggcctgagacaggagaacatcagaatcaacggctgcgccatccagtgcagagtgaccaccgaggaccccgccagaagcttccagcccgacaccggcagaatcgaggtgttcagaagcggcgagggcatgggcatcagactggacaacgccagcgccttccagggcgccgtgatcagcccccactacgacagcctgctggtgaaggtgatcgcccacggcaaggaccaccccaccgccgccaccaagatgagcagagccctggccgagttcagagtgagaggcgtgaagaccaacatcgccttcctgcagaacgtgctgaacaaccagcagttcctggccggcaccgtggacacccagttcatcgacgagaaccccgagctgttccagctgagacccgcccagaacagagcccagaagctgctgcactacctgggccacgtgatggtgaacggccccaccacccccatccccgtgaaggccagccccagccccaccgaccccgtggtgcccgccgtgcccatcggccccccccccgccggcttcagagacatcctgctgagagagggccccgagggcttcgccagagccgtgagaaaccaccccggcctgctgctgatggacaccaccttcagagacgcccaccagagcctgctggccaccagagtgagaacccacgacctgaagaagatcgccccctacgtggcccacaacttcagcaagctgttcagcatggagaactggggcggcgccaccttcgacgtggccatgagattcctgtacgagtgcccctggagaagactgcaggagctgagagagctgatccccaacatccccttccagatgctgctgagaggcgccaacgccgtgggctacaccaactaccccgacaacgtggtgttcaagttctgcgaggtggccaaggagaacggcatggacgtgttcagagtgttcgacagcctgaactacctgcccaacatgctgctgggcatggaggccgccggcagcgccggcggcgtggtggaggccgccatcagctacaccggcgacgtggccgaccccagcagaaccaagtacagcctgcagtactacatgggcctggccgaggagctggtgagagccggcacccacatcctgtgcatcaaggacatggccggcctgctgaagcccaccgcctgcaccatgctggtgagcagcctgagagacagattccccgacctgcccctgcacatccacacccacgacaccagcggcgccggcgtggccgccatgctggcctgcgcccaggccggcgccgacgtggtggacgtggccgccgacagcatgagcggcatgaccagccagcccagcatgggcgccctggtggcctgcaccagaggcacccccctggacaccgaggtgcccatggagagagtgttcgactacagcgagtactgggagggcgccagaggcctgtacgccgccttcgactgcaccgccaccatgaagagcggcaacagcgacgtgtacgagaacgagatccccggcggccagtacaccaacctgcacttccaggcccacagcatgggcctgggcagcaagttcaaggaggtgaagaaggcctacgtggaggccaaccagatgctgggcgacctgatcaaggtgacccccagcagcaagatcgtgggcgacctggcccagttcatggtgcagaacggcctgagcagagccgaggccgaggcccaggccgaggagctgagcttccccagaagcgtggtggagttcctgcagggctacatcggcgtgccccacggcggcttccccgagcccttcagaagcaaggtgctgaaggacctgcccagagtggagggcagacccggcgccagcctgccccccctggacctgcaggccctggagaaggagctggtggacagacacggcgaggaggtgacccccgaggacgtgctgagcgccgccatgtaccccgacgtgttcgcccacttcaaggacttcaccgccaccttcggccccctggacagcctgaacaccagactgttcctgcagggccccaagatcgccgaggagttcgaggtggagctggagagaggcaagaccctgcacatcaaggccctggccgtgagcgacctgaacagagccggccagagacaggtgttcttcgagctgaacggccagctgagaagcatcctggtgaaggacacccaggccatgaaggagatgcacttccaccccaaggccctgaaggacgtgaagggccagatcggcgcccccatgcccggcaaggtgatcgacatcaaggtggtggccggcgccaaggtggccaagggccagcccctgtgcgtgctgagcgccatgaagatggagaccgtggtgaccagccccatggagggcaccgtgagaaaggtgcacgtgaccaaggacatgaccctggagggcgacgacctgatcctggagatcgagtag

SEQ ID NO: 95954 - DNA, 3537 bp, synthetic construct; identical to SEQ ID NO: 95953
  misc_feature 1..3537: note = Description of Artificial Sequence: Synthetic coding sequence
  source 1..3537: mol_type = other DNA

SEQ ID NO: 95955 - DNA, 3537 bp, synthetic construct; identical to SEQ ID NO: 95953
  misc_feature 1..3537: note = Description of Artificial Sequence: Synthetic coding sequence
  source 1..3537: mol_type = other DNA

SEQ ID NO: 95956 - DNA, 615 bp, synthetic construct
  misc_feature 1..615: note = Description of Artificial Sequence: Synthetic coding sequence
  source 1..615: mol_type = other DNA
atgagaaagatgctggccgccgtgagcagagtgctgagcggcgccagccagaagcccgccagcagagtgctggtggccagcagaaacttcgccaacgacgccaccttcgagatcaagaagtgcgacctgcacagactggaggagggcccccccgtgaccaccgtgctgaccagagaggacggcctgaagtactacagaatgatgcagaccgtgagaagaatggagctgaaggccgaccagctgtacaagcagaagatcatcagaggcttctgccacctgtgcgacggccagttcctgctgcccctgacccaggaggcctgctgcgtgggcctggaggccggcatcaaccccaccgaccacctgatcaccgcctacagagcccacggcttcaccttcaccagaggcctgagcgtgagagagatcctggccgagctgaccggcagaaagggcggctgcgccaagggcaagggcggcagcatgcacatgtacgccaagaacttctacggcggcaacggcatcgtgggcgcccaggtgcccctgggcgccggcatcgccctggcctgcaagtacaacggcaaggacgaggtgtgcctgaccctgtacggcgacggctag

SEQ ID NO: 95957 - DNA, 330 bp, synthetic construct
  misc_feature 1..330: note = Description of Artificial Sequence: Synthetic coding sequence
  source 1..330: mol_type = other DNA
atggagctgcagacctacagataccacggccacagcatgagcgaccccggcgtgagctacagaaccagagaggagatccaggaggtgagaagcaagagcgaccccatcatgctgctgaaggacagaatggtgaacagcaacctggccagcgtggaggagctgaaggagatcgacgtggaggtgagaaaggagatcgaggacgccgcccagttcgccaccgccgaccccgagccccccctggaggagctgggctaccacatctacagcagcgacccccccttcgaggtgagaggcgccaaccagtggatcaagttcaagagcgtgagctag

SEQ ID NO: 95958 - DNA, 543 bp, synthetic construct
  misc_feature 1..543: note = Description of Artificial Sequence: Synthetic coding sequence
  source 1..543: mol_type = other DNA
atgagaaagatgctggccgccgtgagcagagtgctgagcggcgccagccagaagcccgccagcagagtgctggtggccagcagaaacttcgccaacgacgccaccttcgagatcaagaagtgcgacctgcacagactggaggagggcccccccgtgaccaccgtgctgaccagagaggacggcctgaagtactacagaatgatgcagaccgtgagaagaatggagctgaaggccgaccagctgtacaagcagaagatcatcagaggcttctgccacctgtgcgacggccaggaggcctgctgcgtgggcctggaggccggcatcaaccccaccgaccacctgatcaccgcctacagagcccacggcttcaccttcaccagaggcctgagcgtgagagagatcctggccgagctgaccggcagaaagggcggctgcgccaagggcaagggcggcagcatgcacatgtacgccaagaacttctacggcggcaacggcatcgtgggcgcccaggtggtgaaggacgaggactgcgtgctgctgtag

SEQ ID NO: 95959 - DNA, 1287 bp, synthetic construct
  misc_feature 1..1287: note = Description of Artificial Sequence: Synthetic coding sequence
  source 1..1287: mol_type = other DNA
atgagaaagatgctggccgccgtgagcagagtgctgagcggcgccagccagaagcccagacacggcctggccaccctgcccagcctggtgagcatcagcagactgaagcagagcagccacctgggcctgcccaagtgctgggactacagccacagcctgaagaccagacaggccagcagagtgctggtggccagcagaaacttcgccaacgacgccaccttcgagatcaagaagtgcgacctgcacagactggaggagggcccccccgtgaccaccgtgctgaccagagaggacggcctgaagtactacagaatgatgcagaccgtgagaagaatggagctgaaggccgaccagctgtacaagcagaagatcatcagaggcttctgccacctgtgcgacggccaggaggcctgctgcgtgggcctggaggccggcatcaaccccaccgaccacctgatcaccgcctacagagcccacggcttcaccttcaccagaggcctgagcgtgagagagatcctggccgagctgaccggcagaaagggcggctgcgccaagggcaagggcggcagcatgcacatgtacgccaagaacttctacggcggcaacggcatcgtgggcgcccaggtgcccctgggcgccggcatcgccctggcctgcaagtacaacggcaaggacgaggtgtgcctgaccctgtacggcgacggcgccgccaaccagggccagatcttcgaggcctacaacatggccgccctgtggaagctgccctgcatcttcatctgcgagaacaacagatacggcatgggcaccagcgtggagagagccgccgccagcaccgactactacaagagaggcgacttcatccccggcctgagagtggacggcatggacatcctgtgcgtgagagaggccaccagattcgccgccgcctactgcagaagcggcaagggccccatcctgatggagctgcagacctacagataccacggccacagcatgagcgaccccggcgtgagctacagaaccagagaggagatccaggaggtgagaagcaagagcgaccccatcatgctgctgaaggacagaatggtgaacagcaacctggccagcgtggaggagctgaaggagatcgacgtggaggtgagaaaggagatcgaggacgccgcccagttcgccaccgccgaccccgagccccccctggaggagctgggctaccacatctacagcagcgacccccccttcgaggtgagaggcgccaaccagtggatcaagttcaagagcgtgagctag

SEQ ID NO: 95960 - DNA, 366 bp, synthetic construct
  misc_feature 1..366: note = Description of Artificial Sequence: Synthetic coding sequence
  source 1..366: mol_type = other DNA
atgagaaagatgctggccgccgtgagcagagtgctgagcggcgccagccagaagcccttcgccggcagccccccccccagacacctgaccgtgggcagaaagctgagcagcagatacgaggtgaccttcgagagcgcccaggccagcagagtgctggtggccagcagaaacttcgccaacgacgccaccttcgagatcaagaagtgcgacctgcacagactggaggagggcccccccgtgaccaccgtgctgaccagagaggacggcctgaagtactacagaatgatgcagaccgtgagaagaatggagctgaaggccgaccagctgtacaagcagaagatcatcagaggcttctgccacctgtag

SEQ ID NO: 95961 - DNA, 366 bp, synthetic construct; identical to SEQ ID NO: 95960
  misc_feature 1..366: note = Description of Artificial Sequence: Synthetic coding sequence
  source 1..366: mol_type = other DNA

SEQ ID NO: 95962 - DNA, 1173 bp, synthetic construct
  misc_feature 1..1173: note = Description of Artificial Sequence: Synthetic coding sequence
  source 1..1173: mol_type = other DNA
atgagaaagatgctggccgccgtgagcagagtgctgagcggcgccagccagaagcccgccagcagagtgctggtggccagcagaaacttcgccaacgacgccaccttcgagatcaagaagtgcgacctgcacagactggaggagggcccccccgtgaccaccgtgctgaccagagaggacggcctgaagtactacagaatgatgcagaccgtgagaagaatggagctgaaggccgaccagctgtacaagcagaagatcatcagaggcttctgccacctgtgcgacggccaggaggcctgctgcgtgggcctggaggccggcatcaaccccaccgaccacctgatcaccgcctacagagcccacggcttcaccttcaccagaggcctgagcgtgagagagatcctggccgagctgaccggcagaaagggcggctgcgccaagggcaagggcggcagcatgcacatgtacgccaagaacttctacggcggcaacggcatcgtgggcgcccaggtgcccctgggcgccggcatcgccctggcctgcaagtacaacggcaaggacgaggtgtgcctgaccctgtacggcgacggcgccgccaaccagggccagatcttcgaggcctacaacatggccgccctgtggaagctgccctgcatcttcatctgcgagaacaacagatacggcatgggcaccagcgtggagagagccgccgccagcaccgactactacaagagaggcgacttcatccccggcctgagagtggacggcatggacatcctgtgcgtgagagaggccaccagattcgccgccgcctactgcagaagcggcaagggccccatcctgatggagctgcagacctacagataccacggccacagcatgagcgaccccggcgtgagctacagaaccagagaggagatccaggaggtgagaagcaagagcgaccccatcatgctgctgaaggacagaatggtgaacagcaacctggccagcgtggaggagctgaaggagatcgacgtggaggtgagaaaggagatcgaggacgccgcccagttcgccaccgccgaccccgagccccccctggaggagctgggctaccacatctacagcagcgacccccccttcgaggtgagaggcgccaaccagtggatcaagttcaagagcgtgagctag

SEQ ID NO: 95963 - DNA, 618 bp, synthetic construct
  misc_feature 1..618: note = Description of Artificial Sequence: Synthetic coding sequence
  source 1..618: mol_type = other DNA
atgagaaagatgctggccgccgtgagcagagtgctgagcggcgccagccagaagcccagacacggcctggccaccctgcccagcctggtgagcatcagcagactgaagcagagcagccacctgggcctgcccaagtgctgggactacagccacagcctgaagaccagacaggccagcagagtgctggtggccagcagaaacttcgccaacgacgccaccttcgagatcaagaagtgcgacctgcacagactggaggagggcccccccgtgaccaccgtgctgaccagagaggacggcctgaagtactacagaatgatgcagaccgtgagaagaatggagctgaaggccgaccagctgtacaagcagaagatcatcagaggcttctgccacctgtgcgacggccaggaggcctgctgcgtgggcctggaggccggcatcaaccccaccgaccacctgatcaccgcctacagagcccacggcttcaccttcaccagaggcctgagcgtgagagagatcctggccgagctgaccggcagaaagggcggctgcgccaagggcaagggcggcagcatgcacatgtacgccaagaacttctacggcggcaacggcatcgtgtag

SEQ ID NO: 95964 - DNA, 1080 bp, synthetic construct
  misc_feature 1..1080: note = Description of Artificial Sequence: Synthetic coding sequence
  source 1..1080: mol_type = other DNA
atgagaaagatgctggccgccgtgagcagagtgctgagcggcgccagccagaagcccgccagcagagtgctggtggccagcagaaacttcgccaacgacgccaccttcgagatcaagaagtgcgacctgcacagactggaggagggcccccccgtgaccaccgtgctgaccagagaggacggcctgaagtactacagaatgatgcagaccgtgagaagaatggagctgaaggccgaccagctgtacaagcagaagatcatcagaggcttctgccacctgtgcgacggccaggaggcctgctgcgtgggcctggaggccggcatcaaccccaccgaccacctgatcaccgcctacagagcccacggcttcaccttcaccagaggcctgagcgtgagagagatcctggccgagctgaccggcagaaagggcggctgcgccaagggcaagggcggcagcatgcacatgtacgccaagaacttctacggcggcaacggcatcgtgggcgcccagggccagatcttcgaggcctacaacatggccgccctgtggaagctgccctgcatcttcatctgcgagaacaacagatacggcatgggcaccagcgtggagagagccgccgccagcaccgactactacaagagaggcgacttcatccccggcctgagagtggacggcatggacatcctgtgcgtgagagaggccaccagattcgccgccgcctactgcagaagcggcaagggccccatcctgatggagctgcagacctacagataccacggccacagcatgagcgaccccggcgtgagctacagaaccagagaggagatccaggaggtgagaagcaagagcgaccccatcatgctgctgaaggacagaatggtgaacagcaacctggccagcgtggaggagctgaaggagatcgacgtggaggtgagaaaggagatcgaggacgccgcccagttcgccaccgccgaccccgagccccccctggaggagctgggctaccacatctacagcagcgacccccccttcgaggtgagaggcgccaaccagtggatcaagttcaagagcgtgagctag

SEQ ID NO: 95965 - DNA, 129 bp, synthetic construct
  misc_feature 1..129: note = Description of Artificial Sequence: Synthetic coding sequence
  source 1..129: mol_type = other DNA
gccaaccagtggatcaagttcaagagcgtgaagggcagaagaagaagaggctacaccttcagaggcctgcccgacagcgtgctgaacctggtgaaggaggaggagaaccccgtgaacgagatccagtag

SEQ ID NO: 95966 - DNA, 1194 bp, synthetic construct
  misc_feature 1..1194: note = Description of Artificial Sequence: Synthetic coding sequence
  source 1..1194: mol_type = other DNA
atgagaaagatgctggccgccgtgagcagagtgctgagcggcgccagccagaagcccgccagcagagtgctggtggccagcagaaacttcgccaacgacgccaccttcgagatcaagaagtgcgacctgcacagactggaggagggcccccccgtgaccaccgtgctgaccagagaggacggcctgaagtactacagaatgatgcagaccgtgagaagaatggagctgaaggccgaccagctgtacaagcagaagatcatcagaggcttctgccacctgtgcgacggccagttcctgctgcccctgacccaggaggcctgctgcgtgggcctggaggccggcatcaaccccaccgaccacctgatcaccgcctacagagcccacggcttcaccttcaccagaggcctgagcgtgagagagatcctggccgagctgaccggcagaaagggcggctgcgccaagggcaagggcggcagcatgcacatgtacgccaagaacttctacggcggcaacggcatcgtgggcgcccaggtgcccctgggcgccggcatcgccctggcctgcaagtacaacggcaaggacgaggtgtgcctgaccctgtacggcgacggcgccgccaaccagggccagatcttcgaggcctacaacatggccgccctgtggaagctgccctgcatcttcatctgcgagaacaacagatacggcatgggcaccagcgtggagagagccgccgccagcaccgactactacaagagaggcgacttcatccccggcctgagagtggacggcatggacatcctgtgcgtgagagaggccaccagattcgccgccgcctactgcagaagcggcaagggccccatcctgatggagctgcagacctacagataccacggccacagcatgagcgaccccggcgtgagctacagaaccagagaggagatccaggaggtgagaagcaagagcgaccccatcatgctgctgaaggacagaatggtgaacagcaacctggccagcgtggaggagctgaaggagatcgacgtggaggtgagaaaggagatcgaggacgccgcccagttcgccaccgccgaccccgagccccccctggaggagctgggctaccacatctacagcagcgacccccccttcgaggtgagaggcgccaaccagtggatcaagttcaagagcgtgagctag

SEQ ID NO: 95967 - DNA, 1167 bp, synthetic construct
  misc_feature 1..1167: note = Description of Artificial Sequence: Synthetic coding sequence
  source 1..1167: mol_type = other DNA
atgctggccgccttcatcagcagagtgctgagaagagtggcccagaagagcgccagaagagtgctggtggccagcagaaacagcagcaacgacgccaccttcgagatcaagaagtgcgacctgtacctgctggaggagggcccccccgtgaccaccgtgctgaccagagccgagggcctgaagtactacagaatgatgctgaccgtgagaagaatggagctgaaggccgaccagctgtacaagcagaagttcatcagaggcttctgccacctgtgcgacggccaggaggcctgctgcgtgggcctggaggccggcatcaaccccagcgaccacgtgatcaccagctacagagcccacggcgtgtgctacaccagaggcctgagcgtgagaagcatcctggccgagctgaccggcagaagaggcggctgcgccaagggcaagggcggcagcatgcacatgtacaccaagaacttctacggcggcaacggcatcgtgggcgcccagggccccctgggcgccggcatcgccctggcctgcaagtacaagggcaacgacgagatctgcctgaccctgtacggcgacggcgccgccaaccagggccagatcgccgaggccttcaacatggccgccctgtggaagctgccctgcgtgttcatctgcgagaacaacctgtacggcatgggcaccagcaccgagagagccgccgccagccccgactactacaagagaggcaacttcatccccggcctgaaggtggacggcatggacgtgctgtgcgtgagagaggccaccaagttcgccgccaactactgcagaagcggcaagggccccatcctgatggagctgcagacctacagataccacggccacagcatgagcgaccccggcgtgagctacagaaccagagaggagatccaggaggtgagaagcaagagagaccccatcatcatcctgcaggacagaatggtgaacagcaagctggccaccgtggaggagctgaaggagatcggcgccgaggtgagaaaggagatcgacgacgccgcccagttcgccaccaccgaccccgagccccacctggaggagctgggccaccacatctacagcagcgacagcagcttcgaggtgagaggcgccaacccctggatcaagttcaagagcgtgagctag

SEQ ID NO: 95968 - DNA, 1080 bp, synthetic construct
  misc_feature 1..1080: note = Description of Artificial Sequence: Synthetic coding sequence
  source 1..1080: mol_type = other DNA
atggccgccgtgagcggcctggtgagaagacccctgagagaggtgagcggcctgctgaagagaagattccactggaccgcccccgccgccctgcaggtgaccgtgagagacgccatcaaccagggcatggacgaggagctggagagagacgagaaggtgttcctgctgggcgaggaggtggcccagtacgacggcgcctacaaggtgagcagaggcctgtggaagaagtacggcgacaagagaatcatcgacacccccatcagcgagatgggcttcgccggcatcgccgtgggcgccgccatggccggcctgagacccatctgcgagttcatgaccttcaacttcagcatgcaggccatcgaccaggtgatcaacagcgccgccaagacctactacatgagcggcggcctgcagcccgtgcccatcgtgttcagaggccccaacggcgccagcgccggcgtggccgcccagcacagccagtgcttcgccgcctggtacggccactgccccggcctgaaggtggtgagcccctggaacagcgaggacgccaagggcctgatcaagagcgccatcagagacaacaaccccgtggtggtgctggagaacgagctgatgtacggcgtgcccttcgagttcccccccgaggcccagagcaaggacttcctgatccccatcggcaaggccaagatcgagagacagggcacccacatcaccgtggtgagccacagcagacccgtgggccactgcctggaggccgccgccgtgctgagcaaggagggcgtggagtgcgaggtgatcaacatgagaaccatcagacccatggacatggagaccatcgaggccagcgtgatgaagaccaaccacctggtgaccgtggagggcggctggccccagttcggcgtgggcgccgagatctgcgccagaatcatggagggccccgccttcaacttcctggacgcccccgccgtgagagtgaccggcgccgacgtgcccatgccctacgccaagatcctggaggacaacagcatcccccaggtgaaggacatcatcttcgccatcaagaagaccctgaacatctag

SEQ ID NO: 95969 - DNA, 1026 bp, synthetic construct
  misc_feature 1..1026: note = Description of Artificial Sequence: Synthetic coding sequence
  source 1..1026: mol_type = other DNA
atggccgccgtgagcggcctggtgagaagacccctgagagaggtgaccgtgagagacgccatcaaccagggcatggacgaggagctggagagagacgagaaggtgttcctgctgggcgaggaggtggcccagtacgacggcgcctacaaggtgagcagaggcctgtggaagaagtacggcgacaagagaatcatcgacacccccatcagcgagatgggcttcgccggcatcgccgtgggcgccgccatggccggcctgagacccatctgcgagttcatgaccttcaacttcagcatgcaggccatcgaccaggtgatcaacagcgccgccaagacctactacatgagcggcggcctgcagcccgtgcccatcgtgttcagaggccccaacggcgccagcgccggcgtggccgcccagcacagccagtgcttcgccgcctggtacggccactgccccggcctgaaggtggtgagcccctggaacagcgaggacgccaagggcctgatcaagagcgccatcagagacaacaaccccgtggtggtgctggagaacgagctgatgtacggcgtgcccttcgagttcccccccgaggcccagagcaaggacttcctgatccccatcggcaaggccaagatcgagagacagggcacccacatcaccgtggtgagccacagcagacccgtgggccactgcctggaggccgccgccgtgctgagcaaggagggcgtggagtgcgaggtgatcaacatgagaaccatcagacccatggacatggagaccatcgaggccagcgtgatgaagaccaaccacctggtgaccgtggagggcggctggccccagttcggcgtgggcgccgagatctgcgccagaatcatggagggccccgccttcaacttcctggacgcccccgccgtgagagtgaccggcgccgacgtgcccatgccctacgccaagatcctggaggacaacagcatcccccaggtgaaggacatcatcttcgccatcaagaagaccctgaacatctag

SEQ ID NO: 95970 - DNA, 1026 bp, synthetic construct
  misc_feature 1..1026: note = Description of Artificial Sequence: Synthetic coding sequence
  source 1..1026: mol_type = other DNA
atggccgccgtgagcggcctggtgagaagacccctgagagaggtgagcggcctgctgaagagaagattccactggaccgcccccgccgccctgcaggtgaccgtgagagacgccatcaaccagggcatggacgaggagctggagagagacgagaaggtgttcctgctgggcgaggaggtggcccagtacgacggcgcctacaaggtgagcagaggcctgtggaagaagtacggcgacaagagaatcatcgacacccccatcagcgagatgggcttcgccggcatcgccgtgggcgccgccatggccggcctgagacccatctgcgagttcatgaccttcaacttcagcatgcaggccatcgaccaggtgatcaacagcgccgccaagacctactacatgagcggcgtggccgcccagcacagccagtgcttcgccgcctggtacggccactgccccggcctgaaggtggtgagcccctggaacagcgaggacgccaagggcctgatcaagagcgccatcagagacaacaaccccgtggtggtgctggagaacgagctgatgtacggcgtgcccttcgagttcccccccgaggcccagagcaaggacttcctgatccccatcggcaaggccaagatcgagagacagggcacccacatcaccgtggtgagccacagcagacccgtgggccactgcctggaggccgccgccgtgctgagcaaggagggcgtggagtgcgaggtgatcaacatgagaaccatcagacccatggacatggagaccatcgaggccagcgtgatgaagaccaaccacctggtgaccgtggagggcggctggccccagttcggcgtgggcgccgagatctgcgccagaatcatggagggccccgccttcaacttcctggacgcccccgccgtgagagtgaccggcgccgacgtgcccatgccctacgccaagatcctggaggacaacagcatcccccaggtgaaggacatcatcttcgccatcaagaagaccctgaacatctag

SEQ ID NO: 95971 - DNA, 1236 bp, synthetic construct
  misc_feature 1..1236: note = Description of Artificial Sequence: Synthetic coding sequence
  source 1..1236: mol_type = other DNA
atgaaggccgccagattcgtgctgagaagcgccggcagcctgaacggcgccggcctggtgcccagagaggtggagcacttcagcagatacagccccagccccctgagcatgaagcagctgctggacttcggcagcgagaacgcctgcgagagaaccagcttcgccttcctgagacaggagctgcccgtgagactggccaacatcctgaaggagatcgacatcctgcccacccagctggtgaacaccagcagcgtgcagctggtgaagagctggtacatccagagcctgatggacctggtggagttccacgagaagagccccgacgaccagaaggccctgagcgacttcgtggacaccctgatcaaggtgagaaacagacaccacaacgtggtgcccaccatggcccagggcatcatcgagtacaaggacgcctgcaccgtggaccccgtgaccaaccagaacctgcagtacttcctggacagattctacatgaacagaatcagcaccagaatgctgatgaaccagcacatcctgatcttcagcgacagccagaccggcaaccccagccacatcggcagcatcgaccccaactgcgacgtggtggccgtggtgcaggacgccttcgagtgcagcagaatgctgtgcgaccagtactacctgagcagccccgagctgaagctgacccaggtgaacggcaagttccccgaccagcccatccacatcgtgtacgtgcccagccacctgcaccacatgctgttcgagctgttcaagaacgccatgagagccaccgtggagcaccaggagaaccagcccagcctgacccccatcgaggtgatcgtggtgctgggcaaggaggacctgaccatcaagatcagcgacagaggcggcggcgtgcccctgagaatcatcgacagactgttcagctacacctacagcaccgcccccacccccgtgatggacaacagcagaaacgcccccctggccggcttcggctacggcctgcccatcagcagactgtacgccaagtacttccagggcgacctgaacctgtacagcctgagcggctacggcaccgacgccatcatctacctgaaggccctgagcagcgagagcatcgagaagctgcccgtgttcaacaagagcgccttcaagcactaccagatgagcagcgaggccgacgactggtgcatccccagcagagagcccaagaacctggccaaggaggtggccatgtag

SEQ ID NO: 95972 - DNA, 1128 bp, synthetic construct
  misc_feature 1..1128: note = Description of Artificial Sequence: Synthetic coding sequence
  source 1..1128: mol_type = other DNA
atgaagcagctgctggacttcggcagcgagaacgcctgcgagagaaccagcttcgccttcctgagacaggagctgcccgtgagactggccaacatcctgaaggagatcgacatcctgcccacccagctggtgaacaccagcagcgtgcagctggtgaagagctggtacatccagagcctgatggacctggtggagttccacgagaagagccccgacgaccagaaggccctgagcgacttcgtggacaccctgatcaaggtgagaaacagacaccacaacgtggtgcccaccatggcccagggcatcatcgagtacaaggacgcctgcaccgtggaccccgtgaccaaccagaacctgcagtacttcctggacagattctacatgaacagaatcagcaccagaatgctgatgaaccagcacatcctgatcttcagcgacagccagaccggcaaccccagccacatcggcagcatcgaccccaactgcgacgtggtggccgtggtgcaggacgccttcgagtgcagcagaatgctgtgcgaccagtactacctgagcagccccgagctgaagctgacccaggtgaacggcaagttccccgaccagcccatccacatcgtgtacgtgcccagccacctgcaccacatgctgttcgagctgttcaagaacgccatgagagccaccgtggagcaccaggagaaccagcccagcctgacccccatcgaggtgatcgtggtgctgggcaaggaggacctgaccatcaagatcagcgacagaggcggcggcgtgcccctgagaatcatcgacagactgttcagctacacctacagcaccgcccccacccccgtgatggacaacagcagaaacgcccccctggccggcttcggctacggcctgcccatcagcagactgtacgccaagtacttccagggcgacctgaacctgtacagcctgagcggctacggcaccgacgccatcatctacctgaaggccctgagcagcgagagcatcgagaagctgcccgtgttcaacaagagcgccttcaagcactaccagatgagcagcgaggccgacgactggtgcatccccagcagagagcccaagaacctggccaaggaggtggccatgtag

SEQ ID NO: 95973 - DNA, 1614 bp, synthetic construct
  misc_feature 1..1614: note = Description of Artificial Sequence: Synthetic coding sequence
  source 1..1614: mol_type = other DNA
atgcccgcccccacccagctgttcttccccctgatcagaaactgcgagctgagcagaatctacggcaccgcctgctactgccaccacaagcacctgtgctgcagcagcagctacatcccccagagcagactgagatacaccccccaccccgcctacgccaccttctgcagacccaaggagaactggtggcagtacacccagggcagaagatacgccagcaccccccagaagttctacctgacccccccccaggtgaacagcatcctgaaggccaacgagtacagcttcaaggtgcccgagttcgacggcaagaacgtgagcagcatcctgggcttcgacagcaaccagctgcccgccaacgcccccatcgaggacagaagaagcgccgccacctgcctgcagaccagaggcatgctgctgggcgtgttcgacggccacgccggctgcgcctgcagccaggccgtgagcgagagactgttctactacatcgccgtgagcctgctgccccacgagaccctgctggagatcgagaacgccgtggagagcggcagagccctgctgcccatcctgcagtggcacaagcaccccaacgactacttcagcaaggaggccagcaagctgtacttcaacagcctgagaacctactggcaggagctgatcgacctgaacaccggcgagagcaccgacatcgacgtgaaggaggccctgatcaacgccttcaagagactggacaacgacatcagcctggaggcccaggtgggcgaccccaacagcttcctgaactacctggtgctgagagtggccttcagcggcgccaccgcctgcgtggcccacgtggacggcgtggacctgcacgtggccaacaccggcgacagcagagccatgctgggcgtgcaggaggaggacggcagctggagcgccgtgaccctgagcaacgaccacaacgcccagaacgagagagagctggagagactgaagctggagcaccccaagagcgaggccaagagcgtggtgaagcaggacagactgctgggcctgctgatgcccttcagagccttcggcgacgtgaagttcaagtggagcatcgacctgcagaagagagtgatcgagagcggccccgaccagctgaacgacaacgagtacaccaagttcatcccccccaactaccacacccccccctacctgaccgccgagcccgaggtgacctaccacagactgagaccccaggacaagttcctggtgctggccaccgacggcctgtgggagaccatgcacagacaggacgtggtgagaatcgtgggcgagtacctgaccggcatgcaccaccagcagcccatcgccgtgggcggctacaaggtgaccctgggccagatgcacggcctgctgaccgagagaagaaccaagatgagcagcgtgttcgaggaccagaacgccgccacccacctgatcagacacgccgtgggcaacaacgagttcggcaccgtggaccacgagagactgagcaagatgctgagcctgcccgaggagctggccagaatgtacagagacgacatcaccatcatcgtggtgcagttcaacagccacgtggtgggcgcctaccagaaccaggagtag

SEQ ID NO: 95974 - DNA, 1689 bp, synthetic construct
  misc_feature 1..1689: note = Description of Artificial Sequence: Synthetic coding sequence
  source 1..1689: mol_type = other DNA
atgtgcgtgtgccccggccccagaagaatcggcatccccgtgagaagcagcagcctgcccctgttcagcgacgccatgcccgcccccacccagctgttcttccccctgatcagaaactgcgagctgagcagaatctacggcaccgcctgctactgccaccacaagcacctgtgctgcagcagcagctacatcccccagagcagactgagatacaccccccaccccgcctacgccaccttctgcagacccaaggagaactggtggcagtacacccagggcagaagatacgccagcaccccccagaagttctacctgacccccccccaggtgaacagcatcctgaaggccaacgagtacagcttcaaggtgcccgagttcgacggcaagaacgtgagcagcatcctgggcttcgacagcaaccagctgcccgccaacgcccccatcgaggacagaagaagcgccgccacctgcctgcagaccagaggcatgctgctgggcgtgttcgacggccacgccggctgcgcctgcagccaggccgtgagcgagagactgttctactacatcgccgtgagcctgctgccccacgagaccctgctggagatcgagaacgccgtggagagcggcagagccctgctgcccatcctgcagtggcacaagcaccccaacgactacttcagcaaggaggccagcaagctgtacttcaacagcctgagaacctactggcaggagctgatcgacctgaacaccggcgagagcaccgacatcgacgtgaaggaggccctgatcaacgccttcaagagactggacaacgacatcagcctggaggcccaggtgggcgaccccaacagcttcctgaactacctggtgctgagagtggccttcagcggcgccaccgcctgcgtggcccacgtggacggcgtggacctgcacgtggccaacaccggcgacagcagagccatgctgggcgtgcaggaggaggacggcagctggagcgccgtgaccctgagcaacgaccacaacgcccagaacgagagagagctggagagactgaagctggagcaccccaagagcgaggccaagagcgtggtgaagcaggacagactgctgggcctgctgatgcccttcagagccttcggcgacgtgaagttcaagtggagcatcgacctgcagaagagagtgatcgagagcggccccgaccagctgaacgacaacgagtacaccaagttcatcccccccaactaccacacccccccctacctgaccgccgagcccgaggtgacctaccacagactgagaccccaggacaagttcctggtgctggccaccgacggcctgtgggagaccatgcacagacaggacgtggtgagaatcgtgggcgagtacctgaccggcatgcaccaccagcagcccatcgccgtgggcggctacaaggtgaccctgggccagatgcacggcctgctgaccgagagaagaaccaagatgagcagcgtgttcgaggaccagaacgccgccacccacctgatcagacacgccgtgggcaacaacgagttcggcaccgtggaccacgagagactgagcaagatgctgagcctgcccgaggagctggccagaatgtacagagacgacatcaccatcatcgtggtgcagttcaacagccacgtggtgggcgcctaccagaaccaggagtag

SEQ ID NO: 95975 - DNA, 1614 bp, synthetic construct; identical to SEQ ID NO: 95973
  misc_feature 1..1614: note = Description of Artificial Sequence: Synthetic coding sequence
  source 1..1614: mol_type = other DNA

SEQ ID NO: 95976 - DNA, 231 bp, synthetic construct
  misc_feature 1..231: note = Description of Artificial Sequence: Synthetic coding sequence
  source 1..231: mol_type = other DNA
atgcccgcccccacccagctgttcttccccctgatcagaaactgcgagctgagcagaatctacggcaccgcctgctactgccaccacaagcacctgtgctgcagcagcagctacatcccccagagcagactgagatacaccccccaccccgcctacgccaccttctgcagacccaaggagaactggtggcagtacacccagggcagaagatacgccagcaccccccagtag

SEQ ID NO: 95977 - DNA, 387 bp, synthetic construct
  misc_feature 1..387: note = Description of Artificial Sequence: Synthetic coding sequence
  source 1..387: mol_type = other DNA
atgcccgcccccacccagctgttcttccccctgatcagaaactgcgagctgagcagaatctacggcaccgcctgctactgccaccacaagcacctgtgctgcagcagcagctacatcccccagagcagactgagatacaccccccaccccgcctacgccaccttctgcagacccaaggagaactggtggcagtacacccagggcagaagatacgccagcaccccccagaagttctacctgacccccccccaggtgaacagcatcctgaaggccaacgagtacagcttcaaggtgcccgagttcgacggcaagaacgtgagcagcatcctgggcttcgacagcaaccagctgcccgccaacgcccccatcgaggacagaagaagctag

SEQ ID NO: 95978 - DNA, 699 bp, synthetic construct
  misc_feature 1..699: note = Description of Artificial Sequence: Synthetic coding sequence
  source 1..699: mol_type = other DNA
atgcccgcccccacccagctgttcttccccctgatcagaaactgcgagctgagcagaatctacggcaccgcctgctactgccaccacaagcacctgtgctgcagcagcagctacatcccccagagcagactgagatacaccccccaccccgcctacgccaccttctgcagacccaaggagaactggtggcagtacacccagggcagaagatacgccagcaccccccagaagttctacctgacccccccccaggtgaacagcatcctgaaggccaacgagtacagcttcaaggtgcccgagttcgacggcaagaacgtgagcagcatcctgggcttcgacagcaaccagctgcccgccaacgcccccatcgaggacagaagaagcgccgccacctgcctgcagaccagaggcatgctgctgggcgtgttcgacggccacgccggctgcgcctgcagccaggccgtgagcgagagactgttctactacatcgccgtgagcctgctgccccacgagaccctgctggagatcgagaacgccgtggagagcggcagagccctgctgcccatcctgcagtggcacaagcaccccaacgactacttcagcaaggaggccagcaagctgtacttcaacagcctgagaacctactggcaggagctgatcgacctgaacaccggcgagagcaccgacatcgacgtgtag

SEQ ID NO: 95979 - DNA, 219 bp, synthetic construct
  misc_feature 1..219: note = Description of Artificial Sequence: Synthetic coding sequence
  source 1..219: mol_type = other DNA
atgcccgcccccacccagctgttcttccccctgatcagaaactgcgagctgagcagaatctacggcaccgcctgctactgccaccacaagcacctgtgctgcagcagcagctacatcccccagagcagactgagatacaccccccaccccgcctacgccaccttctgcagacccaaggagaactggtggcagtacacccagggcagaagatacgcctag

SEQ ID NO: 95980 - DNA, 1614 bp, synthetic construct; identical to SEQ ID NO: 95973
  misc_feature 1..1614: note = Description of Artificial Sequence: Synthetic coding sequence
  source 1..1614: mol_type = other DNA

SEQ ID NO: 95981 - DNA, 444 bp, synthetic construct
  misc_feature 1..444: note = Description of Artificial Sequence: Synthetic coding sequence
  source 1..444: mol_type = other DNA
atgcccgcccccacccagctgttcttccccctgatcagaaactgcgagctgagcagaatctacggcaccgcctgctactgccaccacaagcacctgtgctgcagcagcagctacatcccccagagcagactgagatacaccccccaccccgcctacgccaccttctgcagacccaaggagaactggtggcagtacacccagggcagaagatacgccagcaccccccagaagttctacctgacccccccccaggtgaacagcatcctgaaggccaacgagtacagcttcaaggtgcccgagttcgacggcaagaacgtgagcagcatcctgggcttcgacagcaaccagctgcccgccaacgcccccatcgaggacagaagaagcgccgccacctgcctgcagaccagaggcatgctgctgggcgtgttcgacggccacgcctag

SEQ ID NO: 95982 - DNA, 1467 bp, synthetic construct
  misc_feature 1..1467: note = Description of Artificial Sequence: Synthetic coding sequence
  source 1..1467: mol_type = other DNA
atggccgacaccttcctggagcacctgtgcctgctggacatcgacagcgagcccgtggccgccagaagcaccagcatcatcgccaccatcggccccgccagcagaagcgtggagagactgaaggagatgatcaaggccggcatgaacatcgccagactgaacttcagccacggcagccacgagtaccacgccgagagcatcgccctggacaccaagggccccgagatcagaaccggcatcctgcagggcggccccgagagcgaggtggagctggtgaagggcagccaggtgctggtgaccgtggaccccgccttcagaaccagaggcaacgccaacaccgtgtgggtggactaccccaacatcgtgagagtggtgcccgtgggcggcagaatctacatcgacgacggcctgatcagcctggtggtgcagaagatcggccccgagggcctggtgacccaggtggagaacggcggcgtgctgggcagcagaaagggcgtgaacctgcccggcgcccaggtggacctgcccggcctgagcgagcaggacgtgagagacctgagattcggcgtggagcacggcgtggacatcgtgttcgccagcttcgtgagaaaggccagcgacgtggccgccgtgagagccgccctgggccccgagggccacggcatcaagatcatcagcaagatcgagaaccacgagggcgtgaagagattcgacgagatcctggaggtgagcgacggcatcatggtggccagaggcgacctgggcatcgagatccccgccgagaaggtgttcctggcccagaagatgatgatcggcagatgcaacctggccggcaagcccgtggtgtgcgccacccagatgctggagagcatgatcaccaagcccagacccaccagagccgagaccagcgacgtggccaacgccgtgctggacggcgccgactgcatcatgctgagcggcgagaccgccaagggcaacttccccgtggaggccgtgaagatgcagcacgccatcgccagagaggccgaggccgccgtgtaccacagacagctgttcgaggagctgagaagagccgcccccctgagcagagaccccaccgaggtgaccgccatcggcgccgtggaggccgccttcaagtgctgcgccgccgccatcatcgtgctgaccaccaccggcagaagcgcccagctgctgagcagatacagacccagagccgccgtgatcgccgtgaccagaagcgcccaggccgccagacaggtgcacctgtgcagaggcgtgttccccctgctgtacagagagccccccgaggccatctgggccgacgacgtggacagaagagtgcagttcggcatcgagagcggcaagctgagaggcttcctgagagtgggcgacctggtgatcgtggtgaccggctggagacccggcagcggctacaccaacatcatgagagtgctgagcatcagctag

SEQ ID NO: 95983 - DNA, 1725 bp, synthetic construct
  misc_feature 1..1725: note = Description of Artificial Sequence: Synthetic coding sequence
  source 1..1725: mol_type = other DNA
atgagcatccaggagaacatcagcagcctgcagctgagaagctgggtgagcaagagccagagagacctggccaagagcatcctgatcggcgcccccggcggccccgccggctacctgagaagagccagcgtggcccagctgacccaggagctgggcaccgccttcttccagcagcagcagctgcccgccgccatggccgacaccttcctggagcacctgtgcctgctggacatcgacagcgagcccgtggccgccagaagcaccagcatcatcgccaccatcggccccgccagcagaagcgtggagagactgaaggagatgatcaaggccggcatgaacatcgccagactgaacttcagccacggcagccacgagtaccacgccgagagcatcgccaacgtgagagaggccgtggagagcttcgccggcagccccctgagctacagacccgtggccatcgccctggacaccaagggccccgagatcagaaccggcatcctgcagggcggccccgagagcgaggtggagctggtgaagggcagccaggtgctggtgaccgtggaccccgccttcagaaccagaggcaacgccaacaccgtgtgggtggactaccccaacatcgtgagagtggtgcccgtgggcggcagaatctacatcgacgacggcctgatcagcctggtggtgcagaagatcggccccgagggcctggtgacccaggtggagaacggcggcgtgctgggcagcagaaagggcgtgaacctgcccggcgcccaggtggacctgcccggcctgagcgagcaggacgtgagagacctgagattcggcgtggagcacggcgtggacatcgtgttcgccagcttcgtgagaaaggccagcgacgtggccgccgtgagagccgccctgggccccgagggccacggcatcaagatcatcagcaagatcgagaaccacgagggcgtgaagagattcgacgagatcctggaggtgagcgacggcatcatggtggccagaggcgacctgggcatcgagatccccgccgagaaggtgttcctggcccagaagatgatgatcggcagatgcaacctggccggcaagcccgtggtgtgcgccacccagatgctggagagcatgatcaccaagcccagacccaccagagccgagaccagcgacgtggccaacgccgtgctggacggcgccgactgcatcatgctgagcggcgagaccgccaagggcaacttccccgtggaggccgtgaagatgcagcacgccatcgccagagaggccgaggccgccgtgtaccacagacagctgttcgaggagctgagaagagccgcccccctgagcagagaccccaccgaggtgaccgccatcggcgccgtggaggccgccttcaagtgctgcgccgccgccatcatcgtgctgaccaccaccggcagaagcgcccagctgctgagcagatacagacccagagccgccgtgatcgccgtgaccagaagcgcccaggccgccagacaggtgcacctgtgcagaggcgtgttccccctgctgtacagagagccccccgaggccatctgggccgacgacgtggacagaagagtgcagttcggcatcgagagcggcaagctgagaggcttcctgagagtgggcgacctggtgatcgtggtgaccggctggagacccggcagcggctacaccaacatcatgagagtgctgagcatcagctag

SEQ ID NO: 95984 - DNA, 1632 bp, synthetic construct
  misc_feature 1..1632: note = Description of Artificial Sequence: Synthetic coding sequence
  source 1..1632: mol_type = other DNA
atggagggccccgccggctacctgagaagagccagcgtggcccagctgacccaggagctgggcaccgccttcttccagcagcagcagctgcccgccgccatggccgacaccttcctggagcacctgtgcctgctggacatcgacagcgagcccgtggccgccagaagcaccagcatcatcgccaccatcggccccgccagcagaagcgtggagagactgaaggagatgatcaaggccggcatgaacatcgccagactgaacttcagccacggcagccacgagtaccacgccgagagcatcgccaacgtgagagaggccgtggagagcttcgccggcagccccctgagctacagacccgtggccatcgccctggacaccaagggccccgagatcagaaccggcatcctgcagggcggccccgagagcgaggtggagctggtgaagggcagccaggtgctggtgaccgtggaccccgccttcagaaccagaggcaacgccaacaccgtgtgggtggactaccccaacatcgtgagagtggtgcccgtgggcggcagaatctacatcgacgacggcctgatcagcctggtggtgcagaagatcggccccgagggcctggtgacccaggtggagaacggcggcgtgctgggcagcagaaagggcgtgaacctgcccggcgcccaggtggacctgcccggcctgagcgagcaggacgtgagagacctgagattcggcgtggagcacggcgtggacatcgtgttcgccagcttcgtgagaaaggccagcgacgtggccgccgtgagagccgccctgggccccgagggccacggcatcaagatcatcagcaagatcgagaaccacgagggcgtgaagagattcgacgagatcctggaggtgagcgacggcatcatggtggccagaggcgacctgggcatcgagatccccgccgagaaggtgttcctggcccagaagatgatgatcggcagatgcaacctggccggcaagcccgtggtgtgcgccacccagatgctggagagcatgatcaccaagcccagacccaccagagccgagaccagcgacgtggccaacgccgtgctggacggcgccgactgcatcatgctgagcggcgagaccgccaagggcaacttccccgtggaggccgtgaagatgcagcacgccatcgccagagaggccgaggccgccgtgtaccacagacagctgttcgaggagctgagaagagccgcccccctgagcagagaccccaccgaggtgaccgccatcggcgccgtggaggccgccttcaagtgctgcgccgccgccatcatcgtgctgaccaccaccggcagaagcgcccagctgctgagcagatacagacccagagccgccgtgatcgccgtgaccagaagcgcccaggccgccagacaggtgcacctgtgcagaggcgtgttccccctgctgtacagagagccccccgaggccatctgggccgacgacgtggacagaagagtgcagttcggcatcgagagcggcaagctgagaggcttcctgagagtgggcgacctggtgatcgtggtgaccggctggagacccggcagcggctacaccaacatcatgagagtgctgagcatcagctag

SEQ ID NO: 95985 - DNA, 1800 bp, synthetic construct
  misc_feature 1..1800: note = Description of Artificial Sequence: Synthetic coding sequence
  source 1..1800: mol_type = other DNA
atgagcatccaggagaacatcagcagcctgcagctgagaagctgggtgagcaagagccagagagacctggccaagagcatcctgatcggcgcccccggcgtgcccctgaccacccagcagtgcggcgccgacccccagagaggcagacccagagaggtgtgcagcggcatggagggccccgccggctacctgagaagagccagcgtggcccagctgacccaggagctgggcaccgccttcttccagcagcagcagctgcccgccgccatggccgacaccttcctggagcacctgtgcctgctggacatcgacagcgagcccgtggccgccagaagcaccagcatcatcgccaccatcggccccgccagcagaagcgtggagagactgaaggagatgatcaaggccggcatgaacatcgccagactgaacttcagccacggcagccacgagtaccacgccgagagcatcgccaacgtgagagaggccgtggagagcttcgccggcagccccctgagctacagacccgtggccatcgccctggacaccaagggccccgagatcagaaccggcatcctgcagggcggccccgagagcgaggtggagctggtgaagggcagccaggtgctggtgaccgtggaccccgccttcagaaccagaggcaacgccaacaccgtgtgggtggactaccccaacatcgtgagagtggtgcccgtgggcggcagaatctacatcgacgacggcctgatcagcctggtggtgcagaagatcggccccgagggcctggtgacccaggtggagaacggcggcgtgctgggcagcagaaagggcgtgaacctgcccggcgcccaggtggacctgcccggcctgagcgagcaggacgtgagagacctgagattcggcgtggagcacggcgtggacatcgtgttcgccagcttcgtgagaaaggccagcgacgtggccgccgtgagagccgccctgggccccgagggccacggcatcaagatcatcagcaagatcgagaaccacgagggcgtgaagagattcgacgagatcctggaggtgagcgacggcatcatggtggccagaggcgacctgggcatcgagatccccgccgagaaggtgttcctggcccagaagatgatgatcggcagatgcaacctggccggcaagcccgtggtgtgcgccacccagatgctggagagcatgatcaccaagcccagacccaccagagccgagaccagcgacgtggccaacgccgtgctggacggcgccgactgcatcatgctgagcggcgagaccgccaagggcaacttccccgtggaggccgtgaagatgcagcacgccatcgccagagaggccgaggccgccgtgtaccacagacagctgttcgaggagctgagaagagccgcccccctgagcagagaccccaccgaggtgaccgccatcggcgccgtggaggccgccttcaagtgctgcgccgccgccatcatcgtgctgaccaccaccggcagaagcgcccagctgctgagcagatacagacccagagccgccgtgatcgccgtgaccagaagcgcccaggccgccagacaggtgcacctgtgcagaggcgtgttccccctgctgtacagagagccccccgaggccatctgggccgacgacgtggacagaagagtgcagttcggcatcgagagcggcaagctgagaggcttcctgagagtgggcgacctggtgatcgtggtgaccggctggagacccggcagcggctacaccaacatcatgagagtgctgagcatcagctag

SEQ ID NO: 95986 - DNA, 1596 bp, synthetic construct
  misc_feature 1..1596: note = Description of Artificial Sequence: Synthetic coding sequence
  source 1..1596: mol_type = other DNA
atgagcaagccccacagcgaggccggcaccgccttcatccagacccagcagctgcacgccgccatggccgacaccttcctggagcacatgtgcagactggacatcgacagcccccccatcaccgccagaaacaccggcatcatctgcaccatcggccccgccagcagaagcgtggagaccctgaaggagatgatcaagagcggcatgaacgtggccagactgaacttcagccacggcacccacgagtaccacgccgagaccatcaagaacgtgagaaccgccaccgagagcttcgccagcgaccccatcctgtacagacccgtggccgtggccctggacaccaagggccccgagatcagaaccggcctgatcaagggcagcggcaccgccgaggtggagctgaagaagggcgccaccctgaagatcaccctggacaacgcctacatggagaagtgcgacgagaacatcctgtggctggactacaagaacatctgcaaggtggtggaggtgggcagcaagatctacgtggacgacggcctgatcagcctgcaggtgaagcagaagggcgccgacttcctggtgaccgaggtggagaacggcggcagcctgggcagcaagaagggcgtgaacctgcccggcgccgccgtggacctgcccgccgtgagcgagaaggacatccaggacctgaagttcggcgtggagcaggacgtggacatggtgttcgccagcttcatcagaaaggccagcgacgtgcacgaggtgagaaaggtgctgggcgagaagggcaagaacatcaagatcatcagcaagatcgagaaccacgagggcgtgagaagattcgacgagatcctggaggccagcgacggcatcatggtggccagaggcgacctgggcatcgagatccccgccgagaaggtgttcctggcccagaagatgatgatcggcagatgcaacagagccggcaagcccgtgatctgcgccacccagatgctggagagcatgatcaagaagcccagacccaccagagccgagggcagcgacgtggccaacgccgtgctggacggcgccgactgcatcatgctgagcggcgagaccgccaagggcgactaccccctggaggccgtgagaatgcagcacctgatcgccagagaggccgaggccgccatgttccacagaaagctgttcgaggagctggtgagagccagcagccacagcaccgacctgatggaggccatggccatgggcagcgtggaggccagctacaagtgcctggccgccgccctgatcgtgctgaccgagagcggcagaagcgcccaccaggtggccagatacagacccagagcccccatcatcgccgtgaccagaaacccccagaccgccagacaggcccacctgtacagaggcatcttccccgtgctgtgcaaggaccccgtgcaggaggcctgggccgaggacgtggacctgagagtgaacttcgccatgaacgtgggcaaggccagaggcttcttcaagaagggcgacgtggtgatcgtgctgaccggctggagacccggcagcggcttcaccaacaccatgagagtggtgcccgtgccctag

SEQ ID NO: 95987 - DNA, 1101 bp, synthetic construct
  misc_feature 1..1101: note = Description of Artificial Sequence: Synthetic coding sequence
  source 1..1101: mol_type = other DNA
atgagcaagccccacagcgaggccggcaccgccttcatccagacccagcagctgcacgccgccatggccgacaccttcctggagcacatgtgcagactggacatcgacagcccccccatcaagaagggcgtgaacctgcccggcgccgccgtggacctgcccgccgtgagcgagaaggacatccaggacctgaagttcggcgtggagcaggacgtggacatggtgttcgccagcttcatcagaaaggccagcgacgtgcacgaggtgagaaaggtgctgggcgagaagggcaagaacatcaagatcatcagcaagatcgagaaccacgagggcgtgagaagattcgacgagatcctggaggccagcgacggcatcatggtggccagaggcgacctgggcatcgagatccccgccgagaaggtgttcctggcccagaagatgatgatcggcagatgcaacagagccggcaagcccgtgatctgcgccacccagatgctggagagcatgatcaagaagcccagacccaccagagccgagggcagcgacgtggccaacgccgtgctggacggcgccgactgcatcatgctgagcggcgagaccgccaagggcgactaccccctggaggccgtgagaatgcagcacctgatcgccagagaggccgaggccgccatgttccacagaaagctgttcgaggagctggtgagagccagcagccacagcaccgacctgatggaggccatggccatgggcagcgtggaggccagctacaagtgcctggccgccgccctgatcgtgctgaccgagagcggcagaagcgcccaccaggtggccagatacagacccagagcccccatcatcgccgtgaccagaaacccccagaccgccagacaggcccacctgtacagaggcatcttccccgtgctgtgcaaggaccccgtgcaggaggcctgggccgaggacgtggacctgagagtgaacttcgccatgaacgtgggcaaggccagaggcttcttcaagaagggcgacgtggtgatcgtgctgaccggctggagacccggcagcggcttcaccaacaccatgagagtggtgcccgtgccctag

SEQ ID NO: 95988 - DNA, 1596 bp, synthetic construct
  misc_feature 1..1596: note = Description of Artificial Sequence: Synthetic coding sequence
  source 1..1596: mol_type = other DNA
atgagcaagccccacagcgaggccggcaccgccttcatccagacccagcagctgcacgccgccatggccgacaccttcctggagcacatgtgcagactggacatcgacagcccccccatcaccgccagaaacaccggcatcatctgcaccatcggccccgccagcagaagcgtggagaccctgaaggagatgatcaagagcggcatgaacgtggccagactgaacttcagccacggcacccacgagtaccacgccgagaccatcaagaacgtgagaaccgccaccgagagcttcgccagcgaccccatcctgtacagacccgtggccgtggccctggacaccaagggccccgagatcagaaccggcctgatcaagggcagcggcaccgccgaggtggagctgaagaagggcgccaccctgaagatcaccctggacaacgcctacatggagaagtgcgacgagaacatcctgtggctggactacaagaacatctgcaaggtggtggaggtgggcagcaagatctacgtggacgacggcctgatcagcctgcaggtgaagcagaagggcgccgacttcctggtgaccgaggtggagaacggcggcagcctgggcagcaagaagggcgtgaacctgcccggcgccgccgtggacctgcccgccgtgagcgagaaggacatccaggacctgaagttcggcgtggagcaggacgtggacatggtgttcgccagcttcatcagaaaggccagcgacgtgcacgaggtgagaaaggtgctgggcgagaagggcaagaacatcaagatcatcagcaagatcgagaaccacgagggcgtgagaagattcgacgagatcctggaggccagcgacggcatcatggtggccagaggcgacctgggcatcgagatccccgccgagaaggtgttcctggcccagaagatgatgatcggcagatgcaacagagccggcaagcccgtgatctgcgccacccagatgctggagagcatgatcaagaagcccagacccaccagagccgagggcagcgacgtggccaacgccgtgctggacggcgccgactgcatcatgctgagcggcgagaccgccaagggcgactaccccctggaggccgtgagaatgcagcacctgatcgccagagaggccgaggccgccatctaccacctgcagctgttcgaggagctgagaagactggcccccatcaccagcgaccccaccgaggccaccgccgtgggcgccgtggaggccagcttcaagtgctgcagcggcgccatcatcgtgctgaccaagagcggcagaagcgcccaccaggtggccagatacagacccagagcccccatcatcgccgtgaccagaaacccccagaccgccagacaggcccacctgtacagaggcatcttccccgtgctgtgcaaggaccccgtgcaggaggcctgggccgaggacgtggacctgagagtgaacttcgccatgaacgtgggcaaggccagaggcttcttcaagaagggcgacgtggtgatcgtgctgaccggctggagacccggcagcggcttcaccaacaccatgagagtggtgcccgtgccctag

SEQ ID NO: 95989 - DNA, 1596 bp, synthetic construct; identical to SEQ ID NO: 95986
  misc_feature 1..1596: note = Description of Artificial Sequence: Synthetic coding sequence
  source 1..1596: mol_type = other DNA

SEQ ID NO: 95990 - DNA, 1377 bp, synthetic construct
  misc_feature 1..1377: note = Description of Artificial Sequence: Synthetic coding sequence
  source 1..1377: mol_type = other DNA
atgagcaagccccacagcgaggccggcaccgccttcatccagacccagcagctgcacgccgccatggccgacaccttcctggagcacatgtgcagactggacatcgacagcccccccatcaccgccagaaacaccggcatcatctgcaccatcggccccgccagcagaagcgaggtggagctgaagaagggcgccaccctgaagatcaccctggacaacgcctacatggagaagtgcgacgagaacatcctgtggctggactacaagaacatctgcaaggtggtggaggtgggcagcaagatctacgtggacgacggcctgatcagcctgcaggtgaagcagaagggcgccgacttcctggtgaccgaggtggagaacggcggcagcctgggcagcaagaagggcgtgaacctgcccggcgccgccgtggacctgcccgccgtgagcgagaaggacatccaggacctgaagttcggcgtggagcaggacgtggacatggtgttcgccagcttcatcagaaaggccagcgacgtgcacgaggtgagaaaggtgctgggcgagaagggcaagaacatcaagatcatcagcaagatcgagaaccacgagggcgtgagaagattcgacgagatcctggaggccagcgacggcatcatggtggccagaggcgacctgggcatcgagatccccgccgagaaggtgttcctggcccagaagatgatgatcggcagatgcaacagagccggcaagcccgtgatctgcgccacccagatgctggagagcatgatcaagaagcccagacccaccagagccgagggcagcgacgtggccaacgccgtgctggacggcgccgactgcatcatgctgagcggcgagaccgccaagggcgactaccccctggaggccgtgagaatgcagcacctgatcgccagagaggccgaggccgccatctaccacctgcagctgttcgaggagctgagaagactggcccccatcaccagcgaccccaccgaggccaccgccgtgggcgccgtggaggccagcttcaagtgctgcagcggcgccatcatcgtgctgaccaagagcggcagaagcgcccaccaggtggccagatacagacccagagcccccatcatcgccgtgaccagaaacccccagaccgccagacaggcccacctgtacagaggcatcttccccgtgctgtgcaaggaccccgtgcaggaggcctgggccgaggacgtggacctgagagtgaacttcgccatgaacgtgggcaaggccagaggcttcttcaagaagggcgacgtggtgatcgtgctgaccggctggagacccggcagcggcttcaccaacaccatgagagtggtgcccgtgccctag

SEQ ID NO: 95991 - DNA, 1551 bp, synthetic construct
  misc_feature 1..1551: note = Description of Artificial Sequence: Synthetic coding sequence
  source 1..1551: mol_type = other DNA
atgagccccgaggcccagccccagagaaccaagggcccccagcagccctgcagaagccccatcgtgaagcccggcctgcccagcttcagacccagcagctgcacccagccctggctgacccacagctggagcacctgcgccgcctggaccctgatccaccaccccagccagcccggcaccctggccagcagcgtgcccctgtaccacgccgagaccatcaagaacgtgagaaccgccaccgagagcttcgccagcgaccccatcctgtacagacccgtggccgtggccctggacaccaagggccccgagatcagaaccggcctgatcaagggcagcggcaccgccgaggtggagctgaagaagggcgccaccctgaagatcaccctggacaacgcctacatggagaagtgcgacgagaacatcctgtggctggactacaagaacatctgcaaggtggtggaggtgggcagcaagatctacgtggacgacggcctgatcagcctgcaggtgaagcagaagggcgccgacttcctggtgaccgaggtggagaacggcggcagcctgggcagcaagaagggcgtgaacctgcccggcgccgccgtggacctgcccgccgtgagcgagaaggacatccaggacctgaagttcggcgtggagcaggacgtggacatggtgttcgccagcttcatcagaaaggccagcgacgtgcacgaggtgagaaaggtgctgggcgagaagggcaagaacatcaagatcatcagcaagatcgagaaccacgagggcgtgagaagattcgacgagatcctggaggccagcgacggcatcatggtggccagaggcgacctgggcatcgagatccccgccgagaaggtgttcctggcccagaagatgatgatcggcagatgcaacagagccggcaagcccgtgatctgcgccacccagatgctggagagcatgatcaagaagcccagacccaccagagccgagggcagcgacgtggccaacgccgtgctggacggcgccgactgcatcatgctgagcggcgagaccgccaagggcgactaccccctggaggccgtgagaatgcagcacctgatcgccagagaggccgaggccgccatctaccacctgcagctgttcgaggagctgagaagactggcccccatcaccagcgaccccaccgaggccaccgccgtgggcgccgtggaggccagcttcaagtgctgcagcggcgccatcatcgtgctgaccaagagcggcagaagcgcccaccaggtggccagatacagacccagagcccccatcatcgccgtgaccagaaacccccagaccgccagacaggcccacctgtacagaggcatcttccccgtgctgtgcaaggaccccgtgcaggaggcctgggccgaggacgtggacctgagagtgaacttcgccatgaacgtgggcaaggccagaggcttcttcaagaagggcgacgtggtgatcgtgctgaccggctggagacccggcagcggcttcaccaacaccatgagagtggtgcccgtgccctag

SEQ ID NO: 95992 - DNA, 1212 bp, synthetic construct
  misc_feature 1..1212: note = Description of Artificial Sequence: Synthetic coding sequence
  source 1..1212: mol_type = other DNA
atggccggcgccgccacccaggccagcctggagagcgcccccagaatcatgagactggtggccgagtgcagcagaagcagagccagagccggcgagctgtggctgccccacggcaccgtggccacccccgtgttcatgcccgtgggcacccaggccaccatgaagggcatcaccaccgagcagctggacgccctgggctgcagaatctgcctgggcaacacctaccacctgggcctgagacccggccccgagctgatccagaaggccaacggcctgcacggcttcatgaactggccccacaacctgctgaccgacagcggcggcttccagatggtgagcctggtgagcctgagcgaggtgaccgaggagggcgtgagattcagaagcccctacgacggcaacgagaccctgctgagccccgagaagagcgtgcagatccagaacgccctgggcagcgacatcatcatgcagctggacgacgtggtgagcagcaccgtgaccggccccagagtggaggaggccatgtacagaagcatcagatggctggacagatgcatcgccgcccaccagagacccgacaagcagaacctgttcgccatcatccagggcggcctggacgccgacctgagagccacctgcctggaggagatgaccaagagagacgtgcccggcttcgccatcggcggcctgagcggcggcgagagcaagagccagttctggagaatggtggccctgagcaccagcagactgcccaaggacaagcccagatacctgatgggcgtgggctacgccaccgacctggtggtgtgcgtggccctgggctgcgacatgttcgactgcgtgttccccaccagaaccgccagattcggcagcgccctggtgcccaccggcaacctgcagctgagaaagaaggtgttcgagaaggacttcggccccatcgaccccgagtgcacctgccccacctgccagaagcacagcagagccttcctgcacgccctgctgcacagcgacaacaccgccgccctgcaccacctgaccgtgcacaacatcgcctaccagctgcagctgatgagcgccgtgagaaccagcatcgtggagaagagattccccgacttcgtgagagacttcatgggcgccatgtacggcgaccccaccctgtgccccacctgggccaccgacgccctggccagcgtgggcatcaccctgggctag

SEQ ID NO: 95993 - DNA, 678 bp, synthetic construct
  misc_feature 1..678: note = Description of Artificial Sequence: Synthetic coding sequence
  source 1..678: mol_type = other DNA
atggccggcgccgccacccaggccagcctggagagcgcccccagaatcatgagactggtggccgagtgcagcagaagcagagccagagccggcgagctgtggctgccccacggcaccgtggccacccccgtgttcatgcccgtgggcacccaggccaccatgaagggcatcaccaccgagcagctggacgccctgggctgcagaatctgcctgggcaacacctaccacctgggcctgagacccggccccgagctgatccagaaggccaacggcctgcacggcttcatgaactggccccacaacctgctgaccgacagcggcggcttccagatggtgagcctggtgagcctgagcgaggtgaccgaggagggcgtgagattcagaagcccctacgacggcaacgagaccctgctgagccccgagaagagcgtgcagatccagaacgccctgggcagcgacatcatcatgcagctggacgacgtggtgagcagcaccgtgaccggccccagagtggaggaggccatgtacagacccctgggcctggtgaccggcgccctgctgcaggtgaaccccctggccggccccgtgcactgcagccccagcgccgccggccaggccgagcccctgagacactaccccggctgggccggcagaagaagccccggccacctgccctag

SEQ ID NO: 95994 - DNA, 2097 bp, synthetic construct
  misc_feature 1..2097: note = Description of Artificial Sequence: Synthetic coding sequence
  source 1..2097: mol_type = other DNA
atggccgccgccggcgccgccgtggccagaagccccggcatcggcgccggccccgccctgagagccagaagaagccccccccccagagccgccagactgcccagactgctggtgctgctggccgccgccgccgtgggccccggcgccggcggcgccgccagactgtacagagccggcgaggacgccgtgtgggtgctggacagcggcagcgtgagaggcgccaccgccaacagcagcgccgcctggctggtgcagttctacagcagctggtgcggccactgcatcggctacgcccccacctggagagccctggccggcgacgtgagagactgggccagcgccatcagagtggccgccctggactgcatggaggagaagaaccaggccgtgtgccacgactacgacatccacttctaccccaccttcagatacttcaaggccttcaccaaggagttcaccaccggcgagaacttcaagggccccgacagagagctgagaaccgtgagacagaccatgatcgacttcctgcagaaccacaccgagggcagcagaccccccgcctgccccagactggaccccatccagcccagcgacgtgctgagcctgctggacaacagaggcagccactacgtggccatcgtgttcgagagcaacagcagctacctgggcagagaggtgatcctggacctgatcccctacgagagcatcgtggtgaccagagccctggacggcgacaaggccttcctggagaagctgggcgtgagcagcgtgcccagctgctacctgatctaccccaacggcagccacggcctgatcaacgtggtgaagcccctgagagccttcttcagcagctacctgaagagcctgcccgacgtgagaaagaagagcctgcccctgcccgagaagccccacaaggaggagaacagcgagatcgtggtgtggagagagttcgacaagagcaagctgtacaccgtggacctggagagcggcctgcactacctgctgagagtggagctggccgcccacaagagcctggccggcgccgagctgaagaccctgaaggacttcgtgaccgtgctggccaagctgttccccggcagaccccccgtgaagaagctgctggagatgctgcaggagtggctggccagcctgcccctggacagaatcccctacaacgccgtgctggacctggtgaacaacaagatgagaatcagcggcatcttcctgaccaaccacatcaagtgggtgggctgccagggcagcagaagcgagctgagaggctacccctgcagcctgtggaagctgttccacaccctgaccgtggaggccagcacccaccccgacgccctggtgggcaccggcttcgaggacgacccccaggccgtgctgcagaccatgagaagatacgtgcacaccttcttcggctgcaaggagtgcggcgagcacttcgaggagatggccaaggagagcatggacagcgtgaagacccccgaccaggccatcctgtggctgtggaagaagcacaacatggtgaacggcagactggccggccacctgagcgaggaccccagattccccaagctgcagtggcccacccccgacctgtgccccgcctgccacgaggagatcaagggcctggccagctgggacgagggccacgtgctgaccttcctgaagcagcactacggcagagacaacctgctggacacctacagcgccgaccagggcgacagcagcgagggcggcaccctggccagaggcgaggaggaggagaagagactgaccccccccgaggtgagccacggcgacagagacacccagagcgtgagaccccccggcgccctgggccccagacccgccctgcccgagagcctgcaccacagcctggacggcaagctgcagagcctggacggccccggcgcccacaaggaggtgggcggcgccgcccccttcctgggcgtggacttcagcagcctggacatgagcctgtgcgtggtgctgtacgtggccagcagcctgttcctgatggtgatgtacttcttcttcagagtgagaagcagaagatggaaggtgaagcaccaccaccccgccgtgtag

SEQ ID NO: 95995 - DNA, 948 bp, synthetic construct
  misc_feature 1..948: note = Description of Artificial Sequence: Synthetic coding sequence
  source 1..948: mol_type = other DNA
atggaggagaagaaccaggccgtgtgccacgactacgacatccacttctaccccaccttcagatacttcaaggccttcaccaaggagttcaccaccggcgagaacttcaagggccccgacagagagctgagaaccgtgagacagaccatgatcgacttcctgcagaaccacaccgagggcagcagaccccccgcctgccccagactggaccccatccacgtgaagcccctgagagccttcttcagcagctacctgaagagcctgcccgacgtgagaaagaagagcctgcccctgcccgagaagccccacaaggaggagaacagcgagatcgtggtgtggagagagttcgacaagagcaagctgtacaccgtggacctggagagcggcctgcactacctgctgagagtggagctggccgcccacaagagcctggccggcgccgagctgaagaccctgaaggacttcgtgaccgtgctggccaagctgttccccggcagaccccccgtgaagaagctgctggagatgctgcaggagtggctggccagcctgcccctggacagaatcccctacaacgccgtgctggacctggtgaacaacaagatgagaatcagcggcatcttcctgaccaaccacatcaagtgggtgggctgccagggcagcagaagcgagctgagaggctacccctgcagcctgtggaagctgttccacaccctgaccgtggaggccagcacccaccccgacgccctggtgggcaccggcttcgaggacgacccccaggccgtgctgcagaccatgagaagatacgtgcacaccttcttcggctgcaaggagtgcggcgagcacttcgaggagatggccaaggagagcatggacagcgtgaagacccccgaccaggccatcctgtggctgtggaagaagcacaacatggtgaacggcagactggcctag

SEQ ID NO: 95996 - DNA, 735 bp, synthetic construct
  misc_feature 1..735: note = Description of Artificial Sequence: Synthetic coding sequence
  source 1..735: mol_type = other DNA
atggccgccgccgccgccgccggcgaggccagaagagtgctggtgtacggcggcagaggcgccctgggcagcagatgcgtgcaggccttcagagccagaaactggtgggtggccagcgtggacgtggtggagaacgaggaggccagcgccagcatcatcgtgaagatgaccgacagcttcaccgagcaggccgaccaggtgaccgccgaggtgggcaagctgctgggcgaggagaaggtggacgccatcctgtgcgtggccggcggctgggccggcggcaacgccaagagcaagagcctgttcaagaactgcgacctgatgtggaagcagagcatctggaccagcaccatcagcagccacctggccaccaagcacctgaaggagggcggcctgctgaccctggccggcgccaaggccgccctggacggcacccccggcatgatcggctacggcatggccaagggcgccgtgcaccagctgtgccagagcctggccggcaagaacagcggcatgccccccggcgccgccgccatcgccgtgctgcccgtgaccctggacacccccatgaacagaaagagcatgcccgaggccgacttcagcagctggacccccctggagttcctggtggagaccttccacgactggatcaccggcaagaacagacccagcagcggcagcctgatccaggtggtgaccaccgagggcagaaccgagctgacccccgcctacttctag

SEQ ID NO: 95997 - DNA, 681 bp, synthetic construct
  misc_feature 1..681: note = Description of Artificial Sequence: Synthetic coding sequence
  source 1..681: mol_type = other DNA
atggccgcccccctgctgcacaccagactgcccggcgacgccgccgccagccccagcgccgtgaagatgctgggcgccagcagaaccggcatcagcaacatgagagccctggagaacgacttcttcaacagcccccccagaaagaccgtgcagttcggcggcaccgtgaccgaggtgctgctgaagtacaagaccggcgagaccaacgacttcgagctgctgaagaaccagctgctggaccccgacatcaaggacgaccagatcatcaactggctgctggagttcagaagcagcatcatgtacctgaccaaggacttcgagcagctgatcagcatcatcctgagactgccctggctgaacagaagccagaccgtggtggaggagtacctggccttcctgggcaacctggtgagcgcccagaccgtgttcctgagaccctgcctgagcatgatcgccagccacttcgtgccccccagagtgatcatcaaggagggcgacgtggacgtgagcgacagcgacgacgaggacgacaacctgcccgccaacttcgacaccagccagagcctggccaacaacagcaagatctgcaccatcgacaccgtggtgagccacgccaacaccggcggcaagatcagcatctgcagcaagatcagagagaacaccggcatgctgagaagctag

SEQ ID NO: 95998 - DNA, 894 bp, synthetic construct
  misc_feature 1..894: note = Description of Artificial Sequence: Synthetic coding sequence
  source 1..894: mol_type = other DNA
atggacgccgagggcctggccctgctgctgccccccgtgaccctggccgccctggtggacagctggctgagagaggactgccccggcctgaactacgccgccctggtgagcggcgccggccccagccaggccgccctgtgggccaagagccccggcgtgctggccggccagcccttcttcgacgccatcttcacccagctgaactgccaggtgagctggttcctgcccgagggcagcaagctggtgcccgtggccagagtggccgaggtgagaggccccgcccactgcctgctgctgggcgagagagtggccctgaacaccctggccagatgcagcggcatcgccagcgccgccgccgccgccgtggaggccgccagaggcgccggctggaccggccacgtggccggcaccagaaagaccacccccggcttcagactggtggagaagtacggcctgctggtgggcggcgccgccagccacagatacgacctgggcggcctggtgatggtgaaggacaaccacgtggtggccgccggcggcgtggagaaggccgtgagagccgccagacaggccgccgacttcaccctgaaggtggaggtggagtgcagcagcctgcaggaggccgtgcaggccgccgaggccggcgccgacctggtgctgctggacaacttcaagcccgaggagctgcaccccaccgccaccgtgctgaaggcccagttccccagcgtggccgtggaggccagcggcggcatcaccctggacaacctgccccagttctgcggcccccacatcgacgtgatcagcatgggcatgctgacccaggccgcccccgccctggacttcagcctgaagctgttcgccaaggaggtggcccccgtgcccaagatccactag

SEQ ID NO: 95999 - DNA, 498 bp, synthetic construct
  misc_feature 1..498: note = Description of Artificial Sequence: Synthetic coding sequence
  source 1..498: mol_type = other DNA
atggacgccgagggcctggccctgctgctgccccccgtgaccctggccgccctggtggacagctggctgagagaggactgccccggcctgaactacgccgccctggtgagcggcgccggccccagccaggccgccctgtgggccaagagccccggcgtgctggccggccagcccttcttcgacgccatcttcacccagctgaactgccaggtgagctggttcctgcccgagggcagcaagctggtgcccgtggccagagtggccgaggtgagaggccccgcccactgcctgctgctgggcgagagagtggccctgaacaccctggccagatgcagcggcatcgccagcgccgccgccgccgccgtggaggccgccagaggcgccggctggaccggccacgtggccggcaccagaaagaccacccccggcttcagactggtggagaagtacggcctgctggtgggcggcgccgccagccacagatacgacctgggctag

SEQ ID NO: 96000 - DNA, 2154 bp, synthetic construct
  misc_feature 1..2154: note = Description of Artificial Sequence: Synthetic coding sequence
  source 1..2154: mol_type = other DNA
atggccgtggccgtgagaaccctgcaggagcagctggagaaggccaaggagagcctgaagaacgtggacgagaacatcagaaagctgaccggcagagaccccaacgacgtgagacccatccaggccagactgctggccctgagcggccccggcggcggcagaggcagaggcagcctgctgctgagaagaggcttcagcgacagcggcggcggcccccccgccaagcagagagacctggagggcgccgtgagcagactgggcggcgagagaagaaccagaagagagagcagacaggagagcgaccccgaggacgacgacgtgaagaagcccgccctgcagagcagcgtggtggccaccagcaaggagagaaccagaagagacctgatccaggaccagaacatggacgagaagggcaagcagagaaacagaagaatcttcggcctgctgatgggcaccctgcagaagttcaagcaggagagcaccgtggccaccgagagacagaagagaagacaggagatcgagcagaagctggaggtgcaggccgaggaggagagaaagcaggtggagaacgagagaagagagctgttcgaggagagaagagccaagcagaccgagctgagactgctggagcagaaggtggagctggcccagctgcaggaggagtggaacgagcacaacgccaagatcatcaagtacatcagaaccaagaccaagccccacctgttctacatccccggcagaatgtgccccgccacccagaagctgatcgaggagagccagagaaagatgaacgccctgttcgagggcagaagaatcgagttcgccgagcagatcaacaagatggaggccagacccagaagacagagcatgaaggagaaggagcaccaggtggtgagaaacgaggagcagaaggccgagcaggaggagggcaaggtggcccagagagaggaggagctggaggagaccggcaaccagcacaacgacgtggagatcgaggaggccggcgaggaggaggagaaggagatcgccatcgtgcacagcgacgccgagaaggagcaggaggaggaggagcagaagcaggagatggaggtgaagatggaggaggagaccgaggtgagagagagcgagaagcagcaggacagccagcccgaggaggtgatggacgtgctggagatggtggagaacgtgaagcacgtgatcgccgaccaggaggtgatggagaccaacagagtggagagcgtggagcccagcgagaacgaggccagcaaggagctggagcccgagatggagttcgagatcgagcccgacaaggagtgcaagaccctgagccccggcaaggagaacgtgagcgccctggacatggagaaggagagcgaggagaaggaggagaaggagagcgagccccagcccgagcccgtggcccagccccagccccagagccagccccagctgcagctgcagagccagagccagcccgtgctgcagagccagccccccagccagcccgaggacctgagcctggccgtgctgcagcccaccccccaggtgacccaggagcagggccacctgctgcccgagagaaaggacttccccgtggagagcgtgaagctgaccgaggtgcccgtggagcccgtgctgaccgtgcaccccgagagcaagagcaagaccaagaccagaagcagaagcagaggcagagccagaaacaagaccagcaagagcagaagcagaagcagcagcagcagcagcagcagcagcagcagcaccagcagcagcagcggcagcagcagcagcagcggcagcagcagcagcagaagcagcagcagcagcagcagcagcaccagcggcagcagcagcagagacagcagcagcagcaccagcagcagcagcgagagcagaagcagaagcagaggcagaggccacaacagagacagaaagcacagaagaagcgtggacagaaagagaagagacaccagcggcctggagagaagccacaagagcagcaagggcggcagcagcagagacaccaagggcagcaaggacaagaacagcagaagcgacagaaagagaagcatcagcgagagcagcagaagcggcaagagaagcagcagaagcgagagagacagaaagagcgacagaaaggacaagagaagatag

SEQ ID NO: 96001 - DNA, 1704 bp, synthetic construct; identical to SEQ ID NO: 78299
  misc_feature 1..1704: note = Description of Artificial Sequence: Synthetic coding sequence
  source 1..1704: mol_type = other DNA

SEQ ID NO: 96002 - DNA, 996 bp, synthetic construct
  misc_feature 1..996: note = Description of Artificial Sequence: Synthetic coding sequence
  source 1..996: mol_type = other DNA
atgggcaccccccagaaggacgtgatcatcaagagcgacgcccccgacaccctgctgctggagaagcacgccgactacatcgccagctacggcagcaagaaggacgactacgagtactgcatgagcgagtacctgagaatgagcggcatctactggggcctgaccgtgatggacctgatgggccagctgcacagaatgaacagagaggagatcctggccttcatcaagagctgccagcacgagtgcggcggcatcagcgccagcatcggccacgacccccacctgctgtacaccctgagcgccgtgcagatcctgaccctgtacgacagcatcaacgtgatcgacgtgaacaaggtggtggagtacgtgaagggcctgcagaaggaggacggcagcttcgccggcgacatctggggcgagatcgacaccagattcagcttctgcgccgtggccaccctggccctgctgggcaagctggacgccatcaacgtggagaaggccatcgagttcgtgctgagctgcatgaacttcgacggcggcttcggctgcagacccggcagcgagagccacgccggccagatctactgctgcaccggcttcctggccatcaccagccagctgcaccaggtgaacagcgacctgctgggctggtggctgtgcgagagacagctgcccagcggcggcctgaacggcagacccgagaagctgcccgacgtgtgctacagctggtgggtgctggccagcctgaagatcatcggcagactgcactggatcgacagagagaagctgagaaacttcatcctggcctgccaggacgaggagaccggcggcttcgccgacagacccggcgacatggtggaccccttccacaccctgttcggcatcgccggcctgagcctgctgggcgaggagcagatcaagcccgtgaaccccgtgttctgcatgcccgaggaggtgctgcagagagtgaacgtgcagcccgagctggtgagctag

SEQ ID NO: 96003 - DNA, 963 bp, synthetic construct
  misc_feature 1..963: note = Description of Artificial Sequence: Synthetic coding sequence
  source 1..963: mol_type = other DNA
atgggcaccccccagaaggacgtgatcatcaagagcgacgcccccgacaccctgctgctggagaagcacgccgactacatcgccagctacggcagcaagaaggacgactacgagtactgcatgagcgagtacctgagaatgagcggcatctactggggcctgaccgtgatggacctgatgggccagctgcacagaatgaacagagaggagatcctggccttcatcaagagctgccagcacgagtgcggcggcatcagcgccagcatcggccacgacccccacctgctgtacaccctgagcgccgtgcagatcctgaccctgtacgacagcatcaacgtgatcgacgtgaacaaggtggtggagtacgtgaagggcctgcagaaggaggacggcagcttcgccggcgacatctggggcgagatcgacaccagattcagcttctgcgccgtggccaccctggccctgctgggcaagctggacgccatcaacgtggagaaggccatcgagttcgtgctgagctgcatgaacttcgacggcggcttcggctgcagacccggcagcgagagccacgccggccagatctactgctgcaccggcttcctggccatcaccagccagctgcaccaggtgaacagcgacctgctgggctggtggctgtgcgagagacagctgcccagcggcggcctgaacggcagacccgagaagctgcccgacgtgtgctacagctggtgggtgctggccagcctgaagatcatcggcagactgcactggatcgacagagagaagctgagaaacttcatcctggcctgccaggacgaggagaccggcggcttcgccgacagacccggcgacatgcacttcatctaccagaactaccccaagaaggagctgagcagcaacaaggagaccctgaccgagagcctgctgcccagactggagagaagcagcaccatcagcgcctag

SEQ ID NO: 96004 - DNA, 459 bp, synthetic construct
  misc_feature 1..459: note = Description of Artificial Sequence: Synthetic coding sequence
  source 1..459: mol_type = other DNA
atgggcaccccccagaaggacgtgatcatcaagagcgacgcccccgacaccctgctgctggagaagcacgccgactacatcgccagctacggcagcaagaaggacgactacgagtactgcatgagcgagtacctgagaatgagcggcatctactggggcctgaccgtgatggacctgatgggccagctgcacagaatgaacagagaggagatcctggccttcatcaagagctgccagcacgagtgcggcggcatcagcgccagcatcggccacgacccccacctgctgtacaccctgagcgccgtgcagatcctgaccctgtacgacagcatcaacgtgatcgacgtgaacaaggtggtggagtacgtgaagggcctgcagaaggaggacggcagcttcgccggcgacatctggggcaacgtgagattcagccccttctaccccaagtaccagtactag

SEQ ID NO: 96005 - DNA, 474 bp, synthetic construct
  misc_feature 1..474: note = Description of Artificial Sequence: Synthetic coding sequence
  source 1..474: mol_type = other DNA
atgaacttcgacggcggcttcggctgcagacccggcagcgagagccacgccggccagatctactgctgcaccggcttcctggccatcaccagccagctgcaccaggtgaacagcgacctgctgggctggtggctgtgcgagagacagctgcccagcggcggcctgaacggcagacccgagaagctgcccgacgtgtgctacagctggtgggtgctggccagcctgaagatcatcggcagactgcactggatcgacagagagaagctgagaaacttcatcctggcctgccaggacgaggagaccggcggcttcgccgacagacccggcgacatggtggaccccttccacaccctgttcggcatcgccggcctgagcctgctgggcgaggagcagatcaagcccgtgaaccccgtgttctgcatgcccgaggaggtgctgcagagagtgaacgtgcagcccgagctggtgagctag

SEQ ID NO: 96006 - DNA, 1476 bp, synthetic construct; identical to SEQ ID NO: 93963
  misc_feature 1..1476: note = Description of Artificial Sequence: Synthetic coding sequence
  source 1..1476: mol_type = other DNA

SEQ ID NO: 96007 - DNA, 1518 bp, synthetic construct
  misc_feature 1..1518: note = Description of Artificial Sequence: Synthetic coding sequence
  source 1..1518: mol_type = other DNA
atgatggccagcagctaccacgaggtggtgagcagaaagaagatgagcctgaagagcgagagaagaggcatccacgtggaccagagcgacctgctgtgcaagaagggctgcggctactacggcaaccccgcctggcagggcttctgcagcaagtgctggagagaggagtaccacaaggccagacagaagcagatccaggaggactgggagctggccgagagactgcagagagaggaggaggaggccttcgccagcagccagagcagccagggcgcccagagcctgaccttcagcaagttcgaggagaagaagaccaacgagaagaccagaaaggtgaccaccgtgaagaagttcttcagcgccagcagcagagtgggcagcaagaaggagatccaggaggccaaggcccccagccccagcatcaacagacagaccagcatcgagaccgacagagtgagcaaggagttcatcgagttcctgaagaccttccacaagaccggccaggagatctacaagcagaccaagctgttcctggagggcatgcactacaagagagacctgagcatcgaggagcagagcgagtgcgcccaggacttctaccacaacgtggccgagagaatgcagaccagaggcaaggtgccccccgagagagtggagaagatcatggaccagatcgagaagtacatcatgaccagactgtacaagtacgtgttctgccccgagaccaccgacgacgagaagaaggacctggccatccagaagagaatcagagccctgagatgggtgaccccccagatgctgtgcgtgcccgtgaacgaggacatccccgaggtgagcgacatggtggtgaaggccatcaccgacatcatcgagatggacagcaagagagtgcccagagacaagctggcctgcatcaccaagtgcagcaagcacatcttcaacgccatcaagatcaccaagaacgagcccgccagcgccgacgacttcctgcccaccctgatctacatcgtgctgaagggcaacccccccagactgcagagcaacatccagtacatcaccagattctgcaaccccagcagactgatgaccggcgaggacggctactacttcaccaacctgtgctgcgccgtggccttcatcgagaagctggacgcccagagcctgaacctgagccaggaggacttcgacagatacatgagcggccagaccagccccagaaagcaggaggccgagagctggagccccgacgcctgcctgggcgtgaagcagatgtacaagaacctggacctgctgagccagctgaacgagagacaggagagaatcatgaacgaggccaagaagctggagaaggacctgatcgactggaccgacggcatcgccagagaggtgcaggacatcgtggagaagtaccccctggagatcaagccccccaaccagcccctggccgccatcgacagcgagaacgtggagaacgacaagctgcccccccccctgcagccccaggtgtacgccggctag

SEQ ID NO: 96008 - DNA, 138 bp, synthetic construct
  misc_feature 1..138: note = Description of Artificial Sequence: Synthetic coding sequence
  source 1..138: mol_type = other DNA
atgagcctgaagagcgagagaagaggcatccacgtggaccagagcgacctgctgtgcaagaagggctgcggctactacggcaaccccgcctggcagggcttctgcagcaagtgctggagagaggagtaccacaagtag

SEQ ID NO: 96009 - DNA, 1476 bp, synthetic construct; identical to SEQ ID NO: 93963
  misc_feature 1..1476: note = Description of Artificial Sequence: Synthetic coding sequence
  source 1..1476: mol_type = other DNA

SEQ ID NO: 96010 - DNA, 372 bp, synthetic construct
  misc_feature 1..372: note = Description of Artificial Sequence: Synthetic coding sequence
  source 1..372: mol_type = other DNA
atggagcccgccgagcagcccagcgagctggtgagcgccgagggcagaaacagaaaggccgtgctgtgccagagatgcggcagcagagtgctgcagcccggcaccgccctgttcagcagaagacagctgttcctgcccagcatgagaaagaagcccgccctgagcgacggcagcaaccccgacggcgacctgctgcaggagcactggctggtggaggacatgttcatcttcgagaacgtgggcttcaccaaggacgtgggcaacatcaagttcctggtgtgcgccgactgcgagatcggccccatcggctggcactgcctggacgacaagaacagcttctacgtggccctggagagagtgagccacgagtag

SEQ ID NO: 96011 - DNA, 1206 bp, synthetic construct
  misc_feature 1..1206: note = Description of Artificial Sequence: Synthetic coding sequence
  source 1..1206: mol_type = other DNA
atggagcccagaagagccgcccccggcgtgcccggctggggcagcagagaggccgccggcagcgccagcgccgccgagctggtgtaccacctggccggcgccctgggcaccgagctgcaggacctggccagaagattcggccccgaggccgccgccggcctggtgcccctggtggtgagagccctggagctgctggagcaggccgccgtgggccccgcccccgacagcctgcaggtgagcgcccagcccgccgagcaggagctgagaagactgagagaggagaacgagagactgagaagagagctgagagccggcccccaggaggagagagccctgctgagacagctgaaggaggtgaccgacagacagagagacgagctgagagcccacaacagagacctgagacagagaggccaggagaccgaggccctgcaggagcagctgcagagactgctgctggtgaacgccgagctgagacacaagctggccgccatgcagacccagctgagagccgcccaggacagagagagagagagacagcagcccggcgaggccgccaccccccaggccaaggagagagccagaggccaggccggcagacccggccaccagcacggccaggagcccgagtgggccaccgccggcgccggcgcccccggcaaccccgaggaccccgccgaggccgcccagcagctgggcagacccagcgaggccggccagtgcagattcagcagagaggagttcgagcagatcctgcaggagagaaacgagctgaaggccaaggtgttcctgctgaaggaggagctggcctacttccagagagagctgctgaccgaccacagagtgcccggcctgctgctggaggccatgaaggtggccgtgagaaagcagagaaagaagatcaaggccaagatgctgggcacccccgaggaggccgagagcagcgaggacgaggccggcccctggatcctgctgagcgacgacaagggcgaccacccccccccccccgagagcaagatccagagcttcttcggcctgtggtacagaggcaaggccgagagcagcgaggacgagaccagcagccccgcccccagcaagctgggcggcgaggaggaggcccagccccagagccccgcccccgaccccccctgcagcgccctgcacgagcacctgtgcctgggcgccagcgccgcccccgaggcctag

SEQ ID NO: 96012 - DNA, 1212 bp, synthetic construct
  misc_feature 1..1212: note = Description of Artificial Sequence: Synthetic coding sequence
  source 1..1212: mol_type = other DNA
atggaggaggagagaggcagcgccctggccgccgagagcgccctggagaagaacgtggccgagctgaccgtgatggacgtgtacgacatcgccagcctggtgggccacgagttcgagagagtgatcgaccagcacggctgcgaggccatcgccagactgatgcccaaggtggtgagagtgctggagatcctggaggtgctggtgagcagacaccacgtggcccccgagctggacgagctgagactggagctggacagactgagactggagagaatggacagaatcgagaaggagagaaagcaccagaaggagctggagctggtggaggacgtgtggagaggcgaggcccaggacctgctgagccagatcgcccagctgcaggaggagaacaagcagctgatgaccaacctgagccacaaggacgtgaacttcagcgaggaggagttccagaagcacgagggcatgagcgagagagagagacaggtgatgaagaagctgaaggaggtggtggacaagcagagagacgagatcagagccaaggacagagagctgggcctgaagaacgaggacgtggaggccctgcagcagcagcagaccagactgatgaagatcaaccacgacctgagacacagagtgaccgtggtggaggcccagggcaaggccctgatcgagcagaaggtggagctggaggccgacctgcagaccaaggagcaggagatgggcagcctgagagccgagctgggcaagctgagagagagactgcagggcgagcacagccagaacggcgaggaggagcccgagaccgagcccgtgggcgaggagagcatcagcgacgccgagaaggtggccatggacctgaaggaccccaacagacccagattcaccctgcaggagctgagagacgtgctgcacgagagaaacgagctgaagagcaaggtgttcctgctgcaggaggagctggcctactacaagagcgaggagatggaggaggagaacagaatcccccagcccccccccatcgcccaccccagaaccagcccccagcccgagagcggcatcaagagactgttcagcttcttcagcagagacaagaagagactggccaacacccagagaaacgtgcacatccaggagagcttcggccagtgggccaacacccacagagacgacggctacaccgagcagggccaggaggccctgcagcacctgtag

SEQ ID NO: 96013 - DNA, 636 bp, synthetic construct
  misc_feature 1..636: note = Description of Artificial Sequence: Synthetic coding sequence
  source 1..636: mol_type = other DNA
atggaggagccccccgtgagagaggaggaggaggaggagggcgaggaggacgaggagagagacgaggtgggccccgagggcgccctgggcaagagccccttccagctgaccgccgaggacgtgtacgacatcagctacctgctgggcagagagctgatggccctgggcagcgaccccagagtgacccagctgcagttcaaggtggtgagagtgctggagatgctggaggccctggtgaacgagggcagcctggccctggaggagctgaagatggagagagaccacctgagaaaggaggtggagggcctgagaagacagagcccccccgccagcggcgaggtgaacctgggccccaacaagatggtggtggacctgaccgaccccaacagacccagattcaccctgcaggagctgagagacgtgctgcaggagagaaacaagctgaagagccagctgctggtggtgcaggaggagctgcagtgctacaagagcggcctgatcccccccagagagggccccggcggcagaagagagaaggacgccgtggtgaccagcgccaagaacgccggcagaaacaaggaggagaagaccatcatcaagaagctgttcttcttcagaagcggcaagcagacctag

SEQ ID NO: 96014 - DNA, 717 bp, synthetic construct
  misc_feature 1..717: note = Description of Artificial Sequence: Synthetic coding sequence
  source 1..717: mol_type = other DNA
atggccgaggacaagaccaagcccagcgagctggaccagggcaagtacgacgccgacgacaacgtgaagatcatctgcctgggcgacagcgccgtgggcaagagcaagctgatggagagattcctgatggacggcttccagccccagcagctgagcacctacgccctgaccctgtacaagcacaccgccaccgtggacggcagaaccatcctggtggacttctgggacaccgccggccaggagagattccagagcatgcacgccagctactaccacaaggcccacgcctgcatcatggtgttcgacgtgcagagaaaggtgacctacagaaacctgagcacctggtacaccgagctgagagagttcagacccgagatcccctgcatcgtggtggccaacaagatcgacgacatcaacgtgacccagaagagcttcaacttcgccaagaagttcagcctgcccctgtacttcgtgagcgccgccgacggcaccaacgtggtgaaggtgtggctgaccgccgaggtggccagcaagctgttcaacgacgccatcagactggccgtgagctacaagcagaacagccaggacttcatggacgagatcttccaggagctggagaacttcagcctggagcaggaggaggaggacgtgcccgaccaggagcagagcagcagcatcgagacccccagcgaggaggccgccagcccccacagctag

SEQ ID NO: 96015 - DNA, 498 bp, synthetic construct
  misc_feature 1..498: note = Description of Artificial Sequence: Synthetic coding sequence
  source 1..498: mol_type = other DNA
atggccgaggacaagaccaagcccagcgagctggaccagggcaagtacgacgccgacgacaacgtgaagatcatctgcctgggcgacagcgccgtgggcaagagcaagctgatggagagattcctgatggacggcttccagccccagcagctgagcacctacgccctgaccctgtacaagcacaccgccaccgtggacggcaagaccatcctggtggccgacatcaacgtgacccagaagagcttcaacttcgccaagaagttcagcctgcccctgtacttcgtgagcgccgccgacggcaccaacgtggtgaagctgttcaacgacgccatcagactggccgtgagctacaagcagaacagccaggacttcatggacgagatcttccaggagctggagaacttcagcctggagcaggaggaggaggacgtgcccgaccaggagcagagcagcagcatcgagacccccagcgaggaggtggccagcccccacagctag

SEQ ID NO: 96016 - DNA, 690 bp, synthetic construct
  misc_feature 1..690: note = Description of Artificial Sequence: Synthetic coding sequence
  source 1..690: mol_type = other DNA
atggccgaggacaagaccaagcccagcgagctggaccagggcaagtacgacgccgacgacaacgtgaagatcatctgcctgggcgacagcgccgtgggcaagagcaagctgatggagagattcctgatggacggcttccagccccagcagctgagcacctacgccctgaccctgtacaagcacaccgccaccgtggacggcaagaccatcctggtggacttctgggacaccgccggccaggagagattccagagcatgcacgccagctactaccacaaggcccacgcctgcatcatggtgttcgacatccagagaaaggtgacctacagaaacctgagcacctggtacaccgagctgagagagttcagacccgagatcccctgcatcgtggtggccaacaagatcgacgccgacatcaacgtgacccagaagagcttcaacttcgccaagaagttcagcctgcccctgtacttcgtgagcgccgccgacggcaccaacgtggtgaagctgttcaacgacgccatcagactggccgtgagctacaagcagaacagccaggacttcatggacgagatcttccaggagctggagaacttcagcctggagcaggaggaggaggacgtgcccgaccaggagcagagcagcagcatcgagacccccagcgaggaggtggccagcccccacagctag

SEQ ID NO: 96017 - DNA, 687 bp, synthetic construct
  misc_feature 1..687: note = Description of Artificial Sequence: Synthetic coding sequence
  source 1..687: mol_type = other DNA
atggccgaggacaagaccaagcccagcgagctggaccagggcaagtacgacgccgacgacaacgtgaagatcatctgcctgggcgacagcgccgtgggcaagagcaagctgatggagagattcctgatggacggcttccagccccagcagctgagcacctacgccctgaccctgtacaagcacaccgccaccgtggacggcaagaccatcctggtggacttctgggacaccgccggccaggagagattccagagcatgcacgccagctactaccacaaggcccacgcctgcatcatggtgttcgacatccagagaaaggtgacctacagaaacctgagcacctggtacaccgagctgagagagttcagacccgagatcccctgcatcgtggtggccaacaagatcgacgacatcaacgtgacccagaagagcttcaacttcgccaagaagttcagcctgcccctgtacttcgtgagcgccgccgacggcaccaacgtggtgaagctgttcaacgacgccatcagactggccgtgagctacaagcagaacagccaggacttcatggacgagatcttccaggagctggagaacttcagcctggagcaggaggaggaggacgtgcccgaccaggagcagagcagcagcatcgagacccccagcgaggaggtggccagcccccacagctag

SEQ ID NO: 96018 - DNA, 687 bp, synthetic construct; identical to SEQ ID NO: 96017
  misc_feature 1..687: note = Description of Artificial Sequence: Synthetic coding sequence
  source 1..687: mol_type = other DNA

SEQ ID NO: 96019 - DNA, 717 bp, synthetic construct
  misc_feature 1..717: note = Description of Artificial Sequence: Synthetic coding sequence
  source 1..717: mol_type = other DNA
atggccgaggacaagaccaagcccagcgagctggaccagggcaagtacgacgccgacgacaacgtgaagatcatctgcctgggcgacagcgccgtgggcaagagcaagctgatggagagattcctgatggacggcttccagccccagcagctgagcacctacgccctgaccctgtacaagcacaccgccaccgtggacggcaagaccatcctggtggacttctgggacaccgccggccaggagagattccagagcatgcacgccagctactaccacaaggcccacgcctgcatcatggtgttcgacatccagagaaaggtgacctacagaaacctgagcacctggtacaccgagctgagagagttcagacccgagatcccctgcatcgtggtggccaacaagatcgacgacatcaacgtgacccagaagagcttcaacttcgccaagaagttcagcctgcccctgtacttcgtgagcgccgccgacggcaccaacgtggtgaaggtgtggctgaccgccgaggtggccagcaagctgttcaacgacgccatcagactggccgtgagctacaagcagaacagccaggacttcatggacgagatcttccaggagctggagaacttcagcctggagcaggaggaggaggacgtgcccgaccaggagcagagcagcagcatcgagacccccagcgaggaggtggccagcccccacagctag

SEQ ID NO: 96020 - DNA, 345 bp, synthetic construct
  misc_feature 1..345: note = Description of Artificial Sequence: Synthetic coding sequence
  source 1..345: mol_type = other DNA
atggccgaggacaagaccaagcccagcgagctggaccagggcaagtacgacgccgacgacaacgtgaagatcatctgcctgggcgacagcgccgtgggcaagagcaagctgatggagagattcctgatggacggcttccagccccagcagctgagcacctacgccctgaccctgtacaagcacaccgccaccgtggacggcaagaccatcctggtggacttctgggacaccgccggccaggagagattccagagcatgcacgccagctactaccacaaggcccacgcctgcatcatggtgttcgacatccagagaaaggtgacctacagaaacctgagcacctag

SEQ ID NO: 96021 - DNA, 306 bp, synthetic construct
  misc_feature 1..306: note = Description of Artificial Sequence: Synthetic coding sequence
  source 1..306: mol_type = other DNA
atggccgaggacaagaccaagcccagcgagctggaccagggcaagtacgacgccgacgacaacgtgaagatcatctgcctgggcgacagcgccgtgggcaagagcaagctgatggagagattcctgatggacggcttccagccccagcagctgagcacctacgccctgaccctgtacaagcacaccgccaccgtggacggcaagaccatcctggtggacttctgggacaccgccggccaggagagattccagagcatgcacgccagctactaccacaaggcccacgcctgcatcatgcagacctag

SEQ ID NO: 96022 - DNA, 690 bp, synthetic construct
  misc_feature 1..690: note = Description of Artificial Sequence: Synthetic coding sequence
  source 1..690: mol_type = other DNA
atggccgaggacaagaccaagcccagcgagctggaccagggcaagtacgacgccgacgacaacgtgaagatcatctgcctgggcgacagcgccgtgggcaagagcaagctgatggagagattcctgatggacggcttccagccccagcagctgagcacctacgccctgaccctgtacaagcacaccgccaccgtggacggcagaaccatcctggtggacttctgggacaccgccggccaggagagattccagagcatgcacgccagctactaccacaaggcccacgcctgcatcatggtgttcgacgtgcagagaaaggtgacctacagaaacctgagcacctggtacaccgagctgagagagttcagacccgagatcccctgcatcgtggtggccaacaagatcgacgccgacatcaacgtgacccagaagagcttcaacttcgccaagaagttcagcctgcccctgtacttcgtgagcgccgccgacggcaccaacgtggtgaagctgttcaacgacgccatcagactggccgtgagctacaagcagaacagccaggacttcatggacgagatcttccaggagctggagaacttcagcctggagcaggaggaggaggacgtgcccgaccaggagcagagcagcagcatcgagacccccagcgaggaggccgccagcccccacagctag

SEQ ID NO: 96023 - DNA, 690 bp, synthetic construct; identical to SEQ ID NO: 96022
  misc_feature 1..690: note = Description of Artificial Sequence: Synthetic coding sequence
  source 1..690: mol_type = other DNA

SEQ ID NO: 96024 - DNA, 687 bp, synthetic construct
  misc_feature 1..687: note = Description of Artificial Sequence: Synthetic coding sequence
  source 1..687: mol_type = other DNA
atggccgaggacaagaccaagcccagcgagctggaccagggcaagtacgacgccgacgacaacgtgaagatcatctgcctgggcgacagcgccgtgggcaagagcaagctgatggagagattcctgatggacggcttccagccccagcagctgagcacctacgccctgaccctgtacaagcacaccgccaccgtggacggcagaaccatcctggtggacttctgggacaccgccggccaggagagattccagagcatgcacgccagctactaccacaaggcccacgcctgcatcatggtgttcgacgtgcagagaaaggtgacctacagaaacctgagcacctggtacaccgagctgagagagttcagacccgagatcccctgcatcgtggtggccaacaagatcgacgacatcaacgtgacccagaagagcttcaacttcgccaagaagttcagcctgcccctgtacttcgtgagcgccgccgacggcaccaacgtggtgaagctgttcaacgacgccatcagactggccgtgagctacaagcagaacagccaggacttcatggacgagatcttccaggagctggagaacttcagcctggagcaggaggaggaggacgtgcccgaccaggagcagagcagcagcatcgagacccccagcgaggaggccgccagcccccacagctag

SEQ ID NO: 96025 - DNA, 63 bp, synthetic construct
  misc_feature 1..63: note = Description of Artificial Sequence: Synthetic coding sequence
  source 1..63: mol_type = other DNA
atggccgaggacaagaccaagcccagcgagctggaccagggcaagtacgacgccgacgactag

SEQ ID NO: 96026 - DNA, 687 bp, synthetic construct; identical to SEQ ID NO: 96024
  misc_feature 1..687: note = Description of Artificial Sequence: Synthetic coding sequence
  source 1..687: mol_type = other DNA

SEQ ID NO: 96027 - DNA, 603 bp, synthetic construct
  misc_feature 1..603: note = Description of Artificial Sequence: Synthetic coding sequence
  source 1..603: mol_type = other DNA
atggccaagaagacctacgacctgctgttcaagctgctgctgatcggcgacagcggcgtgggcaagacctgcgtgctgttcagattcagcgacgacgccttcaacaccaccttcatcagcaccatcggcatcgacttcaagatcaagaccgtggagctgcagggcaagaagatcaagctgcagatctgggacaccgccggccaggagagattccacaccatcaccaccagctactacagaggcgccatgggcatcatgctggtgtacgacatcaccaacggcaagagcttcgagaacatcagcaagtggctgagaaacatcgacgagcacgccaacgaggacgtggagagaatgctgctgggcaacaagtgcgacatggacgacaagagagtggtgcccaagggcaagggcgagcagatcgccagagagcacggcatcagattcttcgagaccagcgccaaggccaacatcaacatcgagaaggccttcctgaccctggccgaggacatcctgagaaagacccccgtgaaggagcccaacagcgagaacgtggacatcagcagcggcggcggcgtgaccggctggaagagcaagtgctgctag

SEQ ID NO: 96028 - DNA, 1950 bp, synthetic construct
  misc_feature 1..1950: note = Description of Artificial Sequence: Synthetic coding sequence
  source 1..1950: mol_type = other DNA
atgagcctgatggtgagcgccggcagaggcctgggcgccgtgtggagccccacccacgtgcaggtgaccgtgctgcaggccagaggcctgagagccaagggccccggcggcaccagcgacgcctacgccgtgatccaggtgggcaaggagaagtacgccaccagcgtgagcgagagaagcctgggcgcccccgtgtggagagaggaggccaccttcgagctgcccagcctgctgagcagcggccccgccgccgccgccaccctgcagctgaccgtgctgcacagagccctgctgggcctggacaagttcctgggcagagccgaggtggacctgagagacctgcacagagaccagggcagaagaaagacccagtggtacaagctgaagagcaagcccggcaagaaggacaaggagagaggcgagatcgaggtggacatccagttcatgagaaacaacatgaccgccagcatgttcgacctgagcatgaaggacaagagcagaaaccccttcggcaagctgaaggacaagatcaagggcaagaacaaggacagcggcagcgacaccgccagcgccatcatccccagcaccacccccagcgtggacagcgacgacgagagcgtggtgaaggacaagaagaagaagagcaagatcaagaccctgctgagcaagagcaacctgcagaagacccccctgagccagagcatgagcgtgctgcccaccagcaagcccgagaaggtgctgctgagacccggcgacttccagagccagtgggacgaggacgacaacgaggacgagagcagcagcgccagcgacgtgatgagccacaagagaaccgccagcaccgacctgaagcagctgaaccaggtgaacttcaccctgcccaagaaggagggcctgagcttcctgggcggcctgagaagcaagaacgacgtgctgagcagaagcaacgtgtgcatcaacggcaaccacgtgtacctggagcagcccgaggccaagggcgagatcaaggacagcagccccagcagcagccccagccccaagggcttcagaaagaagcacctgttcagcagcaccgagaacctggccgccggcagctggaaggagcccgccgagggcggcggcctgagcagcgacagacagctgagcgagagcagcaccaaggacagcctgaagagcatgaccctgcccagctacagacccgcccccctggtgagcggcgacctgagagagaacatggcccccgccaacagcgaggccaccaaggaggccaaggagagcaagaagcccgagagcagaagaagcagcctgctgagcctgatgaccggcaagaaggacgtggccaagggcagcgagggcgagaaccccctgaccgtgcccggcagagagaaggagggcatgctgatgggcgtgaagcccggcgaggacgccagcggccccgccgaggacctggtgagaagaagcgagaaggacaccgccgccgtggtgagcagacagggcagcagcctgaacctgttcgaggacgtgcagatcaccgagcccgaggccgagcccgagagcaagagcgagcccagaccccccatcagcagccccagagccccccagaccagagccgtgaagcccagactgcaccccgtgaagcccatgaacgccatggccaccaaggtggccaactgcagcctgggcaccgccaccatcatcagcgagaacctgaacaacgaggtgatgatgaagaagtacagccccagcgaccccgccttcgcctacgcccagctgacccacgacgagctgatccagctggtgctgaagcagaaggagaccatcagcaagaaggagttccaggtgagagagctggaggactacatcgacaacctgctggtgagagtgatggaggagacccccaacatcctgagaatccccacccaggtgggcaagaaggccggcaagatgtag

SEQ ID NO: 96029 - DNA, 3852 bp, synthetic construct
  misc_feature 1..3852: note = Description of Artificial Sequence: Synthetic coding sequence
  source 1..3852: mol_type = other DNA
atgagcctgatggtgagcgccggcagaggcctgggcgccgtgtggagccccacccacgtgcaggtgaccgtgctgcaggccagaggcctgagagccaagggccccggcggcaccagcgacgcctacgccgtgatccaggtgggcaaggagaagtacgccaccagcgtgagcgagagaagcctgggcgcccccgtgtggagagaggaggccaccttcgagctgcccagcctgctgagcagcggccccgccgccgccgccaccctgcagctgaccgtgctgcacagagccctgctgggcctggacaagttcctgggcagagccgaggtggacctgagagacctgcacagagaccagggcagaagaaagacccagtggtacaagctgaagagcaagcccggcaagaaggacaaggagagaggcgagatcgaggtggacatccagttcatgagaaacaacatgaccgccagcatgttcgacctgagcatgaaggacaagagcagaaaccccttcggcaagctgaaggacaagatcaagggcaagaacaaggacagcggcagcgacaccgccagcgccatcatccccagcaccacccccagcgtggacagcgacgacgagagcgtggtgaaggacaagaagaagaagagcaagatcaagaccctgctgagcaagagcaacctgcagaagacccccctgagccagagcatgagcgtgctgcccaccagcaagcccgagaaggtgctgctgagacccggcgacttccagagccagtgggacgaggacgacaacgaggacgagagcagcagcgccagcgacgtgatgagccacaagagaaccgccagcaccgacctgaagcagctgaaccaggtgaacttcaccctgcccaagaaggagggcctgagcttcctgggcggcctgagaagcaagaacgacgtgctgagcagaagcaacgtgtgcatcaacggcaaccacgtgtacctggagcagcccgaggccaagggcgagatcaaggacagcagccccagcagcagccccagccccaagggcttcagaaagaagcacctgttcagcagcaccgagaacctggccgccggcagctggaaggagcccgccgagggcggcggcctgagcagcgacagacagctgagcgagagcagcaccaaggacagcctgaagagcatgaccctgcccagctacagacccgcccccctggtgagcggcgacctgagagagaacatggcccccgccaacagcgaggccaccaaggaggccaaggagagcaagaagcccgagagcagaagaagcagcctgctgagcctgatgaccggcaagaaggacgtggccaagggcagcgagggcgagaaccccctgaccgtgcccggcagagagaaggagggcatgctgatgggcgtgaagcccggcgaggacgccagcggccccgccgaggacctggtgagaagaagcgagaaggacaccgccgccgtggtgagcagacagggcagcagcctgaacctgttcgaggacgtgcagatcaccgagcccgaggccgagcccgagagcaagagcgagcccagaccccccatcagcagccccagagccccccagaccagagccgtgaagcccagactggaggtgagccccgaggcccagcccaccgccagactgcccagccccaccgacagccccagcagcctgccccccctgcccagcagcagcggccaggccagcgtgcccagcgagctgggccacggcgccgacacccagagcagcgagagccccagcgtgttcagcagcctgagcagccccatcgccgcccccatcagcaccagcacccccatcgagagctggcccctggtggacagaggccaggccaagagcgagggcccccccctgctgcccaaggccgagctgcagaccgagagcctgacccccgtgcccaacagcggcagcagcgccctgggcagcctgttcaagcagcccagcttccccgccaacaagggcaccgaggacagcctgatgggcagaaccagagagaccggcaccgagaagaacaccagcagcctggagctggaggagagcctgcccgagcagcccgagaccggcagacaggaggaggagctgcccagattcccctgcaagaagcaggactacagccccagcagcggcgaggcccaggaggtgcccttcgccctgagcctgagcagcgacggcgccgtgagccccgtgggcgagctggccgccggcggcgacagagacctggagagccaggccggcagcctggtggagagcaaggccagagacgccgccgaggaggtggccccccccctgcccatgggcgccagcgtgcccagcatcgacagcatgatgagaaagctggaggagatgggcctgaacctgagaaaggaccagaagaagaccaagaagagagtgagcttcagcgagcagctgttcaccgaggaggccgtggccggcgccgccctgctggtggagggccacagcagctgcccccaggagctgaaccccgcctggagcgtggccggcaacgccagcgacggcgagccccccgagagcccccacgccgaggacagcgagagagagagcgtgaccacccccggccccgccacctgcggcgcccccgccagccccgccgaccacctgctgctgcccagccaggaggagagcttcagcgaggtgcccatgagcgaggccagcagcgccaaggacacccccctgttcagaatggagggcgaggacgccctggtgacccagtaccagagcaaggccagcgaccacgagggcctgctgagcgaccccctgagcgacctgcagctggtgagcgacttcaagagccccatcatggccgacctgaacctgagcctgcccagcatccccgaggtggccagcgacgacgagagaatcgaccaggtggaggacgacggcgaccaggtggaggacgacggcgagaccgccaagagcagcaccctggacatcggcgccctgagcctgggcctggtggtgccctgccccgagagaggcaagggccccagcggcgaggccgacagactggtgctgggcgagggcctgtgcgacttcagactgcaggccccccaggccagcgtgaccgcccccagcgagcagaccaccgagttcggcatccacaagccccacctgggcaagagcagcagcctggacaagcagctgcccggccccagcggcggcgaggaggagaagcccatgggcaacggcagccccagccccccccccggcaccagcctggacaaccccgtgcccagccccagccccagcgagatcttccccgtgacccacagcttccccagcagcgcccacagcgacacccaccacaccagcaccgccgagagccagaagaaggccaccgccgagggcagcgccggcagagtggagaacttcggcaagagaaagcccctgctgcaggcctgggtgagccccagcgagacccaccccgtgagcgcccagcccggcgccggcaccggcagcgccaagcacagactgcaccccgtgaagcccatgaacgccatggccaccaaggtggccaactgcagcctgggcaccgccaccatcatcagcgagaacctgaacaacgaggtgatgatgaagaagtacagccccagcgaccccgccttcgcctacgcccagctgacccacgacgagctgatccagctggtgctgaagcagaaggagaccatcagcaagaaggagttccaggtgagagagctggaggactacatcgacaacctgctggtgagagtgatggaggagacccccaacatcctgagaatccccacccaggtgggcaagaaggccggcaagatgtag

SEQ ID NO: 96030 - DNA, 429 bp, synthetic construct
  misc_feature 1..429: note = Description of Artificial Sequence: Synthetic coding sequence
  source 1..429: mol_type = other DNA
atgagcctgatggtgagcgccggcagaggcctgggcgccgtgtggagccccacccacgtgcaggtgaccgtgctgcaggccagaggcctgagagccaagggccccggcggcaccagcgacgcctacgccgtgatccaggtgggcaaggagaagtacgccaccagcgtgagcgagagaagcctgggcgcccccgtgtggagagaggaggccaccttcgagctgcccagcctgctgagcagcggccccgccgccgccgccaccctgcagctgaccgtgctgcacagagccctgctgggcctggacaagttcctgggcagagccgaggtggacctgagagacctgcacagagacctgggcaagagcttcttcaagaccctgaagaagagagcctgggccatcttcctgagactgtgcctgaagaagaactag

SEQ ID NO: 96031 - DNA, 1320 bp, synthetic construct
  misc_feature 1..1320: note = Description of Artificial Sequence: Synthetic coding sequence
  source 1..1320: mol_type = other DNA
atgagaaacaacatgaccgccagcatgttcgacctgagcatgaaggacaagagcagaaaccccttcggcaagctgaaggacaagatcaagggcaagaacaaggacagcggcagcgacaccgccagcgccatcatccccagcaccacccccagcgtggacagcgacgacgagagcgtggtgaaggacaagaagaagaagagcaagatcaagaccctgctgagcaagagcaacctgcagaagacccccctgagccagagcatgagcgtgctgcccaccagcaagcccgagaaggtgctgctgagacccggcgacttccagagccagtgggacgaggacgacaacgaggacgagagcagcagcgccagcgacgtgatgagccacaagagaaccgccagcaccgacctgaagcagctgaaccaggtgaacttcaccctgcccaagaaggagggcctgagcttcctgggcggcctgagaagcaagaacgacgtgctgagcagaagcaacgtgtgcatcaacggcaaccacgtgtacctggagcagcccgaggccaagggcgagatcaaggacagcagccccagcagcagccccagccccaagggcttcagaaagaagcacctgttcagcagcaccgagaacctggccgccggcagctggaaggagcccgccgagggcggcggcctgagcagcgacagacagctgagcgagagcagcaccaaggacagcctgaagagcatgaccctgcccagctacagacccgcccccctggtgagcggcgacctgagagagaacatggcccccgccaacagcgaggccaccaaggaggccaaggagagcaagaagcccgagagcagaagaagcagcctgctgagcctgatgaccggcaagaaggacgtggccaagggcagcgagggcgagaaccccctgaccgtgcccggcagagagaaggagggcatgctgatgggcgtgaagcccggcgaggacgccagcggccccgccgaggacctggtgagaagaagcgagaaggacaccgccgccgtggtgagcagacagggcagcagcctgaacctgttcgaggacgtgcagatcaccgagcccgaggccgagcccgagagcaagagcgagcccagaccccccatcagcagccccagagccccccagaccagagccgtgaagcccagactgcaccccgtgaagcccatgaacgccatggccaccaaggtggccaactgcagcctgggcaccgccaccatcatcagcgagaacctgaacaacgaggtgatgatgaaggtgtgccccctgagaagctggtgcgtgagatag

SEQ ID NO: 96032 - DNA, 1539 bp, synthetic construct
  misc_feature 1..1539: note = Description of Artificial Sequence: Synthetic coding sequence
  source 1..1539: mol_type = other DNA
atgatgctgagcgagcaggcccagaagtggttccccacccacgtgcaggtgaccgtgctgcaggccaaggacctgaagcccaagggcaagagcggcaccaacgacacctacaccatcatccagctgggcaaggagaagtacagcaccagcgtggccgagaagaccctggagcccgtgtggaaggaggaggccagcttcgagctgcccggcctgctgatccagggcagccccgagaagtacatcctgttcctgatcgtgatgcacagaagcctggtgggcctggacaagttcctgggccaggtggccatcaacctgaacgacatcttcgaggacaagcagagaagaaagaccgagtggttcagactggagagcaagcagggcaagagaatcaagaacagaggcgagatcaaggtgaacatccagttcatgagaaacaacatgaccgccagcatgttcgacctgagcatgaaggacaagaccagaagccccttcgccaagctgaaggacaagatgaagggcagaaagaacgacggcaccttcagcgacaccagcagcgccatcatccccagcacccacatgcccgacgccaacagcgagttcagcagcggcgagatccagatgaagagcaagcccaagaagcccttcctgctgggcccccagagactgagcagcgcccacagcatgagcgacctgagcggcagccacatgagcagcgagaagctgaaggccggcaccatcggccagacccacctgctgggccaccagctggacagcttcggcaccgtgcccgagagcggcagcctgaagagcccccacagaagaaccctgagcttcgacaccagcaagatgaaccagcccgacagcatcgtggacgagggcgagctgtgcttcggcagacagaacgaccccttcaccaacgtgaccgccagcctgccccagaagttcgccaccctgcccagaaagaagaaccccttcgaggagagcagcgagacctgggacagcagcatgaacctgttcagcaagcccatcgagatcagaaaggagaacaagagagagaagagagagaaggtgagcctgttcgagagagtgaccggcaagaaggacagcagaagaagcgacaagctgaacaacggcggcagcgacagcccctgcgacctgaagagccccaacgccttcagcgagaacagacaggactacttcgactacgagagcaccaaccccttcaccgccaagttcagagccagcaacatcatgcccagcagcagcttccacatgagccccaccagcaacgaggacctgagaaagatccccgacagcaaccccttcgacgccaccgccggctacagaagcctgacctacgaggaggtgctgcaggagctggtgaagcacaaggagctgctgagaagaaaggacacccacatcagagagctggaggactacatcgacaacctgctggtgagagtgatggaggagacccccagcatcctgagagtgccctacgagcccagcagaaaggccggcaagttcagcaacagctag

SEQ ID NO: 96033 - DNA, 1599 bp, synthetic construct
  misc_feature 1..1599: note = Description of Artificial Sequence: Synthetic coding sequence
  source 1..1599: mol_type = other DNA
atgatgctgagcgagcaggcccagaagtggttccccacccacgtgcaggtgaccgtgctgcaggccaaggacctgaagcccaagggcaagagcggcaccaacgacacctacaccatcatccagctgggcaaggagaagtacagcaccagcgtggccgagaagaccctggagcccgtgtggaaggaggaggccagcttcgagctgcccggcctgctgatccagggcagccccgagaagtacatcctgttcctgatcgtgatgcacagaagcctggtgggcctggacaagttcctgggccaggtggccatcaacctgaacgacatcttcgaggacaagcagagaagaaagaccgagtggttcagactggagagcaagcagggcaagagaatcaagaacagaggcgagatcaaggtgaacatccagttcatgagaaacaacatgaccgccagcatgttcgacctgagcatgaaggacaagaccagaagccccttcgccaagctgaaggacaagatgaagggcagaaagaacgacggcaccttcagcgacaccagcagcgccatcatccccagcacccacatgcccgacgccaacagcgagttcagcagcggcgagatccagatgaagagcaagcccaagaagcccttcctgctgggcccccagagactgagcagcgcccacagcatgagcgacctgagcggcagccacatgagcagcgagaagctgaaggccggcaccatcggccagacccacctgctgggccaccagctggacagcttcggcaccgtgcccgagagcggcagcctgaagagcccccacagaagaaccctgagcttcgacaccagcaagatgaaccagcccgacagcatcgtggacgagggcgagctgtgcttcggcagacagaacgaccccttcaccaacgtgaccgccagcctgccccagaagttcgccaccctgcccagaaagaagaaccccttcgaggagagcagcgagacctgggacagcagcatgaacctgttcagcaagcccatcgagatcagaaaggagaacaagagagagaagagagagaaggtgagcctgttcgagagagtgaccggcaagaaggacagcagaagaagcgacaagctgaacaacggcggcagcgacagcccctgcgacctgaagagccccaacgccttcagcgagaacagacaggactacttcgactacgagagcaccaaccccttcaccgccaagttcagagccagcaacatcatgcccagcagcagaaacaccctgctgacccccgccgtggccgagtggagaggcagcctgagatgggccgagctgttccacatgagccccaccagcaacgaggacctgagaaagatccccgacagcaaccccttcgacgccaccgccggctacagaagcctgacctacgaggaggtgctgcaggagctggtgaagcacaaggagctgctgagaagaaaggacacccacatcagagagctggaggactacatcgacaacctgctggtgagagtgatggaggagacccccagcatcctgagagtgccctacgagcccagcagaaaggccggcaagttcagcaacagctag

SEQ ID NO: 96034 - DNA, 2271 bp, synthetic construct
  misc_feature 1..2271: note = Description of Artificial Sequence: Synthetic coding sequence
  source 1..2271: mol_type = other DNA
atggccagcgccccccccgccagcccccccggcagcgagccccccggccccgaccccgagcccggcggccccgacggccccggcgccgcccagctggcccccggccccgccgagctgagactgggcgcccccgtgggcggccccgacccccagagccccggcctggacgagcccgcccccggcgccgccgccgacggcggcgccagatggagcgccggccccgcccccggcctggagggcggccccagagaccccggccccagcgcccccccccccagaagcggccccagaggccagctggccagccccgacgcccccggccccggccccagaagcgaggcccccctgcccgagctggaccccctgttcagctggaccgaggagcccgaggagtgcggccccgccagctgccccgagagcgcccccttcagactgcagggcagcagcagcagccacagagccagaggcgaggtggacgtgttcagccccttccccgcccccaccgccggcgagctggccctggagcagggccccggcagccccccccagcccagcgacctgagccagacccaccccctgcccagcgagcccgtgggcagccaggaggacggccccagactgagagccgtgttcgacgccctggacggcgacggcgacggcttcgtgagaatcgaggacttcatccagttcgccaccgtgtacggcgccgagcaggtgaaggacctgaccaagtacctggaccccagcggcctgggcgtgatcagcttcgaggacttctaccagggcatcaccgccatcagaaacggcgaccccgacggccagtgctacggcggcgtggccagcgcccaggacgaggagcccctggcctgccccgacgagttcgacgacttcgtgacctacgaggccaacgaggtgaccgacagcgcctacatgggcagcgagagcacctacagcgagtgcgagaccttcaccgacgaggacaccagcaccctggtgcaccccgagctgcagcccgagggcgacgccgacagcgccggcggcagcgccgtgcccagcgagtgcctggacgccatggaggagcccgaccacggcgccctgctgctgctgcccggcagaccccacccccacggccagagcgtgatcaccgtgatcggcggcgaggagcacttcgaggactacggcgagggcagcgaggccgagctgagccccgagaccctgtgcaacggccagctgggctgcagcgaccccgccttcctgacccccagccccaccaagagactgagcagcaagaaggtggccagatacctgcaccagagcggcgccctgaccatggaggccctggaggaccccagccccgagctgatggagggccccgaggaggacatcgccgacaaggtggtgttcctggagagaagagtgctggagctggagaaggacaccgccgccaccggcgagcagcacagcagactgagacaggagaacctgcagctggtgcacagagccaacgccctggaggagcagctgaaggagcaggagctgagagcctgcgagatggtgctggaggagaccagaagacagaaggagctgctgtgcaagatggagagagagaagagcatcgagatcgagaacctgcagaccagactgcagcagctggacgaggagaacagcgagctgagaagctgcaccccctgcctgaaggccaacatcgagagactggaggaggagaagcagaagctgctggacgagatcgagagcctgaccctgagactgagcgaggagcaggagaacaagagaagaatgggcgacagactgagccacgagagacaccagttccagagagacaaggaggccacccaggagctgatcgaggacctgagaaagcagctggagcacctgcagctgctgaagctggaggccgagcagagaagaggcagaagcagcagcatgggcctgcaggagtaccacagcagagccagagagagcgagctggagcaggaggtgagaagactgaagcaggacaacagaaacctgaaggagcagaacgaggagctgaacggccagatcatcaccctgagcatccagggcgccaagagcctgttcagcaccgccttcagcgagagcctggccgccgagatcagcagcgtgagcagagacgagctgatggaggccatccagaagcaggaggagatcaacttcagactgcaggactacatcgacagaatcatcgtggccatcatggagaccaaccccagcatcctggaggtgaagtag

SEQ ID NO: 96035 - DNA, 1383 bp, synthetic construct
  misc_feature 1..1383: note = Description of Artificial Sequence: Synthetic coding sequence
  source 1..1383: mol_type = other DNA
atgagcctgctgagagccaacgaggtgaccgacagcgcctacatgggcagcgagagcacctacagcgagtgcgagaccttcaccgacgaggacaccagcaccctggtgcaccccgagctgcagcccgagggcgacgccgacagcgccggcggcagcgccgtgcccagcgagtgcctggacgccatggaggagcccgaccacggcgccctgctgctgctgcccggcagaccccacccccacggccagagcgtgatcaccgtgatcggcggcgaggagcacttcgaggactacggcgagggcagcgaggccgagctgagccccgagaccctgtgcaacggccagctgggctgcagcgaccccgccttcctgacccccagccccaccaagagactgagcagcaagaaggtggccagatacctgcaccagagcggcgccctgaccatggaggccctggaggaccccagccccgagctgatggagggccccgaggaggacatcgccgacaaggtggtgttcctggagagaagagtgctggagctggagaaggacaccgccgccaccggcgagcagcacagcagactgagacaggagaacctgcagctggtgcacagagccaacgccctggaggagcagctgaaggagcaggagctgagagcctgcgagatggtgctggaggagaccagaagacagaaggagctgctgtgcaagatggagagagagaagagcatcgagatcgagaacctgcagaccagactgcagcagctggacgaggagaacagcgagctgagaagctgcaccccctgcctgaaggccaacatcgagagactggaggaggagaagcagaagctgctggacgagatcgagagcctgaccctgagactgagcgaggagcaggagaacaagagaagaatgggcgacagactgagccacgagagacaccagttccagagagacaaggaggccacccaggagctgatcgaggacctgagaaagcagctggagcacctgcagctgctgaagctggaggccgagcagagaagaggcagaagcagcagcatgggcctgcaggagtaccacagcagagccagagagagcgagctggagcaggaggtgagaagactgaagcaggacaacagaaacctgaaggagcagaacgaggagctgaacggccagatcatcaccctgagcatccagggcgccaagagcctgttcagcaccgccttcagcgagagcctggccgccgagatcagcagcgtgagcagagacgagctgatggaggccatccagaagcaggaggagatcaacttcagactgcaggactacatcgacagaatcatcgtggccatcatggagaccaaccccagcatcctggaggtgaagtag

SEQ ID NO: 96036 - DNA, 1383 bp, synthetic construct
  misc_feature 1..1383: note = Description of Artificial Sequence: Synthetic coding sequence
  source 1..1383: mol_type = other DNA
atgcccttcctgaaggccaacgaggtgaccgacagcgcctacatgggcagcgagagcacctacagcgagtgcgagaccttcaccgacgaggacaccagcaccctggtgcaccccgagctgcagcccgagggcgacgccgacagcgccggcggcagcgccgtgcccagcgagtgcctggacgccatggaggagcccgaccacggcgccctgctgctgctgcccggcagaccccacccccacggccagagcgtgatcaccgtgatcggcggcgaggagcacttcgaggactacggcgagggcagcgaggccgagctgagccccgagaccctgtgcaacggccagctgggctgcagcgaccccgccttcctgacccccagccccaccaagagactgagcagcaagaaggtggccagatacctgcaccagagcggcgccctgaccatggaggccctggaggaccccagccccgagctgatggagggccccgaggaggacatcgccgacaaggtggtgttcctggagagaagagtgctggagctggagaaggacaccgccgccaccggcgagcagcacagcagactgagacaggagaacctgcagctggtgcacagagccaacgccctggaggagcagctgaaggagcaggagctgagagcctgcgagatggtgctggaggagaccagaagacagaaggagctgctgtgcaagatggagagagagaagagcatcgagatcgagaacctgcagaccagactgcagcagctggacgaggagaacagcgagctgagaagctgcaccccctgcctgaaggccaacatcgagagactggaggaggagaagcagaagctgctggacgagatcgagagcctgaccctgagactgagcgaggagcaggagaacaagagaagaatgggcgacagactgagccacgagagacaccagttccagagagacaaggaggccacccaggagctgatcgaggacctgagaaagcagctggagcacctgcagctgctgaagctggaggccgagcagagaagaggcagaagcagcagcatgggcctgcaggagtaccacagcagagccagagagagcgagctggagcaggaggtgagaagactgaagcaggacaacagaaacctgaaggagcagaacgaggagctgaacggccagatcatcaccctgagcatccagggcgccaagagcctgttcagcaccgccttcagcgagagcctggccgccgagatcagcagcgtgagcagagacgagctgatggaggccatccagaagcaggaggagatcaacttcagactgcaggactacatcgacagaatcatcgtggccatcatggagaccaaccccagcatcctggaggtgaagtag

SEQ ID NO: 96037 - DNA, 549 bp, synthetic construct
  misc_feature 1..549: note = Description of Artificial Sequence: Synthetic coding sequence
  source 1..549: mol_type = other DNA
atgggcagcgagagcacctacagcgagtgcgagaccttcaccgacgaggacaccagcaccctggtgcaccccgagctgcagcccgagggcgacgccgacagcgccggcggcagcgccgtgcccagcgagtgcctggacgccatggaggagcccgaccacggcgccctgctgctgctgcccggcagaccccacccccacggccagagcgtgatcaccgtgatcggcggcgaggagcacttcgaggactacggcgagggcagcgaggccgagctgagccccgagaccctgtgcaacggccagctgggctgcagcgaccccgccttcctgacccccagccccaccaagagactgagcagcaagaaggtggccagatacctgcaccagagcggcgccctgaccatggaggccctggaggaccccagccccgagctgatggagggccccgaggaggacatcgccgacaaggtggtgttcctggagagaagagtgctggagctggagaaggacaccgccgccaccggcgagcagcacagcagactgagacagtag

SEQ ID NO: 96038 - DNA, 2406 bp, synthetic construct
  misc_feature 1..2406: note = Description of Artificial Sequence: Synthetic coding sequence
  source 1..2406: mol_type = other DNA
atggccagcgccccccccgccagcccccccggcagcgagccccccggccccgaccccgagcccggcggccccgacggccccggcgccgcccagctggcccccggccccgccgagctgagactgggcgcccccgtgggcggccccgacccccagagccccggcctggacgagcccgcccccggcgccgccgccgacggcggcgccagatggagcgccggccccgcccccggcctggagggcggccccagagaccccggccccagcgcccccccccccagaagcggccccagaggccagctggccagccccgacgcccccggccccggccccagaagcgaggcccccctgcccgagctggaccccctgttcagctggaccgaggagcccgaggagtgcggccccgccagctgccccgagagcgcccccttcagactgcagggcagcagcagcagccacagagccagaggcgaggtggacgtgttcagccccttccccgcccccaccgccggcgagctggccctggagcagggccccggcagccccccccagcccagcgacctgagccagacccaccccctgcccagcgagcccgtgggcagccaggaggacggccccagactgagagccgtgttcgacgccctggacggcgacggcgacggcttcgtgagaatcgaggacttcatccagttcgccaccgtgtacggcgccgagcaggtgaaggacctgaccaagtacctggaccccagcggcctgggcgtgatcagcttcgaggacttctaccagggcatcaccgccatcagaaacggcgaccccgacggccagtgctacggcggcgtggccagcgcccaggacgaggagcccctggcctgccccgacgagttcgacgacttcgtgacctacgaggccaacgaggtgaccgacagcgcctacatgggcagcgagagcacctacagcgagtgcgagaccttcaccgacgaggacaccagcaccctggtgcaccccgagctgcagcccgagggcgacgccgacagcgccggcggcagcgccgtgcccagcgagtgcctggacgccatggaggagcccgaccacggcgccctgctgctgctgcccggcagaccccacccccacggccagagcgtgatcaccgtgatcggcggcgaggagcacttcgaggactacggcgagggcagcgaggccgagctgagccccgagaccctgtgcaacggccagctgggctgcagcgaccccgccttcctgacccccagcaccgaccccctggccgccaagctgcacagcatcctgaccgacgaggccttcgagttctactgcagccagtgccacaagcagatcaacagactggaggacctgagcgccagactgagcgacctggagatgaacagccccaccaagagactgagcagcaagaaggtggccagatacctgcaccagagcggcgccctgaccatggaggccctggaggaccccagccccgagctgatggagggccccgaggaggacatcgccgacaaggtggtgttcctggagagaagagtgctggagctggagaaggacaccgccgccaccggcgagcagcacagcagactgagacaggagaacctgcagctggtgcacagagccaacgccctggaggagcagctgaaggagcaggagctgagagcctgcgagatggtgctggaggagaccagaagacagaaggagctgctgtgcaagatggagagagagaagagcatcgagatcgagaacctgcagaccagactgcagcagctggacgaggagaacagcgagctgagaagctgcaccccctgcctgaaggccaacatcgagagactggaggaggagaagcagaagctgctggacgagatcgagagcctgaccctgagactgagcgaggagcaggagaacaagagaagaatgggcgacagactgagccacgagagacaccagttccagagagacaaggaggccacccaggagctgatcgaggacctgagaaagcagctggagcacctgcagctgctgaagctggaggccgagcagagaagaggcagaagcagcagcatgggcctgcaggagtaccacagcagagccagagagagcgagctggagcaggaggtgagaagactgaagcaggacaacagaaacctgaaggagcagaacgaggagctgaacggccagatcatcaccctgagcatccagggcgccaagagcctgttcagcaccgccttcagcgagagcctggccgccgagatcagcagcgtgagcagagacgagctgatggaggccatccagaagcaggaggagatcaacttcagactgcaggactacatcgacagaatcatcgtggccatcatggagaccaaccccagcatcctggaggtgaagtag

SEQ ID NO: 96039 - DNA, 1914 bp, synthetic construct
  misc_feature 1..1914: note = Description of Artificial Sequence: Synthetic coding sequence
  source 1..1914: mol_type = other DNA
atggccggcggcgccggctggagcggcgcccccgccgccctgctgagaagcgtgagaagactgagagaggtgttcgaggtgtgcggcagagaccccgacggcttcctgagagtggagagagtggccgccctgggcctgagattcggccagggcgaggaggtggagaagctggtgaagtacctggaccccaacgacctgggcagaatcaacttcaaggacttctgcagaggcgtgttcgccatgaagggctgcgaggagctgctgaaggacgtgctgagcgtggagagcgccggcaccctgccctgcgcccccgagatccccgactgcgtggagcagggcagcgaggtgaccggccccaccttcgccgacggcgagctgatccccagagagcccggcttcttccccgaggacgaggaggaggccatgaccctggccccccccgagggcccccaggagctgtacaccgacagccccatggagagcacccagagcctggagggcagcgtgggcagccccgccgagaaggacggcggcctgggcggcctgttcctgcccgaggacaagagcctggtgcacacccccagcatgaccaccagcgacctgagcacccacagcaccaccagcctgatcagcaacgaggagcagttcgaggactacggcgagggcgacgacgtggactgcgcccccagcagcccctgccccgacgacgagaccagaaccaacgtgtacagcgacctgggcagcagcgtgagcagcagcgccggccagacccccagaaagatgagacacgtgtacaacagcgagctgctggacgtgtactgcagccagtgctgcaagaagatcaacctgctgaacgacctggaggccagactgaagaacctgaaggccaacagccccaacagaaagatcagcagcaccgccttcggcagacagctgatgcacagcagcaacttcagcagcagcaacggcagcaccgaggacctgttcagagacagcatcgacagctgcgacaacgacatcaccgagaaggtgagcttcctggagaagaaggtgaccgagctggagaacgacagcctgaccaacggcgacctgaagagcaagctgaagcaggagaacacccagctggtgcacagagtgcacgagctggaggagatggtgaaggaccaggagaccaccgccgagcaggccctggaggaggaggccagaagacacagagaggcctacggcaagctggagagagagaaggccaccgaggtggagctgctgaacgccagagtgcagcagctggaggaggagaacaccgagctgagaaccaccgtgaccagactgaagagccagaccgagaagctggacgaggagagacagagaatgagcgacagactggaggacaccagcctgagactgaaggacgagatggacctgtacaagagaatgatggacaagctgagacagaacagactggagttccagaaggagagagaggccacccaggagctgatcgaggacctgagaaaggagctggagcacctgcagatgtacaagctggactgcgagagacccggcagaggcagaagcgccagcagcggcctgggcgagttcaacgccagagccagagaggtggagctggagcacgaggtgaagagactgaagcaggagaactacaagctgagagaccagaacgacgacctgaacggccagatcctgagcctgagcctgtacgaggccaagaacctgttcgccgcccagaccaaggcccagagcctggccgccgagatcgacaccgccagcagagacgagctgatggaggccctgaaggagcaggaggagatcaacttcagactgagacagtacatggacaagatcatcctggccatcctggaccacaaccccagcatcctggagatcaagcactag

SEQ ID NO: 96040 - DNA, 1914 bp, synthetic construct; identical to SEQ ID NO: 96039
  misc_feature 1..1914: note = Description of Artificial Sequence: Synthetic coding sequence
  source 1..1914: mol_type = other DNA

SEQ ID NO: 96041 - DNA, 651 bp, synthetic construct
  misc_feature 1..651: note = Description of Artificial Sequence: Synthetic coding sequence
  source 1..651: mol_type = other DNA
atgggcaccagagacgacgagtacgactacctgttcaaggtggtgctgatcggcgacagcggcgtgggcaagagcaacctgctgagcagattcaccagaaacgagttcaacctggagagcaagagcaccatcggcgtggagttcgccaccagaagcatccaggtggacggcaagaccatcaaggcccagatctgggacaccgccggccaggagagatacagagccatcaccagcgcctactacagaggcgccgtgggcgccctgctggtgtacgacatcgccaagcacctgacctacgagaacgtggagagatggctgaaggagctgagagaccacgccgacagcaacatcgtgatcatgctggtgggcaacaagagcgacctgagacacctgagagccgtgcccaccgacgaggccagagccttcgccgagaagaacggcctgagcttcatcgagaccagcgccctggacagcaccaacgtggaggccgccttccagaccatcctgaccgagatctacagaatcgtgagccagaagcagatgagcgacagaagagagaacgacatgagccccagcaacaacgtggtgcccatccacgtgccccccaccaccgagaacaagcccaaggtgcagtgctgccagaacatctag

SEQ ID NO: 96042 - DNA, 468 bp, synthetic construct
  misc_feature 1..468: note = Description of Artificial Sequence: Synthetic coding sequence
  source 1..468: mol_type = other DNA
atgggcaccagagacgacgagtacgactacctgttcaaggtggtgctgatcggcgacagcggcgtgggcaagagcaacctgctgagcagattcaccagaaacgagttcaacctggagagcaagagcaccatcggcgtggagttcgccaccagaagcatccaggtggacggcaagaccatcaaggcccagatctgggacaccgccggccaggagagatacagagccatcaccagcgcctactacagaggcgccgtgggcgccctgctggtgtacgacatcgccaagcacctgacctacgagaacgtggagagatggctgaaggagctgagagaccacgccgacagcaacatcgtgatcatgctggtgggcaacaagagcgacctgagacacctgagagccgtgcccaccgacgaggccagagccttcgccggctacaacaaggccaacgtgagacagaccagaaagtag

SEQ ID NO: 96043 - DNA, 612 bp, synthetic construct
  misc_feature 1..612: note = Description of Artificial Sequence: Synthetic coding sequence
  source 1..612: mol_type = other DNA
atggccaaggcctacgaccacctgttcaagctgctgctgatcggcgacagcggcgtgggcaagacctgcctgatcatcagattcgccgaggacaacttcaacaacacctacatcagcaccatcggcatcgacttcaagatcagaaccgtggacatcgagggcaagaagatcaagctgcaggtgtgggacaccgccggccaggagagattcaagaccatcaccaccgcctactacagaggcgccatgggcatcatcctggtgtacgacatcaccgacgagaagagcttcgagaacatccagaactggatgaagagcatcaaggagaacgccagcgccggcgtggagagactgctgctgggcaacaagtgcgacatggaggccaagagaaaggtgcagaaggagcaggccgacaagctggccagagagcacggcatcagattcttcgagaccagcgccaagagcagcatgaacgtggacgaggccttcagcagcctggccagagacatcctgctgaagagcggcggcagaagaagcggcaacggcaacaagccccccagcaccgacctgaagacctgcgacaagaagaacaccaacaagtgcagcctgggctag

SEQ ID NO: 96044 - DNA, 648 bp, synthetic construct
  misc_feature 1..648: note = Description of Artificial Sequence: Synthetic coding sequence
  source 1..648: mol_type = other DNA
atggccaccgccccctacaactacagctacatcttcaagtacatcatcatcggcgacatgggcgtgggcaagagctgcctgctgcaccagttcaccgagaagaagttcatggccgactgcccccacaccatcggcgtggagttcggcaccagaatcatcgaggtgagcggccagaagatcaagctgcagatctgggacaccgccggccaggagagattcagagccgtgaccagaagctactacagaggcgccgccggcgccctgatggtgtacgacatcaccagaagaagcacctacaaccacctgagcagctggctgaccgacgccagaaacctgaccaaccccaacaccgtgatcatcctgatcggcaacaaggccgacctggaggcccagagagacgtgacctacgaggaggccaagcagttcgccgaggagaacggcctgctgttcctggaggccagcgccaagaccggcgagaacgtggaggacgccttcctggaggccgccaagaagatctaccagaacatccaggacggcagcctggacctgaacgccgccgagagcggcgtgcagcacaagcccagcgccccccagggcggcagactgaccagcgagccccagccccagagagagggctgcggctgctag

SEQ ID NO: 96045 - DNA, 546 bp, synthetic construct
  misc_feature 1..546: note = Description of Artificial Sequence: Synthetic coding sequence
  source 1..546: mol_type = other DNA
atggccaccgccccctacaactacagctacatcttcaagtacatcatcatcggcgacatgggcgtgggcaagagctgcctgctgcaccagttcaccgagaagaagttcatggccgactgcccccacaccatcggcgtggagttcggcaccagaatcatcgaggtgagcggccagaagatcaagctgcagatctgggacaccgccggccaggagagattcagagccgtgaccagaagctactacagaggcgccgccggcgccctgatggtgtacgacatcaccagaagaagcacctacaaccacctgagcagctggctgaccgacgccagaaacctgaccaaccccaacaccgtgatcatcctgatcggcaacaaggccgacctggaggcccagagagacgtgacctacgaggaggccaagcagttcgccgaggagaacggcctgctgttcctggaggccagcgccaagaccggcgagaacgtggaggacgccttcctggaggccgccaagaagatctaccagaacatccaggacggcagcctgtag

SEQ ID NO: 96046 - DNA, 711 bp, synthetic construct
  misc_feature 1..711: note = Description of Artificial Sequence: Synthetic coding sequence
  source 1..711: mol_type = other DNA
atgggccagaaggccagccagcagctggccctgaaggacagcaaggaggtgcccgtggtgtgcgaggtggtgagcgaggccatcgtgcacgccgcccagaagctgaaggagtacctgggcttcgagtacccccccagcaagctgtgccccgccgccaacaccctgaacgagatcttcctgatccacttcatcaccttctgccaggagaagggcgtggacgagtggctgaccaccaccaagatgaccaagcaccaggccttcctgttcggcgccgactggatctggaccttctggggcagcaacaagcagatcaagctgcagctggccgtgcagaccctgcagatgagcagccccccccccgtggagagcaagccctgcgacctgagcaaccccgagagcagagtggaggagagcagctggaagaagagcagattcgacaagctggaggagttctgcaacctgatcggcgaggactgcctgggcctgttcatcatcttcggcatgcccggcaagcccaaggacatcagaggcgtggtgctggacagcgtgaagagccagatggtgagaagccacctgcccggcggcaaggccgtggcccagttcgtgctggagaccgaggactgcgtgttcatcaaggagctgctgagaaactgcctgagcaagaaggacggcctgagagaggtgggcaaggtgtacatcagcatcctgtag

SEQ ID NO: 96047 - DNA, 639 bp, synthetic construct
  misc_feature 1..639: note = Description of Artificial Sequence: Synthetic coding sequence
  source 1..639: mol_type = other DNA
atggcccaggcccacagaaccccccagcccagagccgcccccagccagcccagagtgttcaagctggtgctgctgggcagcggcagcgtgggcaagagcagcctggccctgagatacgtgaagaacgacttcaagagcatcctgcccaccgtgggctgcgccttcttcaccaaggtggtggacgtgggcgccaccagcctgaagctggagatctgggacaccgccggccaggagaagtaccacagcgtgtgccacctgtacttcagaggcgccaacgccgccctgctggtgtacgacatcaccagaaaggacagcttcctgaaggcccagcagtggctgaaggacctggaggaggagctgcaccccggcgaggtgctggtgatgctggtgggcaacaagaccgacctgagccaggagagagaggtgaccttccaggagggcaaggagttcgccgacagccagaagctgctgttcatggagaccagcgccaagctgaaccaccaggtgagcgaggtgttcaacaccgtggcccaggagctgctgcagagaagcgacgaggagggccaggccctgagaggcgacgccgccgtggccctgaacaagggccccgccagacaggccaagtgctgcgcccactag

SEQ ID NO: 96048 - DNA, 258 bp, synthetic construct
  misc_feature 1..258: note = Description of Artificial Sequence: Synthetic coding sequence
  source 1..258: mol_type = other DNA
atgctggtgggcaacaagaccgacctgagccaggagagagaggtgaccttccaggagggcaaggagttcgccgacagccagaagctgctgttcatggagaccagcgccaagctgaaccaccaggtgagcgaggtgttcaacaccgtggcccaggagctgctgcagagaagcgacgaggagggccaggccctgagaggcgacgccgccgtggccctgaacaagggccccgccagacaggccaagtgctgcgcccactag

SEQ ID NO: 96049 - DNA, 621 bp, synthetic construct
  misc_feature 1..621: note = Description of Artificial Sequence: Synthetic coding sequence
  source 1..621: mol_type = other DNA
atggacgaggacgtgctgaccaccctgaagatcctgatcatcggcgagagcggcgtgggcaagagcagcctgctgctgagattcaccgacgacaccttcgaccccgagctggccgccaccatcggcgtggacttcaaggtgaagaccatcagcgtggacggcaacaaggccaagctggccatctgggacaccgccggccaggagagattcagaaccctgacccccagctactacagaggcgcccagggcgtgatcctggtgtacgacgtgaccagaagagacaccttcgtgaagctggacaactggctgaacgagctggagacctactgcaccagaaacgacatcgtgaacatgctggtgggcaacaagatcgacaaggagaacagagaggtggacagaaacgagggcctgaagttcgccagaaagcacagcatgctgttcatcgaggccagcgccaagacctgcgacggcgtgcagtgcgccttcgaggagctggtggagaagatcatccagacccccggcctgtgggagagcgagaaccagaacaagggcgtgaagctgagccacagagaggagggccagggcggcggcgcctgcggcggctactgcagcgtgctgtag

SEQ ID NO: 96050 - DNA, 486 bp, synthetic construct
  misc_feature 1..486: note = Description of Artificial Sequence: Synthetic coding sequence
  source 1..486: mol_type = other DNA
atggacgaggacgtgctgaccaccctgaagatcctgatcatcggcgagagcggcgtgggcaagagcagcctgctgctgagattcaccgacgacaccttcgaccccgagctggccgccaccatcgtgtacgacgtgaccagaagagacaccttcgtgaagctggacaactggctgaacgagctggagacctactgcaccagaaacgacatcgtgaacatgctggtgggcaacaagatcgacaaggagaacagagaggtggacagaaacgagggcctgaagttcgccagaaagcacagcatgctgttcatcgaggccagcgccaagacctgcgacggcgtgcagtgcgccttcgaggagctggtggagaagatcatccagacccccggcctgtgggagagcgagaaccagaacaagggcgtgaagctgagccacagagaggagggccagggcggcggcgcctgcggcggctactgcagcgtgctgtag

SEQ ID NO: 96051 - DNA, 876 bp, synthetic construct
  misc_feature 1..876: note = Description of Artificial Sequence: Synthetic coding sequence
  source 1..876: mol_type = other DNA
tgaagactgcccggcagcagacccctgcccggccccagcagcctgggcagaagccccagctgcagcgccgagaagacccccttcagaggcccccccctgggcagacagagcgccgtgaaggagctggacctggtgaccgccggcaagttcagattcagcgtgagaagcgagtgcttcagcagaggcccccccctgaagatcaagtgcaactgctacttcagcttctgccacatcctgtggagacagaagatcagcgtggtgctgagcttcttcaccttcagcctgggcaagatcatcctgaccgtggagctgagcatcagcctgctgctgagattcaccgacgacaccttcgaccccgagctggccgccaccatcggcgtggacttcaaggtgaagaccatcagcgtggacggcaacaaggccaagctggccatctgggtgaccctgcaccagcagaccgccaacttcttcctgaagagccagatcggcaacagccccatcctgaagtgggccatgtggcagtacgacaccgccggccaggagagattcagaaccctgacccccagctactacagaggcgcccagggcgtgatcctggtgtacgacgtgaccagaagagacaccttcgtgaagctggacaactggctgaacgagctggagacctactgcaccagaaacgacatcgtgaacatgctggtgggcaacaagatcgacaaggagaacagagaggtggacagaaacgagggcctgaagttcgccagaaagcacagcatgctgttcatcgaggccagcgccaagacctgcgacggcgtgcagtgcgccttcgaggagctggtggagaagatcatccagacccccggcctgtgggagagctag

SEQ ID NO: 96052 - DNA, 429 bp, synthetic construct
  misc_feature 1..429: note = Description of Artificial Sequence: Synthetic coding sequence
  source 1..429: mol_type = other DNA
atggacgaggacgtgctgaccaccctgaagatcctgatcatcggcgagagcggcgtgggcaagagcagcctgctgctgagattcaccgacgacaccttcgaccccgagctggccgccaccatcggcgtggacttcaaggtgaagaccatcagcgtggacggcaacaaggccaagctggccatctgggagaacagagaggtggacagaaacgagggcctgaagttcgccagaaagcacagcatgctgttcatcgaggccagcgccaagacctgcgacggcgtgcagtgcgccttcgaggagctggtggagaagatcatccagacccccggcctgtgggagagcgagaaccagaacaagggcgtgaagctgagccacagagaggagggccagggcggcggcgcctgcggcggctactgcagcgtgctgtag

SEQ ID NO: 96053 - DNA, 555 bp, synthetic construct
  misc_feature 1..555: note = Description of Artificial Sequence: Synthetic coding sequence
  source 1..555: mol_type = other DNA
atggacgaggacgtgctgaccaccctgaagatcctgatcatcggcgagagcggcgtgggcaagagcagcctgctgctgagattcaccgacgacaccttcgaccccgagctggccgccaccgacaccgccggccaggagagattcagaaccctgacccccagctactacagaggcgcccagggcgtgatcctggtgtacgacgtgaccagaagagacaccttcgtgaagctggacaactggctgaacgagctggagacctactgcaccagaaacgacatcgtgaacatgctggtgggcaacaagatcgacaaggagaacagagaggtggacagaaacgagggcctgaagttcgccagaaagcacagcatgctgttcatcgaggccagcgccaagacctgcgacggcgtgcagtgcgccttcgaggagctggtggagaagatcatccagacccccggcctgtgggagagcgagaaccagaacaagggcgtgaagctgagccacagagaggagggccagggcggcggcgcctgcggcggctactgcagcgtgctgtag

SEQ ID NO: 96054 - DNA, 390 bp, synthetic construct
  misc_feature 1..390: note = Description of Artificial Sequence: Synthetic coding sequence
  source 1..390: mol_type = other DNA
atgagcagcatgaaccccgagtacgactacctgttcaagctgctgctgatcggcgacagcggcgtgggcaagagctgcctgctgctgagattcgccgacgacacctacaccgagagctacatcagcaccatcggcgtggacttcaagatcagaaccatcgagctggacggcaagaccatcaagctgcagatcgagttcgccgacagcctgggcatccccttcctggagaccagcgccaagaacgccaccaacgtggagcagagcttcatgaccatggccgccgagatcaagaagagaatgggccccggcgccaccgccggcggcgccgagaagagcaacgtgaagatccagagcacccccgtgaagcagagcggcggcggctgctgctag

SEQ ID NO: 96055 - DNA, 390 bp, synthetic construct
  misc_feature 1..390: note = Description of Artificial Sequence: Synthetic coding sequence
  source 1..390: mol_type = other DNA
atgagctgcctgcaccccaccagcgactacctgttcaagctgctgctgatcggcgacagcggcgtgggcaagagctgcctgctgctgagattcgccgacgacacctacaccgagagctacatcagcaccatcggcgtggacttcaagatcagaaccatcgagctggacggcaagaccatcaagctgcagatcgagttcgccgacagcctgggcatccccttcctggagaccagcgccaagaacgccaccaacgtggagcagagcttcatgaccatggccgccgagatcaagaagagaatgggccccggcgccaccgccggcggcgccgagaagagcaacgtgaagatccagagcacccccgtgaagcagagcggcggcggctgctgctag

SEQ ID NO: 96056 - DNA, 522 bp, synthetic construct
  misc_feature 1..522: note = Description of Artificial Sequence: Synthetic coding sequence
  source 1..522: mol_type = other DNA
atgagcagcatgaaccccgagtacgactacctgttcaagctgctgctgatcggcgacagcggcgtgggcaagagctgcctgctgctgagattcgccgacgacacctacaccgagagctacatcagcaccatcggcgtggacttcaagatcagaaccatcgagctggacggcaagaccatcaagctgcagatcgagagcttcaacaacgtgaagcagtggctgcaggagatcgacagatacgccagcgagaacgtgaacaagctgctggtgggcaacaagtgcgacctgaccaccaagaaggtggtggactacaccaccgccaaggagttcgccgacagcctgggcatccccttcctggagaccagcgccaagaacgccaccaacgtggagcagagcttcatgaccatggccgccgagatcaagaagagaatgggccccggcgccaccgccggcggcgccgagaagagcaacgtgaagatccagagcacccccgtgaagcagagcggcggcggctgctgctag

SEQ ID NO: 96057 - DNA, 522 bp, synthetic construct
  misc_feature 1..522: note = Description of Artificial Sequence: Synthetic coding sequence
  source 1..522: mol_type = other DNA
atgagcagcatgaaccccgagtacgactacctgttcaagctgctgctgatcggcgacagcggcgtgggcaagagctgcctgctgctgagattcgcctgggacaccgccggccaggagagattcagaaccatcaccagcagctactacagaggcgcccacggcatcatcgtggtgtacgacgtgaccgaccaggagagcttcaacaacgtgaagcagtggctgcaggagatcgacagatacgccagcgagaacgtgaacaagctgctggtgggcaacaagtgcgacctgaccaccaagaaggtggtggactacaccaccgccaaggagttcgccgacagcctgggcatccccttcctggagaccagcgccaagaacgccaccaacgtggagcagagcttcatgaccatggccgccgagatcaagaagagaatgggccccggcgccaccgccggcggcgccgagaagagcaacgtgaagatccagagcacccccgtgaagcagagcggcggcggctgctgctag

SEQ ID NO: 96058 - DNA, 618 bp, synthetic construct
  misc_feature 1..618: note = Description of Artificial Sequence: Synthetic coding sequence
  source 1..618: mol_type = other DNA
atgagcagcatgaaccccgagtacgactacctgttcaagctgctgctgatcggcgacagcggcgtgggcaagagctgcctgctgctgagattcgccgacgacacctacaccgagagctacatcagcaccatcggcgtggacttcaagatcagaaccatcgagctggacggcaagaccatcaagctgcagatctgggacaccgccggccaggagagattcagaaccatcaccagcagctactacagaggcgcccacggcatcatcgtggtgtacgacgtgaccgaccaggagagcttcaacaacgtgaagcagtggctgcaggagatcgacagatacgccagcgagaacgtgaacaagctgctggtgggcaacaagtgcgacctgaccaccaagaaggtggtggactacaccaccgccaaggagttcgccgacagcctgggcatccccttcctggagaccagcgccaagaacgccaccaacgtggagcagagcttcatgaccatggccgccgagatcaagaagagaatgggccccggcgccaccgccggcggcgccgagaagagcaacgtgaagatccagagcacccccgtgaagcagagcggcggcggctgctgctag

SEQ ID NO: 96059 - DNA, 426 bp, synthetic construct
  misc_feature 1..426: note = Description of Artificial Sequence: Synthetic coding sequence
  source 1..426: mol_type = other DNA
atgagcagcatgaaccccgagtacgactacctgttcaagctgctgctgatcggcgacagcggcgtgggcaagagctgcctgctgctgagattcgccgagagcttcaacaacgtgaagcagtggctgcaggagatcgacagatacgccagcgagaacgtgaacaagctgctggtgggcaacaagtgcgacctgaccaccaagaaggtggtggactacaccaccgccaaggagttcgccgacagcctgggcatccccttcctggagaccagcgccaagaacgccaccaacgtggagcagagcttcatgaccatggccgccgagatcaagaagagaatgggccccggcgccaccgccggcggcgccgagaagagcaacgtgaagatccagagcacccccgtgaagcagagcggcggcggctgctgctag

SEQ ID NO: 96060 - DNA, 606 bp, synthetic construct
  misc_feature 1..606: note = Description of Artificial Sequence: Synthetic coding sequence
  source 1..606: mol_type = other DNA
atgaaccccgagtacgactacctgttcaagctgctgctgatcggcgacagcggcgtgggcaagagctgcctgctgctgagattcgccgacgacacctacaccgagagctacatcagcaccatcggcgtggacttcaagatcagaaccatcgagctggacggcaagaccatcaagctgcagatctgggacaccgccggccaggagagattcagaaccatcaccagcagctactacagaggcgcccacggcatcatcgtggtgtacgacgtgaccgaccaggagagctacgccaacgtgaagcagtggctgcaggagatcgacagatacgccagcgagaacgtgaacaagctgctggtgggcaacaagagcgacctgaccaccaagaaggtggtggacaacaccaccgccaaggagttcgccgacagcctgggcatccccttcctggagaccagcgccaagaacgccaccaacgtggagcaggccttcatgaccatggccgccgagatcaagaagagaatgggccccggcgccgccagcggcggcgagagacccaacctgaagatcgacagcacccccgtgaagcccgccggcggcggctgctgctag

SEQ ID NO: 96061 - DNA, 489 bp, synthetic construct
  misc_feature 1..489: note = Description of Artificial Sequence: Synthetic coding sequence
  source 1..489: mol_type = other DNA
atgaaccccgagtacgactacctgttcaagctgctgctgatcggcgacagcggcgtgggcaagagctgcctgctgctgagattcgccgacgacacctacaccgagagctacatcagcaccatcggcgtggacttcaagatcagaaccatcgagctggacggcaagaccatcaagctgcagatctgggacaccgccggccaggagagattcagaaccatcaccagcagctactacagaggcgcccacggcatcatcgtggtgtacgacgtgaccgaccaggagagctacgccaacgtgaagcagggctgcagaagactgaccgccatgcccgccagaaccagcatcagcagctggtgggccaccagagccaccagcccccccagaagatggtggaccaccccccagcccagaagcctgcagaccctgtgggccagccccagctggagaagagcccccagaatgccccccatgagcagcagaagaagctag

SEQ ID NO: 96062 - DNA, 360 bp, synthetic construct
  misc_feature 1..360: note = Description of Artificial Sequence: Synthetic coding sequence
  source 1..360: mol_type = other DNA
atgaaccccgagtacgactacctgttcaagctgctgctgatcggcgacagcggcgtgggcaagagctgcctgctgctgagattcgccgacgacacctacaccgagagctacatcagcaccatcggcgtggacttcaagatcagaaccatcgagctggacggcaagaccatcaagctgcagatctgggacaccgccggccaggagagattcagaaccatcaccagcagctactacagaggcgcccacggcatcatcgtggtgtacgacgtgaccgaccaggagagctacgccaacgtgaagcagtggctgcaggagatcgacagatacgccagcgagaacgtgaacaagctgctggtgtag

SEQ ID NO: 96063 - DNA, 678 bp, synthetic construct
  misc_feature 1..678: note = Description of Artificial Sequence: Synthetic coding sequence
  source 1..678: mol_type = other DNA
atggccgccgccggcggcggcggcggcggcgccgccgccgccggcagagcctacagcttcaaggtggtgctgctgggcgagggctgcgtgggcaagaccagcctggtgctgagatactgcgagaacaagttcaacgacaagcacatcaccaccctgcaggccagcttcctgaccaagaagctgaacatcggcggcaagagagtgaacctggccatctgggacaccgccggccaggagagattccacgccctgggccccatctactacagagacagcaacggcgccatcctggtgtacgacatcaccgacgaggacagcttccagaaggtgaagaactgggtgaaggagctgagaaagatgctgggcaacgagatctgcctgtgcatcgtgggcaacaagatcgacctggagaaggagagacacgtgagcatccaggaggccgagagctacgccgagagcgtgggcgccaagcactaccacaccagcgccaagcagaacaagggcatcgaggagctgttcctggacctgtgcaagagaatgatcgagaccgcccaggtggacgagagagccaagggcaacggcagcagccagcccggcaccgccagaagaggcgtgcagatcatcgacgacgagccccaggcccagaccagcggcggcggctgctgcagcagcggctag

SEQ ID NO: 96064 - DNA, 585 bp, synthetic construct
  misc_feature 1..585: note = Description of Artificial Sequence: Synthetic coding sequence
  source 1..585: mol_type = other DNA
atggccctgagagagctgaaggtgtgcctgctgggcgacaccggcgtgggcaagagcagcatcgtgtggagattcgtggaggacagcttcgaccccaacatcaaccccaccatcggcgccagcttcatgaccaagaccgtgcagtaccagaacgagctgcacaagttcctgatctgggacaccgccggccaggagagattcagagccctggcccccatgtactacagaggcagcgccgccgccatcatcgtgtacgacatcaccaaggaggagaccttcagcaccctgaagaactgggtgaaggagctgagacagcacggcccccccaacatcgtggtggccatcgccggcaacaagtgcgacctgatcgacgtgagagaggtgatggagagagacgccaaggactacgccgacagcatccacgccatcttcgtggagaccagcgccaagaacgccatcaacatcaacgagctgttcatcgagatcagcagaagaatccccagcaccgacgccaacctgcccagcggcggcaagggcttcaagctgagaagacagcccagcgagcccaagagaagctgctgctag

SEQ ID NO: 96065 - DNA, 714 bp, synthetic construct
  misc_feature 1..714: note = Description of Artificial Sequence: Synthetic coding sequence
  source 1..714: mol_type = other DNA
atgctggaggaggacatggaggtggccatcaagatggtggtggtgggcaacggcgccgtgggcaagagcagcatgatccagagatactgcaagggcatcttcaccaaggactacaagaagaccatcggcgtggacttcctggagagacagatccaggtgaacgacgaggacgtgagactgatgctgtgggacaccgccggccaggaggagttcgacgccatcaccaaggcctactacagaggcgcccaggcctgcgtgctggtgttcagcaccaccgacagagagagcttcgaggccgtgagcagctggagagagaaggtggtggccgaggtgggcgacatccccaccgtgctggtgcagaacaagatcgacctgctggacgacagctgcatcaagaacgaggaggccgaggccctggccaagagactgaagctgagattctacagaaccagcgtgaaggaggacctgaacgtgaacgaggtgttcaagtacctggccgagaagtacctgcagaagctgaagcagcagatcgccgaggaccccgagctgacccacagcagcagcaacaagatcggcgtgttcaacaccagcggcggcagccacagcggccagaacagcggcaccctgaacggcggcgacgtgatcaacctgagacccaacaagcagagaaccaagaagaacagaaaccccttcagcagctgcagcatcccctag

SEQ ID NO: 96066 - DNA, 714 bp, synthetic construct; identical to SEQ ID NO: 96065
  misc_feature 1..714: note = Description of Artificial Sequence: Synthetic coding sequence
  source 1..714: mol_type = other DNA

SEQ ID NO: 96067 - DNA, 612 bp, synthetic construct
  misc_feature 1..612: note = Description of Artificial Sequence: Synthetic coding sequence
  source 1..612: mol_type = other DNA
atgagcggccagagagtggacgtgaaggtggtgatgctgggcaaggagtacgtgggcaagaccagcctggtggagagatacgtgcacgacagattcctggtgggcccctaccagaacaccatcggcgccgccttcgtggccaaggtgatgagcgtgggcgacagaaccgtgaccctgggcatctgggacaccgccggcagcgagagatacgaggccatgagcagaatctactacagaggcgccaaggccgccatcgtgtgctacgacctgaccgacagcagcagcttcgagagagccaagttctgggtgaaggagctgagaagcctggaggagggctgccagatctacctgtgcggcaccaagagcgacctgctggaggaggacagaagaagaagaagagtggacttccacgacgtgcaggactacgccgacaacatcaaggcccagctgttcgagaccagcagcaagaccggccagagcgtggacgagctgttccagaaggtggccgaggactacgtgagcgtggccgccttccaggtgatgaccgaggacaagggcgtggacctgggccagaagcccaacccctacttctacagctgctgccaccactag

SEQ ID NO: 96068 - DNA, 612 bp, synthetic construct; identical to SEQ ID NO: 96067
  misc_feature 1..612: note = Description of Artificial Sequence: Synthetic coding sequence
  source 1..612: mol_type = other DNA

SEQ ID NO: 96069 - DNA, 201 bp, synthetic construct
  misc_feature 1..201: note = Description of Artificial Sequence: Synthetic coding sequence
  source 1..201: mol_type = other DNA
atgagcggccagagagtggacgtgaaggtggtgatgctgggcaaggagtacgtgggcaagaccagcctggtggagagatacgtgcacgacagattcctggtgggcccctaccagaacaccatcggcgccgccttcgtggccaaggtgatgagcgtgggcgacagaaccgtgaccctgggcatctgggacaccgccggctag

SEQ ID NO: 96070 - DNA, 642 bp, synthetic construct
  misc_feature 1..642: note = Description of Artificial Sequence: Synthetic coding sequence
  source 1..642: mol_type = other DNA
atgggcaacggcaccgaggaggactacaacttcgtgttcaaggtggtgctgatcggcgagagcggcgtgggcaagaccaacctgctgagcagattcaccagaaacgagttcagccacgacagcagaaccaccatcggcgtggagttcagcaccagaaccgtgatgctgggcaccgccgccgtgaaggcccagatctgggacaccgccggcctggagagatacagagccatcaccagcgcctactacagaggcgccgtgggcgccctgctggtgttcgacctgaccaagcaccagacctacgccgtggtggagagatggctgaaggagctgtacgaccacgccgaggccaccatcgtggtgatgctggtgggcaacaagagcgacctgagccaggccagagaggtgcccaccgaggaggccagaatgttcgccgagaacaacggcctgctgttcctggagaccagcgccctggacagcaccaacgtggagctggccttcgagaccgtgctgaaggagatcttcgccaaggtgagcaagcagagacagaacagcatcagaaccaacgccatcaccctgggcagcgcccaggccggccaggagcccggccccggcgagaagagagcctgctgcatcagcctgtag

SEQ ID NO: 96071 - DNA, 1110 bp, synthetic construct
  misc_feature 1..1110: note = Description of Artificial Sequence: Synthetic coding sequence
  source 1..1110: mol_type = other DNA
atggagggcagcctggagagagaggcccccgccggcgccctggccgccgtgctgaagcacagcagcaccctgccccccgagagcacccaggtgagaggctacgacttcaacagaggcgtgaactacagagccctgctggaggccttcggcaccaccggcttccaggccaccaacttcggcagagccgtgcagcaggtgaacgccatgatcgagaagaagctggagcccctgagccaggacgaggaccagcacgccgacctgacccagagcagaagacccctgaccagctgcaccatcttcctgggctacaccagcaacctgatcagcagcggcatcagagagaccatcagatacctggtgcagcacaacatggtggacgtgctggtgaccaccgccggcggcgtggaggaggacctgatcaagtgcctggcccccacctacctgggcgagttcagcctgagaggcaaggagctgagagagaacggcatcaacagaatcggcaacctgctggtgcccaacgagaactactgcaagttcgaggactggctgatgcccatcctggaccagatggtgatggagcagaacaccgagggcgtgaagtggacccccagcaagatgatcgccagactgggcaaggagatcaacaaccccgagagcgtgtactactgggcccagaagaaccacatccccgtgttcagccccgccctgaccgacggcagcctgggcgacatgatcttcttccacagctacaagaaccccggcctggtgctggacatcgtggaggacctgagactgatcaacacccaggccatcttcgccaagtgcaccggcatgatcatcctgggcggcggcgtggtgaagcaccacatcgccaacgccaacctgatgagaaacggcgccgactacgccgtgtacatcaacaccgcccaggagttcgacggcagcgacagcggcgccagacccgacgaggccgtgagctggggcaagatcagagtggacgcccagcccgtgaaggtgtacgccgacgccagcctggtgttccccctgctggtggccgagaccttcgcccagaagatggacgccttcatgcacgagaagaacgaggactag

SEQ ID NO: 96072 - DNA, 573 bp, synthetic construct
  misc_feature 1..573: note = Description of Artificial Sequence: Synthetic coding sequence
  source 1..573: mol_type = other DNA
atgctggtgggcgacagcggcgtgggcaagacctgcctgctggtgagattcaaggacggcgccttcctggccggcaccttcatcagcaccgtgggcatcgacttcagaaacaaggtgctggacgtggacggcgtgaaggtgaagctgcagatgtgggacaccgccggccaggagagattcagaagcgtgacccacgcctactacagagacgcccacgccctgctgctgctgtacgacgtgaccaacaaggccagcttcgacaacatccaggcctggctgaccgagatccacgagtacgcccagcacgacgtggccctgatgctgctgggcaacaaggtggacagcgcccacgagagagtggtgaagagagaggacggcgagaagctggccaaggagtacggcctgcccttcatggagaccagcgccaagaccggcctgaacgtggacctggccttcaccgccatcgccaaggagctgaagcagagaagcatgaaggcccccagcgagcccagattcagactgcacgactacgtgaagagagagggcagaggcgccagctgctgcagaccctag

SEQ ID NO: 96073 - DNA, 666 bp, synthetic construct
  misc_feature 1..666: note = Description of Artificial Sequence: Synthetic coding sequence
  source 1..666: mol_type = other DNA
atgagcgacggcgactacgactacctgatcaagttcctggccctgggcgacagcggcgtgggcaagaccagcgtgctgtaccagtacaccgacggcaagttcaacagcaagttcatcaccaccgtgggcatcgacttcagagagaagagagtggtgtacagagccagcggccccgacggcgccaccggcagaggccagagaatccacctgcagctgtgggacaccgccggccaggagagattcagaagcctgaccaccgccttcttcagagacgccatgggcttcctgctgctgttcgacctgaccaacgagcagagcttcctgaacgtgagaaactggatcagccagctgcagatgcacgcctactgcgagaaccccgacatcgtgctgtgcggcaacaagagcgacctggaggaccagagagtggtgaaggaggaggaggccatcgccctggccgagaagtacggcatcccctacttcgagaccagcgccgccaacggcaccaacatcagccaggccatcgagatgctgctggacctgatcatgaagagaatggagagatgcgtggacaagagctggatccccgagggcgtggtgagaagcaacggccacgccagcaccgaccagctgagcgaggagaaggagaagggcgcctgcggctgctag

SEQ ID NO: 96074 - DNA, 642 bp, synthetic construct
  misc_feature 1..642: note = Description of Artificial Sequence: Synthetic coding sequence
  source 1..642: mol_type = other DNA
atgagcgacggcgactacgactacctgatcaagttcctggccctgggcgacagcggcgtgggcaagaccagcgtgctgtaccagtacaccgacggcaagttcaacagcaagttcatcaccaccgtgggcatcgacttcagagagaagagagtggtgtacagagccagcggccccgacggcgccaccggcagaggccagagaatccacctgcagctgtgggacaccgccggccaggagagattcagaagcctgaccaccgccttcttcagagacgccatgggcttcctgctgctgttcgacctgaccaacgagcagagcttcctgaacgtgagaaactggatcagccagctgcagatgcacgcctactgcgagaaccccgacatcgtgctgtgcggcaacaagagcgacctggaggaccagagagtggtgaaggagaagtacggcatcccctacttcgagaccagcgccgccaacggcaccaacatcagccaggccatcgagatgctgctggacctgatcatgaagagaatggagagatgcgtggacaagagctggatccccgagggcgtggtgagaagcaacggccacgccagcaccgaccagctgagcgaggagaaggagaagggcgcctgcggctgctag

SEQ ID NO: 96075 - DNA, 666 bp, synthetic construct; identical to SEQ ID NO: 96073
  misc_feature 1..666: note = Description of Artificial Sequence: Synthetic coding sequence
  source 1..666: mol_type = other DNA

SEQ ID NO: 96076 - DNA, 663 bp, synthetic construct
  misc_feature 1..663: note = Description of Artificial Sequence: Synthetic coding sequence
  source 1..663: mol_type = other DNA
atgagcgacagcgaggaggagagccaggacagacagctgaagatcgtggtgctgggcgacggcgccagcggcaagaccagcctgaccacctgcttcgcccaggagaccttcggcaagcagtacaagcagaccatcggcctggacttcttcctgagaagaatcaccctgcccggcaacctgaacgtgaccctgcagatctgggacatcggcggccagaccatcggcggcaagatgctggacaagtacatctacggcgcccagggcgtgctgctggtgtacgacatcaccaactaccagagcttcgagaacctggaggactggtacaccgtggtgaagaaggtgagcgaggagagcgagacccagcccctggtggccctggtgggcaacaagatcgacctggagcacatgagaaccatcaagcccgagaagcacctgagattctgccaggagaacggcttcagcagccacttcgtgagcgccaagaccggcgacagcgtgttcctgtgcttccagaaggtggccgccgagatcctgggcatcaagctgaacaaggccgagatcgagcagagccagagaatcgtgagagccgagatcgtgaagtaccccgaggaggagaaccagcacaccaccagcacccagagcagaatctgcagcgtgcagtag

SEQ ID NO: 96077 - DNA, 666 bp, synthetic construct
  misc_feature 1..666: note = Description of Artificial Sequence: Synthetic coding sequence
  source 1..666: mol_type = other DNA
atgagcgacagcgaggaggagagccaggacagacagctgaagatcgtggtgctgggcgacggcgccagcggcaagaccagcctgaccacctgcttcgcccaggagaccttcggcaagcagtacaagcagaccatcggcctggacttcttcctgagaagaatcaccctgcccggcaacctgaacgtgaccctgcagatctgggacatcggcggccagaccatcggcggcaagatgctggacaagtacatctacggcgcccagggcgtgctgctggtgtacgacatcaccaactaccagagcttcgagaacctggaggactggtacaccgtggtgaagaaggtgagcgaggagagcgagacccagcccctggtggccctggtgggcaacaagatcgacctggagcacatgagaaccatcaagcccgagaagcacctgagattctgccaggagaacggcttcagcagccacttcgtgagcgccaagaccggcgacagcgtgttcctgtgcttccagaaggtggccgccgagatcctgggcatcaagctgaacaaggccgagatcgagcagagccagagagtggtgaaggccgacatcgtgaactacaaccaggagcccatgagcagaaccgtgaacccccccagaagcagcatgtgcgccgtgcagtag

SEQ ID NO: 96078 - DNA, 615 bp, synthetic construct
  misc_feature 1..615: note = Description of Artificial Sequence: Synthetic coding sequence
  source 1..615: mol_type = other DNA
atgagcgacagcgaggaggagagccaggacagacagctgaagatcgtggtgctgggcgacggcgccagcggcaagaccagcctgaccacctgcttcgcccaggagaccttcggcaagcagtacaagcagaccatcggcctggacttcttcctgagaagaatcaccctgcccggcaacctgaacgtgaccctgcagatctgggacatcggcggccagaccatcggcggcaagatgctggacaagtacatctacggcgcccagggcgtgctgctggtgtacgacatcaccaactaccagagcttcgagaacctggaggactggtacaccgtggtgaagaaggtgagcgaggagagcgagacccagcccctggtggccctggtgggcaacaagatcgacctggagcacatgagaaccatcaagcccgagaagcacctgagattctgccaggagaacggcttcagcagccacttcgtgagcgccaagaccggcgacagcgtgttcctgtgcttccagaaggtggccgccgagatcctgggcatcaagctgaacaaggccgagatcgagcagagccagggccacttcatcatcttcatcagcagcaccaacagagagtag

SEQ ID NO: 96079 - DNA, 288 bp, synthetic construct
  misc_feature 1..288: note = Description of Artificial Sequence: Synthetic coding sequence
  source 1..288: mol_type = other DNA
atgagcgacagcgaggaggagagccaggacagacagctgaagatcgtggtgctgggcgacggcgccagcggcaagaccagcctgaccacctgcttcgcccaggagaccttcggcaagcagtacaagcagaccatcggcctggacttcttcctgagaagaatcaccctgcccggcaacctgaacgtgaccctgcagatctgggacatcggcggccagaccatcggcggcaagatgctggacaagtacatctacggcgcccagctgatctggagcatctgcgagcagtag

SEQ ID NO: 96080 - DNA, 639 bp, synthetic construct
  misc_feature 1..639: note = Description of Artificial Sequence: Synthetic coding sequence
  source 1..639: mol_type = other DNA
atggcctacgcctacctgttcaagtacatcatcatcggcgacaccggcgtgggcaagagctgcctgctgctgcagttcaccgacaagagattccagcccgtgcacgacctgaccatcggcgtggagttcggcgccagaatgatcaccatcgacggcaagcagatcaagctgcagatctgggacaccgccggccaggagagcttcagaagcatcaccagaagctactacagaggcgccgccggcgccctgctggtgtacgacatcaccagaagagacaccttcaaccacctgaccacctggctggaggacgccagacagcacagcaacagcaacatggtgatcatgctgatcggcaacaagagcgacctggagagcagaagagaggtgaagaaggaggagggcgaggccttcgccagagagcacggcctgatcttcatggagaccagcgccaagaccgccagcaacgtggaggaggccttcatcaacaccgccaaggagatctacgagaagatccaggagggcgtgttcgacatcaacaacgaggccaacggcatcaagatcggcccccagcacgccgccaccaacgccacccacgccggcaaccagggcggccagcaggccggcggcggctgctgctag

SEQ ID NO: 96081 - DNA, 567 bp, synthetic construct
  misc_feature 1..567: note = Description of Artificial Sequence: Synthetic coding sequence
  source 1..567: mol_type = other DNA
atggcctacgcctacctgttcaagtacatcatcatcggcgacaccggcgtggagttcggcgccagaatgatcaccatcgacggcaagcagatcaagctgcagatctgggacaccgccggccaggagagcttcagaagcatcaccagaagctactacagaggcgccgccggcgccctgctggtgtacgacatcaccagaagagacaccttcaaccacctgaccacctggctggaggacgccagacagcacagcaacagcaacatggtgatcatgctgatcggcaacaagagcgacctggagagcagaagagaggtgaagaaggaggagggcgaggccttcgccagagagcacggcctgatcttcatggagaccagcgccaagaccgccagcaacgtggaggaggccttcatcaacaccgccaaggagatctacgagaagatccaggagggcgtgttcgacatcaacaacgaggccaacggcatcaagatcggcccccagcacgccgccaccaacgccacccacgccggcaaccagggcggccagcaggccggcggcggctgctgctag

SEQ ID NO: 96082 - DNA, 501 bp, synthetic construct
  misc_feature 1..501: note = Description of Artificial Sequence: Synthetic coding sequence
  source 1..501: mol_type = other DNA
atgatcaccatcgacggcaagcagatcaagctgcagatctgggacaccgccggccaggagagcttcagaagcatcaccagaagctactacagaggcgccgccggcgccctgctggtgtacgacatcaccagaagagacaccttcaaccacctgaccacctggctggaggacgccagacagcacagcaacagcaacatggtgatcatgctgatcggcaacaagagcgacctggagagcagaagagaggtgaagaaggaggagggcgaggccttcgccagagagcacggcctgatcttcatggagaccagcgccaagaccgccagcaacgtggaggaggccttcatcaacaccgccaaggagatctacgagaagatccaggagggcgtgttcgacatcaacaacgaggccaacggcatcaagatcggcccccagcacgccgccaccaacgccacccacgccggcaaccagggcggccagcaggccggcggcggctgctgctag

SEQ ID NO: 96083 - DNA, 630 bp, synthetic construct
  misc_feature 1..630: note = Description of Artificial Sequence: Synthetic coding sequence
  source 1..630: mol_type = other DNA
atgacctacgcctacctgttcaagtacatcatcatcggcgacaccggcgtgggcaagagctgcctgctgctgcagttcaccgacaagagattccagcccgtgcacgacctgaccatcggcgtggagttcggcgccagaatggtgaacatcgacggcaagcagatcaagctgcagatctgggacaccgccggccaggagagcttcagaagcatcaccagaagctactacagaggcgccgccggcgccctgctggtgtacgacatcaccagaagagagaccttcaaccacctgaccagctggctggaggacgccagacagcacagcagcagcaacatggtgatcatgctgatcggcaacaagagcgacctggagagcagaagagacgtgaagagagaggagggcgaggccttcgccagagagcacggcctgatcttcatggagaccagcgccaagaccgcctgcaacgtggaggaggccttcatcaacaccgccaaggagatctacagaaagatccagcagggcctgttcgacgtgcacaacgaggccaacggcatcaagatcggcccccagcagagcatcagcaccagcgtgggccccagcgccagccagagcgccggcctgcaggtgtag

SEQ ID NO: 96084 - DNA, 651 bp, synthetic construct
  misc_feature 1..651: note = Description of Artificial Sequence: Synthetic coding sequence
  source 1..651: mol_type = other DNA
atgacctacgcctacctgttcaagtacatcatcatcggcgacaccggcgtgggcaagagctgcctgctgctgcagttcaccgacaagagattccagcccgtgcacgacctgaccatcggcgtggagttcggcgccagaatggtgaacatcgacggcaagcagatcaagctgcagatctgggacaccgccggccaggagagcttcagaagcatcaccagaagctactacagaggcgccgccggcgccctgctggtgtacgacatcaccagaagagagaccttcaaccacctgaccagctggctggaggacgccagacagcacagcagcagcaacatggtgatcatgctgatcggcaacaagagcgacctggagagcagaagagacgtgaagagagaggagggcgaggccttcgccagagagcacggcctgatcttcatggagaccagcgccaagaccgcctgcaacgtggaggaggccttcatcaacaccgccaaggagatctacagaaagatccagcagggcctgttcgacgtgcacaacgaggccaacggcatcaagatcggcccccagcagagcatcagcaccagcgtgggccccagcgccagccagagaaacagcagagacatcggcagcaacagcggctgctgctag

SEQ ID NO: 96085 - DNA, 189 bp, synthetic construct
  misc_feature 1..189: note = Description of Artificial Sequence: Synthetic coding sequence
  source 1..189: mol_type = other DNA
atgacctacgcctacctgttcaagtacatcatcatcggcgacaccggcgtgggcaagagctgcctgctgctgcagttcaccgacaagagattccagcccgtgcacgacctgaccatcggcgtggagttcggcgccagaatggtgaacatcgacggcaagcagatcaagctgcagatctgggacacctag

SEQ ID NO: 96086 - DNA, 2946 bp, synthetic construct
  misc_feature 1..2946: note = Description of Artificial Sequence: Synthetic coding sequence
  source 1..2946: mol_type = other DNA
atggccgccgacagcgagcccgagagcgaggtgttcgagatcaccgacttcaccaccgccagcgagtgggagagattcatcagcaaggtggaggaggtgctgaacgactggaagctgatcggcaacagcctgggcaagcccctggagaagggcatcttcaccagcggcacctgggaggagaagagcgacgagatcagcttcgccgacttcaagttcagcgtgacccaccactacctggtgcaggagagcaccgacaaggagggcaaggacgagctgctggaggacgtggtgccccagagcatgcaggacctgctgggcatgaacaacgacttcccccccagagcccactgcctggtgagatggtacggcctgagagagttcgtggtgatcgcccccgccgcccacagcgacgccgtgctgagcgagagcaagtgcaacctgctgctgagcagcgtgagcatcgccctgggcaacaccggctgccaggtgcccctgttcgtgcagatccaccacaagtggagaagaatgtacgtgggcgagtgccagggccccggcgtgagaaccgacttcgagatggtgcacctgagaaaggtgcccaaccagtacacccacctgagcggcctgctggacatcttcaagagcaagatcggctgccccctgacccccctgccccccgtgagcatcgccatcagattcacctacgtgctgcaggactggcagcagtacttctggccccagcagccccccgacatcgacgccctggtgggcggcgaggtgggcggcctggagttcggcaagctgcccttcggcgcctgcgaggaccccatcagcgagctgcacctggccaccacctggccccacctgaccgagggcatcatcgtggacaacgacgtgtacagcgacctggaccccatccaggccccccactggagcgtgagagtgagaaaggccgagaacccccagtgcctgctgggcgacttcgtgaccgagttcttcaagatctgcagaagaaaggagagcaccgacgagatcctgggcagaagcgccttcgaggaggagggcaaggagaccgccgacatcacccacgccctgagcaagctgaccgagcccgccagcgtgcccatccacaagctgagcgtgagcaacatggtgcacaccgccaagaagaagatcagaaagcacagaggcgtggaggagagccccctgaacaacgacgtgctgaacaccatcctgctgttcctgttccccgacgccgtgagcgagaagcccctggacggcaccaccagcaccgacaacaacaacccccccagcgagagcgaggactacaacctgtacaaccagttcaagagcgcccccagcgacagcctgacctacaagctggccctgtgcctgtgcatgatcaacttctaccacggcggcctgaagggcgtggcccacctgtggcaggagttcgtgctggagatgagattcagatgggagaacaacttcctgatccccggcctggccagcggcccccccgacctgagatgctgcctgctgcaccagaagctgcagatgctgaactgctgcatcgagagaaagaaggccagagacgagggcaagaagaccagcgccagcgacgtgaccaacatctaccccggcgacgccggcaaggccggcgaccagctggtgcccgacaacctgaaggagaccgacaaggagaagggcgaggtgggcaagagctgggacagctggagcgacagcgaggaggagttcttcgagtgcctgagcgacaccgaggagctgaagggcaacggccaggagagcggcaagaagggcggccccaaggagatggccaacctgagacccgagggcagactgtaccagcacggcaagctgaccctgctgcacaacggcgagcccctgtacatccccgtgacccaggagcccgcccccatgaccgaggacctgctggaggagcagagcgaggtgctggccaagctgggcaccagcgccgagggcgcccacctgagagccagaatgcagagcgcctgcctgctgagcgacatggagagcttcaaggccgccaaccccggctgcagcctggaggacttcgtgagatggtacagccccagagactacatcgaggaggaggtgatcgacgagaagggcaacgtggtgctgaagggcgagctgagcgccagaatgaagatccccagcaacatgtgggtggaggcctgggagaccgccaagcccatccccgccagaagacagagaagactgttcgacgacaccagagaggccgagaaggtgctgcactacctggccatccagaagcccgccgacctggccagacacctgctgccctgcgtgatccacgccgccgtgctgaaggtgaaggaggaggagagcctggagaacatcagcagcgtgaagaagatcatcaagcagatcatcagccacagcagcaaggtgctgcacttccccaaccccgaggacaagaagctggaggagatcatccaccagatcaccaacgtggaggccctgatcgccagagccagaagcctgaaggccaagttcggcaccgagaagtgcgagcaggaggaggagaaggaggacctggagagattcgtgagctgcctgctggagcagcccgaggtgctggtgaccggcgccggcagaggccacgccggcagaatcatccacaagctgttcgtgaacgcccagagagccgccgccatgaccccccccgaggaggagctgaagagaatgggcagccccgaggagagaagacagaacagcgtgagcgacttccccccccccgccggcagagagttcatcctgagaaccaccgtgcccagacccgccccctacagcaaggccctgccccagagaatgtacagcgtgctgaccaaggaggacttcagactggccggcgccttcagcagcgacaccagcttcttctag

SEQ ID NO: 96087 - DNA, 2808 bp, synthetic construct
  misc_feature 1..2808: note = Description of Artificial Sequence: Synthetic coding sequence
  source 1..2808: mol_type = other DNA
atgttcagcctgatcagcggcatcttcaccagcggcacctgggaggagaagagcgacgagatcagcttcgccgacttcaagttcagcgtgacccaccactacctggtgcaggagagcaccgacaaggagggcaaggacgagctgctggaggacgtggtgccccagagcatgcaggacctgctgggcatgaacaacgacttcccccccagagcccactgcctggtgagatggtacggcctgagagagttcgtggtgatcgcccccgccgcccacagcgacgccgtgctgagcgagagcaagtgcaacctgctgctgagcagcgtgagcatcgccctgggcaacaccggctgccaggtgcccctgttcgtgcagatccaccacaagtggagaagaatgtacgtgggcgagtgccagggccccggcgtgagaaccgacttcgagatggtgcacctgagaaaggtgcccaaccagtacacccacctgagcggcctgctggacatcttcaagagcaagatcggctgccccctgacccccctgccccccgtgagcatcgccatcagattcacctacgtgctgcaggactggcagcagtacttctggccccagcagccccccgacatcgacgccctggtgggcggcgaggtgggcggcctggagttcggcaagctgcccttcggcgcctgcgaggaccccatcagcgagctgcacctggccaccacctggccccacctgaccgagggcatcatcgtggacaacgacgtgtacagcgacctggaccccatccaggccccccactggagcgtgagagtgagaaaggccgagaacccccagtgcctgctgggcgacttcgtgaccgagttcttcaagatctgcagaagaaaggagagcaccgacgagatcctgggcagaagcgccttcgaggaggagggcaaggagaccgccgacatcacccacgccctgagcaagctgaccgagcccgccagcgtgcccatccacaagctgagcgtgagcaacatggtgcacaccgccaagaagaagatcagaaagcacagaggcgtggaggagagccccctgaacaacgacgtgctgaacaccatcctgctgttcctgttccccgacgccgtgagcgagaagcccctggacggcaccaccagcaccgacaacaacaacccccccagcgagagcgaggactacaacctgtacaaccagttcaagagcgcccccagcgacagcctgacctacaagctggccctgtgcctgtgcatgatcaacttctaccacggcggcctgaagggcgtggcccacctgtggcaggagttcgtgctggagatgagattcagatgggagaacaacttcctgatccccggcctggccagcggcccccccgacctgagatgctgcctgctgcaccagaagctgcagatgctgaactgctgcatcgagagaaagaaggccagagacgagggcaagaagaccagcgccagcgacgtgaccaacatctaccccggcgacgccggcaaggccggcgaccagctggtgcccgacaacctgaaggagaccgacaaggagaagggcgaggtgggcaagagctgggacagctggagcgacagcgaggaggagttcttcgagtgcctgagcgacaccgaggagctgaagggcaacggccaggagagcggcaagaagggcggccccaaggagatggccaacctgagacccgagggcagactgtaccagcacggcaagctgaccctgctgcacaacggcgagcccctgtacatccccgtgacccaggagcccgcccccatgaccgaggacctgctggaggagcagagcgaggtgctggccaagctgggcaccagcgccgagggcgcccacctgagagccagaatgcagagcgcctgcctgctgagcgacatggagagcttcaaggccgccaaccccggctgcagcctggaggacttcgtgagatggtacagccccagagactacatcgaggaggaggtgatcgacgagaagggcaacgtggtgctgaagggcgagctgagcgccagaatgaagatccccagcaacatgtgggtggaggcctgggagaccgccaagcccatccccgccagaagacagagaagactgttcgacgacaccagagaggccgagaaggtgctgcactacctggccatccagaagcccgccgacctggccagacacctgctgccctgcgtgatccacgccgccgtgctgaaggtgaaggaggaggagagcctggagaacatcagcagcgtgaagaagatcatcaagcagatcatcagccacagcagcaaggtgctgcacttccccaaccccgaggacaagaagctggaggagatcatccaccagatcaccaacgtggaggccctgatcgccagagccagaagcctgaaggccaagttcggcaccgagaagtgcgagcaggaggaggagaaggaggacctggagagattcgtgagctgcctgctggagcagcccgaggtgctggtgaccggcgccggcagaggccacgccggcagaatcatccacaagctgttcgtgaacgcccagagagccgccgccatgaccccccccgaggaggagctgaagagaatgggcagccccgaggagagaagacagaacagcgtgagcgacttccccccccccgccggcagagagttcatcctgagaaccaccgtgcccagacccgccccctacagcaaggccctgccccagagaatgtacagcgtgctgaccaaggaggacttcagactggccgtgaagatcatcgacggcgacgtgtag

SEQ ID NO: 96088 - DNA, 2967 bp, synthetic construct
  misc_feature 1..2967: note = Description of Artificial Sequence: Synthetic coding sequence
  source 1..2967: mol_type = other DNA
atggccgccgacagcgagcccgagagcgaggtgttcgagatcaccgacttcaccaccgccagcgagtgggagagattcatcagcaaggtggaggaggtgctgaacgactggaagctgatcggcaacagcctgggcaagcccctggagaagggcatcttcaccagcggcacctgggaggagaagagcgacgagatcagcttcgccgacttcaagttcagcgtgacccaccactacctggtgcaggagagcaccgacaaggagggcaaggacgagctgctggaggacgtggtgccccagagcatgcaggacctgctgggcatgaacaacgacttcccccccagagcccactgcctggtgagatggtacggcctgagagagttcgtggtgatcgcccccgccgcccacagcgacgccgtgctgagcgagagcaagtgcaacctgctgctgagcagcgtgagcatcgccctgggcaacaccggctgccaggtgcccctgttcgtgcagatccaccacaagtggagaagaatgtacgtgggcgagtgccagggccccggcgtgagaaccgacttcgagatggtgcacctgagaaaggtgcccaaccagtacacccacctgagcggcctgctggacatcttcaagagcaagatcggctgccccctgacccccctgccccccgtgagcatcgccatcagattcacctacgtgctgcaggactggcagcagtacttctggccccagcagccccccgacatcgacgccctggtgggcggcgaggtgggcggcctggagttcggcaagctgcccttcggcgcctgcgaggaccccatcagcgagctgcacctggccaccacctggccccacctgaccgagggcatcatcgtggacaacgacgtgtacagcgacctggaccccatccaggccccccactggagcgtgagagtgagaaaggccgagaacccccagtgcctgctgggcgacttcgtgaccgagttcttcaagatctgcagaagaaaggagagcaccgacgagatcctgggcagaagcgccttcgaggaggagggcaaggagaccgccgacatcacccacgccctgagcaagctgaccgagcccgccagcgtgcccatccacaagctgagcgtgagcaacatggtgcacaccgccaagaagaagatcagaaagcacagaggcgtggaggagagccccctgaacaacgacgtgctgaacaccatcctgctgttcctgttccccgacgccgtgagcgagaagcccctggacggcaccaccagcaccgacaacaacaacccccccagcgagagcgaggactacaacctgtacaaccagttcaagagcgcccccagcgacagcctgacctacaagctggccctgtgcctgtgcatgatcaacttctaccacggcggcctgaagggcgtggcccacctgtggcaggagttcgtgctggagatgagattcagatgggagaacaacttcctgatccccggcctggccagcggcccccccgacctgagatgctgcctgctgcaccagaagctgcagatgctgaactgctgcatcgagagaaagaaggccagagacgagggcaagaagaccagcgccagcgacgtgaccaacatctaccccggcgacgccggcaaggccggcgaccagctggtgcccgacaacctgaaggagaccgacaaggagaagggcgaggtgggcaagagctgggacagctggagcgacagcgaggaggagttcttcgagtgcctgagcgacaccgaggagctgaagggcaacggccaggagagcggcaagaagggcggccccaaggagatggccaacctgagacccgagggcagactgtaccagcacggcaagctgaccctgctgcacaacggcgagcccctgtacatccccgtgacccaggagcccgcccccatgaccgaggacctgctggaggagcagagcgaggtgctggccaagctgggcaccagcgccgagggcgcccacctgagagccagaatgcagagcgcctgcctgctgagcgacatggagagcttcaaggccgccaaccccggctgcagcctggaggacttcgtgagatggtacagccccagagactacatcgaggaggaggtgatcgacgagaagggcaacgtggtgctgaagggcgagctgagcgccagaatgaagatccccagcaacatgtgggtggaggcctgggagaccgccaagcccatccccgccagaagacagagaagactgttcgacgacaccagagaggccgagaaggtgctgcactacctggccatccagaagcccgccgacctggccagacacctgctgccctgcgtgatccacgccgccgtgctgaaggtgaaggaggaggagagcctggagaacatcagcagcgtgaagaagatcatcaagcagatcatcagccacagcagcaaggtgctgcacttccccaaccccgaggacaagaagctggaggagatcatccaccagatcaccaacgtggaggccctgatcgccagagccagaagcctgaaggccaagttcggcaccgagaagtgcgagcaggaggaggagaaggaggacctggagagattcgtgagctgcctgctggagcagcccgaggtgctggtgaccggcgccggcagaggccacgccggcagaatcatccacaagctgttcgtgaacgcccagagactgaccgagagcagcgacgaggccgccgccatgaccccccccgaggaggagctgaagagaatgggcagccccgaggagagaagacagaacagcgtgagcgacttccccccccccgccggcagagagttcatcctgagaaccaccgtgcccagacccgccccctacagcaaggccctgccccagagaatgtacagcgtgctgaccaaggaggacttcagactggccggcgccttcagcagcgacaccagcttcttctag

SEQ ID NO: 96089 - DNA, 4182 bp, synthetic construct
  misc_feature 1..4182: note = Description of Artificial Sequence: Synthetic coding sequence
  source 1..4182: mol_type = other DNA
atggcctgcagcatcgtgcagttctgctacttccaggacctgcaggccgccagagacttcctgttcccccacctgagagaggagatcctgagcggcgccctgagaagagaccccagcaagagcaccgactgggaggacgacggctggggcgcctgggaggagaacgagccccaggagcccgaggaggagggcaacacctgcaagacccagaagaccagctggctgcaggactgcgtgctgagcctgagccccaccaacgacctgatggtgatcgccagagagcagaaggccgtgttcctggtgcccaagtggaagtacagcgacaagggcaaggaggagatgcagttcgccgtgggctggagcggcagcctgaacgtggaggagggcgagtgcgtgaccagcgccctgtgcatccccctggccagccagaagagaagcagcaccggcagacccgactggacctgcatcgtggtgggcttcaccagcggctacgtgagattctacaccgagaacggcgtgctgctgctggcccagctgctgaacgaggaccccgtgctgcagctgaagtgcagaacctacgagatccccagacaccccggcgtgaccgagcagaacgaggagctgagcatcctgtaccccgccgccatcgtgaccatcgacggcttcagcctgttccagagcctgagagcctgcagaaaccaggtggccaaggccgccgccagcggcaacgagaacatccagcccccccccctggcctacaagaagtggggcctgcaggacatcgacaccatcatcgaccacgccagcgtgggcatcatgaccctgagccccttcgaccagatgaagaccgccagcaacatcggcggcttcaacgccgccatcaagaacagcccccccgccatgagccagtacatcaccgtgggcagcaaccccttcaccggcttcttctacgccctggagggcagcacccagcccctgctgagccacgtggccctggccgtggccagcaagctgaccagcgccctgttcaacgccgccagcggctggctgggctggaagagcaagcacgaggaggaggccgtgcagaagcagaagcccaaggtggagcccgccacccccctggccgtgagattcggcctgcccgacagcagaagacacggcgagagcatctgcctgagcccctgcaacaccctggccgccgtgaccgacgacttcggcagagtgatcctgctggacgtggccagaggcatcgccatcagaatgtggaagggctacagagacgcccagatcggctggatccagaccgtggaggacctgcacgagagagtgcccgagaaggccgacttcagccccttcggcaacagccagggccccagcagagtggcccagttcctggtgatctacgcccccagaagaggcatcctggaggtgtggagcacccagcagggccccagagtgggcgccttcaacgtgggcaagcactgcagactgctgtaccccggctacaagatcatgggcctgaacaacgtgaccagccagagctggcagccccagacctaccagatctgcctggtggaccccgtgagcggcagcgtgaagaccgtgaacgtgcccttccacctggccctgagcgacaagaagagcgagagagccaaggacatgcacctggtgaagaagctggccgccctgctgaagaccaagagccccaacctggacctggtggagaccgagatcaaggagctgatcctggacatcaagtaccccgccaccaagaagcaggccctggagagcatcctggccagcgagagactgcccttcagctgcctgagaaacatcacccagaccctgatggacaccctgaagagccaggagctggagagcgtggacgagggcctgctgcagttctgcgccaacaagctgaagctgctgcagctgtacgagagcgtgagccagctgaacagcctggacttccacctggacacccccttcagcgacaacgacctggccctgctgctgagactggacgagaaggagctgctgaagctgcaggccctgctggagaagtacaagcaggagaacaccagaaccaacgtgagattcagcgacgacaaggacggcgtgctgcccgtgaagaccttcctggagtacctggagtacgagaaggacgtgctgaacatcaagaagatcagcgaggaggagtacgtggccctgggcagcttcttcttctggaagtgcctgcacggcgagagcagcaccgaggacatgtgccacaccctggagagcgccggcctgagcccccagctgctgctgagcctgctgctgagcgtgtggctgagcaaggagaaggacatcctggacaagccccagagcatctgctgcctgcacaccatgctgagcctgctgagcaagatgaaggtggccatcgacgagacctgggacagccagagcgtgagcccctggtggcagcagatgagaaccgcctgcatccagagcgagaacaacggcgccgccctgctgagcgcccacgtgggccacagcgtggccgcccagatcagcaacaacatgaccgagaagaagttcagccagaccgtgctgggcgccgacagcgaggccctgaccgacagctgggaggccctgagcctggacaccgagtactggaagctgctgctgaagcagctggaggactgcctgatcctgcagaccctgctgcacagcaagggcaacacccagaccagcaaggtgagcagcctgcaggccgagcccctgcccagactgagcgtgaagaagctgctggagggcggcaagggcggcatcgccgacagcgtggccaagtggatcttcaagcaggacttcagccccgaggtgctgaagctggccaacgaggagagagacgccgagaaccccgacgagcccaaggagggcgtgaacagaagcttcctggaggtgagcgagatggagatggacctgggcgccatccccgacctgctgcacctggcctacgagcagttcccctgcagcctggagctggacgtgctgcacgcccactgctgctgggagtacgtggtgcagtggaacaaggaccccgaggaggccagattcttcgtgagaagcatcgagcacctgaagcagatcttcaacgcccacgtgcagaacggcatcgccctgatgatgtggaacaccttcctggtgaagagattcagcgccgccacctacctgatggacaaggtgggcaagagccccaaggacagactgtgcagaagagacgtgggcatgagcgacaccgccatgaccagcttcctgggcagctgcctggacctgctgcagatcctgatggaggccgacgtgagcagagacgagatccaggtgcccgtgctggacaccgaggacgcctggctgagcgtggagggccccatcagcatcgtggagctggccctggagcagaagcacatccactaccccctggtggagcaccacagcatcctgtgcagcatcctgtacgccgtgatgagattcagcctgaagaccgtgaagcccctgagcctgttcgacagcaagggcaagaacgccttcttcaaggacctgaccagcatccagctgctgcccagcggcgagatggaccccaacttcatcagcgtgagacagcagttcctgctgaaggtggtgagcgccgccgtgcaggcccagcacagcgccaccaaggtgaaggaccccaccgaggaggccacccccacccccttcggcaaggaccaggactggcccgccctggccgtggacctggcccaccacctgcaggtgagcgaggacgtggtgagaagacactacgtgggcgagctgtacaactacggcgtggaccacctgggcgaggaggccatcctgcaggtgcacgacaaggaggtgctggccagccagctgctggtgctgaccggccagagactggcccacgccctgctgcacacccagaccaaggagggcatggagctgctggccagactgccccccaccctgtgcacctggctgaaggccatggacccccaggacctgcagaacaccgaggtgcccatcgccaccaccgccaagctggtgaacaaggtgatcgagctgctgcccgagaagcacggccagtacggcctggccctgcacctgatcgaggccgtggaggccatcagcctgcccagcctgtag

SEQ ID NO: 96090 - DNA, 612 bp, synthetic construct
  misc_feature 1..612: note = Description of Artificial Sequence: Synthetic coding sequence
  source 1..612: mol_type = other DNA
atgagcatggaggactacgacttcctgttcaagatcgtgctgatcggcaacgccggcgtgggcaagacctgcctggtgagaagattcacccagggcctgttcccccccggccagggcgccaccatcggcgtggacttcatgatcaagaccgtggagatcaacggcgagaaggtgaagctgcagatctgggacaccgccggccaggagagattcagaagcatcacccagagctactacagaagcgccaacgccctgatcctgacctacgacatcacctgcgaggagagcttcagatgcctgcccgagtggctgagagagatcgagcagtacgccagcaacaaggtgatcaccgtgctggtgggcaacaagatcgacctggccgagagaagagaggtgagccagcagagagccgaggagttcagcgaggcccaggacatgtactacctggagaccagcgccaaggagagcgacaacgtggagaagctgttcctggacctggcctgcagactgatcagcgaggccagacagaacaccctggtgaacaacgtgagcagccccctgcccggcgagggcaagagcatcagctacctgacctgctgcaacttcaactag

SEQ ID NO: 96091 - DNA, 345 bp, synthetic construct
  misc_feature 1..345: note = Description of Artificial Sequence: Synthetic coding sequence
  source 1..345: mol_type = other DNA
atgagcatggaggactacgacttcctgttcaagatcgtgctgatcggcaacgccggcgtgggcaagacctgcctggtgagaagattcacccagggcctgttcccccccggccagggcgccaccatcggcgtggacttcatgatcaagaccgtggagatcaacggcgagaaggtgaagctgcagatctgggacaccgccggccaggagagattcagaagcatcacccagagctactacagaagcgccaacgccctgatcctgacctacgacatcacctgcgaggagagcttcagatgcctgcccgagtggctgagagagatcgagcagtacgccagcaacaagtag

SEQ ID NO: 96092 - DNA, 612 bp, synthetic construct; identical to SEQ ID NO: 96090
  misc_feature 1..612: note = Description of Artificial Sequence: Synthetic coding sequence
  source 1..612: mol_type = other DNA

SEQ ID NO: 96093 - DNA, 168 bp, synthetic construct
  misc_feature 1..168: note = Description of Artificial Sequence: Synthetic coding sequence
  source 1..168: mol_type = other DNA
atgagcatggaggactacgacttcctgttcaagatcgtgctgatcggcaacgccggcgtgggcaagacctgcctggtgagaagattcacccagggcctgttcccccccggccagggcgccaccatcggcgtggacttcatgatcaagaccgtggagatcaacggctag

SEQ ID NO: 96094 - DNA, 507 bp, synthetic construct
  misc_feature 1..507: note = Description of Artificial Sequence: Synthetic coding sequence
  source 1..507: mol_type = other DNA
atgagcatggaggactacgacttcctgttcaagatcgtgctgatcggcaacgccggcgtgggcaagacctgcctggtgagaagattcacccagggcctgttcccccccggccagggcgccaccatcggcgtggacttcatgatcaagaccgtggagatcaacggcgagaaggtgaagctgcagatctgggacaccgccggccaggagagattcagaagcatcacccagagctactacagaagcgccaacgccctgatcctgacctacgacatcacctgcgaggagagcttcagatgcctgcccgagtggctgagagagatcgagcagtacgccagcaacaaggtgatcaccgtgctggtgggcaacaagatcgacctggccgagagaagagaggtgagccagcagagagccgaggagttcagcgaggcccaggacatgtactacctggagaccagcgccaaggagagcgacaacgtggagaagctgttcctggacctggcctgctag

SEQ ID NO: 96095 - DNA, 183 bp, synthetic construct
  misc_feature 1..183: note = Description of Artificial Sequence: Synthetic coding sequence
  source 1..183: mol_type = other DNA
atgagcatggaggactacgacttcctgttcaagatcgtgctgatcggcaacgccggcgtgggcaagacctgcctggtgagaagattcacccagggcctgttcccccccggccagggcgccaccatcggcgtggacttcatgatcaagaccgtggagatcaacggcgagaaggtgaagctgtag

SEQ ID NO: 96096 - DNA, 612 bp, synthetic construct; identical to SEQ ID NO: 96090
  misc_feature 1..612: note = Description of Artificial Sequence: Synthetic coding sequence
  source 1..612: mol_type = other DNA

SEQ ID NO: 96097 - DNA, 303 bp, synthetic construct
  misc_feature 1..303: note = Description of Artificial Sequence: Synthetic coding sequence
  source 1..303: mol_type = other DNA
atgagcatggaggactacgacttcctgttcaagatcgtgctgatcggcaacgccggcgtgggcaagacctgcctggtgagaagattcacccagggcctgttcccccccggccagggcgccaccatcggcgtggacttcatgatcaagaccgtggagatcaacggcgagaaggtgaagctgcagatctgggacaccgccggccaggagagattcagaagcatcacccagagctactacagaagcgccaacgccctgatcctgacctacgacatcacctgcgaggagagcttcagatgcctgtag

SEQ ID NO: 96098 - DNA, 495 bp, synthetic construct
  misc_feature 1..495: note = Description of Artificial Sequence: Synthetic coding sequence
  source 1..495: mol_type = other DNA
atgagcatggaggactacgacttcctgttcaagatcgtgctgatcggcaacgccggcgtgggcaagacctgcctggtgagaagattcacccagggcctgttcccccccggccagggcgccaccatcggcgtggacttcatgatcaagaccgtggagatcaacggcgagaaggtgaagctgcagatctgggacaccgccggccaggagagattcagaagcatcacccagagctactacagaagcgccaacgccctgatcctgacctacgacatcacctgcgaggagagcttcagatgcctgcccgagtggctgagagagatcgagcagtacgccagcaacaaggtgatcaccgtgctggccaccagactgacctggctgaagggcgagagattccccagcagcgagctgaagaacagccagaagctgagaacctgcatcatctggagaccccagcccagaaacctgatcatgtggagaaacagcagcctgacctag

SEQ ID NO: 96099 - DNA, 420 bp, synthetic construct
  misc_feature 1..420: note = Description of Artificial Sequence: Synthetic coding sequence
  source 1..420: mol_type = other DNA
atgagcatggaggactacgacttcctgttcaagatcgtgctgatcggcaacgccggcgtgggcaagacctgcctggtgagaagattcacccagggcctgttcccccccggccagggcgccaccatcggcgtggacttcatgatcaagaccgtggagatcaacggcgagaaggtgaagctgcagatctgggacaccgccggccaggagagattcagaagcatcacccagagctactacagaagcgccaacgccctgatcctgacctacgacatcacctgcgaggagagcttcagatgcctgcccgagtggctgagagagatcgagcagtacgccagcaacaaggtgatcaccgtgctggtgggcaacaagatcgacctggccgagagaagagaggtgagccagcagagagccgaggagtag

SEQ ID NO: 96100 - DNA, 588 bp, synthetic construct
  misc_feature 1..588: note = Description of Artificial Sequence: Synthetic coding sequence
  source 1..588: mol_type = other DNA
atgatggccatcagagagctgaaggtgtgcctgctgggcgacaccggcgtgggcaagagcagcatcgtgtgcagattcgtgcaggaccacttcgaccacaacatcagccccaccatcggcgccagcttcatgaccaagaccgtgccctgcggcaacgagctgcacaagttcctgatctgggacaccgccggccaggagagattccacagcctggcccccatgtactacagaggcagcgccgccgccgtgatcgtgtacgacatcaccaagcaggacagcttctacaccctgaagaagtgggtgaaggagctgaaggagcacggccccgagaacatcgtgatggccatcgccggcaacaagtgcgacctgagcgacatcagagaggtgcccctgaaggacgccaaggagtacgccgagagcatcggcgccatcgtggtggagaccagcgccaagaacgccatcaacatcgaggagctgttccagggcatcagcagacagatcccccccctggacccccacgagaacggcaacaacggcaccatcaaggtggagaagcccaccatgcaggccagcagaagatgctgctag

SEQ ID NO: 96101 - DNA, 561 bp, synthetic construct
  misc_feature 1..561: note = Description of Artificial Sequence: Synthetic coding sequence
  source 1..561: mol_type = other DNA
tgcctgctgaacgacaccggcgtgggcaagagcagcatcgtgtgcagattcgtgcaggaccacttcgaccacaacatcagccccaccatcggcgccagcttcatgaccaagaccgtgccctgcggcaacgagctgcacaagttcctgatctgggacaccgccggccaggagagattccacagcctggcccccatgtactacagaggcagcgccgccgccgtgatcgtgtacgacatcaccaagcaggacagcttctacaccctgaagaagtgggtgaaggagctgaaggagcacggccccgagaacatcgtgatggccatcgccggcaacaagtgcgacctgagcgacatcagagaggtgcccctgaaggacgccaaggagtacgccgagagcatcggcgccatcgtggtggagaccagcgccaagaacgccatcaacatcgaggagctgttccagggcatcagcagacagatcccccccctggacccccacgagaacggcaacaacggcaccatcaaggtggagaagcccaccatgcaggccagcagaagatgctgctag

SEQ ID NO: 96102 - DNA, 678 bp, synthetic construct
  misc_feature 1..678: note = Description of Artificial Sequence: Synthetic coding sequence
  source 1..678: mol_type = other DNA
atggccggcggcggcgccggcgaccccggcctgggcgccgccgccgcccccgcccccgagaccagagagcacctgttcaaggtgctggtgatcggcgagctgggcgtgggcaagaccagcatcatcaagagatacgtgcaccagctgttcagccagcactacagagccaccatcggcgtggacttcgccctgaaggtgctgaactgggacagcagaaccctggtgagactgcagctgtgggacatcgccggccaggagagattcggcaacatgaccagagtgtactacaaggaggccgtgggcgccttcgtggtgttcgacatcagcagaagcagcaccttcgaggccgtgctgaagtggaagagcgacctggacagcaaggtgcacctgcccaacggcagccccatccccgccgtgctgctggccaacaagtgcgaccagaacaaggacagcagccagagccccagccaggtggaccagttctgcaaggagcacggcttcgccggctggttcgagaccagcgccaaggacaacatcaacatcgaggaggccgccagattcctggtggagaagatcctggtgaaccaccagagcttccccaacgaggagaacgacgtggacaagatcaagctggaccaggagaccctgagagccgagaacaagagccagtgctgctag

SEQ ID NO: 96103 - DNA, 714 bp, synthetic construct
  misc_feature 1..714: note = Description of Artificial Sequence: Synthetic coding sequence
  source 1..714: mol_type = other DNA
atggcccagcccatcctgggccacggcagcctgcagcccgccagcgccgccggcctggccagcctggagctggacagcagcctggaccagtacgtgcagatcagaatcttcaagatcatcgtgatcggcgacagcaacgtgggcaagacctgcctgaccttcagattctgcggcggcaccttccccgacaagaccgaggccaccatcggcgtggacttcagagagaagaccgtggagatcgagggcgagaagatcaaggtgcaggtgtgggacaccgccggccaggagagattcagaaagagcatggtggagcactactacagaaacgtgcacgccgtggtgttcgtgtacgacgtgaccaagatgaccagcttcaccaacctgaagatgtggatccaggagtgcaacggccacgccgtgccccccctggtgcccaaggtgctggtgggcaacaagtgcgacctgagagagcagatccaggtgcccagcaacctggccctgaagttcgccgacgcccacaacatgctgctgttcgagaccagcgccaaggaccccaaggagagccagaacgtggagagcatcttcatgtgcctggcctgcagactgaaggcccagaagagcctgctgtacagagacgccgagagacagcagggcaaggtgcagaagctggagttcccccaggaggccaacagcaagaccagctgcccctgctag

SEQ ID NO: 96104 - DNA, 714 bp, synthetic construct
  misc_feature 1..714: note = Description of Artificial Sequence: Synthetic coding sequence
  source 1..714: mol_type = other DNA
atgaacatcctggcccccgtgagaagagacagagtgctggccgagctgccccagtgcctgagaaaggaggccgccctgcacggccacaaggacttccaccccagagtgacctgcgcctgccaggagcacagaaccggcaccgtgggcttctgcaaggacaccttcgacaagaactacaaggccaccatcggcgtggacttcgagatggagagattcgaggtgctgggcatccccttcagcctgcagctgtgggacaccgccggccaggagagattcaagtgcatcgccagcacctactacagaggcgcccaggccatcatcatcgtgttcaacctgaacgacgtggccagcctggagcacaccaagcagtggctggccgacgccctgaaggagaacgaccccagcagcgtgctgctgttcctggtgggcagcaagaaggacctgagcacccccgcccagtacgccctgatggagaaggacgccctgcaggtggcccaggagatgaaggccgagtactgggccgtgagcagcctgaccggcgagaacgtgagagagttcttcttcagagtggccgccctgaccttcgaggccaacgtgctggccgagctggagaagagcggcgccagaagaatcggcgacgtggtgagaatcaacagcgacgacagcaacctgtacctgaccgccagcaagaagaagcccacctgctgcccctag

SEQ ID NO: 96105 - DNA, 780 bp, synthetic construct
  misc_feature 1..780: note = Description of Artificial Sequence: Synthetic coding sequence
  source 1..780: mol_type = other DNA
atgaacatcctggcccccgtgagaagagacagagtgctggccgagctgccccagtgcctgagaaaggaggccgccctgcacggccacaaggacttccaccccagagtgacctgcgcctgccaggagcacagaaccggcaccgtgggcttcaagatcagcaaggtgatcgtggtgggcgacctgagcgtgggcaagacctgcctgatcaacagattctgcaaggacaccttcgacaagaactacaaggccaccatcggcgtggacttcgagatggagagattcgaggtgctgggcatccccttcagcctgcagctgtgggacaccgccggccaggagagattcaagtgcatcgccagcacctactacagaggcgcccaggccatcatcatcgtgttcaacctgaacgacgtggccagcctggagcacaccaagcagtggctggccgacgccctgaaggagaacgaccccagcagcgtgctgctgttcctggtgggcagcaagaaggacctgagcacccccgcccagtacgccctgatggagaaggacgccctgcaggtggcccaggagatgaaggccgagtactgggccgtgagcagcctgaccggcgagaacgtgagagagttcttcttcagagtggccgccctgaccttcgaggccaacgtgctggccgagctggagaagagcggcgccagaagaatcggcgacgtggtgagaatcaacagcgacgacagcaacctgtacctgaccgccagcaagaagaagcccacctgctgcccctag

SEQ ID NO: 96106 - DNA, 636 bp, synthetic construct
  misc_feature 1..636: note = Description of Artificial Sequence: Synthetic coding sequence
  source 1..636: mol_type = other DNA
atgaacatcctggcccccgtgagaagagacagagtgctggccgagctgccccagtgcctgagaaaggaggccgccctgcacggccacaaggacttccaccccagagtgacctgcgcctgccaggagcacagaaccggcaccgtgggcttcaagatcagcaaggtgatcgtggtgggcgacctgagcgtgggcaagacctgcctgatcaacagattctgcaaggacaccttcgacaagaactacaaggccaccatcggcgtggacttcgagatggagagattcgaggtgctgggcatccccttcagcctgcagctgtgggacaccgccggccaggagagattcaagtgcatcgccagcacctactacagaggcgcccaggccatcatcatcgtgttcaacctgaacgacgtggccagcctggagcacaccaagcagtggctggccgacgccctgaaggagaacgaccccagcagcgtgctgctgttcctggtgggcagcaagaaggacctgagcacccccgcccagtacgccctgatggagaaggacgccctgcaggtggcccaggagatgaaggccgagtactgggccgtgagcagcctgaccggcgagaacgtgagagagttcttcttcagatag

SEQ ID NO: 96107 - DNA, 756 bp, synthetic construct
  misc_feature 1..756: note = Description of Artificial Sequence: Synthetic coding sequence
  source 1..756: mol_type = other DNA
atgaacatcctggcccccgtgagaagagacagagtgctggccgagctgccccagtgcctgagaaaggaggccgccctgcacggccacaaggacttccaccccagagtgacctgcgcctgccaggagcacagaaccggcaccgtgggcttcaagatcagcaaggtgatcgtggtgggcgacctgagcgtgggcaagacctgcctgatcaacagattctgcaaggacaccttcgacaagaactacaaggccaccatcggcgtggacttcgagatggagagattcgaggtgctgggcatccccttcagcctgcagctgtgggacaccgccggccaggagagattcaagtgcatcgccagcacctactacagaggcgcccaggccatcatcatcgtgttcaacctgaacgacgtggccagcctggagcacaccaagcagtggctggccgacgccctgaaggagaacgaccccagcagcgtgctgctgttcctgacccccgcccagtacgccctgatggagaaggacgccctgcaggtggcccaggagatgaaggccgagtactgggccgtgagcagcctgaccggcgagaacgtgagagagttcttcttcagagtggccgccctgaccttcgaggccaacgtgctggccgagctggagaagagcggcgccagaagaatcggcgacgtggtgagaatcaacagcgacgacagcaacctgtacctgaccgccagcaagaagaagcccacctgctgcccctag

SEQ ID NO: 96108 - DNA, 780 bp, synthetic construct; identical to SEQ ID NO: 96105
  misc_feature 1..780: note = Description of Artificial Sequence: Synthetic coding sequence
  source 1..780: mol_type = other DNA

SEQ ID NO: 96109 - DNA, 636 bp, synthetic construct; identical to SEQ ID NO: 96106
  misc_feature 1..636: note = Description of Artificial Sequence: Synthetic coding sequence
  source 1..636: mol_type = other DNA

SEQ ID NO: 96110 - DNA, 696 bp, synthetic construct
  misc_feature 1..696: note = Description of Artificial Sequence: Synthetic coding sequence
  source 1..696: mol_type = other DNA
tgaagcctgagattccccatcaccaacagcgccggcgccccctgcaaggccgccggcagaatgaacatcctggcccccgtgagaagagacagagtgctggccgagctgccccagtgcctgagaaaggaggccgccctgcacggccacaaggacttccaccccagagtgacctgcgcctgccaggagcacagaaccggcaccgtgggcagattcaagatcagcaaggtgatcgtggtgggcgacctgagcgtgggcaagacctgcctgatcaacagattctgcaaggacaccttcgacaagaactacaaggccaccatcggcgtggacttcgagatggagagattcgaggtgctgggcatccccttcagcctgcagctgtgggacaccgccggccaggagagattcaagtgcatcgccagcacctactacagaggcgcccaggccatcatcatcgtgttcaacctgaacgacgtggccagcctggagcacaccaagcagtggctggccgacgccctgaaggagaacgaccccagcagcgtgctgctgttcctggtgggcagcaagaaggacctgagcacccccgcccagtacgccctgatggagaaggacgccctgcaggtggcccaggagatgaagaccgtgcagagactgcccagccccagagccctgtgccacccccacagcagcagagcctag

SEQ ID NO: 96111 - DNA, 951 bp, synthetic construct
  misc_feature 1..951: note = Description of Artificial Sequence: Synthetic coding sequence
  source 1..951: mol_type = other DNA
atgagccacctgcccggcctggagctgagaagagaggccccccccctgctgggccccctgctgagccccttccccctgcccgccggcagctggcacagacagatgctgagaagcagcctgagattccccatcaccaacagcgccggcgccccctgcaaggccgccggcagaatgaacatcctggcccccgtgagaagagacagagtgctggccgagctgccccagtgcctgagaaaggaggccgccctgcacggccacaaggacttccaccccagagtgacctgcgcctgccaggagcacagaaccggcaccgtgggcttcaagatcagcaaggtgatcgtggtgggcgacctgagcgtgggcaagacctgcctgatcaacagattctgcaaggacaccttcgacaagaactacaaggccaccatcggcgtggacttcgagatggagagattcgaggtgctgggcatccccttcagcctgcagctgtgggacaccgccggccaggagagattcaagtgcatcgccagcacctactacagaggcgcccaggccatcatcatcgtgttcaacctgaacgacgtggccagcctggagcacaccaagcagtggctggccgacgccctgaaggagaacgaccccagcagcgtgctgctgttcctggtgggcagcaagaaggacctgagcacccccgcccagtacgccctgatggagaaggacgccctgcaggtggcccaggagatgaaggccgagtactgggccgtgagcagcctgaccggcgagaacgtgagagagttcttcttcagagtggccgccctgaccttcgaggccaacgtgctggccgagctggagaagagcggcgccagaagaatcggcgacgtggtgagaatcaacagcgacgacagcaacctgtacctgaccgccagcaagaagaagcccacctgctgcccctag

SEQ ID NO: 96112 - DNA, 825 bp, synthetic construct
  misc_feature 1..825: note = Description of Artificial Sequence: Synthetic coding sequence
  source 1..825: mol_type = other DNA
atgctgagaagcagcctgagattccccatcaccaacagcgccggcgccccctgcaaggccgccggcagaatgaacatcctggcccccgtgagaagagacagagtgctggccgagctgccccagtgcctgagaaaggaggccgccctgcacggccacaaggacttccaccccagagtgacctgcgcctgccaggagcacagaaccggcaccgtgggcttcaagatcagcaaggtgatcgtggtgggcgacctgagcgtgggcaagacctgcctgatcaacagattctgcaaggacaccttcgacaagaactacaaggccaccatcggcgtggacttcgagatggagagattcgaggtgctgggcatccccttcagcctgcagctgtgggacaccgccggccaggagagattcaagtgcatcgccagcacctactacagaggcgcccaggccatcatcatcgtgttcaacctgaacgacgtggccagcctggagcacaccaagcagtggctggccgacgccctgaaggagaacgaccccagcagcgtgctgctgttcctgacccccgcccagtacgccctgatggagaaggacgccctgcaggtggcccaggagatgaaggccgagtactgggccgtgagcagcctgaccggcgagaacgtgagagagttcttcttcagagtggccgccctgaccttcgaggccaacgtgctggccgagctggagaagagcggcgccagaagaatcggcgacgtggtgagaatcaacagcgacgacagcaacctgtacctgaccgccagcaagaagaagcccacctgctgcccctag

SEQ ID NO: 96113 - DNA, 807 bp, synthetic construct
  misc_feature 1..807: note = Description of Artificial Sequence: Synthetic coding sequence
  source 1..807: mol_type = other DNA
atgagccacctgcccggcctggagctgagaagagaggccccccccctgctgggccccctgctgagccccttccccctgcccgccggcagctggcacagacagatgctgagaagcagcctgagattccccatcaccaacagcgccggcgccccctgcaaggccgccggcagaatgaacatcctggcccccgtgagaagagacagagtgctggccgagctgccccagtgcctgagaaaggaggccgccctgcacggccacaaggacttccaccccagagtgacctgcgcctgccaggagcacagaaccggcaccgtgggcagattcaagatcagcaaggtgatcgtggtgggcgacctgagcgtgggcaagacctgcctgatcaacagattctgcaaggacaccttcgacaagaactacaaggccaccatcggcgtggacttcgagatggagagattcgaggtgctgggcatccccttcagcctgcagctgtgggacaccgccggccaggagagattcaagtgcatcgccagcacctactacagaggcgcccaggccatcatcatcgtgttcaacctgaacgacgtggccagcctggagcacaccaagcagtggctggccgacgccctgaaggagaacgaccccagcagcgtgctgctgttcctggtgggcagcaagaaggacctgagcacccccgcccagtacgccctgatggagaaggacgccctgcaggtggcccaggagatgaagaccgtgcagagactgcccagccccagagccctgtgccacccccacagcagcagagcctag

SEQ ID NO: 96114 - DNA, 1002 bp, synthetic construct
  misc_feature 1..1002: note = Description of Artificial Sequence: Synthetic coding sequence
  source 1..1002: mol_type = other DNA
atggtgatcgccggcgccagctggatgctgggcagagccgccgccagccccacccagaccccccccaccaccagcaccatcagagtggccagaagaagcagagtggccctggtggccatggtgatcgccgccgccggcagcggcggccccggcagagccgagccccagctgagccagcccagcctggactgcggcagaatgagaagcagcctgacccccctgggcccccccgtgagcagagacagagtgatcgccagcttccccaagtggtacacccccgaggcctgcctgcagctgagagagcacttccacggccaggtgagcgccgcctgccagagaagaaacaccggcaccgtgggcctgaagctgagcaaggtggtggtggtgggcgacctgtacgtgggcaagaccagcctgatccacagattctgcaagaacgtgttcgacagagactacaaggccaccatcggcgtggacttcgagatcgagagattcgagatcgccggcatcccctacagcctgcagatctgggacaccgccggccaggagaagttcaagtgcatcgccagcgcctactacagaggcgcccaggtgatcatcaccgccttcgacctgaccgacgtgcagaccctggagcacaccagacagtggctggaggacgccctgagagagaacgaggccggcagctgcttcatcttcctggtgggcaccaagaaggacctgctgagcggcgccgcctgcgagcaggccgaggccgacgccgtgcacctggccagagagatgcaggccgagtactggagcgtgagcgccaagaccggcgagaacgtgaaggccttcttcagcagagtggccgccctggccttcgagcagagcgtgctgcaggacctggagagacagagcagcgccagactgcaggtgggcaacggcgacctgatccagatggagggcagcccccccgagacccaggagagcaagagacccagcagcctgggctgctgctag

SEQ ID NO: 96115 - DNA, 936 bp, synthetic construct
  misc_feature 1..936: note = Description of Artificial Sequence: Synthetic coding sequence
  source 1..936: mol_type = other DNA
atggtgatcgccggcgccagctggatgctgggcagagccgccgccagccccacccagaccccccccaccaccagcaccatcagagtggccagaagaagcagagtggccctggtggccatggtgatcgccgccgccggcagcggcggccccggcagagccgagccccagctgagccagcccagcctggactgcggcagaatgagaagcagcctgacccccctgggcccccccgtgagcagagacagagtgatcgccagcttccccaagtggtacacccccgaggcctgcctgcagctgagagagcacttccacggccaggtgagcgccgcctgccagagaagaaacaccggcaccgtgggcttctgcaagaacgtgttcgacagagactacaaggccaccatcggcgtggacttcgagatcgagagattcgagatcgccggcatcccctacagcctgcagatctgggacaccgccggccaggagaagttcaagtgcatcgccagcgcctactacagaggcgcccaggtgatcatcaccgccttcgacctgaccgacgtgcagaccctggagcacaccagacagtggctggaggacgccctgagagagaacgaggccggcagctgcttcatcttcctggtgggcaccaagaaggacctgctgagcggcgccgcctgcgagcaggccgaggccgacgccgtgcacctggccagagagatgcaggccgagtactggagcgtgagcgccaagaccggcgagaacgtgaaggccttcttcagcagagtggccgccctggccttcgagcagagcgtgctgcaggacctggagagacagagcagcgccagactgcaggtgggcaacggcgacctgatccagatggagggcagcccccccgagacccaggagagcaagagacccagcagcctgggctgctgctag

SEQ ID NO: 96116 - DNA, 498 bp, synthetic construct
  misc_feature 1..498: note = Description of Artificial Sequence: Synthetic coding sequence
  source 1..498: mol_type = other DNA
atggtgatcgccgccgccggcagcggcggccccggcagagccgagccccagctgagccagcccagcctggactgcggcagaatgagaagcagcctgacccccctgggcccccccgtgagcagagacagagtgatcgccagcttccccaagtggtacacccccgaggcctgcctgcagctgagagagcacttccacggccaggtgagcgccgcctgccagagaagaaacaccggcaccgtgggcctgaagctgagcaaggtggtggtggtgggcgacctgtacgtgggcaagaccagcctgagcgcccagtacgcccacccccagggcttcctgaccgccatgaaccagccccacagccccagacccctgagccccggctacgcccacagcagccaccccagcagagccgtggccagcagaagatggagagccccctgcagacagcccagcgaccagtactgcagccccagagcctggcacaccgccgccgccctgtag

SEQ ID NO: 96117 - DNA, 549 bp, synthetic construct
  misc_feature 1..549: note = Description of Artificial Sequence: Synthetic coding sequence
  source 1..549: mol_type = other DNA
atggacctgcagagacccgacagctaccagggcggcgccggccccgacttcaacgaccacgtgctgcacaagaccatcctggtgggcgacagcggcgtgggcaagaccagcctgctggtgcagttcgaccagggcaagttcatccccggcagcttcagcgccaccgtgggcatcggcttcaccaacaaggtggtgaccgtggacggcgtgagagtgaagctgcagatctgggacaccgccggccaggagagattcagaagcgtgacccacgcctactacagagacgcccaggccctgctgctgctgtacgacatcaccaacaagagcagcttcgacaacatcagagcctggctgaccgagatccacgagtacgcccagagagacgtggtgatcatgctgctgggcaacaaggccgacatgagcagcgagagagtgatcagaagcgaggacggcgagaccctggccagagagtacggcgtgcccttcctggagaccagcgccaagaccggcatgaacgtggagctggccttcctggccatcgccaagtag

SEQ ID NO: 96118 - DNA, 570 bp, synthetic construct
  misc_feature 1..570: note = Description of Artificial Sequence: Synthetic coding sequence
  source 1..570: mol_type = other DNA
atgaccggcacccccggcgccgtggccaccagagacggcgaggcccccgagagaagccccccctgcagccccagctacgacctgaccggcaaggtgatgctgctgggcgacaccggcgtgggcaagacctgcttcctgatccagttcaaggacggcgccttcctgagcggcaccttcatcgccaccgtgggcatcgacttcagaaacaaggtggtgaccgtggacggcgtgagagtgaagctgcagatctgggacaccgccggccaggagagattcagaagcgtgacccacgcctactacagagacgcccaggccctgctgctgctgtacgacatcaccaacaagagcagcttcgacaacatcagagcctggctgaccgagatccacgagtacgcccagagagacgtggtgatcatgctgctgggcaacaaggccgacatgagcagcgagagagtgatcagaagcgaggacggcgagaccctggccagagagtacggcgtgcccttcctggagaccagcgccaagaccggcatgaacgtggagctggccttcctggccatcgccaagtag

SEQ ID NO: 96119 - DNA, 561 bp, synthetic construct
  misc_feature 1..561: note = Description of Artificial Sequence: Synthetic coding sequence
  source 1..561: mol_type = other DNA
atgaccggcacccccggcgccgtggccaccagagacggcgaggcccccgagagaagccccccctgcagccccagctacgacctgaccggcaagaacaaggtggtgaccgtggacggcgtgagagtgaagctgcagatctgggacaccgccggccaggagagattcagaagcgtgacccacgcctactacagagacgcccaggccctgctgctgctgtacgacatcaccaacaagagcagcttcgacaacatcagagcctggctgaccgagatccacgagtacgcccagagagacgtggtgatcatgctgctgggcaacaaggccgacatgagcagcgagagagtgatcagaagcgaggacggcgagaccctggccagagagtacggcgtgcccttcctggagaccagcgccaagaccggcatgaacgtggagctggccttcctggccatcgccaaggagctgaagtacagagccggccaccaggccgacgagcccagcttccagatcagagactacgtggagagccagaagaagagaagcagctgctgcagcttcatgtag

SEQ ID NO: 96120 - DNA, 672 bp, synthetic construct
  misc_feature 1..672: note = Description of Artificial Sequence: Synthetic coding sequence
  source 1..672: mol_type = other DNA
atgaccggcacccccggcgccgtggccaccagagacggcgaggcccccgagagaagccccccctgcagccccagctacgacctgaccggcaaggtgatgctgctgggcgacaccggcgtgggcaagacctgcttcctgatccagttcaaggacggcgccttcctgagcggcaccttcatcgccaccgtgggcatcgacttcagaaacaaggtggtgaccgtggacggcgtgagagtgaagctgcagatctgggacaccgccggccaggagagattcagaagcgtgacccacgcctactacagagacgcccaggccctgctgctgctgtacgacatcaccaacaagagcagcttcgacaacatcagagcctggctgaccgagatccacgagtacgcccagagagacgtggtgatcatgctgctgggcaacaaggccgacatgagcagcgagagagtgatcagaagcgaggacggcgagaccctggccagagagtacggcgtgcccttcctggagaccagcgccaagaccggcatgaacgtggagctggccttcctggccatcgccaaggagctgaagtacagagccggccaccaggccgacgagcccagcttccagatcagagactacgtggagagccagaagaagagaagcagctgctgcagcttcatgtag

SEQ ID NO: 96121 - DNA, 687 bp, synthetic construct
  misc_feature 1..687: note = Description of Artificial Sequence: Synthetic coding sequence
  source 1..687: mol_type = other DNA
atgtggctgatgagcgaggcccacggcgccgagcccgtgctgctgagagaggccgccagacccttcacccagaccctgagactgtgcgtgcccagcggcaacagcaaggtgatgctgctgggcgacaccggcgtgggcaagacctgcttcctgatccagttcaaggacggcgccttcctgagcggcaccttcatcgccaccgtgggcatcgacttcagaaacaaggtggtgaccgtggacggcgtgagagtgaagctgcagatctgggacaccgccggccaggagagattcagaagcgtgacccacgcctactacagagacgcccaggccctgctgctgctgtacgacatcaccaacaagagcagcttcgacaacatcagagcctggctgaccgagatccacgagtacgcccagagagacgtggtgatcatgctgctgggcaacaaggccgacatgagcagcgagagagtgatcagaagcgaggacggcgagaccctggccagagagtacggcgtgcccttcctggagaccagcgccaagaccggcatgaacgtggagctggccttcctggccatcgccaaggagctgaagtacagagccggccaccaggccgacgagcccagcttccagatcagagactacgtggagagccagaagaagagaagcagctgctgcagcttcatgtag

SEQ ID NO: 96122 - DNA, 576 bp, synthetic construct
  misc_feature 1..576: note = Description of Artificial Sequence: Synthetic coding sequence
  source 1..576: mol_type = other DNA
atgtggctgatgagcgaggcccacggcgccgagcccgtgctgctgagagaggccgccagacccttcacccagaccctgagactgtgcgtgcccagcggcaacagcaagaacaaggtggtgaccgtggacggcgtgagagtgaagctgcagatctgggacaccgccggccaggagagattcagaagcgtgacccacgcctactacagagacgcccaggccctgctgctgctgtacgacatcaccaacaagagcagcttcgacaacatcagagcctggctgaccgagatccacgagtacgcccagagagacgtggtgatcatgctgctgggcaacaaggccgacatgagcagcgagagagtgatcagaagcgaggacggcgagaccctggccagagagtacggcgtgcccttcctggagaccagcgccaagaccggcatgaacgtggagctggccttcctggccatcgccaaggagctgaagtacagagccggccaccaggccgacgagcccagcttccagatcagagactacgtggagagccagaagaagagaagcagctgctgcagcttcatgtag

SEQ ID NO: 96123 - DNA, 510 bp, synthetic construct
  misc_feature 1..510: note = Description of Artificial Sequence: Synthetic coding sequence
  source 1..510: mol_type = other DNA
atggacctgcagagacccgacagctaccagggcggcgccggccccgacttcaacgaccacgtgctgcacaagaccatcctggtgggcgacagcggcgtgggcaagaccagcctgctggtgcagttcgaccagggcaagttcatccccggcagcttcagcgccaccgtgggcatcggcttcaccaacaaggtggtgaccgtggacggcgtgagagtgaagctgcagatctgggacaccgccggccaggagagattcagaagcgtgacccacgcctactacagagacgcccaggccctgctgctgctgtacgacatcaccaacaagagcagcttcgacaacatcagagcctggctgaccgagatccacgagtacgcccagagagacgtggtgatcatgctgctgggcaacaaggtgagcggcagcggcgccggcagcgcccagccctgcaccagcagcgccctggccggccccatcaccacccaggagcagctgagcagacaccccagctag

SEQ ID NO: 96124 - DNA, 651 bp, synthetic construct
  misc_feature 1..651: note = Description of Artificial Sequence: Synthetic coding sequence
  source 1..651: mol_type = other DNA
atggacctgcagagacccgacagctaccagggcggcgccggccccgacttcaacgaccacgtgctgcacaagaccatcctggtgggcgacagcggcgtgggcaagaccagcctgctggtgcagttcgaccagggcaagttcatccccggcagcttcagcgccaccgtgggcatcggcttcaccaacaaggtggtgaccgtggacggcgtgagagtgaagctgcagatctgggacaccgccggccaggagagattcagaagcgtgacccacgcctactacagagacgcccaggccctgctgctgctgtacgacatcaccaacaagagcagcttcgacaacatcagagcctggctgaccgagatccacgagtacgcccagagagacgtggtgatcatgctgctgggcaacaaggccgacatgagcagcgagagagtgatcagaagcgaggacggcgagaccctggccagagagtacggcgtgcccttcctggagaccagcgccaagaccggcatgaacgtggagctggccttcctggccatcgccaaggagctgaagtacagagccggccaccaggccgacgagcccagcttccagatcagagactacgtggagagccagaagaagagaagcagctgctgcagcttcatgtag

SEQ ID NO: 96125 - DNA, 651 bp, synthetic construct; identical to SEQ ID NO: 96124
  misc_feature 1..651: note = Description of Artificial Sequence: Synthetic coding sequence
  source 1..651: mol_type = other DNA

SEQ ID NO: 96126 - DNA, 672 bp, synthetic construct; identical to SEQ ID NO: 96120
  misc_feature 1..672: note = Description of Artificial Sequence: Synthetic coding sequence
  source 1..672: mol_type = other DNA

SEQ ID NO: 96127 - DNA, 591 bp, synthetic construct
  misc_feature 1..591: note = Description of Artificial Sequence: Synthetic coding sequence
  source 1..591: mol_type = other DNA
atgtgctgcaaggtgatgctgctgggcgacaccggcgtgggcaagacctgcttcctgatccagttcaaggacggcgccttcctgagcggcaccttcatcgccaccgtgggcatcgacttcagaaacaaggtggtgaccgtggacggcgtgagagtgaagctgcagatctgggacaccgccggccaggagagattcagaagcgtgacccacgcctactacagagacgcccaggccctgctgctgctgtacgacatcaccaacaagagcagcttcgacaacatcagagcctggctgaccgagatccacgagtacgcccagagagacgtggtgatcatgctgctgggcaacaaggccgacatgagcagcgagagagtgatcagaagcgaggacggcgagaccctggccagagagtacggcgtgcccttcctggagaccagcgccaagaccggcatgaacgtggagctggccttcctggccatcgccaaggagctgaagtacagagccggccaccaggccgacgagcccagcttccagatcagagactacgtggagagccagaagaagagaagcagctgctgcagcttcatgtag

SEQ ID NO: 96128 - DNA, 636 bp, synthetic construct
  misc_feature 1..636: note = Description of Artificial Sequence: Synthetic coding sequence
  source 1..636: mol_type = other DNA
atgcaggccccccacaaggagcacctgtacaagctgctggtgatcggcgacctgggcgtgggcaagaccagcatcatcaagagatacgtgcaccagaacttcagcagccactacagagccaccatcggcgtggacttcgccctgaaggtgctgcactgggaccccgagaccgtggtgagactgcagctgtgggacatcgccggccaggagagattcggcaacatgaccagagtgtactacagagaggccatgggcgccttcatcgtgttcgacgtgaccagacccgccaccttcgaggccgtggccaagtggaagaacgacctggacagcaagctgagcctgcccaacggcaagcccgtgagcgtggtgctgctggccaacaagtgcgaccagggcaaggacgtgctgatgaacaacggcctgaagatggaccagttctgcaaggagcacggcttcgtgggctggttcgagaccagcgccaaggagaacatcaacatcgacgaggccagcagatgcctggtgaagcacatcctggccaacgagtgcgacctgatggagagcatcgagcccgacgtggtgaagccccacctgaccagcaccaaggtggccagctgcagcggctgcgccaagagctag

SEQ ID NO: 96129 - DNA, 642 bp, synthetic construct
  misc_feature 1..642: note = Description of Artificial Sequence: Synthetic coding sequence
  source 1..642: mol_type = other DNA
atggaggccatctggctgtaccagttcagactgatcgtgatcggcgacagcaccgtgggcaagagctgcctgatcagaagattcaccgagggcagattcgcccaggtgagcgaccccaccgtgggcgtggacttcttcagcagactggtggagatcgagcccggcaagagaatcaagctgcagatctgggacaccgccggccaggagagattcagaagcatcaccagagcctactacagaaacagcgtgggcggcctgctgctgttcgacatcaccaacagaagaagcttccagaacgtgcacgagtggctggaggagaccaaggtgcacgtgcagccctaccagatcgtgttcgtgctggtgggccacaagtgcgacctggacacccagagacaggtgaccagacacgaggccgagaagctggccgccgcctacggcatgaagtacatcgagaccagcgccagagacgccatcaacgtggagaaggccttcaccgacctgaccagagacatctacgagctggtgaagagaggcgagatcaccatccaggagggctgggagggcgtgaagagcggcttcgtgcccaacgtggtgcacagcagcgaggaggtggtgaagagcgagagaagatgcctgtgctag

SEQ ID NO: 96130 - DNA, 2187 bp, synthetic construct
  misc_feature 1..2187: note = Description of Artificial Sequence: Synthetic coding sequence
  source 1..2187: mol_type = other DNA
atggccggccccgagggcttccagtacagagccctgtaccccttcagaagagagagacccgaggacctggagctgctgcccggcgacgtgctggtggtgagcagagccgccctgcaggccctgggcgtggccgagggcggcgagagatgcccccagagcgtgggctggatgcccggcctgaacgagagaaccagacagagaggcgacttccccggcacctacgtggagttcctgggccccgtggccctggccagacccggccccagacccagaggccccagacccctgcccgccagacccagagacggcgcccccgagcccggcctgaccctgcccgacctgcccgagcagttcagcccccccgacgtggccccccccctgctggtgaagctggtggaggccatcgagagaaccggcctggacagcgagagccactacagacccgagctgcccgcccccagaaccgactggagcctgagcgacgtggaccagtgggacaccgccgccctggccgacggcatcaagagcttcctgctggccctgcccgcccccctggtgacccccgaggccagcgccgaggccagaagagccctgagagaggccgccggccccgtgggccccgccctggagccccccaccctgcccctgcacagagccctgaccctgagattcctgctgcagcacctgggcagagtggccagcagagcccccgccctgggccccgccgtgagagccctgggcgccaccttcggccccctgctgctgagagccccccccccccccagcagccccccccccggcggcgcccccgacggcagcgagcccagccccgacttccccgccctgctggtggagaagctgctgcaggagcacctggaggagcaggaggtggccccccccgccctgccccccaagccccccaaggccaagcccgccagcaccgtgctggccaacggcggcagcccccccagcctgcaggacgccgagtggtactggggcgacatcagcagagaggaggtgaacgagaagctgagagacacccccgacggcaccttcctggtgagagacgccagcagcaagatccagggcgagtacaccctgaccctgagaaagggcggcaacaacaagctgatcaaggtgttccacagagacggccactacggcttcagcgagcccctgaccttctgcagcgtggtggacctgatcaaccactacagacacgagagcctggcccagtacaacgccaagctggacaccagactgctgtaccccgtgagcaagtaccagcaggaccagatcgtgaaggaggacagcgtggaggccgtgggcgcccagctgaaggtgtaccaccagcagtaccaggacaagagcagagagtacgaccagctgtacgaggagtacaccagaaccagccaggagctgcagatgaagagaaccgccatcgaggccttcaacgagaccatcaagatcttcgaggagcagggccagacccaggagaagtgcagcaaggagtacctggagagattcagaagagagggcaacgagaaggagatgcagagaatcctgctgaacagcgagagactgaagagcagaatcgccgagatccacgagagcagaaccaagctggagcagcagctgagagcccaggccagcgacaacagagagatcgacaagagaatgaacagcctgaagcccgacctgatgcagctgagaaagatcagagaccagtacctggtgtggctgacccagaagggcgccagacagaagaagatcaacgagtggctgggcatcaagaacgagaccgaggaccagtacgccctgatggaggacgaggacgacctgccccaccacgaggagagaacctggtacgtgggcaagatcaacagaacccaggccgaggagatgctgagcggcaagagagacggcaccttcctgatcagagagagcagccagagaggctgctacgcctgcagcgtggtggtggacggcgacaccaagcactgcgtgatctacagaaccgccaccggcttcggcttcgccgagccctacaacctgtacggcagcctgaaggagctggtgctgcactaccagcacgccagcctggtgcagcacaacgacgccctgaccgtgaccctggcccaccccgtgagagcccccggccccggccccccccccgccgccagatag

SEQ ID NO: 96131 - DNA, 660 bp, synthetic construct
  misc_feature 1..660: note = Description of Artificial Sequence: Synthetic coding sequence
  source 1..660: mol_type = other DNA
atggccagcgtgaccgacggcaagaccggcgtgaaggacgccagcgaccagaacttcgactacatgttcaagctgctgatcatcggcaacagcagcgtgggcaagaccagcttcctgttcagatacgccgacgacaccttcacccccgccttcgtgagcaccgtgggcatcgacttcaaggtgaagaccgtgtacagacacgagaagagagtgaagctgcagatctgggacaccgccggccaggagagatacagaaccatcaccaccgcctactacagaggcgccatgggcttcatcctgatgtacgacatcaccaacgaggagagcttcaacgccgtgcaggactgggccacccagatcaagacctacagctgggacaacgcccaggtgatcctggtgggcaacaagtgcgacatggaggaggagagagtggtgcccaccgagaagggccagctgctggccgagcagctgggcttcgacttcttcgaggccagcgccaaggagaacatcagcgtgagacaggccttcgagagactggtggacgccatctgcgacaagatgagcgacagcctggacaccgaccccagcatgctgggcagcagcaagaacaccagactgagcgacaccccccccctgctgcagcagaactgcagctgctag

SEQ ID NO: 96132 - DNA, 660 bp, synthetic construct; identical to SEQ ID NO: 96131
  misc_feature 1..660: note = Description of Artificial Sequence: Synthetic coding sequence
  source 1..660: mol_type = other DNA

SEQ ID NO: 96133 - DNA, 684 bp, synthetic construct
  misc_feature 1..684: note = Description of Artificial Sequence: Synthetic coding sequence
  source 1..684: mol_type = other DNA
atgagacacgaggcccccatgcagatggccagcgcccaggacgccagatacggccagaaggacagcagcgaccagaacttcgactacatgttcaagctgctgatcatcggcaacagcagcgtgggcaagaccagcttcctgttcagatacgccgacgacagcttcaccagcgccttcgtgagcaccgtgggcatcgacttcaaggtgaagaccgtgttcaagaacgagaagagaatcaagctgcagatctgggacaccgccggccaggagagatacagaaccatcaccaccgcctactacagaggcgccatgggcttcatcctgatgtacgacatcaccaacgaggagagcttcaacgccgtgcaggactggagcacccagatcaagacctacagctgggacaacgcccaggtgatcctggtgggcaacaagtgcgacatggaggacgagagagtgatcagcaccgagagaggccagcacctgggcgagcagctgggcttcgagttcttcgagaccagcgccaaggacaacatcaacgtgaagcagaccttcgagagactggtggacatcatctgcgacaagatgagcgagagcctggagaccgaccccgccatcaccgccgccaagcagaacaccagactgaaggagacccccccccccccccagcccaactgcgcctgctag

SEQ ID NO: 96134 - DNA, 783 bp, synthetic construct
  misc_feature 1..783: note = Description of Artificial Sequence: Synthetic coding sequence
  source 1..783: mol_type = other DNA
atggccggcagccccctgctgtggggccccagagccggcggcgtgggcctgctggtgctgctgctgctgggcctgttcagacccccccccgccctgtgcgccagacccgtgaaggagcccagaggcctgagcgccgccagcccccccctggccgagaccggcgcccccagaagattcagaagaagcgtgcccagaggcgaggccgccggcgccgtgcaggagctggccagagccctggcccacctgctggaggccgagagacaggagagagccagagccgaggcccaggaggccgaggaccagcaggccagagtgctggcccagctgctgagagtgtggggcgcccccagaaacagcgaccccgccctgggcctggacgacgaccccgacgcccccgccgcccagctggccagagccctgctgagagccagactggaccccgccgccctggccgcccagctggtgcccgcccccgtgcccgccgccgccctgagacccagaccccccgtgtacgacgacggccccgccggccccgacgccgaggaggccggcgacgagacccccgacgtggaccccgagctgctgagatacctgctgggcagaatcctggccggcagcgccgacagcgagggcgtggccgcccccagaagactgagaagagccgccgaccacgacgtgggcagcgagctgccccccgagggcgtgctgggcgccctgctgagagtgaagagactggagacccccgccccccaggtgcccgccagaagactgctgcccccctag

SEQ ID NO: 96135 - DNA, 657 bp, synthetic construct
  misc_feature 1..657: note = Description of Artificial Sequence: Synthetic coding sequence
  source 1..657: mol_type = other DNA
atgagccagaccgccatgagcgagacctacgacttcctgttcaagttcctggtgatcggcaacgccggcaccggcaagagctgcctgctgcaccagttcatcgagaagaagttcaaggacgacagcaaccacaccatcggcgtggagttcggcagcaagatcatcaacgtgggcggcaagtacgtgaagctgcagatctgggacaccgccggccaggagagattcagaagcgtgaccagaagctactacagaggcgccgccggcgccctgctggtgtacgacatcaccagcagagagacctacaacgccctgaccaactggctgaccgacgccagaatgctggccagccagaacatcgtgatcatcctgtgcggcaacaagaaggacctggacgccgacagagaggtgaccttcctggaggccagcagattcgcccaggagaacgagctgatgttcctggagaccagcgccctgaccggcgagaacgtggaggaggccttcgtgcagtgcgccagaaagatcctgaacaagatcgagagcggcgagctggaccccgagagaatgggcagcggcatccagtacggcgacgccgccctgagacagctgagaagccccagaagagcccaggcccccaacgcccaggagtgcggctgctag

SEQ ID NO: 96136 - DNA, 648 bp, synthetic construct
  misc_feature 1..648: note = Description of Artificial Sequence: Synthetic coding sequence
  source 1..648: mol_type = other DNA
atggccagcagaggcgccaccagacccaacggccccaacaccggcaacaagatctgccagttcaagctggtgctgctgggcgagagcgccgtgggcaagagcagcctggtgctgagattcgtgaagggccagttccacgagttccaggagagcaccatcggcgccgccttcctgacccagaccgtgtgcctggacgacaccaccgtgaagttcgagatctgggacaccgccggccaggagagataccacagcctggcccccatgtactacagaggcgcccaggccgccatcgtggtgtacgacatcaccaacgaggagagcttcgccagagccaagaactgggtgaaggagctgcagagacaggccagccccaacatcgtgatcgccctgagcggcaacaaggccgacctggccaacaagagagccgtggacttccaggaggcccagagctacgccgacgacaacagcctgctgttcatggagaccagcgccaagaccagcatgaacgtgaacgagatcttcatggccatcgccaagaagctgcccaagaacgagccccagaaccccggcgccaacagcgccagaggcagaggcgtggacctgaccgagcccacccagcccaccagaaaccagtgctgcagcaactag

SEQ ID NO: 96137 - DNA, 606 bp, synthetic construct
  misc_feature 1..606: note = Description of Artificial Sequence: Synthetic coding sequence
  source 1..606: mol_type = other DNA
atggccagcagaggcgccaccagacccaacggccccaacaccggcaacaagatctgccagttcaagctggtgctgctgggcgagagcgccgtgggcaagagcagcctggtgctgagattcgtgaagggccagttccacgagttccaggagagcaccatcggcgtgaagttcgagatctgggacaccgccggccaggagagataccacagcctggcccccatgtactacagaggcgcccaggccgccatcgtggtgtacgacatcaccaacgaggagagcttcgccagagccaagaactgggtgaaggagctgcagagacaggccagccccaacatcgtgatcgccctgagcggcaacaaggccgacctggccaacaagagagccgtggacttccaggaggcccagagctacgccgacgacaacagcctgctgttcatggagaccagcgccaagaccagcatgaacgtgaacgagatcttcatggccatcgccaagaagctgcccaagaacgagccccagaaccccggcgccaacagcgccagaggcagaggcgtggacctgaccgagcccacccagcccaccagaaaccagtgctgcagcaactag

SEQ ID NO: 96138 - DNA, 48 bp, synthetic construct
  misc_feature 1..48: note = Description of Artificial Sequence: Synthetic coding sequence
  source 1..48: mol_type = other DNA
atggccagcagaggcgccaccagacccaacggccccaacaccggctag

SEQ ID NO: 96139 - DNA, 648 bp, synthetic construct
  misc_feature 1..648: note = Description of Artificial Sequence: Synthetic coding sequence
  source 1..648: mol_type = other DNA
atgaccagcagaagcaccgccagacccaacggccagccccaggccagcaagatctgccagttcaagctggtgctgctgggcgagagcgccgtgggcaagagcagcctggtgctgagattcgtgaagggccagttccacgagtaccaggagagcaccatcggcgccgccttcctgacccagagcgtgtgcctggacgacaccaccgtgaagttcgagatctgggacaccgccggccaggagagataccacagcctggcccccatgtactacagaggcgcccaggccgccatcgtggtgtacgacatcaccaaccaggagaccttcgccagagccaagacctgggtgaaggagctgcagagacaggccagccccagcatcgtgatcgccctggccggcaacaaggccgacctggccaacaagagaatggtggagtacgaggaggcccaggcctacgccgacgacaacagcctgctgttcatggagaccagcgccaagaccgccatgaacgtgaacgacctgttcctggccatcgccaagaagctgcccaagagcgagccccagaacctgggcggcgccgccggcagaagcagaggcgtggacctgcacgagcagagccagcagaacaagagccagtgctgcagcaactag

SEQ ID NO: 96140 - DNA, 525 bp, synthetic construct
  misc_feature 1..525: note = Description of Artificial Sequence: Synthetic coding sequence
  source 1..525: mol_type = other DNA
atgaccagcagaagcaccgccagacccaacggccagccccaggccagcaagatctgccagttcaagctggtgctgctgggcgagagcgccgtgggcaagagcagcctggtgctgagattcgtgaagggccagttccacgagtaccaggagagcaccatcggcgccgccttcctgacccagagcgtgtgcctggacgacaccaccgtgaagttcgagatctgggacaccgccggccaggagagataccacagcctggcccccatgtactacagaggcgcccaggccgccatcgtggtgtacgacatcaccaaccaggaggcccaggcctacgccgacgacaacagcctgctgttcatggagaccagcgccaagaccgccatgaacgtgaacgacctgttcctggccatcgccaagaagctgcccaagagcgagccccagaacctgggcggcgccgccggcagaagcagaggcgtggacctgcacgagcagagccagcagaacaagagccagtgctgcagcaactag

SEQ ID NO: 96141 - DNA, 348 bp, synthetic construct
  misc_feature 1..348: note = Description of Artificial Sequence: Synthetic coding sequence
  source 1..348: mol_type = other DNA
atgaccagcagaagcaccgccagacccaacggccagccccaggccagcaagatctgccagttcaagctggtgctgctgggcgagagcgccgtgggcaagagcagcctggtgctgagattcgtgaagggccagttccacgagtaccaggagagcaccatcggcgccgccttcctgacccagagcgtgtgcctggacgacaccaccgtgaagttcgagatctgggacaccgccggccaggagagataccacagcctggcccccatgtactacagaggcgcccaggccgccatcgtggtgtacgacatcaccaaccaggagaccttcgccagagccaagacctgggtgtag

SEQ ID NO: 96142 - DNA, 303 bp, synthetic construct
  misc_feature 1..303: note = Description of Artificial Sequence: Synthetic coding sequence
  source 1..303: mol_type = other DNA
atgaccagcagaagcaccgccagacccaacggccagccccaggccagcaagatctgccagttcaagctggtgctgctgggcgagagcgccgtgggcaagagcagcctggtgctgagattcgtgaagggccagttccacgagtaccaggagagcaccatcggcgccgccttcctgacccagagcgtgtgcctggacgacaccaccgtgaagttcgagatctgggacaccgccggccaggagagataccacagcctggcccccatgtactacagaggcgcccaggccgccatcgtggtgtactag

SEQ ID NO: 96143 - DNA, 648 bp, synthetic construct; identical to SEQ ID NO: 96139
  misc_feature 1..648: note = Description of Artificial Sequence: Synthetic coding sequence
  source 1..648: mol_type = other DNA

SEQ ID NO: 96144 - DNA, 651 bp, synthetic construct
  misc_feature 1..651: note = Description of Artificial Sequence: Synthetic coding sequence
  source 1..651: mol_type = other DNA
atggccggcagaggcggcgccgccagacccaacggccccgccgccggcaacaagatctgccagttcaagctggtgctgctgggcgagagcgccgtgggcaagagcagcctggtgctgagattcgtgaagggccagttccacgagtaccaggagagcaccatcggcgccgccttcctgacccagaccgtgtgcctggacgacaccaccgtgaagttcgagatctgggacaccgccggccaggagagataccacagcctggcccccatgtactacagaggcgcccaggccgccatcgtggtgtacgacatcaccaacaccgacaccttcgccagagccaagaactgggtgaaggagctgcagagacaggccagccccaacatcgtgatcgccctggccggcaacaaggccgacctggccagcaagagagccgtggagttccaggaggcccaggcctacgccgacgacaacagcctgctgttcatggagaccagcgccaagaccgccatgaacgtgaacgagatcttcatggccatcgccaagaagctgcccaagaacgagccccagaacgccaccggcgcccccggcagaaacagaggcgtggacctgcaggagaacaaccccgccagcagaagccagtgctgcagcaactag

SEQ ID NO: 96145 - DNA, 651 bp, synthetic construct; identical to SEQ ID NO: 96144
  misc_feature 1..651: note = Description of Artificial Sequence: Synthetic coding sequence
  source 1..651: mol_type = other DNA

SEQ ID NO: 96146 - DNA, 750 bp, synthetic construct
  misc_feature 1..750: note = Description of Artificial Sequence: Synthetic coding sequence
  source 1..750: mol_type = other DNA
atggagctgagctggagaagccccagccccctgagcgccagcctgcacagcaccagcccccacccccacgccctgtggaccaccaccgccggcagagccatggccggcagaggcggcgccgccagacccaacggccccgccgccggcaacaagatctgccagttcaagctggtgctgctgggcgagagcgccgtgggcaagagcagcctggtgctgagattcgtgaagggccagttccacgagtaccaggagagcaccatcggcgccgccttcctgacccagaccgtgtgcctggacgacaccaccgtgaagttcgagatctgggacaccgccggccaggagagataccacagcctggcccccatgtactacagaggcgcccaggccgccatcgtggtgtacgacatcaccaacaccgacaccttcgccagagccaagaactgggtgaaggagctgcagagacaggccagccccaacatcgtgatcgccctggccggcaacaaggccgacctggccagcaagagagccgtggagttccaggaggcccaggcctacgccgacgacaacagcctgctgttcatggagaccagcgccaagaccgccatgaacgtgaacgagatcttcatggccatcgccaagaagctgcccaagaacgagccccagaacgccaccggcgcccccggcagaaacagaggcgtggacctgcaggagaacaaccccgccagcagaagccagtgctgcagcaactag

SEQ ID NO: 96147 - DNA, 225 bp, synthetic construct
  misc_feature 1..225: note = Description of Artificial Sequence: Synthetic coding sequence
  source 1..225: mol_type = other DNA
atggccggcagaggcggcgccgccagacccaacggccccgccgccggcaacaagatctgccagttcaagctggtgctgctgggcgagagcgccgtgggcaagagcagcctggtgctgagattcgtgaagggccagttccacgagtaccaggagagcaccatcggcgccgccttcctgacccagaccgtgtgcctggacgacaccaccgtgaagttcgagatctag

SEQ ID NO: 96148 - DNA, 279 bp, synthetic construct
  misc_feature 1..279: note = Description of Artificial Sequence: Synthetic coding sequence
  source 1..279: mol_type = other DNA
atggccggcagaggcggcgccgccagacccaacggccccgccgccggcaacaagatctgccagttcaagctggtgctgctgggcgagagcgccgtgggcaagagcagcctggtgctgagattcgtgaagggccagttccacgagtaccaggagagcaccatcggcgccgccttcctgacccagaccgtgtgcctggacgacaccaccgtgaagttcgagatctgggacaccgccggccaggagagataccacagcctggcccccatgtactacagatag

SEQ ID NO: 96149 - DNA, 375 bp, synthetic construct
  misc_feature 1..375: note = Description of Artificial Sequence: Synthetic coding sequence
  source 1..375: mol_type = other DNA
atggccggcagaggcggcgccgccagacccaacggccccgccgccggcaacaagatctgccagttcaagctggtgctgctgggcgagagcgccgtgggcaagagcagcctggtgctgagattcgtgaagggccagttccacgagtaccaggagagcaccatcggcgccgccttcctgacccagaccgtgtgcctggacgacaccaccgtgaagttcgagatctgggacaccgccggccaggagagataccacagcctggcccccatgtactacagaggcgcccaggccgccatcgtggtgtacgacatcaccaacaccgacaccttcgccagagccaagaactgggtgaaggagctgcagagacaggccagctag

SEQ ID NO: 96150 - DNA, 627 bp, synthetic construct
  misc_feature 1..627: note = Description of Artificial Sequence: Synthetic coding sequence
  source 1..627: mol_type = other DNA
atgagcaccggcggcgacttcggcaaccccctgagaaagttcaagctggtgttcctgggcgagcagagcgtgggcaagaccagcctgatcaccagattcatgtacgacagcttcgacaacacctaccaggccaccatcggcatcgacttcctgagcaagaccatgtacctggaggacagaaccatcagactgcagctgtgggacaccgccggccaggagagattcagaagcctgatccccagctacatcagagacagcgccgccgccgtggtggtgtacgacatcaccaacgtgaacagcttccagcagaccaccaagtggatcgacgacgtgagaaccgagagaggcagcgacgtgatcatcatgctggtgggcaacaagaccgacctggccgacaagagacaggtgagcatcgaggagggcgagagaaaggccaaggagctgaacgtgatgttcatcgagaccagcgccaaggccggctacaacgtgaagcagctgttcagaagagtggccgccgccctgcccggcatggagagcacccaggacagaagcagagaggacatgatcgacatcaagctggagaagccccaggagcagcccgtgagcgagggcggctgcagctgctag

SEQ ID NO: 96151 - DNA, 627 bp, synthetic construct
  misc_feature 1..627: note = Description of Artificial Sequence: Synthetic coding sequence
  source 1..627: mol_type = other DNA
atgagcaccggcggcgacttcggcaaccccctgagaaagttcaagctggtgttcctgggcgagcagagcgtgggcaagaccagcctgatcaccagattcatgtacgacagcttcgacaacacctaccaggccaccatcggcatcgacttcctgagcaagaccatgtacctggaggacagaaccgtgagactgcagctgtgggacaccgccggccaggagagattcagaagcctgatccccagctacatcagagacagcaccgtggccgtggtggtgtacgacatcaccaacgtgaacagcttccagcagaccaccaagtggatcgacgacgtgagaaccgagagaggcagcgacgtgatcatcatgctggtgggcaacaagaccgacctggccgacaagagacaggtgagcatcgaggagggcgagagaaaggccaaggagctgaacgtgatgttcatcgagaccagcgccaaggccggctacaacgtgaagcagctgttcagaagagtggccgccgccctgcccggcatggagagcacccaggacagaagcagagaggacatgatcgacatcaagctggagaagccccaggagcagcccgtgagcgagggcggctgcagctgctag

SEQ ID NO: 96152 - DNA, 627 bp, synthetic construct; identical to SEQ ID NO: 96150
  misc_feature 1..627: note = Description of Artificial Sequence: Synthetic coding sequence
  source 1..627: mol_type = other DNA

SEQ ID NO: 96153 - DNA, 525 bp, synthetic construct
  misc_feature 1..525: note = Description of Artificial Sequence: Synthetic coding sequence
  source 1..525: mol_type = other DNA
tgacccctgagaaagttcaagctggtgttcctgggcgagcagagcgtgggcaagaccagcctgatcaccagattcatgtacgacagcttcgacaacacctaccaggccaccatcggcatcgacttcctgagcaagaccatgtacctggaggacagaaccgtgagactgcagctgtgggacaccgccggccaggagagattcagaagcctgatccccagctacatcagagacagcaccgtggccgtggtggtgtacgacatcaccaacgtgaacagcttccagcagaccaccaagtggatcgacgacgtgagaaccgagagaggcagcgacgtgatcatcatgctggtgggcaacaagaccgacctggccgacaagagacaggtgagcatcgaggagggcgagagaaaggccaaggagctgaacgtgatgttcatcgagaccagcgccaaggccggctacaacgtgaagcagagaatcggcagctgccacgtggcccaggccagcctggagctgctggacagctag

SEQ ID NO: 96154 - DNA, 225 bp, synthetic construct
  misc_feature 1..225: note = Description of Artificial Sequence: Synthetic coding sequence
  source 1..225: mol_type = other DNA
atgagcaccggcggcgacttcggcaaccccctgagaaagttcaagctggtgttcctgggcgagcagagcgtgggcaagaccagcctgatcaccagattcatgtacgacagcttcgacaacacctaccaggccaccatcggcatcgacttcctgagcaagaccatgtacctggaggacagaaccgtgagactgcagctgtgggacaccgccggccaggagagatag

SEQ ID NO: 96155 - DNA, 528 bp, synthetic construct
  misc_feature 1..528: note = Description of Artificial Sequence: Synthetic coding sequence
  source 1..528: mol_type = other DNA
atgtacgacagcttcgacaacacctaccaggccaccatcggcatcgacttcctgagcaagaccatgtacctggaggacagaaccatcagactgcagctgtgggacaccgccggccaggagagattcagaagcctgatccccagctacatcagagacagcgccgccgccgtggtggtgtacgacatcaccaacgtgaacagcttccagcagaccaccaagtggatcgacgacgtgagaaccgagagaggcagcgacgtgatcatcatgctggtgggcaacaagaccgacctggccgacaagagacaggtgagcatcgaggagggcgagagaaaggccaaggagctgaacgtgatgttcatcgagaccagcgccaaggccggctacaacgtgaagcagctgttcagaagagtggccgccgccctgcccggcatggagagcacccaggacagaagcagagaggacatgatcgacatcaagctggagaagccccaggagcagcccgtgagcgagggcggctgcagctgctag

SEQ ID NO: 96156 - DNA, 429 bp, synthetic construct
  misc_feature 1..429: note = Description of Artificial Sequence: Synthetic coding sequence
  source 1..429: mol_type = other DNA
atgagcaccggcggcgacttcggcaaccccctgagaaagttcaagctggtgttcctgggcgagcagagcgtgggcaagaccagcctgatcaccagattcatgtacgacagcttcgacaacacctaccaggccaccatcggcatcgacttcctgagcaagaccatgtacctggaggacagaaccatcagactgcagctgtgggacaccgccggccaggagagattcagaagcctgatccccagctacatcagagacagcgccgccgccgtggtggtgtacgacatcaccaacgtgaacagcttccagcagaccaccaagtggatcgacgacgtgagaaccgagagaggcagcgacgtgatcatcatgctggtgggcaacaagaccgacctggccgacaagagacaggtgagcatcgaggagggcgagtag

SEQ ID NO: 96157 - DNA, 315 bp, synthetic construct
  misc_feature 1..315: note = Description of Artificial Sequence: Synthetic coding sequence
  source 1..315: mol_type = other DNA
atgagcaccggcggcgacttcggcaaccccctgagaaagttcaagctggtgttcctgggcgagcagagcgtgggcaagaccagcctgatcaccagattcatgtacgacagcttcgacaacacctaccaggccaccatcggcatcgacttcctgagcaagaccatgtacctggaggacagaaccctgttcagaagagtggccgccgccctgcccggcatggagagcacccaggacagaagcagagaggacatgatcgacatcaagctggagaagccccaggagcagcccgtgagcgagggcggctgcagctgctag

SEQ ID NO: 96158 - DNA, 606 bp, synthetic construct
  misc_feature 1..606: note = Description of Artificial Sequence: Synthetic coding sequence
  source 1..606: mol_type = other DNA
tgagtgttccccagaggcctggccctgagaagcgccgacgtggtggaggtgggcaagaccagcctgatcaccagattcatgtacgacagcttcgacaacacctaccaggccaccatcggcatcgacttcctgagcaagaccatgtacctggaggacagaaccatcagactgcagctgtgggacaccgccggccaggagagattcagaagcctgatccccagctacatcagagacagcgccgccgccgtggtggtgtacgacatcaccaacgtgaacagcttccagcagaccaccaagtggatcgacgacgtgagaaccgagagaggcagcgacgtgatcatcatgctggtgggcaacaagaccgacctggccgacaagagacaggtgagcatcgaggagggcgagagaaaggccaaggagctgaacgtgatgttcatcgagaccagcgccaaggccggctacaacgtgaagcagctgttcagaagagtggccgccgccctgcccggcatggagagcacccaggacagaagcagagaggacatgatcgacatcaagctggagaagccccaggagcagcccgtgagcgagggcggctgcagctgctag

SEQ ID NO: 96159 - DNA, 144 bp, synthetic construct
  misc_feature 1..144: note = Description of Artificial Sequence: Synthetic coding sequence
  source 1..144: mol_type = other DNA
atgagcaccggcggcgacttcggcaaccccctgagaaagttcaagctggtgttcctgggcgagcagagcgtgggcaagaccagcctgatcaccagattcatgtacgacagcttcgacaacacctaccaggccaccatcggctag

SEQ ID NO: 96160 - DNA, 765 bp, synthetic construct
  misc_feature 1..765: note = Description of Artificial Sequence: Synthetic coding sequence
  source 1..765: mol_type = other DNA
atgagcgccggcggcgacttcggcaaccccctgagaaagttcaagctggtgttcctgggcgagcagagcgtggccaagaccagcctgatcaccagattcagatacgacagcttcgacaacacctaccaggccatcatcggcatcgacttcctgagcaagaccatgtacctggaggacggcaccatcggcctgagactgtgggacaccgccggccaggagagactgagaagcctgatccccagatacatcagagacagcgccgccgccgtggtggtgtacgacatcaccaacgtgaacagcttccagcagaccaccaagtggatcgacgacgtgagaaccgagagaggcagcgacgtgatcatcaccctggtgggcaacagaaccgacctggccgacaagagacaggtgagcgtggaggagggcgagagaaaggccaagggcctgaacgtgaccttcatcgagaccagagccaaggccggctacaacgtgaagcagctgttcagaagagtggccgccgccctgcccggcatggagagcacccaggacggcagcagagaggacatgagcgacatcaagctggagaagccccaggagcagaccgtgagcgagggcggctgcagctgctacagccccatgagcagcagcaccctgccccagaagcccccctacagcttcatcgactgcagcgtgaacatcggcctgaacctgttccccagcctgatcaccttctgcaacagcagcctgctgcccgtgagctggagatag

SEQ ID NO: 96161 - DNA, 612 bp, synthetic construct
  misc_feature 1..612: note = Description of Artificial Sequence: Synthetic coding sequence
  source 1..612: mol_type = other DNA
atgggcagcagagaccacctgttcaaggtgctggtggtgggcgacgccgccgtgggcaagaccagcctggtgcagagatacagccaggacagcttcagcaagcactacaagagcaccgtgggcgtggacttcgccctgaaggtgctgcagtggagcgactacgagatcgtgagactgcagctgtgggacatcgccggccaggagagattcaccagcatgaccagactgtactacagagacgccagcgcctgcgtgatcatgttcgacgtgaccaacgccaccaccttcagcaacagccagagatggaagcaggacctggacagcaagctgaccctgcccaacggcgagcccgtgccctgcctgctgctggccaacaagtgcgacctgagcccctgggccgtgagcagagaccagatcgacagattcagcaaggagaacggcttcaccggctggaccgagaccagcgtgaaggagaacaagaacatcaacgaggccatgagagtgctgatcgagaagatgatgagaaacagcaccgaggacatcatgagcctgagcacccagggcgactacatcaacctgcagaccaagagcagcagctggagctgctgctag

SEQ ID NO: 96162 - DNA, 612 bp, synthetic construct; identical to SEQ ID NO: 96161
  misc_feature 1..612: note = Description of Artificial Sequence: Synthetic coding sequence
  source 1..612: mol_type = other DNA

SEQ ID NO: 96163 - DNA, 612 bp, synthetic construct; identical to SEQ ID NO: 96161
  misc_feature 1..612: note = Description of Artificial Sequence: Synthetic coding sequence
  source 1..612: mol_type = other DNA

SEQ ID NO: 96164 - DNA, 396 bp, synthetic construct
  misc_feature 1..396: note = Description of Artificial Sequence: Synthetic coding sequence
  source 1..396: mol_type = other DNA
atgaccagactgtactacagagacgccagcgcctgcgtgatcatgttcgacgtgaccaacgccaccaccttcagcaacagccagagatggaagcaggacctggacagcaagctgaccctgcccaacggcgagcccgtgccctgcctgctgctggccaacaagtgcgacctgagcccctgggccgtgagcagagaccagatcgacagattcagcaaggagaacggcttcaccggctggaccgagaccagcgtgaaggagaacaagaacatcaacgaggccatgagagtgctgatcgagaagatgatgagaaacagcaccgaggacatcatgagcctgagcacccagggcgactacatcaacctgcagaccaagagcagcagctggagctgctgctag

SEQ ID NO: 96165 - DNA, 540 bp, synthetic construct
  misc_feature 1..540: note = Description of Artificial Sequence: Synthetic coding sequence
  source 1..540: mol_type = other DNA
atgggcagcagagaccacctgttcaaggtgctggtggtgggcgacgccgccgtgggcaagaccagcctggtgcagagatacagccaggacagcttcagcaagcactacaagagcaccgtgggcggccaggagagattcaccagcatgaccagactgtactacagagacgccagcgcctgcgtgatcatgttcgacgtgaccaacgccaccaccttcagcaacagccagagatggaagcaggacctggacagcaagctgaccctgcccaacggcgagcccgtgccctgcctgctgctggccaacaagtgcgacctgagcccctgggccgtgagcagagaccagatcgacagattcagcaaggagaacggcttcaccggctggaccgagaccagcgtgaaggagaacaagaacatcaacgaggccatgagagtgctgatcgagaagatgatgagaaacagcaccgaggacatcatgagcctgagcacccagggcgactacatcaacctgcagaccaagagcagcagctggagctgctgctag

SEQ ID NO: 96166 - DNA, 624 bp, synthetic construct
  misc_feature 1..624: note = Description of Artificial Sequence: Synthetic coding sequence
  source 1..624: mol_type = other DNA
atggccaagacctacgactacctgttcaagctgctgctgatcggcgacagcggcgtgggcaagacctgcgtgctgttcagattcagcgaggacgccttcaacagcaccttcatcagcaccatcggcatcgacttcaagatcagaaccatcgagctggacggcaagagaatcaagctgcagatctgggacaccgccggccaggagagattcagaaccatcaccaccgcctactacagaggcgccatgggcatcatgctggtgtacgacatcaccaacgagaagagcttcgacaacatcagaaactggatcagaaacatcgaggagcacgccagcgccgacgtggagaagatgatcctgggcaacaagtgcgacgtgaacgacaagagacaggtgagcaaggagagaggcgagaagctggccctggactacggcatcaagttcatggagaccagcgccaaggccaacatcaacgtggagaacgccttcttcaccctggccagagacatcaaggccaagatggacaagaagctggagggcaacagcccccagggcagcaaccagggcgtgaagatcacccccgaccagcagaagagaagcagcttcttcagatgcgtgctgctgtag

SEQ ID NO: 96167 - DNA, 606 bp, synthetic construct
  misc_feature 1..606: note = Description of Artificial Sequence: Synthetic coding sequence
  source 1..606: mol_type = other DNA
atgagcggcaagagcctgctgctgaaggtgatcctgctgggcgacggcggcgtgggcaagagcagcctgatgaacagatacgtgaccaacaagttcgacagccaggccttccacaccatcggcgtggagttcctgaacagagacctggaggtggacggcagattcgtgaccctgcagatctgggacaccgccggccaggagagattcaagagcctgagaacccccttctacagaggcgccgactgctgcctgctgaccttcagcgtggacgacagacagagcttcgagaacctgggcaactggcagaaggagttcatctactacgccgacgtgaaggaccccgagcacttccccttcgtggtgctgggcaacaaggtggacaaggaggacagacaggtgaccaccgaggaggcccagacctggtgcatggagaacggcgactacccctacctggagaccagcgccaaggacgacaccaacgtgaccgtggccttcgaggaggccgtgagacaggtgctggccgtggaggagcagctggagcactgcatgctgggccacaccatcgacctgaacagcggcagcaaggccggcagcagctgctgctag

SEQ ID NO: 96168 - DNA, 2589 bp, synthetic construct
  misc_feature 1..2589: note = Description of Artificial Sequence: Synthetic coding sequence
  source 1..2589: mol_type = other DNA
atggcccagcccggccccgccagccagcccgacgtgagcctgcagcagagagtggccgagctggagaagatcaacgccgagttcctgagagcccagcagcagctggagcaggagttcaaccagaagagagccaagttcaaggagctgtacctggccaaggaggaggacctgaagagacagaacgccgtgctgcaggccgcccaggacgacctgggccacctgagaacccagctgtgggaggcccaggccgagatggagaacatcaaggccatcgccaccgtgagcgagaacaccaagcaggaggccatcgacgaggtgaagagacagtggagagaggaggtggccagcctgcaggccgtgatgaaggagaccgtgagagactacgagcaccagttccacctgagactggagcaggagagaacccagtgggcccagtacagagagagcgccgagagagagatcgccgacctgagaagaagactgagcgagggccaggaggaggagaacctggagaacgagatgaagaaggcccaggaggacgccgagaagctgagaagcgtggtgatgcccatggagaaggagatcgccgccctgaaggacaagctgaccgaggccgaggacaagatcaaggagctggaggccagcaaggtgaaggagctgaaccactacctggaggccgagaagagctgcagaaccgacctggagatgtacgtggccgtgctgaacacccagaagagcgtgctgcaggaggacgccgagaagctgagaaaggagctgcacgaggtgtgccacctgctggagcaggagagacagcagcacaaccagctgaagcacacctggcagaaggccaacgaccagttcctggagagccagagactgctgatgagagacatgcagagaatggagatcgtgctgaccagcgagcagctgagacaggtggaggagctgaagaagaaggaccaggaggacgacgagcagcagagactgaacaagagaaaggaccacaagaaggccgacgtggaggaggagatcaagatccccgtggtgtgcgccctgacccaggaggagagcagcgcccagctgagcaacgaggaggagcacctggacagcaccagaggcagcgtgcacagcctggacgccggcctgctgctgcccagcggcgaccccttcagcaagagcgacaacgacatgttcaaggacggcctgagaagagcccagagcaccgacagcctgggcaccagcggcagcctgcagagcaaggccctgggctacaactacaaggccaagagcgccggcaacctggacgagagcgacttcggccccctggtgggcgccgacagcgtgagcgagaacttcgacaccgccagcctgggcagcctgcagatgcccagcggcttcatgctgaccaaggaccaggagagagccatcaaggccatgacccccgagcaggaggagaccgccagcctgctgagcagcgtgacccagggcatggagagcgcctacgtgagccccagcggctacagactggtgagcgagaccgagtggaacctgctgcagaaggaggtgcacaacgccggcaacaagctgggcagaagatgcgacatgtgcagcaactacgagaagcagctgcagggcatccagatccaggaggccgagaccagagaccaggtgaagaagctgcagctgatgctgagacaggccaacgaccagctggagaagaccatgaaggacaagcaggagctggaggacttcatcaagcagagcagcgaggacagcagccaccagatcagcgccctggtgctgagagcccaggccagcgagatcctgctggaggagctgcagcagggcctgagccaggccaagagagacgtgcaggagcagatggccgtgctgatgcagagcagagagcaggtgagcgaggagctggtgagactgcagaaggacaacgacagcctgcagggcaagcacagcctgcacgtgagcctgcagcaggccgaggacttcatcctgcccgacaccaccgaggccctgagagagctggtgctgaagtacagagaggacatcatcaacgtgagaaccgccgccgaccacgtggaggagaagctgaaggccgagatcctgttcctgaaggagcagatccaggccgagcagtgcctgaaggagaacctggaggagaccctgcagctggagatcgagaactgcaaggaggagatcgccagcatcagcagcctgaaggccgagctggagagaatcaaggtggagaagggccagctggagagcaccctgagagagaagagccagcagctggagagcctgcaggagatcaagatcagcctggaggagcagctgaagaaggagaccgccgccaaggccaccgtggagcagctgatgttcgaggagaagaacaaggcccagagactgcagaccgagctggacgtgagcgagcaggtgcagagagacttcgtgaagctgagccagaccctgcaggtgcagctggagagaatcagacaggccgacagcctggagagaatcagagccatcctgaacgacaccaagctgaccgacatcaaccagctgcccgagacctag

SEQ ID NO: 96169 - DNA, 2490 bp, synthetic construct
  misc_feature 1..2490: note = Description of Artificial Sequence: Synthetic coding sequence
  source 1..2490: mol_type = other DNA
atggcccagcccggccccgccagccagcccgacgtgagcctgcagcagagagtggccgagctggagaagatcaacgccgagttcctgagagcccagcagcagctggagcaggagttcaaccagaagagagccaagttcaaggagctgtacctggccaaggaggaggacctgaagagacagaacgccgtgctgcaggccgcccaggacgacctgggccacctgagaacccagctgtgggaggcccaggccgagatggagaacatcaaggccatcgccaccgtgagcgagaacaccaagcaggaggccatcgacgaggtgaagagacagtggagagaggaggtggccagcctgcaggccgtgatgaaggagaccgtgagagactacgagcaccagttccacctgagactggagcaggagagaacccagtgggcccagtacagagagagcgccgagagagagatcgccgacctgagaagaagactgagcgagggccaggaggaggagaacctggagaacgagatgaagaaggcccaggaggacgccgagaagctgagaagcgtggtgatgcccatggagaaggagatcgccgccctgaaggacaagctgaccgaggccgaggacaagatcaaggagctggaggccagcaaggtgaaggagctgaaccactacctggaggccgagaagagctgcagaaccgacctggagatgtacgtggccgtgctgaacacccagaagagcgtgctgcaggaggacgccgagaagctgagaaaggagctgcacgaggtgtgccacctgctggagcaggagagacagcagcacaaccagctgaagcacacctggcagaaggccaacgaccagttcctggagagccagagactgctgatgagagacatgcagagaatggagatcgtgctgaccagcgagcagctgagacaggtggaggagctgaagaagaaggaccaggaggacgacgagcagcagagactgaacaagagaaaggaccacaagaaggccgacgtggaggaggagatcaagatccccgtggtgtgcgccctgacccaggaggagagcagcgcccagctgagcaacgaggaggagcacctggacagcaccagaggcagcgtgcacagcctggacgccggcctgctgctgcccagcggcgaccccttcagcaagagcgacaacgacatgttcaaggacggcctgagaagagcccagagcaccgacagcctgggcaccagcggcagcctgcagagcaaggccctgggctacaactacaaggccaagagcgccggcaacctggacgagagcgacttcggccccctggtgggcgccgacagcgtgagcgagaacttcgacaccgccagcctgggcagcctgcagatgcccagcggcttcatgctgaccaaggaccaggagagagccatcaaggccatgacccccgagcaggaggagaccgccagcctgctgagcagcgtgacccagggcatggagagcgcctacgtgagccccagcggctacagactggtgagcgagaccgagtggaacctgctgcagaaggaggtgcacaacgccggcaacaagctgggcagaagatgcgacatgtgcagcaactacgagaagcagctgcagggcatccagatccaggaggccgagaccagagaccaggtgaagaagctgcagctgatgctgagacaggccaacgaccagctggagaagaccatgaaggacaagcaggagctggaggacttcatcaagcagagcagcgaggacagcagccaccagatcagcgccctggtgctgagagcccaggccagcgagatcctgctggaggagctgcagcagggcctgagccaggccaagagagacgtgcaggagcagatggccgtgctgatgcagagcagagagcaggtgagcgaggagctggtgagactgcagaaggacaacgacagcctgcagggcaagcacagcctgcacgtgagcctgcagcaggccgaggacttcatcctgcccgacaccaccgaggccctgagagagctggtgctgaagtacagagaggacatcatcaacgtgagaaccgccgccgaccacgtggaggagaagctgaaggccgagatcctgttcctgaaggagcagatccaggccgagcagtgcctgaaggagaacctggaggagaccctgcagctggagatcgagaactgcaaggaggagatcgccagcatcagcagcctgaaggccgagctggagagaatcaaggtggagaagggccaggccaccgtggagcagctgatgttcgaggagaagaacaaggcccagagactgcagaccgagctggacgtgagcgagcaggtgcagagagacttcgtgaagctgagccagaccctgcaggtgcagctggagagaatcagacaggccgacagcctggagagaatcagagccatcctgaacgacaccaagctgaccgacatcaaccagctgcccgagacctag

SEQ ID NO: 96170 - DNA, 2490 bp, synthetic construct; identical to SEQ ID NO: 96169
  misc_feature 1..2490: note = Description of Artificial Sequence: Synthetic coding sequence
  source 1..2490: mol_type = other DNA

SEQ ID NO: 96171 - DNA, 2460 bp, synthetic construct
  misc_feature 1..2460: note = Description of Artificial Sequence: Synthetic coding sequence
  source 1..2460: mol_type = other DNA
atggcccagcccggccccgccagccagcccgacgaggacctgaagagacagaacgccgtgctgcaggccgcccaggacgacctgggccacctgagaacccagctgtgggaggcccaggccgagatggagaacatcaaggccatcgccaccgtgagcgagaacaccaagcaggaggccatcgacgaggtgaagagacagtggagagaggaggtggccagcctgcaggccgtgatgaaggagaccgtgagagactacgagcaccagttccacctgagactggagcaggagagaacccagtgggcccagtacagagagagcgccgagagagagatcgccgacctgagaagaagactgagcgagggccaggaggaggagaacctggagaacgagatgaagaaggcccaggaggacgccgagaagctgagaagcgtggtgatgcccatggagaaggagatcgccgccctgaaggacaagctgaccgaggccgaggacaagatcaaggagctggaggccagcaaggtgaaggagctgaaccactacctggaggccgagaagagctgcagaaccgacctggagatgtacgtggccgtgctgaacacccagaagagcgtgctgcaggaggacgccgagaagctgagaaaggagctgcacgaggtgtgccacctgctggagcaggagagacagcagcacaaccagctgaagcacacctggcagaaggccaacgaccagttcctggagagccagagactgctgatgagagacatgcagagaatggagatcgtgctgaccagcgagcagctgagacaggtggaggagctgaagaagaaggaccaggaggacgacgagcagcagagactgaacaagagaaaggaccacaagaaggccgacgtggaggaggagatcaagatccccgtggtgtgcgccctgacccaggaggagagcagcgcccagctgagcaacgaggaggagcacctggacagcaccagaggcagcgtgcacagcctggacgccggcctgctgctgcccagcggcgaccccttcagcaagagcgacaacgacatgttcaaggacggcctgagaagagcccagagcaccgacagcctgggcaccagcggcagcctgcagagcaaggccctgggctacaactacaaggccaagagcgccggcaacctggacgagagcgacttcggccccctggtgggcgccgacagcgtgagcgagaacttcgacaccgccagcctgggcagcctgcagatgcccagcggcttcatgctgaccaaggaccaggagagagccatcaaggccatgacccccgagcaggaggagaccgccagcctgctgagcagcgtgacccagggcatggagagcgcctacgtgagccccagcggctacagactggtgagcgagaccgagtggaacctgctgcagaaggaggtgcacaacgccggcaacaagctgggcagaagatgcgacatgtgcagcaactacgagaagcagctgcagggcatccagatccaggaggccgagaccagagaccaggtgaagaagctgcagctgatgctgagacaggccaacgaccagctggagaagaccatgaaggacaagcaggagctggaggacttcatcaagcagagcagcgaggacagcagccaccagatcagcgccctggtgctgagagcccaggccagcgagatcctgctggaggagctgcagcagggcctgagccaggccaagagagacgtgcaggagcagatggccgtgctgatgcagagcagagagcaggtgagcgaggagctggtgagactgcagaaggacaacgacagcctgcagggcaagcacagcctgcacgtgagcctgcagcaggccgaggacttcatcctgcccgacaccaccgaggccctgagagagctggtgctgaagtacagagaggacatcatcaacgtgagaaccgccgccgaccacgtggaggagaagctgaaggccgagatcctgttcctgaaggagcagatccaggccgagcagtgcctgaaggagaacctggaggagaccctgcagctggagatcgagaactgcaaggaggagatcgccagcatcagcagcctgaaggccgagctggagagaatcaaggtggagaagggccagctggagagcaccctgagagagaagagccagcagctggagagcctgcaggagatcaagatcagcctggaggagcagctgaagaaggagaccgccgccaaggccaccgtggagcagctgatgttcgaggagaagaacaaggcccagagactgcagaccgagctggacgtgagcgagcaggtgcagagagacttcgtgaagctgagccagaccctgcaggtgcagctggagagaatcagacaggccgacagcctggagagaatcagagccatcctgaacgacaccaagctgaccgacatcaaccagctgcccgagacctag

SEQ ID NO: 96172 - DNA, 2151 bp, synthetic construct
  misc_feature 1..2151: note = Description of Artificial Sequence: Synthetic coding sequence
  source 1..2151: mol_type = other DNA
atggcccagcccggccccgccagccagcccgacgtgagcctgcagcagagagtggccgagctggagaagatcaacgccgagttcctgagagcccagcagcagctggagcaggagttcaaccagaagagagccaagttcaaggagctgtacctggccaaggaggaggacctgaagagacagaacgccgtgctgcaggccgcccaggacgacctgggccacctgagaacccagctgtgggaggcccaggccgagatggagaacatcaaggccatcgccaccgtgagcgagaacaccaagcaggaggccatcgacgaggtgaagagacagtggagagaggaggtggccagcctgcaggccgtgatgaaggagaccgtgagagactacgagcaccagttccacctgagactggagcaggagagaacccagtgggcccagtacagagagagcgccgagagagagatcgccgacctgagaagaagactgagcgagggccaggaggaggagaacctggagaacgagatgaagaaggcccaggaggacgccgagaagctgagaagcgtggtgatgcccatggagaaggagatcgccgccctgaaggacaagctgaccgaggccgaggacaagatcaaggagctggaggccagcaaggtgaaggagctgaaccactacctggaggccgagaagagctgcagaaccgacctggagatgtacgtggccgtgctgaacacccagaagagcgtgctgcaggaggacgccgagaagctgagaaaggagctgcaccaggagagacagcagcacaaccagctgaagcacacctggcagaaggccaacgaccagttcctggagagccagagactgctgatgagagacatgcagagaatggagatcgtgctgaccagcgagcagctgagacaggtggaggagctgaagaagaaggaccaggaggacgacgagcagcagagactgaacaagagaaaggaccacaagaaggccgacgtggaggaggagatcaagatccccgtggtgtgcgccctgacccaggaggagagcagcgcccagctgagcaacgaggaggagcacctggacagcaccagaggcagcgtgcacagcctggacgccggcctgctgctgcccagcggcgaccccttcagcaagagcgacaacgacatgttcaaggacggcctgagaagagcccagagcaccgacagcctgggcaccagcggcagcctgcagagcaaggccctgggctacaactacaaggccaagagcgccggcaacctggacgagagcgacttcggccccctggtgggcgccgacagcgtgagcgagaacttcgacaccgccagcctgggcagcctgcagatgcccagcggcttcatgctgaccaaggaccaggagagagccatcaaggccatgacccccgagcaggaggagaccgccagcctgctgagcagcgtgacccagggcatggagagcgcctacgtgagccccagcggctacagactggtgagcgagaccgagtggaacctgctgcagaaggaggtgcacaacgccggcaacaagctgggcagaagatgcgacatgtgcagcaactacgagaagcagctgcagggcatccagatccaggaggccgagaccagagaccaggtgaagaagctgcagctgatgctgagacaggccaacgaccagctggagaagaccatgaaggacaagcaggagctggaggacttcatcaagcagagcagcgaggacagcagccaccagatcagcgccctggtgctgagagcccaggccagcgagatcctgctggaggagctgcagcagggcctgagccaggccaagagagacgtgcaggagcagatggccgtgctgatgcagagcagagagcaggtgagcgaggagctggtgagactgcagaaggacaacgacagcctgcagggcaagcacagcctgcacgtgagcctgcagcaggccgaggacttcatcctgcccgacaccaccgaggccctgagagagctggtgctgaagtacagagaggacatcatcaacgtgagaaccgccgccgaccacgtggaggagaagctgaaggccgagatcctgttcctgaaggagcagatccaggccgagcagtgcctgaagaagaagaagtag

SEQ ID NO: 96173 - DNA, 2589 bp, synthetic construct; identical to SEQ ID NO: 96168
  misc_feature 1..2589: note = Description of Artificial Sequence: Synthetic coding sequence
  source 1..2589: mol_type = other DNA

SEQ ID NO: 96174 - DNA, 1602 bp, synthetic construct
  misc_feature 1..1602: note = Description of Artificial Sequence: Synthetic coding sequence
  source 1..1602: mol_type = other DNA
atggccgccgccgcccccgtggccgccgacgacgacgagagaagaagaagacccggcgccgccctggaggacagcagaagccaggagggcgccaacggcgaggccgagagcggcgagctgagcagactgagagccgagctggccggcgccctggccgagatggagaccatgaaggccgtggccgaggtgagcgagagcaccaaggccgaggccgtggccgccgtgcagagacagtgccaggaggaggtggccagcctgcaggccatcctgaaggacagcatcagcagctacgaggcccagatcaccgccctgaagcaggagagacagcagcagcagcaggactgcgaggagaaggagagagagctgggcagactgaagcagctgctgagcagagcctaccccctggacagcctggagaagcagatggagaaggcccacgaggacagcgagaagctgagagagatcgtgctgcccatggagaaggagatcgaggagctgaaggccaagctgctgagagccgaggagctgatccaggagatccagagaagacccagacacgcccccagcctgcacggcagcaccgagctgctgcccctgagcagagaccccagcccccccctggagcccctggaggagctgagcggcgacggcggccccgccgccgaggccttcgcccacaactgcgacgacagcgccagcatcagcagcttcagcctgggcggcggcgtgggcagcagcagcagcctgccccagagcagacagggcctgagccccgagcaggaggagaccgccagcctggtgagcaccggcaccctggtgcccgagggcatctacctgcccccccccggctaccagctggtgcccgacacccagtgggagcagctgcagaccgagatgcaggtgctgctggcccaggtgcagaacagcgagcagctgctgagaaccctgcagggcaccgtgagccaggcccaggagagagtgcagctgcagatggccgagctggtgaccacccacaagtgcctgcaccacgaggtgaagagactgaacgaggagaaccagggcctgagagccgagcagctgcccagcagcgccccccagggcagccagcaggagcagggcgaggaggagagcctgcccagcagcgtgcccgagctgcagcagctgctgtgctgcaccagacaggaggccagagccagactgcaggcccaggagcacggcgccgagagactgagaatcgagatcgtgaccctgagagaggccctggaggaggagaccgtggccagagccagcctggagggccagctgagagtgcagagagaggagaccgccagcctgtgcagcctgagaaccgagatggagagagtgcagcaggagcagagcaaggcccagctgcccgacctgctgagcgagcagagagccaaggtgctgagactgcaggccgagctggagaccagcgagcaggtgcagagagacttcgtgagactgagccaggccctgcaggtgagactggagagaatcagacaggccgagaccctggagcaggtgagaagcatcatggacgaggcccccctgaccgacgtgagagacatcaaggacacctag

SEQ ID NO: 96175 - DNA, 1710 bp, synthetic construct
  misc_feature 1..1710: note = Description of Artificial Sequence: Synthetic coding sequence
  source 1..1710: mol_type = other DNA
atggccgccgccgcccccgtggccgccgacgacgacgagagaagaagaagacccggcgccgccctggaggacagcagaagccaggagggcgccaacggcgaggccgagagcggcgagctgagcagactgagagccgagctggccggcgccctggccgagatggagaccatgaaggccgtggccgaggtgagcgagagcaccaaggccgaggccgtggccgccgtgcagagacagtgccaggaggaggtggccagcctgcaggccatcctgaaggacagcatcagcagctacgaggcccagatcaccgccctgaagcaggagagacagcagcagcagcaggactgcgaggagaaggagagagagctgggcagactgaagcagctgctgagcagagcctaccccctggacagcctggagaagcagatggagaaggcccacgaggacagcgagaagctgagagagatcgtgctgcccatggagaaggagatcgaggagctgaaggccaagctgctgagagccgaggagctgatccaggagatccagagaagacccagacacgcccccagcctgcacggcagcaccgagctgctgcccctgagcagagaccccagcccccccctggagcccctggaggagctgagcggcgacggcggccccgccgccgaggccttcgcccacaactgcgacgacagcgccagcatcagcagcttcagcctgggcggcggcgtgggcagcagcagcagcctgccccagagcagacagggcctgagccccgagcaggaggagaccgccagcctggtgagcaccggcaccctggtgcccgagggcatctacctgcccccccccggctaccagctggtgcccgacacccagtgggagcagctgcagaccgagggcagacagctgcagaaggacctggagagcgtgagcagagagagagacgagctgcaggagggcctgagaagaagcaacgaggactgcgccaagcagatgcaggtgctgctggcccaggtgcagaacagcgagcagctgctgagaaccctgcagggcaccgtgagccaggcccaggagagagtgcagctgcagatggccgagctggtgaccacccacaagtgcctgcaccacgaggtgaagagactgaacgaggagaaccagggcctgagagccgagcagctgcccagcagcgccccccagggcagccagcaggagcagggcgaggaggagagcctgcccagcagcgtgcccgagctgcagcagctgctgtgctgcaccagacaggaggccagagccagactgcaggcccaggagcacggcgccgagagactgagaatcgagatcgtgaccctgagagaggccctggaggaggagaccgtggccagagccagcctggagggccagctgagagtgcagagagaggagaccgaggtgctggaggccagcctgtgcagcctgagaaccgagatggagagagtgcagcaggagcagagcaaggcccagctgcccgacctgctgagcgagcagagagccaaggtgctgagactgcaggccgagctggagaccagcgagcaggtgcagagagacttcgtgagactgagccaggccctgcaggtgagactggagagaatcagacaggccgagaccctggagcaggtgagaagcatcatggacgaggcccccctgaccgacgtgagagacatcaaggacacctag

SEQ ID NO: 96176 - DNA, 1497 bp, synthetic construct
  misc_feature 1..1497: note = Description of Artificial Sequence: Synthetic coding sequence
  source 1..1497: mol_type = other DNA
atggccgccgccgcccccgtggccgccgacgacgacgagagaagaagaagacccggcgccgacagcatcagcagctacgaggcccagatcaccgccctgaagcaggagagacagcagcagcagcaggactgcgaggagaaggagagagagctgggcagactgaagcagctgctgagcagagcctaccccctggacagcctggagaagcagatggagaaggcccacgaggacagcgagaagctgagagagatcgtgctgcccatggagaaggagatcgaggagctgaaggccaagctgctgagagccgaggagctgatccaggagatccagagaagacccagacacgcccccagcctgcacggcagcaccgagctgctgcccctgagcagagaccccagcccccccctggagcccctggaggagctgagcggcgacggcggccccgccgccgaggccttcgcccacaactgcgacgacagcgccagcatcagcagcttcagcctgggcggcggcgtgggcagcagcagcagcctgccccagagcagacagggcctgagccccgagcaggaggagaccgccagcctggtgagcaccggcaccctggtgcccgagggcatctacctgcccccccccggctaccagctggtgcccgacacccagtgggagcagctgcagaccgagggcagacagctgcagaaggacctggagagcgtgagcagagagagagacgagctgcaggagggcctgagaagaagcaacgaggactgcgccaagcagatgcaggtgctgctggcccaggtgcagaacagcgagcagctgctgagaaccctgcagggcaccgtgagccaggcccaggagagagtgcagctgcagatggccgagctggtgaccacccacaagtgcctgcaccacgaggtgaagagactgaacgaggagaaccagggcctgagagccgagcagctgcccagcagcgccccccagggcagccagcaggagcagggcgaggaggagagcctgcccagcagcgtgcccgagctgcagcagctgctgtgctgcaccagacaggaggccagagccagactgcaggcccaggagcacggcgccgagagactgagaatcgagatcgtgaccctgagagaggccctggaggaggagaccgtggccagagccagcctggagggccagctgagagtgcagagagaggagaccgaggtgctggaggccagcctgtgcagcctgagaaccgagatggagagagtgcagcaggagcagagcaaggcccagctgcccgacctgctgagcgagcagagagccaaggtgctgagactgcaggccgagctggagaccagcgagcaggtgcagagagacttcgtgagactgagccaggccctgcaggtgagactggagagaatcagacaggccgagaccctggagcaggtgagaagcatcatggacgaggcccccctgaccgacgtgagagacatcaaggacacctag

SEQ ID NO: 96177 - DNA, 2085 bp, synthetic construct
  misc_feature 1..2085: note = Description of Artificial Sequence: Synthetic coding sequence
  source 1..2085: mol_type = other DNA
atgaccgacaccgtgttcagcaacagcagcaacagatggatgtaccccagcgacagacccctgcagagcaacgacaaggagcagctgcaggccggctggagcgtgcaccccggcggccagcccgacagacagagaaagcaggaggagctgaccgacgaggagaaggagatcatcaacagagtgatcgccagagccgagaagatggaggagatggagcaggagagaatcggcagactggtggacagactggagaacatgagaaagaacgtggccggcgacggcgtgaacagatgcatcctgtgcggcgagcagctgggcatgctgggcagcgcctgcgtggtgtgcgaggactgcaagaagaacgtgtgcaccaagtgcggcgtggagaccaacaacagactgcacagcgtgtggctgtgcaagatctgcatcgagcagagagaggtgtggaagagaagcggcgcctggttcttcaagggcttccccaagcaggtgctgccccagcccatgcccatcaagaagaccaagccccagcagcccgtgagcgagcccgccgcccccgagcagcccgcccccgagcccaagcaccccgccagagcccccgccagaggcgacagcgaggacagaagaggccccggccagaagaccggccccgaccccgccagcgcccccggcagaggcaactacggcccccccgtgagaagagccagcgaggccagaatgagcagcagcagcagagacagcgagagctgggaccacagcggcggcgccggcgacagcagcagaagccccgccggcctgagaagagccaacagcgtgcaggccagcagacccgcccccggcagcgtgcagagccccgcccccccccagcccggccagcccggcacccccggcggcagcagacccggccccggccccgccggcagattccccgaccagaagcccgaggtggcccccagcgaccccggcaccaccgccccccccagagaggagagaaccggcggcgtgggcggctaccccgccgtgggcgccagagaggacagaatgagccaccccagcggcccctacagccaggccagcgccgccgccccccagcccgccgccgccagacagccccccccccccgaggaggaggaggaggaggccaacagctacgacagcgacgaggccaccaccctgggcgccctggagttcagcctgctgtacgaccaggacaacagcagcctgcagtgcaccatcatcaaggccaagggcctgaagcccatggacagcaacggcctggccgacccctacgtgaagctgcacctgctgcccggcgccagcaagagcaacaagctgagaaccaagaccctgagaaacaccagaaaccccatctggaacgagaccctggtgtaccacggcatcaccgacgaggacatgcagagaaagaccctgagaatcagcgtgtgcgacgaggacaagttcggccacaacgagttcatcggcgagaccagattcagcctgaagaagctgaagcccaaccagagaaagaacttcaacatctgcctggagagagtgatccccatgaagagagccggcaccaccggcagcgccagaggcatggccctgtacgaggaggagcaggtggagagagtgggcgacatcgaggagagaggcaagatcctggtgagcctgatgtacagcacccagcagggcggcctgatcgtgggcatcatcagatgcgtgcacctggccgccatggacgccaacggctacagcgaccccttcgtgaagctgtggctgaagcccgacatgggcaagaaggccaagcacaagacccagatcaagaagaagaccctgaaccccgagttcaacgaggagttcttctacgacatcaagcacagcgacctggccaagaagagcctggacatcagcgtgtgggactacgacatcggcaagagcaacgactacatcggcggctgccagctgggcatcagcgccaagggcgagagactgaagcactggtacgagtgcctgaagaacaaggacaagaagatcgagagatggcaccagctgcagaacgagaaccacgtgagcagcgactag

SEQ ID NO: 96178 - DNA, 2085 bp, synthetic construct; identical to SEQ ID NO: 96177
  misc_feature 1..2085: note = Description of Artificial Sequence: Synthetic coding sequence
  source 1..2085: mol_type = other DNA

SEQ ID NO: 96179 - DNA, 2085 bp, synthetic construct; identical to SEQ ID NO: 96177
  misc_feature 1..2085: note = Description of Artificial Sequence: Synthetic coding sequence
  source 1..2085: mol_type = other DNA

SEQ ID NO: 96180 - DNA, 1938 bp, synthetic construct
  misc_feature 1..1938: note = Description of Artificial Sequence: Synthetic coding sequence
  source 1..1938: mol_type = other DNA
atgaccgacaccgtgttcagcaacagcagcaacagatggatgtaccccagcgacagacccctgcagagcaagctgaaggacagaagactggtggacagactggagaacatgagaaagaacgtggccggcgacggcgtgaacagatgcatcctgtgcggcgagcagctgggcatgctgggcagcgcctgcgtggtgtgcgaggactgcaagaagaacgtgtgcaccaagtgcggcgtggagaccaacaacagactgcacagcgtgtggctgtgcaagatctgcatcgagcagagagaggtgtggaagagaagcggcgcctggttcttcaagggcttccccaagcaggtgctgccccagcccatgcccatcaagaagaccaagccccagcagcccgtgagcgagcccgccgcccccgagcagcccgcccccgagcccaagcaccccgccagagcccccgccagaggcgacagcgaggacagaagaggccccggccagaagaccggccccgaccccgccagcgcccccggcagaggcaactacggcccccccgtgagaagagccagcgaggccagaatgagcagcagcagcagagacagcgagagctgggaccacagcggcggcgccggcgacagcagcagaagccccgccggcctgagaagagccaacagcgtgcaggccagcagacccgcccccggcagcgtgcagagccccgcccccccccagcccggccagcccggcacccccggcggcagcagacccggccccggccccgccggcagattccccgaccagaagcccgaggtggcccccagcgaccccggcaccaccgccccccccagagaggagagaaccggcggcgtgggcggctaccccgccgtgggcgccagagaggacagaatgagccaccccagcggcccctacagccaggccagcgccgccgccccccagcccgccgccgccagacagccccccccccccgaggaggaggaggaggaggccaacagctacgacagcgacgaggccaccaccctgggcgccctggagttcagcctgctgtacgaccaggacaacagcagcctgcagtgcaccatcatcaaggccaagggcctgaagcccatggacagcaacggcctggccgacccctacgtgaagctgcacctgctgcccggcgccagcaagagcaacaagctgagaaccaagaccctgagaaacaccagaaaccccatctggaacgagaccctggtgtaccacggcatcaccgacgaggacatgcagagaaagaccctgagaatcagcgtgtgcgacgaggacaagttcggccacaacgagttcatcggcgagaccagattcagcctgaagaagctgaagcccaaccagagaaagaacttcaacatctgcctggagagagtgatccccatgaagagagccggcaccaccggcagcgccagaggcatggccctgtacgaggaggagcaggtggagagagtgggcgacatcgaggagagaggcaagatcctggtgagcctgatgtacagcacccagcagggcggcctgatcgtgggcatcatcagatgcgtgcacctggccgccatggacgccaacggctacagcgaccccttcgtgaagctgtggctgaagcccgacatgggcaagaaggccaagcacaagacccagatcaagaagaagaccctgaaccccgagttcaacgaggagttcttctacgacatcaagcacagcgacctggccaagaagagcctggacatcagcgtgtgggactacgacatcggcaagagcaacgactacatcggcggctgccagctgggcatcagcgccaagggcgagagactgaagcactggtacgagtgcctgaagaacaaggacaagaagatcgagagatggcaccagctgcagaacgagaaccacgtgagcagcgactag

SEQ ID NO: 96181 - DNA, 2085 bp, synthetic construct; identical to SEQ ID NO: 96177
  misc_feature 1..2085: note = Description of Artificial Sequence: Synthetic coding sequence
  source 1..2085: mol_type = other DNA

SEQ ID NO: 96182 - DNA, 39 bp, synthetic construct
  misc_feature 1..39: note = Description of Artificial Sequence: Synthetic coding sequence
  source 1..39: mol_type = other DNA
atgaccgacaccgtgttcagcaacagcagcaacagatag

SEQ ID NO: 96183 - DNA, 252 bp, synthetic construct
  misc_feature 1..252: note = Description of Artificial Sequence: Synthetic coding sequence
  source 1..252: mol_type = other DNA
atgaccgacaccgtgttcagcaacagcagcaacagatggatgtaccccagcgacagacccctgcagagcaacgacaaggagcagctgcaggccggctggagcgtgcaccccggcggccagcccgacagacagagaaagcaggaggagctgaccgacgaggagaaggagatcatcaacagagtgatcgccagagccgagaagatggaggagatggagcaggagagaatcggcagactggtggacagactgtag

SEQ ID NO: 96184 - DNA, 285 bp, synthetic construct
  misc_feature 1..285: note = Description of Artificial Sequence: Synthetic coding sequence
  source 1..285: mol_type = other DNA
atgaccgacaccgtgttcagcaacagcagcaacagatggatgtaccccagcgacagacccctgcagagcaacgacaaggagcagctgcaggccggctggagcgtgcaccccggcggccagcccgacagacagagaaagcaggaggagctgaccgacgaggagaaggagatcatcaacagagtgatcgccagagccgagaagatggaggagatggagcaggagagaatcggcagactggtggacagactggagaacatgagaaagaacgtggccggcgacggctag

SEQ ID NO: 96185 - DNA, 492 bp, synthetic construct
  misc_feature 1..492: note = Description of Artificial Sequence: Synthetic coding sequence
  source 1..492: mol_type = other DNA
atgaccgacaccgtgttcagcaacagcagcaacagatggatgtaccccagcgacagacccctgcagagcaacgacaaggagcagctgcaggccggctggagcgtgcaccccggcggccagcccgacagacagagaaagcaggaggagctgaccgacgaggagaaggagatcatcaacagagtgatcgccagagccgagaagatggaggagatggagcaggagagaatcggcagactggtggacagactggagaacatgagaaagaacgtggccggcgacggcgtgaacagatgcatcctgtgcggcgagcagctgggcatgctgggcagcgcctgcgtggtgtgcgaggactgcaagaagaacgtgtgcaccaagtgcggcgtggagaccaacaacagactgcacagcgtgtggctgtgcaagatctgcatcgagcagagagaggtgtggaagagaagcggcgcctggttcttcaagggcttccccaagtag

SEQ ID NO: 96186 - DNA, 384 bp, synthetic construct
  misc_feature 1..384: note = Description of Artificial Sequence: Synthetic coding sequence
  source 1..384: mol_type = other DNA
atgaccgacaccgtgttcagcaacagcagcaacagatggatgtaccccagcgacagacccctgcagagcaacgacaaggagcagctgcaggccggctggagcgtgcaccccggcggccagcccgacagacagagaaagcaggaggagctgaccgacgaggagaaggagatcatcaacagagtgatcgccagagccgagaagatggaggagatggagcaggagagaatcggcagactggtggacagactggagaacatgagaaagaacgtggccggcgacggcgtgaacagatgcatcctgtgcggcgagcagctgggcatgctgggcagcgcctgcgtggtgtgcgaggactgcaagaagaacgtgtgcaccaagtgcggctag

SEQ ID NO: 96187 - DNA, 315 bp, synthetic construct
  misc_feature 1..315: note = Description of Artificial Sequence: Synthetic coding sequence
  source 1..315: mol_type = other DNA
atgaccgacaccgtgttcagcaacagcagcaacagatggatgtaccccagcgacagacccctgcagagcaacgacaaggagcagctgcaggccggctggagcgtgcaccccggcggccagcccgacagacagagaaagcaggaggagctgaccgacgaggagaaggagatcatcaacagagtgatcgccagagccgagaagatggaggagatggagcaggagagaatcggcagactggtggacagactggagaacatgagaaagaacgtggccggcgacggcgtgaacagatgcatcctgtgcggcgagcagtag

SEQ ID NO: 96188 - DNA, 120 bp, synthetic construct
  misc_feature 1..120: note = Description of Artificial Sequence: Synthetic coding sequence
  source 1..120: mol_type = other DNA
atgaccgacaccgtgttcagcaacagcagcaacagatggatgtaccccagcgacagacccctgcagagcaacgacaaggagcagctgcaggccggctggagcgtgcaccccggcggctag

SEQ ID NO: 96189 - DNA, 348 bp, synthetic construct
  misc_feature 1..348: note = Description of Artificial Sequence: Synthetic coding sequence
  source 1..348: mol_type = other DNA
atgaccgacaccgtgttcagcaacagcagcaacagatggatgtaccccagcgacagacccctgcagagcaacgacaaggagcagctgcaggccggctggagcgtgcaccccggcggccagcccgacagacagagaaagcaggaggagctgaccgacgaggagaaggagatcatcaacagagtgatcgccagagccgagaagatggaggagatggagcaggagagaatcggcagactggtggacagactggagaacatgagaaagaacgtggccggcgacggcgtgaacagatgcatcctgtgcggcgagcagctgggcatgctgggcagcgcctgcgtggtgtgctag

SEQ ID NO: 96190 - DNA, 2073 bp, synthetic construct
  misc_feature 1..2073: note = Description of Artificial Sequence: Synthetic coding sequence
  source 1..2073: mol_type = other DNA
atgaccgacaccgtgttcagcaacagcagcaacagatggatgtaccccagcgacagacccctgcagagcaagctgcaggccggctggagcgtgcaccccggcggccagcccgacagacagagaaagcaggaggagctgaccgacgaggagaaggagatcatcaacagagtgatcgccagagccgagaagatggaggagatggagcaggagagaatcggcagactggtggacagactggagaacatgagaaagaacgtggccggcgacggcgtgaacagatgcatcctgtgcggcgagcagctgggcatgctgggcagcgcctgcgtggtgtgcgaggactgcaagaagaacgtgtgcaccaagtgcggcgtggagaccaacaacagactgcacagcgtgtggctgtgcaagatctgcatcgagcagagagaggtgtggaagagaagcggcgcctggttcttcaagggcttccccaagcaggtgctgccccagcccatgcccatcaagaagaccaagccccagcagcccgtgagcgagcccgccgcccccgagcagcccgcccccgagcccaagcaccccgccagagcccccgccagaggcgacagcgaggacagaagaggccccggccagaagaccggccccgaccccgccagcgcccccggcagaggcaactacggcccccccgtgagaagagccagcgaggccagaatgagcagcagcagcagagacagcgagagctgggaccacagcggcggcgccggcgacagcagcagaagccccgccggcctgagaagagccaacagcgtgcaggccagcagacccgcccccggcagcgtgcagagccccgcccccccccagcccggccagcccggcacccccggcggcagcagacccggccccggccccgccggcagattccccgaccagaagcccgaggtggcccccagcgaccccggcaccaccgccccccccagagaggagagaaccggcggcgtgggcggctaccccgccgtgggcgccagagaggacagaatgagccaccccagcggcccctacagccaggccagcgccgccgccccccagcccgccgccgccagacagccccccccccccgaggaggaggaggaggaggccaacagctacgacagcgacgaggccaccaccctgggcgccctggagttcagcctgctgtacgaccaggacaacagcagcctgcagtgcaccatcatcaaggccaagggcctgaagcccatggacagcaacggcctggccgacccctacgtgaagctgcacctgctgcccggcgccagcaagagcaacaagctgagaaccaagaccctgagaaacaccagaaaccccatctggaacgagaccctggtgtaccacggcatcaccgacgaggacatgcagagaaagaccctgagaatcagcgtgtgcgacgaggacaagttcggccacaacgagttcatcggcgagaccagattcagcctgaagaagctgaagcccaaccagagaaagaacttcaacatctgcctggagagagtgatccccatgaagagagccggcaccaccggcagcgccagaggcatggccctgtacgaggaggagcaggtggagagagtgggcgacatcgaggagagaggcaagatcctggtgagcctgatgtacagcacccagcagggcggcctgatcgtgggcatcatcagatgcgtgcacctggccgccatggacgccaacggctacagcgaccccttcgtgaagctgtggctgaagcccgacatgggcaagaaggccaagcacaagacccagatcaagaagaagaccctgaaccccgagttcaacgaggagttcttctacgacatcaagcacagcgacctggccaagaagagcctggacatcagcgtgtgggactacgacatcggcaagagcaacgactacatcggcggctgccagctgggcatcagcgccaagggcgagagactgaagcactggtacgagtgcctgaagaacaaggacaagaagatcgagagatggcaccagctgcagaacgagaaccacgtgagcagcgactag

SEQ ID NO: 96191 - DNA, 378 bp, synthetic construct
  misc_feature 1..378: note = Description of Artificial Sequence: Synthetic coding sequence
  source 1..378: mol_type = other DNA
atgaccgacaccgtgttcagcaacagcagcaacagatggatgtaccccagcgacagacccctgcagagcaacgacaaggagcagctgcaggccggctggagcgtgcaccccggcggccagcccgacagacagagaaagcaggaggagctgaccgacgaggagaaggagatcatcaacagagtgatcgccagagccgagaagatggaggagatggagcaggagagaatcggcagactggtggacagactggagaacatgagaaagaacgtggccggcgacggcgtgaacagatgcatcctgtgcggcgagcagctgggcatgctgggcagcgcctgcgtggtgtgcgaggactgcaagaagaacgtgtgcaccaagtag

SEQ ID NO: 96192 - DNA, 546 bp, synthetic construct
  misc_feature 1..546: note = Description of Artificial Sequence: Synthetic coding sequence
  source 1..546: mol_type = other DNA
atgaccgacaccgtgttcagcaacagcagcaacagatggatgtaccccagcgacagacccctgcagagcaacgacaaggagcagctgcaggccggctggagcgtgcaccccggcggccagcccgacagacagagaaagcaggaggagctgaccgacgaggagaaggagatcatcaacagagtgatcgccagagccgagaagatggaggagatggagcaggagagaatcggcagactggtggacagactggagaacatgagaaagaacgtggccggcgacggcgtgaacagatgcatcctgtgcggcgagcagctgggcatgctgggcagcgcctgcgtggtgtgcgaggactgcaagaagaacgtgtgcaccaagtgcggcgtggagaccaacaacagactgcacagcgtgtggctgtgcaagatctgcatcgagcagagagaggtgtggaagagaagcggcgcctggttcttcaagggcttccccaagcaggtgctgccccagcccatgcccatcaagaagaccaagccccagcagcccgtgtag

SEQ ID NO: 96193 - DNA, 285 bp, synthetic construct; identical to SEQ ID NO: 96184
  misc_feature 1..285: note = Description of Artificial Sequence: Synthetic coding sequence
  source 1..285: mol_type = other DNA

SEQ ID NO: 96194 - DNA, 363 bp, synthetic construct
  misc_feature 1..363: note = Description of Artificial Sequence: Synthetic coding sequence
  source 1..363: mol_type = other DNA
atgaccgacaccgtgttcagcaacagcagcaacagatggatgtaccccagcgacagacccctgcagagcaacgacaaggagcagctgcaggccggctggagcgtgcaccccggcggccagcccgacagacagagaaagcaggaggagctgaccgacgaggagaaggagatcatcaacagagtgatcgccagagccgagaagatggaggagatggagcaggagagaatcggcagactggtggacagactggagaacatgagaaagaacgtggccggcgacggcgtgaacagatgcatcctgtgcggcgagcagctgggcatgctgggcagcgcctgcgtggtgtgcgaggactgcaagaagtag

SEQ ID NO: 96195 - DNA, 405 bp, synthetic construct
  misc_feature 1..405: note = Description of Artificial Sequence: Synthetic coding sequence
  source 1..405: mol_type = other DNA
atgaccgacaccgtgttcagcaacagcagcaacagatggatgtaccccagcgacagacccctgcagagcaacgacaaggagcagctgcaggccggctggagcgtgcaccccggcggccagcccgacagacagagaaagcaggaggagctgaccgacgaggagaaggagatcatcaacagagtgatcgccagagccgagaagatggaggagatggagcaggagagaatcggcagactggtggacagactggagaacatgagaaagaacgtggccggcgacggcgtgaacagatgcatcctgtgcggcgagcagctgggcatgctgggcagcgcctgcgtggtgtgcgaggactgcaagaagaacgtgtgcaccaagtgcggcgtggagaccaacaacagactgtag

SEQ ID NO: 96196 - DNA, 948 bp, synthetic construct
  misc_feature 1..948: note = Description of Artificial Sequence: Synthetic coding sequence
  source 1..948: mol_type = other DNA
atggccgacaccatcttcggcagcggcaacgaccagtgggtgtgccccaacgacagacagctggccctgagagccaagctgcagaccggctggagcgtgcacacctaccagaccgagaagcagagaagaaagcagcacctgagccccgccgaggtggaggccatcctgcaggtgatccagagagccgagagactggacgtgctggagcagcagagaatcggcagactggtggagagactggagaccatgagaagaaacgtgatgggcaacggcctgagccagtgcctgctgtgcggcgaggtgctgggcttcctgggcagcagcagcgtgttctgcaaggactgcagaaagaaggtgtgcaccaagtgcggcatcgaggccagccccggccagaagagacccctgtggctgtgcaagatctgcagcgagcagagagaggtgtggaagagaagcggcgcctggttctacaagggcctgcccaagtacatcctgcccctgaagacccccggcagagccgacgacccccacttcagacccctgcccaccgagcccgccgagagagagcccagaagcagcgagaccagcagaatctacacctgggccagaggcagagtggtgagcagcgacagcgacagcgacagcgacctgagcagcagcagcctggaggacagactgcccagcaccggcgtgagagacagaaagggcgacaagccctggaaggagagcggcggcagcgtggaggcccccagaatgggcttcacccacccccccggccacctgagcggctgccagagcagcctggccagcggcgagaccggcaccggcagcgccgacccccccggcggccccagacccggcctgaccagaagagcccccgtgaaggacacccccggcagagcccccgccgccgacgccgcccccgccggccccagcagctgcctgggctag

SEQ ID NO: 96197 - DNA, 861 bp, synthetic construct
  misc_feature 1..861: note = Description of Artificial Sequence: Synthetic coding sequence
  source 1..861: mol_type = other DNA
atggccgacaccatcttcggcagcggcaacgaccagtgggtgtgccccaacgacagacagctggccctgagagccaagctgcagaccggctggagcgtgcacacctaccagaccgagaagcagagaagaaagcagcacctgagccccgccgaggtggaggccatcctgcaggtgatccagagagccgagagactggacgtgctggagcagcagagaatcggcagactggtggagagactggagaccatgagaagaaacgtgatgggcaacggcctgagccagtgcctgctgtgcggcgaggtgctgggcttcctgggcagcagcagcgtgttctgcaaggactgcagaaaggtgtggaagagaagcggcgcctggttctacaagggcctgcccaagtacatcctgcccctgaagacccccggcagagccgacgacccccacttcagacccctgcccaccgagcccgccgagagagagcccagaagcagcgagaccagcagaatctacacctgggccagaggcagagtggtgagcagcgacagcgacagcgacagcgacctgagcagcagcagcctggaggacagactgcccagcaccggcgtgagagacagaaagggcgacaagccctggaaggagagcggcggcagcgtggaggcccccagaatgggcttcacccacccccccggccacctgagcggctgccagagcagcctggccagcggcgagaccggcaccggcagcgccgacccccccggcggccccagacccggcctgaccagaagagcccccgtgaaggacacccccggcagagcccccgccgccgacgccgcccccgccggccccagcagctgcctgggctag

SEQ ID NO: 96198 - DNA, 861 bp, synthetic construct; identical to SEQ ID NO: 96197
  misc_feature 1..861: note = Description of Artificial Sequence: Synthetic coding sequence
  source 1..861: mol_type = other DNA

SEQ ID NO: 96199 - DNA, 2331 bp, synthetic construct
  misc_feature 1..2331: note = Description of Artificial Sequence: Synthetic coding sequence
  source 1..2331: mol_type = other DNA
atgaaccccgaggagcagatcgtgacctggctgatcagcctgggcgtgctggagagccccaagaagaccatctgcgaccccgaggagttcctgaagagcagcctgaagaacggcgtggtgctgtgcaagctgatcaacagactgatgcccggcagcgtggagaagttctgcctggacccccagaccgaggccgactgcatcaacaacatcaacgacttcctgaagggctgcgccaccctgcaggtggagatcttcgaccccgacgacctgtacagcggcgtgaacttcagcaaggtgctgagcaccctgctggccgtgaacaaggccaccgaggaccagctgagcgagagaccctgcggcagaagcagcagcctgagcgccgccaacaccagccagaccaacccccagggcgccgtgagcagcaccgtgagcggcctgcagagacagagcaagaccgtggagatgaccgagaacggcagccaccagctgatcgtgaaggccagattcaacttcaagcagaccaacgaggacgagctgagcgtgtgcaagggcgacatcatctacgtgaccagagtggaggagggcggctggtgggagggcaccctgaacggcagaaccggctggttccccagcaactacgtgagagagatcaagagcagcgagagacccctgagccccaaggccgtgaagggcttcgagaccgcccccctgaccaagaactactacaccgtggtgctgcagaacatcctggacaccgagaaggagtacgccaaggagctgcagagcctgctggtgacctacctgagacccctgcagagcaacaacaacctgagcaccgtggaggtgaccagcctgctgggcaacttcgaggaggtgtgcaccttccagcagaccctgtgccaggccctggaggagtgcagcaagttccccgagaaccagcacaaggtgggcggctgcctgctgagcctgatgccccacttcaagagcatgtacctggcctactgcgccaaccaccccagcgccgtgaacgtgctgacccagcacagcgacgagctggagcagttcatggagaaccagggcgccagcagccccggcatcctgatcctgaccaccaacctgagcaagcccttcatgagactggagaagtacgtgaccctgctgcaggagctggagagacacatggaggacacccaccccgaccaccaggacatcctgaaggccatcgtggccttcaagaccctgatgggccagtgccaggacctgagaaagagaaagcagctggagctgcagatcctgagcgagcccatccaggcctgggagggcgaggacatcaagaacctgggcaacgtgatcttcatgagccaggtgatggtgcagtacggcgcctgcgaggagaaggaggagagatacctgatgctgttcagcaacgtgctgatcatgctgagcgccagccccagaatgagcggcttcatctaccagggcaagatccccatcgccggcaccgtggtgaccagactggacgagatcgagggcaacgactgcaccttcgagatcaccggcaacaccgtggagagaatcgtggtgcactgcaacaacaaccaggacttccaggagtggctggagcagctgaacagactgatcagaggccccgccagctgcagcagcctgagcaagaccagcagcagcagctgcagcgcccacagcagcttcagcagcaccggccagcccagaggccccctggagcccccccagatcatcaagccctggagcctgagctgcctgagacccgccccccccctgagacccagcgccgccctgggctacaaggagagaatgagctacatcctgaaggagagcagcaagagccccaagaccatgaagaagttcctgcacaagagaaagaccgagagaaagcccagcgaggaggagtacgtgatcagaaagagcaccgccgccctggaggaggacgcccagatcctgaaggtgatcgaggcctactgcaccagcgccaacttccagcagggccacggcagcagcaccagaaaggacagcatcccccaggtgctgctgcccgaggaggagaagctgatcatcgaggagaccagaagcaacggccagaccatcatggaggagaagagcctggtggacaccgtgtacgccctgaaggacgaggtgagagagctgaagcaggagaacaagagaatgaagcagtgcctggaggaggagctgaagagcagaagagacctggagaagctggtgagaagactgctgaagcagaccgacgagtgcatcagaggcgagagcagcagcaagaccagcatcctgccctag

SEQ ID NO: 96200 - DNA, 1869 bp, synthetic construct
  misc_feature 1..1869: note = Description of Artificial Sequence: Synthetic coding sequence
  source 1..1869: mol_type = other DNA
atgaccgagaacggcagccaccagctgatcgtgaaggccagattcaacttcaagcagaccaacgaggacgagctgagcgtgtgcaagggcgacatcatctacgtgaccagagtggaggagggcggctggtgggagggcaccctgaacggcagaaccggctggttccccagcaactacgtgagagagatcaagagcagcgagagacccctgagccccaaggccgtgaagggcttcgagaccgcccccctgaccaagaactactacaccgtggtgctgcagaacatcctggacaccgagaaggagtacgccaaggagctgcagagcctgctggtgacctacctgagacccctgcagagcaacaacaacctgagcaccgtggaggtgaccagcctgctgggcaacttcgaggaggtgtgcaccttccagcagaccctgtgccaggccctggaggagtgcagcaagttccccgagaaccagcacaaggtgggcggctgcctgctgagcctgatgccccacttcaagagcatgtacctggcctactgcgccaaccaccccagcgccgtgaacgtgctgacccagcacagcgacgagctggagcagttcatggagaaccagggcgccagcagccccggcatcctgatcctgaccaccaacctgagcaagcccttcatgagactggagaagtacgtgaccctgctgcaggagctggagagacacatggaggacacccaccccgaccaccaggacatcctgaaggccatcgtggccttcaagaccctgatgggccagtgccaggacctgagaaagagaaagcagctggagctgcagatcctgagcgagcccatccaggcctgggagggcgaggacatcaagaacctgggcaacgtgatcttcatgagccaggtgatggtgcagtacggcgcctgcgaggagaaggaggagagatacctgatgctgttcagcaacgtgctgatcatgctgagcgccagccccagaatgagcggcttcatctaccagggcaagatccccatcgccggcaccgtggtgaccagactggacgagatcgagggcaacgactgcaccttcgagatcaccggcaacaccgtggagagaatcgtggtgcactgcaacaacaaccaggacttccaggagtggctggagcagctgaacagactgatcagaggccccgccagctgcagcagcctgagcaagaccagcagcagcagctgcagcgcccacagcagcttcagcagcaccggccagcccagaggccccctggagcccccccagatcatcaagccctggagcctgagctgcctgagacccgccccccccctgagacccagcgccgccctgggctacaaggagagaatgagctacatcctgaaggagagcagcaagagccccaagaccatgaagaagttcctgcacaagagaaagaccgagagaaagcccagcgaggaggagtacgtgatcagaaagagcaccgccgccctggaggaggacgcccagatcctgaaggtgatcgaggcctactgcaccagcgccaacttccagcagggccacggcagcagcaccagaaaggacagcatcccccaggtgctgctgcccgaggaggagaagctgatcatcgaggagaccagaagcaacggccagaccatcatggaggagaagagcctggtggacaccgtgtacgccctgaaggacgaggtgagagagctgaagcaggagaacaagagaatgaagcagtgcctggaggaggagctgaagagcagaagagacctggagaagctggtgagaagactgctgaagcagaccgacgagtgcatcagaggcgagagcagcagcaagaccagcatcctgccctag

SEQ ID NO: 96201 - DNA, 1869 bp, synthetic construct; identical to SEQ ID NO: 96200
  misc_feature 1..1869: note = Description of Artificial Sequence: Synthetic coding sequence
  source 1..1869: mol_type = other DNA

SEQ ID NO: 96202 - DNA, 1950 bp, synthetic construct
  misc_feature 1..1950: note = Description of Artificial Sequence: Synthetic coding sequence
  source 1..1950: mol_type = other DNA
atgaccgagaacggcagccaccagctgatcgtgaaggccagattcaacttcaagcagaccaacgaggacgagctgagcgtgtgcaagggcgacatcatctacgtgaccagagtggaggagggcggctggtgggagggcaccctgaacggcagaaccggctggttccccagcaactacgtgagagagatcaagagcagcgacggcgtgagcctgctgctgcccggcctggagtgcaacggcgccatcagcgcccaccacaacctgtgcctgcccggcagcaagagacccctgagccccaaggccgtgaagggcttcgagaccgcccccctgaccaagaactactacaccgtggtgctgcagaacatcctggacaccgagaaggagtacgccaaggagctgcagagcctgctggtgacctacctgagacccctgcagagcaacaacaacctgagcaccgtggaggtgaccagcctgctgggcaacttcgaggaggtgtgcaccttccagcagaccctgtgccaggccctggaggagtgcagcaagttccccgagaaccagcacaaggtgggcggctgcctgctgagcctgatgccccacttcaagagcatgtacctggcctactgcgccaaccaccccagcgccgtgaacgtgctgacccagcacagcgacgagctggagcagttcatggagaaccagggcgccagcagccccggcatcctgatcctgaccaccaacctgagcaagcccttcatgagactggagaagtacgtgaccctgctgcaggagctggagagacacatggaggacacccaccccgaccaccaggacatcctgaaggccatcgtggccttcaagaccctgatgggccagtgccaggacctgagaaagagaaagcagctggagctgcagatcctgagcgagcccatccaggcctgggagggcgaggacatcaagaacctgggcaacgtgatcttcatgagccaggtgatggtgcagtacggcgcctgcgaggagaaggaggagagatacctgatgctgttcagcaacgtgctgatcatgctgagcgccagccccagaatgagcggcttcatctaccagggcaagatccccatcgccggcaccgtggtgaccagactggacgagatcgagggcaacgactgcaccttcgagatcaccggcaacaccgtggagagaatcgtggtgcactgcaacaacaaccaggacttccaggagtggctggagcagctgaacagactgatcagaggccccgccagctgcagcagcctgagcaagaccagcagcagcagctgcagcgcccacagcagcttcagcagcaccggccagcccagaggccccctggagcccccccagatcatcaagccctggagcctgagctgcctgagacccgccccccccctgagacccagcgccgccctgggctacaaggagagaatgagctacatcctgaaggagagcagcaagagccccaagaccatgaagaagttcctgcacaagagaaagaccgagagaaagcccagcgaggaggagtacgtgatcagaaagagcaccgccgccctggaggaggacgcccagatcctgaaggtgatcgaggcctactgcaccagcgccaacttccagcagggccacggcagcagcaccagaaaggacagcatcccccaggtgctgctgcccgaggaggagaagctgatcatcgaggagaccagaagcaacggccagaccatcatggaggagaagagcctggtggacaccgtgtacgccctgaaggacgaggtgagagagctgaagcaggagaacaagagaatgaagcagtgcctggaggaggagctgaagagcagaagagacctggagaagctggtgagaagactgctgaagcagaccgacgagtgcatcagaggcgagagcagcagcaagaccagcatcctgccctag

SEQ ID NO: 96203 - DNA, 1869 bp, synthetic construct
  misc_feature 1..1869: note = Description of Artificial Sequence: Synthetic coding sequence
  source 1..1869: mol_type = other DNA
atgaccgagaacggcagccaccagctgatcgtgaaggccagattcaacttcaagcagaccaacgaggacgagctgagcgtgtgcaagggcgacatcatctacgtgaccagagtggaggagggcggctggtgggagggcaccctgaacggcagaaccggctggttccccagcaactacgtgagagagatcaagagcagcgagagacccctgagccccaaggccgtgaagggcttcgagaccgcccccctgaccaagaactactacaccgtggtgctgcagaacatcctggacaccgagaaggagtacgccaaggagctgcagagcctgctggtgacctacctgagacccctgcagagcaacaacaacctgagcaccgtggaggtgaccagcctgctgggcaacttcgaggaggtgtgcaccttccagcagaccctgtgccaggccctggaggagtgcagcaagttccccgagaaccagcacaaggtgggcggctgcctgctgagcctgatgccccacttcaagagcatgtacctggcctactgcgccaaccaccccagcgccgtgaacgtgctgacccagcacagcgacgagctggagcagttcatggagaaccagggcgccagcagccccggcatcctgatcctgaccaccaacctgagcaagcccttcatgagactggagaagtacgtgaccctgctgcaggagctggagagacacatggaggacacccaccccgaccaccaggacatcctgaaggccatcgtggccttcaagaccctgatgggccagtgccaggacctgagaaagagaaagcagctggagctgcagatcctgagcgagcccatccaggcctgggagggcgaggacatcaagaacctgggcaacgtgatcttcatgagccaggtgatggtgcagtacggcgcctgcgaggagaaggaggagagatacctgatgctgttcagcaacgtgctgatcatgctgagcgccagccccagaatgagcggcttcatctaccagggcaagatccccatcgccggcaccgtggtgaccagactggacgagatcgagggcaacgactgcaccttcgagatcaccggcaacaccgtggagagaatcgtggtgcactgcaacaacaaccaggacttccaggagtggctggagcagctgaacagactgatcagaggccccgccagctgcagcagcctgagcaagaccagcagcagcagctgcagcgcccacagcagcttcagcagcaccggccagcccagaggccccctggagcccccccagatcatcaagccctggagcctgagctgcctgagacccgccccccccctgagacccagcgccgccctgggctacaaggaggccttcaccttcgtgttcgaggagagcagcaagagccccaagaccatgaagaagttcctgcacaagagaaagaccgagagaaagcccagcgaggaggagtacgtgatcagaaagagcaccgccgccctggaggaggacgcccagatcctgaaggtgatcgaggcctactgcaccagcgccaacttccagcagggccacggcagcagcaccagaaaggacagcatcccccaggtgctgctgcccgaggaggagaagctgatcatcgaggagaccagaagcaacggccagaccatcatggaggagaagagcctggtggacaccgtgtacgccctgaaggacgaggtgagagagctgaagcaggagaacaagagaatgaagcagtgcctggaggaggagctgaagagcagaagagacctggagaagctggtgagaagactgctgaagcagaccgacgagtgcatcagaggcgagagcagcagcaagaccagcatcctgccctag

SEQ ID NO: 96204 - DNA, 1896 bp, synthetic construct
  misc_feature 1..1896: note = Description of Artificial Sequence: Synthetic coding sequence
  source 1..1896: mol_type = other DNA
atgttctacgcccacttcgtgctgagcaagagaggccccctggccaagatctggctggccgcccactgggacaagaagctgaccaaggcccacgtgttcgagtgcaacctggagagcagcgtggagagcatcatcagccccaaggtgaagatggccctgagaaccagcggccacctgctgctgggcgtggtgagaatctaccacagaaaggccaagtacctgctggccgactgcaacgaggccttcatcaagatcaagatggccttcagacccggcgtggtggacctgcccgaggagaacagagaggccgcctacaacgccatcaccctgcccgaggagttccacgacttcgaccagcccctgcccgacctggacgacatcgacgtggcccagcagttcagcctgaaccagagcagagtggaggagatcaccatgagagaggaggtgggcaacatcagcatcctgcaggagaacgacttcggcgacttcggcatggacgacagagagatcatgagagagggcagcgccttcgaggacgacgacatgctggtgagcaccaccaccagcaacctgctgctggagagcgagcagagcaccagcaacctgaacgagaagatcaaccacctggagtacgaggaccagtacaaggacgacaacttcggcgagggcaacgacggcggcatcctggacgacaagctgatcagcaacaacgacggcggcatcttcgacgacccccccgccctgagcgaggccggcgtgatgctgcccgagcagcccgcccacgacgacatggacgaggacgacaacgtgagcatgggcggccccgacagccccgacagcgtggaccccgtggagcccatgcccaccatgaccgaccagaccaccctggtgcccaacgaggaggaggccttcgccctggagcccatcgacatcaccgtgaaggagaccaaggccaagagaaagagaaagctgatcgtggacagcgtgaaggagctggacagcaagaccatcagagcccagctgagcgactacagcgacatcgtgaccaccctggacctggccccccccaccaagaagctgatgatgtggaaggagaccggcggcgtggagaagctgttcagcctgcccgcccagcccctgtggaacaacagactgctgaagctgttcaccagatgcctgacccccctggtgcccgaggacctgagaaagagaagaaagggcggcgaggccgacaacctggacgagttcctgaaggagttcgagaaccccgaggtgcccagagaggaccagcagcagcagcaccagcagagagacgtgatcgacgagcccatcatcgaggagcccagcagactgcaggagagcgtgatggaggccagcagaaccaacatcgacgagagcgccatgccccccccccccccccagggcgtgaagagaaaggccggccagatcgaccccgagcccgtgatgcccccccagcaggtggagcagatggagatcccccccgtggagctgccccccgaggagccccccaacatctgccagctgatccccgagctggagctgctgcccgagaaggagaaggagaaggagaaggagaaggaggacgacgaggaggaggaggacgaggacgccagcggcggcgaccaggaccaggaggagagaagatggaacaagagaacccagcagatgctgcacggcctgcagagagccctggccaagaccggcgccgagagcatcagcctgctggagctgtgcagaaacaccaacagaaagcaggccgccgccaagttctacagcttcctggtgctgaagaagcagcaggccatcgagctgacccaggaggagccctacagcgacatcatcgccacccccggccccagattccacatcatctag

SEQ ID NO: 96205 - DNA, 501 bp, synthetic construct
  misc_feature 1..501: note = Description of Artificial Sequence: Synthetic coding sequence
  source 1..501: mol_type = other DNA
atggcccccaagaaggccaagaagagagccggcggcgccaacagcaacgtgttcagcatgttcgagcagacccagatccaggagttcaaggaggccttcaccatcatggaccagaacagagacggcttcatcgacaagaacgacctgagagacaccttcgccgccctgggcagagtgaacgtgaagaacgaggagatcgacgagatgatcaaggaggcccccggccccatcaacttcaccgtgttcctgaccatgttcggcgagaagctgaagggcgccgaccccgaggagaccatcctgaacgccttcaaggtgttcgaccccgagggcaagggcgtgctgaaggccgactacgtgagagagatgctgaccacccaggccgagagattcagcaaggaggaggtggaccagatgttcgccgccttcccccccgacgtgaccggcaacctggactacaagaacctggtgcacatcatcacccacggcgaggagaaggactag

SEQ ID NO: 96206 - DNA, 909 bp, synthetic construct
  misc_feature 1..909: note = Description of Artificial Sequence: Synthetic coding sequence
  source 1..909: mol_type = other DNA
atggtgagacccgtgagacacaagaagcccgtgaactacagccagttcgaccacagcgacagcgacgacgacttcgtgagcgccaccgtgcccctgaacaagaagagcagaaccgcccccaaggagctgaagcaggacaagcccaagcccaacctgaacaacctgagaaaggaggagatccccgtgcaggagaagacccccaagaagagactgcccgagggcaccttcagcatccccgccagcgccgtgccctgcaccaagatggccctggacgacaagctgtaccagagagacctggaggtggccctggccctgagcgtgaaggagctgcccaccgtgaccaccaacgtgcagaacagccaggacaagagcatcgagaagcacggcagcagcaagatcgagaccatgaacaagagcccccacatcagcaactgcagcgtggccagcgactacctggacctggacaagatcaccgtggaggacgacgtgggcggcgtgcagggcaagagaaaggccgccagcaaggccgccgcccagcagagaaagatcctgctggagggcagcgacggcgacagcgccaacgacaccgagcccgacttcgcccccggcgaggacagcgaggacgacagcgacttctgcgagagcgaggacaacgacgaggacttcagcatgagaaagagcaaggtgaaggagatcaagaagaaggaggtgaaggtgaagagccccgtggagaagaaggagaagaagagcaagagcaagtgcaacgccctggccgccagcggcggcagcagaagcagcagcagccccctggtggtggtgagcgtgaagagccccaaccagagcctgagactgggcctgagcagactggccagagtgaagcccctgcaccccaacgccaccagcacctag

SEQ ID NO: 96207 - DNA, 1008 bp, synthetic construct
  misc_feature 1..1008: note = Description of Artificial Sequence: Synthetic coding sequence
  source 1..1008: mol_type = other DNA
atggtgagacccgtgagacacaagaagcccgtgaactacagccagttcgaccacagcgacagcgacgacgacttcgtgagcgccaccgtgcccctgaacaagaagagcagaaccgcccccaaggagctgaagcaggacaagcccaagcccaacctgaacaacctgagaaaggaggagatccccgtgcaggagaagacccccaagaagagaatggccctggacgacaagctgtaccagagagacctggaggtggccctggccctgagcgtgaaggagctgcccaccgtgaccaccaacgtgcagaacagccaggacaagagcatcgagaagcacggcagcagcaagatcgagaccatgaacaagagcccccacatcagcaactgcagcgtggccagcgactacctggacctggacaagatcaccgtggaggacgacgtgggcggcgtgcagggcaagagaaaggccgccagcaaggccgccgcccagcagagaaagatcctgctggagggcagcgacggcgacagcgccaacgacaccgagcccgacttcgcccccggcgaggacagcgaggacgacagcgacttctgcgagagcgaggacaacgacgaggacttcagcatgagaaagagcaaggtgaaggagatcaagaagaaggaggtgaaggtgaagagccccgtggagaagaaggagaagaagagcaagagcaagtgcaacgccctggtgaccagcgtggacagcgcccccgccgccgtgaagagcgagagccagagcctgcccaagaaggtgagcctgagcagcgacaccaccagaaagcccctggagatcagaagccccagcgccgagagcaagaagcccaagtgggtgccccccgccgccagcggcggcagcagaagcagcagcagccccctggtggtggtgagcgtgaagagccccaaccagagcctgagactgggcctgagcagactggccagagtgaagcccctgcaccccaacgccaccagcacctag

SEQ ID NO: 96208 - DNA, 702 bp, synthetic construct
  misc_feature 1..702: note = Description of Artificial Sequence: Synthetic coding sequence
  source 1..702: mol_type = other DNA
atgaacaagagcccccacatcagcaactgcagcgtggccagcgactacctggacctggacaagatcaccgtggaggacgacgtgggcggcgtgcagggcaagagaaaggccgccagcaaggccgccgcccagcagagaaagatcctgctggagggcagcgacggcgacagcgccaacgacaccgagcccgacttcgcccccggcgaggacagcgaggacgacagcgacttctgcgagagcgaggacaacgacgaggacttcagcatgagaaagagcaaggtgaaggagatcaagaagaaggaggtgaaggtgaagagccccgtggagaagaaggagaagaagagcaagagcaagtgcaacgccctggtgaccagcgtggacagcgcccccgccgccgtgaagagcgagagccagagcctgcccaagaaggtgagcctgagcagcgacaccaccagaaagcccctggagatcagaagccccagcgccgagagcaagaagcccaagtgggtgccccccggcatggcctacctgagcagcagaaccggcgcctggaagatcatcaccgccgccagcggcggcagcagaagcagcagcagccccctggtggtggtgagcgtgaagagccccaaccagagcctgagactgggcctgagcagactggccagagtgaagcccctgcaccccaacgccaccagcacctag

SEQ ID NO: 96209 - DNA, 408 bp, synthetic construct
  misc_feature 1..408: note = Description of Artificial Sequence: Synthetic coding sequence
  source 1..408: mol_type = other DNA
atgagaggcaagaccttcagattcgagatgcagagagacctggtgagcttccccctgagccccgccgtgagagtgaagctggtgagcgccggcttccagaccgccgaggagctgctggaggtgaagcccagcgagctgagcaaggaggtgggcatcagcaaggccgaggccctggagaccctgcagatcatcagaagagagtgcctgaccaacaagcccagatacgccggcaccagcgagagccacaagaagtgcaccgccctggagctgctggagcaggagcacacccagggcttcatcatcaccttctgcagcgccctggacgacatcctgggcggcggcgtgcccctgatgaagaccaccgagatctgcggcgcccccggcgtgggcaagacccagctgtggtag

SEQ ID NO: 96210 - DNA, 855 bp, synthetic construct
  misc_feature 1..855: note = Description of Artificial Sequence: Synthetic coding sequence
  source 1..855: mol_type = other DNA
atggccgagctggtgcccttcgccgtgcccatcgagagcgacaagaccctgctggtgtgggagctgagcagcggccccaccgccgaggccctgcaccacagcctgttcaccgccttcagccagttcggcctgctgtacagcgtgagagtgttccccaacgccgccgtggcccaccccggcttctacgccgtgatcaagttctacagcgccagagccgcccacagagcccagaaggcctgcgacagaaagcagctgttccagaagagccccgtgaaggtgagactgggcaccagacacaaggccgtgcagcaccaggccctggccctgaacagcagcaagtgccaggagctggccaactactacttcggcttcaacggctgcagcaagagaatcatcaagctgcaggagctgagcgacctggaggagagagagaacgaggacagcatggtgcccctgcccaagcagagcctgaagttcttctgcgccctggaggtggtgctgcccagctgcgactgcagaagccccggcatcggcctggtggaggagcccatggacaaggtggaggagggccccctgagcttcctgatgaagagaaagaccgcccagaagctggccatccagaaggccctgagcgacgccttccagaagctgctgatcgtggtgctggagagcggcaagatcgccgtggagtacagacccagcgaggacatcgtgggcgtgagatgcgaggaggagctgcacggcctgatccaggtgccctgcagcccctggaagcagtacggccaggaggaggagggctacctgagcgacttcagcctggaggaggaggagttcagactgcccgagctggactag

SEQ ID NO: 96211 - DNA, 351 bp, synthetic construct
  misc_feature 1..351: note = Description of Artificial Sequence: Synthetic coding sequence
  source 1..351: mol_type = other DNA
atgcacctgctggtgccccccccccagcacagcctgttcaccgccttcagccagttcggcctgctgtacagcgtgagagtgttccccaacgccgccgtggcccaccccggcttctacgccgtgatcaagttctacagcgccagagccgcccacagagcccagaaggcctgcgacagaaagcagctgttccagaagagccccgtgaaggtgagactgggcaccagacacaaggccgtgcagcaccaggccctggccctgaacagcagcaagtgccaggagctggccaactactacttcggcttcaacggctgcagcaagagaatcatcaaggaccactaccacagcctgtag

SEQ ID NO: 96212 - DNA, 711 bp, synthetic construct
  misc_feature 1..711: note = Description of Artificial Sequence: Synthetic coding sequence
  source 1..711: mol_type = other DNA
atggccgagctggtgcccttcgccgtgcccatcgagagcgacaagaccctgctggtgtgggagctgagcagcggccccaccgccgaggccctgcaccacagcctgttcaccgccttcagccagttcggcctgctgtacagcgtgagagtgttccccaacgccgccgtggcccaccccggcttctacgccgtgatcaagttctacagcgccagagccgcccacagagcccagaaggcctgcgacagaaagcagctgttccagaagagccccgtgaaggtgagactgggcaccagacacaaggccgtgcagcaccaggccctggccctgaacagcagcaagtgccaggagctggccaactactacttcggcttcaacggctgcagcaagagaatcatcaagctgcaggagctgagcgacctggaggagagagagaacgaggacagcatggtgcccctgcccaagcagagcctgaagttcttctgcgccctggaggtggtgctgcccagctgcgactgcagaagccccggcatcggcctggtggaggagcccatggacaaggtggaggagggccccctgagcttcctgatgaagagaaagaccgcccagaagctggccatccagaaggccctgagcgacgccttccagaagctgctgatcgtggtgctgggcaagaccgtgctgatcatcctggaggtgctgcagttccagtag

SEQ ID NO: 96213 - DNA, 786 bp, synthetic construct
  misc_feature 1..786: note = Description of Artificial Sequence: Synthetic coding sequence
  source 1..786: mol_type = other DNA
atgcacctgctggtgccccccccccagcacagcctgttcaccgccttcagccagttcggcctgctgtacagcgtgagagtgttccccaacgccgccgtggcccaccccggcttctacgccgtgatcaagttctacagcgccagagccgcccacagagcccagaaggcctgcgacagaaagcagctgttccagaagagccccgtgaaggtgagactgggcaccagacacaaggccgtgcagcaccaggccctggccctgaacagcagcaagtgccaggagctggccaactactacttcggcttcaacggctgcagcaagagaatcatcaagctgcaggagctgagcgacctggaggagagagagaacgaggacagcatggtgcccctgcccaagcagagcctgaagttcttctgcgccctggaggtggtgctgcccagctgcgactgcagaagccccggcatcggcctggtggaggagcccatggacaaggtggaggagggccccctgagcttcctgatgaagagaaagaccgcccagaagctggccatccagaaggccctgagcgacgccttccagaagctgctgatcgtggtgctggagagcggcaagatcgccgtggagtacagacccagcgaggacatcgtgggcgtgagatgcgaggaggagctgcacggcctgatccaggtgccctgcagcccctggaagcagtacggccaggaggaggagggctacctgagcgacttcagcctggaggaggaggagttcagactgcccgagctggactag

SEQ ID NO: 96214 - DNA, 393 bp, synthetic construct
  misc_feature 1..393: note = Description of Artificial Sequence: Synthetic coding sequence
  source 1..393: mol_type = other DNA
ttcggcttcaacggctgcagcaagagaatcatcaagctgcaggagctgagcgacctggaggagagagagaacgaggacagcatggtgcccctgcccaagcagagcctgaagttcttctgcgccctggaggtggtgctgcccagctgcgactgcagaagccccggcatcggcctggtggaggagcccatggacaaggtggaggaggagagcggcaagatcgccgtggagtacagacccagcgaggacatcgtgggcgtgagatgcgaggaggagctgcacggcctgatccaggtgccctgcagcccctggaagcagtacggccaggaggaggagggctacctgagcgacttcagcctggaggaggaggagttcagactgcccgagctggactag

SEQ ID NO: 96215 - DNA, 501 bp, synthetic construct
  misc_feature 1..501: note = Description of Artificial Sequence: Synthetic coding sequence
  source 1..501: mol_type = other DNA
atggccgagctggtgcccttcgccgtgcccatcgagagcgacaagaccctgctggtgtgggagctgagcagcggccccaccgccgaggccctgcaccacagcctgttcaccgccttcagccagttcggcctgctgtacagcgtgagagtgttccccaacgccgccgtggcccaccccggcttctacgccgtgatcaagttctacagcgccagagccgcccacagagcccagaaggcctgcgacagaaagcagctgttccagaagagccccgtgaaggtgagactgggcaccagacacaaggccgtgcagcaccaggccctggccctgaacagcagcaagtgccaggagctggccaactactacttcggcttcaacggctgcagcaagagaatcatcaaggtgccctgcagcccctggaagcagtacggccaggaggaggagggctacctgagcgacttcagcctggaggaggaggagttcagactgcccgagctggactag

SEQ ID NO: 96216 - DNA, 642 bp, synthetic construct
  misc_feature 1..642: note = Description of Artificial Sequence: Synthetic coding sequence
  source 1..642: mol_type = other DNA
atgcacctgctggtgccccccccccagcacagcctgttcaccgccttcagccagttcggcctgctgtacagcgtgagagtgttccccaacgccgccgtggcccaccccggcttctacgccgtgatcaagttctacagcgccagagccgcccacagagcccagaaggcctgcgacagaaagcagctgttccagaagagccccgtgaaggtgagactgggcaccagacacaaggccgtgcagcaccaggccctggccctgaacagcagcaagtgccaggagctggccaactactacttcggcttcaacggctgcagcaagagaatcatcaagctgcaggagctgagcgacctggaggagagagagaacgaggacagcatggtgcccctgcccaagcagagcctgaagttcttctgcgccctggaggtggtgctgcccagctgcgactgcagaagccccggcatcggcctggtggaggagcccatggacaaggtggaggagggccccctgagcttcctgatgaagagaaagaccgcccagaagctggccatccagaaggccctgagcgacgccttccagaagctgctgatcgtggtgctgggcaagaccgtgctgatcatcctggaggtgctgcagttccagtag

SEQ ID NO: 96217 - DNA, 756 bp, synthetic construct
  misc_feature 1..756: note = Description of Artificial Sequence: Synthetic coding sequence
  source 1..756: mol_type = other DNA
atggccgagctggtgcccttcgccgtgcccatcgagagcgacaagaccctgctggtgtgggagctgagcagcggccccaccgccgaggccctgcaccacagcctgttcaccgccttcagccagttcggcctgctgtacagcgtgagagtgttccccaacgccgccgtggcccaccccggcttctacgccgtgatcaagttctacagcgccagagccgcccacagagcccagaaggcctgcgacagaaagcagctgttccagaagagccccgtgaaggtgagactgggcaccagacacaaggccgtgcagcaccaggccctggccctgaacagcagcaagtgccaggagctggccaactactacttcggcttcaacggctgcagcaagagaatcatcaagctgcaggagctgagcgacctggaggagagagagaacgaggacagcatggtgcccctgcccaagcagagcctgaagttcttctgcgccctggaggtggtgctgcccagctgcgactgcagaagccccggcatcggcctggtggaggagcccatggacaaggtggaggaggagagcggcaagatcgccgtggagtacagacccagcgaggacatcgtgggcgtgagatgcgaggaggagctgcacggcctgatccaggtgccctgcagcccctggaagcagtacggccaggaggaggagggctacctgagcgacttcagcctggaggaggaggagttcagactgcccgagctggactag

SEQ ID NO: 96218 - DNA, 420 bp, synthetic construct
  misc_feature 1..420: note = Description of Artificial Sequence: Synthetic coding sequence
  source 1..420: mol_type = other DNA
atggccgagctggtgcccttcgccgtgcccatcgagagcgacaagaccctgctggtgtgggagctgagcagcggccccaccgccgaggccctgcaccacagcctgttcaccgccttcagccagttcggcctgctgtacagcgtgagagtgttccccaacgccgccgtggcccaccccggcttctacgccgtgatcaagttctacagcgccagagccgcccacagagcccagaaggcctgcgacagaaagcagctgttccagaagagccccgtgaaggtgagactgggcaccagacacaaggccgtgcagcaccaggccctggccctgaacagcagcaagtgccaggagctggccaactactacttcggcttcaacggctgcagcaagagaatcatcaaggaccactaccacagcctgtag

SEQ ID NO: 96219 - DNA, 432 bp, synthetic construct
  misc_feature 1..432: note = Description of Artificial Sequence: Synthetic coding sequence
  source 1..432: mol_type = other DNA
atgcacctgctggtgccccccccccagcacagcctgttcaccgccttcagccagttcggcctgctgtacagcgtgagagtgttccccaacgccgccgtggcccaccccggcttctacgccgtgatcaagttctacagcgccagagccgcccacagagcccagaaggcctgcgacagaaagcagctgttccagaagagccccgtgaaggtgagactgggcaccagacacaaggccgtgcagcaccaggccctggccctgaacagcagcaagtgccaggagctggccaactactacttcggcttcaacggctgcagcaagagaatcatcaaggtgccctgcagcccctggaagcagtacggccaggaggaggagggctacctgagcgacttcagcctggaggaggaggagttcagactgcccgagctggactag

SEQ ID NO: 96220 - DNA, 2733 bp, synthetic construct
  misc_feature 1..2733: note = Description of Artificial Sequence: Synthetic coding sequence
  source 1..2733: mol_type = other DNA
atgagaagaagcgccgcccccagccagctgcagggcaacagcttcaagaagcccaagttcatcccccccggcagaagcaaccccggcctgaacgaggagatcaccaagctgaaccccgacatcaagctgttcgagggcgtggccatcaacaacaccttcctgcccagccagaacgacctgagaatctgcagcctgaacctgcccagcgaggagagcaccagagagatcaacaacagagacaactgcagcggcaagtactgcttcgaggcccccaccctggccaccctggaccccccccacaccgtgcacagcgcccccaaggaggtggccgtgagcaaggagcaggaggagaagagcgacagcctggtgaagtacttcagcgtggtgtggtgcaagcccagcaagaagaagcacaagaagtgggagggcgacgccgtgctgatcgtgaagggcaagagcttcatcctgaagaacctggagggcaaggacatcggcagaggcatcggctacaagttcaaggagctggagaagatcgaggagggccagaccctgatgatctgcggcaaggagatcgaggtgatgggcgtgatcagccccgacgacttcagcagcggcagatgcttccagctgggcggcggcagcaccgccatcagccacagcagccaggtggccagaaagtgcttcagcaaccccttcaagagcgtgtgcaagcccagcagcaaggagaacagacagaacgacttccagaactgcaagcccagacacgacccctacacccccaacagcctggtgatgcccagacccgacaagaaccaccagtgggtgttcaacaagaactgcttccccctggtggacgtggtgatcgacccctacctggtgtaccacctgagaccccaccagaaggagggcatcatcttcctgtacgagtgcgtgatgggcatgagaatgaacggcagatgcggcgccatcctggccgacgagatgggcctgggcaagaccctgcagtgcatcagcctgatctggaccctgcagtgccagggcccctacggcggcaagcccgtgatcaagaagaccctgatcgtgacccccggcagcctggtgaacaactggaagaaggagttccagaagtggctgggcagcgagagaatcaagatcttcaccgtggaccaggaccacaaggtggaggagttcatcaagagcatcttctacagcgtgctgatcatcagctacgagatgctgctgagaagcctggaccagatcaagaacatcaagttcgacctgctgatctgcgacgagggccacagactgaagaacagcgccatcaagaccaccaccgccctgatcagcctgagctgcgagaagagaatcatcctgaccggcacccccatccagaacgacctgcaggagttcttcgccctgatcgacttcgtgaaccccggcatcctgggcagcctgagcagctacagaaagatctacgaggagcccatcatcctgagcagagagcccagcgccagcgaggaggagaaggagctgggcgagagaagagccgccgagctgacctgcctgaccggcctgttcatcctgagaagaacccaggagatcatcaacaagtacctgccccccaagatcgagaacgtggtgttctgcagacccggcgccctgcagatcgagctgtacagaaagctgctgaacagccaggtggtgagattctgcctgcagggcctgctggagaacagcccccacctgatctgcatcggcgccctgaagaagctgtgcaaccacccctgcctgctgttcaacagcatcaaggagaaggagtgcagcagcacctgcgacaagaacgaggagaagagcctgtacaagggcctgctgagcgtgttccccgccgactacaaccccctgctgttcaccgagaaggagagcggcaagctgcaggtgctgagcaagctgctggccgtgatccacgagctgagacccaccgagaaggtggtgctggtgagcaactacacccagaccctgaacatcctgcaggaggtgtgcaagagacacggctacgcctacaccagactggacggccagacccccatcagccagagacagcagatcgtggacggcttcaacagccagcacagcagcttcttcatcttcctgctgagcagcaaggccggcggcgtgggcctgaacctgatcggcggcagccacctgatcctgtacgacatcgactggaaccccgccaccgacatccaggccatgagcagagtgtggagagacggccagaagtaccccgtgcacatctacagactgctgaccaccggcaccatcgaggagaagatctaccagagacagatcagcaagcagggcctgtgcggcgccgtggtggacctgaccaagaccagcgagcacatccagttcagcgtggaggagctgaagaacctgttcaccctgcacgagagcagcgactgcgtgacccacgacctgctggactgcgagtgcaccggcgaggaggtgcacaccggcgacagcctggagaagttcatcgtgagcagagactgccagctgggcccccaccaccagaagagcaacagcctgaagcccctgagcatgagccagctgaagcagtggaagcacttcagcggcgaccacctgaacctgaccgaccccttcctggagagaatcaccgagaacgtgagcttcatcttccagaacatcaccacccaggccaccggcacctag

SEQ ID NO: 96221 - DNA, 900 bp, synthetic construct
  misc_feature 1..900: note = Description of Artificial Sequence: Synthetic coding sequence
  source 1..900: mol_type = other DNA
atggtgggcaaggccagaagcagcaacttcaccctgagcgagaagctggacctgctgaagctggtgaagccctacgtgaagatcctggaggagcacaccaacaagcacagcgtgatcgtggagaagaacagatgctgggacatcatcgccgtgaactacaacgccatcggcgtggacagaccccccagaaccgcccagggcctgagaaccctgtacaagagactgaaggagtacgccaagcaggagctgctgcagcagaaggagacccagagcgacttcaagagcaacatcagcgagcccaccaagaaggtgatggagatgatcccccagatcagcagcttctgcctggtgagagacagaaaccacatccagagcgccaacctggacgaggaggcccaggccggcaccagcagcctgcaggtgatgctggaccaccaccccgtggccatcaccgtggaggtgaagcaggaggaggacatcaagccccccccccccctggtgctgaacagccagcagagcgacaccctggagcagagagaggagcacgagctggtgcacgtgatggagagaagcctgagccccagcctgagcagcgtggacatgagaatgaccagcagccccagcagcatccccagaagagacgacttcttcagacacgagagcggcgagcacttcagaagcctgctgggctacgacccccagatcctgcagatgctgaaggaggagcaccagatcatcctggagaaccagaagaacttcggcctgtacgtgcaggagaagagagacggcctgaagagaagacagcagctggaggaggagctgctgagagccaagatcgaggtggagaagctgaaggccatcagactgagacacgacctgcccgagtacaacagcctgtag

SEQ ID NO: 96222 - DNA, 378 bp, synthetic construct
  misc_feature 1..378: note = Description of Artificial Sequence: Synthetic coding sequence
  source 1..378: mol_type = other DNA
atgagaagaagcgccgcccccagccagctgcagggcaacagcttcaagaagcccaagttcatcccccccggcagaagcaaccccggcctgaacgaggagatcaccaagctgaaccccgacatcaagctgttcgagggcgtggccatcaacaacaccttcctgcccagccagaacgacctgagaatctgcagcctgaacctgcccagcgaggagagcaccagagagatcaacaacagagacaactgcagcggcaagtactgcttcgaggcccccaccctggccaccctggaccccccccacaccgtgcacagcgcccccaaggaggtggccgtgagcaaggagcaggaggagaagagcgacagcctggtgaagtactag

SEQ ID NO: 96223 - DNA, 354 bp, synthetic construct
  misc_feature 1..354: note = Description of Artificial Sequence: Synthetic coding sequence
  source 1..354: mol_type = other DNA
atgagaagaagcgccgcccccagccagctgcagggcaacagcttcaagaagcccaagttcatcccccccggcagaagcaaccccggcctgaacgaggagatcaccaagctgaaccccgacatcaagctgttcgagggcgtggccatcaacaacaccttcctgcccagccagaacgacctgagaatctgcagcctgaacctgcccagcgaggagagcaccagagagatcaacaacagagacaactgcagcggcaagtactgcttcgaggcccccaccctggccaccctggaccccccccacaccgtgcagacctggatgagaagacacagactggtgcccgtgcactacagatag

SEQ ID NO: 96224 - DNA, 477 bp, synthetic construct
  misc_feature 1..477: note = Description of Artificial Sequence: Synthetic coding sequence
  source 1..477: mol_type = other DNA
atgctggaccaccaccccgtggccatcaccgtggaggtgaagcaggaggaggacatcaagccccccccccccctggtgctgaacagccagcagagcgacaccctggagcagagagaggagcacgagctggtgcacgtgatggagagaagcctgagccccagcctgagcagcgtggacatgagaatgaccagcagccccagcagcatccccagaagagacgacttcttcagacacgagagcggcgagcacttcagaagcctgctgggctacgacccccagatcctgcagatgctgaaggaggagcaccagatcatcctggagaaccagaagaacttcggcctgtacgtgcaggagaagagagacggcctgaagagaagacagcagctggaggaggagctgctgagagccaagatcgaggtggagaagctgaaggccatcagactgagacacgacctgcccgagtacaacagcctgtag

SEQ ID NO: 96225 - DNA, 1749 bp, synthetic construct
  misc_feature 1..1749: note = Description of Artificial Sequence: Synthetic coding sequence
  source 1..1749: mol_type = other DNA
atgggcctgggcaagaccctgcagtgcatcagcctgatctggaccctgcagtgccagggcccctacggcggcaagcccgtgatcaagaagaccctgatcgtgacccccggcagcctggtgaacaactggaagaaggagttccagaagtggctgggcagcgagagaatcaagatcttcaccgtggaccaggaccacaaggtggaggagttcatcaagagcatcttctacagcgtgctgatcatcagctacgagatgctgctgagaagcctggaccagatcaagaacatcaagttcgacctgctgatctgcgacgagggccacagactgaagaacagcgccatcaagaccaccaccgccctgatcagcctgagctgcgagaagagaatcatcctgaccggcacccccatccagaacgacctgcaggagttcttcgccctgatcgacttcgtgaaccccggcatcctgggcagcctgagcagctacagaaagatctacgaggagcccatcatcctgagcagagagcccagcgccagcgaggaggagaaggagctgggcgagagagagcagctgaacctgctggccagcctggacagcctgctgagaagaacccaggagatcatcaacaagtacctgccccccaagatcgagaacgtggtgttctgcagacccggcgccctgcagatcgagctgtacagaaagctgctgaacagccaggtggtgagattctgcctgcagggcctgctggagaacagcccccacctgatctgcatcggcgccctgaagaagctgtgcaaccacccctgcctgctgttcaacagcatcaaggagaaggagtgcagcagcacctgcgacaagaacgaggagaagagcctgtacaagggcctgctgagcgtgttccccgccgactacaaccccctgctgttcaccgagaaggagagcggcaagctgcaggtgctgagcaagctgctggccgtgatccacgagctgagacccaccgagaaggtggtgctggtgagcaactacacccagaccctgaacatcctgcaggaggtgtgcaagagacacggctacgcctacaccagactggacggccagacccccatcagccagagacagcagatcgtggacggcttcaacagccagcacagcagcttcttcatcttcctgctgagcagcaaggccggcggcgtgggcctgaacctgatcggcggcagccacctgatcctgtacgacatcgactggaaccccgccaccgacatccaggccatgagcagagtgtggagagacggccagaagtaccccgtgcacatctacagactgctgaccaccggcaccatcgaggagaagatctaccagagacagatcagcaagcagggcctgtgcggcgccgtggtggacctgaccaagaccagcgagcacatccagttcagcgtggaggagctgaagaacctgttcaccctgcacgagagcagcgactgcgtgacccacgacctgctggactgcgagtgcaccggcgaggaggtgcacaccggcgacagcctggagaagttcatcgtgagcagagactgccagctgggcccccaccaccagaagagcaacagcctgaagcccctgagcatgagccagctgaagcagtggaagcacttcagcggcgaccacctgaacctgaccgaccccttcctggagagaatcaccgagaacgtgagcttcatcttccagaacatcaccacccaggccaccggcacctag

SEQ ID NO: 96226 - DNA, 1290 bp, synthetic construct
  misc_feature 1..1290: note = Description of Artificial Sequence: Synthetic coding sequence
  source 1..1290: mol_type = other DNA
atggccgccatgctgaagtgcgtgatgagcggcagccaggtgaaggtgttcggcaaggccgtgcaggccctgagcagaatcagcgacgagttctggctggaccccagcaagaagggcctggccctgagatgcgtgaacagcagcagaagcgcctacggctgcgtgctgttcagccccgtgttcttccagcactaccagtggagcgccctggtgaagatgagcgagaacgagctggacaccaccctgcacctgaagtgcaagctgggcatgaagagcatcctgcccatcttcagatgcctgaacagcctggagagaaacatcgagaagtgcagaatcttcaccagaagcgacaagtgcaaggtggtgatccagttcttctacagacacggcatcaagagaacccacaacatctgcttccaggagagccagcccctgcaggtgatcttcgacaagaacgtgtgcaccaacaccctgatgatccagcccagactgctggccgacgccatcgtgctgttcaccagcagccaggaggaggtgaccctggccgtgacccccctgaacttctgcctgaagagcagcaacgaggagagcatggacctgagcaacgccgtgcacagcgagatgttcgtgggcagcgacgagttcgacttcttccagatcggcatggacaccgagatcaccttctgcttcaaggagctgaagggcatcctgaccttcagcgaggccacccacgcccccatcagcatctacttcgacttccccggcaagcccctggccctgagcatcgacgacatgctggtggaggccaacttcatcctggccaccctggccgacgagcagagcagagccagcagcccccagagcctgtgcctgagccagaagagaaagagaagcgacctgatcgagaagaaggccggcaagaacgtgaccggccaggccctggagtgcatcagcaagaaggccgcccccagaagactgtaccccaaggagaccctgaccaacatcagcgccctggagaactgcggcagccccgccatgaagagagtggacggcgacgtgagcgaggtgagcgagagcagcgtgagcaacaccgaggaggtgcccggcagcctgtgcctgagaaagttcagctgcatgttcttcggcgccgtgagcagcgaccagcaggagcacttcaaccaccccttcgacagcctggccagagccagcgacagcgaggaggacatgaacaacgtgtgctgcagaaaggagttcaacggcagcgacgccaagtacttctgcatcatctag

SEQ ID NO: 96227 - DNA, 1038 bp, synthetic construct
  misc_feature 1..1038: note = Description of Artificial Sequence: Synthetic coding sequence
  source 1..1038: mol_type = other DNA
atgagcgagaacgagctggacaccaccctgcacctgaagtgcaagctgggcatgaagagcatcctgcccatcttcagatgcctgaacagcctggagagaaacatcgagaagtgcagaatcttcaccagaagcgacaagtgcaaggtggtgatccagttcttctacagacacggcatcaagagaacccacaacatctgcttccaggagagccagcccctgcaggtgatcttcgacaagaacgtgtgcaccaacaccctgatgatccagcccagactgctggccgacgccatcgtgctgttcaccagcagccaggaggaggtgaccctggccgtgacccccctgaacttctgcctgaagagcagcaacgaggagagcatggacctgagcaacgccgtgcacagcgagatgttcgtgggcagcgacgagttcgacttcttccagatcggcatggacaccgagatcaccttctgcttcaaggagctgaagggcatcctgaccttcagcgaggccacccacgcccccatcagcatctacttcgacttccccggcaagcccctggccctgagcatcgacgacatgctggtggaggccaacttcatcctggccaccctggccgacgagcagagcagagccagcagcccccagagcctgtgcctgagccagaagagaaagagaagcgacctgatcgagaagaaggccggcaagaacgtgaccggccaggccctggagtgcatcagcaagaaggccgcccccagaagactgtaccccaaggagaccctgaccaacatcagcgccctggagaactgcggcagccccgccatgaagagagtggacggcgacgtgagcgaggtgagcgagagcagcgtgagcaacaccgaggaggtgcccggcagcctgtgcctgagaaagttcagctgcatgttcttcggcgccgtgagcagcgaccagcaggagcacttcaaccaccccttcgacagcctggccagagccagcgacagcgaggaggacatgaacaacggcagcttcagcatcttctag

SEQ ID NO: 96228 - DNA, 1038 bp, synthetic construct; identical to SEQ ID NO: 96227
  misc_feature 1..1038: note = Description of Artificial Sequence: Synthetic coding sequence
  source 1..1038: mol_type = other DNA

SEQ ID NO: 96229 - DNA, 1449 bp, synthetic construct; identical to SEQ ID NO: 82211
  misc_feature 1..1449: note = Description of Artificial Sequence: Synthetic coding sequence
  source 1..1449: mol_type = other DNA

SEQ ID NO: 96230 - DNA, 1410 bp, synthetic construct
  misc_feature 1..1410: note = Description of Artificial Sequence: Synthetic coding sequence
  source 1..1410: mol_type = other DNA
atggaggacagcaccagccccaagcaggagaaggagaaccaggaggagctgggcgagaccagaagaccctgggagggcaagaccgccgccagcccccagtacagcgagcccgagagcagcgagcccctggaggccaagcagggccccgagaccggcagacagagcagaagcagcagaccctggagcccccagagcagagccaagacccccctgggcggccccgccggccccgagaccagcagccccgcccccgtgagccccagagagcccagcagcagccccagccccctggcccccgccagacaggacctggccgcccccccccagagcgacagaaccaccagcgtgatccccgaggccggcaccccctaccccgaccccctggagcagagcagcgacaagagagagagcaccccccaccacaccagccagagcgagggcaacaccttccagcagagccagcagcccaagccccacctgtgcggcagaagagacgtgagctacaacaacgccaagcagaaggagctgagattcgacgtgttccaggaggaggacagcaacagcgactacgacctgcagcagcccgcccccggcggcagcgaggtggcccccagcatgctggagatcaccatccagaacgccaaggcctacctgctgaagaccagcagcaacagcggcttcaacctgtacgaccacctgagcaacatgctgaccaagatcctgaacgagagacccgagaacgccgtggacatcttcgagaacatcagccaggacgtgaagatggcccacttcagcaagaagttcgacgccctgcagaacgagaacgagctgctgcccacctacgagatcgccgagaagcagaaggccctgttcctgcagggccacctggagggcgtggaccaggagctggaggacgagatcggcagatgcaactggttcaacagcatccagaagaacgaggaggaggaggaggaggaggacgaggagaaggacgacagcgactacatcgagcaggaggtgggcctgcccctgctgacccccatcagcgaggacctggagatccagaacatccccccctggaccaccagactgagcagcaacctgatcccccagtacgccatcgccgtgctgcagagcaacctgtggcccggcgcctacgccttcagcaacggcaagaagttcgagaacttctacatcggctggggccacaagtacagccccgacaactacaccccccccgtgcccccccccgtgtaccaggagtaccccagcggccccgagatcaccgagatggacgaccccagcgtggaggaggagcaggccttcagagccgcccaggaggccgtgctgctggccgccgagaacgaggagagcgaggaggacgaggacgaggaggacgactacgactag

SEQ ID NO: 96231 - DNA, 1803 bp, synthetic construct
  misc_feature 1..1803: note = Description of Artificial Sequence: Synthetic coding sequence
  source 1..1803: mol_type = other DNA
atggaggacagcaccagccccaagcaggagaaggagaaccaggaggagctgggcgagaccagaagaccctgggagggcaagaccgccgccagcccccagtacagcgagcccgagagcagcgagcccctggaggccaagcagggccccgagaccggcagacagagcagaagcagcagaccctggagcccccagagcagagccaagacccccctgggcggccccgccggccccgagaccagcagccccgcccccgtgagccccagagagcccagcagcagccccagccccctggcccccgccagacaggacctggccgcccccccccagagcgacagaaccaccagcgtgatccccgaggccggcaccccctaccccgaccccctggagcagagcagcgacaagagagagagcaccccccaccacaccagccagagcgagggcaacaccttccagcagagccagcagcccaagccccacctgtgcggcagaagagacgtgagctacaacaacgccaagcagaaggagctgagattcgacgtgttccaggaggaggacagcaacagcgactacgacctgcagcagcccgcccccggcggcagcgaggtggcccccagcatgctggagatcaccatccagaacgccaaggcctacctgctgaagaccagcagcaacagcggcttcaacctgtacgaccacctgagcaacatgctgaccaagatcctgaacgagagacccgagaacgccgtggacatcttcgagaacatcagccaggacgtgaagatggcccacttcagcaagaagttcgacgccctgcagaacgagaacgagctgctgcccacctacgagatcgccgagaagcagaaggccctgttcctgcagggccacctggagggcgtggaccaggagctggaggacgagatcgccgagaacgccctgcccaacgtgatggagagcgccttctacttcgagcaggccggcgtgggcctgggcaccgacgagacctacagaatcttcctggccctgaagcagctgaccgacacccaccccatccagagatgcagattctggggcaagatcctgggcctggagatgaactacatcgtggccgaggtggagttcagagagggcgaggacgaggaggaggtggaggaggaggacgtggccgaggagagagacaacggcgagagcgaggcccacgaggacgaggaggacgagctgcccaagagcttctacaaggccccccaggccatccccaaggaggagagcagaaccggcgccaacaagtacgtgtacttcgtgtgcaacgagcccggcagaccctgggtgaagctgccccccgtgatccccgcccagatcgtgatcgccagaaagatcaagaagttcttcaccggcagactggacgcccccatcatcagctacccccccttccccggcaacgagagcaactacctgagagcccagatcgccagaatcagcgccggcacccacgtgagccccctgggcttctaccagttcggcgaggaggagggcgaggaggaggaggaggccgagggcggcagaaacagcttcgaggagaaccccgacttcgagggcatccaggtgatcgacctggtggagagcctgagcaactgggtgcaccacgtgcagcacatcctgagccagagattcagaatctacccccccggccagcacggctacccccagatcagcttccacaacatgctgctgcagagcttcaaccccaccttcggcctggagcacatgcccagccccatggccaagagcctgaagatcagcacctag

SEQ ID NO: 96232 - DNA, 1536 bp, synthetic construct
  misc_feature 1..1536: note = Description of Artificial Sequence: Synthetic coding sequence
  source 1..1536: mol_type = other DNA
atgctggagatcaccatccagaacgccaaggcctacctgctgaagaccagcagcaacagcggcttcaacctgtacgaccacctgagcaacatgctgaccaagatcctgaacgagagacccgagaacgccgtggacatcttcgagaacatcagccaggacgtgaagatggcccacttcagcaagaagttcgacgccctgcagaacgagaacgagctgctgcccacctacgagatcgccgagaagcagaaggccctgttcctgcagggccacctggagggcgtggaccaggagctggaggacgagatcgccgagaacgccctgcccaacgtgatggagagcgccttctacttcgagcaggccggcgtgggcctgggcaccgacgagacctacagaatcttcctggccctgaagcagctgaccgacacccaccccatccagagatgcagattctggggcaagatcctgggcctggagatgaactacatcgtggccgaggtggagttcagagagggcgaggacgaggaggaggtggaggaggaggacgtggccgaggagagagacaacggcgagagcgaggcccacgaggacgaggaggacgagctgcccaagagcttctacaaggccccccaggccatccccaaggaggagagcagaaccggcgccaacaagtacgtgtacttcgtgtgcaacgagcccggcagaccctgggtgaagctgccccccgtgatccccgcccagatcgtgatcgccagaaagatcaagaagttcttcaccggcagactggacgcccccatcatcagctacccccccttccccggcaacgagagcaactacctgagagcccagatcgccagaatcagcgccggcacccacgtgagccccctgggcttctaccagttcggcgaggaggagggcgaggaggaggaggaggccgagggcggcagaaacagcttcgaggagaaccccgacttcgagggcatccaggtgatcgacctggtggagagcctgagcaactgggtgcaccacgtgcagcacatcctgagccagggcagatgcaactggttcaacagcatccagaagaacgaggaggaggaggaggaggaggacgaggagaaggacgacagcgactacatcgagcaggaggtgggcctgcccctgctgacccccatcagcgaggacctggagatccagaacatccccccctggaccaccagactgagcagcaacctgatcccccagtacgccatcgccgtgctgcagagcaacctgtggcccggcgcctacgccttcagcaacggcaagaagttcgagaacttctacatcggctggggccacaagtacagccccgacaactacaccccccccgtgcccccccccgtgtaccaggagtaccccagcggccccgagatcaccgagatggacgaccccagcgtggaggaggagcaggccttcagagccgcccaggaggccgtgctgctggccgccgagaacgaggagagcgaggaggacgaggacgaggaggacgactacgactag

SEQ ID NO: 96233 - DNA, 531 bp, synthetic construct
  misc_feature 1..531: note = Description of Artificial Sequence: Synthetic coding sequence
  source 1..531: mol_type = other DNA
atgctggtgaagagagactacagatacgacagagtgctgttctggggcagaatcctgggcctggtggccgactactacatcgcccagggcctgagcgaggaccagctggcccccagaaagaccctgtacagcctgaactgcaccgagtggagcctgctgccccccgccaccgaggagatggtggcccagagcagcgtggtgaagggcagattcatgggcgaccccagctacgagtacgagcacaccgagctgcagaaggtgaacgagggcgagaaggtgttcgaggaggagatcgtggtgcagatcaaggaggagaccagactggtgagcgtgatcgaccagatcgacaaggccgtggccatcatccccagaggcgccctgttcaagacccccttcggccccacccacgtgaacagaaccttcgagggctactacaactggtacaagacccccgccccccaccccacctgcgacggcaaccagggcgtgagagccagaggcagaagccccagcctgggcagattcctgtag

SEQ ID NO: 96234 - DNA, 831 bp, synthetic construct
  misc_feature 1..831: note = Description of Artificial Sequence: Synthetic coding sequence
  source 1..831: mol_type = other DNA
atggacgccgacagcctgctgctgagcctggagctggccagcggcagcggccagggcctgagccccgacagaagagccagcctgctgaccagcctgatgctggtgaagagagactacagatacgacagagtgctgttctggggcagaatcctgggcctggtggccgactactacatcgcccagggcctgagcgaggaccagctggcccccagaaagaccctgtacagcctgaactgcaccgagtggagcctgctgccccccgccaccgaggagatggtggcccagagcagcgtggtgaagggcagattcatgggcgaccccagctacgagtacgagcacaccgagctgcagaaggtgaacgagggcgagaaggtgttcgaggaggagatcgtggtgcagatcaaggaggagaccagactggtgagcgtgatcgaccagatcgacaaggccgtggccatcatccccagaggcgccctgttcaagacccccttcggccccacccacgtgaacagaaccttcgagggcctgagcctgagcgaggccaagaagctgagcagctacttccacttcagagagcccgtggagctgaagaacaagaccctgctggagaaggccgacctggaccccagcctggacttcatggacagcctggagcacgacatccccaagggcagctggagcatccagatggagagaggcaacgccctggtggtgctgagaagcctgctgtggcccggcctgaccttctaccacgcccccagaaccaagaactacggctacgtgtacgtgggcaccggcgagaagaacatggacctgcccttcatgctgtag

SEQ ID NO: 96235 - DNA, 921 bp, synthetic construct
  misc_feature 1..921: note = Description of Artificial Sequence: Synthetic coding sequence
  source 1..921: mol_type = other DNA
atggacgccgacagcctgctgctgagcctggagctggccagcggcagcggccagggcctgagccccgacagaagagccagcctgctgaccagcctgatgctggtgaagagagactacagatacgacagagtgctgttctggggcagaatcctgggcctggtggccgactactacatcgcccagggcctgagcgaggaccagctggcccccagaaagaccctgtacagcctgaactgcaccgagtggagcctgctgccccccgccaccgaggagatggtggcccagagcagcgtggtgaagggcagattcatgggcgaccccagctacgagtacgagcacaccgagctgcagaaggtgaacgagggcgagaaggtgttcgaggaggagatcgtgatcgacaaggccgtggccatcatccccagaggcgccctgttcaagacccccttcggccccacccacgtgaacagaaccttcgagggcctgagcctgagcgaggccaagaagctgagcagctacttccacttcagagagcccgtggagctgaagaacaagaccctgctggagaaggccgacctggaccccagcctggacttcatggacagcctggagcacgacatccccaagggcagcgaggccgtggtgcagggcgacttcacctggctgctgagcagatgcggcttcggctggccctgcagctgggacagctgcagcgtgagcatgagagtgctggagcaccccgacggcgagggccagtgccccggcggcgccgcccagcccgccctggccggcccccacctgctgccctgcagcccccaccaggagctgtggctgagactgagaggccactggagagaggagcacggcctggccctgcacgccatcgagtgggagcccgcctggatgttcctgaacagagtgtag

SEQ ID NO: 96236 - DNA, 402 bp, synthetic construct
  misc_feature 1..402: note = Description of Artificial Sequence: Synthetic coding sequence
  source 1..402: mol_type = other DNA
tgactgaactgcaccgagtggagcctgctgccccccgccaccgaggagatggtggcccagagcagcgtggtgaagggcagattcatgggcgaccccagctacgagtacgagcacaccgagctgcagaaggtgaacgagggcgagaaggtgttcgaggaggagatcgtggtgcagatcaaggaggagaccagactggtgagcgtgatcgaccagatcgacaaggccgtggccatcatccccagaggcgccctgttcaagacccccttcggccccacccacgtgaacagaaccttcgagggctactacaactggtacaagacccccgccccccaccccacctgcgacggcaaccagggcgtgagagccagaggcagaagccccagcctgggcagattcctgtag

SEQ ID NO: 96237 - DNA, 1086 bp, synthetic construct
  misc_feature 1..1086: note = Description of Artificial Sequence: Synthetic coding sequence
  source 1..1086: mol_type = other DNA
atgtgggtgctgacccccgccgccttcgccggcaagctgctgagcgtgttcagacagcccctgagcagcctgtggagaagcctggtgcccctgttctgctggctgagagccaccttctggctgctggccaccaagagaagaaagcagcagctggtgctgagaggccccgacgagaccaaggaggaggaggaggacccccccctgcccaccacccccaccagcgtgaactaccacttcaccagacagtgcaactacaagtgcggcttctgcttccacaccgccaagaccagcttcgtgctgcccctggaggaggccaagagaggcctgctgctgctgaaggaggccggcatggagaagatcaacttcagcggcggcgagcccttcctgcaggacagaggcgagtacctgggcaagctggtgagattctgcaaggtggagctgagactgcccagcgtgagcatcgtgagcaacggcagcctgatcagagagagatggttccagaactacggcgagtacctggacatcctggccatcagctgcgacagcttcgacgaggaggtgaacgtgctgatcggcagaggccagggcaagaagaaccacgtggagaacctgcagaagctgagaagatggtgcagagactacagagtggccttcaagatcaacagcgtgatcaacagattcaacgtggaggaggacatgaccgagcagatcaaggccctgaaccccgtgagatggaaggtgttccagtgcctgctgatcgagggcgagaactgcggcgaggacgccctgagagaggccgagagattcgtgatcggcgacgaggagttcgagagattcctggagagacacaaggaggtgagctgcctggtgcccgagagcaaccagaagatgaaggacagctacctgatcctggacgagtacatgagattcctgaactgcagaaagggcagaaaggaccccagcaagagcatcctggacgtgggcgtggaggaggccatcaagttcagcggcttcgacgagaagatgttcctgaagagaggcggcaagtacatctggagcaaggccgacctgaagctggactggtag

SEQ ID NO: 96238 - DNA, 765 bp, synthetic construct
  misc_feature 1..765: note = Description of Artificial Sequence: Synthetic coding sequence
  source 1..765: mol_type = other DNA
atgctgcacagcagccactaccccggcatggagaagatcaacttcagcggcggcgagcccttcctgcaggacagaggcgagtacctgggcaagctggtgagattctgcaaggtggagctgagactgcccagcgtgagcatcgtgagcaacggcagcctgatcagagagagatggttccagaactacggcgagtacctggacatcctggccatcagctgcgacagcttcgacgaggaggtgaacgtgctgatcggcagaggccagggcaagaagaaccacgtggagaacctgcagaagctgagaagatggtgcagagactacagagtggccttcaagatcaacagcgtgatcaacagattcaacgtggaggaggacatgaccgagcagatcaaggccctgaaccccgtgagatggaaggtgttccagtgcctgctgatcgagggcgagaactgcggcgaggacgccctgagagaggccgagagattcgtgatcggcgacgaggagttcgagagattcctggagagacacaaggaggtgagctgcctggtgcccgagagcaaccagaagatgaaggacagctacctgatcctggacgagtacatgagattcctgaactgcagaaagggcagaaaggaccccagcaagagcatcctggacgtgggcgtggaggaggccatcaagttcagcggcttcgacgagaagatgttcctgaagagaggcggcaagtacatctggagcaaggccgacctgaagctggactggtag

SEQ ID NO: 96239 - DNA, 1674 bp, synthetic construct
  misc_feature 1..1674: note = Description of Artificial Sequence: Synthetic coding sequence
  source 1..1674: mol_type = other DNA
atgtacaagagaaacggcctgatggccagcgtgctggtgaccagcgccaccccccagggcagcagcagcagcgacagcctggagggccagagctgcgactacgccagcaagagctacgacgccgtggtgttcgacgtgctgaaggtgacccccgaggagttcgccagccagatcaccctgatggacatccccgtgttcaaggccatccagcccgaggagctggccagctgcggctggagcaagaaggagaagcacagcctggcccccaacgtggtggccttcaccagaagattcaaccaggtgagcttctgggtggtgagagagatcctgaccgcccagaccctgaagatcagagccgagatcctgagccacttcgtgaagatcgccaagaagctgctggagctgaacaacctgcacagcctgatgagcgtggtgagcgccctgcagagcgcccccatcttcagactgaccaagacctgggccctgctgaacagaaaggacaagaccaccttcgagaagctggactacctgatgagcaaggaggacaactacaagagaaccagagagtacatcagaagcctgaagatggtgcccagcatcccctacctgggcatctacctgctggacctgatctacatcgacagcgcctaccccgccagcggcagcatcatggagaacgagcagagaagcaaccagatgaacaacatcctgagaatcatcgccgacctgcaggtgagctgcagctacgaccacctgaccaccctgccccacgtgcagaagtacctgaagagcgtgagatacatcgaggagctgcagaagttcgtggaggacgacaactacaagctgagcctgagaatcgagcccggcagcagcagccccagactggtgagcagcaaggaggacctggccggccccagcgccggcagcggcagcgccagattcagcagaagacccacctgccccgacaccagcgtggccggcagcctgcccaccccccccgtgcccagacacagaaagagccacagcctgggcaacaacatgatgtgccagctgagcgtggtggagagcaagagcgccaccttccccagcgagaaggccagacacctgctggacgacagcgtgctggagagcagaagccccagaagaggcctggccctgaccagcagcagcgccgtgaccaacggcctgagcctgggcagcagcgagagcagcgagttcagcgaggagatgagcagcggcctggagagccccaccggcccctgcatctgcagcctgggcaacagcgccgccgtgcccaccatggagggccccctgagaagaaagaccctgctgaaggagggcagaaagcccgccctgagcagctggaccagatactgggtgatcctgagcggcagcaccctgctgtactacggcgccaagagcctgagaggcaccgacagaaagcactacaagagcacccccggcaagaaggtgagcatcgtgggctggatggtgcagctgcccgacgaccccgagcaccccgacatcttccagctgaacaaccccgacaagggcaacgtgtacaagttccagaccggcagcagattccacgccatcctgtggcacaagcacctggacgacgcctgcaagagcaacagaccccaggtgcccgccaacctgatgagcttcgagtag

SEQ ID NO: 96240 - DNA, 522 bp, synthetic construct
  misc_feature 1..522: note = Description of Artificial Sequence: Synthetic coding sequence
  source 1..522: mol_type = other DNA
atgtacaagagaaacggcctgatggccagcgtgctggtgaccagcgccaccccccagggcagcagcagcagcgacagcctggagggccagagctgcgactacgccagcaagagctacgacgccgtggtgttcgacgtgctgaaggtgacccccgaggagttcgccagccagatcaccctgatggacatccccgtgttcaaggccatccagcccgaggagctggccagctgcggctggagcaagaaggagaagcacagcctggcccccaacgtggtggccttcaccagaagattcaaccagaagctgctggagctgaacaacctgcacagcctgatgagcgtggtgagcgccctgcagagcgcccccatcttcagactgaccaagacctgggccctgctgaacagaaaggacaagaccaccttcgagaagctggactacctgatgagcaaggaggacaactacaagagaaccagagagtacatcagaagcctgaagatggtgcccagcatcccctacctgtag

SEQ ID NO: 96241 - DNA, 1590 bp, synthetic construct
  misc_feature 1..1590: note = Description of Artificial Sequence: Synthetic coding sequence
  source 1..1590: mol_type = other DNA
atgtacaagagaaacggcctgatggccagcgtgctggtgaccagcgccaccccccagggcagcagcagcagcgacagcctggagggccagagctgcgactacgccagcaagagctacgacgccgtggtgttcgacgtgctgaaggtgacccccgaggagttcgccagccagatcaccctgatggacatccccgtgttcaaggccatccagcccgaggagctggccagctgcggctggagcaagaaggagaagcacagcctggcccccaacgtggtggccttcaccagaagattcaaccaggtgagcttctgggtggtgagagagatcctgaccgcccagaccctgaagatcagagccgagatcctgagccacttcgtgaagatcgccaagaagctgctggagctgaacaacctgcacagcctgatgagcgtggtgagcgccctgcagagcgcccccatcttcagactgaccaagacctgggccctgctgaacagaaaggacaagaccaccttcgagaagctggactacctgatgagcaaggaggacaactacaagagaaccagagagtacatcagaagcctgaagatggtgcccagcatcccctacctgggcatctacctgctggacctgatctacatcgacagcgcctaccccgccagcggcagcatcatggagaacgagcagagaagcaaccagatgaacaacatcctgagaatcatcgccgacctgcaggtgagctgcagctacgaccacctgaccaccctgccccacgtgcagaagtacctgaagagcgtgagatacatcgaggagctgcagaagttcgtggaggacgacaactacaagctgagcctgagaatcgagcccggcagcagcagccccagactggtgagcagcaaggaggacctggccggccccagcgccggcagcggcagcgccagattcagcagaagacccacctgccccgacaccagcgtggccggcagcctgcccaccccccccgtgcccagacacagaaagagccacagcctgggcaacaacagaggcagactgtacgccaccctgggccccaactggagagtgcccgtgagaaacagccccagaaccagaagctgcgtgtacagccccaccggcccctgcatctgcagcctgggcaacagcgccgccgtgcccaccatggagggccccctgagaagaaagaccctgctgaaggagggcagaaagcccgccctgagcagctggaccagatactgggtgatcctgagcggcagcaccctgctgtactacggcgccaagagcctgagaggcaccgacagaaagcacgtgagcatcgtgggctggatggtgcagctgcccgacgaccccgagcaccccgacatcttccagctgaacaaccccgacaagggcaacgtgtacaagttccagaccggcagcagattccacgccatcctgtggcacaagcacctggacgacgcctgcaagagcaacagaccccaggaggccggcgccgcccccggccccaccggcaccgacagccacgaggtggaccacctggagggcggcgccggcaaggaggccggcccctgcgcctag

SEQ ID NO: 96242 - DNA, 918 bp, synthetic construct
  misc_feature 1..918: note = Description of Artificial Sequence: Synthetic coding sequence
  source 1..918: mol_type = other DNA
atgtacaagagaaacggcctgatggccagcgtgctggtgaccagcgccaccccccagggcagcagcagcagcgacagcctggagggccagagctgcgactacgccagcaagagctacgacgccgtggtgttcgacgtgctgaaggtgacccccgaggagttcgccagccagatcaccctgatggacatccccgtgttcaaggccatccagcccgaggagctggccagctgcggctggagcaagaaggagaagcacagcctggcccccaacgtggtggccttcaccagaagattcaaccaggtgagcttctgggtggtgagagagatcctgaccgcccagaccctgaagatcagagccgagatcctgagccacttcgtgaagatcgccaagaagctgctggagctgaacaacctgcacagcctgatgagcgtggtgagcgccctgcagagcgcccccatcttcagactgaccaagacctgggccctgctgaacagaaaggacaagaccaccttcgagaagctggactacctgatgagcaaggaggacaactacaagagaaccagagagtacatcagaagcctgaagatggtgcccagcatcccctacctgggcatctacctgctggacctgatctacatcgacagcgcctaccccgccagcggcagcatcatggagaacgagcagagaagcaaccagatgaacaacatcctgagaatcatcgccgacctgcaggtgagctgcagctacgaccacctgaccaccctgccccacgtgcagaagtacctgaagagcgtgagatacatcgaggagctgcagaagttcgtggaggacgacaactacaagctgagcctgagaatcgagcccggcagcagcagccccagactggtgagcagcaaggaggacctggccgccatgtag

SEQ ID NO: 96243 - DNA, 642 bp, synthetic construct
  misc_feature 1..642: note = Description of Artificial Sequence: Synthetic coding sequence
  source 1..642: mol_type = other DNA
atgtacaagagaaacggcctgatggccagcgtgctggtgaccagcgccaccccccagggcagcagcagcagcgacagcctggagggccagagctgcgactacgccagcaagagctacgacgccgtggtgttcgacgtgctgaaggtgacccccgaggagttcgccagccagatcaccctgatggacatccccgtgttcaaggccatccagcccgaggagctggccagctgcggctggagcaagaaggagaagcacagcctggcccccaacgtggtggccttcaccagaagattcaaccaggtgagcttctgggtggtgagagagatcctgaccgcccagaccctgaagatcagagccgagatcctgagccacttcgtgaagatcgccaagaagctgctggagctgaacaacctgcacagcctgatgagcgtggtgagcgccctgcagagcgcccccatcttcagactgaccaagacctgggccctgctgaacagaaaggacaagaccaccttcgagaagctggactacctgatgagcaaggaggacaactacaagagaaccagagagtacatcagaagcctgaagatggtgcccagcatcccctacctgggcagaagcctgaactggctgatcttcttctag

SEQ ID NO: 96244 - DNA, 327 bp, synthetic construct
  misc_feature 1..327: note = Description of Artificial Sequence: Synthetic coding sequence
  source 1..327: mol_type = other DNA
atgtacaagagaaacggcctgatggccagcgtgctggtgaccagcgccaccccccagggcagcagcagcagcgacagcctggagggccagagctgcgactacgccagcaagagctacgacgccgtggtgttcgacgtgctgaaggtgacccccgaggagttcgccagccagatcaccctgatggacatccccgtgttcaaggccatccagcccgagaagggctggcccgccagaatggaggacagcctgcagaagagcaccgtgagcagcagaccccacgacaccctgcagttcagaaagaccctgcccgtgggccccggcacctag

SEQ ID NO: 96245 - DNA, 1155 bp, synthetic construct
  misc_feature 1..1155: note = Description of Artificial Sequence: Synthetic coding sequence
  source 1..1155: mol_type = other DNA
atgtacaagagaaacggcctgatggccagcgtgctggtgaccagcgccaccccccagggcagcagcagcagcgacagcctggagggccagagctgcgactacgccagcaagagctacgacgccgtggtgttcgacgtgctgaaggtgacccccgaggagttcgccagccagatcaccctgatggacatccccgtgttcaaggccatccagcccgaggagctggccagctgcggctggagcaagaaggagaagcacagcctggcccccaacgtggtggccttcaccagaagattcaaccaggtgagcttctgggtggtgagagagatcctgaccgcccagaccctgaagatcagagccgagatcctgagccacttcgtgaagatcgccaagaagctgctggagctgaacaacctgcacagcctgatgagcgtggtgagcgccctgcagagcgcccccatcttcagactgaccaagacctgggccctgctgaacagaaaggacaagaccaccttcgagaagctggactacctgatgagcaaggaggacaactacaagagaaccagagagtacatcagaagcctgaagatggtgcccagcatcccctacctgggcatctacctgctggacctgatctacatcgacagcgcctaccccgccagcggcagcatcatggagaacgagcagagaagcaaccagatgaacaacatcctgagaatcatcgccgacctgcaggtgagctgcagctacgaccacctgaccaccctgccccacgtgcagaagtacctgaagagcgtgagatacatcgaggagctgcagaagttcgtggaggacgacaactacaagctgagcctgagaatcgagcccggcagcagcagccccagactggtgagcagcaaggaggacctggccgtgagccacctgagcagcctgagccaccagggccaggccgaggaggccagactgaagcccaccagcggccagcaccccgcctggatgtggcccagcagcagcagagtgcccgccgccccccccgccagcgccgcccccagaagcccctggcccagaaacctgagaaacgaccagggccagcccggcgccgtggccctgacctgcaaccccagcaccctgggcagcagaagcagaagaatcacctag

SEQ ID NO: 96246 - DNA, 1614 bp, synthetic construct
  misc_feature 1..1614: note = Description of Artificial Sequence: Synthetic coding sequence
  source 1..1614: mol_type = other DNA
atgtacaagagaaacggcctgatggccagcgtgctggtgaccagcgccaccccccagggcagcagcagcagcgacagcctggagggccagagctgcgactacgccagcaagagctacgacgccgtggtgttcgacgtgctgaaggtgacccccgaggagttcgccagccagatcaccctgatggacatccccgtgttcaaggccatccagcccgaggagctggccagctgcggctggagcaagaaggagaagcacagcctggcccccaacgtggtggccttcaccagaagattcaaccaggtgagcttctgggtggtgagagagatcctgaccgcccagaccctgaagatcagagccgagatcctgagccacttcgtgaagatcgccaagaagctgctggagctgaacaacctgcacagcctgatgagcgtggtgagcgccctgcagagcgcccccatcttcagactgaccaagacctgggccctgctgaacagaaaggacaagaccaccttcgagaagctggactacctgatgagcaaggaggacaactacaagagaaccagagagtacatcagaagcctgaagatggtgcccagcatcccctacctgggcatctacctgctggacctgatctacatcgacagcgcctaccccgccagcggcagcatcatggagaacgagcagagaagcaaccagatgaacaacatcctgagaatcatcgccgacctgcaggtgagctgcagctacgaccacctgaccaccctgccccacgtgcagaagtacctgaagagcgtgagatacatcgaggagctgcagaagttcgtggaggacgacaactacaagctgagcctgagaatcgagcccggcagcagcagccccagactggtgagcagcaaggaggacctggccggccccagcgccggcagcggcagcgccagattcagcagaagacccacctgccccgacaccagcgtggccggcagcctgcccaccccccccgtgcccagacacagaaagagccacagcctgggcaacaacagaggcagactgtacgccaccctgggccccaactggagagtgcccgtgagaaacagccccagaaccagaagctgcgtgtacagccccaccggcccctgcatctgcagcctgggcaacagcgccgccgtgcccaccatggagggccccctgagaagaaagaccctgctgaaggagggcagaaagcccgccctgagcagctggaccagatactgggtgatcctgagcggcagcaccctgctgtactacggcgccaagagcctgagaggcaccgacagaaagcactacaagagcacccccggcaagaaggtgagcatcgtgggctggatggtgcagctgcccgacgaccccgagcaccccgacatcttccagctgaacaaccccgacaagggcaacgtgtacaagttccagaccggcagcagattccacgccatcctgtggcacaagcacctggacgacgcctgcaagagcaacagaccccaggaggccggcgccgcccccggccccaccggcaccgacagccacgaggtggaccacctggagggcggcgccggcaaggaggccggcccctgcgcctag

SEQ ID NO: 96247 - DNA, 462 bp, synthetic construct
  misc_feature 1..462: note = Description of Artificial Sequence: Synthetic coding sequence
  source 1..462: mol_type = other DNA
tgaaacagccccagaaccagaagctgcgtgtacagccccaccggcccctgcatctgcagcctgggcaacagcgccgccgtgcccaccatggagggccccctgagaagaaagaccctgctgaaggagggcagaaagcccgccctgagcagctggaccagatactgggtgatcctgagcggcagcaccctgctgtactacggcgccaagagcctgagaggcaccgacagaaagcactacaagagcacccccggcaagaaggtgagcatcgtgggctggatggtgcagctgcccgacgaccccgagcaccccgacatcttccagctgaacaaccccgacaagggcaacgtgtacaagttccagaccggcagcagattccacgccatcctgtggcacaagcacctggacgacgcctgcaagagcaacagaccccaggtgcccgccaacctgatgagcttcgagtag

SEQ ID NO: 96248 - DNA, 6252 bp, synthetic construct
  misc_feature 1..6252: note = Description of Artificial Sequence: Synthetic coding sequence
  source 1..6252: mol_type = other DNA
atgttcagcaagaagccccacggcgacgtgaagaagagcacccagaaggtgctggacaccaagaaggacgccctgaccagactgaagcacctgagaatcgtgatcgagaacgccgagagcatcgacctgaagcagttcttcgaccagcacttcagccacatctactacgtgttcttcgagaacttcgtgaccatcgaggccagcctgaagcagaagggccacaagagccagagagaggagctggacgccatcctgttcatcttcgagaagatcctgcagctgctgcccgagagaatccaccagagatggcagttccacagcatcggcctgatcctgaagaagctgctgcacaccggcaacagcctgaagatcagaagagagggcgtgagactgttcctgctgtggctgcaggccctgcagaacaactgcagcaaggagcagctgtggatgttcagctgcctgatccccggcttcagcgccccccagagcgagcacggccccagaaccctggacaacctgatcaacccccccctgaacctgcaggagacccaggtgaccatcgaggagatcacccccctggtgcccccccagagcggcgacaagggccaggaggacctgaccagctacttcctggaggccctgctgaagtacatcgtgatccaggtgaagagcctggagtggaagaacaaggagaaccaggagagaggcttcagcttcctgttcagccacttcaagaagtactacctgccctacatcttccccaacatctgcaaggagaacagcctgtaccaccccatcctggacatcccccagatgagacccaagccccactacgtggtgatcaagaaggacgccgagaccaacgaggccatctactgcaccaaggagcccttcatcaaggccagagtgatcgtgatcagatggctggtgagcttctggctggagcccaagccccacaccggcccccacatccccggcatggagggcgaggtgctgcccaagaacatccagagagccgccgccagcctggtgagcagagaggagagcaagaacgacaacgccgacaagaccgacagaaccaccgagcccgagcagagccacagcaacaccagcaccctgaccgagagagagcccagcagcagcagcctgtgcagcatcgacgaggagcacctgaccgacatcgagatcgtgagaagagtgttcagcagcaagagaagcaacgtgaacttcgtgaccgagatcttcagacaggccttcctgctgcccatctgcgaggccgccgccatgagaaaggtggtgaaggtgtaccaggagtggatccagcaggaggagaagcccctgttcatgcaggagcccgaggagatcgtgatcaccagcagcgacctgccctgcatcgagaacgtgaccgaccacgacatcagcatggaggagggcgagaagagagaggaggagaacggcaccaacaccgccgaccacgtgagaaacagcagctgggccaagaacggcagctaccagggcgccctgcacaacgccagcgaggaggccaccgagcagaacatcagagccggcacccaggccgtgctgcaggtgttcatcatcaacagcagcaacatcttcctgctggagcccgccaacgagatcaagaacctgctggacgagcacaccgacatgtgcaagagaatcctgaacatctacagatacatggtggtgcaggtgagcatggacaagaagacctgggagcagatgctgctggtgctgctgagagtgaccgagagcgtgctgaagatgcccagccaggccttcctgcagttccagggcaagaagaacatgaccctggccggcagactggccggccccctgttccagaccctgatcgtggcctggatcaaggccaacctgaacgtgtacatcagcagagagctgtgggacgacctgctgagcgtgctgagcagcctgacctactgggaggagctggccaccgagtggagcctgaccatggagaccctgaccaaggtgctggccagaaacctgtacagcctggacctgagcgacctgcccctggacaagctgagcgagcagaagcagaagaagcacaagggcaagggcgtgggccacgagttccagaaggtgagcgtggacaagagcttcagcagaggctggagcagagaccagcccggccaggcccccatgagacagagaagcgccaccaccaccggcagccccggcaccgagaaggccagaagcatcgtgagacagaagaccgtggccatgagaagcagaagcatcggcgagtgcgccctgcccagcgcctacatcagaagcgccaagagcgcccccgtgctgatccacaccagcaagcccttcctgcccgacatcgtgctgacccccctgagcgacgagctgagcgacatcgacgacgcccagatcctgcccagaagcaccagagtgagacacttcagccagagcgaggagaccggcaacgaggtgttcggcgccctgaacgaggagcagcccctgcccagaagcagcagcaccagcgacatcctggagcccttcaccgtggagagagccaaggtgaacaaggaggacatgagccagaagctgccccccctgaacagcgacatcggcggcagcagcgccaacgtgcccgacctgatggacgagttcatcgccgagagactgagaagcggcaacgccagcaccatgaccagaagaggcagcagccccggcagcctggagatccccaaggacctgcccgacatcctgaacaagcagaaccagatgagacccatcgacgaccccggcgtgcccagcgagtggaccagccccgccagcgccggcagcagcgacctgatcagcagcgacagccacagcgacagcttcagcgccttccagtacgacggcagaaagttcgacaacttcggcttcggcaccgacaccggcgtgaccagcagcgccgacgtggacagcggcagcggccaccaccagagcgccgaggagcaggaggtggccagcctgaccaccctgcacatcgacagcgagaccagcagcctgaaccagcaggccttcagcgccgaggtggccaccatcaccggcagcgagagcgccagccccgtgcacagccccctgggcagcagaagccagacccccagccccagcaccctgaacatcgaccacatggagcagaaggacctgcagctggacgagaagctgcaccacagcgtgctgcagacccccgacgacctggagatcagcgagttccccagcgagtgctgcagcgtgatggccggcggcaccctgaccggctggcacgccgacgtggccaccgtgatgtggagaagaatgctgggcatcctgggcgacgtgaacagcatcatggaccccgagatccacgcccaggtgttcgactacctgtgcgagctgtggcagaacctggccaagatcagagacaacctgggcatcagcaccgacaacctgaccagccccagcccccccgtgctgatcccccccctgagaatcctgaccccctggctgttcaaggccaccatgctgaccgacaagtacaagcagggcaagctgcacgcctacaagctgatctgcaacaccatgaagagaagacaggacgtgagccccaacagagacttcctgacccacttctacaacatcatgcactgcggcctgctgcacatcgaccaggacatcgtgaacaccatcatcaagcactgcagcccccagttcttcagcctgggcctgcccggcgccaccatgctgatcatggacttcatcgtggccgccggcagagtggccagcagcgccttcctgaacgcccccagagtggaggcccaggtgctgctgggcagcctggtgtgcttccccaacctgtactgcgagctgcccagcctgcaccccaacatccccgacgtggccgtgagccagttcaccgacgtgaaggagctgatcatcaagaccgtgctgagcagcgccagagacgagcccagcggccccgccagatgcgtggccctgtgcagcctgggcatctggatctgcgaggagctggtgcacgagagccaccacccccagatcaaggaggccctgaacgtgatctgcgtgagcctgaagttcaccaacaagaccgtggcccacgtggcctgcaacatgctgcacatgctggtgcactacgtgcccagactgcagatctaccagcccgacagccccctgaagatcatccagatcctgatcgccaccatcacccacctgctgcccagcaccgaggccagcagctacgagatggacaagagactggtggtgagcctgctgctgtgcctgctggactggatcatggccctgcccctgaagaccctgctgcagcccttccacgccaccggcgccgagagcgacaagaccgagaagagcgtgctgaactgcatctacaaggtgctgcacggctgcgtgtacggcgcccagtgcttcagcaaccccagatacttccccatgagcctgagcgacctggccagcgtggactacgaccccttcatgcacctggagagcctgaaggagcccgagcccctgcacagccccgacagcgagagaagcagcaagctgcagcccgtgaccgaggtgaagacccagatgcagcacggcctgatcagcatcgccgccagaaccgtgatcacccacctggtgaaccacctgggccactaccccatgagcggcggccccgccatgctgaccagccaggtgtgcgagaaccacgacaaccactacagcgagagcaccgagctgagccccgagctgttcgagagccccaacatccagttcttcgtgctgaacaacaccaccctggtgagctgcatccagatcagaagcgaggagaacatgcccggcggcggcctgagcgccggcctggccagcgccaacagcaacgtgagaatcatcgtgagagacctgagcggcaagtacagctgggacagcgccatcctgtacggccccccccccgtgagcggcctgagcgagcccaccagcttcatgctgagcctgagccaccaggagaagcccgaggagccccccaccagcaacgagtgcctggaggacatcaccgtgaaggacggcctgagcctgcagttcaagagattcagagagaccgtgcccacctgggacaccatcagagacgaggaggacgtgctggacgagctgctgcagtacctgggcgtgaccagccccgagtgcctgcagagaaccggcatcagcctgaacatccccgccccccagcccgtgtgcatcagcgagaagcaggagaacgacgtgatcaacgccatcctgaagcagcacaccgaggagaaggagttcgtggagaagcacttcaacgacctgaacatgaaggccgtggagcaggacgagcccatcccccagaagccccagagcgccttctactactgcagactgctgctgagcatcctgggcatgaacagctgggacaagagaagaagcttccacctgctgaagaagaacgagaagctgctgagagagctgagaaacctggacagcagacagtgcagagagacccacaagatcgccgtgttctacgtggccgagggccaggaggacaagcacagcatcctgaccaacaccggcggcagccaggcctacgaggacttcgtggccggcctgggctgggaggtgaacctgaccaaccactgcggcttcatgggcggcctgcagaagaacaagagcaccggcctgaccaccccctacttcgccaccagcaccgtggaggtgatcttccacgtgagcaccagaatgcccagcgacagcgacgacagcctgaccaagaagctgagacacctgggcaacgacgaggtgcacatcgtgtggagcgagcacaccagagactacagaagaggcatcatccccaccgagttcggcgacgtgctgatcgtgatctaccccatgaagaaccacatgttcagcatccagatcatgaagaagcccgaggtgcccttcttcggccccctgttcgacggcgccatcgtgaacggcaaggtgctgcccatcatggtgagagccaccgccatcaacgccagcagagccctgaagagcctgatccccctgtaccagaacttctacgaggagagagccagatacctgcagaccatcgtgcagcaccacctggagcccaccaccttcgaggacttcgccgcccaggtgttcagccccgccccctaccaccacctgcccagcgacgccgaccactag

SEQ ID NO: 96249 - DNA, 6252 bp, synthetic construct
  misc_feature 1..6252: note = Description of Artificial Sequence: Synthetic coding sequence
  source 1..6252: mol_type = other DNA
atgttcagcaagaagccccacggcgacgtgaagaagagcacccagaaggtgctggacaccaagaaggacgccctgaccagactgaagcacctgagaatcgtgatcgagaacgccgagagcatcgacctgaagcagttcttcgaccagcacttcagccacatctactacgtgttcttcgagaacttcgtgaccatcgaggccagcctgaagcagaagggccacaagagccagagagaggagctggacgccatcctgttcatcttcgagaagatcctgcagctgctgcccgagagaatccaccagagatggcagttccacagcatcggcctgatcctgaagaagctgctgcacaccggcaacagcctgaagatcagaagagagggcgtgagactgttcctgctgtggctgcaggccctgcagaacaactgcagcaaggagcagctgtggatgttcagctgcctgatccccggcttcagcgccccccagagcgagcacggccccagaaccctggacaacctgatcaacccccccctgaacctgcaggagacccaggtgaccatcgaggagatcacccccctggtgcccccccagagcggcgacaagggccaggaggacctgaccagctacttcctggaggccctgctgaagtacatcgtgatccaggtgaagagcctggagtggaagaacaaggagaaccaggagagaggcttcagcttcctgttcagccacttcaagaagtactacctgccctacatcttccccaacatctgcaaggagaacagcctgtaccaccccatcctggacatcccccagatgagacccaagccccactacgtggtgatcaagaaggacgccgagaccaacgaggccatctactgcaccaaggagcccttcatcaaggccagagtgatcgtgatcagatggctggtgagcttctggctggagcccaagccccacaccggcccccacatccccggcatggagggcgaggtgctgcccaagaacatccagagagccgccgccagcctggtgagcagagaggagagcaagaacgacaacgccgacaagaccgacagaaccaccgagcccgagcagagccacagcaacaccagcaccctgaccgagagagagcccagcagcagcagcctgtgcagcatcgacgaggagcacctgaccgacatcgagatcgtgagaagagtgttcagcagcaagagaagcaacgtgaacttcgtgaccgagatcttcagacaggccttcctgctgcccatctgcgaggccgccgccatgagaaaggtggtgaaggtgtaccaggagtggatccagcaggaggagaagcccctgttcatgcaggagcccgaggagatcgtgatcaccagcagcgacctgccctgcatcgagaacgtgaccgaccacgacatcagcatggaggagggcgagaagagagaggaggagaacggcaccaacaccgccgaccacgtgagaaacagcagctgggccaagaacggcagctaccagggcgccctgcacaacgccagcgaggaggccaccgagcagaacatcagagccggcacccaggccgtgctgcaggtgttcatcatcaacagcagcaacatcttcctgctggagcccgccaacgagatcaagaacctgctggacgagcacaccgacatgtgcaagagaatcctgaacatctacagatacatggtggtgcaggtgagcatggacaagaagacctgggagcagatgctgctggtgctgctgagagtgaccgagagcgtgctgaagatgcccagccaggccttcctgcagttccagggcaagaagaacatgaccctggccggcagactggccggccccctgttccagaccctgatcgtggcctggatcaaggccaacctgaacgtgtacatcagcagagagctgtgggacgacctgctgagcgtgctgagcagcctgacctactgggaggagctggccaccgagtggagcctgaccatggagaccctgaccaaggtgctggccagaaacctgtacagcctggacctgagcgacctgcccctggacaagctgagcgagcagaagcagaagaagcacaagggcaagggcgtgggccacgagttccagaaggtgagcgtggacaagagcttcagcagaggctggagcagagaccagcccggccaggcccccatgagacagagaagcgccaccaccaccggcagccccggcaccgagaaggccagaagcatcgtgagacagaagaccgtggacatcgacgacgcccagatcctgcccagaagcaccagagtgagacacttcagccagagcgaggagaccggcaacgaggtgttcggcgccctgaacgaggagcagcccctgcccagaagcagcagcaccagcgacatcctggagcccttcaccgtggagagagccaaggtgaacaaggaggacatgagccagaagctgccccccctgaacagcgacatcggcggcagcagcgccaacgtgcccgacctgatggacgagttcatcgccgagagactgagaagcggcaacgccagcaccatgaccagaagaggcagcagccccggcagcctggagatccccaaggacctgcccgacatcctgaacaagcagaaccagatgagacccatcgacgaccccggcgtgcccagcgagtggaccagccccgccagcgccggcagcagcgacctgatcagcagcgacagccacagcgacagcttcagcgccttccagtacgacggcagaaagttcgacaacttcggcttcggcaccgacaccggcgtgaccagcagcgccgacgtggacagcggcagcggccaccaccagagcgccgaggagcaggaggtggccagcctgaccaccctgcacatcgacagcgagaccagcagcctgaaccagcaggccttcagcgccgaggtggccaccatcaccggcagcgagagcgccagccccgtgcacagccccctgggcagcagaagccagacccccagccccagcaccctgaacatcgaccacatggagcagaaggacctgcagctggacgagaagctgcaccacagcgtgctgcagacccccgacgacctggagatcagcgagttccccagcgagtgctgcagcgtgatggccggcggcaccctgaccggctggcacgccgacgtggccaccgtgatgtggagaagaatgctgggcatcctgggcgacgtgaacagcatcatggaccccgagatccacgcccaggtgttcgactacctgtgcgagctgtggcagaacctggccaagatcagagacaacctgggcatcagcaccgacaacctgaccagccccagcccccccgtgctgatcccccccctgagaatcctgaccccctggctgttcaaggccaccatgctgaccgacaagtacaagcagggcaagctgcacgcctacaagctgatctgcaacaccatgaagagaagacaggacgtgagccccaacagagacttcctgacccacttctacaacatcatgcactgcggcctgctgcacatcgaccaggacatcgtgaacaccatcatcaagcactgcagcccccagttcttcagcctgggcctgcccggcgccaccatgctgatcatggacttcatcgtggccgccggcagagtggccagcagcgccttcctgaacgcccccagagtggaggcccaggtgctgctgggcagcctggtgtgcttccccaacctgtactgcgagctgcccagcctgcaccccaacatccccgacgtggccgtgagccagttcaccgacgtgaaggagctgatcatcaagaccgtgctgagcagcgccagagacgagcccagcggccccgccagatgcgtggccctgtgcagcctgggcatctggatctgcgaggagctggtgcacgagagccaccacccccagatcaaggaggccctgaacgtgatctgcgtgagcctgaagttcaccaacaagaccgtggcccacgtggcctgcaacatgctgcacatgctggtgcactacgtgcccagactgcagatctaccagcccgacagccccctgaagatcatccagatcctgatcgccaccatcacccacctgctgcccagcaccgaggccagcagctacgagatggacaagagactggtggtgagcctgctgctgtgcctgctggactggatcatggccctgcccctgaagaccctgctgcagcccttccacgccaccggcgccgagagcgacaagaccgagaagagcgtgctgaactgcatctacaaggtgctgcacggctgcgtgtacggcgcccagtgcttcagcaaccccagatacttccccatgagcctgagcgacctggccagcgtggactacgaccccttcatgcacctggagagcctgaaggagcccgagcccctgcacagccccgacagcgagagaagcagcaagctgcagcccgtgaccgaggtgaagacccagatgcagcacggcctgatcagcatcgccgccagaaccgtgatcacccacctggtgaaccacctgggccactaccccatgagcggcggccccgccatgctgaccagccaggtgtgcgagaaccacgacaaccactacagcgagagcaccgagctgagccccgagctgttcgagagccccaacatccagttcttcgtgctgaacaacaccaccctggtgagctgcatccagatcagaagcgaggagaacatgcccggcggcggcctgagcgccggcctggccagcgccaacagcaacgtgagaatcatcgtgagagacctgagcggcaagtacagctgggacagcgccatcctgtacggccccccccccgtgagcggcctgagcgagcccaccagcttcatgctgagcctgagccaccaggagaagcccgaggagccccccaccagcaacgagtgcctggaggacatcaccgtgaaggacggcctgagcctgcagttcaagagattcagagagaccgtgcccacctgggacaccatcagagacgaggaggacgtgctggacgagctgctgcagtacctgggcgtgaccagccccgagtgcctgcagagaaccggcatcagcctgaacatccccgccccccagcccgtgtgcatcagcgagaagcaggagaacgacgtgatcaacgccatcctgaagcagcacaccgaggagaaggagttcgtggagaagcacttcaacgacctgaacatgaaggccgtggagcaggacgagcccatcccccagaagccccagagcgccttctactactgcagactgctgctgagcatcctgggcatgaacagctgggacaagagaagaagcttccacctgctgaagaagaacgagaagctgctgagagagctgagaaacctggacagcagacagtgcagagagacccacaagatcgccgtgttctacgtggccgagggccaggaggacaagcacagcatcctgaccaacaccggcggcagccaggcctacgaggacttcgtggccggcctgggctgggaggtgaacctgaccaaccactgcggcttcatgggcggcctgcagaagaacaagagcaccggcctgaccaccccctacttcgccaccagcaccgtggaggtgatcttccacgtgagcaccagaatgcccagcgacagcgacgacagcctgaccaagaagctgagacacctgggcaacgacgaggtgcacatcgtgtggagcgagcacaccagagactacagaagaggcatcatccccaccgagttcggcgacgtgctgatcgtgatctaccccatgaagaaccacatgttcagcatccagatcatgaagaagcccgaggtgcccttcttcggccccctgttcgacggcgccatcgtgaacggcaaggtgctgcccatcatggtgagagccaccgccatcaacgccagcagagccctgaagagcctgatccccctgtaccagaacttctacgaggagagagccagatacctgcagaccatcgtgcagcaccacctggagcccaccaccttcgaggacttcgccgcccaggtgttcagccccgccccctaccaccacctgcccagcgacgccggcagctaccccgagatcctgcccagcgagacccccaccgccacccaggtggacggcgccgacctggccagccccatgagccccagaaccagcaagagcagaatgagcatgaagctgagaagaagcagcggcagcgccaacaagagctag

SEQ ID NO: 96250 - DNA, 6222 bp, synthetic construct
  misc_feature 1..6222: note = Description of Artificial Sequence: Synthetic coding sequence
  source 1..6222: mol_type = other DNA
atgttcagcaagaagccccacggcgacgtgaagaagagcacccagaaggtgctggacaccaagaaggacgccctgaccagactgaagcacctgagaatcgtgatcgagaacgccgagagcatcgacctgaagcagttcttcgaccagcacttcagccacatctactacgtgttcttcgagaacttcgtgaccatcgaggccagcctgaagcagaagggccacaagagccagagagaggagctggacgccatcctgttcatcttcgagaagatcctgcagctgctgcccgagagaatccaccagagatggcagttccacagcatcggcctgatcctgaagaagctgctgcacaccggcaacagcctgaagatcagaagagagggcgtgagactgttcctgctgtggctgcaggccctgcagaacaactgcagcaaggagcagctgtggatgttcagctgcctgatccccggcttcagcgccccccagagcgagcacggccccagaaccctggacaacctgatcaacccccccctgaacctgcaggagacccaggtgaccatcgaggagatcacccccctggtgcccccccagagcggcgacaagggccaggaggacctgaccagctacttcctggaggccctgctgaagtacatcgtgatccaggtgaagagcctggagtggaagaacaaggagaaccaggagagaggcttcagcttcctgttcagccacttcaagaagtactacctgccctacatcttccccaacatctgcaaggagaacagcctgtaccaccccatcctggacatcccccagatgagacccaagccccactacgtggtgatcaagaaggacgccgagaccaacgaggccatctactgcaccaaggagcccttcatcaaggccagagtgatcgtgatcagatggctggtgagcttctggctggagcccaagccccacaccggcccccacatccccggcatggagggcgaggtgctgcccaagaacatccagagagccgccgccagcctggtgagcagagaggagagcaagaacgacaacgccgacaagaccgacagaaccaccgagcccgagcagagccacagcaacaccagcaccctgaccgagagagagcccagcagcagcagcctgtgcagcatcgacgaggagcacctgaccgacatcgagatcgtgagaagagtgttcagcagcaagagaagcaacgtgaacttcgtgaccgagatcttcagacaggccttcctgctgcccatctgcgaggccgccgccatgagaaaggtggtgaaggtgtaccaggagtggatccagcaggaggagaagcccctgttcatgcaggagcccgaggagatcgtgatcaccagcagcgacctgccctgcatcgagaacgtgaccgaccacgacatcagcatggaggagggcgagaagagagaggaggagaacggcaccaacaccgccgaccacgtgagaaacagcagctgggccaagaacggcagctaccagggcgccctgcacaacgccagcgaggaggccaccgagcagaacatcagagccggcacccaggccgtgctgcaggtgttcatcatcaacagcagcaacatcttcctgctggagcccgccaacgagatcaagaacctgctggacgagcacaccgacatgtgcaagagaatcctgaacatctacagatacatggtggtgcaggtgagcatggacaagaagacctgggagcagatgctgctggtgctgctgagagtgaccgagagcgtgctgaagatgcccagccaggccttcctgcagttccagggcaagaagaacatgaccctggccggcagactggccggccccctgttccagaccctgatcgtggcctggatcaaggccaacctgaacgtgtacatcagcagagagctgtgggacgacctgctgagcgtgctgagcagcctgacctactgggaggagctggccaccgagtggagcctgaccatggagaccctgaccaaggtgctggccagaaacctgtacagcctggacctgagcgacctgcccctggacaagctgagcgagcagaagcagaagaagcacaagggcaagggcgtgggccacgagttccagaaggtgagcgtggacaagagcttcagcagaggctggagcagagaccagcccggccaggcccccatgagacagagaagcgccaccaccaccggcagccccggcaccgagaaggccagaagcatcgtgagacagaagaccgtggacatcgacgacgcccagatcctgcccagaagcaccagagtgagacacttcagccagagcgaggagaccggcaacgaggtgttcggcgccctgaacgaggagcagcccctgcccagaagcagcagcaccagcgacatcctggagcccttcaccgtggagagagccaaggtgaacaaggaggacatgagccagaagctgccccccctgaacagcgacatcggcggcagcagcgccaacgtgcccgacctgatggacgagttcatcgccgagagactgagaagcggcaacgccagcaccatgaccagaagaggcagcagccccggcagcctggagatccccaaggacctgcccgacatcctgaacaagcagaaccagatgagacccatcgacgaccccggcgtgcccagcgagtggaccagccccgccagcgccggcagcagcgacctgatcagcagcgacagccacagcgacagcttcagcgccttccagtacgacggcagaaagttcgacaacttcggcttcggcaccgacaccggcgtgaccagcagcgccgacgtggacagcggcagcggccaccaccagagcgccgaggagcaggaggtggccagcctgaccaccctgcacatcgacagcgagaccagcagcctgaaccagcaggccttcagcgccgaggtggccaccatcaccggcagcgagagcgccagccccgtgcacagccccctgggcagcagaagccagacccccagccccagcaccctgaacatcgaccacatggagcagaaggacctgcagctggacgagaagctgcaccacagcgtgctgcagacccccgacgacctggagatcagcgagttccccagcgagtgctgcagcgtgatggccggcggcaccctgaccggctggcacgccgacgtggccaccgtgatgtggagaagaatgctgggcatcctgggcgacgtgaacagcatcatggaccccgagatccacgcccaggtgttcgactacctgtgcgagctgtggcagaacctggccaagatcagagacaacctgggcatcagcaccgacaacctgaccagccccagcccccccgtgctgatcccccccctgagaatcctgaccccctggctgttcaaggccaccatgctgaccgacaagtacaagcagggcaagctgcacgcctacaagctgatctgcaacaccatgaagagaagacaggacgtgagccccaacagagacttcctgacccacttctacaacatcatgcactgcggcctgctgcacatcgaccaggacatcgtgaacaccatcatcaagcactgcagcccccagttcttcagcctgggcctgcccggcgccaccatgctgatcatggacttcatcgtggccgccggcagagtggccagcagcgccttcctgaacgcccccagagtggaggcccaggtgctgctgggcagcctggtgtgcttccccaacctgtactgcgagctgcccagcctgcaccccaacatccccgacgtggccgtgagccagttcaccgacgtgaaggagctgatcatcaagaccgtgctgagcagcgccagagacgagcccagcggccccgccagatgcgtggccctgtgcagcctgggcatctggatctgcgaggagctggtgcacgagagccaccacccccagatcaaggaggccctgaacgtgatctgcgtgagcctgaagttcaccaacaagaccgtggcccacgtggcctgcaacatgctgcacatgctggtgcactacgtgcccagactgcagatctaccagcccgacagccccctgaagatcatccagatcctgatcgccaccatcacccacctgctgcccagcaccgaggccagcagctacgagatggacaagagactggtggtgagcctgctgctgtgcctgctggactggatcatggccctgcccctgaagaccctgctgcagcccttccacgccaccggcgccgagagcgacaagaccgagaagagcgtgctgaactgcatctacaaggtgctgcacggctgcgtgtacggcgcccagtgcttcagcaaccccagatacttccccatgagcctgagcgacctggccagcgtggactacgaccccttcatgcacctggagagcctgaaggagcccgagcccctgcacagccccgacagcgagagaagcagcaagctgcagcccgtgaccgaggtgaagacccagatgcagcacggcctgatcagcatcgccgccagaaccgtgatcacccacctggtgaaccacctgggccactaccccatgagcggcggccccgccatgctgaccagccaggtgtgcgagaaccacgacaaccactacagcgagagcaccgagctgagccccgagctgttcgagagccccaacatccagttcttcgtgctgaacaacaccaccctggtgagctgcatccagatcagaagcgaggagaacatgcccggcggcggcctgagcgccggcctggccagcgccaacagcaacgtgagaatcatcgtgagagacctgagcggcaagtacagctgggacagcgccatcctgtacggccccccccccgtgagcggcctgagcgagcccaccagcttcatgctgagcctgagccaccaggagaagcccgaggagccccccaccagcaacgagtgcctggaggacatcaccgtgaaggacggcctgagcctgcagttcaagagattcagagagaccgtgcccacctgggacaccatcagagacgaggaggacgtgctggacgagctgctgcagtacctgggcgtgaccagccccgagtgcctgcagagaaccggcatcagcctgaacatccccgccccccagcccgtgtgcatcagcgagaagcaggagaacgacgtgatcaacgccatcctgaagcagcacaccgaggagaaggagttcgtggagaagcacttcaacgacctgaacatgaaggccgtggagcaggacgagcccatcccccagaagccccagagcgccttctactactgcagactgctgctgagcatcctgggcatgaacagctgggacaagagaagaagcttccacctgctgaagaagaacgagaagctgctgagagagctgagaaacctggacagcagacagtgcagagagacccacaagatcgccgtgttctacgtggccgagggccaggaggacaagcacagcatcctgaccaacaccggcggcagccaggcctacgaggacttcgtggccggcctgggctgggaggtgaacctgaccaaccactgcggcttcatgggcggcctgcagaagaacaagagcaccggcctgaccaccccctacttcgccaccagcaccgtggaggtgatcttccacgtgagcaccagaatgcccagcgacagcgacgacagcctgaccaagaagctgagacacctgggcaacgacgaggtgcacatcgtgtggagcgagcacaccagagactacagaagaggcatcatccccaccgagttcggcgacgtgctgatcgtgatctaccccatgaagaaccacatgttcagcatccagatcatgaagaagcccgaggtgcccttcttcggccccctgttcgacggcgccatcgtgaacggcaaggtgctgcccatcatggtgagagccaccgccatcaacgccagcagagccctgaagagcctgatccccctgtaccagaacttctacgaggagagagccagatacctgcagaccatcgtgcagcaccacctggagcccaccaccttcgaggacttcgccgcccaggtgttcagccccgccccctaccaccacctgcccagcgacgccgaggagagaaacgccgtgatcgtgctgttcctgcccaagccccccctggagaacatcggccacctgaaggcccccacccagagattctaccccgtgaagctgccccagcagagaagatag

SEQ ID NO: 96251 - DNA, 6150 bp, synthetic construct
  misc_feature 1..6150: note = Description of Artificial Sequence: Synthetic coding sequence
  source 1..6150: mol_type = other DNA
atgttcagcaagaagccccacggcgacgtgaagaagagcacccagaaggtgctggacaccaagaaggacgccctgaccagactgaagcacctgagaatcgtgatcgagaacgccgagagcatcgacctgaagcagttcttcgaccagcacttcagccacatctactacgtgttcttcgagaacttcgtgaccatcgaggccagcctgaagcagaagggccacaagagccagagagaggagctggacgccatcctgttcatcttcgagaagatcctgcagctgctgcccgagagaatccaccagagatggcagttccacagcatcggcctgatcctgaagaagctgctgcacaccggcaacagcctgaagatcagaagagagggcgtgagactgttcctgctgtggctgcaggccctgcagaacaactgcagcaaggagcagctgtggatgttcagctgcctgatccccggcttcagcgccccccagagcgagcacggccccagaaccctggacaacctgatcaacccccccctgaacctgcaggagacccaggtgaccatcgaggagatcacccccctggtgcccccccagagcggcgacaagggccaggaggacctgaccagctacttcctggaggccctgctgaagtacatcgtgatccaggtgaagagcctggagtggaagaacaaggagaaccaggagagaggcttcagcttcctgttcagccacttcaagaagtactacctgccctacatcttccccaacatctgcaaggagaacagcctgtaccaccccatcctggacatcccccagatgagacccaagccccactacgtggtgatcaagaaggacgccgagaccaacgaggccatctactgcaccaaggagcccttcatcaaggccagagtgatcgtgatcagatggctggtgagcttctggctggagcccaagccccacaccggcccccacatccccggcatggagggcgaggtgctgcccaagaacatccagagagccgccgccagcctggtgagcagagaggagagcaagaacgacaacgccgacaagaccgacagaaccaccgagcccgagcagagccacagcaacaccagcaccctgaccgagagagagcccagcagcagcagcctgtgcagcatcgacgaggagcacctgaccgacatcgagatcgtgagaagagtgttcagcagcaagagaagcaacgtgaacttcgtgaccgagatcttcagacaggccttcctgctgcccatctgcgaggccgccgccatgagaaaggtggtgaaggtgtaccaggagtggatccagcaggaggagaagcccctgttcatgcaggagcccgaggagatcgtgatcaccagcagcgacctgccctgcatcgagaacgtgaccgaccacgacatcagcatggaggagggcgagaagagagaggaggagaacggcaccaacaccgccgaccacgtgagaaacagcagctgggccaagaacggcagctaccagggcgccctgcacaacgccagcgaggaggccaccgagcagaacatcagagccggcacccaggccgtgctgcaggtgttcatcatcaacagcagcaacatcttcctgctggagcccgccaacgagatcaagaacctgctggacgagcacaccgacatgtgcaagagaatcctgaacatctacagatacatggtggtgcaggtgagcatggacaagaagacctgggagcagatgctgctggtgctgctgagagtgaccgagagcgtgctgaagatgcccagccaggccttcctgcagttccagggcaagaagaacatgaccctggccggcagactggccggccccctgttccagaccctgatcgtggcctggatcaaggccaacctgaacgtgtacatcagcagagagctgtgggacgacctgctgagcgtgctgagcagcctgacctactgggaggagctggccaccgagtggagcctgaccatggagaccctgaccaaggtgctggccagaaacctgtacagcctggacctgagcgacctgcccctggacaagctgagcgagcagaagcagaagaagcacaagggcaagggcgtgggccacgagttccagaaggtgagcgtggacaagagcttcagcagaggctggagcagagaccagcccggccaggcccccatgagacagagaagcgccaccaccaccggcagccccggcaccgagaaggccagaagcatcgtgagacagaagaccgtggacatcgacgacgcccagatcctgcccagaagcaccagagtgagacacttcagccagagcgaggagaccggcaacgaggtgttcggcgccctgaacgaggagcagcccctgcccagaagcagcagcaccagcgacatcctggagcccttcaccgtggagagagccaaggaggccgagcagaacgccaccagaggcagcaccgagggcagcgtgcagagctgcaacggcctgttctggaaggagagctgcagcgacatcggcggcagcagcgccaacgtgcccgacctgatggacgagttcatcgccgagagactgagaagcggcaacgccagcaccatgaccagaagaggcagcagccccggcagcctggagatccccaaggacctgcccgacatcctgaacaagcagaaccagatgagacccatcgacgaccccggcgtgcccagcgagtggaccagccccgccagcgccggcagcagcgacctgatcagcagcgacagccacagcgacagcttcagcgccttccagtacgacggcagaaagttcgacaacttcggcttcggcaccgacaccggcgtgaccagcagcgccgacgtggacagcggcagcggccaccaccagagcgccgaggagcaggaggtggccagcctgaccaccctgcacatcgacagcgagaccagcagcctgaaccagcaggccttcagcgccgaggtggccaccatcaccggcagcgagagcgccagccccgtgcacagccccctgggcagcagaagccagacccccagccccagcaccctgaacatcgaccacatggagcagaaggacctgcagctggacgagaagctgcaccacagcgtgctgcagacccccgacgacctggagatcagcgagttccccagcgagtgctgcagcgtgatggccggcggcaccctgaccggctggcacgccgacgtggccaccgtgatgtggagaagaatgctgggcatcctgggcgacgtgaacagcatcatggaccccgagatccacgcccaggtgttcgactacctgtgcgagctgtggcagaacctggccaagatcagagacaacctgggcatcagcaccgacaacctgaccagccccagcccccccgtgctgatcccccccctgagaatcctgaccccctggctgttcaaggccaccatgctgaccgacaagtacaagcagggcaagctgcacgcctacaagctgatctgcaacaccatgaagagaagacaggacgtgagccccaacagagacttcctgacccacttctacaacatcatgcactgcggcctgctgcacatcgaccaggacatcgtgaacaccatcatcaagcactgcagcccccagttcttcagcctgggcctgcccggcgccaccatgctgatcatggacttcatcgtggccgccggcagagtggccagcagcgccttcctgaacgcccccagagtggaggcccaggtgctgctgggcagcctggtgtgcttccccaacctgtactgcgagctgcccagcctgcaccccaacatccccgacgtggccgtgagccagttcaccgacgtgaaggagctgatcatcaagaccgtgctgagcagcgccagagacgagcccagcggccccgccagatgcgtggccctgtgcagcctgggcatctggatctgcgaggagctggtgcacgagagccaccacccccagatcaaggaggccctgaacgtgatctgcgtgagcctgaagttcaccaacaagaccgtggcccacgtggcctgcaacatgctgcacatgctggtgcactacgtgcccagactgcagatctaccagcccgacagccccctgaagatcatccagatcctgatcgccaccatcacccacctgctgcccagcaccgaggccagcagctacgagatggacaagagactggtggtgagcctgctgctgtgcctgctggactggatcatggccctgcccctgaagaccctgctgcagcccttccacgccaccggcgccgagagcgacaagaccgagaagagcgtgctgaactgcatctacaaggtgctgcacggctgcgtgtacggcgcccagtgcttcagcaaccccagatacttccccatgagcctgagcgacctggccagcgtggactacgaccccttcatgcacctggagagcctgaaggagcccgagcccctgcacagccccgacagcgagagaagcagcaagctgcagcccgtgaccgaggtgaagacccagatgcagcacggcctgatcagcatcgccgccagaaccgtgatcacccacctggtgaaccacctgggccactaccccatgagcggcggccccgccatgctgaccagccaggtgtgcgagaaccacgacaaccactacagcgagagcaccgagctgagccccgagctgttcgagagccccaacatccagttcttcgtgctgaacaacaccaccctggtgagctgcatccagatcagaagcgaggagaacatgcccggcggcggcctgagcgccggcctggccagcgccaacagcaacgtgagaatcatcgtgagagacctgagcggcaagtacagctgggacagcgccatcctgtacggccccccccccgtgagcggcctgagcgagcccaccagcttcatgctgagcctgagccaccaggagaagcccgaggagccccccaccagcaacgagtgcctggaggacatcaccgtgaaggacggcctgagcctgcagttcaagagattcagagagaccgtgcccacctgggacaccatcagagacgaggaggacgtgctggacgagctgctgcagtacctgggcgtgaccagccccgagtgcctgcagagaaccggcatcagcctgaacatccccgccccccagcccgtgtgcatcagcgagaagcaggagaacgacgtgatcaacgccatcctgaagcagcacaccgaggagaaggagttcgtggagaagcacttcaacgacctgaacatgaaggccgtggagcaggacgagcccatcccccagaagccccagagcgccttctactactgcagactgctgctgagcatcctgggcatgaacagctgggacaagagaagaagcttccacctgctgaagaagaacgagaagctgctgagagagctgagaaacctggacagcagacagtgcagagagacccacaagatcgccgtgttctacgtggccgagggccaggaggacaagcacagcatcctgaccaacaccggcggcagccaggcctacgaggacttcgtggccggcctgggctgggaggtgaacctgaccaaccactgcggcttcatgggcggcctgcagaagaacaagagcaccggcctgaccaccccctacttcgccaccagcaccgtggaggtgatcttccacgtgagcaccagaatgcccagcgacagcgacgacagcctgaccaagaagctgagacacctgggcaacgacgaggtgcacatcgtgtggagcgagcacaccagagactacagaagaggcatcatccccaccgagttcggcgacgtgctgatcgtgatctaccccatgaagaaccacatgttcagcatccagatcatgaagaagcccgaggtgcccttcttcggccccctgttcgacggcgccatcgtgaacggcaaggtgctgcccatcatggtgagagccaccgccatcaacgccagcagagccctgaagagcctgatccccctgtaccagaacttctacgaggagagagccagatacctgcagaccatcgtgcagcaccacctggagcccaccaccttcgaggacttcgccgcccaggtgttcagccccgccccctaccaccacctgcccagcgacgccgaccactag

SEQ ID NO: 96252 - DNA, 6111 bp, synthetic construct
  misc_feature 1..6111: note = Description of Artificial Sequence: Synthetic coding sequence
  source 1..6111: mol_type = other DNA
atgttcagcaagaagccccacggcgacgtgaagaagagcacccagaaggtgctggacaccaagaaggacgccctgaccagactgaagcacctgagaatcgtgatcgagaacgccgagagcatcgacctgaagcagttcttcgaccagcacttcagccacatctactacgtgttcttcgagaacttcgtgaccatcgaggccagcctgaagcagaagggccacaagagccagagagaggagctggacgccatcctgttcatcttcgagaagatcctgcagctgctgcccgagagaatccaccagagatggcagttccacagcatcggcctgatcctgaagaagctgctgcacaccggcaacagcctgaagatcagaagagagggcgtgagactgttcctgctgtggctgcaggccctgcagaacaactgcagcaaggagcagctgtggatgttcagctgcctgatccccggcttcagcgccccccagagcgagcacggccccagaaccctggacaacctgatcaacccccccctgaacctgcaggagacccaggtgaccatcgaggagatcacccccctggtgcccccccagagcggcgacaagggccaggaggacctgaccagctacttcctggaggccctgctgaagtacatcgtgatccaggtgaagagcctggagtggaagaacaaggagaaccaggagagaggcttcagcttcctgttcagccacttcaagaagtactacctgccctacatcttccccaacatctgcaaggagaacagcctgtaccaccccatcctggacatcccccagatgagacccaagccccactacgtggtgatcaagaaggacgccgagaccaacgaggccatctactgcaccaaggagcccttcatcaaggccagagtgatcgtgatcagatggctggtgagcttctggctggagcccaagccccacaccggcccccacatccccggcatggagggcgaggtgctgcccaagaacatccagagagccgccgccagcctggtgagcagagaggagagcaagaacgacaacgccgacaagaccgacagaaccaccgagcccgagcagagccacagcaacaccagcaccctgaccgagagagagcccagcagcagcagcctgtgcagcatcgacgaggagcacctgaccgacatcgagatcgtgagaagagtgttcagcagcaagagaagcaacgtgaacttcgtgaccgagatcttcagacaggccttcctgctgcccatctgcgaggccgccgccatgagaaaggtggtgaaggtgtaccaggagtggatccagcaggaggagaagcccctgttcatgcaggagcccgaggagatcgtgatcaccagcagcgacctgccctgcatcgagaacgtgaccgaccacgacatcagcatggaggagggcgagaagagagaggaggagaacggcaccaacaccgccgaccacgtgagaaacagcagctgggccaagaacggcagctaccagggcgccctgcacaacgccagcgaggaggccaccgagcagaacatcagagccggcacccaggccgtgctgcaggtgttcatcatcaacagcagcaacatcttcctgctggagcccgccaacgagatcaagaacctgctggacgagcacaccgacatgtgcaagagaatcctgaacatctacagatacatggtggtgcaggtgagcatggacaagaagacctgggagcagatgctgctggtgctgctgagagtgaccgagagcgtgctgaagatgcccagccaggccttcctgcagttccagggcaagaagaacatgaccctggccggcagactggccggccccctgttccagaccctgatcgtggcctggatcaaggccaacctgaacgtgtacatcagcagagagctgtgggacgacctgctgagcgtgctgagcagcctgacctactgggaggagctggccaccgagtggagcctgaccatggagaccctgaccaaggtgctggccagaaacctgtacagcctggacctgagcgacctgcccctggacaagctgagcgagcagaagcagaagaagcacaagggcaagggcgtgggccacgagttccagaaggtgagcgtggacaagagcttcagcagaggctggagcagagaccagcccggccaggcccccatgagacagagaagcgccaccaccaccggcagccccggcaccgagaaggccagaagcatcgtgagacagaagaccgtggacatcgacgacgcccagatcctgcccagaagcaccagagtgagacacttcagccagagcgaggagaccggcaacgaggtgttcggcgccctgaacgaggagcagcccctgcccagaagcagcagcaccagcgacatcctggagcccttcaccgtggagagagccaaggtgaacaaggaggacatgagccagaagctgccccccctgaacagcgacatcggcggcagcagcgccaacgtgcccgacctgatggacgagttcatcgccgagagactgagaagcggcaacgccagcaccatgaccagaagaggcagcagccccggcagcctggagatccccaaggacctgcccgacatcctgaacaagcagaaccagatgagacccatcgacgaccccggcgtgcccagcgagtggaccagccccgccagcgccggcagcagcgacctgatcagcagcgacagccacagcgacagcttcagcgccttccagtacgacggcagaaagttcgacaacttcggcttcggcaccgacaccggcgtgaccagcagcgccgacgtggacagcggcagcggccaccaccagagcgccgaggagcaggaggtggccagcctgaccaccctgcacatcgacagcgagaccagcagcctgaaccagcaggccttcagcgccgaggtggccaccatcaccggcagcgagagcgccagccccgtgcacagccccctgggcagcagaagccagacccccagccccagcaccctgaacatcgaccacatggagcagaaggacctgcagctggacgagaagctgcaccacagcgtgctgcagacccccgacgacctggagatcagcgagttccccagcgagtgctgcagcgtgatggccggcggcaccctgaccggctggcacgccgacgtggccaccgtgatgtggagaagaatgctgggcatcctgggcgacgtgaacagcatcatggaccccgagatccacgcccaggtgttcgactacctgtgcgagctgtggcagaacctggccaagatcagagacaacctgggcatcagcaccgacaacctgaccagccccagcccccccgtgctgatcccccccctgagaatcctgaccccctggctgttcaaggccaccatgctgaccgacaagtacaagcagggcaagctgcacgcctacaagctgatctgcaacaccatgaagagaagacaggacgtgagccccaacagagacttcctgacccacttctacaacatcatgcactgcggcctgctgcacatcgaccaggacatcgtgaacaccatcatcaagcactgcagcccccagttcttcagcctgggcctgcccggcgccaccatgctgatcatggacttcatcgtggccgccggcagagtggccagcagcgccttcctgaacgcccccagagtggaggcccaggtgctgctgggcagcctggtgtgcttccccaacctgtactgcgagctgcccagcctgcaccccaacatccccgacgtggccgtgagccagttcaccgacgtgaaggagctgatcatcaagaccgtgctgagcagcgccagagacgagcccagcggccccgccagatgcgtggccctgtgcagcctgggcatctggatctgcgaggagctggtgcacgagagccaccacccccagatcaaggaggccctgaacgtgatctgcgtgagcctgaagttcaccaacaagaccgtggcccacgtggcctgcaacatgctgcacatgctggtgcactacgtgcccagactgcagatctaccagcccgacagccccctgaagatcatccagatcctgatcgccaccatcacccacctgctgcccagcaccgaggccagcagctacgagatggacaagagactggtggtgagcctgctgctgtgcctgctggactggatcatggccctgcccctgaagaccctgctgcagcccttccacgccaccggcgccgagagcgacaagaccgagaagagcgtgctgaactgcatctacaaggtgctgcacggctgcgtgtacggcgcccagtgcttcagcaaccccagatacttccccatgagcctgagcgacctggccagcgtggactacgaccccttcatgcacctggagagcctgaaggagcccgagcccctgcacagccccgacagcgagagaagcagcaagctgcagcccgtgaccgaggtgaagacccagatgcagcacggcctgatcagcatcgccgccagaaccgtgatcacccacctggtgaaccacctgggccactaccccatgagcggcggccccgccatgctgaccagccaggtgtgcgagaaccacgacaaccactacagcgagagcaccgagctgagccccgagctgttcgagagccccaacatccagttcttcgtgctgaacaacaccaccctggtgagctgcatccagatcagaagcgaggagaacatgcccggcggcggcctgagcgccggcctggccagcgccaacagcaacgtgagaatcatcgtgagagacctgagcggcaagtacagctgggacagcgccatcctgtacggccccccccccgtgagcggcctgagcgagcccaccagcttcatgctgagcctgagccaccaggagaagcccgaggagccccccaccagcaacgagtgcctggaggacatcaccgtgaaggacggcctgagcctgcagttcaagagattcagagagaccgtgcccacctgggacaccatcagagacgaggaggacgtgctggacgagctgctgcagtacctgggcgtgaccagccccgagtgcctgcagagaaccggcatcagcctgaacatccccgccccccagcccgtgtgcatcagcgagaagcaggagaacgacgtgatcaacgccatcctgaagcagcacaccgaggagaaggagttcgtggagaagcacttcaacgacctgaacatgaaggccgtggagcaggacgagcccatcccccagaagccccagagcgccttctactactgcagactgctgctgagcatcctgggcatgaacagctgggacaagagaagaagcttccacctgctgaagaagaacgagaagctgctgagagagctgagaaacctggacagcagacagtgcagagagacccacaagatcgccgtgttctacgtggccgagggccaggaggacaagcacagcatcctgaccaacaccggcggcagccaggcctacgaggacttcgtggccggcctgggctgggaggtgaacctgaccaaccactgcggcttcatgggcggcctgcagaagaacaagagcaccggcctgaccaccccctacttcgccaccagcaccgtggaggtgatcttccacgtgagcaccagaatgcccagcgacagcgacgacagcctgaccaagaagctgagacacctgggcaacgacgaggtgcacatcgtgtggagcgagcacaccagagactacagaagaggcatcatccccaccgagttcggcgacgtgctgatcgtgatctaccccatgaagaaccacatgttcagcatccagatcatgaagaagcccgaggtgcccttcttcggccccctgttcgacggcgccatcgtgaacggcaaggtgctgcccatcatggtgagagccaccgccatcaacgccagcagagccctgaagagcctgatccccctgtaccagaacttctacgaggagagagccagatacctgcagaccatcgtgcagcaccacctggagcccaccaccttcgaggacttcgccgcccaggtgttcagccccgccccctaccaccacctgcccagcgacgccgaccactag

SEQ ID NO: 96253 - DNA, 6252 bp, synthetic construct; identical to SEQ ID NO: 96248
  misc_feature 1..6252: note = Description of Artificial Sequence: Synthetic coding sequence
  source 1..6252: mol_type = other DNA

SEQ ID NO: 96254 - DNA, 2169 bp, synthetic construct
  misc_feature 1..2169: note = Description of Artificial Sequence: Synthetic coding sequence
  source 1..2169: mol_type = other DNA
cagatcctgatcgccaccatcacccacctgctgcccagcaccgaggccagcagctacgagatggacaagagactggtggtgagcctgctgctgtgcctgctggactggatcatggccctgcccctgaagaccctgctgcagcccttccacgccaccggcgccgagagcgacaagaccgagaagagcgtgctgaactgcatctacaaggtgctgcacggctgcgtgtacggcgcccagtgcttcagcaaccccagatacttccccatgagcctgagcgacctggccagcgtggactacgaccccttcatgcacctggagagcctgaaggagcccgagcccctgcacagccccgacagcgagagaagcagcaagctgcagcccgtgaccgaggtgaagacccagatgcagcacggcctgatcagcatcgccgccagaaccgtgatcacccacctggtgaaccacctgggccactaccccatgagcggcggccccgccatgctgaccagccaggtgtgcgagaaccacgacaaccactacagcgagagcaccgagctgagccccgagctgttcgagagccccaacatccagttcttcgtgctgaacaacaccaccctggtgagctgcatccagatcagaagcgaggagaacatgcccggcggcggcctgagcgccggcctggccagcgccaacagcaacgtgagaatcatcgtgagagacctgagcggcaagtacagctgggacagcgccatcctgtacggccccccccccgtgagcggcctgagcgagcccaccagcttcatgctgagcctgagccaccaggagaagcccgaggagccccccaccagcaacgagtgcctggaggacatcaccgtgaaggacggcctgagcctgcagttcaagagattcagagagaccgtgcccacctgggacaccatcagagacgaggaggacgtgctggacgagctgctgcagtacctgggcgtgaccagccccgagtgcctgcagagaaccggcatcagcctgaacatccccgccccccagcccgtgtgcatcagcgagaagcaggagaacgacgtgatcaacgccatcctgaagcagcacaccgaggagaaggagttcgtggagaagcacttcaacgacctgaacatgaaggccgtggagcaggacgagcccatcccccagaagccccagagcgccttctactactgcagactgctgctgagcatcctgggcatgaacagctgggacaagagaagaagcttccacctgctgaagaagaacgagaagctgctgagagagctgagaaacctggacagcagacagtgcagagagacccacaagatcgccgtgttctacgtggccgagggccaggaggacaagcacagcatcctgaccaacaccggcggcagccaggcctacgaggacttcgtggccggcctgggctgggaggtgaacctgaccaaccactgcggcttcatgggcggcctgcagaagaacaagagcaccggcctgaccaccccctacttcgccaccagcaccgtggaggtgatcttccacgtgagcaccagaatgcccagcgacagcgacgacagcctgaccaagaagctgagacacctgggcaacgacgaggtgcacatcgtgtggagcgagcacaccagagactacagaagaggcatcatccccaccgagttcggcgacgtgctgatcgtgatctaccccatgaagaaccacatgttcagcatccagatcatgaagaagcccgaggtgcccttcttcggccccctgttcgacggcgccatcgtgaacggcaaggtgctgcccatcatggtgagagccaccgccatcaacgccagcagagccctgaagagcctgatccccctgtaccagaacttctacgaggagagagccagatacctgcagaccatcgtgcagcaccacctggagcccaccaccttcgaggacttcgccgcccaggtgttcagccccgccccctaccaccacctgcccagcgacgccgtgggcagctaccccgagatcctgcccagcgagacccccaccgccacccaggtggacggcgccgacctggccagccccatgagccccagaaccagcaagagcagaatgagcatgaagctgagaagaagcagcggcagcgccaacaagagctag

SEQ ID NO: 96255 - DNA, 2709 bp, synthetic construct
  misc_feature 1..2709: note = Description of Artificial Sequence: Synthetic coding sequence
  source 1..2709: mol_type = other DNA
atggtgcagagaatgtgggccgaggccgccggccccgccggcggcgccgagcccctgttccccggcagcagaagaagcagaagcgtgtgggacgccgtgagactggaggtgggcgtgcccgacagctgccccgtggtgctgcacagcttcacccagctggaccccgacctgcccagacccgagagcagcacccaggagatcggcgaggagctgatcaacggcgtgatctacagcatcagcctgagaaaggtgcagctgcaccacggcggcaacaagggccagagatggctgggctacgagaacgagagcgccctgaacctgtacgagacctgcaaggtgagaaccgtgaaggccggcaccctggagaagctggtggagcacctggtgcccgccttccagggcagcgacctgagctacgtgaccatcttcctgtgcacctacagagccttcaccaccacccagcaggtgctggacctgctgttcaagagatacggctgcatcctgccctacagcgacgaggacggcggcccccaggaccagctgaagaacgccatcagcagcatcctgggcacctggctggaccagtacagcgaggacttctgccagccccccgacttcccctgcctgaagcagctggtggcctacgtgcagctgaacatgcccggcagcgacctggagagaagagcccacctgctgctggcccagctggagcacagcgagcccatcgaggccgagcccgaggccctgagccccgtgcccgccctgaagcccacccccgagctggagctggccctgacccccgccagagcccccagccccgtgcccgcccccgcccccgagcccgagcccgcccccacccccgcccccggcagcgagctggaggtggcccccgcccccgcccccgagctgcagcaggcccccgagcccgccgtgggcctggagagcgcccccgcccccgccctggagctggagcccgcccccgagcaggaccccgcccccagccagaccctggagctggagcccgcccccgcccccgtgcccagcctgcagcccagctggcccagccccgtggtggccgagaacggcctgagcgaggagaagccccacctgctggtgttcccccccgacctggtggccgagcagttcaccctgatggacgccgagctgttcaagaaggtggtgccctaccactgcctgggcagcatctggagccagagagacaagaagggcaaggagcacctggcccccaccatcagagccaccgtgacccagttcaacagcgtggccaactgcgtgatcaccacctgcctgggcaacagaagcaccaaggcccccgacagagccagagtggtggagcactggatcgaggtggccagagagtgcagaatcctgaagaacttcagcagcctgtacgccatcctgagcgccctgcagagcaacagcatccacagactgaagaagacctgggaggacgtgagcagagacagcttcagaatcttccagaagctgagcgagatcttcagcgacgagaacaactacagcctgagcagagagctgctgatcaaggagggcaccagcaagttcgccaccctggagatgaaccccaagagagcccagaagagacccaaggagaccggcatcatccagggcaccgtgccctacctgggcaccttcctgaccgacctggtgatgctggacaccgccatgaaggactacctgtacggcagactgatcaacttcgagaagagaagaaaggagttcgaggtgatcgcccagatcaagctgctgcagagcgcctgcaacaactacagcatcgcccccgacgagcagttcggcgcctggttcagagccgtggagagactgagcgagaccgagagctacaacctgagctgcgagctggagccccccagcgagagcgccagcaacaccctgagaaccaagaagaacaccgccatcgtgaagagatggagcgacagacaggcccccagcaccgagctgagcaccagcggcagcagccacagcaagagctgcgaccagctgagatgcggcccctacctgagcagcggcgacatcgccgacgccctgagcgtgcacagcgccggcagcagcagcagcgacgtggaggagatcaacatcagcttcgtgcccgagagccccgacggccaggagaagaagttctgggagagcgccagccagagcagccccgagaccagcggcatcagcagcgccagcagcagcaccagcagcagcagcgccagcaccacccccgtggccgccaccagaacccacaagagaagcgtgagcggcctgtgcaacagcagcagcgccctgcccctgtacaaccagcaggtgggcgactgctgcatcatcagagtgagcctggacgtggacaacggcaacatgtacaagagcatcctggtgaccagccaggacaaggcccccgccgtgatcagaaaggccatggacaagcacaacctggaggaggaggagcccgaggactacgagctgctgcagatcctgagcgacgacagaaagctgaagatccccgagaacgccaacgtgttctacgccatgaacagcaccgccaactacgacttcgtgctgaagaagagaaccttcaccaagggcgtgaaggtgaagcacggcgccagcagcaccctgcccagaatgaagcagaagggcctgaagatcgccaagggcatcttctag

SEQ ID NO: 96256 - DNA, 2745 bp, synthetic construct
  misc_feature 1..2745: note = Description of Artificial Sequence: Synthetic coding sequence
  source 1..2745: mol_type = other DNA
atggtgcagagaatgtgggccgaggccgccggccccgccggcggcgccgagcccctgttccccggcagcagaagaagcagaagcgtgtgggacgccgtgagactggaggtgggcgtgcccgacagctgccccgtggtgctgcacagcttcacccagctggaccccgacctgcccagacccgagagcagcacccaggagatcggcgaggagctgatcaacggcgtgatctacagcatcagcctgagaaaggtgcagctgcaccacggcggcaacaagggccagagatggctgggctacgagaacgagagcgccctgaacctgtacgagacctgcaaggtgagaaccgtgaaggccggcaccctggagaagctggtggagcacctggtgcccgccttccagggcagcgacctgagctacgtgaccatcttcctgtgcacctacagagccttcaccaccacccagcaggtgctggacctgctgttcaagagatacggcagatgcgacgccctgaccgccagcagcagatacggctgcatcctgccctacagcgacgaggacggcggcccccaggaccagctgaagaacgccatcagcagcatcctgggcacctggctggaccagtacagcgaggacttctgccagccccccgacttcccctgcctgaagcagctggtggcctacgtgcagctgaacatgcccggcagcgacctggagagaagagcccacctgctgctggcccagctggagcacagcgagcccatcgaggccgagcccgaggccctgagccccgtgcccgccctgaagcccacccccgagctggagctggccctgacccccgccagagcccccagccccgtgcccgcccccgcccccgagcccgagcccgcccccacccccgcccccggcagcgagctggaggtggcccccgcccccgcccccgagctgcagcaggcccccgagcccgccgtgggcctggagagcgcccccgcccccgccctggagctggagcccgcccccgagcaggaccccgcccccagccagaccctggagctggagcccgcccccgcccccgtgcccagcctgcagcccagctggcccagccccgtggtggccgagaacggcctgagcgaggagaagccccacctgctggtgttcccccccgacctggtggccgagcagttcaccctgatggacgccgagctgttcaagaaggtggtgccctaccactgcctgggcagcatctggagccagagagacaagaagggcaaggagcacctggcccccaccatcagagccaccgtgacccagttcaacagcgtggccaactgcgtgatcaccacctgcctgggcaacagaagcaccaaggcccccgacagagccagagtggtggagcactggatcgaggtggccagagagtgcagaatcctgaagaacttcagcagcctgtacgccatcctgagcgccctgcagagcaacagcatccacagactgaagaagacctgggaggacgtgagcagagacagcttcagaatcttccagaagctgagcgagatcttcagcgacgagaacaactacagcctgagcagagagctgctgatcaaggagggcaccagcaagttcgccaccctggagatgaaccccaagagagcccagaagagacccaaggagaccggcatcatccagggcaccgtgccctacctgggcaccttcctgaccgacctggtgatgctggacaccgccatgaaggactacctgtacggcagactgatcaacttcgagaagagaagaaaggagttcgaggtgatcgcccagatcaagctgctgcagagcgcctgcaacaactacagcatcgcccccgacgagcagttcggcgcctggttcagagccgtggagagactgagcgagaccgagagctacaacctgagctgcgagctggagccccccagcgagagcgccagcaacaccctgagaaccaagaagaacaccgccatcgtgaagagatggagcgacagacaggcccccagcaccgagctgagcaccagcggcagcagccacagcaagagctgcgaccagctgagatgcggcccctacctgagcagcggcgacatcgccgacgccctgagcgtgcacagcgccggcagcagcagcagcgacgtggaggagatcaacatcagcttcgtgcccgagagccccgacggccaggagaagaagttctgggagagcgccagccagagcagccccgagaccagcggcatcagcagcgccagcagcagcaccagcagcagcagcgccagcaccacccccgtggccgccaccagaacccacaagagaagcgtgagcggcctgtgcaacagcagcagcgccctgcccctgtacaaccagcaggtgggcgactgctgcatcatcagagtgagcctggacgtggacaacggcaacatgtacaagagcatcctggtgaccagccaggacaaggcccccgccgtgatcagaaaggccatggacaagcacaacctggaggaggaggagcccgaggactacgagctgctgcagatcctgagcgacgacagaaagctgaagatccccgagaacgccaacgtgttctacgccatgaacagcaccgccaactacgacttcgtgctgaagaagagaaccttcaccaagggcgtgaaggtgaagcacggcgccagcagcaccctgcccagaatgaagcagaagggcctgaagatcgccaagggcatcttctag

SEQ ID NO: 96257 - DNA, 1341 bp, synthetic construct
  misc_feature 1..1341: note = Description of Artificial Sequence: Synthetic coding sequence
  source 1..1341: mol_type = other DNA
atgcccggcagcgacctggagagaagagcccacctgctgctggcccagctggagcacagcgagcccatcgaggccgagcccgaggccctgagccccgtgcccgccctgaagcccacccccgagctggagctggccctgacccccgccagagcccccagccccgtgcccgcccccgcccccgagcccgagcccgcccccacccccgcccccggcagcgagctggaggtggcccccgcccccgcccccgagctgcagcaggcccccgagcccgccgtgggcctggagagcgcccccgcccccgccctggagctggagcccgcccccgagcaggaccccgcccccagccagaccctggagctggagcccgcccccgcccccgtgcccagcctgcagcccagctggcccagccccgtggtggccgagaacggcctgagcgaggagaagccccacctgctggtgttcccccccgacctggtggccgagcagttcaccctgatggacgccgagtgcagaatcctgaagaacttcagcagcctgtacgccatcctgagcgccctgcagagcaacagcatccacagactgaagaagacctgggaggacgtgagcagagacagcttcagaatcttccagaagctgagcgagatcttcagcgacgagaacaactacagcctgagcagagagctgctgatcaaggagggcaccagcaagttcgccaccctggagatgaaccccaagagagcccagaagagacccaaggagaccggcatcatccagggcaccgtgccctacctgggcaccttcctgaccgacctggtgatgctggacaccgccatgaaggactacctgtacggcagactgatcaacttcgagaagagaagaaaggagttcgaggtgatcgcccagatcaagctgctgcagagcgcctgcaacaactacagcatcgcccccgacgagcagttcggcgcctggttcagagccgtggagagactgagcgagaccgagagctacaacctgagctgcgagctggagccccccagcgagagcgccagcaacaccctgagaaccaagaagaacaccgccatcgtgaagagatggagcgacagacaggcccccagcaccgagctgagcaccagcggcagcagccacagcaagagctgcgaccagctgagatgcggcccctacctgagcagcggcgacatcgccgacgccctgagcgtgcacagcgccggcagcagcagcagcgacgtggaggagatcaacatcagcttcgtgcccgagagccccgacggccaggagaagaagttctgggagagcgccagccagagcagccccgagacctag

SEQ ID NO: 96258 - DNA, 2658 bp, synthetic construct
  misc_feature 1..2658: note = Description of Artificial Sequence: Synthetic coding sequence
  source 1..2658: mol_type = other DNA
atgtgcctgtggggccacagcaccgcccccgcccacaccctgagcagcccccccctgctgttctgcagcctgccctgcgccctgcacctgcagcccggcaccggccacccccccggccaggtgcccagaaagagcagcacccaggagatcggcgaggagctgatcaacggcgtgatctacagcatcagcctgagaaaggtgcagctgcaccacggcggcaacaagggccagagatggctgggctacgagaacgagagcgccctgaacctgtacgagacctgcaaggtgagaaccgtgaaggccggcaccctggagaagctggtggagcacctggtgcccgccttccagggcagcgacctgagctacgtgaccatcttcctgtgcacctacagagccttcaccaccacccagcaggtgctggacctgctgttcaagagatacggctgcatcctgccctacagcgacgaggacggcggcccccaggaccagctgaagaacgccatcagcagcatcctgggcacctggctggaccagtacagcgaggacttctgccagccccccgacttcccctgcctgaagcagctggtggcctacgtgcagctgaacatgcccggcagcgacctggagagaagagcccacctgctgctggcccagctggagcacagcgagcccatcgaggccgagcccgaggccctgagccccgtgcccgccctgaagcccacccccgagctggagctggccctgacccccgccagagcccccagccccgtgcccgcccccgcccccgagcccgagcccgcccccacccccgcccccggcagcgagctggaggtggcccccgcccccgcccccgagctgcagcaggcccccgagcccgccgtgggcctggagagcgcccccgcccccgccctggagctggagcccgcccccgagcaggaccccgcccccagccagaccctggagctggagcccgcccccgcccccgtgcccagcctgcagcccagctggcccagccccgtggtggccgagaacggcctgagcgaggagaagccccacctgctggtgttcccccccgacctggtggccgagcagttcaccctgatggacgccgagctgttcaagaaggtggtgccctaccactgcctgggcagcatctggagccagagagacaagaagggcaaggagcacctggcccccaccatcagagccaccgtgacccagttcaacagcgtggccaactgcgtgatcaccacctgcctgggcaacagaagcaccaaggcccccgacagagccagagtggtggagcactggatcgaggtggccagagagtgcagaatcctgaagaacttcagcagcctgtacgccatcctgagcgccctgcagagcaacagcatccacagactgaagaagacctgggaggacgtgagcagagacagcttcagaatcttccagaagctgagcgagatcttcagcgacgagaacaactacagcctgagcagagagctgctgatcaaggagggcaccagcaagttcgccaccctggagatgaaccccaagagagcccagaagagacccaaggagaccggcatcatccagggcaccgtgccctacctgggcaccttcctgaccgacctggtgatgctggacaccgccatgaaggactacctgtacggcagactgatcaacttcgagaagagaagaaaggagttcgaggtgatcgcccagatcaagctgctgcagagcgcctgcaacaactacagcatcgcccccgacgagcagttcggcgcctggttcagagccgtggagagactgagcgagaccgagagctacaacctgagctgcgagctggagccccccagcgagagcgccagcaacaccctgagaaccaagaagaacaccgccatcgtgaagagatggagcgacagacaggcccccagcaccgagctgagcaccagcggcagcagccacagcaagagctgcgaccagctgagatgcggcccctacctgagcagcggcgacatcgccgacgccctgagcgtgcacagcgccggcagcagcagcagcgacgtggaggagatcaacatcagcttcgtgcccgagagccccgacggccaggagaagaagttctgggagagcgccagccagagcagccccgagaccagcggcatcagcagcgccagcagcagcaccagcagcagcagcgccagcaccacccccgtggccgccaccagaacccacaagagaagcgtgagcggcctgtgcaacagcagcagcgccctgcccctgtacaaccagcaggtgggcgactgctgcatcatcagagtgagcctggacgtggacaacggcaacatgtacaagagcatcctggtgaccagccaggacaaggcccccgccgtgatcagaaaggccatggacaagcacaacctggaggaggaggagcccgaggactacgagctgctgcagatcctgagcgacgacagaaagctgaagatccccgagaacgccaacgtgttctacgccatgaacagcaccgccaactacgacttcgtgctgaagaagagaaccttcaccaagggcgtgaaggtgaagcacggcgccagcagcaccctgcccagaatgaagcagaagggcctgaagatcgccaagggcatcttctag

SEQ ID NO: 96259 - DNA, 2742 bp, synthetic construct
  misc_feature 1..2742: note = Description of Artificial Sequence: Synthetic coding sequence
  source 1..2742: mol_type = other DNA
atggccagagaggccggccaggtgtgcgccagacccgccgtgcccagaggcagaaagggcagcgtgttcttcgcctgcgtgagcgtggtgaccgccagaagaagagccgtggccagaagagccgccctgcagagccccaccccctggctggcccccctgcccgcccccgccaccaccgagagcagcacccaggagatcggcgaggagctgatcaacggcgtgatctacagcatcagcctgagaaaggtgcagctgcaccacggcggcaacaagggccagagatggctgggctacgagaacgagagcgccctgaacctgtacgagacctgcaaggtgagaaccgtgaaggccggcaccctggagaagctggtggagcacctggtgcccgccttccagggcagcgacctgagctacgtgaccatcttcctgtgcacctacagagccttcaccaccacccagcaggtgctggacctgctgttcaagagatacggcagatgcgacgccctgaccgccagcagcagatacggctgcatcctgccctacagcgacgaggacggcggcccccaggaccagctgaagaacgccatcagcagcatcctgggcacctggctggaccagtacagcgaggacttctgccagccccccgacttcccctgcctgaagcagctggtggcctacgtgcagctgaacatgcccggcagcgacctggagagaagagcccacctgctgctggcccagctggagcacagcgagcccatcgaggccgagcccgaggccctgagccccgtgcccgccctgaagcccacccccgagctggagctggccctgacccccgccagagcccccagccccgtgcccgcccccgcccccgagcccgagcccgcccccacccccgcccccggcagcgagctggaggtggcccccgcccccgcccccgagctgcagcaggcccccgagcccgccgtgggcctggagagcgcccccgcccccgccctggagctggagcccgcccccgagcaggaccccgcccccagccagaccctggagctggagcccgcccccgcccccgtgcccagcctgcagcccagctggcccagccccgtggtggccgagaacggcctgagcgaggagaagccccacctgctggtgttcccccccgacctggtggccgagcagttcaccctgatggacgccgagctgttcaagaaggtggtgccctaccactgcctgggcagcatctggagccagagagacaagaagggcaaggagcacctggcccccaccatcagagccaccgtgacccagttcaacagcgtggccaactgcgtgatcaccacctgcctgggcaacagaagcaccaaggcccccgacagagccagagtggtggagcactggatcgaggtggccagagagtgcagaatcctgaagaacttcagcagcctgtacgccatcctgagcgccctgcagagcaacagcatccacagactgaagaagacctgggaggacgtgagcagagacagcttcagaatcttccagaagctgagcgagatcttcagcgacgagaacaactacagcctgagcagagagctgctgatcaaggagggcaccagcaagttcgccaccctggagatgaaccccaagagagcccagaagagacccaaggagaccggcatcatccagggcaccgtgccctacctgggcaccttcctgaccgacctggtgatgctggacaccgccatgaaggactacctgtacggcagactgatcaacttcgagaagagaagaaaggagttcgaggtgatcgcccagatcaagctgctgcagagcgcctgcaacaactacagcatcgcccccgacgagcagttcggcgcctggttcagagccgtggagagactgagcgagaccgagagctacaacctgagctgcgagctggagccccccagcgagagcgccagcaacaccctgagaaccaagaagaacaccgccatcgtgaagagatggagcgacagacaggcccccagcaccgagctgagcaccagcggcagcagccacagcaagagctgcgaccagctgagatgcggcccctacctgagcagcggcgacatcgccgacgccctgagcgtgcacagcgccggcagcagcagcagcgacgtggaggagatcaacatcagcttcgtgcccgagagccccgacggccaggagaagaagttctgggagagcgccagccagagcagccccgagaccagcggcatcagcagcgccagcagcagcaccagcagcagcagcgccagcaccacccccgtggccgccaccagaacccacaagagaagcgtgagcggcctgtgcaacagcagcagcgccctgcccctgtacaaccagcaggtgggcgactgctgcatcatcagagtgagcctggacgtggacaacggcaacatgtacaagagcatcctggtgaccagccaggacaaggcccccgccgtgatcagaaaggccatggacaagcacaacctggaggaggaggagcccgaggactacgagctgctgcagatcctgagcgacgacagaaagctgaagatccccgagaacgccaacgtgttctacgccatgaacagcaccgccaactacgacttcgtgctgaagaagagaaccttcaccaagggcgtgaaggtgaagcacggcgccagcagcaccctgcccagaatgaagcagaagggcctgaagatcgccaagggcatcttctag

SEQ ID NO: 96260 - DNA, 2580 bp, synthetic construct
  misc_feature 1..2580: note = Description of Artificial Sequence: Synthetic coding sequence
  source 1..2580: mol_type = other DNA
atgatggtggactgccagagcagcacccaggagatcggcgaggagctgatcaacggcgtgatctacagcatcagcctgagaaaggtgcagctgcaccacggcggcaacaagggccagagatggctgggctacgagaacgagagcgccctgaacctgtacgagacctgcaaggtgagaaccgtgaaggccggcaccctggagaagctggtggagcacctggtgcccgccttccagggcagcgacctgagctacgtgaccatcttcctgtgcacctacagagccttcaccaccacccagcaggtgctggacctgctgttcaagagatacggcagatgcgacgccctgaccgccagcagcagatacggctgcatcctgccctacagcgacgaggacggcggcccccaggaccagctgaagaacgccatcagcagcatcctgggcacctggctggaccagtacagcgaggacttctgccagccccccgacttcccctgcctgaagcagctggtggcctacgtgcagctgaacatgcccggcagcgacctggagagaagagcccacctgctgctggcccagctggagcacagcgagcccatcgaggccgagcccgaggccctgagccccgtgcccgccctgaagcccacccccgagctggagctggccctgacccccgccagagcccccagccccgtgcccgcccccgcccccgagcccgagcccgcccccacccccgcccccggcagcgagctggaggtggcccccgcccccgcccccgagctgcagcaggcccccgagcccgccgtgggcctggagagcgcccccgcccccgccctggagctggagcccgcccccgagcaggaccccgcccccagccagaccctggagctggagcccgcccccgcccccgtgcccagcctgcagcccagctggcccagccccgtggtggccgagaacggcctgagcgaggagaagccccacctgctggtgttcccccccgacctggtggccgagcagttcaccctgatggacgccgagctgttcaagaaggtggtgccctaccactgcctgggcagcatctggagccagagagacaagaagggcaaggagcacctggcccccaccatcagagccaccgtgacccagttcaacagcgtggccaactgcgtgatcaccacctgcctgggcaacagaagcaccaaggcccccgacagagccagagtggtggagcactggatcgaggtggccagagagtgcagaatcctgaagaacttcagcagcctgtacgccatcctgagcgccctgcagagcaacagcatccacagactgaagaagacctgggaggacgtgagcagagacagcttcagaatcttccagaagctgagcgagatcttcagcgacgagaacaactacagcctgagcagagagctgctgatcaaggagggcaccagcaagttcgccaccctggagatgaaccccaagagagcccagaagagacccaaggagaccggcatcatccagggcaccgtgccctacctgggcaccttcctgaccgacctggtgatgctggacaccgccatgaaggactacctgtacggcagactgatcaacttcgagaagagaagaaaggagttcgaggtgatcgcccagatcaagctgctgcagagcgcctgcaacaactacagcatcgcccccgacgagcagttcggcgcctggttcagagccgtggagagactgagcgagaccgagagctacaacctgagctgcgagctggagccccccagcgagagcgccagcaacaccctgagaaccaagaagaacaccgccatcgtgaagagatggagcgacagacaggcccccagcaccgagctgagcaccagcggcagcagccacagcaagagctgcgaccagctgagatgcggcccctacctgagcagcggcgacatcgccgacgccctgagcgtgcacagcgccggcagcagcagcagcgacgtggaggagatcaacatcagcttcgtgcccgagagccccgacggccaggagaagaagttctgggagagcgccagccagagcagccccgagaccagcggcatcagcagcgccagcagcagcaccagcagcagcagcgccagcaccacccccgtggccgccaccagaacccacaagagaagcgtgagcggcctgtgcaacagcagcagcgccctgcccctgtacaaccagcaggtgggcgactgctgcatcatcagagtgagcctggacgtggacaacggcaacatgtacaagagcatcctggtgaccagccaggacaaggcccccgccgtgatcagaaaggccatggacaagcacaacctggaggaggaggagcccgaggactacgagctgctgcagatcctgagcgacgacagaaagctgaagatccccgagaacgccaacgtgttctacgccatgaacagcaccgccaactacgacttcgtgctgaagaagagaaccttcaccaagggcgtgaaggtgaagcacggcgccagcagcaccctgcccagaatgaagcagaagggcctgaagatcgccaagggcatcttctag

SEQ ID NO: 96261 - DNA, 930 bp, synthetic construct
  misc_feature 1..930: note = Description of Artificial Sequence: Synthetic coding sequence
  source 1..930: mol_type = other DNA
gtggtggccgagaacggcctgagcgaggagaagccccacctgctggtgttcccccccgacctggtggccgagcagttcaccctgatggacgccgagtgcagaatcctgaagaacttcagcagcctgtacgccatcctgagcgccctgcagagcaacagcatccacagactgaagaagacctgggaggacgtgagcagagacagcttcagaatcttccagaagctgagcgagatcttcagcgacgagaacaactacagcctgagcagagagctgctgatcaaggagggcaccagcaagttcgccaccctggagatgaaccccaagagagcccagaagagacccaaggagaccggcatcatccagggcaccgtgccctacctgggcaccttcctgaccgacctggtgatgctggacaccgccatgaaggactacctgtacggcagactgatcaacttcgagaagagaagaaaggagttcgaggtgatcgcccagatcaagctgctgcagagcgcctgcaacaactacagcatcgcccccgacgagcagttcggcgcctggttcagagccgtggagagactgagcgagaccgagagctacaacctgagctgcgagctggagccccccagcgagagcgccagcaacaccctgagaaccaagaagaacaccgccatcgtgaagagatggagcgacagacaggcccccagcaccgagctgagcaccagcggcagcagccacagcaagagctgcgaccagctgagatgcggcccctacctgagcagcggcgacatcgccgacgccctgagcgtgcacagcgccggcagcagcagcagcgacgtggaggagatcaacatcagcttcgtgcccgagagccccgacggccaggagaagaagttctgggagagcgccagccagagcagccccgagacctag

SEQ ID NO: 96262 - DNA, 2958 bp, synthetic construct
  misc_feature 1..2958: note = Description of Artificial Sequence: Synthetic coding sequence
  source 1..2958: mol_type = other DNA
atgcacagaagaagactggccctgggcctgggcttctgcctgctggccggcaccagcctgagcgtgctgtgggtgtacctggagaactggctgcccgtgagctacgtgccctactacctgccctgccccgagatcctgcccatgatgatggccctgagctgcctgtgccaccagcagcacgaggccgccctgcaggagggcgaggccacccccgccagaggcatggtgaccgtgcccagcgcccaggccgccggcgcccaggcccacaccgccgccgacacccacaccctggtgggcgcccacagactgagaggcaacctgcagcccagagccagcgccgcccacctgcccgccaccgagcccgaccactggggccacggcgtgtgcagaggcgagagcagcacccaggagatcggcgaggagctgatcaacggcgtgatctacagcatcagcctgagaaaggtgcagctgcaccacggcggcaacaagggccagagatggctgggctacgagaacgagagcgccctgaacctgtacgagacctgcaaggtgagaaccgtgaaggccggcaccctggagaagctggtggagcacctggtgcccgccttccagggcagcgacctgagctacgtgaccatcttcctgtgcacctacagagccttcaccaccacccagcaggtgctggacctgctgttcaagagatacggcagatgcgacgccctgaccgccagcagcagatacggctgcatcctgccctacagcgacgaggacggcggcccccaggaccagctgaagaacgccatcagcagcatcctgggcacctggctggaccagtacagcgaggacttctgccagccccccgacttcccctgcctgaagcagctggtggcctacgtgcagctgaacatgcccggcagcgacctggagagaagagcccacctgctgctggcccagctggagcacagcgagcccatcgaggccgagcccgaggccctgagccccgtgcccgccctgaagcccacccccgagctggagctggccctgacccccgccagagcccccagccccgtgcccgcccccgcccccgagcccgagcccgcccccacccccgcccccggcagcgagctggaggtggcccccgcccccgcccccgagctgcagcaggcccccgagcccgccgtgggcctggagagcgcccccgcccccgccctggagctggagcccgcccccgagcaggaccccgcccccagccagaccctggagctggagcccgcccccgcccccgtgcccagcctgcagcccagctggcccagccccgtggtggccgagaacggcctgagcgaggagaagccccacctgctggtgttcccccccgacctggtggccgagcagttcaccctgatggacgccgagctgttcaagaaggtggtgccctaccactgcctgggcagcatctggagccagagagacaagaagggcaaggagcacctggcccccaccatcagagccaccgtgacccagttcaacagcgtggccaactgcgtgatcaccacctgcctgggcaacagaagcaccaaggcccccgacagagccagagtggtggagcactggatcgaggtggccagagagtgcagaatcctgaagaacttcagcagcctgtacgccatcctgagcgccctgcagagcaacagcatccacagactgaagaagacctgggaggacgtgagcagagacagcttcagaatcttccagaagctgagcgagatcttcagcgacgagaacaactacagcctgagcagagagctgctgatcaaggagggcaccagcaagttcgccaccctggagatgaaccccaagagagcccagaagagacccaaggagaccggcatcatccagggcaccgtgccctacctgggcaccttcctgaccgacctggtgatgctggacaccgccatgaaggactacctgtacggcagactgatcaacttcgagaagagaagaaaggagttcgaggtgatcgcccagatcaagctgctgcagagcgcctgcaacaactacagcatcgcccccgacgagcagttcggcgcctggttcagagccgtggagagactgagcgagaccgagagctacaacctgagctgcgagctggagccccccagcgagagcgccagcaacaccctgagaaccaagaagaacaccgccatcgtgaagagatggagcgacagacaggcccccagcaccgagctgagcaccagcggcagcagccacagcaagagctgcgaccagctgagatgcggcccctacctgagcagcggcgacatcgccgacgccctgagcgtgcacagcgccggcagcagcagcagcgacgtggaggagatcaacatcagcttcgtgcccgagagccccgacggccaggagaagaagttctgggagagcgccagccagagcagccccgagaccagcggcatcagcagcgccagcagcagcaccagcagcagcagcgccagcaccacccccgtggccgccaccagaacccacaagagaagcgtgagcggcctgtgcaacagcagcagcgccctgcccctgtacaaccagcaggtgggcgactgctgcatcatcagagtgagcctggacgtggacaacggcaacatgtacaagagcatcctggtgaccagccaggacaaggcccccgccgtgatcagaaaggccatggacaagcacaacctggaggaggaggagcccgaggactacgagctgctgcagatcctgagcgacgacagaaagctgaagatccccgagaacgccaacgtgttctacgccatgaacagcaccgccaactacgacttcgtgctgaagaagagaaccttcaccaagggcgtgaaggtgaagcacggcgccagcagcaccctgcccagaatgaagcagaagggcctgaagatcgccaagggcatcttctag

SEQ ID NO: 96263 - DNA, 2412 bp, synthetic construct
  misc_feature 1..2412: note = Description of Artificial Sequence: Synthetic coding sequence
  source 1..2412: mol_type = other DNA
atggaggtgaagcccgtgggcgagcccacccaggaggtgagcaagttcaagctgagcaccaaggtggagagcaccggccactggctggtggaggaccacgtgagaatctgggaggtgctgaagaccgaggagagcagcatccaggactggggcgaggaggtggaggagggcgccgtgtaccacgtgaccctgaagagagtgcagatccagcaggccgccaacaagggcgccagatggctgggcgtggagggcgaccagctgccccccggccacaccgtgagccagtacgagacctgcaagatcagaaccatcaaggccggcaccctggagaagctggtggagaacctgctgaccgccttcggcgacaacgacttcacctacatcagcatcttcctgagcacctacagaggcttcgccagcaccaaggaggtgctggagctgctgctggacagatacggcaacctgaccagccccaactgcgaggaggacggcagccagagcagcagcgagagcaagatggtgatcagaaacgccatcgccagcatcctgagagcctggctggaccagtgcgccgaggacttcagagagcccccccacttcccctgcctgcagaagctgctggactacctgaccagaatgatgcccggcagcgaccccgagagaagagcccagaacctgctggagcagttccagaagcaggaggtggagaccgacaacggcctgcccaacaccatcagcttcagcctggaggaggaggaggagctggagggcggcgagagcgccgagttcacctgcttcagcgaggacctggtggccgagcagctgacctacatggacgcccagctgttcaagaaggtggtgccccaccactgcctgggctgcatctggagcagaagagacaagaaggagaacaagcacctggcccccaccatcagagccaccatcagccagttcaacaccctgaccaagtgcgtggtgagcaccatcctgggcggcaaggagctgaagacccagcagagagccaagatcatcgagaagtggatcaacatcgcccacgagtgcagactgctgaagaacttcagcagcctgagagccatcgtgagcgccctgcagagcaacagcatctacagactgaagaagacctgggccgccgtgcccagagacagaatgctgatgttcgaggagctgagcgacatcttcagcgaccacaacaaccacctgaccagcagagagctgctgatgaaggagggcaccagcaagttcgccaacctggacagcagcgtgaaggagaaccagaagagaacccagagaagactgcagctgcagaaggacatgggcgtgatgcagggcaccgtgccctacctgggcaccttcctgaccgacctgaccatgctggacaccgccctgcaggactacatcgagggcggcctgatcaacttcgagaagagaagaagagagttcgaggtgatcgcccagatcaagctgctgcagagcgcctgcaacagctactgcatgacccccgaccagaagttcatccagtggttccagagacagcagctgctgaccgaggaggagagctacgccctgagctgcgagatcgaggccgccgccgacgccagcaccaccagccccaagcccagaaagagcatggtgaagagactgagcctgctgttcctgggcagcgacatgatcaccagccccacccccaccaaggagcagcccaagagcaccgccagcggcagcagcggcgagagcatggacagcgtgagcgtgagcagctgcgagagcaaccacagcgaggccgaggagggcagcatcacccccatggacacccccgacgagccccagaagaagctgagcgagagcagcagcagctgcagcagcatccacagcatggacaccaacagcagcggcatgagcagcctgatcaaccccctgagcagcccccccagctgcaacaacaaccccaagatccacaagagaagcgtgagcgtgaccagcatcaccagcaccgtgctgccccccgtgtacaaccagcagaacgaggacacctgcatcatcagaatcagcgtggaggacaacaacggcaacatgtacaagagcatcatgctgaccagccaggacaagacccccgccgtgatccagagagccatgctgaagcacaacctggacagcgaccccgccgaggagtacgagctggtgcaggtgatcagcgaggacaaggagctggtgatccccgacagcgccaacgtgttctacgccatgaacagccaggtgaacttcgacttcatcctgagaaagaagaacagcatggaggagcaggtgaagctgagaagcagaaccagcctgaccctgcccagaaccgccaagagaggctgctggagcaacagacacagcaagatcaccctgtag

SEQ ID NO: 96264 - DNA, 2307 bp, synthetic construct
  misc_feature 1..2307: note = Description of Artificial Sequence: Synthetic coding sequence
  source 1..2307: mol_type = other DNA
atgaagctgctgtggcaggccaagatgagcagcatccaggactggggcgaggaggtggaggagggcgccgtgtaccacgtgaccctgaagagagtgcagatccagcaggccgccaacaagggcgccagatggctgggcgtggagggcgaccagctgccccccggccacaccgtgagccagtacgagacctgcaagatcagaaccatcaaggccggcaccctggagaagctggtggagaacctgctgaccgccttcggcgacaacgacttcacctacatcagcatcttcctgagcacctacagaggcttcgccagcaccaaggaggtgctggagctgctgctggacagatacggcaacctgaccagccccaactgcgaggaggacggcagccagagcagcagcgagagcaagatggtgatcagaaacgccatcgccagcatcctgagagcctggctggaccagtgcgccgaggacttcagagagcccccccacttcccctgcctgcagaagctgctggactacctgaccagaatgatgcccggcagcgaccccgagagaagagcccagaacctgctggagcagttccagaagcaggaggtggagaccgacaacggcctgcccaacaccatcagcttcagcctggaggaggaggaggagctggagggcggcgagagcgccgagttcacctgcttcagcgaggacctggtggccgagcagctgacctacatggacgcccagctgttcaagaaggtggtgccccaccactgcctgggctgcatctggagcagaagagacaagaaggagaacaagcacctggcccccaccatcagagccaccatcagccagttcaacaccctgaccaagtgcgtggtgagcaccatcctgggcggcaaggagctgaagacccagcagagagccaagatcatcgagaagtggatcaacatcgcccacgagtgcagactgctgaagaacttcagcagcctgagagccatcgtgagcgccctgcagagcaacagcatctacagactgaagaagacctgggccgccgtgcccagagacagaatgctgatgttcgaggagctgagcgacatcttcagcgaccacaacaaccacctgaccagcagagagctgctgatgaaggagggcaccagcaagttcgccaacctggacagcagcgtgaaggagaaccagaagagaacccagagaagactgcagctgcagaaggacatgggcgtgatgcagggcaccgtgccctacctgggcaccttcctgaccgacctgaccatgctggacaccgccctgcaggactacatcgagggcggcctgatcaacttcgagaagagaagaagagagttcgaggtgatcgcccagatcaagctgctgcagagcgcctgcaacagctactgcatgacccccgaccagaagttcatccagtggttccagagacagcagctgctgaccgaggaggagagctacgccctgagctgcgagatcgaggccgccgccgacgccagcaccaccagccccaagcccagaaagagcatggtgaagagactgagcctgctgttcctgggcagcgacatgatcaccagccccacccccaccaaggagcagcccaagagcaccgccagcggcagcagcggcgagagcatggacagcgtgagcgtgagcagctgcgagagcaaccacagcgaggccgaggagggcagcatcacccccatggacacccccgacgagccccagaagaagctgagcgagagcagcagcagctgcagcagcatccacagcatggacaccaacagcagcggcatgagcagcctgatcaaccccctgagcagcccccccagctgcaacaacaaccccaagatccacaagagaagcgtgagcgtgaccagcatcaccagcaccgtgctgccccccgtgtacaaccagcagaacgaggacacctgcatcatcagaatcagcgtggaggacaacaacggcaacatgtacaagagcatcatgctgaccagccaggacaagacccccgccgtgatccagagagccatgctgaagcacaacctggacagcgaccccgccgaggagtacgagctggtgcaggtgatcagcgaggacaaggagctggtgatccccgacagcgccaacgtgttctacgccatgaacagccaggtgaacttcgacttcatcctgagaaagaagaacagcatggaggagcaggtgaagctgagaagcagaaccagcctgaccctgcccagaaccgccaagagaggctgctggagcaacagacacagcaagatcaccctgtag

SEQ ID NO: 96265 - DNA, 2412 bp, synthetic construct; identical to SEQ ID NO: 96263
  misc_feature 1..2412: note = Description of Artificial Sequence: Synthetic coding sequence
  source 1..2412: mol_type = other DNA

SEQ ID NO: 96266 - DNA, 2301 bp, synthetic construct
  misc_feature 1..2301: note = Description of Artificial Sequence: Synthetic coding sequence
  source 1..2301: mol_type = other DNA
atggaggtgaagcccgtgggcgagcccacccaggaggtgagcaagttcaagctgagcaccaaggtggagagcaccggccactggctggtggaggaccacgtgagaatctgggaggtgctgaagaccgaggaggtggagggcgaccagctgccccccggccacaccgtgagccagtacgagacctgcaagatcagaaccatcaaggccggcaccctggagaagctggtggagaacctgctgaccgccttcggcgacaacgacttcacctacatcagcatcttcctgagcacctacagaggcttcgccagcaccaaggaggtgctggagctgctgctggacagatacggcaacctgaccagccccaactgcgaggaggacggcagccagagcagcagcgagagcaagatggtgatcagaaacgccatcgccagcatcctgagagcctggctggaccagtgcgccgaggacttcagagagcccccccacttcccctgcctgcagaagctgctggactacctgaccagaatgatgcccggcagcgaccccgagagaagagcccagaacctgctggagcagttccagaagcaggaggtggagaccgacaacggcctgcccaacaccatcagcttcagcctggaggaggaggaggagctggagggcggcgagagcgccgagttcacctgcttcagcgaggacctggtggccgagcagctgacctacatggacgcccagctgttcaagaaggtggtgccccaccactgcctgggctgcatctggagcagaagagacaagaaggagaacaagcacctggcccccaccatcagagccaccatcagccagttcaacaccctgaccaagtgcgtggtgagcaccatcctgggcggcaaggagctgaagacccagcagagagccaagatcatcgagaagtggatcaacatcgcccacgagtgcagactgctgaagaacttcagcagcctgagagccatcgtgagcgccctgcagagcaacagcatctacagactgaagaagacctgggccgccgtgcccagagacagaatgctgatgttcgaggagctgagcgacatcttcagcgaccacaacaaccacctgaccagcagagagctgctgatgaaggagggcaccagcaagttcgccaacctggacagcagcgtgaaggagaaccagaagagaacccagagaagactgcagctgcagaaggacatgggcgtgatgcagggcaccgtgccctacctgggcaccttcctgaccgacctgaccatgctggacaccgccctgcaggactacatcgagggcggcctgatcaacttcgagaagagaagaagagagttcgaggtgatcgcccagatcaagctgctgcagagcgcctgcaacagctactgcatgacccccgaccagaagttcatccagtggttccagagacagcagctgctgaccgaggaggagagctacgccctgagctgcgagatcgaggccgccgccgacgccagcaccaccagccccaagcccagaaagagcatggtgaagagactgagcctgctgttcctgggcagcgacatgatcaccagccccacccccaccaaggagcagcccaagagcaccgccagcggcagcagcggcgagagcatggacagcgtgagcgtgagcagctgcgagagcaaccacagcgaggccgaggagggcagcatcacccccatggacacccccgacgagccccagaagaagctgagcgagagcagcagcagctgcagcagcatccacagcatggacaccaacagcagcggcatgagcagcctgatcaaccccctgagcagcccccccagctgcaacaacaaccccaagatccacaagagaagcgtgagcgtgaccagcatcaccagcaccgtgctgccccccgtgtacaaccagcagaacgaggacacctgcatcatcagaatcagcgtggaggacaacaacggcaacatgtacaagagcatcatgctgaccagccaggacaagacccccgccgtgatccagagagccatgctgaagcacaacctggacagcgaccccgccgaggagtacgagctggtgcaggtgatcagcgaggacaaggagctggtgatccccgacagcgccaacgtgttctacgccatgaacagccaggtgaacttcgacttcatcctgagaaagaagaacagcatggaggagcaggtgaagctgagaagcagaaccagcctgaccctgcccagaaccgccaagagaggctgctggagcaacagacacagcaagatcaccctgtag

SEQ ID NO: 96267 - DNA, 2220 bp, synthetic construct
  misc_feature 1..2220: note = Description of Artificial Sequence: Synthetic coding sequence
  source 1..2220: mol_type = other DNA
atgaagctgctgtggcaggccaagatgagcagcatccaggactggggcgaggaggtggaggagggcgccgtgtaccacgtgaccctgaagagagtgcagatccagcaggccgccaacaagggcgccagatggctgggcgtggagggcgaccagctgccccccggccacaccgtgagccagtacgagacctgcaagatcagaaccatcaaggccggcaccctggagaagctggtggagaacctgctgaccgccttcggcgacaacgacttcacctacatcagcatcttcctgagcacctacagaggcttcgccagcaccaaggaggtgctggagctgctgctggacagatacggcaacctgaccagccccaactgcgaggaggacggcagccagagcagcagcgagagcaagatggtgatcagaaacgccatcgccagcatcctgagagcctggctggaccagtgcgccgaggacttcagagagcccccccacttcccctgcctgcagaagctgctggactacctgaccagaatgatgcccggcagcgaccccgagagaagagcccagaacctgctggagcagttccagaagcaggaggtggagaccgacaacggcctgcccaacaccatcagcttcagcctggaggaggaggaggagctggagggcggcgagagcgccgagttcacctgcttcagcgaggacctggtggccgagcagctgacctacatggacgcccagctgttcaagaaggtggtgccccaccactgcctgggctgcatctggagcagaagagacaagaaggagaacaagcacctggcccccaccatcagagccaccatcagccagttcaacaccctgaccaagtgcgtggtgagcaccatcctgggcggcaaggagctgaagacccagcagagagccaagatcatcgagaagtggatcaacatcgcccacgagtgcagactgctgaagaacttcagcagcctgagagccatcgtgagcgccctgcagagcaacagcatctacagactgaagaagacctgggccgccgtgcccagagacagaatgctgatgttcgaggagctgagcgacatcttcagcgaccacaacaaccacctgaccagcagagagctgctgatgaaggagggcaccagcaagttcgccaacctggacagcagcgtgaaggagaaccagaagagaacccagagaagactgcagctgcagaaggacatgggcggcctgatcaacttcgagaagagaagaagagagttcgaggtgatcgcccagatcaagctgctgcagagcgcctgcaacagctactgcatgacccccgaccagaagttcatccagtggttccagagacagcagctgctgaccgaggaggagagctacgccctgagctgcgagatcgaggccgccgccgacgccagcaccaccagccccaagcccagaaagagcatggtgaagagactgagcctgctgttcctgggcagcgacatgatcaccagccccacccccaccaaggagcagcccaagagcaccgccagcggcagcagcggcgagagcatggacagcgtgagcgtgagcagctgcgagagcaaccacagcgaggccgaggagggcagcatcacccccatggacacccccgacgagccccagaagaagctgagcgagagcagcagcagctgcagcagcatccacagcatggacaccaacagcagcggcatgagcagcctgatcaaccccctgagcagcccccccagctgcaacaacaaccccaagatccacaagagaagcgtgagcgtgaccagcatcaccagcaccgtgctgccccccgtgtacaaccagcagaacgaggacacctgcatcatcagaatcagcgtggaggacaacaacggcaacatgtacaagagcatcatgctgaccagccaggacaagacccccgccgtgatccagagagccatgctgaagcacaacctggacagcgaccccgccgaggagtacgagctggtgcaggtgatcagcgaggacaaggagctggtgatccccgacagcgccaacgtgttctacgccatgaacagccaggtgaacttcgacttcatcctgagaaagaagaacagcatggaggagcaggtgaagctgagaagcagaaccagcctgaccctgcccagaaccgccaagagaggctgctggagcaacagacacagcaagatcaccctgtag

SEQ ID NO: 96268 - DNA, 1173 bp, synthetic construct
  misc_feature 1..1173: note = Description of Artificial Sequence: Synthetic coding sequence
  source 1..1173: mol_type = other DNA
atgggcagcttcaaggacagaggcgacggcctgcccaacaccatcagcttcagcctggaggaggaggaggagctggagggcggcgagagcgccgagttcacctgcttcagcgaggacctggtggccgagcagctgacctacatggacgcccagctgttcaagaaggtggtgccccaccactgcctgggctgcatctggagcagaagagacaagaaggagaacaagcacctggcccccaccatcagagccaccatcagccagttcaacaccctgaccaagtgcgtggtgagcaccatcctgggcggcaaggagctgaagacccagcagagagccaagatcatcgagaagtggatcaacatcgcccacgagtgcagactgctgaagaacttcagcagcctgagagccatcgtgagcgccctgcagagcaacagcatctacagactgaagaagacctgggccgccgtgcccagagacagaatgctgatgttcgaggagctgagcgacatcttcagcgaccacaacaaccacctgaccagcagagagctgctgatgaaggagggcaccagcaagttcgccaacctggacagcagcgtgaaggagaaccagaagagaacccagagaagactgcagctgcagaaggacatgggcgtgatgcagggcaccgtgccctacctgggcaccttcctgaccgacctgaccatgctggacaccgccctgcaggactacatcgagggcggcctgatcaacttcgagaagagaagaagagagttcgaggtgatcgcccagatcaagctgctgcagagcgcctgcaacagctactgcatgacccccgaccagaagttcatccagtggttccagagacagcagctgctgaccgaggaggagagctacgccctgagctgcgagatcgaggccgccgccgacgccagcaccaccagccccaagcccagaaagagcatggtgaagagactgagcctgctgttcctgggcagcgacatgatcaccagccccacccccaccaaggagcagcccaagagcaccgccagcggcagcagcggcgagagcatggacagcgtgagcgtgagcagctgcgagagcaaccacagcgaggccgaggagggcagcatcacccccatggacacccccgacgagccccagaagaaggccctgtag

SEQ ID NO: 96269 - DNA, 1422 bp, synthetic construct
  misc_feature 1..1422: note = Description of Artificial Sequence: Synthetic coding sequence
  source 1..1422: mol_type = other DNA
atgagaaagctgctgaccaacctgcccgccgccgccgtgctgagcgcccaggtgtacagcgccgtgctgcagggcctgtgggaggagaacgtgtgcggcacccccggcagaaccagagtgtgcaccgccctgctgtacggccaggtgtgccccttccaggacagcaccgacggcctgagaaccatcaccagcatcctgttcaactggccccccgagaacaccagcgtgtactaccagcccccccagagaagcagcttcagaatcaagctggccttcagaaacctgagctggcccggcctgggcctggaggaccaccaggagatcgtgctgggccagctggtgctgcccgagcccaacgaggccaagcccgacgaccccgcccccagacccggccagcacgccctgaccatgcccgccctggagcccgccccccccctgctggccgacctgggccccgccctggagcccgagagccccgccgccctgggcccccccggctacctgcacagcgcccccggccccgcccccgcccccggcgagggccccccccccggcaccgtgctggagccccagagcgcccccgagagcagctgcccctgcagaggcagcgtgaagaaccagcccagcgaggagctgcccgacatgaccaccttcccccccagactgctggccgagcagctgaccctgatggacgccgagctgttcaagaaggtggtgctgcacgagtgcctgggctgcatctggggccagggccacctgaagggcaacgagcacatggcccccaccgtgagagccaccatcgcccacttcaacagactgaccaactgcatcaccaccagctgcctgggcgaccacagcatgagagccagagacagagccagagtggtggagcactggatcaaggtggccagagagtgcctgagcctgaacaacttcagcagcgtgcacgtgatcgtgagcgccctgtgcagcaaccccatcggccagctgcacaagacctgggccggcgtgagcagcaagagcatgaaggagctgaaggagctgtgcaagaaggacaccgccgtgaagagagacctgctgatcaaggccggcagcttcaaggtggccacccaggagagaaacccccagagagtgcagatgagactgagaagacagaagaagggcgtggtgcccttcctgggcgacttcctgaccgagctgcagagactggacagcgccatccccgacgacctggacggcaacaccaacaagagaagcaaggaggtgagagtgctgcaggagatgcagctgctgcaggtggccgccatgaactacagactgagacccctggagaagttcgtgacctacttcaccagaatggagcagctgagcgacaaggagagctacaagctgagctgccagctggagcccgagaacccctag

SEQ ID NO: 96270 - DNA, 1743 bp, synthetic construct
  misc_feature 1..1743: note = Description of Artificial Sequence: Synthetic coding sequence
  source 1..1743: mol_type = other DNA
atgagaaagctgctgaccaacctgcccgccgccgccgtgctgagcgcccaggtgtacagcgccgtgctgcagggcctgtgggaggagaacgtgtgcggcacccccggcagaaccagagtgtgcaccgccctgctgtacggccaggtgtgccccttccaggacagcaccgacggcctgagaaccatcaccagcatcctgttcaactggccccccgagaacaccagcgtgtactaccagcccccccagagaagcagcttcagaatcaagctggccttcagaaacctgagctggcccggcctgggcctggaggaccaccaggagatcgtgctgggccagctggtgctgcccgagcccaacgaggccaagcccgacgaccccgcccccagacccggccagcacgccctgaccatgcccgccctggagcccgccccccccctgctggccgacctgggccccgccctggagcccgagagccccgccgccctgggcccccccggctacctgcacagcgcccccggccccgcccccgcccccggcgagggccccccccccggcaccgtgctggagccccagagcgcccccgagagcagctgcccctgcagaggcagcgtgaagaaccagcccagcgaggagctgcccgacatgaccaccttcccccccagactgctggccgagcagctgaccctgatggacgccgagctgttcaagaaggtggtgctgcacgagtgcctgggctgcatctggggccagggccacctgaagggcaacgagcacatggcccccaccgtgagagccaccatcgcccacttcaacagactgaccaactgcatcaccaccagctgcctgggcgaccacagcatgagagccagagacagagccagagtggtggagcactggatcaaggtggccagagagtgcctgagcctgaacaacttcagcagcgtgcacgtgatcgtgagcgccctgtgcagcaaccccatcggccagctgcacaagacctgggccggcgtgagcagcaagagcatgaaggagctgaaggagctgtgcaagaaggacaccgccgtgaagagagacctgctgatcaaggccggcagcttcaaggtggccacccaggagagaaacccccagagagtgcagatgagactgagaagacagaagaagggcgtggtgcccttcctgggcgacttcctgaccgagctgcagagactggacagcgccatccccgacgacctggacggcaacaccaacaagagaagcaaggaggtgagagtgctgcaggagatgcagctgctgcaggtggccgccatgaactacagactgagacccctggagaagttcgtgacctacttcaccagaatggagcagctgagcgacaaggagagatggggcttcaccatgatgagcagaatcgtgagcaacagctggccccaggccatccaccccccccagccccccaaggtgctgaccctgcagctgcaggccgtgctgcccgccggcgccagaaagcccgtgggctggcagcaccccgccgtggccggcaacccccccggctgctggcccgagcacagactgtgcaccatcccccaccccgacagaagacaccagggcaccaccagcagaagactggccgcccagctgcacctggccctggacccccaccaccagctgctgctgctggccagaatcagaccctgggacttctgcgagagcggcggcagacccttctacgtgtacttcctgtag

SEQ ID NO: 96271 - DNA, 1968 bp, synthetic construct
  misc_feature 1..1968: note = Description of Artificial Sequence: Synthetic coding sequence
  source 1..1968: mol_type = other DNA
atgaccgagtgcttcctgccccccaccagcagccccagcgagcacagaagagtggagcacggcagcggcctgaccagaacccccagcagcgaggagatcagccccaccaagttccccggcctgtacagaaccggcgagcccagccccccccacgacatcctgcacgagccccccgacgtggtgagcgacgacgagaaggaccacggcaagaagaagggcaagttcaagaagaaggagaagagaaccgagggctacgccgccttccaggaggacagcagcggcgacgaggccgagagccccagcaagatgaagagaagcaagggcatccacgtgttcaagaagcccagcttcagcaagaagaaggagaaggacttcaagatcaaggagaagcccaaggaggagaagcacaaggaggagaagcacaaggaggagaagcacaaggagaagaagagcaaggacctgaccgccgccgacgtggtgaagcagtggaaggagaagaagaagaagaagaagcccatccaggagcccgaggtgccccagatcgacgtgcccaacctgaagcccatcttcggcatccccctggccgacgccgtggagagaaccatgatgtacgacggcatcagactgcccgccgtgttcagagagtgcatcgactacgtggagaagtacggcatgaagtgcgagggcatctacagagtgagcggcatcaagagcaaggtggacgagctgaaggccgcctacgacagagaggagagcaccaacctggaggactacgagcccaacaccgtggccagcctgctgaagcagtacctgagagacctgcccgagaacctgctgaccaaggagctgatgcccagattcgaggaggcctgcggcagaaccaccgagaccgagaaggtgcaggagttccagagactgctgaaggagctgcccgagtgcaactacctgctgatcagctggctgatcgtgcacatggaccacgtgatcgccaaggagctggagaccaagatgaacatccagaacatcagcatcgtgctgagccccaccgtgcagatcagcaacagagtgctgtacgtgttcttcacccacgtgcaggagctgttcggcaacgtggtgctgaagcaggtgatgaagcccctgagatggagcaacatggccaccatgcccaccctgcccgagacccaggccggcatcaaggaggagatcagaagacaggagttcctgctgaactgcctgcacagagacctgcagggcggcatcaaggacctgagcaaggaggagagactgtgggaggtgcagagaatcctgaccgccctgaagagaaagctgagagaggccaagagacaggagtgcgagaccaagatcgcccaggagatcgccagcctgagcaaggaggacgtgagcaaggaggagatgaacgagaacgaggaggtgatcaacatcctgctggcccaggagaacgagatcctgaccgagcaggaggagctgctggccatggagcagttcctgagaagacagatcgccagcgagaaggaggagatcgagagactgagagccgagatcgccgagatccagagcagacagcagcacggcagaagcgagaccgaggagtacagcagcgagagcgagagcgagagcgaggacgaggaggagctgcagatcatcctggaggacctgcagagacagaacgaggagctggagatcaagaacaaccacctgaaccaggccatccacgaggagagagaggccatcatcgagctgagagtgcagctgagactgctgcagatgcagagagccaaggccgagcagcaggcccaggaggacgaggagcccgagtggagaggcggcgccgtgcagccccccagagacggcgtgctggagcccaaggccgccaaggagcagcccaaggccggcaaggagcccgccaagcccagccccagcagagacagaaaggagaccagcatctag

SEQ ID NO: 96272 - DNA, 1968 bp, synthetic construct; identical to SEQ ID NO: 96271
  misc_feature 1..1968: note = Description of Artificial Sequence: Synthetic coding sequence
  source 1..1968: mol_type = other DNA

SEQ ID NO: 96273 - DNA, 1044 bp, synthetic construct
  misc_feature 1..1044: note = Description of Artificial Sequence: Synthetic coding sequence
  source 1..1044: mol_type = other DNA
atgaccgagtgcttcctgccccccaccagcagccccagcgagcacagaagagtggagcacggcagcggcctgaccagaacccccagcagcgaggagatcagccccaccaagttccccggcctgtacagaaccggcgagcccagccccccccacgacatcctgcacgagccccccgacgtggtgagcgacgacgagaaggaccacggcaagaagaagggcaagttcaagaagaaggagaagagaaccgagggctacgccgccttccaggaggacagcagcggcgacgaggccgagagccccagcaagatgaagagaagcaagggcatccacgtgttcaagaagcccagcttcagcaagaagaaggagaaggacttcaagatcaaggagaagcccaaggaggagaagcacaaggaggagaagcacaaggaggagaagcacaaggagaagaagagcaaggacctgaccgccgccgacgtggtgaagcagtggaaggagaagaagaagaagaagaagcccatccaggagcccgaggtgccccagatcgacgtgcccaacctgaagcccatcttcggcatccccctggccgacgccgtggagagaaccatgatgtacgacggcatcagactgcccgccgtgttcagagagtgcatcgactacgtggagaagtacggcatgaagtgcgagggcatctacagagtgagcggcatcaagagcaaggtggacgagctgaaggccgcctacgacagagaggagagcaccaacctggaggactacgagcccaacaccgtggccagcctgctgaagcagtacctgagagacctgcccgagaacctgctgaccaaggagctgatgcccagattcgaggaggcctgcggcagaaccaccgagaccgagaaggtgcagagcagcggcgaggaggccgccagaagctgccagttcctgaccgccggcaccagcaagggcctgctgaccggcctggtgaagggcagccacctgggcctggtgcacccccagagaatgctgttcaagcccgagatcttctag

SEQ ID NO: 96274 - DNA, 1980 bp, synthetic construct
  misc_feature 1..1980: note = Description of Artificial Sequence: Synthetic coding sequence
  source 1..1980: mol_type = other DNA
atggaggccgccgccgccgccgccgccgccgccgccgccgccgccgccgccggcggcggctgcggcagcggccccccccccctgctgctgagcgagggcgagcagcagtgctacagcgagctgttcgccagatgcgccggcgccgccggcggcggccccggcagcggcccccccgaggccgccagagtggcccccggcaccgccaccgccgccgccggccccgtggccgacctgttcagagccagccagctgcccgccgagaccctgcaccagatcaccgagctgtgcggcgccaagagagtgggctacttcggccccacccagttctacatcgccctgaagctgatcgccgccgcccagagcggcctgcccgtgagaatcgagagcatcaagtgcgagctgcccctgcccagattcatgatgagcaagaacgacggcgagatcagattcggcaaccccgccgagctgcacggcaccaaggtgcagatcccctacctgaccaccgagaagaacagcttcaagagaatggacgacgaggacaagcaggagacccagagccccaccatgagccccctggccagcccccccagcagccccccccactaccagagagtgcccctgagccacggctacagcaagctgagaagcagcgccgagcagatgcaccccgccccctacgaggccagacagcccctggtgcagcccgagggcagcagcagcggcggccccggcaccaagcccctgagacaccaggccagcctgatcagaagcttcagcgtggagagagagctgcaggacaacagcagctaccccgacgagccctggagaatcaccgaggagcagagagagtactacgtgaaccagttcagaagcctgcagcccgaccccagcagcttcatcagcggcagcgtggccaagaacttcttcaccaagagcaagctgagcatccccgagctgagctacatctgggagctgagcgacgccgactgcgacggcgccctgaccctgcccgagttctgcgccgccttccacctgatcgtggccagaaagaacggctaccccctgcccgagggcctgccccccaccctgcagcccgagtacctgcaggccgccttccccaagcccaagtgggactgccagctgttcgacagctacagcgagagcctgcccgccaaccagcagcccagagacctgaacagaatggagaagaccagcgtgaaggacatggccgacctgcccgtgcccaaccaggacgtgaccagcgacgacaagcaggccctgaagagcaccatcaacgaggccctgcccaaggacgtgagcgaggaccccgccacccccaaggacagcaacagcctgaaggccagacccagaagcagaagctacagcagcaccagcatcgaggaggccatgaagagaggcgaggacccccccacccccccccccagaccccagaagacccacagcagagccagcagcctggacctgaacaaggtgttccagcccagcgtgcccgccaccaagagcggcctgctgccccccccccccgccctgccccccagaccctgccccagccagagcgagcaggtgagcgaggccgagctgctgccccagctgagcagagcccccagccaggccgccgagagcagccccgccaagaaggacgtgctgtacagccagccccccagcaagcccatcagaagaaagttcagacccgagaaccaggccaccgagaaccaggagcccagcaccgccgccagcggccccgccagcgccgccaccatgaagccccaccccaccgtgcagaagcagagcagcaagcagaagaaggccatccagaccgccatcagaaagaacaaggaggccaacgccgtgctggccagactgaacagcgagctgcagcagcagctgaaggaggtgcaccaggagagaatcgccctggagaaccagctggagcagctgagacccgtgaccgtgctgtag

SEQ ID NO: 96275 - DNA, 1983 bp, synthetic construct
  misc_feature 1..1983: note = Description of Artificial Sequence: Synthetic coding sequence
  source 1..1983: mol_type = other DNA
atggaggccgccgccgccgccgccgccgccgccgccgccgccgccgccgccggcggcggctgcggcagcggccccccccccctgctgctgagcgagggcgagcagcagtgctacagcgagctgttcgccagatgcgccggcgccgccggcggcggccccggcagcggcccccccgaggccgccagagtggcccccggcaccgccaccgccgccgccggccccgtggccgacctgttcagagccagccagctgcccgccgagaccctgcaccagatcaccgagctgtgcggcgccaagagagtgggctacttcggccccacccagttctacatcgccctgaagctgatcgccgccgcccagagcggcctgcccgtgagaatcgagagcatcaagtgcgagctgcccctgcccagattcatgatgagcaagaacgacggcgagatcagattcggcaaccccgccgagctgcacggcaccaaggtgcagatcccctacctgaccaccgagaagaacagcttcaagagaatggacgacgaggacaagcagcaggagacccagagccccaccatgagccccctggccagcccccccagcagccccccccactaccagagagtgcccctgagccacggctacagcaagctgagaagcagcgccgagcagatgcaccccgccccctacgaggccagacagcccctggtgcagcccgagggcagcagcagcggcggccccggcaccaagcccctgagacaccaggccagcctgatcagaagcttcagcgtggagagagagctgcaggacaacagcagctaccccgacgagccctggagaatcaccgaggagcagagagagtactacgtgaaccagttcagaagcctgcagcccgaccccagcagcttcatcagcggcagcgtggccaagaacttcttcaccaagagcaagctgagcatccccgagctgagctacatctgggagctgagcgacgccgactgcgacggcgccctgaccctgcccgagttctgcgccgccttccacctgatcgtggccagaaagaacggctaccccctgcccgagggcctgccccccaccctgcagcccgagtacctgcaggccgccttccccaagcccaagtgggactgccagctgttcgacagctacagcgagagcctgcccgccaaccagcagcccagagacctgaacagaatggagaagaccagcgtgaaggacatggccgacctgcccgtgcccaaccaggacgtgaccagcgacgacaagcaggccctgaagagcaccatcaacgaggccctgcccaaggacgtgagcgaggaccccgccacccccaaggacagcaacagcctgaaggccagacccagaagcagaagctacagcagcaccagcatcgaggaggccatgaagagaggcgaggacccccccacccccccccccagaccccagaagacccacagcagagccagcagcctggacctgaacaaggtgttccagcccagcgtgcccgccaccaagagcggcctgctgccccccccccccgccctgccccccagaccctgccccagccagagcgagcaggtgagcgaggccgagctgctgccccagctgagcagagcccccagccaggccgccgagagcagccccgccaagaaggacgtgctgtacagccagccccccagcaagcccatcagaagaaagttcagacccgagaaccaggccaccgagaaccaggagcccagcaccgccgccagcggccccgccagcgccgccaccatgaagccccaccccaccgtgcagaagcagagcagcaagcagaagaaggccatccagaccgccatcagaaagaacaaggaggccaacgccgtgctggccagactgaacagcgagctgcagcagcagctgaaggaggtgcaccaggagagaatcgccctggagaaccagctggagcagctgagacccgtgaccgtgctgtag

SEQ ID NO: 96276 - DNA, 1824 bp, synthetic construct
  misc_feature 1..1824: note = Description of Artificial Sequence: Synthetic coding sequence
  source 1..1824: mol_type = other DNA
atggaggccgccgccgccgccgccgccgccgccgccgccgccgccgccgccggcggcggctgcggcagcggccccccccccctgctgctgagcgagggcgagcagcagtgctacagcgagctgttcgccagatgcgccggcgccgccggcggcggccccggcagcggcccccccgaggccgccagagtggcccccggcaccgccaccgccgccgccggccccgtggccgacctgttcagagccagccagctgcccgccgagaccctgcaccagatcaccgagctgtgcggcgccaagagagtgggctacttcggccccacccagttctacatcgccctgaagctgatcgccgccgcccagagcggcctgcccgtgagaatcgagagcatcaagtgcgagctgcccctgcccagattcatgatgagcaagaacgacggcgagatcagattcggcaaccccgccgagctgcacggcaccaaggtgcagatcccctacctgaccaccgagaagaacagcttcaagagaatggacgacgaggacaagcagcaggagacccagagccccaccatgagccccctggccagcccccccagcagccccccccactaccagagagtgcccctgagccacggctacagcaagctgagaagcagcgccgagcagatgcaccccgccccctacgaggccagacagcccctggtgcagcccgagggcagcagcagcggcggccccggcaccaagcccctgagacaccaggccagcctgatcagaagcttcagcgtggagagagagctgcaggacaacagcagctaccccgacgagccctggagaatcaccgaggagcagagagagtactacgtgaaccagttcagaagcctgcagcccgaccccagcagcttcatcagcggcagcgtggccaagaacttcttcaccaagagcaagctgagcatccccgagctgagctacatctgggagctgagcgacgccgactgcgacggcgccctgaccctgcccgagttctgcgccgccttccacctgatcgtggccagaaagaacggctaccccctgcccgagggcctgccccccaccctgcagcccgagtacctgcaggccgccttccccaagcccaagtgggactgccagctgttcgacagctacagcgagagcctgcccgccaaccagcagcccagagacctgaacagaatggagaagaccagcgtgaaggacatggccgacctgcccgtgcccaaccaggacgtgaccagcgacgacaagcaggccctgaagagcaccatcaacgaggccctgcccaaggacgtgagcgaggaccccgccacccccaaggacagcaacagcctgaaggccagacccagaagcagaagctacagcagcaccagcatcgaggaggccatgaagagaggcgaggacccccccacccccccccccagaccccagaagacccacagcagagccagcagcctggacctgaacaaggtgttccagcccagcgtgcccgccaccaagagcggcctgctgccccccccccccgccctgccccccagaccctgccccagccagagcgagcaggtgagcgaggccgagctgctgccccagctgagcagagcccccagccaggccgccgagagcagccccgccaagaaggacgtgctgtacagccagccccccagcaagcccatcagaagaaagttcagacccgtgtgcggcatccagcccctgatcagcatcgagctgagagccttcagaaccagcagacacctgttcaacgtgagcctggtgcactggcaggccctgagcatcgcctag

SEQ ID NO: 96277 - DNA, 1380 bp, synthetic construct
  misc_feature 1..1380: note = Description of Artificial Sequence: Synthetic coding sequence
  source 1..1380: mol_type = other DNA
atgatgagcaagaacgacggcgagatcagattcggcaaccccgccgagctgcacggcaccaaggtgcagatcccctacctgaccaccgagaagaacagcttcaagagaatggacgacgaggacaagcaggagacccagagccccaccatgagccccctggccagcccccccagcagccccccccactaccagagagtgcccctgagccacggctacagcaagctgagaagcagcgccgagcagatgcaccccgccccctacgaggccagacagcccctggtgcagcccgagggcagcagcagcggcggccccggcaccaagcccctgagacaccaggccagcctgatcagaagcttcagcgtggagagagagctgcaggacaacagcagctaccccgacgagccctggagaatcaccgaggagcagagagagtactacgtgaaccagttcagaagcctgcagcccgaccccagcagcttcatcagcggcagcgtggccaagaacttcttcaccaagagcaagctgagcatccccgagctgagctacatctgggagctgagcgacgccgactgcgacggcgccctgaccctgcccgagttctgcgccgccttccacctgatcgtggccagaaagaacggctaccccctgcccgagggcctgccccccaccctgcagcccgagtacctgcaggccgccttccccaagcccaagtgggactgccagctgttcgacagctacagcgagagcctgcccgccaaccagcagcccagagacctgaacagaatggagaagaccagcgtgaaggacatggccgacctgcccgtgcccaaccaggacgtgaccagcgacgacaagcaggccctgaagagcaccatcaacgaggccctgcccaaggacgtgagcgaggaccccgccaccaagagcggcctgctgccccccccccccgccctgccccccagaccctgccccagccagagcgagcaggtgagcgaggccgagctgctgccccagctgagcagagcccccagccaggccgccgagagcagccccgccaagaaggacgtgctgtacagccagccccccagcaagcccatcagaagaaagttcagacccgagaaccaggccaccgagaaccaggagcccagcaccgccgccagcggccccgccagcgccgccaccatgaagccccaccccaccgtgcagaagcagagcagcaagcagaagaaggccatccagaccgccatcagaaagaacaaggaggccaacgccgtgctggccagactgaacagcgagctgcagcagcagctgaaggaggtgcaccaggagagaatcgccctggagaaccagctggagcagctgagacccgtgaccgtgctgtag

SEQ ID NO: 96278 - DNA, 1863 bp, synthetic construct
  misc_feature 1..1863: note = Description of Artificial Sequence: Synthetic coding sequence
  source 1..1863: mol_type = other DNA
atggccgccgccaccgccgaccccggcgccggcaacccccagcccggcgacagcagcggcggcggcgccggcggcggcctgcccagccccggcgagcaggagctgagcagaagactgcagagactgtaccccgccgtgaaccagcaggagacccccctgcccagaagctggagccccaaggacaagtacaactacatcggcctgagccagggcaacctgagagtgcactacaagggccacggcaagaaccacaaggacgccgccagcgtgagagccacccaccccatccccgccgcctgcggcatctactacttcgaggtgaagatcgtgagcaagggcagagacggctacatgggcatcggcctgagcgcccagggcgtgaacatgaacagactgcccggctgggacaagcacagctacggctaccacggcgacgacggccacagcttctgcagcagcggcaccggccagccctacggccccaccttcaccaccggcgacgtgatcggctgctgcgtgaacctgatcaacggcacctgcttctacaccaagaacggccacagcctgggcatcgccttcaccgacctgcccgccaacctgtaccccaccgtgggcctgcagacccccggcgagatcgtggacgccaacttcggccagcagcccttcctgttcgacatcgaggactacatgagagagtggagagccaaggtgcagggcaccgtgcactgcttccccatcagcgccagactgggcgagtggcaggccgtgctgcagaacatggtgagcagctacctggtgcaccacggctactgcgccaccgccaccgccttcgccagaatgaccgagacccccatccaggaggagcaggccagcatcaagaacagacagaagatccagaagctggtgctggagggcagagtgggcgaggccatcgagaccacccagagattctaccccggcctgctggagcacaaccccaacctgctgttcatgctgaagtgcagacagttcgtggagatggtgaacggcaccgacagcgaggtgagaagcctgagcagcagaagccccaagagccaggacagctaccccggcagccccagcctgagccccagacacggccccagcagcagccacatgcacaacaccggcgccgacagccccagctgcagcaacggcgtggccagcaccaagagcaagcagaaccacagcaagtaccccgcccccagcagcagcagcagcagcagcagcagcagcagcagcagcagccccagcagcgtgaactacagcgagagcaacagcaccgacagcaccaagagccagcaccacagcagcaccagcaaccaggagaccagcgacagcgagatggagatggaggccgagcactaccccaacggcgtgctgggcagcatgagcaccagaatcgtgaacggcgcctacaagcacgaggacctgcagaccgacgagagcagcatggacgacagacaccccagaagacagctgtgcggcggcaaccaggccgccaccgagagaatcatcctgttcggcagagagctgcaggccctgagcgagcagctgggcagagagtacggcaagaacctggcccacaccgagatgctgcaggacgccttcagcctgctggcctacagcgacccctggagctgccccgtgggccagcagctggaccccatccagagagagcccgtgtgcgccgccctgaacagcgccatcctggagagccagaacctgcccaagcagccccccctgatgctggccctgggccaggccagcgagtgcctgagactgatggccagagccggcctgggcagctgcagcttcgccagagtggacgactacctgcactag

SEQ ID NO: 96279 - DNA, 1602 bp, synthetic construct
  misc_feature 1..1602: note = Description of Artificial Sequence: Synthetic coding sequence
  source 1..1602: mol_type = other DNA
atgggcatcggcctgagcgcccagggcgtgaacatgaacagactgcccggctgggacaagcacagctacggctaccacggcgacgacggccacagcttctgcagcagcggcaccggccagccctacggccccaccttcaccaccggcgacgtgatcggctgctgcgtgaacctgatcaacggcacctgcttctacaccaagaacggccacagcctgggcatcgccttcaccgacctgcccgccaacctgtaccccaccgtgggcctgcagacccccggcgagatcgtggacgccaacttcggccagcagcccttcctgttcgacatcgaggactacatgagagagtggagagccaaggtgcagggcaccgtgcactgcttccccatcagcgccagactgggcgagtggcaggccgtgctgcagaacatggtgagcagctacctggtgcaccacggctactgcgccaccgccaccgccttcgccagaatgaccgagacccccatccaggaggagcaggccagcatcaagaacagacagaagatccagaagctggtgctggagggcagagtgggcgaggccatcgagaccacccagagattctaccccggcctgctggagcacaaccccaacctgctgttcatgctgaagtgcagacagttcgtggagatggtgaacggcaccgacagcgaggtgagaagcctgagcagcagaagccccaagagccaggacagctaccccggcagccccagcctgagccccagacacggccccagcagcagccacatgcacaacaccggcgccgacagccccagctgcagcaacggcgtggccagcaccaagagcaagcagaaccacagcaagtaccccgcccccagcagcagcagcagcagcagcagcagcagcagcagcagcagccccagcagcgtgaactacagcgagagcaacagcaccgacagcaccaagagccagcaccacagcagcaccagcaaccaggagaccagcaacccctggctgcagctggagagaagacccaaccaggccgcccccaccaccccccccggccccacccccaccagcacccccccccacagcgacagcgagatggagatggaggccgagcactaccccaacggcgtgctgggcagcatgagcaccagaatcgtgaacggcgcctacaagcacgaggacctgcagaccgacgagagcagcatggacgacagacaccccagaagacagctgtgcggcggcaaccaggccgccaccgagagaatcatcctgttcggcagagagctgcaggccctgagcgagcagctgggcagagagtacggcaagaacctggcccacaccgagatgctgcaggacgccttcagcctgctggcctacagcgacccctggagctgccccgtgggccagcagctggaccccatccagagagagcccgtgtgcgccgccctgaacagcgccatcctggagagccagaacctgcccaagcagccccccctgatgctggccctgggccaggccagcgagtgcctgagactgatggccagagccggcctgggcagctgcagcttcgccagagtggacgactacctgcactag

SEQ ID NO: 96280 - DNA, 540 bp, synthetic construct
  misc_feature 1..540: note = Description of Artificial Sequence: Synthetic coding sequence
  source 1..540: mol_type = other DNA
atgggctgggacaagcacagctacggctaccacggcgacgacggccacagcttctgcagcagcggcaccggccagccctacggccccaccttcaccaccggcgacgtgatcggctgctgcgtgaacctgatcaacggcacctgcttctacaccaagaacggccacagcctgggcatcgccttcaccgacctgcccgccaacctgtaccccaccgtgggcctgcagacccccggcgagatcgtggacgccaacttcggccagcagcccttcctgttcgacatcgaggactacatgagagagtggagagccaaggtgcagggcaccgtgcactgcttccccatcagcgccagactgggcgagtggcaggccgtgctgcagaacatggtgagcagctacctggtgcaccacggctactgcgccaccgccaccgccttcgccagaatgaccgagacccccatccaggaggagcaggccagcatcaagaacagacagagcaaggtgtacagcaccttccccttccccttcctgacctgcccctag

SEQ ID NO: 96281 - DNA, 1785 bp, synthetic construct
  misc_feature 1..1785: note = Description of Artificial Sequence: Synthetic coding sequence
  source 1..1785: mol_type = other DNA
atggccgccgccaccgccgaccccggcgccggcaacccccagcccggcgacagcagcggcggcggcgccggcggcggcctgcccagccccggcgagcaggagctgagcagaagactgcagagactgtaccccgccgtgaaccagcaggagacccccctgcccagaagctggagccccaaggacaagtacaactacatcggcctgagccagggcaacctgagagtgcactacaagggccacggcaagaaccacaaggacgccgccagcgtgagagccacccaccccatccccgccgcctgcggcatctactacttcgaggtgaagatcgtgagcaagggcagagacggctacatgggcatcggcctgagcgcccagggcgtgaacatgaacagactgcccggcatcgccttcaccgacctgcccgccaacctgtaccccaccgtgggcctgcagacccccggcgagatcgtggacgccaacttcggccagcagcccttcctgttcgacatcgaggactacatgagagagtggagagccaaggtgcagggcaccgtgcactgcttccccatcagcgccagactgggcgagtggcaggccgtgctgcagaacatggtgagcagctacctggtgcaccacggctactgcgccaccgccaccgccttcgccagaatgaccgagacccccatccaggaggagcaggccagcatcaagaacagacagaagatccagaagctggtgctggagggcagagtgggcgaggccatcgagaccacccagagattctaccccggcctgctggagcacaaccccaacctgctgttcatgctgaagtgcagacagttcgtggagatggtgaacggcaccgacagcgaggtgagaagcctgagcagcagaagccccaagagccaggacagctaccccggcagccccagcctgagccccagacacggccccagcagcagccacatgcacaacaccggcgccgacagccccagctgcagcaacggcgtggccagcaccaagagcaagcagaaccacagcaagtaccccgcccccagcagcagcagcagcagcagcagcagcagcagcagcagcagccccagcagcgtgaactacagcgagagcaacagcaccgacagcaccaagagccagcaccacagcagcaccagcaaccaggagaccagcaacccctggctgcagctggagagaagacccaaccaggccgcccccaccaccccccccggccccacccccaccagcacccccccccacagcgacagcgagatggagatggaggccgagcactaccccaacggcgtgctgggcagcatgagcaccagaatcgtgaacggcgcctacaagcacgaggacctgcagaccgacgagagcagcatggacgacagacaccccagaagacagctgtgcggcggcaaccaggccgccaccgagagaatcatcctgttcggcagagagctgcaggccctgagcgagcagctgggcagagagtacggcaagaacctggcccacaccgagatgctgcaggacgccttcagcctgctggcctacagcgacccctggagctgccccgtgggccagcagctggaccccatccagagagagcccgtgtgcgccgccctgaacagcgccatcctggagagccagaacctgcccaagcagccccccctgatgctggccctgggccaggccagcgagtgcctgagactgatggccagagccggcctgggcagctgcagcttcgccagagtggacgactacctgcactag

SEQ ID NO: 96282 - DNA, 1176 bp, synthetic construct
  misc_feature 1..1176: note = Description of Artificial Sequence: Synthetic coding sequence
  source 1..1176: mol_type = other DNA
atgagagagtggagagccaaggtgcagggcaccgtgcactgcttccccatcagcgccagactgggcgagtggcaggccgtgctgcagaacatggtgagcagctacctggtgcaccacggctactgcgccaccgccaccgccttcgccagaatgaccgagacccccatccaggaggagcaggccagcatcaagaacagacagaagatccagaagctggtgctggagggcagagtgggcgaggccatcgagaccacccagagattctaccccggcctgctggagcacaaccccaacctgctgttcatgctgaagtgcagacagttcgtggagatggtgaacggcaccgacagcgaggtgagaagcctgagcagcagaagccccaagagccaggacagctaccccggcagccccagcctgagccccagacacggccccagcagcagccacatgcacaacaccggcgccgacagccccagctgcagcaacggcgtggccagcaccaagagcaagcagaaccacagcaagtaccccgcccccagcagcagcagcagcagcagcagcagcagcagcagcagcagccccagcagcgtgaactacagcgagagcaacagcaccgacagcaccaagagccagcaccacagcagcaccagcaaccaggagaccagcgacagcgagatggagatggaggccgagcactaccccaacggcgtgctgggcagcatgagcaccagaatcgtgaacggcgcctacaagcacgaggacctgcagaccgacgagagcagcatggacgacagacaccccagaagacagctgtgcggcggcaaccaggccgccaccgagagaatcatcctgttcggcagagagctgcaggccctgagcgagcagctgggcagagagtacggcaagaacctggcccacaccgagatgctgcaggacgccttcagcctgctggcctacagcgacccctggagctgccccgtgggccagcagctggaccccatccagagagagcccgtgtgcgccgccctgaacagcgccatcctggagagccagaacctgcccaagcagccccccctgatgctggccctgggccaggccagcgagtgcctgagactgatggccagagccggcctgggcagctgcagcttcgccagagtggacgactacctgcactag

SEQ ID NO: 96283 - DNA, 3267 bp, synthetic construct
  misc_feature 1..3267: note = Description of Artificial Sequence: Synthetic coding sequence
  source 1..3267: mol_type = other DNA
atggccctgcacttccagagcctggccgagctggaggtgctgtgcacccacctgtacatcggcaccgacctgacccagagaatcgaggccgagaaggccctgctggagctgatcgacagccccgagtgcctgagcaagtgccagctgctgctggagcagggcaccaccagctacgcccagctgctggccgccacctgcctgagcaagctggtgagcagagtgagccccctgcccgtggagcagagaatggacatcagaaactacatcctgaactacgtggccagccagcccaagctggcccccttcgtgatccaggccctgatccaggtgatcgccaagatcaccaagctgggctggttcgaggtgcagaaggaccagttcgtgttcagagagatcatcgccgacgtgaagaagttcctgcagggcaccgtggagcactgcatcatcggcgtgatcatcctgagcgagctgacccaggagatgaacctggtggactacagcagacccagcgccaagcacagaaagatcgccaccagcttcagagacaccagcctgaaggacgtgctggtgctggcctgcagcctgctgaaggaggtgttcgccaagcccctgaacctgcaggaccagtgccagcagaacctggtgatgcaggtgctgaagctggtgctgaactgcctgaacttcgacttcatcggcagcagcgccgacgagagcgccgacgacctgtgcaccgtgcagatccccaccacctggagaaccatcttcctggagcccgagaccctggacctgttcttcaacctgtaccacagcctgccccccctgctgagccagctggccctgagctgcctggtgcagttcgccagcaccagaagaagcctgttcaacagccccgagagagccaagtacctgggcaacctgatcaagggcgtgaagagaatcctggagaacccccagggcctgagcgaccccggcaactaccacgagttctgcagattcctggccagactgaagaccaactaccagctgggcgagctggtgatggtgaaggagtaccccgaggtgatcagactgatcgccaacttcaccatcaccagcctgcagcactgggagttcgcccccaacagcgtgcactacctgctgaccctgtggcagagaatggtggccagcgtgcccttcgtgaagagcaccgagccccacctgctggacacctacgcccccgagatcaccaaggccttcatcaccagcagactggacagcgtggccatcgtggtgagagaccacctggacgaccccctggacgacaccgccaccgtgttccagcagctggagcagctgtgcaccgtgagcagatgcgagtacgagaagacctgcgccctgctggtgcagctgttcgaccagaacgcccagaactaccagaagctgctgcacccctacagcggcgtgaccgtggacatcaccatccaggagggcagactggcctggctggtgtacctggtgggcaccgtggtgggcggcagactgacctacaccagcaccgacgagcacgacgccatggacggcgagctgagctgcagagtgttccagctgatcagcctgatggacaccggcctgcccagatgctgcaacgagaagatcgagctggccatcctgtggttcctggaccagttcagaaagacctacgtgggcgaccagctgcagagaaccagcaaggtgtacgccagaatgagcgaggtgctgggcatcaccgacgacaaccacgtgctggagaccttcatgaccaagatcgtgaccaacctgaagtactggggcagatacgagcccgtgatcagcagaaccctgcagttcctgaacgacctgagcgtgggctacatcctgctgaagaagctggtgaagatcgacgccgtgaagttcatgctgaagaaccacaccagcgagcacttccccttcctgggcatcagcgacaaccacagcctgagcgacttcagatgcagaaccaccttctacaccgccctgaccagactgctgatggtggacctgggcgaggacgaggacgagttcgagaacttcatgctgcccctgaccgtggccttcgagaccgtgctgcagatcttcaacaacaacttcaagcaggaggacgtgaagagaatgctgatcggcctggccagagacctgagaggcatcgccttcgccctgaacaccaagaccagctacaccatgctgttcgactggatgtaccccacctacctgcccctgctgcagaacgccgtggagagatggtacggcgagcccacctgcaccacccccatcctgaagctgatggccgagctgatgcagaacagaagccagagactgaacttcgacgtgagcagccccaacggcatcctgctgttcagagaggccagcaagatggtgtgcacctacggcaaccagatcctgagcctgggcagcctgagcaaggaccagatctaccccatgaagctgaagggcatcagcatctgctacagcgccctgaagagcgccctgtgcggcaactacgtgagcttcggcgtgttcaagctgtacggcgacaaccacttcgacaacgtgctgcaggccttcgtgaagatgctgctgagcgtgagccacagcgacctgctgcagtacagaaagctgagccagagctactaccccctgctggagtgcctgacccaggaccacatgagcttcatcatcaacctggagccccccgtgctgatgtacgtgctgaccagcatcagcgagggcctgaccaccctggacaccgtggtgagcagcagctgctgcaccagcctggactacatcgtgacctacctgttcaagcacatcgccaaggagggcaagaagcccctgagatgcagagaggccacccaggccggccagagactgctgcacttcatgcagcagaaccccgacgtgctgcagcagatgatgagcgtgctgatgaacaccatcgtgttcgaggactgcagaaaccagtggagcgtgagcagacccctgctgggcctgatcctgctgaacgagaagtacttcagcgagctgagagccagcctgatcaacagccagcccctgcccaagcaggaggtgctggcccagtgcttcagaaacctgatggagggcgtggagcagaacctgagcgtgaagaacagagacagattcacccagaacctgagcgtgttcagaagagacgtggccgaggccctgagaagcgacggcaacaccgagccctgcagcctggacatgatgagctag

SEQ ID NO: 96284 - DNA, 1557 bp, synthetic construct
  misc_feature 1..1557: note = Description of Artificial Sequence: Synthetic coding sequence
  source 1..1557: mol_type = other DNA
gtgtacgccagaatgagcgaggtgctgggcatcaccgacgacaaccacgtgctggagaccttcatgaccaagatcgtgaccaacctgaagtactggggcagatacgagcccgtgatcagcagaaccctgcagttcctgaacgacctgagcgtgggctacatcctgctgaagaagctggtgaagatcgacgccgtgaagttcatgctgaagaaccacaccagcgagcacttccccttcctgggcatcagcgacaaccacagcctgagcgacttcagatgcagaaccaccttctacaccgccctgaccagactgctgatggtggacctgggcgaggacgaggacgagttcgagaacttcatgctgcccctgaccgtggccttcgagaccgtgctgcagatcttcaacaacaacttcaagcaggaggacgtgaagagaatgctgatcggcctggccagagacctgagaggcatcgccttcgccctgaacaccaagaccagctacaccatgctgttcgactggatgtaccccacctacctgcccctgctgcagaacgccgtggagagatggtacggcgagcccacctgcaccacccccatcctgaagctgatggccgagctgatgcagaacagaagccagagactgaacttcgacgtgagcagccccaacggcatcctgctgttcagagaggccagcaagatggtgtgcacctacggcaaccagatcctgagcctgggcagcctgagcaaggaccagatctaccccatgaagctgaagggcatcagcatctgctacagcgccctgaagagcgccctgtgcggcaactacgtgagcttcggcgtgttcaagctgtacggcgacaaccacttcgacaacgtgctgcaggccttcgtgaagatgctgctgagcgtgagccacagcgacctgctgcagtacagaaagctgagccagagctactaccccctgctggagtgcctgacccaggaccacatgagcttcatcatcaacctggagccccccgtgctgatgtacgtgctgaccagcatcagcgagggcctgaccaccctggacaccgtggtgagcagcagctgctgcaccagcctggactacatcgtgacctacctgttcaagcacatcgccaaggagggcaagaagcccctgagatgcagagaggccacccaggccggccagagactgctgcacttcatgcagcagaaccccgacgtgctgcagcagatgatgagcgtgctgatgaacaccatcgtgttcgaggactgcagaaaccagtggagcgtgagcagacccctgctgggcctgatcctgctgaacgagaagtacttcagcgagctgagagccagcctgatcaacagccagcccctgcccaagcaggaggtgctggcccagtgcttcagaaacctgatggagggcgtggagcagaacctgagcgtgaagaacagagacagattcacccagaacctgagcgtgttcagaagagacgtggccgaggccctgagaagcgacggcaacaccgagccctgcagcctggacatgatgagctag

SEQ ID NO: 96285 - DNA, 1419 bp, synthetic construct
  misc_feature 1..1419: note = Description of Artificial Sequence: Synthetic coding sequence
  source 1..1419: mol_type = other DNA
atggacatcagaaactacatcctgaactacgtggccagccagcccaagctggcccccttcgtgatccaggccctgatccaggtgatcgccaagatcaccaagctgggctggttcgaggtgcagaaggaccagttcgtgttcagagagatcatcgccgacgtgaagaagttcctgcaggtggactacagcagacccagcgccaagcacagaaagatcgccaccagcttcagagacaccagcctgaaggacgtgctggtgctggcctgcagcctgctgaaggaggtgttcgccaagcccctgaacctgcaggaccagtgccagcagaacctggtgatgcaggtgctgaagctggtgctgaactgcctgaacttcgacttcatcggcagcagcgccgacgagagcgccgacgacctgtgcaccgtgcagatccccaccacctggagaaccatcttcctggagcccgagaccctggacctgttcttcaacctgtaccacagcctgccccccctgctgagccagctggccctgagctgcctggtgcagttcgccagcaccagaagaagcctgttcaacagccccgagagagccaagtacctgggcaacctgatcaagggcgtgaagagaatcctggagaacccccagggcctgagcgaccccggcaactaccacgagttctgcagattcctggccagactgaagaccaactaccagctgggcgagctggtgatggtgaaggagtaccccgaggtgatcagactgatcgccaacttcaccatcaccagcctgcagcactgggagttcgcccccaacagcgtgcactacctgctgaccctgtggcagagaatggtggccagcgtgcccttcgtgaagagcaccgagccccacctgctggacacctacgcccccgagatcaccaaggccttcatcaccagcagactggacagcgtggccatcgtggtgagagaccacctggacgaccccctggacgacaccgccaccgtgttccagcagctggagcagctgtgcaccgtgagcagatgcgagtacgagaagacctgcgccctgctggtgcagctgttcgaccagaacgcccagaactaccagaagctgctgcacccctacagcggcgtgaccgtggacatcaccatccaggagggcagactggcctggctggtgtacctggtgggcaccgtggtgggcggcagactgacctacaccagcaccgacgagcacgacgccatggacggcgagctgagctgcagagtgttccagctgatcagcctgatggacaccggcctgcccagatgctgcaacgagaagatcgagctggccatcctgtggttcctggaccagttcagaaagacctacgtgggcgaccagctgcagagaaccagcaagaagaccttcatctacctgtag

SEQ ID NO: 96286 - DNA, 9675 bp, synthetic construct
  misc_feature 1..9675: note = Description of Artificial Sequence: Synthetic coding sequence
  source 1..9675: mol_type = other DNA
atgagaagaagcaaggccgacgtggagagatacatcgccagcgtgcagggcagcacccccagccccagacagaagagcatgaagggcttctacttcgccaagctgtactacgaggccaaggagtacgacctggccaagaagtacatctgcacctacatcaacgtgcaggagagagaccccaaggcccacagattcctgggcctgctgtacgagctggaggagaacaccgacaaggccgtggagtgctacagaagaagcgtggagctgaaccccacccagaaggacctggtgctgaagatcgccgagctgctgtgcaagaacgacgtgaccgacggcagagccaagtactggctggagagagccgccaagctgttccccggcagccccgccatctacaagctgaaggagcagctgctggactgcgagggcgaggacggctggaacaagctgttcgacctgatccagagcgagctgtacgtgagacccgacgacgtgcacgtgaacatcagactggtggaggtgtacagaagcaccaagagactgaaggacgccgtggcccactgccacgaggccgagagaaacatcgccctgagaagcagcctggagtggaacagctgcgtggtgcagaccctgaaggagtacctggagagcctgcagtgcctggagagcgacaagagcgactggagagccaccaacaccgacctgctgctggcctacgccaacctgatgctgctgaccctgagcaccagagacgtgcaggagagcagagagctgctgcagagcttcgacagcgccctgcagagcgtgaagagcctgggcggcaacgacgagctgagcgccaccttcctggagatgaagggccacttctacatgcacgccggcagcctgctgctgaagatgggccagcacagcagcaacgtgcagtggagagccctgagcgagctggccgccctgtgctacctgatcgccttccaggtgcccagacccaagatcaagctgatcaagggcgaggccggccagaacctgctggagatgatggcctgcgacagactgagccagagcggccacatgctgctgaacctgagcagaggcaagcaggacttcctgaaggagatcgtggagaccttcgccaacaagagcggccagagcgccctgtacgacgccctgttcagcagccagagccccaaggacaccagcttcctgggcagcgacgacatcggcaacatcgacgtgagagagcccgagctggaggacctgaccagatacgacgtgggcgccatcagagcccacaacggcagcctgcagcacctgacctggctgggcctgcagtggaacagcctgcccgccctgcccggcatcagaaagtggctgaagcagctgttccaccacctgccccacgagaccagcagactggagaccaacgcccccgagagcatctgcatcctggacctggaggtgttcctgctgggcgtggtgtacaccagccacctgcagctgaaggagaagtgcaacagccaccacagcagctaccagcccctgtgcctgcccctgcccgtgtgcaagcagctgtgcaccgagagacagaagagctggtgggacgccgtgtgcaccctgatccacagaaaggccgtgcccggcaacgtggccaagctgagactgctggtgcagcacgagatcaacaccctgagagcccaggagaagcacggcctgcagcccgccctgctggtgcactgggccgagtgcctgcagaagaccggcagcggcctgaacagcttctacgaccagagagagtacatcggcagaagcgtgcactactggaagaaggtgctgcccctgctgaagatcatcaagaagaagaacagcatccccgagcccatcgaccccctgttcaagcacttccacagcgtggacatccaggccagcgagatcgtggagtacgaggaggacgcccacatcaccttcgccatcctggacgccgtgaacggcaacatcgaggacgccgtgaccgccttcgagagcatcaagagcgtggtgagctactggaacctggccctgatcttccacagaaaggccgaggacatcgagaacgacgccctgagccccgaggagcaggaggagtgcaagaactacctgagaaagaccagagactacctgatcaagatcatcgacgacagcgacagcaacctgagcgtggtgaagaagctgcccgtgcccctggagagcgtgaaggagatgctgaacagcgtgatgcaggagctggaggactacagcgagggcggccccctgtacaagaacggcagcctgagaaacgccgacagcgagatcaagcacagcacccccagccccaccagatacagcctgagccccagcaagagctacaagtacagccccaagaccccccccagatgggccgaggaccagaacagcctgctgaagatgatctgccagcaggtggaggccatcaagaaggagatgcaggagctgaagctgaacagcagcaacagcgccagcccccacagatggcccaccgagaactacggccccgacagcgtgcccgacggctaccagggcagccagaccttccacggcgcccccctgaccgtggccaccaccggccccagcgtgtactacagccagagccccgcctacaacagccagtacctgctgagacccgccgccaacgtgacccccaccaagggccccgtgtacggcatgaacagactgcccccccagcagcacatctacgcctacccccagcagatgcacaccccccccgtgcagagcagcagcgcctgcatgttcagccaggagatgtacggcccccccgccctgagattcgagagccccgccaccggcatcctgagccccagaggcgacgactacttcaactacaacgtgcagcagaccagcaccaacccccccctgcccgagcccggctacttcaccaagccccccatcgccgcccacgccagcagaagcgccgagagcaagaccatcgagttcggcaagaccaacttcgtgcagcccatgcccggcgagggcctgagacccagcctgcccacccaggcccacaccacccagcccacccccttcaagttcaacagcaacttcaagagcaacgacggcgacttcaccttcagcagcccccaggtggtgacccagcccccccccgccgcctacagcaacagcgagagcctgctgggcctgctgaccagcgacaagcccctgcagggcgacggctacagcggcgccaagcccatccccggcggccagaccatcggccccagaaacaccttcaacttcggcagcaagaacgtgagcggcatcagcttcaccgagaacatgggcagcagccagcagaagaacagcggcttcagaagaagcgacgacatgttcaccttccacggccccggcaagagcgtgttcggcacccccaccctggagaccgccaacaagaaccacgagaccgacggcggcagcgcccacggcgacgacgacgacgacggcccccacttcgagcccgtggtgcccctgcccgacaagatcgaggtgaagaccggcgaggaggacgaggaggagttcttctgcaacagagccaagctgttcagattcgacgtggagagcaaggagtggaaggagagaggcatcggcaacgtgaagatcctgagacacaagaccagcggcaagatcagactgctgatgagaagagagcaggtgctgaagatctgcgccaaccactacatcagccccgacatgaagctgacccccaacgccggcagcgacagaagcttcgtgtggcacgccctggactacgccgacgagctgcccaagcccgagcagctggccatcagattcaagacccccgaggaggccgccctgttcaagtgcaagttcgaggaggcccagagcatcctgaaggcccccggcaccaacgtggccatggccagcaaccaggccgtgagaatcgtgaaggagcccaccagccacgacaacaaggacatctgcaagagcgacgccggcaacctgaacttcgagttccaggtggccaagaaggagggcagctggtggcactgcaacagctgcagcctgaagaacgccagcaccgccaagaagtgcgtgagctgccagaacctgaaccccagcaacaaggagctggtgggcccccccctggccgagaccgtgttcacccccaagaccagccccgagaacgtgcaggacagattcgccctggtgacccccaagaaggagggccactgggactgcagcatctgcctggtgagaaacgagcccaccgtgagcagatgcatcgcctgccagaacaccaagagcgccaacaagagcggcagcagcttcgtgcaccaggccagcttcaagttcggccagggcgacctgcccaagcccatcaacagcgacttcagaagcgtgttcagcaccaaggagggccagtgggactgcagcgcctgcctggtgcagaacgagggcagcagcaccaagtgcgccgcctgccagaaccccagaaagcagagcctgcccgccaccagcatccccacccccgccagcttcaagttcggcaccagcgagaccagcaagaccctgaagagcggcttcgaggacatgttcgccaagaaggagggccagtgggactgcagcagctgcctggtgagaaacgaggccaacgccaccagatgcgtggcctgccagaaccccgacaagcccagccccagcaccagcgtgcccgcccccgccagcttcaagttcggcaccagcgagaccagcaaggcccccaagagcggcttcgagggcatgttcaccaagaaggagggccagtgggactgcagcgtgtgcctggtgagaaacgaggccagcgccaccaagtgcatcgcctgccagaaccccggcaagcagaaccagaccaccagcgccgtgagcacccccgccagcagcgagaccagcaaggcccccaagagcggcttcgagggcatgttcaccaagaaggagggccagtgggactgcagcgtgtgcctggtgagaaacgaggccagcgccaccaagtgcatcgcctgccagaaccccggcaagcagaaccagaccaccagcgccgtgagcacccccgccagcagcgagaccagcaaggcccccaagagcggcttcgagggcatgttcaccaagaaggagggccagtgggactgcagcgtgtgcctggtgagaaacgaggccagcgccaccaagtgcatcgcctgccagtgccccagcaagcagaaccagaccaccgccatcagcacccccgccagcagcgagatcagcaaggcccccaagagcggcttcgagggcatgttcatcagaaagggccagtgggactgcagcgtgtgctgcgtgcagaacgagagcagcagcctgaagtgcgtggcctgcgacgccagcaagcccacccacaagcccatcgccgaggcccccagcgccttcaccctgggcagcgagatgaagctgcacgacagcagcggcagccaggtgggcaccggcttcaagagcaacttcagcgagaaggccagcaagttcggcaacaccgagcagggcttcaagttcggccacgtggaccaggagaacagccccagcttcatgttccagggcagcagcaacaccgagttcaagagcaccaaggagggcttcagcatccccgtgagcgccgacggcttcaagttcggcatcagcgagcccggcaaccaggagaagaagagcgagaagcccctggagaacggcaccggcttccaggcccaggacatcagcggccagaagaacggcagaggcgtgatcttcggccagaccagcagcaccttcaccttcgccgacctggccaagagcaccagcggcgagggcttccagttcggcaagaaggaccccaacttcaagggcttcagcggcgccggcgagaagctgttcagcagccagtacggcaagatggccaacaaggccaacaccagcggcgacttcgagaaggacgacgacgcctacaagaccgaggacagcgacgacatccacttcgagcccgtggtgcagatgcccgagaaggtggagctggtgaccggcgaggaggacgagaaggtgctgtacagccagagagtgaagctgttcagattcgacgccgaggtgagccagtggaaggagagaggcctgggcaacctgaagatcctgaagaacgaggtgaacggcaagctgagaatgctgatgagaagagagcaggtgctgaaggtgtgcgccaaccactggatcaccaccaccatgaacctgaagcccctgagcggcagcgacagagcctggatgtggctggccagcgacttcagcgacggcgacgccaagctggagcagctggccgccaagttcaagacccccgagctggccgaggagttcaagcagaagttcgaggagtgccagagactgctgctggacatccccctgcagaccccccacaagctggtggacaccggcagagccgccaagctgatccagagagccgaggagatgaagagcggcctgaaggacttcaagaccttcctgaccaacgaccagaccaaggtgaccgaggaggagaacaagggcagcggcaccggcgccgccggcgccagcgacaccaccatcaagcccaaccccgagaacaccggccccaccctggagtgggacaactacgacctgagagaggacgccctggacgacagcgtgagcagcagcagcgtgcacgccagccccctggccagcagccccgtgagaaagaacctgttcagattcggcgagagcaccaccggcttcaacttcagcttcaagagcgccctgagccccagcaagagccccgccaagctgaaccagagcggcaccagcgtgggcaccgacgaggagagcgacgtgacccaggaggaggagagagacggccagtacttcgagcccgtggtgcccctgcccgacctggtggaggtgagcagcggcgaggagaacgagcaggtggtgttcagccacagagccaagctgtacagatacgacaaggacgtgggccagtggaaggagagaggcatcggcgacatcaagatcctgcagaactacgacaacaagcaggtgagaatcgtgatgagaagagaccaggtgctgaagctgtgcgccaaccacagaatcacccccgacatgaccctgcagaacatgaagggcaccgagagagtgtggctgtggaccgcctgcgacttcgccgacggcgagagaaaggtggagcacctggccgtgagattcaagctgcaggacgtggccgacagcttcaagaagatcttcgacgaggccaagaccgcccaggagaaggacagcctgatcaccccccacgtgagcagaagcagcacccccagagagagcccctgcggcaagatcgccgtggccgtgctggaggagaccaccagagagagaaccgacgtgatccagggcgacgacgtggccgacgccaccagcgaggtggaggtgagcagcaccagcgagaccacccccaaggccgtggtgagcccccccaagttcgtgttcggcagcgagagcgtgaagagcatcttcagcagcgagaagagcaagcccttcgccttcggcaacagcagcgccaccggcagcctgttcggcttcagcttcaacgcccccctgaagagcaacaacagcgagaccagcagcgtggcccagagcggcagcgagagcaaggtggagcccaagaagtgcgagctgagcaagaacagcgacatcgagcagagcagcgacagcaaggtgaagaacctgttcgccagcttccccaccgaggagagcagcatcaactacaccttcaagacccccgagaaggccaaggagaagaagaagcccgaggacagccccagcgacgacgacgtgctgatcgtgtacgagctgacccccaccgccgagcagaaggccctggccaccaagctgaagctgccccccaccttcttctgctacaagaacagacccgactacgtgagcgaggaggaggaggacgacgaggacttcgagaccgccgtgaagaagctgaacggcaagctgtacctggacggcagcgagaagtgcagacccctggaggagaacaccgccgacaacgagaaggagtgcatcatcgtgtgggagaagaagcccaccgtggaggagaaggccaaggccgacaccctgaagctgccccccaccttcttctgcggcgtgtgcagcgacaccgacgaggacaacggcaacggcgaggacttccagagcgagctgcagaaggtgcaggaggcccagaagagccagaccgaggagatcaccagcaccaccgacagcgtgtacaccggcggcaccgaggtgatggtgcccagcttctgcaagagcgaggagcccgacagcatcaccaagagcatcagcagccccagcgtgagcagcgagaccatggacaagcccgtggacctgagcaccagaaaggagatcgacaccgacagcaccagccagggcgagagcaagatcgtgagcttcggcttcggcagcagcaccggcctgagcttcgccgacctggccagcagcaacagcggcgacttcgccttcggcagcaaggacaagaacttccagtgggccaacaccggcgccgccgtgttcggcacccagagcgtgggcacccagagcgccggcaaggtgggcgaggacgaggacggcagcgacgaggaggtggtgcacaacgaggacatccacttcgagcccatcgtgagcctgcccgaggtggaggtgaagagcggcgaggaggacgaggagatcctgttcaaggagagagccaagctgtacagatgggacagagacgtgagccagtggaaggagagaggcgtgggcgacatcaagatcctgtggcacaccatgaagaactactacagaatcctgatgagaagagaccaggtgttcaaggtgtgcgccaaccacgtgatcaccaagaccatggagctgaagcccctgaacgtgagcaacaacgccctggtgtggaccgccagcgactacgccgacggcgaggccaaggtggagcagctggccgtgagattcaagaccaaggaggtggccgactgcttcaagaagaccttcgaggagtgccagcagaacctgatgaagctgcagaagggccacgtgagcctggccgccgagctgagcaaggagaccaaccccgtggtgttcttcgacgtgtgcgccgacggcgagcccctgggcagaatcaccatggagctgttcagcaacatcgtgcccagaaccgccgagaacttcagagccctgtgcaccggcgagaagggcttcggcttcaagaacagcatcttccacagagtgatccccgacttcgtgtgccagggcggcgacatcaccaagcacgacggcaccggcggccagagcatctacggcgacaagttcgaggacgagaacttcgacgtgaagcacaccggccccggcctgctgagcatggccaaccagggccagaacaccaacaacagccagttcgtgatcaccctgaagaaggccgagcacctggacttcaagcacgtggtgttcggcttcgtgaaggacggcatggacaccgtgaagaagatcgagagcttcggcagccccaagggcagcgtgtgcagaagaatcaccatcaccgagtgcggccagatctag

SEQ ID NO: 96287 - DNA, 1500 bp, synthetic construct
  misc_feature 1..1500: note = Description of Artificial Sequence: Synthetic coding sequence
  source 1..1500: mol_type = other DNA
atggccgacctggccaacgaggagaagcccgccatcgccccccccgtgttcgtgttccagaaggacaagggccagaagagaagcgccggcggcagcagccccgagggcggcgaggacagcgacagagaggacggcaactactgcccccccgtgaagagagagagaaccagcagcctgacccagttcccccccagccagagcgaggagagaagcagcggcttcagactgaagccccccaccctgatccacggccaggcccccagcgccggcctgcccagccagaagcccaaggagcagcagagaagcgtgctgagacccgccgtgctgcaggccccccagcccaaggccctgagccagaccgtgcccagcagcggcaccaacggcgtgagcctgcccgccgactgcaccggcgccgtgcccgccgccagccccgacaccgccgcctggagaagccccagcgaggccgccgacgaggtgtgcgccctggaggagaaggagccccagaagaacgagagcagcaacgccagcgaggaggaggcctgcgagaagaaggaccccgccacccagcaggccttcgtgttcggccagaacctgagagacagagtgaagctgatcaacgagagcgtggacgaggccgacatggagaacgccggccaccccagcgccgacacccccaccgccaccaactacttcctgcagtacatcagcagcagcctggagaacagcaccaacagcgccgacgccagcagcaacaagttcgtgttcggccagaacatgagcgagagagtgctgagcccccccaagctgaacgaggtgagcagcgacgccaacagagagaacgccgccgccgagagcggcagcgagagcagcagccaggaggccacccccgagaaggagagcctggccgagagcgccgccgcctacaccaaggccaccgccagaaagtgcctgctggagaaggtggaggtgatcaccggcgaggaggccgagagcaacgtgctgcagatgcagtgcaagctgttcgtgttcgacaagaccagccagagctgggtggagagaggcagaggcctgctgagactgaacgacatggccagcaccgacgacggcaccctgcagagcagactggtgatgagaacccagggcagcctgagactgatcctgaacaccaagctgtgggcccagatgcagatcgacaaggccagcgagaagagcatcagaatcaccgccatggacaccgaggaccagggcgtgaaggtgttcctgatcagcgccagcagcaaggacaccggccagctgtacgccgccctgcaccacagaatcctggccctgagaagcagagtggagcaggagcaggaggccaagatgcccgcccccgagcccggcgccgcccccagcaacgaggaggacgacagcgacgacgacgacgtgctggcccccagcggcgccaccgccgccggcgccggcgacgagggcgacggccagaccaccggcagcacctag

SEQ ID NO: 96288 - DNA, 1194 bp, synthetic construct
  misc_feature 1..1194: note = Description of Artificial Sequence: Synthetic coding sequence
  source 1..1194: mol_type = other DNA
gccgacgtgaccaaggccgagaagcccgccatcgccccccccgtgttcgtgttccagaaggacaagggccagaagagaagcgccggcggcagcagccccgagggcggcgaggacagcgacagagaggacggcaactactgcccccccgtgaagagagagagaaccagcagcctgacccagttcccccccagccagagcgaggagagaagcagcggcttcagactgaagccccccaccctgatccacggccaggcccccagcgccggcctgcccagccagaagcccaaggagcagcagagaagcgtgctgagacccgccgtgctgcaggccccccagcccaaggccctgagccagaccgtgcccagcagcggcaccaacggcgtgagcctgcccgccgactgcaccggcgccgtgcccgccgccagccccgacaccgccgcctggagaagccccagcgaggccgccgacgaggtgtgcgccctggaggagaaggagccccagaagaacgagagcagcaacgccagcgaggaggaggcctgcgagaagaaggaccccgccacccagcaggccttcgtgttcggccagaacctgagagacagagtgaagctgatcaacgagagcgtggacgaggccgacatggagaacgccggccaccccagcgccgacacccccaccgccaccaactacttcctgcagtacatcagcagcagcctggagaacagcaccaacagcgccgacgccagcagcaacaagttcgtgttcggccagaacatgagcgagagagtgctgagcccccccaagctgaacgaggtgagcagcgacgccaacagagagaacgccgccgccgagagcggcagcgagagcagcagccaggaggccacccccgagaaggagagcctggccgagagcgccgccgcctacaccaaggccaccgccagaaagtgcctgctggagaaggtggaggtgatcaccggcgaggaggccgagagcaacgtgctgcagatgcagtgcaagctgttcgtgttcgacaagaccagccagagctggtggctgctgagacacccccaccccagccaccccgccgtgggcccctgcctgtgcggcgagcagcccgccctgtgcccctgccccggcctgcccaactacagacccggcacccccgcccagctgggcggcctgctggtgagagtgtag

SEQ ID NO: 96289 - DNA, 1704 bp, synthetic construct
  misc_feature 1..1704: note = Description of Artificial Sequence: Synthetic coding sequence
  source 1..1704: mol_type = other DNA
atggccgacctggccaacgaggagaagcccgccatcgccccccccgtgttcgtgttccagaaggacaagggccagaagagccccgccgagcagaagaacctgagcgacagcggcgaggagcccagaggcgaggccgaggccccccaccacggcaccggccaccccgagagcgccggcgagcacgccctggagccccccgcccccgccggcgccagcgccagcaccccccccccccccgcccccgaggcccagctgccccccttccccagagagctggccggcagaagcgccggcggcagcagccccgagggcggcgaggacagcgacagagaggacggcaactactgcccccccgtgaagagagagagaaccagcagcctgacccagttcccccccagccagagcgaggagagaagcagcggcttcagactgaagccccccaccctgatccacggccaggcccccagcgccggcctgcccagccagaagcccaaggagcagcagagaagcgtgctgagacccgccgtgctgcaggccccccagcccaaggccctgagccagaccgtgcccagcagcggcaccaacggcgtgagcctgcccgccgactgcaccggcgccgtgcccgccgccagccccgacaccgccgcctggagaagccccagcgaggccgccgacgaggtgtgcgccctggaggagaaggagccccagaagaacgagagcagcaacgccagcgaggaggaggcctgcgagaagaaggaccccgccacccagcaggccttcgtgttcggccagaacctgagagacagagtgaagctgatcaacgagagcgtggacgaggccgacatggagaacgccggccaccccagcgccgacacccccaccgccaccaactacttcctgcagtacatcagcagcagcctggagaacagcaccaacagcgccgacgccagcagcaacaagttcgtgttcggccagaacatgagcgagagagtgctgagcccccccaagctgaacgaggtgagcagcgacgccaacagagagaacgccgccgccgagagcggcagcgagagcagcagccaggaggccacccccgagaaggagagcctggccgagagcgccgccgcctacaccaaggccaccgccagaaagtgcctgctggagaaggtggaggtgatcaccggcgaggaggccgagagcaacgtgctgcagatgcagtgcaagctgttcgtgttcgacaagaccagccagagctgggtggagagaggcagaggcctgctgagactgaacgacatggccagcaccgacgacggcaccctgcagagcagactggtgatgagaacccagggcagcctgagactgatcctgaacaccaagctgtgggcccagatgcagatcgacaaggccagcgagaagagcatcagaatcaccgccatggacaccgaggaccagggcgtgaaggtgttcctgatcagcgccagcagcaaggacaccggccagctgtacgccgccctgcaccacagaatcctggccctgagaagcagagtggagcaggagcaggaggccaagatgcccgcccccgagcccggcgccgcccccagcaacgaggaggacgacagcgacgacgacgacgtgctggcccccagcggcgccaccgccgccggcgccggcgacgagggcgacggccagaccaccggcagcacctag

SEQ ID NO: 96290 - DNA, 1689 bp, synthetic construct
  misc_feature 1..1689: note = Description of Artificial Sequence: Synthetic coding sequence
  source 1..1689: mol_type = other DNA
atggccgacctggccaacgaggagaagcccgccatcgccccccccgtgttcgtgttccagaaggacaagggccagaagagccccgccgagcagaagaacctgagcgacagcggcgaggagcccagaggcgaggccgaggccccccaccacggcaccggccaccccgagagcgccggcgagcacgccctggagccccccgcccccgccggcgccagcgccagcaccccccccccccccgcccccgaggcccagctgccccccttccccagagagctggccggcagaagcgccggcggcagcagccccgagggcggcgaggacagcgacagagaggacggcaactactgcccccccgtgaagagagagagaaccagcagcctgacccagttcccccccagccagagcgaggagagaagcagcggcttcagactgaagccccccaccctgatccacggccaggcccccagcgccggcctgcccagccagaagcccaaggagcagcagagaagcgtgctgagacccgccgtgctgcaggccccccagcccaaggccctgagccagaccgtgcccagcagcggcaccaacggcgtgagcctgcccgccgactgcaccggcgccgtgcccgccgccagccccgacaccgccgcctggagaagccccagcgaggccgccgacgaggagaaggagccccagaagaacgagagcagcaacgccagcgaggaggaggcctgcgagaagaaggaccccgccacccagcaggccttcgtgttcggccagaacctgagagacagagtgaagctgatcaacgagagcgtggacgaggccgacatggagaacgccggccaccccagcgccgacacccccaccgccaccaactacttcctgcagtacatcagcagcagcctggagaacagcaccaacagcgccgacgccagcagcaacaagttcgtgttcggccagaacatgagcgagagagtgctgagcccccccaagctgaacgaggtgagcagcgacgccaacagagagaacgccgccgccgagagcggcagcgagagcagcagccaggaggccacccccgagaaggagagcctggccgagagcgccgccgcctacaccaaggccaccgccagaaagtgcctgctggagaaggtggaggtgatcaccggcgaggaggccgagagcaacgtgctgcagatgcagtgcaagctgttcgtgttcgacaagaccagccagagctgggtggagagaggcagaggcctgctgagactgaacgacatggccagcaccgacgacggcaccctgcagagcagactggtgatgagaacccagggcagcctgagactgatcctgaacaccaagctgtgggcccagatgcagatcgacaaggccagcgagaagagcatcagaatcaccgccatggacaccgaggaccagggcgtgaaggtgttcctgatcagcgccagcagcaaggacaccggccagctgtacgccgccctgcaccacagaatcctggccctgagaagcagagtggagcaggagcaggaggccaagatgcccgcccccgagcccggcgccgcccccagcaacgaggaggacgacagcgacgacgacgacgtgctggcccccagcggcgccaccgccgccggcgccggcgacgagggcgacggccagaccaccggcagcacctag

SEQ ID NO: 96291 - DNA, 1320 bp, synthetic construct
  misc_feature 1..1320: note = Description of Artificial Sequence: Synthetic coding sequence
  source 1..1320: mol_type = other DNA
atggccgacctggccaacgaggaggagagaagcagcggcttcagactgaagccccccaccctgatccacggccaggcccccagcgccggcctgcccagccagaagcccaaggagcagcagagaagcgtgctgagacccgccgtgctgcaggccccccagcccaaggccctgagccagaccgtgcccagcagcggcaccaacggcgtgagcctgcccgccgactgcaccggcgccgtgcccgccgccagccccgacaccgccgcctggagaagccccagcgaggccgccgacgaggtgtgcgccctggaggagaaggagccccagaagaacgagagcagcaacgccagcgaggaggaggcctgcgagaagaaggaccccgccacccagcaggccttcgtgttcggccagaacctgagagacagagtgaagctgatcaacgagagcgtggacgaggccgacatggagaacgccggccaccccagcgccgacacccccaccgccaccaactacttcctgcagtacatcagcagcagcctggagaacagcaccaacagcgccgacgccagcagcaacaagttcgtgttcggccagaacatgagcgagagagtgctgagcccccccaagctgaacgaggtgagcagcgacgccaacagagagaacgccgccgccgagagcggcagcgagagcagcagccaggaggccacccccgagaaggagagcctggccgagagcgccgccgcctacaccaaggccaccgccagaaagtgcctgctggagaaggtggaggtgatcaccggcgaggaggccgagagcaacgtgctgcagatgcagtgcaagctgttcgtgttcgacaagaccagccagagctgggtggagagaggcagaggcctgctgagactgaacgacatggccagcaccgacgacggcaccctgcagagcagactggtgatgagaacccagggcagcctgagactgatcctgaacaccaagctgtgggcccagatgcagatcgacaaggccagcgagaagagcatcagaatcaccgccatggacaccgaggaccagggcgtgaaggtgttcctgatcagcgccagcagcaaggacaccggccagctgtacgccgccctgcaccacagaatcctggccctgagaagcagagtggagcaggagcaggaggccaagatgcccgcccccgagcccggcgccgcccccagcaacgaggaggacgacagcgacgacgacgacgtgctggcccccagcggcgccaccgccgccggcgccggcgacgagggcgacggccagaccaccggcagcacctag

SEQ ID NO: 96292 - DNA, 2190 bp, synthetic construct
  misc_feature 1..2190: note = Description of Artificial Sequence: Synthetic coding sequence
  source 1..2190: mol_type = other DNA
atgagcggccagcccccccccccccccccccagcagcagcagcagcagcagcagctgagcccccccccccccgccgccctggcccccgtgagcggcgtggtgctgcccgccccccccgccgtgagcgccggcagcagccccgccggcagccccggcggcggcgccggcggcgagggcctgggcgccgccgccgccgccctgctgctgcaccccccccccccccccccccccgccaccgccgcccccccccccccccccccccccccccccccccccgccagcgccgccgcccccgccagcggcccccccgccccccccggcctggccgccggccccggccccgccggcggcgcccccacccccgccctggtggccggcagcagcgccgccgcccccttcccccacggcgacagcgccctgaacgagcaggagaaggagctgcagagaagactgaagagactgtaccccgccgtggacgagcaggagacccccctgcccagaagctggagccccaaggacaagttcagctacatcggcctgagccagaacaacctgagagtgcactacaagggccacggcaagacccccaaggacgccgccagcgtgagagccacccaccccatccccgccgcctgcggcatctactacttcgaggtgaagatcgtgagcaagggcagagacggctacatgggcatcggcctgagcgcccagggcgtgaacatgaacagactgcccggctgggacaagcacagctacggctaccacggcgacgacggccacagcttctgcagcagcggcaccggccagccctacggccccaccttcaccaccggcgacgtgatcggctgctgcgtgaacctgatcaacaacacctgcttctacaccaagaacggccacagcctgggcatcgccttcaccgacctgccccccaacctgtaccccaccgtgggcctgcagacccccggcgaggtggtggacgccaacttcggccagcaccccttcgtgttcgacatcgaggactacatgagagagtggagaaccaagatccaggcccagatcgacagattccccatcggcgacagagagggcgagtggcagaccatgatccagaagatggtgagcagctacctggtgcaccacggctactgcgccaccgccgaggccttcgccagaagcaccgaccagaccgtgctggaggagctggccagcatcaagaacagacagagaatccagaagctggtgctggccggcagaatgggcgaggccatcgagaccacccagcagctgtaccccagcctgctggagagaaaccccaacctgctgttcaccctgaaggtgagacagttcatcgagatggtgaacggcaccgacagcgaggtgagatgcctgggcggcagaagccccaagagccaggacagctaccccgtgagccccagacccttcagcagccccagcatgagccccagccacggcatgaacatccacaacctggccagcggcaagggcagcaccgcccacttcagcggcttcgagagctgcagcaacggcgtgatcagcaacaaggcccaccagagctactgccacagcaacaagcaccagagcagcaacctgaacgtgcccgagctgaacagcatcaacatgagcagaagccagcaggtgaacaacttcaccagcaacgacgtggacatggagaccgaccactacagcaacggcgtgggcgagaccagcagcaacggcttcctgaacggcagcagcaagcacgaccacgagatggaggactgcgacaccgagatggaggtggacagcagccagctgagaagacagctgtgcggcggcagccaggccgccatcgagagaatgatccacttcggcagagagctgcaggccatgagcgagcagctgagaagagactgcggcaagaacaccgccaacaagaagatgctgaaggacgccttcagcctgctggcctacagcgacccctggaacagccccgtgggcaaccagctggaccccatccagagagagcccgtgtgcagcgccctgaacagcgccatcctggagacccacaacctgcccaagcagccccccctggccctggccatgggccaggccacccagtgcctgggcctgatggccagaagcggcatcggcagctgcgccttcgccaccgtggaggactacctgcactag

SEQ ID NO: 96293 - DNA, 1176 bp, synthetic construct
  misc_feature 1..1176: note = Description of Artificial Sequence: Synthetic coding sequence
  source 1..1176: mol_type = other DNA
atgagcggccagcccccccccccccccccccagcagcagcagcagcagcagcagctgagcccccccccccccgccgccctggcccccgtgagcggcgtggtgctgcccgccccccccgccgtgagcgccggcagcagccccgccggcagccccggcggcggcgccggcggcgagggcctgggcgccgccgccgccgccctgctgctgcaccccccccccccccccccccccgccaccgccgcccccccccccccccccccccccccccccccccccgccagcgccgccgcccccgccagcggcccccccgccccccccggcctggccgccggccccggccccgccggcggcgcccccacccccgccctggtggccggcagcagcgccgccgcccccttcccccacggcgacagcgccctgaacgagcaggagaaggagctgcagagaagactgaagagactgtaccccgccgtggacgagcaggagacccccctgcccagaagctggagccccaaggacaagttcagctacatcggcctgagccagaacaacctgagagtgcactacaagggccacggcaagacccccaaggacgccgccagcgtgagagccacccaccccatccccgccgcctgcggcatctactacttcgaggtgaagatcgtgagcaagggcagagacggctacatgggcatcggcctgagcgcccagggcgtgaacatgaacagactgcccggctgggacaagcacagctacggctaccacggcgacgacggccacagcttctgcagcagcggcaccggccagccctacggccccaccttcaccaccggcgacgtgatcggctgctgcgtgaacctgatcaacaacacctgcttctacaccaagaacggccacagcctgggcatcgccttcaccgacctgccccccctggactaccccgtgagccccagacccttcagcagccccagcatgagccccagccacggcatgaacatccacaacctggccagcggcaagggcagcaccgcccacttcagcggcttcgagagctgcagcaacggcgtgatcagcaacaaggcccaccagagctactgccacagcaacaagcaccagagcagcaacgagtgcaccagaaccaagcagtacaagtacgtgaagatcaccgccagctag

SEQ ID NO: 96294 - DNA, 1503 bp, synthetic construct
  misc_feature 1..1503: note = Description of Artificial Sequence: Synthetic coding sequence
  source 1..1503: mol_type = other DNA
atgggcatcggcctgagcgcccagggcgtgaacatgaacagactgcccggctgggacaagcacagctacggctaccacggcgacgacggccacagcttctgcagcagcggcaccggccagccctacggccccaccttcaccaccggcgacgtgatcggctgctgcgtgaacctgatcaacaacacctgcttctacaccaagaacggccacagcctgggcatcgccttcaccgacctgccccccaacctgtaccccaccgtgggcctgcagacccccggcgaggtggtggacgccaacttcggccagcaccccttcgtgttcgacatcgaggactacatgagagagtggagaaccaagatccaggcccagatcgacagattccccatcggcgacagagagggcgagtggcagaccatgatccagaagatggtgagcagctacctggtgcaccacggctactgcgccaccgccgaggccttcgccagaagcaccgaccagaccgtgctggaggagctggccagcatcaagaacagacagagaatccagaagctggtgctggccggcagaatgggcgaggccatcgagaccacccagcagctgtaccccagcctgctggagagaaaccccaacctgctgttcaccctgaaggtgagacagttcatcgagatggtgaacggcaccgacagcgaggtgagatgcctgggcggcagaagccccaagagccaggacagctaccccgtgagccccagacccttcagcagccccagcatgagccccagccacggcatgaacatccacaacctggccagcggcaagggcagcaccgcccacttcagcggcttcgagagctgcagcaacggcgtgatcagcaacaaggcccaccagagctactgccacagcaacaagcaccagagcagcaacctgaacgtgcccgagctgaacagcatcaacatgagcagaagccagcaggtgaacaacttcaccagcaacgacgtggacatggagaccgaccactacagcaacggcgtgggcgagaccagcagcaacggcttcctgaacggcagcagcaagcacgaccacgagatggaggactgcgacaccgagatggaggtggacagcagccagctgagaagacagctgtgcggcggcagccaggccgccatcgagagaatgatccacttcggcagagagctgcaggccatgagcgagcagctgagaagagactgcggcaagaacaccgccaacaagaagatgctgaaggacgccttcagcctgctggcctacagcgacccctggaacagccccgtgggcaaccagctggaccccatccagagagagcccgtgtgcagcgccctgaacagcgccatcctggagacccacaacctgcccaagcagccccccctggccctggccatgggccaggccacccagtgcctgggcctgatggccagaagcggcatcggcagctgcgccttcgccaccgtggaggactacctgcactag

SEQ ID NO: 96295 - DNA, 387 bp, synthetic construct
  misc_feature 1..387: note = Description of Artificial Sequence: Synthetic coding sequence
  source 1..387: mol_type = other DNA
atgttcgacgtgaccagcagagtgacctacaagaacgtgcccaactggcacagagacctggtgagagtgtgcgagaacatccccatcgtgctgtgcggcaacaaggtggacatcaaggacagaaaggtgaaggccaagagcatcgtgttccacagaaagaagaacctgcagtactacgacatcagcgccaagagcaactacaacttcgagaagcccttcctgtggctggccagaaagctgatcggcgaccccaacctggagttcgtggccatgcccgccctggccccccccgaggtggtgatggaccccgccctggccgcccagtacgagcacgacctggaggtggcccagaccaccgccctgcccgacgaggacgacgacctgtag

SEQ ID NO: 96296 - DNA, 702 bp, synthetic construct
  misc_feature 1..702: note = Description of Artificial Sequence: Synthetic coding sequence
  source 1..702: mol_type = other DNA
atggccgcccagggcgagccccaggtgcagttcaagctggtgctggtgggcgacggcggcaccggcaagaccaccttcgtgaagagacacctgaccggcgagttcgagaagaagtacgtggccaccctgggcgtggaggtgcaccccctggtgttccacaccaacagaggccccatcaagttcaacgtgtgggacaccgccggccaggagaagttcggcggcctgagagacggctactacatccaggagatgggcatccaccacgtggcccacgccggcctggagctgatgagcagcgcccagtgcgccatcatcatgttcgacgtgaccagcagagtgacctacaagaacgtgcccaactggcacagagacctggtgagagtgtgcgagaacatccccatcgtgctgtgcggcaacaaggtggacatcaaggacagaaaggtgaaggccaagagcatcgtgttccacagaaagaagaacctgcagtactacgacatcagcgccaagagcaactacaacttcgagaagcccttcctgtggctggccagaaagctgatcggcgaccccaacctggagttcgtggccatgcccgccctggccccccccgaggtggtgatggaccccgccctggccgcccagtacgagcacgacctggaggtggcccagaccaccgccctgcccgacgaggacgacgacctgtag

SEQ ID NO: 96297 - DNA, 651 bp, synthetic construct
  misc_feature 1..651: note = Description of Artificial Sequence: Synthetic coding sequence
  source 1..651: mol_type = other DNA
atggccgcccagggcgagccccaggtgcagttcaagctggtgctggtgggcgacggcggcaccggcaagaccaccttcgtgaagagacacctgaccggcgagttcgagaagaagtacgtggccaccctgggcgtggaggtgcaccccctggtgttccacaccaacagaggccccatcaagttcaacgtgtgggacaccgccggccaggagaagttcggcggcctgagagacggctactacatccaggcccagtgcgccatcatcatgttcgacgtgaccagcagagtgacctacaagaacgtgcccaactggcacagagacctggtgagagtgtgcgagaacatccccatcgtgctgtgcggcaacaaggtggacatcaaggacagaaaggtgaaggccaagagcatcgtgttccacagaaagaagaacctgcagtactacgacatcagcgccaagagcaactacaacttcgagaagcccttcctgtggctggccagaaagctgatcggcgaccccaacctggagttcgtggccatgcccgccctggccccccccgaggtggtgatggaccccgccctggccgcccagtacgagcacgacctggaggtggcccagaccaccgccctgcccgacgaggacgacgacctgtag

SEQ ID NO: 96298 - DNA, 705 bp, synthetic construct
  misc_feature 1..705: note = Description of Artificial Sequence: Synthetic coding sequence
  source 1..705: mol_type = other DNA
agaagaagaagactgagactgagaagactgaactgcgccagcgccatcttccccgccagcgtgggcagagccagaagaagattctggaagctggtgctggtgggcgacggcggcaccggcaagaccaccttcgtgaagagacacctgaccggcgagttcgagaagaagtacgtggccaccctgggcgtggaggtgcaccccctggtgttccacaccaacagaggccccatcaagttcaacgtgtgggacaccgccggccaggagaagttcggcggcctgagagacggctactacatccaggcccagtgcgccatcatcatgttcgacgtgaccagcagagtgacctacaagaacgtgcccaactggcacagagacctggtgagagtgtgcgagaacatccccatcgtgctgtgcggcaacaaggtggacatcaaggacagaaaggtgaaggccaagagcatcgtgttccacagaaagaagaacctgcagtactacgacatcagcgccaagagcaactacaacttcgagaagcccttcctgtggctggccagaaagctgatcggcgaccccaacctggagttcgtggccatgcccgccctggccccccccgaggtggtgatggaccccgccctggccgcccagtacgagcacgacctggaggtggcccagaccaccgccctgcccgacgaggacgacgacctgtag

SEQ ID NO: 96299 - DNA, 387 bp, synthetic construct; identical to SEQ ID NO: 96295
  misc_feature 1..387: note = Description of Artificial Sequence: Synthetic coding sequence
  source 1..387: mol_type = other DNA

SEQ ID NO: 96300 - DNA, 651 bp, synthetic construct; identical to SEQ ID NO: 96297
  misc_feature 1..651: note = Description of Artificial Sequence: Synthetic coding sequence
  source 1..651: mol_type = other DNA

SEQ ID NO: 96301 - DNA, 5271 bp, synthetic construct
  misc_feature 1..5271: note = Description of Artificial Sequence: Synthetic coding sequence
  source 1..5271: mol_type = other DNA
atgagaagaagcaaggcctacggcgagagatacctggccagcgtgcagggcagcgcccccagccccggcaagaagctgagaggcttctacttcgccaagctgtactacgaggccaaggagtacgacctggccaagaagtacgtgtgcacctacctgagcgtgcaggagagagaccccagagcccacagattcctgggcctgctgtacgagctggaggagaacaccgagaaggccgtggagtgctacagaagaagcctggagctgaaccccccccagaaggacctggtgctgaagatcgccgagctgctgtgcaagaacgacgtgaccgacggcagagccaagtactgggtggagagagccgccaagctgttccccggcagccccgccatctacaagctgaaggagcacctgctggactgcgagggcgaggacggctggaacaagctgttcgactggatccagagcgagctgtacgtgagacccgacgacgtgcacatgaacatcagactggtggagctgtacagaagcaacaagagactgaaggacgccgtggccagatgccacgaggccgagagaaacatcgccctgagaagcagcctggagtggaacagctgcgtggtgcagaccctgaaggagtacctggagagcctgcagtgcctggagagcgacaagagcgactggagagccaccaacaccgacctgctgctggcctacgccaacctgatgctgctgaccctgagcaccagagacgtgcaggagagcagagagctgctggagagcttcgacagcgccctgcagagcgccaagagcagcctgggcggcaacgacgagctgagcgccaccttcctggagatgaagggccacttctacatgcacgccggcagcctgctgctgaagatgggccagcacggcaacaacgtgcagtggcaggccctgagcgagctggccgccctgtgctacgtgatcgccttccaggtgcccagacccaagatcaagctgatcaagggcgaggccggccagaacctgctggagatgatggcctgcgacagactgagccagagcggccacatgctgctgaacctgagcagaggcaagcaggacttcctgaaggaggtggtggagaccttcgccaacaagagcggccagagcgtgctgtacaacgccctgttcagcagccagagcagcaaggacaccagcttcctgggcagcgacgacatcggcaacatcgacgtgcaggagcccgagctggaggacctggccagatacgacgtgggcgccatccaggcccacaacggcagcctgcagcacctgacctggctgggcctgcagtggaacagcctgcccgccctgcccggcatcagaaagtggctgaagcagctgttccaccacctgccccaggagaccagcagactggagaccaacgcccccgagagcatctgcatcctggacctggaggtgttcctgctgggcgtggtgtacaccagccacctgcagctgaaggagaagtgcaacagccaccacagcagctaccagcccctgtgcctgcccctgcccgtgtgcaagagactgtgcaccgagagacagaagagctggtgggacgccgtgtgcaccctgatccacagaaaggccgtgcccggcaacagcgccgagctgagactggtggtgcagcacgagatcaacaccctgagagcccaggagaagcacggcctgcagcccgccctgctggtgcactgggccaagtgcctgcagaagatgggcagaggcctgaacagcagctacgaccagcaggagtacatcggcagaagcgtgcactactggaagaaggtgctgcccctgctgaagatcatcaagaagaacagcatccccgagcccatcgaccccctgttcaagcacttccacagcgtggacatccaggccagcgagatcgtggagtacgaggaggacgcccacatcaccttcgccatcctggacgccgtgcacggcaacatcgaggacgccgtgaccgccttcgagagcatcaagagcgtggtgagctactggaacctggccctgatcttccacagaaaggccgaggacatcgagaacgacgccgtgttccccgaggagcaggaggagtgcaagaactacctgagaaagaccagagactacctgatcaagatcatcgacgacagcgacagcaacctgagcgtggtgaagaagctgcccgtgcccctggagagcgtgaaggagatgctgaagagcgtgatgcaggagctggaggactacagcgagggcggccccctgtacaagaacggcagcctgagaaacgccgacagcgagatcaagcacagcacccccagccccaccaagtacagcctgagccccagcaagagctacaagtacagccccaagaccccccccagatgggccgaggaccagaacagcctgagaaagatgatctgccaggaggtgaaggccatcaccaagctgaacagcagcaagagcgccagcagacacagatggcccaccgagaactacggccccgacagcgtgcccgacggctaccagggcagccagaccttccacggcgcccccctgaccgtggccaccaccggccccagcgtgtactacagccagagccccgcctacaacagccagtacctgctgagacccgccgccaacgtgacccccaccaagggcagcagcaacaccgagttcaagagcaccaaggagggcttcagcatcgccgtgagcgccgacggcttcaagttcggcatcagcgagcccggcaaccaggagaagaagagcgagaagcccctggagaacgacaccggcttccaggcccaggacatcagcggccagaagaacggcagaggcgtgatcttcggccagaccagcagcaccttcaccttcgccgacgtggccaagagcaccagcggcgagggcttccagttcggcaagaaggaccccaacttcaagggcttcagcggcgccggcgagaagctgttcagcagccagtgcggcaagatggccaacaaggccaacaccagcggcgacttcgagaaggacgacgacgcctgcaagaccgaggacagcgacgacatccacttcgagcccgtggtgcagatgcccgagaaggtggagctggtgaccggcgaggagggcgagaaggtgctgtacagccagggcgtgaagctgttcagattcgacgccgagatcagccagtggaaggagagaggcctgggcaacctgaagatcctgaagaacgaggtgaacggcaagcccagaatgctgatgagaagagaccaggtgctgaaggtgtgcgccaaccactggatcaccaccaccatgaacctgaagcccctgagcggcagcgacagagcctggatgtggctggccagcgacttcagcgacggcgacgccaagctggagagactggccgcccagttcaagacccccgagctggccgaggagttcaagcagaagttcgaggagtgccagagactgctgctggacatccccctgcagaccccccacaagctggtggacaccggcagagccgccaagctgatccagagagccgaggagatgaagagcggcctgaaggacttcaagaccttcctgaccaacgaccagaccaaggtgaccgaggaggagaacaagggcagcggcaccggcgccgccggcgccagcgacaccaccatcaagcccaaccccgagaacaccggccccaccctggagtgggacaactacgacctgagagaggacgccctggacgacaacgtgagcagcagcagcgtgcacgacagccccctggccagcagccccgtgagaaagaacatcttcagattcgacgagagcaccaccggcttcaacttcagcttcaagagcgccctgagcctgagcaagagccccgccaagctgaaccagagcggcaccagcgtgggcaccgacgaggagagcgacgtgacccaggaggaggagagagacggccagtacttcgagcccgtggtgcccctgcccgacctggtggaggtgagcagcggcgaggagaacgagcaggtggtgttcagccacagagccgagctgtacagatacgacaaggacgtgggccagtggaaggagagaggcatcggcgacatcaagatcctgcagaactacgacaacaagcaggtgagaatcgtgatgagaagagaccaggtgctgaagctgtgcgccaaccacagaatcacccccgacatgagcctgcagaacatgaagggcaccgagagagtgtgggtgtggaccgcctgcgacttcgccgacggcgagagaaaggtggagcacctggccgtgagattcaagctgcaggacgtggccgacagcttcaagaagatcttcgacgaggccaagaccgcccaggagaaggacagcctgatcaccccccacgtgagcagaagcagcacccccagagagagcccctgcggcaagatcgccgtggccgtgctggaggagaccaccagagagagaaccgacgtgatccagggcgacgacgtggccgacgccgccagcgaggtggaggtgagcagcaccagcgagaccaccaccaaggccgtggtgagcccccccaagttcgtgttcggcagcgagagcgtgaagagaatcttcagcagcgagaagagcaaccccttcgccttcggcaacagcagcgccaccggcagcctgttcggcttcagcttcaacgcccccctgaagagcaacgacagcgagaccagcagcgtggcccagagcggcagcgagagcaaggtggagcccaagaagtgcgagctgagcaagaacagcgacatcgagcagagcagcgacagcaaggtgaagaacctgagcgccagcttccccatggaggagagcagcatcaactacaccttcaagacccccgagaaggagccccccctgtggcacgccgagttcaccaaggaggagctggtgcagaagctgagcagcaccaccaagagcgccgaccagctgaacggcctgctgagagagaccgaggccaccagcgccgtgctgatggagcagatcaagctgctgaagagcgagatcagaagactggagagaaaccaggaggagagcgccgccaacgtggagcacctgaagaacgtgctgctgcagttcatcttcctgaagcccggcagcgagagagagagcctgctgcccgtgatcaacaccatgctgcagctgagccccgaggagaagggcaagctggccgccgtggcccagggcctgcaggagaccagcatccccaagaagaagtag

SEQ ID NO: 96302 - DNA, 5247 bp, synthetic construct
  misc_feature 1..5247: note = Description of Artificial Sequence: Synthetic coding sequence
  source 1..5247: mol_type = other DNA
atgaacgtgatgggcttcaacaccgacagactggcctggaccagaaacaagctgagaggcttctacttcgccaagctgtactacgaggccaaggagtacgacctggccaagaagtacgtgtgcacctacctgagcgtgcaggagagagaccccagagcccacagattcctgggcctgctgtacgagctggaggagaacaccgagaaggccgtggagtgctacagaagaagcctggagctgaaccccccccagaaggacctggtgctgaagatcgccgagctgctgtgcaagaacgacgtgaccgacggcagagccaagtactgggtggagagagccgccaagctgttccccggcagccccgccatctacaagctgaaggagcacctgctggactgcgagggcgaggacggctggaacaagctgttcgactggatccagagcgagctgtacgtgagacccgacgacgtgcacatgaacatcagactggtggagctgtacagaagcaacaagagactgaaggacgccgtggccagatgccacgaggccgagagaaacatcgccctgagaagcagcctggagtggaacagctgcgtggtgcagaccctgaaggagtacctggagagcctgcagtgcctggagagcgacaagagcgactggagagccaccaacaccgacctgctgctggcctacgccaacctgatgctgctgaccctgagcaccagagacgtgcaggagagcagagagctgctggagagcttcgacagcgccctgcagagcgccaagagcagcctgggcggcaacgacgagctgagcgccaccttcctggagatgaagggccacttctacatgcacgccggcagcctgctgctgaagatgggccagcacggcaacaacgtgcagtggcaggccctgagcgagctggccgccctgtgctacgtgatcgccttccaggtgcccagacccaagatcaagctgatcaagggcgaggccggccagaacctgctggagatgatggcctgcgacagactgagccagagcggccacatgctgctgaacctgagcagaggcaagcaggacttcctgaaggaggtggtggagaccttcgccaacaagagcggccagagcgtgctgtacaacgccctgttcagcagccagagcagcaaggacaccagcttcctgggcagcgacgacatcggcaacatcgacgtgcaggagcccgagctggaggacctggccagatacgacgtgggcgccatccaggcccacaacggcagcctgcagcacctgacctggctgggcctgcagtggaacagcctgcccgccctgcccggcatcagaaagtggctgaagcagctgttccaccacctgccccaggagaccagcagactggagaccaacgcccccgagagcatctgcatcctggacctggaggtgttcctgctgggcgtggtgtacaccagccacctgcagctgaaggagaagtgcaacagccaccacagcagctaccagcccctgtgcctgcccctgcccgtgtgcaagagactgtgcaccgagagacagaagagctggtgggacgccgtgtgcaccctgatccacagaaaggccgtgcccggcaacagcgccgagctgagactggtggtgcagcacgagatcaacaccctgagagcccaggagaagcacggcctgcagcccgccctgctggtgcactgggccaagtgcctgcagaagatgggcagaggcctgaacagcagctacgaccagcaggagtacatcggcagaagcgtgcactactggaagaaggtgctgcccctgctgaagatcatcaagaagaacagcatccccgagcccatcgaccccctgttcaagcacttccacagcgtggacatccaggccagcgagatcgtggagtacgaggaggacgcccacatcaccttcgccatcctggacgccgtgcacggcaacatcgaggacgccgtgaccgccttcgagagcatcaagagcgtggtgagctactggaacctggccctgatcttccacagaaaggccgaggacatcgagaacgacgccgtgttccccgaggagcaggaggagtgcaagaactacctgagaaagaccagagactacctgatcaagatcatcgacgacagcgacagcaacctgagcgtggtgaagaagctgcccgtgcccctggagagcgtgaaggagatgctgaagagcgtgatgcaggagctggaggactacagcgagggcggccccctgtacaagaacggcagcctgagaaacgccgacagcgagatcaagcacagcacccccagccccaccaagtacagcctgagccccagcaagagctacaagtacagccccaagaccccccccagatgggccgaggaccagaacagcctgagaaagatgatctgccaggaggtgaaggccatcaccaagctgaacagcagcaagagcgccagcagacacagatggcccaccgagaactacggccccgacagcgtgcccgacggctaccagggcagccagaccttccacggcgcccccctgaccgtggccaccaccggccccagcgtgtactacagccagagccccgcctacaacagccagtacctgctgagacccgccgccaacgtgacccccaccaagggcagcagcaacaccgagttcaagagcaccaaggagggcttcagcatcgccgtgagcgccgacggcttcaagttcggcatcagcgagcccggcaaccaggagaagaagagcgagaagcccctggagaacgacaccggcttccaggcccaggacatcagcggccagaagaacggcagaggcgtgatcttcggccagaccagcagcaccttcaccttcgccgacgtggccaagagcaccagcggcgagggcttccagttcggcaagaaggaccccaacttcaagggcttcagcggcgccggcgagaagctgttcagcagccagtgcggcaagatggccaacaaggccaacaccagcggcgacttcgagaaggacgacgacgcctgcaagaccgaggacagcgacgacatccacttcgagcccgtggtgcagatgcccgagaaggtggagctggtgaccggcgaggagggcgagaaggtgctgtacagccagggcgtgaagctgttcagattcgacgccgagatcagccagtggaaggagagaggcctgggcaacctgaagatcctgaagaacgaggtgaacggcaagcccagaatgctgatgagaagagaccaggtgctgaaggtgtgcgccaaccactggatcaccaccaccatgaacctgaagcccctgagcggcagcgacagagcctggatgtggctggccagcgacttcagcgacggcgacgccaagctggagagactggccgcccagttcaagacccccgagctggccgaggagttcaagcagaagttcgaggagtgccagagactgctgctggacatccccctgcagaccccccacaagctggtggacaccggcagagccgccaagctgatccagagagccgaggagatgaagagcggcctgaaggacttcaagaccttcctgaccaacgaccagaccaaggtgaccgaggaggagaacaagggcagcggcaccggcgccgccggcgccagcgacaccaccatcaagcccaaccccgagaacaccggccccaccctggagtgggacaactacgacctgagagaggacgccctggacgacaacgtgagcagcagcagcgtgcacgacagccccctggccagcagccccgtgagaaagaacatcttcagattcgacgagagcaccaccggcttcaacttcagcttcaagagcgccctgagcctgagcaagagccccgccaagctgaaccagagcggcaccagcgtgggcaccgacgaggagagcgacgtgacccaggaggaggagagagacggccagtacttcgagcccgtggtgcccctgcccgacctggtggaggtgagcagcggcgaggagaacgagcaggtggtgttcagccacagagccgagctgtacagatacgacaaggacgtgggccagtggaaggagagaggcatcggcgacatcaagatcctgcagaactacgacaacaagcaggtgagaatcgtgatgagaagagaccaggtgctgaagctgtgcgccaaccacagaatcacccccgacatgagcctgcagaacatgaagggcaccgagagagtgtgggtgtggaccgcctgcgacttcgccgacggcgagagaaaggtggagcacctggccgtgagattcaagctgcaggacgtggccgacagcttcaagaagatcttcgacgaggccaagaccgcccaggagaaggacagcctgatcaccccccacgtgagcagaagcagcacccccagagagagcccctgcggcaagatcgccgtggccgtgctggaggagaccaccagagagagaaccgacgtgatccagggcgacgacgtggccgacgccgccagcgaggtggaggtgagcagcaccagcgagaccaccaccaaggccgtggtgagcccccccaagttcgtgttcggcagcgagagcgtgaagagaatcttcagcagcgagaagagcaaccccttcgccttcggcaacagcagcgccaccggcagcctgttcggcttcagcttcaacgcccccctgaagagcaacgacagcgagaccagcagcgtggcccagagcggcagcgagagcaaggtggagcccaagaagtgcgagctgagcaagaacagcgacatcgagcagagcagcgacagcaaggtgaagaacctgagcgccagcttccccatggaggagagcagcatcaactacaccttcaagacccccgagaaggagccccccctgtggcacgccgagttcaccaaggaggagctggtgcagaagctgagcagcaccaccaagagcgccgaccagctgaacggcctgctgagagagaccgaggccaccagcgccgtgctgatggagcagatcaagctgctgaagagcgagatcagaagactggagagaaaccaggaggagagcgccgccaacgtggagcacctgaagaacgtgctgctgcagttcatcttcctgaagcccggcagcgagagagagagcctgctgcccgtgatcaacaccatgctgcagctgagccccgaggagaagggcaagctggccgccgtggcccagggcctgcaggagaccagcatccccaagaagaagtag

SEQ ID NO: 96303 - DNA, 1935 bp, synthetic construct
  misc_feature 1..1935: note = Description of Artificial Sequence: Synthetic coding sequence
  source 1..1935: mol_type = other DNA
atgctgatgagaagagaccaggtgctgaaggtgtgcgccaaccactggatcaccaccaccatgaacctgaagcccctgagcggcagcgacagagcctggatgtggctggccagcgacttcagcgacggcgacgccaagctggagagactggccgcccagttcaagacccccgagctggccgaggagttcaagcagaagttcgaggagtgccagagactgctgctggacatccccctgcagaccccccacaagctggtggacaccggcagagccgccaagctgatccagagagccgaggagatgaagagcggcctgaaggacttcaagaccttcctgaccaacgaccagaccaaggtgaccgaggaggagaacaagggcagcggcaccggcgccgccggcgccagcgacaccaccatcaagcccaaccccgagaacaccggccccaccctggagtgggacaactacgacctgagagaggacgccctggacgacaacgtgagcagcagcagcgtgcacgacagccccctggccagcagccccgtgagaaagaacatcttcagattcgacgagagcaccaccggcttcaacttcagcttcaagagcgccctgagcctgagcaagagccccgccaagctgaaccagagcggcaccagcgtgggcaccgacgaggagagcgacgtgacccaggaggaggagagagacggccagtacttcgagcccgtggtgcccctgcccgacctggtggaggtgagcagcggcgaggagaacgagcaggtggtgttcagccacagagccgagctgtacagatacgacaaggacgtgggccagtggaaggagagaggcatcggcgacatcaagatcctgcagaactacgacaacaagcaggtgagaatcgtgatgagaagagaccaggtgctgaagctgtgcgccaaccacagaatcacccccgacatgagcctgcagaacatgaagggcaccgagagagtgtgggtgtggaccgcctgcgacttcgccgacggcgagagaaaggtggagcacctggccgtgagattcaagctgcaggacgtggccgacagcttcaagaagatcttcgacgaggccaagaccgcccaggagaaggacagcctgatcaccccccacgtgagcagaagcagcacccccagagagagcccctgcggcaagatcgccgtggccgtgctggaggagaccaccagagagagaaccgacgtgatccagggcgacgacgtggccgacgccgccagcgaggtggaggtgagcagcaccagcgagaccaccaccaaggccgtggtgagcccccccaagttcgtgttcggcagcgagagcgtgaagagaatcttcagcagcgagaagagcaaccccttcgccttcggcaacagcagcgccaccggcagcctgttcggcttcagcttcaacgcccccctgaagagcaacgacagcgagaccagcagcgtggcccagagcggcagcgagagcaaggtggagcccaagaagtgcgagctgagcaagaacagcgacatcgagcagagcagcgacagcaaggtgaagaacctgagcgccagcttccccatggaggagagcagcatcaactacaccttcaagacccccgagaaggagccccccctgtggcacgccgagttcaccaaggaggagctggtgcagaagctgagcagcaccaccaagagcgccgaccagctgaacggcctgctgagagagaccgaggccaccagcgccgtgctgatggagcagatcaagctgctgaagagcgagatcagaagactggagagaaaccaggaggagagcgccgccaacgtggagcacctgaagaacgtgctgctgcagttcatcttcctgaagcccggcagcgagagagagcccagcagctgctacaagtacgacgtggccgcccagccctag

SEQ ID NO: 96304 - DNA, 5247 bp, synthetic construct; identical to SEQ ID NO: 96302
  misc_feature 1..5247: note = Description of Artificial Sequence: Synthetic coding sequence
  source 1..5247: mol_type = other DNA

SEQ ID NO: 96305 - DNA, 3042 bp, synthetic construct
  misc_feature 1..3042: note = Description of Artificial Sequence: Synthetic coding sequence
  source 1..3042: mol_type = other DNA
atgctgaagagcgtgatgcaggagctggaggactacagcgagggcggccccctgtacaagaacggcagcctgagaaacgccgacagcgagatcaagcacagcacccccagccccaccaagtacagcctgagccccagcaagagctacaagtacagccccaagaccccccccagatgggccgaggaccagaacagcctgagaaagatgatctgccaggaggtgaaggccatcaccaagctgaacagcagcaagagcgccagcagacacagatggcccaccgagaactacggccccgacagcgtgcccgacggctaccagggcagccagaccttccacggcgcccccctgaccgtggccaccaccggccccagcgtgtactacagccagagccccgcctacaacagccagtacctgctgagacccgccgccaacgtgacccccaccaagggcagcagcaacaccgagttcaagagcaccaaggagggcttcagcatcgccgtgagcgccgacggcttcaagttcggcatcagcgagcccggcaaccaggagaagaagagcgagaagcccctggagaacgacaccggcttccaggcccaggacatcagcggccagaagaacggcagaggcgtgatcttcggccagaccagcagcaccttcaccttcgccgacgtggccaagagcaccagcggcgagggcttccagttcggcaagaaggaccccaacttcaagggcttcagcggcgccggcgagaagctgttcagcagccagtgcggcaagatggccaacaaggccaacaccagcggcgacttcgagaaggacgacgacgcctgcaagaccgaggacagcgacgacatccacttcgagcccgtggtgcagatgcccgagaaggtggagctggtgaccggcgaggagggcgagaaggtgctgtacagccagggcgtgaagctgttcagattcgacgccgagatcagccagtggaaggagagaggcctgggcaacctgaagatcctgaagaacgaggtgaacggcaagcccagaatgctgatgagaagagaccaggtgctgaaggtgtgcgccaaccactggatcaccaccaccatgaacctgaagcccctgagcggcagcgacagagcctggatgtggctggccagcgacttcagcgacggcgacgccaagctggagagactggccgcccagttcaagacccccgagctggccgaggagttcaagcagaagttcgaggagtgccagagactgctgctggacatccccctgcagaccccccacaagctggtggacaccggcagagccgccaagctgatccagagagccgaggagatgaagagcggcctgaaggacttcaagaccttcctgaccaacgaccagaccaaggtgaccgaggaggagaacaagggcagcggcaccggcgccgccggcgccagcgacaccaccatcaagcccaaccccgagaacaccggccccaccctggagtgggacaactacgacctgagagaggacgccctggacgacaacgtgagcagcagcagcgtgcacgacagccccctggccagcagccccgtgagaaagaacatcttcagattcgacgagagcaccaccggcttcaacttcagcttcaagagcgccctgagcctgagcaagagccccgccaagctgaaccagagcggcaccagcgtgggcaccgacgaggagagcgacgtgacccaggaggaggagagagacggccagtacttcgagcccgtggtgcccctgcccgacctggtggaggtgagcagcggcgaggagaacgagcaggtggtgttcagccacatggccgagctgtacagatacgacaaggacgtgggccagtggaaggagagaggcatcggcgacatcaagatcctgcagaactacgacaacaagcaggtgagaatcgtgatgagaagagaccaggtgctgaagctgtgcgccaaccacagaatcacccccgacatgagcctgcagaacatgaagggcaccgagagagtgtgggtgtggaccgcctgcgacttcgccgacggcgagagaaaggtggagcacctggccgtgagattcaagctgcaggacgtggccgacagcttcaagaagatcttcgacgaggccaagaccgcccaggagaaggacagcctgatcaccccccacgtgagcagaagcagcacccccagagagagcccctgcggcaagatcgccgtggccgtgctggaggagaccaccagagagagaaccgacgtgatccagggcgacgacgtggccgacgccgccagcgaggtggaggtgagcagcaccagcgagaccaccaccaaggccgtggtgagcccccccaagttcgtgttcggcagcgagagcgtgaagagaatcttcagcagcgagaagagcaaccccttcgccttcggcaacagcagcgccaccggcagcctgttcggcttcagcttcaacgcccccctgaagagcaacgacagcgagaccagcagcgtggcccagagcggcagcgagagcaaggtggagcccaagaagtgcgagctgagcaagaacagcgacatcgagcagagcagcgacagcaaggtgaagaacctgagcgccagcttccccatggaggagagcagcatcaactacaccttcaagacccccgagaaggagccccccctgtggcacgccgagttcaccaaggaggagctggtgcagaagctgagcagcaccaccaagagcgccgaccagctgaacggcctgctgagagagaccgaggccaccagcgccgtgctgatggagcagatcaagctgctgaagagcgagatcagaagactggagagaaaccaggaggagagcgccgccaacgtggagcacctgaagaacgtgctgctgcagttcatcttcctgaagcccggcagcgagagagagagcctgctgcccgtgatcaacaccatgctgcagctgagccccgaggagaagggcaagctggccgccgtggcccagggcctgcaggagaccagcatccccaagaagaagtag

SEQ ID NO: 96306 - DNA, 5271 bp, synthetic construct
  misc_feature 1..5271: note = Description of Artificial Sequence: Synthetic coding sequence
  source 1..5271: mol_type = other DNA
atgagaagaagcaaggcctacggcgagagatacctggccagcgtgcagggcagcgcccccagccccggcaagaagctgagaggcttctacttcgccaagctgtactacgaggccaaggagtacgacctggccaagaagtacgtgtgcacctacctgagcgtgcaggagagagaccccagagcccacagattcctgggcctgctgtacgagctggaggagaacaccgagaaggccgtggagtgctacagaagaagcctggagctgaaccccccccagaaggacctggtgctgaagatcgccgagctgctgtgcaagaacgacgtgaccgacggcagagccaagtactgggtggagagagccgccaagctgttccccggcagccccgccatctacaagctgaaggagcacctgctggactgcgagggcgaggacggctggaacaagctgttcgactggatccagagcgagctgtacgtgagacccgacgacgtgcacatgaacatcagactggtggagctgtacagaagcaacaagagactgaaggacgccgtggccagatgccacgaggccgagagaaacatcgccctgagaagcagcctggagtggaacagctgcgtggtgcagaccctgaaggagtacctggagagcctgcagtgcctggagagcgacaagagcgactggagagccaccaacaccgacctgctgctggcctacgccaacctgatgctgctgaccctgagcaccagagacgtgcaggagagcagagagctgctggagagcttcgacagcgccctgcagagcgccaagagcagcctgggcggcaacgacgagctgagcgccaccttcctggagatgaagggccacttctacatgcacgccggcagcctgctgctgaagatgggccagcacggcaacaacgtgcagtggcaggccctgagcgagctggccgccctgtgctacgtgatcgccttccaggtgcccagacccaagatcaagctgatcaagggcgaggccggccagaacctgctggagatgatggcctgcgacagactgagccagagcggccacatgctgctgaacctgagcagaggcaagcaggacttcctgaaggaggtggtggagaccttcgccaacaagagcggccagagcgtgctgtacaacgccctgttcagcagccagagcagcaaggacaccagcttcctgggcagcgacgacatcggcaacatcgacgtgcaggagcccgagctggaggacctggccagatacgacgtgggcgccatccaggcccacaacggcagcctgcagcacctgacctggctgggcctgcagtggaacagcctgcccgccctgcccggcatcagaaagtggctgaagcagctgttccaccacctgccccaggagaccagcagactggagaccaacgcccccgagagcatctgcatcctggacctggaggtgttcctgctgggcgtggtgtacaccagccacctgcagctgaaggagaagtgcaacagccaccacagcagctaccagcccctgtgcctgcccctgcccgtgtgcaagagactgtgcaccgagagacagaagagctggtgggacgccgtgtgcaccctgatccacagaaaggccgtgcccggcaacagcgccgagctgagactggtggtgcagcacgagatcaacaccctgagagcccaggagaagcacggcctgcagcccgccctgctggtgcactgggccaagtgcctgcagaagatgggcagaggcctgaacagcagctacgaccagcaggagtacatcggcagaagcgtgcactactggaagaaggtgctgcccctgctgaagatcatcaagaagaacagcatccccgagcccatcgaccccctgttcaagcacttccacagcgtggacatccaggccagcgagatcgtggagtacgaggaggacgcccacatcaccttcgccatcctggacgccgtgcacggcaacatcgaggacgccgtgaccgccttcgagagcatcaagagcgtggtgagctactggaacctggccctgatcttccacagaaaggccgaggacatcgagaacgacgccgtgttccccgaggagcaggaggagtgcaagaactacctgagaaagaccagagactacctgatcaagatcatcgacgacagcgacagcaacctgagcgtggtgaagaagctgcccgtgcccctggagagcgtgaaggagatgctgaagagcgtgatgcaggagctggaggactacagcgagggcggccccctgtacaagaacggcagcctgagaaacgccgacagcgagatcaagcacagcacccccagccccaccaagtacagcctgagccccagcaagagctacaagtacagccccaagaccccccccagatgggccgaggaccagaacagcctgagaaagatgatctgccaggaggtgaaggccatcaccaagctgaacagcagcaagagcgccagcagacacagatggcccaccgagaactacggccccgacagcgtgcccgacggctaccagggcagccagaccttccacggcgcccccctgaccgtggccaccaccggccccagcgtgtactacagccagagccccgcctacaacagccagtacctgctgagacccgccgccaacgtgacccccaccaagggcagcagcaacaccgagttcaagagcaccaaggagggcttcagcatcgccgtgagcgccgacggcttcaagttcggcatcagcgagcccggcaaccaggagaagaagagcgagaagcccctggagaacgacaccggcttccaggcccaggacatcagcggccagaagaacggcagaggcgtgatcttcggccagaccagcagcaccttcaccttcgccgacgtggccaagagcaccagcggcgagggcttccagttcggcaagaaggaccccaacttcaagggcttcagcggcgccggcgagaagctgttcagcagccagtgcggcaagatggccaacaaggccaacaccagcggcgacttcgagaaggacgacgacgcctgcaagaccgaggacagcgacgacatccacttcgagcccgtggtgcagatgcccgagaaggtggagctggtgaccggcgaggagggcgagaaggtgctgtacagccagggcgtgaagctgttcagattcgacgccgagatcagccagtggaaggagagaggcctgggcaacctgaagatcctgaagaacgaggtgaacggcaagcccagaatgctgatgagaagagaccaggtgctgaaggtgtgcgccaaccactggatcaccaccaccatgaacctgaagcccctgagcggcagcgacagagcctggatgtggctggccagcgacttcagcgacggcgacgccaagctggagagactggccgcccagttcaagacccccgagctggccgaggagttcaagcagaagttcgaggagtgccagagactgctgctggacatccccctgcagaccccccacaagctggtggacaccggcagagccgccaagctgatccagagagccgaggagatgaagagcggcctgaaggacttcaagaccttcctgaccaacgaccagaccaaggtgaccgaggaggagaacaagggcagcggcaccggcgccgccggcgccagcgacaccaccatcaagcccaaccccgagaacaccggccccaccctggagtgggacaactacgacctgagagaggacgccctggacgacaacgtgagcagcagcagcgtgcacgacagccccctggccagcagccccgtgagaaagaacatcttcagattcgacgagagcaccaccggcttcaacttcagcttcaagagcgccctgagcctgagcaagagccccgccaagctgaaccagagcggcaccagcgtgggcaccgacgaggagagcgacgtgacccaggaggaggagagagacggccagtacttcgagcccgtggtgcccctgcccgacctggtggaggtgagcagcggcgaggagaacgagcaggtggtgttcagccacatggccgagctgtacagatacgacaaggacgtgggccagtggaaggagagaggcatcggcgacatcaagatcctgcagaactacgacaacaagcaggtgagaatcgtgatgagaagagaccaggtgctgaagctgtgcgccaaccacagaatcacccccgacatgagcctgcagaacatgaagggcaccgagagagtgtgggtgtggaccgcctgcgacttcgccgacggcgagagaaaggtggagcacctggccgtgagattcaagctgcaggacgtggccgacagcttcaagaagatcttcgacgaggccaagaccgcccaggagaaggacagcctgatcaccccccacgtgagcagaagcagcacccccagagagagcccctgcggcaagatcgccgtggccgtgctggaggagaccaccagagagagaaccgacgtgatccagggcgacgacgtggccgacgccgccagcgaggtggaggtgagcagcaccagcgagaccaccaccaaggccgtggtgagcccccccaagttcgtgttcggcagcgagagcgtgaagagaatcttcagcagcgagaagagcaaccccttcgccttcggcaacagcagcgccaccggcagcctgttcggcttcagcttcaacgcccccctgaagagcaacgacagcgagaccagcagcgtggcccagagcggcagcgagagcaaggtggagcccaagaagtgcgagctgagcaagaacagcgacatcgagcagagcagcgacagcaaggtgaagaacctgagcgccagcttccccatggaggagagcagcatcaactacaccttcaagacccccgagaaggagccccccctgtggcacgccgagttcaccaaggaggagctggtgcagaagctgagcagcaccaccaagagcgccgaccagctgaacggcctgctgagagagaccgaggccaccagcgccgtgctgatggagcagatcaagctgctgaagagcgagatcagaagactggagagaaaccaggaggagagcgccgccaacgtggagcacctgaagaacgtgctgctgcagttcatcttcctgaagcccggcagcgagagagagagcctgctgcccgtgatcaacaccatgctgcagctgagccccgaggagaagggcaagctggccgccgtggcccagggcctgcaggagaccagcatccccaagaagaagtag

SEQ ID NO: 96307 - DNA, 5247 bp, synthetic construct
  misc_feature 1..5247: note = Description of Artificial Sequence: Synthetic coding sequence
  source 1..5247: mol_type = other DNA
atgaacgtgatgggcttcaacaccgacagactggcctggaccagaaacaagctgagaggcttctacttcgccaagctgtactacgaggccaaggagtacgacctggccaagaagtacgtgtgcacctacctgagcgtgcaggagagagaccccagagcccacagattcctgggcctgctgtacgagctggaggagaacaccgagaaggccgtggagtgctacagaagaagcctggagctgaaccccccccagaaggacctggtgctgaagatcgccgagctgctgtgcaagaacgacgtgaccgacggcagagccaagtactgggtggagagagccgccaagctgttccccggcagccccgccatctacaagctgaaggagcacctgctggactgcgagggcgaggacggctggaacaagctgttcgactggatccagagcgagctgtacgtgagacccgacgacgtgcacatgaacatcagactggtggagctgtacagaagcaacaagagactgaaggacgccgtggccagatgccacgaggccgagagaaacatcgccctgagaagcagcctggagtggaacagctgcgtggtgcagaccctgaaggagtacctggagagcctgcagtgcctggagagcgacaagagcgactggagagccaccaacaccgacctgctgctggcctacgccaacctgatgctgctgaccctgagcaccagagacgtgcaggagagcagagagctgctggagagcttcgacagcgccctgcagagcgccaagagcagcctgggcggcaacgacgagctgagcgccaccttcctggagatgaagggccacttctacatgcacgccggcagcctgctgctgaagatgggccagcacggcaacaacgtgcagtggcaggccctgagcgagctggccgccctgtgctacgtgatcgccttccaggtgcccagacccaagatcaagctgatcaagggcgaggccggccagaacctgctggagatgatggcctgcgacagactgagccagagcggccacatgctgctgaacctgagcagaggcaagcaggacttcctgaaggaggtggtggagaccttcgccaacaagagcggccagagcgtgctgtacaacgccctgttcagcagccagagcagcaaggacaccagcttcctgggcagcgacgacatcggcaacatcgacgtgcaggagcccgagctggaggacctggccagatacgacgtgggcgccatccaggcccacaacggcagcctgcagcacctgacctggctgggcctgcagtggaacagcctgcccgccctgcccggcatcagaaagtggctgaagcagctgttccaccacctgccccaggagaccagcagactggagaccaacgcccccgagagcatctgcatcctggacctggaggtgttcctgctgggcgtggtgtacaccagccacctgcagctgaaggagaagtgcaacagccaccacagcagctaccagcccctgtgcctgcccctgcccgtgtgcaagagactgtgcaccgagagacagaagagctggtgggacgccgtgtgcaccctgatccacagaaaggccgtgcccggcaacagcgccgagctgagactggtggtgcagcacgagatcaacaccctgagagcccaggagaagcacggcctgcagcccgccctgctggtgcactgggccaagtgcctgcagaagatgggcagaggcctgaacagcagctacgaccagcaggagtacatcggcagaagcgtgcactactggaagaaggtgctgcccctgctgaagatcatcaagaagaacagcatccccgagcccatcgaccccctgttcaagcacttccacagcgtggacatccaggccagcgagatcgtggagtacgaggaggacgcccacatcaccttcgccatcctggacgccgtgcacggcaacatcgaggacgccgtgaccgccttcgagagcatcaagagcgtggtgagctactggaacctggccctgatcttccacagaaaggccgaggacatcgagaacgacgccgtgttccccgaggagcaggaggagtgcaagaactacctgagaaagaccagagactacctgatcaagatcatcgacgacagcgacagcaacctgagcgtggtgaagaagctgcccgtgcccctggagagcgtgaaggagatgctgaagagcgtgatgcaggagctggaggactacagcgagggcggccccctgtacaagaacggcagcctgagaaacgccgacagcgagatcaagcacagcacccccagccccaccaagtacagcctgagccccagcaagagctacaagtacagccccaagaccccccccagatgggccgaggaccagaacagcctgagaaagatgatctgccaggaggtgaaggccatcaccaagctgaacagcagcaagagcgccagcagacacagatggcccaccgagaactacggccccgacagcgtgcccgacggctaccagggcagccagaccttccacggcgcccccctgaccgtggccaccaccggccccagcgtgtactacagccagagccccgcctacaacagccagtacctgctgagacccgccgccaacgtgacccccaccaagggcagcagcaacaccgagttcaagagcaccaaggagggcttcagcatcgccgtgagcgccgacggcttcaagttcggcatcagcgagcccggcaaccaggagaagaagagcgagaagcccctggagaacgacaccggcttccaggcccaggacatcagcggccagaagaacggcagaggcgtgatcttcggccagaccagcagcaccttcaccttcgccgacgtggccaagagcaccagcggcgagggcttccagttcggcaagaaggaccccaacttcaagggcttcagcggcgccggcgagaagctgttcagcagccagtgcggcaagatggccaacaaggccaacaccagcggcgacttcgagaaggacgacgacgcctgcaagaccgaggacagcgacgacatccacttcgagcccgtggtgcagatgcccgagaaggtggagctggtgaccggcgaggagggcgagaaggtgctgtacagccagggcgtgaagctgttcagattcgacgccgagatcagccagtggaaggagagaggcctgggcaacctgaagatcctgaagaacgaggtgaacggcaagcccagaatgctgatgagaagagaccaggtgctgaaggtgtgcgccaaccactggatcaccaccaccatgaacctgaagcccctgagcggcagcgacagagcctggatgtggctggccagcgacttcagcgacggcgacgccaagctggagagactggccgcccagttcaagacccccgagctggccgaggagttcaagcagaagttcgaggagtgccagagactgctgctggacatccccctgcagaccccccacaagctggtggacaccggcagagccgccaagctgatccagagagccgaggagatgaagagcggcctgaaggacttcaagaccttcctgaccaacgaccagaccaaggtgaccgaggaggagaacaagggcagcggcaccggcgccgccggcgccagcgacaccaccatcaagcccaaccccgagaacaccggccccaccctggagtgggacaactacgacctgagagaggacgccctggacgacaacgtgagcagcagcagcgtgcacgacagccccctggccagcagccccgtgagaaagaacatcttcagattcgacgagagcaccaccggcttcaacttcagcttcaagagcgccctgagcctgagcaagagccccgccaagctgaaccagagcggcaccagcgtgggcaccgacgaggagagcgacgtgacccaggaggaggagagagacggccagtacttcgagcccgtggtgcccctgcccgacctggtggaggtgagcagcggcgaggagaacgagcaggtggtgttcagccacatggccgagctgtacagatacgacaaggacgtgggccagtggaaggagagaggcatcggcgacatcaagatcctgcagaactacgacaacaagcaggtgagaatcgtgatgagaagagaccaggtgctgaagctgtgcgccaaccacagaatcacccccgacatgagcctgcagaacatgaagggcaccgagagagtgtgggtgtggaccgcctgcgacttcgccgacggcgagagaaaggtggagcacctggccgtgagattcaagctgcaggacgtggccgacagcttcaagaagatcttcgacgaggccaagaccgcccaggagaaggacagcctgatcaccccccacgtgagcagaagcagcacccccagagagagcccctgcggcaagatcgccgtggccgtgctggaggagaccaccagagagagaaccgacgtgatccagggcgacgacgtggccgacgccgccagcgaggtggaggtgagcagcaccagcgagaccaccaccaaggccgtggtgagcccccccaagttcgtgttcggcagcgagagcgtgaagagaatcttcagcagcgagaagagcaaccccttcgccttcggcaacagcagcgccaccggcagcctgttcggcttcagcttcaacgcccccctgaagagcaacgacagcgagaccagcagcgtggcccagagcggcagcgagagcaaggtggagcccaagaagtgcgagctgagcaagaacagcgacatcgagcagagcagcgacagcaaggtgaagaacctgagcgccagcttccccatggaggagagcagcatcaactacaccttcaagacccccgagaaggagccccccctgtggcacgccgagttcaccaaggaggagctggtgcagaagctgagcagcaccaccaagagcgccgaccagctgaacggcctgctgagagagaccgaggccaccagcgccgtgctgatggagcagatcaagctgctgaagagcgagatcagaagactggagagaaaccaggaggagagcgccgccaacgtggagcacctgaagaacgtgctgctgcagttcatcttcctgaagcccggcagcgagagagagagcctgctgcccgtgatcaacaccatgctgcagctgagccccgaggagaagggcaagctggccgccgtggcccagggcctgcaggagaccagcatccccaagaagaagtag

SEQ ID NO: 96308 - DNA, 1935 bp, synthetic construct
  misc_feature 1..1935: note = Description of Artificial Sequence: Synthetic coding sequence
  source 1..1935: mol_type = other DNA
atgctgatgagaagagaccaggtgctgaaggtgtgcgccaaccactggatcaccaccaccatgaacctgaagcccctgagcggcagcgacagagcctggatgtggctggccagcgacttcagcgacggcgacgccaagctggagagactggccgcccagttcaagacccccgagctggccgaggagttcaagcagaagttcgaggagtgccagagactgctgctggacatccccctgcagaccccccacaagctggtggacaccggcagagccgccaagctgatccagagagccgaggagatgaagagcggcctgaaggacttcaagaccttcctgaccaacgaccagaccaaggtgaccgaggaggagaacaagggcagcggcaccggcgccgccggcgccagcgacaccaccatcaagcccaaccccgagaacaccggccccaccctggagtgggacaactacgacctgagagaggacgccctggacgacaacgtgagcagcagcagcgtgcacgacagccccctggccagcagccccgtgagaaagaacatcttcagattcgacgagagcaccaccggcttcaacttcagcttcaagagcgccctgagcctgagcaagagccccgccaagctgaaccagagcggcaccagcgtgggcaccgacgaggagagcgacgtgacccaggaggaggagagagacggccagtacttcgagcccgtggtgcccctgcccgacctggtggaggtgagcagcggcgaggagaacgagcaggtggtgttcagccacatggccgagctgtacagatacgacaaggacgtgggccagtggaaggagagaggcatcggcgacatcaagatcctgcagaactacgacaacaagcaggtgagaatcgtgatgagaagagaccaggtgctgaagctgtgcgccaaccacagaatcacccccgacatgagcctgcagaacatgaagggcaccgagagagtgtgggtgtggaccgcctgcgacttcgccgacggcgagagaaaggtggagcacctggccgtgagattcaagctgcaggacgtggccgacagcttcaagaagatcttcgacgaggccaagaccgcccaggagaaggacagcctgatcaccccccacgtgagcagaagcagcacccccagagagagcccctgcggcaagatcgccgtggccgtgctggaggagaccaccagagagagaaccgacgtgatccagggcgacgacgtggccgacgccgccagcgaggtggaggtgagcagcaccagcgagaccaccaccaaggccgtggtgagcccccccaagttcgtgttcggcagcgagagcgtgaagagaatcttcagcagcgagaagagcaaccccttcgccttcggcaacagcagcgccaccggcagcctgttcggcttcagcttcaacgcccccctgaagagcaacgacagcgagaccagcagcgtggcccagagcggcagcgagagcaaggtggagcccaagaagtgcgagctgagcaagaacagcgacatcgagcagagcagcgacagcaaggtgaagaacctgagcgccagcttccccatggaggagagcagcatcaactacaccttcaagacccccgagaaggagccccccctgtggcacgccgagttcaccaaggaggagctggtgcagaagctgagcagcaccaccaagagcgccgaccagctgaacggcctgctgagagagaccgaggccaccagcgccgtgctgatggagcagatcaagctgctgaagagcgagatcagaagactggagagaaaccaggaggagagcgccgccaacgtggagcacctgaagaacgtgctgctgcagttcatcttcctgaagcccggcagcgagagagagcccagcagctgctacaagtacgacgtggccgcccagccctag

SEQ ID NO: 96309 - DNA, 5301 bp, synthetic construct
  misc_feature 1..5301: note = Description of Artificial Sequence: Synthetic coding sequence
  source 1..5301: mol_type = other DNA
atgagctgcagcaaggcctacggcgagagatacgtggccagcgtgcagggcagcgcccccagccccagaaagaagagcaccagaggcttctacttcgccaagctgtactacgaggccaaggagtacgacctggccaagaagtacatctgcacctacatcaacgtgagagagatggaccccagagcccacagattcctgggcctgctgtacgagctggaggagaacaccgagaaggccgtggagtgctacagaagaagcgtggagctgaaccccacccagaaggacctggtgctgaagatcgccgagctgctgtgcaagaacgacgtgaccgacggcagagccgagtactgggtggagagagccgccaagctgttccccggcagccccgccatctacaagctgaaggagcagctgctggactgcgagggcgaggacggctggaacaagctgttcgacctgatccagagcgagctgtacgtgagacccgacgacgtgcacgtgaacatcagactggtggagctgtacagaagcaccaagagactgaaggacgccgtggccagatgccacgaggccgagagaaacatcgccctgagaagcagcctggagtggaacagctgcgtggtgcagaccctgaaggagtacctggagagcctgcagtgcctggagagcgacaagagcgactggagagccaccaacaccgacctgctgctggcctacgccaacctgatgctgctgaccctgagcaccagagacgtgcaggagagcagagagctgctggagagcttcgacagcgccctgcagagcgccaagagcagcctgggcggcaacgacgagctgagcgccaccttcctggagatgaagggccacttctacatgcacgccggcagcctgctgctgaagatgggccagcacggcaacaacgtgcagtggagagccctgagcgagctggccgccctgtgctacctgatcgccttccaggtgcccagacccaagatcaagctgatcaagggcgaggccggccagaacctgctggagatgatggcctgcgacagactgagccagagcggccacatgctgctgaacctgagcagaggcaagcaggacttcctgaaggtggtggtggagaccttcgccaacaagagcggccagagcgccctgtacgacgccctgttcagcagccagagccccaaggacaccagcttcctgggcagcgacgacatcggcaacatcgacgtgcaggagcccgagctggaggacctggccagatacgacgtgggcgccatcagagcccacaacggcagcctgcagcacctgacctggctgggcctgcagtggaacagcctgcccgccctgcccggcatcagaaagtggctgaagcagctgttccaccacctgccccaggagaccagcagactggagaccaacgcccccgagagcatctgcatcctggacctggaggtgttcctgctgggcgtggtgtacaccagccacctgcagctgaaggagaagtgcaacagccaccacagcagctaccagcccctgtgcctgcccctgcccgtgtgcaagcagctgtgcaccgagagacagaagagctggtgggacgccgtgtgcaccctgatccacagaaaggccgtgcccggcaacagcgccaagctgagactgctggtgcagcacgagatcaacaccctgagagcccaggagaagcacggcctgcagcccgccctgctggtgcactgggccaagtgcctgcagaagatgggcagcggcctgaacagcttctacgaccagagagagtacatcggcagaagcgtgcactactggaagaaggtgctgcccctgctgaagatcatcaagaagaagaacagcatccccgagcccatcgaccccctgttcaagcacttccacagcgtggacatccaggccagcgagatcgtggagtacgaggaggacgcccacgtgaccttcgccatcctggacgccgtgaacggcaacatcgaggacgccatgaccgccttcgagagcatcaagagcgtggtgagctactggaacctggccctgatcttccacagaaaggccgaggacatcgccaacgacgccctgagccccgaggagcaggaggagtgcaagaactacctgagaaagaccagaggctacctgatcaagatcctggacgacagcgacagcaacctgagcgtggtgaagaagctgcccgtgcccctggagagcgtgaaggagatgctgaagagcgtgatgcaggagctggagaactacagcgagggcggccccctgtacaagaacggcagcctgagaaacgccgacagcgagatcaagcacagcacccccagccccaccaagtacagcctgagccccagcaagagctacaagtacagccccaagaccccccccagatgggccgaggaccagaacagcctgctgaagatgatcagacaggaggtgaaggccatcaaggaggagatgcaggagctgaagctgaacagcagcaagagcgccagccaccacagatggcccaccgagaactacggccccgacagcgtgcccgacggctaccagggcagccagaccttccacggcgcccccctgaccgtggccaccaccggccccagcgtgtactacagccagagccccgcctacaacagccagtacctgctgagacccgccgccaacgtgacccccaccaagggcagcagcaacaccgagttcaagagcaccaaggagggcttcagcatccccgtgagcgccgacggcttcaagttcggcatcagcgagcccggcaaccaggagaagaagagcgagaagcccctggagaacgacaccggcctgcaggcccaggacatcagcggcagaaagaagggcagaggcgtgatcttcggccagaccagcagcaccttcaccttcgccgacgtggccaagagcaccagcggcgagggcttccagttcggcaagaaggacctgaacttcaagggcttcagcggcgccggcgagaagctgttcagcagccagtacggcaagatggccaacaaggccaacaccagcggcgacttcgagaaggacgacgacgcctacaagaccgaggacagcgacgacatccacttcgagcccgtggtgcagatgcccgagaaggtggagctggtgaccggcgaggagggcgagaaggtgctgtacagccagggcgtgaagctgttcagattcgacgccgaggtgagccagtggaaggagagaggcctgggcaacctgaagatcctgaagaacgaggtgaacggcaaggtgagaatgctgatgcagagagagcaggtgctgaaggtgtgcgccaaccactggatcaccaccaccatgaacctgaagcccctgagcggcagcgacagagcctggatgtggagcgccagcgacttcagcgacggcgacgccaagctggagagactggccgccaagttcaagacccccgagctggccgaggagttcaagcagaagttcgaggagtgccagagactgctgctggacatccccctgcagaccccccacaagctggtggacaccggcagagccgccaagctgatccagagagccgaggagatgaagagcggcctgaaggacttcaagaccttcctgaccaacgaccagaccaaggtggccgaggaggagaacaagggcagcggcaccggcgccgccggcgccagcgacaccaccatcaagcccaacgccgagaacaccggccccaccctggagtgggacaactacgacctgagagaggacgccctggacgacagcgtgagcagcagcagcgtgcacgccagccccctggccagcagccccgtgagaaagaacctgttccacttcgacgagagcaccaccggcagcaacttcagcttcaagagcgccctgagcctgagcaagagccccgccaagctgaaccagagcggcaccagcgtgggcaccgacgaggagagcgacgtgacccaggaggaggagagagacggccagtacttcgagcccgtggtgcccctgcccgacctggtggaggtgagcagcggcgaggagaacgagcaggtggtgttcagccacagagccgagttctacagatacgacaaggacgtgggccagtggaaggagagaggcatcggcgacatcaagatcctgcagaactacgacaacaagcacgtgagaatcctgatgagaagagaccaggtgctgaagctgtgcgccaaccacagaatcacccccgacatgagcctgcagaacatgaagggcaccgagagagtgtgggtgtggaccgcctgcgacttcgccgacggcgagagaaaggtggagcacctggccgtgagattcaagctgcaggacgtggccgacagcttcaagaagatcttcgacgaggccaagaccgcccaggagaaggacagcctgatcaccccccacgtgagcagaagcagcacccccagagagagcccctgcggcaagatcgccgtggccgtgctggaggagaccaccagagagagaaccgacgtgatccagggcgacgacgtggccgacgccgccagcgaggtggaggtgagcagcaccagcgagaccaccaccaaggccgtggtgagcccccccaagttcgtgttcggcagcgagagcgtgaagagaatcttcagcagcgagaagagcaagcccttcgccttcggcaacagcagcgccaccggcagcctgttcggcttcagcttcaacgcccccctgaagagcaacaacagcgagaccagcagcgtggcccagagcggcagcgagagcaaggtggagcccaagaagtgcgagctgagcaagaacagcgacatcgagcagagcagcgacagcaaggtgaagaacctgagcgccagcttccccaccgaggagagcagcatcaactacaccttcaagacccccgagaaggagccccccctgtggtacgccgagttcaccaaggaggagctggtgcagaagctgagcagcaccaccaagagcgccgaccacctgaacggcctgctgagagagatcgaggccaccaacgccgtgctgatggagcagatcaagctgctgaagagcgagatcagaagactggagagaaaccaggagcaggaggtgagcgccgccaacgtggagcacctgaagaacgtgctgctgcagttcatcttcctgaagcccggcagcgagagagagagactgctgcccgtgatcaacaccatgctgcagctgagcctggaggagaagggcaagctggccgccgtggcccaggccgagagaggcttcgtgctgaacagcaccttctag

SEQ ID NO: 96310 - DNA, 471 bp, synthetic construct
  misc_feature 1..471: note = Description of Artificial Sequence: Synthetic coding sequence
  source 1..471: mol_type = other DNA
atggaccccagagcccacagattcctgggcctgctgtacgagctggaggagaacaccgagaaggccgtggagtgctacagaagaagcgtggagctgaaccccacccagaaggacctggtgctgaagatcgccgagctgctgtgcaagaacgacgtgaccgacggcagagccgagtactgggtggagagagccgccaagctgttccccggcagccccgccatctacaagctgaaggagcagctgctggactgcgagggcgaggacggctggaacaagctgttcgacctgatccagagcgagctgtacgtgagacccgacgacgtgcacgtgaacatcagactggtggagctgtacagaagcaccaagagactgaaggacgccgtggccagatgccacgaggccgagagaaacatcgccctgagaagcagcctggagtggaacagctgcgtggtgcagaccctgaagttctag

SEQ ID NO: 96311 - DNA, 3378 bp, synthetic construct
  misc_feature 1..3378: note = Description of Artificial Sequence: Synthetic coding sequence
  source 1..3378: mol_type = other DNA
atgctgctgaccctgagcaccagagacgtgcaggagagcagagagctgctggagagcttcgacagcgccctgcagagcgccaagagcagcctgggcggcaacgacgagctgagcgccaccttcctggagatgaagggccacttctacatgcacgccggcagcctgctgctgaagatgggccagcacggcaacaacgtgcagtggagagccctgagcgagctggccgccctgtgctacctgatcgccttccaggtgcccagacccaagatcaagctgatcaagggcgaggccggccagaacctgctggagatgatggcctgcgacagactgagccagagcggccacatgctgctgaacctgagcagaggcaagcaggacttcctgaaggtggtggtggagaccttcgccaacaagagcggccagagcgccctgtacgacgccctgttcagcagccagagccccaaggacaccagcttcctgggcagcgacgacatcggcaacatcgacgtgcaggagcccgagctggaggacctggccagatacgacgtgggcgccatcagagcccacaacggcagcctgcagcacctgacctggctgggcctgcagtggaacagcctgcccgccctgcccggcatcagaaagtggctgaagcagctgttccaccacctgccccaggagaccagcagactggagaccaacgcccccgagagcatctgcatcctggacctggaggtgttcctgctgggcgtggtgtacaccagccacctgcagctgaaggagaagtgcaacagccaccacagcagctaccagcccctgtgcctgcccctgcccgtgtgcaagcagctgtgcaccgagagacagaagagctggtgggacgccgtgtgcaccctgatccacagaaaggccgtgcccggcaacagcgccaagctgagactgctggtgcagcacgagatcaacaccctgagagcccaggagaagcacggcctgcagcccgccctgctggtgcactgggccaagtgcctgcagaagatgggcagcggcctgaacagcttctacgaccagagagagtacatcggcagaagcgtgcactactggaagaaggtgctgcccctgctgaagatcatcaagaagaagaacagcatccccgagcccatcgaccccctgttcaagcacttccacagcgtggacatccaggccagcgagatcgtggagtacgaggaggacgcccacgtgaccttcgccatcctggacgccgtgaacggcaacatcgaggacgccatgaccgccttcgagagcatcaagagcgtggtgagctactggaacctggccctgatcttccacagaaaggccgaggacatcgccaacgacgccctgagccccgaggagcaggaggagtgcaagaactacctgagaaagaccagaggctacctgatcaagatcctggacgacagcgacagcaacctgagcgtggtgaagaagctgcccgtgcccctggagagcgtgaaggagatgctgaagagcgtgatgcaggagctggagaactacagcgagggcggccccctgtacaagaacggcagcctgagaaacgccgacagcgagatcaagcacagcacccccagccccaccaagtacagcctgagccccagcaagagctacaagtacagccccaagaccccccccagatgggccgaggaccagaacagcctgctgaagatgatcagacaggaggtgaaggccatcaaggaggagatgcaggagctgaagctgaacagcagcaagagcgccagccaccacagatggcccaccgagaactacggccccgacagcgtgcccgacggctaccagggcagccagaccttccacggcgcccccctgaccgtggccaccaccggccccagcgtgtactacagccagagccccgcctacaacagccagtacctgctgagacccgccgccaacgtgacccccaccaagggcagcagcaacaccgagttcaagagcaccaaggagggcttcagcatccccgtgagcgccgacggcttcaagttcggcatcagcgagcccggcaaccaggagaagaagagcgagaagcccctggagaacgacaccggcctgcaggcccaggacatcagcggcagaaagaagggcagaggcgtgatcttcggccagaccagcagcaccttcaccttcgccgacgtggccaagagcaccagcggcgagggcttccagttcggcaagaaggacctgaacttcaagggcttcagcggcgccggcgagaagctgttcagcagccagtacggcaagatggccaacaaggccaacaccagcggcgacttcgagaaggacgacgacgcctacaagaccgaggacagcgacgacatccacttcgagcccgtggtgcagatgcccgagaaggtggagctggtgaccggcgaggagggcgagaaggtgctgtacagccagggcgtgaagctgttcagattcgacgccgaggtgagccagtggaaggagagaggcctgggcaacctgaagatcctgaagaacgaggtgaacggcaaggtgagaatgctgatgcagagagagcaggtgctgaaggtgtgcgccaaccactggatcaccaccaccatgaacctgaagcccctgagcggcagcgacagagcctggatgtggagcgccagcgacttcagcgacggcgacgccaagctggagagactggccgccaagttcaagacccccgagctggccgaggagttcaagcagaagttcgaggagtgccagagactgctgctggacatccccctgcagaccccccacaagctggtggacaccggcagagccgccaagctgatccagagagccgaggagatgaagagcggcagcgagagcaaggtggagcccaagaagtgcgagctgagcaagaacagcgacatcgagcagagcagcgacagcaaggtgaagaacctgagcgccagcttccccaccgaggagagcagcatcaactacaccttcaagacccccgagaaggagccccccctgtggtacgccgagttcaccaaggaggagctggtgcagaagctgagcagcaccaccaagagcgccgaccacctgaacggcctgctgagagagatcgaggccaccaacgccgtgctgatggagcagatcaagctgctgaagagcgagatcagaagactggagagaaaccaggagcaggaggtgagcgccgccaacgtggagcacctgaagaacgtgctgctgcagttcatcttcctgaagcccggcagcgagagagagagactgctgcccgtgatcaacaccatgctgcagctgagcctggaggagaagggcaagctggccgccgtggcccagggcgaggagtag

SEQ ID NO: 96312 - DNA, 423 bp, synthetic construct
  misc_feature 1..423: note = Description of Artificial Sequence: Synthetic coding sequence
  source 1..423: mol_type = other DNA
accgaggagagcagcatcaactacaccttcaagacccccgagaaggagccccccctgtggtacgccgagttcaccaaggaggagctggtgcagaagctgagcagcaccaccaagagcgccgaccacctgaacggcctgctgagagagatcgaggccaccaacgccgtgctgatggagcagatcaagctgctgaagagcgagatcagaagactggagagaaaccaggagcaggaggtgagcgccgccaacgtggagcacctgaagaacgtgctgctgcagttcatcttcctgaagcccggcagcgagagagagagactgctgcccgtgatcaacaccatgctgcagctgagcctggaggagaagggcaagctggccgccgtggcccagggcctgcaggagaccagcatccccaagaagaagtag

SEQ ID NO: 96313 - DNA, 5277 bp, synthetic construct
  misc_feature 1..5277: note = Description of Artificial Sequence: Synthetic coding sequence
  source 1..5277: mol_type = other DNA
atgagctgcagcaaggcctacggcgagagatacgtggccagcgtgcagggcagcgcccccagccccagaaagaagagcaccagaggcttctacttcgccaagctgtactacgaggccaaggagtacgacctggccaagaagtacatctgcacctacatcaacgtgagagagatggaccccagagcccacagattcctgggcctgctgtacgagctggaggagaacaccgagaaggccgtggagtgctacagaagaagcgtggagctgaaccccacccagaaggacctggtgctgaagatcgccgagctgctgtgcaagaacgacgtgaccgacggcagagccgagtactgggtggagagagccgccaagctgttccccggcagccccgccatctacaagctgaaggagcagctgctggactgcgagggcgaggacggctggaacaagctgttcgacctgatccagagcgagctgtacgtgagacccgacgacgtgcacgtgaacatcagactggtggagctgtacagaagcaccaagagactgaaggacgccgtggccagatgccacgaggccgagagaaacatcgccctgagaagcagcctggagtggaacagctgcgtggtgcagaccctgaaggagtacctggagagcctgcagtgcctggagagcgacaagagcgactggagagccaccaacaccgacctgctgctggcctacgccaacctgatgctgctgaccctgagcaccagagacgtgcaggagagcagagagctgctggagagcttcgacagcgccctgcagagcgccaagagcagcctgggcggcaacgacgagctgagcgccaccttcctggagatgaagggccacttctacatgcacgccggcagcctgctgctgaagatgggccagcacggcaacaacgtgcagtggagagccctgagcgagctggccgccctgtgctacctgatcgccttccaggtgcccagacccaagatcaagctgatcaagggcgaggccggccagaacctgctggagatgatggcctgcgacagactgagccagagcggccacatgctgctgaacctgagcagaggcaagcaggacttcctgaaggtggtggtggagaccttcgccaacaagagcggccagagcgccctgtacgacgccctgttcagcagccagagccccaaggacaccagcttcctgggcagcgacgacatcggcaacatcgacgtgcaggagcccgagctggaggacctggccagatacgacgtgggcgccatcagagcccacaacggcagcctgcagcacctgacctggctgggcctgcagtggaacagcctgcccgccctgcccggcatcagaaagtggctgaagcagctgttccaccacctgccccaggagaccagcagactggagaccaacgcccccgagagcatctgcatcctggacctggaggtgttcctgctgggcgtggtgtacaccagccacctgcagctgaaggagaagtgcaacagccaccacagcagctaccagcccctgtgcctgcccctgcccgtgtgcaagcagctgtgcaccgagagacagaagagctggtgggacgccgtgtgcaccctgatccacagaaaggccgtgcccggcaacagcgccaagctgagactgctggtgcagcacgagatcaacaccctgagagcccaggagaagcacggcctgcagcccgccctgctggtgcactgggccaagtgcctgcagaagatgggcagcggcctgaacagcttctacgaccagagagagtacatcggcagaagcgtgcactactggaagaaggtgctgcccctgctgaagatcatcaagaagaagaacagcatccccgagcccatcgaccccctgttcaagcacttccacagcgtggacatccaggccagcgagatcgtggagtacgaggaggacgcccacgtgaccttcgccatcctggacgccgtgaacggcaacatcgaggacgccatgaccgccttcgagagcatcaagagcgtggtgagctactggaacctggccctgatcttccacagaaaggccgaggacatcgccaacgacgccctgagccccgaggagcaggaggagtgcaagaactacctgagaaagaccagaggctacctgatcaagatcctggacgacagcgacagcaacctgagcgtggtgaagaagctgcccgtgcccctggagagcgtgaaggagatgctgaagagcgtgatgcaggagctggagaactacagcgagggcggccccctgtacaagaacggcagcctgagaaacgccgacagcgagatcaagcacagcacccccagccccaccaagtacagcctgagccccagcaagagctacaagtacagccccaagaccccccccagatgggccgaggaccagaacagcctgctgaagatgatcagacaggaggtgaaggccatcaaggaggagatgcaggagctgaagctgaacagcagcaagagcgccagccaccacagatggcccaccgagaactacggccccgacagcgtgcccgacggctaccagggcagccagaccttccacggcgcccccctgaccgtggccaccaccggccccagcgtgtactacagccagagccccgcctacaacagccagtacctgctgagacccgccgccaacgtgacccccaccaagggcagcagcaacaccgagttcaagagcaccaaggagggcttcagcatccccgtgagcgccgacggcttcaagttcggcatcagcgagcccggcaaccaggagaagaagagcgagaagcccctggagaacgacaccggcctgcaggcccaggacatcagcggcagaaagaagggcagaggcgtgatcttcggccagaccagcagcaccttcaccttcgccgacgtggccaagagcaccagcggcgagggcttccagttcggcaagaaggacctgaacttcaagggcttcagcggcgccggcgagaagctgttcagcagccagtacggcaagatggccaacaaggccaacaccagcggcgacttcgagaaggacgacgacgcctacaagaccgaggacagcgacgacatccacttcgagcccgtggtgcagatgcccgagaaggtggagctggtgaccggcgaggagggcgagaaggtgctgtacagccagggcgtgaagctgttcagattcgacgccgaggtgagccagtggaaggagagaggcctgggcaacctgaagatcctgaagaacgaggtgaacggcaaggtgagaatgctgatgcagagagagcaggtgctgaaggtgtgcgccaaccactggatcaccaccaccatgaacctgaagcccctgagcggcagcgacagagcctggatgtggagcgccagcgacttcagcgacggcgacgccaagctggagagactggccgccaagttcaagacccccgagctggccgaggagttcaagcagaagttcgaggagtgccagagactgctgctggacatccccctgcagaccccccacaagctggtggacaccggcagagccgccaagctgatccagagagccgaggagatgaagagcggcctgaaggacttcaagaccttcctgaccaacgaccagaccaaggtggccgaggaggagaacaagggcagcggcaccggcgccgccggcgccagcgacaccaccatcaagcccaacgccgagaacaccggccccaccctggagtgggacaactacgacctgagagaggacgccctggacgacagcgtgagcagcagcagcgtgcacgccagccccctggccagcagccccgtgagaaagaacctgttccacttcgacgagagcaccaccggcagcaacttcagcttcaagagcgccctgagcctgagcaagagccccgccaagctgaaccagagcggcaccagcgtgggcaccgacgaggagagcgacgtgacccaggaggaggagagagacggccagtacttcgagcccgtggtgcccctgcccgacctggtggaggtgagcagcggcgaggagaacgagcaggtggtgttcagccacagagccgagttctacagatacgacaaggacgtgggccagtggaaggagagaggcatcggcgacatcaagatcctgcagaactacgacaacaagcacgtgagaatcctgatgagaagagaccaggtgctgaagctgtgcgccaaccacagaatcacccccgacatgagcctgcagaacatgaagggcaccgagagagtgtgggtgtggaccgcctgcgacttcgccgacggcgagagaaaggtggagcacctggccgtgagattcaagctgcaggacgtggccgacagcttcaagaagatcttcgacgaggccaagaccgcccaggagaaggacagcctgatcaccccccacgtgagcagaagcagcacccccagagagagcccctgcggcaagatcgccgtggccgtgctggaggagaccaccagagagagaaccgacgtgatccagggcgacgacgtggccgacgccgccagcgaggtggaggtgagcagcaccagcgagaccaccaccaaggccgtggtgagcccccccaagttcgtgttcggcagcgagagcgtgaagagaatcttcagcagcgagaagagcaagcccttcgccttcggcaacagcagcgccaccggcagcctgttcggcttcagcttcaacgcccccctgaagagcaacaacagcgagaccagcagcgtggcccagagcggcagcgagagcaaggtggagcccaagaagtgcgagctgagcaagaacagcgacatcgagcagagcagcgacagcaaggtgaagaacctgagcgccagcttccccaccgaggagagcagcatcaactacaccttcaagacccccgagaaggagccccccctgtggtacgccgagttcaccaaggaggagctggtgcagaagctgagcagcaccaccaagagcgccgaccacctgaacggcctgctgagagagatcgaggccaccaacgccgtgctgatggagcagatcaagctgctgaagagcgagatcagaagactggagagaaaccaggagcaggaggtgagcgccgccaacgtggagcacctgaagaacgtgctgctgcagttcatcttcctgaagcccggcagcgagagagagagactgctgcccgtgatcaacaccatgctgcagctgagcctggaggagaagggcaagctggccgccgtggcccagggcgaggagtag

SEQ ID NO: 96314 - DNA, 5301 bp, synthetic construct
  misc_feature 1..5301: note = Description of Artificial Sequence: Synthetic coding sequence
  source 1..5301: mol_type = other DNA
atgagctgcagcaaggcctacggcgagagatacgtggccagcgtgcagggcagcgcccccagccccagaaagaagagcaccagaggcttctacttcgccaagctgtactacgaggccaaggagtacgacctggccaagaagtacatctgcacctacatcaacgtgagagagatggaccccagagcccacagattcctgggcctgctgtacgagctggaggagaacaccgagaaggccgtggagtgctacagaagaagcgtggagctgaaccccacccagaaggacctggtgctgaagatcgccgagctgctgtgcaagaacgacgtgaccgacggcagagccaagtactgggtggagagagccgccaagctgttccccggcagccccgccatctacaagctgaaggagcagctgctggactgcgagggcgaggacggctggaacaagctgttcgacctgatccagagcgagctgtacgtgagacccgacgacgtgcacgtgaacatcagactggtggagctgtacagaagcaccaagagactgaaggacgccgtggccagatgccacgaggccgagagaaacatcgccctgagaagcagcctggagtggaacagctgcgtggtgcagaccctgaaggagtacctggagagcctgcagtgcctggagagcgacaagagcgactggagagccaccaacaccgacctgctgctggcctacgccaacctgatgctgctgaccctgagcaccagagacgtgcaggagagcagagagctgctggagagcttcgacagcgccctgcagagcgccaagagcagcctgggcggcaacgacgagctgagcgccaccttcctggagatgaagggccacttctacatgcacgccggcagcctgctgctgaagatgggccagcacggcaacaacgtgcagtggagagccctgagcgagctggccgccctgtgctacctgatcgccttccaggtgcccagacccaagatcaagctgatcaagggcgaggccggccagaacctgctggagatgatggcctgcgacagactgagccagagcggccacatgctgctgaacctgagcagaggcaagcaggacttcctgaaggtggtggtggagaccttcgccaacaagagcggccagagcgccctgtacgacgccctgttcagcagccagagccccaaggacaccagcttcctgggcagcgacgacatcggcaacatcgacgtgcaggagcccgagctggaggacctggccagatacgacgtgggcgccatcagagcccacaacggcagcctgcagcacctgacctggctgggcctgcagtggaacagcctgcccgccctgcccggcatcagaaagtggctgaagcagctgttccaccacctgccccaggagaccagcagactggagaccaacgcccccgagagcatctgcatcctggacctggaggtgttcctgctgggcgtggtgtacaccagccacctgcagctgaaggagaagtgcaacagccaccacagcagctaccagcccctgtgcctgcccctgcccgtgtgcaagcagctgtgcaccgagagacagaagagctggtgggacgccgtgtgcaccctgatccacagaaaggccgtgcccggcaacagcgccaagctgagactgctggtgcagcacgagatcaacaccctgagagcccaggagaagcacggcctgcagcccgccctgctggtgcactgggccaagtgcctgcagaagatgggcagcggcctgaacagcttctacgaccagagagagtacatcggcagaagcgtgcactactggaagaaggtgctgcccctgctgaagatcatcaagaagaagaacagcatccccgagcccatcgaccccctgttcaagcacttccacagcgtggacatccaggccagcgagatcgtggagtacgaggaggacgcccacgtgaccttcgccatcctggacgccgtgaacggcaacatcgaggacgccatgaccgccttcgagagcatcaagagcgtggtgagctactggaacctggccctgatcttccacagaaaggccgaggacatcgccaacgacgccctgagccccgaggagcaggaggagtgcaagaactacctgagaaagaccagaggctacctgatcaagatcctggacgacagcgacagcaacctgagcgtggtgaagaagctgcccgtgcccctggagagcgtgaaggagatgctgaagagcgtgatgcaggagctggagaactacagcgagggcgaccccctgtacaagaacggcagcctgagaaacgccgacagcgagatcaagcacagcacccccagccccaccaagtacagcctgagccccagcaagagctacaagtacagccccaagaccccccccagatgggccgaggaccagaacagcctgctgaagatgatcagacaggaggtgaaggccatcaaggaggagatgcaggagctgaagctgaacagcagcaagagcgccagccaccacagatggcccaccgagaactacggccccgacagcgtgcccgacggctaccagggcagccagaccttccacggcgcccccctgaccgtggccaccaccggccccagcgtgtactacagccagagccccgcctacaacagccagtacctgctgagacccgccgccaacgtgacccccaccaagggcagcagcaacaccgagttcaagagcaccaaggagggcttcagcatccccgtgagcgccgacggcttcaagttcggcatcagcgagcccggcaaccaggagaaggagagcgagaagcccctggagaacgacaccggcttccaggcccaggacatcagcggccagaagaacggcagaggcgtgatcttcggccagaccagcagcaccttcaccttcgccgacgtggccaagagcaccagcggcgagggcttccagttcggcaagaaggaccccaacttcaagggcttcagcggcgccggcgagaagctgttcagcagccagtgcggcaagatggccaacaaggccaacaccagcggcgacttcgagaaggacgacgacgcctacaagaccgaggacagcgacgacatccacttcgagcccgtggtgcagatgcccgagaaggtggagctggtgatcggcgaggagggcgagaaggtgctgtacagccagggcgtgaagctgttcagattcgacgccgaggtgagacagtggaaggagagaggcctgggcaacctgaagatcctgaagaacgaggtgaacggcaagcccagaatgctgatgagaagagagcaggtgctgaaggtgtgcgccaaccactggatcaccaccaccatgaacctgaagcccctgagcggcagcgacagagcctggatgtggagcgccagcgacttcagcgacggcgacgccaagctggagagactggccgccaagttcaagacccccgagctggccgaggagttcaagcagaagttcgaggagtgccagcagctgctgctggacatccccctgcagaccccccacaagctggtggacaccggcagagccgccaagctgatccagagagccgaggagatgaagagcggcctgaaggacttcaagaccttcctgaccaacgaccagaccaaggtgaccgaggaggagaacaagggcagcggcaccggcgccgccggcgccagcgacaccaccatcaagcccaaccccgagaacaccggccccaccctggagtgggacaactgcgacctgagagaggacgccctggacgacagcgtgagcagcagcagcgtgcacgccagccccctggccagcagccccgtgagaaagaacctgttccacttcggcgagagcaccaccggcagcaacttcagcttcaagagcgccctgagccccagcaagagccccgccaagctgaaccagagcggcaccagcgtgggcaccgacgaggagagcgacgtgacccaggaggaggagagagacggccagtacttcgagcccgtggtgcccctgcccgacctggtggaggtgagcagcggcgaggagaacgagaaggtggtgttcagccacagagccgagctgtacagatacgacaaggacgtgggccagtggaaggagagaggcatcggcgacatcaagatcctgcagaactacgacaacaagcaggtgagaatcgtgatgagaagagaccaggtgctgaagctgtgcgccaaccacaccatcacccccgacatgagcctgcagaacatgaagggcaccgagagagtgtgggtgtggaccgcctgcgacttcgccgacggcgagagaaaggtggagcacctggccgtgagattcaagctgcaggacgtggccgacagcttcaagaagatcttcgacgaggccaagaccgcccaggagaaggacagcctgatcaccccccacgtgagcagaagcagcacccccagagagagcccctgcggcaagatcgccgtggccgtgctggaggagaccaccagagagagaaccgacgtgatccagggcgacgacgtggccgacgccgccagcgaggtggaggtgagcagcaccagcgagaccaccaccaaggccgtggtgagcccccccaagttcgtgttcggcagcgagagcgtgaagagaatcttcagcagcgagaagagcaagcccttcgccttcggcaacagcagcgccaccggcagcctgttcggcttcagcttcaacgccagcctgaagagcaacaacagcgagaccagcagcgtggcccagagcggcagcgagagcaaggtggagcccaagaagtgcgagctgagcaagaacagcgacatcgagcagagcagcgacagcaaggtgaagaacctgagcgccagcttccccatggaggagagcagcatcaactacaccttcaagacccccgagaaggagccccccctgtggcacgccgagttcaccaaggaggagctggtgcagaagctgagcagcaccaccaagagcgccgaccacctgaacggcctgctgagagaggccgaggccaccagcgccgtgctgatggagcagatcaagctgctgaagagcgagatcagaagactggagagaaaccaggagcaggaggagagcgccgccaacgtggagcacctgaagaacgtgctgctgcagttcatcttcctgaagcccggcagcgagagagagagactgctgcccgtgatcaacaccatgctgcagctgagccccgaggagaagggcaagctggccgccgtggcccaggccgagagaggcttcgtgctgaacagcaccttctag

SEQ ID NO: 96315 - DNA, 3378 bp, synthetic construct
  misc_feature 1..3378: note = Description of Artificial Sequence: Synthetic coding sequence
  source 1..3378: mol_type = other DNA
atgctgctgaccctgagcaccagagacgtgcaggagagcagagagctgctggagagcttcgacagcgccctgcagagcgccaagagcagcctgggcggcaacgacgagctgagcgccaccttcctggagatgaagggccacttctacatgcacgccggcagcctgctgctgaagatgggccagcacggcaacaacgtgcagtggagagccctgagcgagctggccgccctgtgctacctgatcgccttccaggtgcccagacccaagatcaagctgatcaagggcgaggccggccagaacctgctggagatgatggcctgcgacagactgagccagagcggccacatgctgctgaacctgagcagaggcaagcaggacttcctgaaggtggtggtggagaccttcgccaacaagagcggccagagcgccctgtacgacgccctgttcagcagccagagccccaaggacaccagcttcctgggcagcgacgacatcggcaacatcgacgtgcaggagcccgagctggaggacctggccagatacgacgtgggcgccatcagagcccacaacggcagcctgcagcacctgacctggctgggcctgcagtggaacagcctgcccgccctgcccggcatcagaaagtggctgaagcagctgttccaccacctgccccaggagaccagcagactggagaccaacgcccccgagagcatctgcatcctggacctggaggtgttcctgctgggcgtggtgtacaccagccacctgcagctgaaggagaagtgcaacagccaccacagcagctaccagcccctgtgcctgcccctgcccgtgtgcaagcagctgtgcaccgagagacagaagagctggtgggacgccgtgtgcaccctgatccacagaaaggccgtgcccggcaacagcgccaagctgagactgctggtgcagcacgagatcaacaccctgagagcccaggagaagcacggcctgcagcccgccctgctggtgcactgggccaagtgcctgcagaagatgggcagcggcctgaacagcttctacgaccagagagagtacatcggcagaagcgtgcactactggaagaaggtgctgcccctgctgaagatcatcaagaagaagaacagcatccccgagcccatcgaccccctgttcaagcacttccacagcgtggacatccaggccagcgagatcgtggagtacgaggaggacgcccacgtgaccttcgccatcctggacgccgtgaacggcaacatcgaggacgccatgaccgccttcgagagcatcaagagcgtggtgagctactggaacctggccctgatcttccacagaaaggccgaggacatcgccaacgacgccctgagccccgaggagcaggaggagtgcaagaactacctgagaaagaccagaggctacctgatcaagatcctggacgacagcgacagcaacctgagcgtggtgaagaagctgcccgtgcccctggagagcgtgaaggagatgctgaagagcgtgatgcaggagctggagaactacagcgagggcgaccccctgtacaagaacggcagcctgagaaacgccgacagcgagatcaagcacagcacccccagccccaccaagtacagcctgagccccagcaagagctacaagtacagccccaagaccccccccagatgggccgaggaccagaacagcctgctgaagatgatcagacaggaggtgaaggccatcaaggaggagatgcaggagctgaagctgaacagcagcaagagcgccagccaccacagatggcccaccgagaactacggccccgacagcgtgcccgacggctaccagggcagccagaccttccacggcgcccccctgaccgtggccaccaccggccccagcgtgtactacagccagagccccgcctacaacagccagtacctgctgagacccgccgccaacgtgacccccaccaagggcagcagcaacaccgagttcaagagcaccaaggagggcttcagcatccccgtgagcgccgacggcttcaagttcggcatcagcgagcccggcaaccaggagaaggagagcgagaagcccctggagaacgacaccggcttccaggcccaggacatcagcggccagaagaacggcagaggcgtgatcttcggccagaccagcagcaccttcaccttcgccgacgtggccaagagcaccagcggcgagggcttccagttcggcaagaaggaccccaacttcaagggcttcagcggcgccggcgagaagctgttcagcagccagtgcggcaagatggccaacaaggccaacaccagcggcgacttcgagaaggacgacgacgcctacaagaccgaggacagcgacgacatccacttcgagcccgtggtgcagatgcccgagaaggtggagctggtgatcggcgaggagggcgagaaggtgctgtacagccagggcgtgaagctgttcagattcgacgccgaggtgagacagtggaaggagagaggcctgggcaacctgaagatcctgaagaacgaggtgaacggcaagcccagaatgctgatgagaagagagcaggtgctgaaggtgtgcgccaaccactggatcaccaccaccatgaacctgaagcccctgagcggcagcgacagagcctggatgtggagcgccagcgacttcagcgacggcgacgccaagctggagagactggccgccaagttcaagacccccgagctggccgaggagttcaagcagaagttcgaggagtgccagcagctgctgctggacatccccctgcagaccccccacaagctggtggacaccggcagagccgccaagctgatccagagagccgaggagatgaagagcggcagcgagagcaaggtggagcccaagaagtgcgagctgagcaagaacagcgacatcgagcagagcagcgacagcaaggtgaagaacctgagcgccagcttccccatggaggagagcagcatcaactacaccttcaagacccccgagaaggagccccccctgtggcacgccgagttcaccaaggaggagctggtgcagaagctgagcagcaccaccaagagcgccgaccacctgaacggcctgctgagagaggccgaggccaccagcgccgtgctgatggagcagatcaagctgctgaagagcgagatcagaagactggagagaaaccaggagcaggaggagagcgccgccaacgtggagcacctgaagaacgtgctgctgcagttcatcttcctgaagcccggcagcgagagagagagactgctgcccgtgatcaacaccatgctgcagctgagccccgaggagaagggcaagctggccgccgtggcccagggcgaggagtag

SEQ ID NO: 96316 - DNA, 471 bp, synthetic construct
  misc_feature 1..471: note = Description of Artificial Sequence: Synthetic coding sequence
  source 1..471: mol_type = other DNA
atggaccccagagcccacagattcctgggcctgctgtacgagctggaggagaacaccgagaaggccgtggagtgctacagaagaagcgtggagctgaaccccacccagaaggacctggtgctgaagatcgccgagctgctgtgcaagaacgacgtgaccgacggcagagccaagtactgggtggagagagccgccaagctgttccccggcagccccgccatctacaagctgaaggagcagctgctggactgcgagggcgaggacggctggaacaagctgttcgacctgatccagagcgagctgtacgtgagacccgacgacgtgcacgtgaacatcagactggtggagctgtacagaagcaccaagagactgaaggacgccgtggccagatgccacgaggccgagagaaacatcgccctgagaagcagcctggagtggaacagctgcgtggtgcagaccctgaagttctag

SEQ ID NO: 96317 - DNA, 5277 bp, synthetic construct
  misc_feature 1..5277: note = Description of Artificial Sequence: Synthetic coding sequence
  source 1..5277: mol_type = other DNA
atgagctgcagcaaggcctacggcgagagatacgtggccagcgtgcagggcagcgcccccagccccagaaagaagagcaccagaggcttctacttcgccaagctgtactacgaggccaaggagtacgacctggccaagaagtacatctgcacctacatcaacgtgagagagatggaccccagagcccacagattcctgggcctgctgtacgagctggaggagaacaccgagaaggccgtggagtgctacagaagaagcgtggagctgaaccccacccagaaggacctggtgctgaagatcgccgagctgctgtgcaagaacgacgtgaccgacggcagagccaagtactgggtggagagagccgccaagctgttccccggcagccccgccatctacaagctgaaggagcagctgctggactgcgagggcgaggacggctggaacaagctgttcgacctgatccagagcgagctgtacgtgagacccgacgacgtgcacgtgaacatcagactggtggagctgtacagaagcaccaagagactgaaggacgccgtggccagatgccacgaggccgagagaaacatcgccctgagaagcagcctggagtggaacagctgcgtggtgcagaccctgaaggagtacctggagagcctgcagtgcctggagagcgacaagagcgactggagagccaccaacaccgacctgctgctggcctacgccaacctgatgctgctgaccctgagcaccagagacgtgcaggagagcagagagctgctggagagcttcgacagcgccctgcagagcgccaagagcagcctgggcggcaacgacgagctgagcgccaccttcctggagatgaagggccacttctacatgcacgccggcagcctgctgctgaagatgggccagcacggcaacaacgtgcagtggagagccctgagcgagctggccgccctgtgctacctgatcgccttccaggtgcccagacccaagatcaagctgatcaagggcgaggccggccagaacctgctggagatgatggcctgcgacagactgagccagagcggccacatgctgctgaacctgagcagaggcaagcaggacttcctgaaggtggtggtggagaccttcgccaacaagagcggccagagcgccctgtacgacgccctgttcagcagccagagccccaaggacaccagcttcctgggcagcgacgacatcggcaacatcgacgtgcaggagcccgagctggaggacctggccagatacgacgtgggcgccatcagagcccacaacggcagcctgcagcacctgacctggctgggcctgcagtggaacagcctgcccgccctgcccggcatcagaaagtggctgaagcagctgttccaccacctgccccaggagaccagcagactggagaccaacgcccccgagagcatctgcatcctggacctggaggtgttcctgctgggcgtggtgtacaccagccacctgcagctgaaggagaagtgcaacagccaccacagcagctaccagcccctgtgcctgcccctgcccgtgtgcaagcagctgtgcaccgagagacagaagagctggtgggacgccgtgtgcaccctgatccacagaaaggccgtgcccggcaacagcgccaagctgagactgctggtgcagcacgagatcaacaccctgagagcccaggagaagcacggcctgcagcccgccctgctggtgcactgggccaagtgcctgcagaagatgggcagcggcctgaacagcttctacgaccagagagagtacatcggcagaagcgtgcactactggaagaaggtgctgcccctgctgaagatcatcaagaagaagaacagcatccccgagcccatcgaccccctgttcaagcacttccacagcgtggacatccaggccagcgagatcgtggagtacgaggaggacgcccacgtgaccttcgccatcctggacgccgtgaacggcaacatcgaggacgccatgaccgccttcgagagcatcaagagcgtggtgagctactggaacctggccctgatcttccacagaaaggccgaggacatcgccaacgacgccctgagccccgaggagcaggaggagtgcaagaactacctgagaaagaccagaggctacctgatcaagatcctggacgacagcgacagcaacctgagcgtggtgaagaagctgcccgtgcccctggagagcgtgaaggagatgctgaagagcgtgatgcaggagctggagaactacagcgagggcgaccccctgtacaagaacggcagcctgagaaacgccgacagcgagatcaagcacagcacccccagccccaccaagtacagcctgagccccagcaagagctacaagtacagccccaagaccccccccagatgggccgaggaccagaacagcctgctgaagatgatcagacaggaggtgaaggccatcaaggaggagatgcaggagctgaagctgaacagcagcaagagcgccagccaccacagatggcccaccgagaactacggccccgacagcgtgcccgacggctaccagggcagccagaccttccacggcgcccccctgaccgtggccaccaccggccccagcgtgtactacagccagagccccgcctacaacagccagtacctgctgagacccgccgccaacgtgacccccaccaagggcagcagcaacaccgagttcaagagcaccaaggagggcttcagcatccccgtgagcgccgacggcttcaagttcggcatcagcgagcccggcaaccaggagaaggagagcgagaagcccctggagaacgacaccggcttccaggcccaggacatcagcggccagaagaacggcagaggcgtgatcttcggccagaccagcagcaccttcaccttcgccgacgtggccaagagcaccagcggcgagggcttccagttcggcaagaaggaccccaacttcaagggcttcagcggcgccggcgagaagctgttcagcagccagtgcggcaagatggccaacaaggccaacaccagcggcgacttcgagaaggacgacgacgcctacaagaccgaggacagcgacgacatccacttcgagcccgtggtgcagatgcccgagaaggtggagctggtgatcggcgaggagggcgagaaggtgctgtacagccagggcgtgaagctgttcagattcgacgccgaggtgagacagtggaaggagagaggcctgggcaacctgaagatcctgaagaacgaggtgaacggcaagcccagaatgctgatgagaagagagcaggtgctgaaggtgtgcgccaaccactggatcaccaccaccatgaacctgaagcccctgagcggcagcgacagagcctggatgtggagcgccagcgacttcagcgacggcgacgccaagctggagagactggccgccaagttcaagacccccgagctggccgaggagttcaagcagaagttcgaggagtgccagcagctgctgctggacatccccctgcagaccccccacaagctggtggacaccggcagagccgccaagctgatccagagagccgaggagatgaagagcggcctgaaggacttcaagaccttcctgaccaacgaccagaccaaggtgaccgaggaggagaacaagggcagcggcaccggcgccgccggcgccagcgacaccaccatcaagcccaaccccgagaacaccggccccaccctggagtgggacaactgcgacctgagagaggacgccctggacgacagcgtgagcagcagcagcgtgcacgccagccccctggccagcagccccgtgagaaagaacctgttccacttcggcgagagcaccaccggcagcaacttcagcttcaagagcgccctgagccccagcaagagccccgccaagctgaaccagagcggcaccagcgtgggcaccgacgaggagagcgacgtgacccaggaggaggagagagacggccagtacttcgagcccgtggtgcccctgcccgacctggtggaggtgagcagcggcgaggagaacgagaaggtggtgttcagccacagagccgagctgtacagatacgacaaggacgtgggccagtggaaggagagaggcatcggcgacatcaagatcctgcagaactacgacaacaagcaggtgagaatcgtgatgagaagagaccaggtgctgaagctgtgcgccaaccacaccatcacccccgacatgagcctgcagaacatgaagggcaccgagagagtgtgggtgtggaccgcctgcgacttcgccgacggcgagagaaaggtggagcacctggccgtgagattcaagctgcaggacgtggccgacagcttcaagaagatcttcgacgaggccaagaccgcccaggagaaggacagcctgatcaccccccacgtgagcagaagcagcacccccagagagagcccctgcggcaagatcgccgtggccgtgctggaggagaccaccagagagagaaccgacgtgatccagggcgacgacgtggccgacgccgccagcgaggtggaggtgagcagcaccagcgagaccaccaccaaggccgtggtgagcccccccaagttcgtgttcggcagcgagagcgtgaagagaatcttcagcagcgagaagagcaagcccttcgccttcggcaacagcagcgccaccggcagcctgttcggcttcagcttcaacgccagcctgaagagcaacaacagcgagaccagcagcgtggcccagagcggcagcgagagcaaggtggagcccaagaagtgcgagctgagcaagaacagcgacatcgagcagagcagcgacagcaaggtgaagaacctgagcgccagcttccccatggaggagagcagcatcaactacaccttcaagacccccgagaaggagccccccctgtggcacgccgagttcaccaaggaggagctggtgcagaagctgagcagcaccaccaagagcgccgaccacctgaacggcctgctgagagaggccgaggccaccagcgccgtgctgatggagcagatcaagctgctgaagagcgagatcagaagactggagagaaaccaggagcaggaggagagcgccgccaacgtggagcacctgaagaacgtgctgctgcagttcatcttcctgaagcccggcagcgagagagagagactgctgcccgtgatcaacaccatgctgcagctgagccccgaggagaagggcaagctggccgccgtggcccagggcgaggagtag

SEQ ID NO: 96318 - DNA, 5298 bp, synthetic construct
  misc_feature 1..5298: note = Description of Artificial Sequence: Synthetic coding sequence
  source 1..5298: mol_type = other DNA
atgagaagaagcaaggccgacgtggagagatacgtggccagcgtgctgggcctgacccccagccccagacagaagagcatgaagggcttctacttcgccaagctgtactacgaggccaaggagtacgacctggccaagaagtacatctgcacctacatcaacgtgcaggagagagaccccaaggcccacagattcctgggcctgctgtacgagctggaggagaacaccgagaaggccgtggagtgctacagaagaagcgtggagctgaaccccacccagaaggacctggtgctgaagatcgccgagctgctgtgcaagaacgacgtgaccgacggcagagccaagtactgggtggagagagccgccaagctgttccccggcagccccgccatctacaagctgaaggagcagctgctggactgcgagggcgaggacggctggaacaagctgttcgacctgatccagagcgagctgtacgtgagacccgacgacgtgcacgtgaacatcagactggtggagctgtacagaagcaccaagagactgaaggacgccgtggcccactgccacgaggccgagagaaacatcgccctgagaagcagcctggagtggaacagctgcgtggtgcagaccctgaaggagtacctggagagcctgcagtgcctggagagcgacaagagcgactggcaggccaccaacaccgacctgctgctggcctacgccaacctgatgctgctgaccctgagcaccagagacgtgcaggagaacagagagctgctggagagcttcgacagcgccctgcagagcgccaagagcagcctgggcggcaacgacgagctgagcgccaccttcctggagatgaagggccacttctacatgtacgccggcagcctgctgctgaagatgggccagcacggcaacaacgtgcagtggagagccctgagcgagctggccgccctgtgctacctgatcgccttccaggtgcccagacccaagatcaagctgagagagggcaaggccggccagaacctgctggagatgatggcctgcgacagactgagccagagcggccacatgctgctgagcctgagcagaggcaagcaggacttcctgaaggaggtggtggagaccttcgccaacaagatcggccagagcgccctgtacgacgccctgttcagcagccagagccccaaggacaccagcttcctgggcagcgacgacatcggcaagatcgacgtgcaggagcccgagctggaggacctggccagatacgacgtgggcgccatcagagcccacaacggcagcctgcagcacctgacctggctgggcctgcagtggaacagcctgcccgccctgcccggcatcagaaagtggctgaagcagctgttccacagactgccccacgagaccagcagactggagaccaacgcccccgagagcatctgcatcctggacctggaggtgttcctgctgggcgtggtgtacaccagccacctgcagctgaaggagaagtgcaacagccaccacagcagctaccagcccctgtgcctgcccttccccgtgtgcaagcagctgtgcaccgagagacagaagagctggtgggacgccgtgtgcaccctgatccacagaaaggccgtgcccggcaacctggccaagctgagactgctggtgcagcacgagatcaacaccctgagagcccaggagaagcacggcctgcagcccgccctgctggtgcactgggccaagtacctgcagaagaccggcagcggcctgaacagcttctacggccagctggagtacatcggcagaagcgtgcactactggaagaaggtgctgcccctgctgaagatcatcaagaagaacagcatccccgagcccatcgaccccctgttcaagcacttccacagcgtggacatccaggccagcgagatcgtggagtacgaggaggacgcccacatcaccttcgccatgctggacgccgtgaacggcaacatcgaggacgccgtgaccgccttcgagagcatcaagagcgtggtgagctactggaacctggccctgatcttccacagaaaggccgaggacatcgagaacgacgccctgagccccgaggagcaggaggagtgcagaaactacctgaccaagaccagagactacctgatcaagatcatcgacgacggcgacagcaacctgagcgtggtgaagaagctgcccgtgcccctggagagcgtgaagcagatgctgaacagcgtgatgcaggagctggaggactacagcgagggcggccccctgtacaagaacggcagcctgagaaacgccgacagcgagatcaagcacagcacccccagccccaccaagtacagcctgagccccagcaagagctacaagtacagccccgagaccccccccagatggaccgaggacagaaacagcctgctgaacatgatctgccagcaggtggaggccatcaagaaggagatgcaggagctgaagctgaacagcagcaagagcgccagcagacacagatggcccaccgagaactacggccccgacagcgtgcccgacggctaccagggcagccagaccttccacggcgcccccctgaccgtggccaccaccggccccagcgtgtactacagccagagccccgcctacaacagccagtacctgctgagacccgccgccaacgtgacccccaccaagggcagcagcaacaccgagttcaagagcaccaaggagggcttcagcatccccgtgagcgccgacggcttcaagttcggcatcagcgagcccggcaaccaggagaagaagagagagaagcccctggagaacgacaccggcttccaggcccaggacatcagcggcagaaagaagggcagaggcgtgatcttcggccagaccagcagcaccttcaccttcgccgacgtggccaagagcaccagcggcgagggcttccagttcggcaagaaggacctgaacttcaagggcttcagcggcgccggcgagaagctgttcagcagcagatacggcaagatggccaacaaggccaacaccagcggcgacttcgagaaggacgacgacgcctacaagaccgaggacagcgacgacatccacttcgagcccgtggtgcagatgcccgagaaggtggagctggtgaccggcgaggagggcgagaaggtgctgtacagccagggcgtgaagctgttcagattcgacgccgaggtgagacagtggaaggagagaggcctgggcaacctgaagatcctgaagaacgaggtgaacggcaagctgagaatgctgatgagaagagagcaggtgctgaaggtgtgcgccaaccactggatcaccaccaccatgaacctgaagcccctgagcggcagcgacagagcctggatgtggagcgccagcgacttcagcgacggcgacgccaagctggagagactggccgccaagttcaagacccccgagctggccgaggagttcaagcagaagttcgaggagtgccagagactgctgctggacatccccctgcagaccccccacaagctggtggacaccggcagagccgccaagctgatccagagagccgaggagatgaagagcggcctgaaggacttcaagaccttcctgaccaacgaccagaccaaggtgaccgaggaggagaacaagggcagcggcaccggcgccgccggcgccagcgacaccaccatcaagcccaacgccgagaacaccggccccaccctggagtgggacaactacgacctgagagaggacgccctggacgacagcgtgagcagcagcagcgtgcacgccagccccctggccagcagccccgtgagaaagaacctgttcagattcgacgagagcaccaccggcagcaacttcagcttcaagagcgccctgagcctgagcaagagccccgccaagctgaaccagagcggcaccagcgtgggcaccgacgaggagagcgtggtgacccaggaggaggagagagacggccagtacttcgagcccgtggtgcccctgcccgacctggtggaggtgagcagcggcgaggagaacgagcaggtggtgttcagccacagagccgagatctacagatacgacaaggacgtgggccagtggaaggagagaggcatcggcgacatcaagatcctgcagaactacgacaacaagcaggtgagaatcgtgatgagaagagaccaggtgctgaagctgtgcgccaaccacagaatcacccccgacatgagcctgcagaacatgaagggcaccgagagagtgtgggtgtggaccgcctgcgacttcgccgacggcgagagaaaggtggagcacctggccgtgagattcaagctgcaggacgtggccgacagcttcaagaagatcttcgacgaggccaagaccgcccaggagaaggacagcctgatcaccccccacgtgagcagaagcagcacccccagagagagcccctgcggcaagatcgccgtggccatcctggaggagaccaccagagagagaaccgacgtgatccagggcgacgacgtggccgacgccgccagcgaggtggaggtgagcagcaccagcgagaccaccaccaaggccgtggtgagcccccccaagttcgtgttcgtgagcgagagcgtgaagagaatcttcagcagcgagaagagcaagcccttcgtgttcggcaacagcagcgccaccggcagcctgttcggcttcagcttcaacgcccccctgaagagcaacaacagcgagaccagcagcgtggcccagagcggcagcgagagcaaggtggagcccaagaagtgcgagctgagcaagaacagcgacatcgagcagagcagcgacagcaaggtgaagaacctgagcgccagcttccccaccgaggagagcagcatcaactacaccttcaagacccccgagaaggagccccccctgtggcacgccgagttcaccaaggaggagctggtgcagaagctgagaagcaccaccaagagcgccgaccacctgaacggcctgctgagagagatcgaggccaccaacgccgtgctgatggagcagatcaagctgctgaagagcgagatcagaagactggagagaaaccaggagagagagaagagcgccgccaacctggagtacctgaagaacgtgctgctgcagttcatcttcctgaagcccggcagcgagagagagagactgctgcccgtgatcaacaccatgctgcagctgagccccgaggagaagggcaagctggccgccgtggcccaggacgaggaggagaacgccagcagaagcagcggctag

SEQ ID NO: 96319 - DNA, 2715 bp, synthetic construct
  misc_feature 1..2715: note = Description of Artificial Sequence: Synthetic coding sequence
  source 1..2715: mol_type = other DNA
atgagaagaagcaaggccgacgtggagagatacgtggccagcgtgctgggcctgacccccagccccagacagaagagcatgaagggcttctacttcgccaagctgtactacgaggccaaggagtacgacctggccaagaagtacatctgcacctacatcaacgtgcaggagagagaccccaaggcccacagattcctgggcctgctgtacgagctggaggagaacaccgagaaggccgtggagtgctacagaagaagcgtggagctgaaccccacccagaaggacctggtgctgaagatcgccgagctgctgtgcaagaacgacgtgaccgacggcagagccaagtactgggtggagagagccgccaagctgttccccggcagccccgccatctacaagctgaaggagcagctgctggactgcgagggcgaggacggctggaacaagctgttcgacctgatccagagcgagctgtacgtgagacccgacgacgtgcacgtgaacatcagactggtggagctgtacagaagcaccaagagactgaaggacgccgtggcccactgccacgaggccgagagaaacatcgccctgagaagcagcctggagtggaacagctgcgtggtgcagaccctgaaggagtacctggagagcctgcagtgcctggagagcgacaagagcgactggcaggccaccaacaccgacctgctgctggcctacgccaacctgatgctgctgaccctgagcaccagagacgtgcaggagaacagagagctgctggagagcttcgacagcgccctgcagagcgccaagagcagcctgggcggcaacgacgagctgagcgccaccttcctggagatgaagggccacttctacatgtacgccggcagcctgctgctgaagatgggccagcacggcaacaacgtgcagtggagagccctgagcgagctggccgccctgtgctacctgatcgccttccaggtgcccagacccaagatcaagctgagagagggcaaggccggccagaacctgctggagatgatggcctgcgacagactgagccagagcggccacatgctgctgagcctgagcagaggcaagcaggacttcctgaaggaggtggtggagaccttcgccaacaagatcggccagagcgccctgtacgacgccctgttcagcagccagagccccaaggacaccagcttcctgggcagcgacgacatcggcaagatcgacgtgcaggagcccgagctggaggacctggccagatacgacgtgggcgccatcagagcccacaacggcagcctgcagcacctgacctggctgggcctgcagtggaacagcctgcccgccctgcccggcatcagaaagtggctgaagcagctgttccacagactgccccacgagaccagcagactggagaccaacgcccccgagagcatctgcatcctggacctggaggtgttcctgctgggcgtggtgtacaccagccacctgcagctgaaggagaagtgcaacagccaccacagcagctaccagcccctgtgcctgcccttccccgtgtgcaagcagctgtgcaccgagagacagaagagctggtgggacgccgtgtgcaccctgatccacagaaaggccgtgcccggcaacctggccaagctgagactgctggtgcagcacgagatcaacaccctgagagcccaggagaagcacggcctgcagcccgccctgctggtgcactgggccaagtacctgcagaagaccggcagcggcctgaacagcttctacggccagctggagtacatcggcagaagcgtgcactactggaagaaggtgctgcccctgctgaagatcatcaagaagaacagcatccccgagcccatcgaccccctgttcaagcacttccacagcgtggacatccaggccagcgagatcgtggagtacgaggaggacgcccacatcaccttcgccatgctggacgccgtgaacggcaacatcgaggacgccgtgaccgccttcgagagcatcaagagcgtggtgagctactggaacctggccctgatcttccacagaaaggccgaggacatcgagaacgacgccctgagccccgaggagcaggaggagtgcagaaactacctgaccaagaccagagactacctgatcaagatcatcgacgacggcgacagcaacctgagcgtggtgaagaagctgcccgtgcccctggagagcgtgaagcagatgctgaacagcgtgatgcaggagctggaggactacagcgagggcggccccctgtacaagaacggcagcctgagaaacgccgacagcgagatcaagcacagcacccccagccccaccaagtacagcctgagccccagcaagagctacaagtacagccccgagaccccccccagatggaccgaggacagaaacagcctgctgaacatgatctgccagcaggtggaggccatcaagaaggagatgcaggagctgaagctgaacagcagcaagagcgccagcagacacagatggcccaccgagaactacggccccgacagcgtgcccgacggctaccagggcagccagaccttccacggcgcccccctgaccgaggccgcccacagacacttcaccatcgagaagcacggcgacagcaagtggatcatctacagattcaccaagcagctgtgcggcaccgagagagccagagccaagatcagctag

SEQ ID NO: 96320 - DNA, 459 bp, synthetic construct
  misc_feature 1..459: note = Description of Artificial Sequence: Synthetic coding sequence
  source 1..459: mol_type = other DNA
atgtggagcggcaccagccccagatgctgggtgagccccagaagactggacagatacatctgcacctacatcaacgtgcaggagagagaccccaaggcccacagattcctgggcctgctgtacgagctggaggagaacaccgagaaggccgtggagtgctacagaagaagcgtggagctgaaccccacccagaaggacctggtgctgaagatcgccgagctgctgtgcaagaacgacgtgaccgacggcagagccaagtactgggtggagagagccgccaagctgttccccggcagccccgccatctacaagctgaaggagcagctgctggactgcgagggcgaggacggctggaacaagctgttcgacctgatccagagcgagctgtacgtgagacccgacgacgtgcacgtgaacatcagactggtggagctgtacagaagcaccaagagactgtag

SEQ ID NO: 96321 - DNA, 2715 bp, synthetic construct; identical to SEQ ID NO: 96319
  misc_feature 1..2715: note = Description of Artificial Sequence: Synthetic coding sequence
  source 1..2715: mol_type = other DNA

SEQ ID NO: 96322 - DNA, 5298 bp, synthetic construct; identical to SEQ ID NO: 96318
  misc_feature 1..5298: note = Description of Artificial Sequence: Synthetic coding sequence
  source 1..5298: mol_type = other DNA

SEQ ID NO: 96323 - DNA, 2715 bp, synthetic construct; identical to SEQ ID NO: 96319
  misc_feature 1..2715: note = Description of Artificial Sequence: Synthetic coding sequence
  source 1..2715: mol_type = other DNA

SEQ ID NO: 96324 - DNA, 5298 bp, synthetic construct
  misc_feature 1..5298: note = Description of Artificial Sequence: Synthetic coding sequence
  source 1..5298: mol_type = other DNA
atgagaagaagcaaggccgacgtggagagatacgtggccagcgtgctgggcctgacccccagccccagacagaagagcatgaagggcttctacttcgccaagctgtactacgaggccaaggagtacgacctggccaagaagtacatctgcacctacatcaacgtgcaggagagagaccccaaggcccacagattcctgggcctgctgtacgagctggaggagaacaccgagaaggccgtggagtgctacagaagaagcgtggagctgaaccccacccagaaggacctggtgctgaagatcgccgagctgctgtgcaagaacgacgtgaccgacggcagagccaagtactgggtggagagagccgccaagctgttccccggcagccccgccatctacaagctgaaggagcagctgctggactgcgagggcgaggacggctggaacaagctgttcgacctgatccagagcgagctgtacgtgagacccgacgacgtgcacgtgaacatcagactggtggagctgtacagaagcaccaagagactgaaggacgccgtggcccactgccacgaggccgagagaaacatcgccctgagaagcagcctggagtggaacagctgcgtggtgcagaccctgaaggagtacctggagagcctgcagtgcctggagagcgacaagagcgactggagagccaccaacaccgacctgctgctggcctacgccaacctgatgctgctgaccctgagcaccagagacgtgcaggagaacagagagctgctggagagcttcgacagcgccctgcagagcgccaagagcagcctgggcggcaacgacgagctgagcgccaccttcctggagatgaagggccacttctacatgtacgccggcagcctgctgctgaagatgggccagcacggcaacaacgtgcagtggagagccctgagcgagctggccgccctgtgctacctgatcgccttccaggtgcccagacccaagatcaagctgagagagggcaaggccggccagaacctgctggagatgatggcctgcgacagactgagccagagcggccacatgctgctgagcctgagcagaggcaagcaggacttcctgaaggaggtggtggagaccttcgccaacaagatcggccagagcgccctgtacgacgccctgttcagcagccagagccccaaggacaccagcttcctgggcagcgacgacatcggcaagatcgacgtgcaggagcccgagctggaggacctggccagatacgacgtgggcgccatcagagcccacaacggcagcctgcagcacctgacctggctgggcctgcagtggaacagcctgcccgccctgcccggcatcagaaagtggctgaagcagctgttccacagactgccccacgagaccagcagactggagaccaacgcccccgagagcatctgcatcctggacctggaggtgttcctgctgggcgtggtgtacaccagccacctgcagctgaaggagaagtgcaacagccaccacagcagctaccagcccctgtgcctgcccttccccgtgtgcaagcagctgtgcaccgagagacagaagagctggtgggacgccgtgtgcaccctgatccacagaaaggccgtgcccggcaacctggccaagctgagactgctggtgcagcacgagatcaacaccctgagagcccaggagaagcacggcctgcagcccgccctgctggtgcactgggccaagtacctgcagaagaccggcagcggcctgaacagcttctacggccagctggagtacatcggcagaagcgtgcactactggaagaaggtgctgcccctgctgaagatcatcaagaagaacagcatccccgagcccatcgaccccctgttcaagcacttccacagcgtggacatccaggccagcgagatcgtggagtacgaggaggacgcccacatcaccttcgccatcctggacgccgtgaacggcaacatcgaggacgccgtgaccgccttcgagagcatcaagagcgtggtgagctactggaacctggccctgatcttccacagaaaggccgaggacatcgagaacgacgccctgagccccgaggagcaggaggagtgcagaaactacctgaccaagaccagagactacctgatcaagatcatcgacgacggcgacagcaacctgagcgtggtgaagaagctgcccgtgcccctggagagcgtgaagcagatgctgaacagcgtgatgcaggagctggaggactacagcgagggcggccccctgtacaagaacggcagcctgagaaacgccgacagcgagatcaagcacagcacccccagccccaccaagtacagcctgagccccagcaagagctacaagtacagccccgagaccccccccagatggaccgaggacagaaacagcctgctgaacatgatctgccagcaggtggaggccatcaagaaggagatgcaggagctgaagctgaacagcagcaagagcgccagcagacacagatggcccaccgagaactacggccccgacagcgtgcccgacggctaccagggcagccagaccttccacggcgcccccctgaccgtggccaccaccggccccagcgtgtactacagccagagccccgcctacaacagccagtacctgctgagacccgccgccaacgtgacccccaccaagggcagcagcaacaccgagttcaagagcaccaaggagggcttcagcatccccgtgagcgccgacggcttcaagttcggcatcagcgagcccggcaaccaggagaagaagagagagaagcccctggagaacgacaccggcctgcaggcccaggacatcagaggcagaaagaagggcagaggcgtgatcttcggccagaccagcagcaccttcaccttcgccgacgtggccaagagcaccagcggcgagggcttccagttcggcaagaaggacctgaacttcaagggcttcagcggcgccggcgagaagctgttcagcagcagatacggcaagatggccaacaaggccaacaccagcggcgacttcgagaaggacgacgacgcctacaagaccgaggacagcgacgacatccacttcgagcccgtggtgcagatgcccgagaaggtggagctggtgaccggcgaggagggcgagaaggtgctgtacagccagggcgtgaagctgttcagattcgacgccgaggtgagacagtggaaggagagaggcctgggcaacctgaagatcctgaagaacgaggtgaacggcaagctgagaatgctgatgagaagagagcaggtgctgaaggtgtgcgccaaccactggatcaccaccaccatgaacctgaagcccctgagcggcagcgacagagcctggatgtggagcgccagcgacttcagcgacggcgacgccaagctggagagactggccgccaagttcaagacccccgagctggccgaggagttcaagcagaagttcgaggagtgccagagactgctgctggacatccccctgcagaccccccacaagctggtggacaccggcagagccgccaagctgatccagagagccgaggagatgaagagcggcctgaaggacttcaagaccttcctgaccaacgaccagaccaaggtgaccgaggaggagaacaagggcagcggcaccggcgtggccggcgccagcgacaccaccatcaagcccaacgccgagaacaccggccccaccctggagtgggacaactacgacctgagagaggacgccctggacgacagcgtgagcagcagcagcgtgcacgccagccccctggccagcagccccgtgagaaagaacctgttcagattcgacgagagcaccaccggcagcaacttcagcttcaagagcgccctgagcctgagcaagagccccgccaagctgaaccagagcggcaccagcgtgggcaccgacgaggagagcgtggtgacccaggaggaggagagagacggccagtacttcgagcccgtggtgcccctgcccgacctggtggaggtgagcagcggcgaggagaacgagcaggtggtgttcagccacagagccgagatctacagatacgacaaggacgtgggccagtggaaggagagaggcatcggcgacatcaagatcctgcagaactacgacaacaagcaggtgagaatcgtgatgagaagagaccaggtgctgaagctgtgcgccaaccacagaatcacccccgacatgagcctgcagaacatgaagggcaccgagagagtgtgggtgtggaccgcctgcgacttcgccgacggcgagagaaaggtggagcacctggccgtgagattcaagctgcaggacgtggccgacagcttcaagaagatcttcgacgaggccaagaccgcccaggagaaggacagcctgatcaccccccacgtgagcagaagcagcacccccagagagagcccctgcggcaagatcgccgtggccgtgctggaggagatcaccagagagagaaccgacgtgatccagggcgacgacgtggccgacgccgccagcgaggtggaggtgagcagcaccagcgagaccaccaccaaggccgtggtgagcccccccaagttcgtgttcgtgagcgagagcgtgaagagaatcttcagcagcgagaagagcaagcccttcgccttcggcaacagcagcgccaccggcagcctgttcggcttcagcttcaacgcccccctgaagagcaacaacagcgagaccagcagcgtggcccagagcggcagcgagagcaaggtggagcccaagaagtgcgagctgagcaagaacagcgacatcgagcagagcagcgacagcaaggtgaagaacctgagcgccagcttccccaccgaggagagcagcatcaactacaccttcaagacccccgagaaggagccccccctgtggcacgccgagttcaccaaggaggagctggtgcagaagctgagaagcaccaccaagagcgccgaccacctgaacggcctgctgagagagatcgaggccaccaacgccgtgctgatggagcagatcaagctgctgaagagcgagatcagaagactggagagaaaccaggagagagagaagagcgccgccaacctggagtacctgaagaacgtgctgctgcagttcatcttcctgaagcccggcagcgagagagagagactgctgcccgtgatcaacaccatgctgcagctgagccccgaggagaagggcaagctggccgccgtggcccaggacgaggaggagaaccccagcagaagcagcggctag

SEQ ID NO: 96325 - DNA, 1407 bp, synthetic construct
  misc_feature 1..1407: note = Description of Artificial Sequence: Synthetic coding sequence
  source 1..1407: mol_type = other DNA
atgggcaccgccacccccgacggcagagaggaccaggagagactgtgggtgagcgtggaggacgcccagatgcacaccgtgaccatctggctgaccgtgagacccgacatgaccgtggccagcctgaaggacatggtgttcctggactacggcttcccccccgtgctgcagcagtgggtgatcggccagagactggccagagaccaggagaccctgcacagccacggcgtgagacagaacggcgacagcgcctacctgtacctgctgagcgccagaaacaccagcctgaacccccaggagctgcagagagagagacagctgagaatgctggaggacctgggcttcaaggacctgaccctgcagcccagaggccccctggagcccggcccccccaagcccggcgtgccccaggagcccggcagaggccagcccgacgccgtgcccgagcccccccccgtgggctggcagtgccccggctgcaccttcatcaacaagcccaccagacccggctgcgagatgtgctgcagagccagacccgaggcctaccaggtgcccgccagctaccagcccgacgaggaggagagagccagactggccggcgaggaggaggccctgagacagtaccagcagagaaagcagcagcagcaggagggcaactacctgcagcacgtgcagctggaccagagaagcctggtgctgaacaccgagcccgccgagtgccccgtgtgctacagcgtgctggcccccggcgaggccgtggtgctgagagagtgcctgcacaccttctgcagagagtgcctgcagggcaccatcagaaacagccaggaggccgaggtgagctgccccttcatcgacaacacctacagctgcagcggcaagctgctggagagagagatcaaggccctgctgacccccgaggactaccagagattcctggacctgggcatcagcatcgccgagaacagaagcgccttcagctaccactgcaagacccccgactgcaagggctggtgcttcttcgaggacgacgtgaacgagttcacctgccccgtgtgcttccacgtgaactgcctgctgtgcaaggccatccacgagcagatgaactgcaaggagtaccaggaggacctggccctgagagcccagaacgacgtggccgccagacagaccaccgagatgctgaaggtgatgctgcagcagggcgaggccatgagatgcccccagtgccagatcgtggtgcagaagaaggacggctgcgactggatcagatgcaccgtgtgccacaccgagatctgctgggtgaccaagggccccagatggggccccggcggccccggcgacaccagcggcggctgcagatgcagagtgaacggcatcccctgccaccccagctgccagaactgccactag

SEQ ID NO: 96326 - DNA, 1533 bp, synthetic construct
  misc_feature 1..1533: note = Description of Artificial Sequence: Synthetic coding sequence
  source 1..1533: mol_type = other DNA
atggacgagaagaccaagaaggccgaggagatggccctgagcctgaccagagccgtggccggcggcgacgagcaggtggccatgaagtgcgccatctggctggccgagcagagagtgcccctgagcgtgcagctgaagcccgaggtgagccccacccaggacatcagactgtgggtgagcgtggaggacgcccagatgcacaccgtgaccatctggctgaccgtgagacccgacatgaccgtggccagcctgaaggacatggtgttcctggactacggcttcccccccgtgctgcagcagtgggtgatcggccagagactggccagagaccaggagaccctgcacagccacggcgtgagacagaacggcgacagcgcctacctgtacctgctgagcgccagaaacaccagcctgaacccccaggagctgcagagagagagacagctgagaatgctggaggacctgggcttcaaggacctgaccctgcagcccagaggccccctggagcccggcccccccaagcccggcgtgccccaggagcccggcagaggccagcccgacgccgtgcccgagcccccccccgtgggctggcagtgccccggctgcaccttcatcaacaagcccaccagacccggctgcgagatgtgctgcagagccagacccgaggcctaccaggtgcccgccagctaccagcccgacgaggaggagagagccagactggccggcgaggaggaggccctgagacagtaccagcagagaaagcagcagcagcaggagggcaactacctgcagcacgtgcagctggaccagagaagcctggtgctgaacaccgagcccgccgagtgccccgtgtgctacagcgtgctggcccccggcgaggccgtggtgctgagagagtgcctgcacaccttctgcagagagtgcctgcagggcaccatcagaaacagccaggaggccgaggtgagctgccccttcatcgacaacacctacagctgcagcggcaagctgctggagagagagatcaaggccctgctgacccccgaggactaccagagattcctggacctgggcatcagcatcgccgagaacagaagcgccttcagctaccactgcaagacccccgactgcaagggctggtgcttcttcgaggacgacgtgaacgagttcacctgccccgtgtgcttccacgtgaactgcctgctgtgcaaggccatccacgagcagatgaactgcaaggagtaccaggaggacctggccctgagagcccagaacgacgtggccgccagacagaccaccgagatgctgaaggtgatgctgcagcagggcgaggccatgagatgcccccagtgccagatcgtggtgcagaagaaggacggctgcgactggatcagatgcaccgtgtgccacaccgagatctgctgggtgaccaagggccccagatggggccccggcggccccggcgacaccagcggcggctgcagatgcagagtgaacggcatcccctgccaccccagctgccagaactgccactag

SEQ ID NO: 96327 - DNA, 1011 bp, synthetic construct
  misc_feature 1..1011: note = Description of Artificial Sequence: Synthetic coding sequence
  source 1..1011: mol_type = other DNA
atggacgagaagaccaagaaggccgaggagatggccctgagcctgaccagagccgtggccggcggcgacgagcaggtggccatgaagtgcgccatctggctggccgagcagagagtgcccctgagcgtgcagctgaagcccgaggtgagccccacccaggacatcagactgtgggtgagcgtggaggacgcccagatgcacaccgtgaccatctggctgaccgtgagacccgacatgaccgtggccagcctgaaggacatggtgttcctggactacggcttcccccccgtgctgcagcagtgggtgatcggccagagactggccagagaccaggagaccctgcacagccacggcgtgagacagaacggcgacagcgcctacctgtacctgctgagcgccagaaacaccagcctgaacccccaggagctgcagagagagagacagctgagaatgctggaggacctgggcttcaaggacctgaccctgcagcccagaggccccctggagcccggcccccccaagcccggcgtgccccaggagcccggcagaggccagcccgacgccgtgcccgagcccccccccgtgggctggcagtgccccggctgcaccttcatcaacaagcccaccagacccggctgcgagatgtgctgcagagccagacccgaggcctaccaggtgcccgccagctaccagcccgacgaggaggagagagccagactggccggcgaggaggaggccctgagacagtaccagcagagaaagcagcagcagcaggagggcaactacctgcagcacgtgcagctggaccagagaagcctggtgctgaacaccgagcccgccgagtgccccgtgtgctacagcgtgctggcccccggcgaggccgtggtgctgagaagcgcctgcagagcccccagcgccaccgccagaagaagaagaagccccgcccccagcctgaccacccccaccagagccagagccagctgctggagaggcagaagcagaagaagctag

SEQ ID NO: 96328 - DNA, 792 bp, synthetic construct
  misc_feature 1..792: note = Description of Artificial Sequence: Synthetic coding sequence
  source 1..792: mol_type = other DNA
atggacgagaagaccaagaaggccgaggagatggccctgagcctgaccagagccgtggccggcggcgacgagcaggtggccatgaagtgcgccatctggctggccgagcagagagtgcccctgagcgtgcagctgaagcccgaggtgagccccacccaggacatcagaagcagaggcgagaagaccgaggaggtgggcgaggtgagagaggtgcccgaccacggcggccccagagtgctgcccagagtggacagcaagagcagcgtggagcccctggagggccccaactggctgtgggtgagcgtggaggacgcccagatgcacaccgtgaccatctggctgaccgtgagacccgacatgaccgtggccagcctgaaggacatggtgttcctggactacggcttcccccccgtgctgcagcagtgggtgatcggccagagactggccagagaccaggagaccctgcacagccacggcgtgagacagaacggcgacagcgcctacctgtacctgctgagcgccagaaacaccagcctgaacccccaggagctgcagagagagagacagctgagaatgctggaggacctgggcttcaaggacctgaccctgcagcccagaggccccctggagcccggcccccccaagcccggcgtgccccaggagcccggcagaggccagcccgacgccgtgcccgagcccccccccgtgggctggcagtgccccggctgcaccttcatcaacaagcccaccagacccggctgcgagatgtgctgcagagccagacccgagtag

SEQ ID NO: 96329 - DNA, 819 bp, synthetic construct
  misc_feature 1..819: note = Description of Artificial Sequence: Synthetic coding sequence
  source 1..819: mol_type = other DNA
atggacgagaagaccaagaaggccgaggagatggccctgagcctgaccagagccgtggccggcggcgacgagcaggtggccatgaagtgcgccatctggctggccgagcagagagtgcccctgagcgtgcagctgaagcccgaggtgagccccacccaggacatcagactgtgggtgagcgtggaggacgcccagatgcacaccgtgaccatctggctgaccgtgagacccgacatgaccgtggccagcctgaaggacatggtgttcctggactacggcttcccccccgtgctgcagcagtgggtgatcggccagagactggccagagaccaggagaccctgcacagccacggcgtgagacagaacggcgacagcgcctacctgtacctgctgagcgccagaaacaccagcctgaacccccaggagctgcagagagagagacagctgagaatgctggaggacctgggcttcaaggacctgaccctgcagcccagaggccccctggagcccggcccccccaagcccggcgtgccccaggagcccggcagaggccagcccgacgccgtgcccgagcccccccccgtgggctggcagtgccccggctgcaccttcatcaacaagcccaccagacccggctgcgagatgtgctgcagagccagacccgaggcctaccaggtgcccgccagctaccagcccgacgaggaggagagagccagactggccggcgaggaggaggccctgagacagtaccagcagggcgtgcccgccggccaccacccccagcagcccggcggcggcggcctgctgcccctgcactag

SEQ ID NO: 96330 - DNA, 354 bp, synthetic construct
  misc_feature 1..354: note = Description of Artificial Sequence: Synthetic coding sequence
  source 1..354: mol_type = other DNA
atggacgagaagaccaagaaggccgaggagatggccctgagcctgaccagagccgtggccggcggcgacgagcaggtggccatgaagtgcgccatctggctggccgagcagagagtgcccctgagcgtgcagctgaagcccgaggtgagccccacccaggacatcagactgtgggtgagcgtggaggacgcccagatgcacaccgtgaccatctggctgaccgtgagacccgacatgaccgtggccagcctgaaggacatggtgttcctggactacggcttcccccccgtgctgcagcagtgggtgatcggccagagactggccagagaccaggagaccctgcacagccactag

SEQ ID NO: 96331 - DNA, 768 bp, synthetic construct
  misc_feature 1..768: note = Description of Artificial Sequence: Synthetic coding sequence
  source 1..768: mol_type = other DNA
tgagagatggccctgagcctgaccagagccgtggccggcggcgacgagcaggtggccatgaagtgcgccatctggctggccgagcagagagtgcccctgagcgtgcagctgaagcccgaggtgagccccacccaggacatcagaagcagaggcgagaagaccgaggaggtgggcgaggtgagagaggtgcccgaccacggcggccccagagtgctgcccagagtggacagcaagagcagcgtggagcccctggagggccccaactggctgtgggtgagcgtggaggacgcccagatgcacaccgtgaccatctggctgaccgtgagacccgacatgaccgtggccagcctgaaggacatggtgttcctggactacggcttcccccccgtgctgcagcagtgggtgatcggccagagactggccagagaccaggagaccctgcacagccacggcgtgagacagaacggcgacagcgcctacctgtacctgctgagcgccagaaacaccagcctgaacccccaggagctgcagagagagagacagctgagaatgctggaggacctgggcttcaaggacctgaccctgcagcccagaggccccctggagcccggcccccccaagcccggcgtgccccaggagcccggcagaggccagcccgacgccgtgcccgagcccccccccgtgggctggcagtgccccggctgcaccttcatcaacaagcccaccagacccggctgcgagatgtgctgcagagccagacccgagtag

SEQ ID NO: 96332 - DNA, 819 bp, synthetic construct; identical to SEQ ID NO: 96329
  misc_feature 1..819: note = Description of Artificial Sequence: Synthetic coding sequence
  source 1..819: mol_type = other DNA

SEQ ID NO: 96333 - DNA, 4830 bp, synthetic construct
  misc_feature 1..4830: note = Description of Artificial Sequence: Synthetic coding sequence
  source 1..4830: mol_type = other DNA
atgaacagccccgtggaccccggcgccagacaggccctgagaaagaagccccccgagagaacccccgaggacctgaacaccatctacagctacctgcacggcatggagatcctgagcaacctgagagagcaccagctgagactgatgagcgccagagccagatacgagagatacagcggcaaccaggtgctgttctgcagcgagaccatcgccagatgctggtacatcctgctgagcggcagcgtgctggtgaagggcagcatggtgctgcccccctgcagcttcggcaagcagttcggcggcaagagaggctgcgactgcctggtgctggagcccagcgagatgatcgtggtggagaacgccaaggacaacgaggacagcatcctgcagagagagatccccgccagacagagcagaagaagattcagaaagatcaactacaagggcgagagacagaccatcaccgacgacgtggaggtgaacagctacctgagcctgcccgccgacctgaccaagatgcacctgaccgagaacccccacccccaggtgacccacgtgagcagcagccagagcggctgcagcatcgccagcgacagcggcagcagcagcctgagcgacatctaccaggccaccgagagcgaggtgggcgacgtggacctgaccagactgcccgagggccccgtggacagcgaggacgacgaggaggaggacgaggagatcgacagaaccgaccccctgcagggcagagacctggtgagagagtgcctggagaaggagcccgccgacaagaccgacgacgacatcgagcagctgctggagttcatgcaccagctgcccgccttcgccaacatgaccatgagcgtgagaagagagctgtgcagcgtgatgatcttcgaggtggtggagcaggccggcgccatcatcctggaggacggccaggagctggacagctggtacgtgatcctgaacggcaccgtggagatcagccaccccgacggcaaggtggagaacctgttcatgggcaacagcttcggcatcacccccaccctggacaagcagtacatgcacggcatcgtgagaaccaaggtggacgactgccagttcgtgtgcatcgcccagcaggactactggagaatcctgaaccacgtggagaagaacacccacaaggtggaggaggagggcgagatcgtgatggtgcacgagcacagagagctggacagaagcggcaccagaaagggccacatcgtgatcaaggccacccccgagagactgatcatgcacctgatcgaggagcacagcatcgtggaccccacctacatcgaggacttcctgctgacctacagaaccttcctggagagccccctggacgtgggcatcaagctgctggagtggttcaagatcgacagcctgagagacaaggtgaccagaatcgtgctgctgtgggtgaacaaccacttcaacgacttcgagggcgaccccgccatgaccagattcctggaggagttcgagaagaacctggaggacaccaagatgaacggccacctgagactgctgaacatcgcctgcgccgccaaggccaagtggagacaggtggtgctgcagaaggccagcagagagagccccctgcagttcagcctgaacggcggcagcgagaagggcttcggcatcttcgtggagggcgtggagcccggcagcaaggccgccgacagcggcctgaagagaggcgaccagatcatggaggtgaacggccagaacttcgagaacatcaccttcatgaaggccgtggagatcctgagaaacaacacccacctggccctgaccgtgaagaccaacatcttcgtgttcaaggagctgctgttcagaaccgagcaggagaagagcggcgtgccccacatccccaagatcgccgagaagaagagcaacagacacagcatccagcacgtgcccggcgacatcgagcagaccagccaggagaagggcagcaagaaggtgaaggccaacaccgtgagcggcggcagaaacaagatcagaaagatcctggacaagaccagattcagcatcctgccccccaagctgttcagcgacggcggcctgagccagagccaggacgacagcatcgtgggcaccagacactgcagacacagcctggccatcatgcccatccccggcaccctgagcagcagcagccccgacctgctgcagcccaccaccagcatgctggacttcagcaaccccagcgacatccccgaccaggtgatcagagtgttcaaggtggaccagcagagctgctacatcatcatcagcaaggacaccaccgccaaggaggtggtgttccacgccgtgcacgagttcggcctgaccggcgccagcgacacctacagcctgtgcgaggtgagcgtgacccccgagggcgtgatcaagcagagaagactgcccgaccagttcagcaagctggccgacagaatccagctgaacggcagatactacctgaagaacaacatggagaccgagaccctgtgcagcgacgaggacgcccaggagctggtgaaggagagccagctgagcatgctgcagctgagcaccatcgaggtggccacccagctgagcatgagagacttcgacctgttcagaaacatcgagcccaccgagtacatcgacgacctgttcaagctgaacagcaagaccggcaacacccacctgaagagattcgaggacatcgtgaaccaggagaccttctgggtggccagcgagatcctgaccgaggccaaccagctgaagagaatgaagatcatcaagcacttcatcaagatcgccctgcactgcagagagtgcaagaacttcaacagcatgttcgccatcatcagcggcctgaacctggccagcgtggccagactgagaggcacctgggagaagctgcccagcaagtacgagaagcacctgcaggacctgcaggacatcttcgaccccagcagaaacatggccaagtacagaaacatcctgagcagccagagcatgcagccccccatcatccccctgttccccgtggtgaagaaggacatgaccttcctgcacgagggcaacgacagcaaggtggacggcctggtgaacttcgagaagctgagaatgatcagcaaggagatcagacaggtggtgagaatgaccagcgccaacatggaccccgccatgatgttcagacagagaaagaagagatggagaagcctgggcagcctgagccagggcagcaccaacagcaacatgctggacgtgcagggcggcgcccacaagaagagagccagaagaagcagcctgctgaacgccaagaagctgtacgaggacgcccagatggccagaaaggtgaagcagtacctgagcagcctggacgtggagaccgacgaggagaagttccagatgatgagcctgcagtgggagcccgcctacggcaccctgaccaagaacctgagcgagaagagaagcgccaagagcagcgagatgagccccgtgcccatgagaagcgccggccagaccaccaaggcccacctgcaccagccccacagagtgagccaggtgctgcaggtgcccgccgtgaacctgcaccccatcagaaagaagggccagaccaaggaccccgccctgaacaccagcctgccccagaaggtgctgggcaccaccgaggagatcagcggcaagaagcacaccgaggacaccatcagcgtggccagcagcctgcacagcagcccccccgccagcccccagggcagcccccacaagggctacaccctgatccccagcgccaagagcgacaacctgagcgacagcagccacagcgagatcagcagcagaagcagcatcgtgagcaactgcagcgtggacagcatgagcgccgccctgcaggacgagagatgcagcagccaggccctggccgtgcccgagagcaccggcgccctggagaagaccgagcacgccagcggcatcggcgaccacagccagcacggccccggctggaccctgctgaagcccagcctgatcaagtgcctggccgtgagcagcagcgtgagcaacgaggagatcagccaggagcacatcatcatcgaggccgccgacagcggcagaggcagctggaccagctgcagcagcagcagccacgacaacttccagagcctgcccaaccccaagagctgggacttcctgaacagctacagacacacccacctggacgaccccatcgccgaggtggagcccaccgacagcgagccctacagctgcagcaagagctgcagcagaacctgcggccagtgcaagggcagcctggagagaaagagctggaccagcagcagcagcctgagcgacacctacgagcccaactacggcaccgtgaagcagagagtgctggagagcacccccgccgagagcagcgagggcctggaccccaaggacgccaccgaccccgtgtacaagaccgtgaccagcagcaccgagaagggcctgatcgtgtactgcgtgaccagccccaagaaggacgacagatacagagagcccccccccaccccccccggctacctgggcatcagcctggccgacctgaaggagggcccccacacccacctgaagccccccgactacagcgtggccgtgcagagaagcaagatgatgcacaacagcctgagcagactgccccccgccagcctgagcagcaacctggtggcctgcgtgcccagcaagatcgtgacccagccccagagacacaacctgcagcccttccaccccaagctgggcgacgtgaccgacgccgacagcgaggccgacgagaacgagcaggtgagcgccgtgtag

SEQ ID NO: 96334 - DNA, 4530 bp, synthetic construct
  misc_feature 1..4530: note = Description of Artificial Sequence: Synthetic coding sequence
  source 1..4530: mol_type = other DNA
atgaacagccccgtggaccccggcgccagacaggccctgagaaagaagccccccgagagaacccccgaggacctgaacaccatctacagctacctgcacggcatggagatcctgagcaacctgagagagcaccagctgagactgatgagcgccagagccagatacgagagatacagcggcaaccaggtgctgttctgcagcgagaccatcgccagatgctggtacatcctgctgagcggcagcgtgctggtgaagggcagcatggtgctgcccccctgcagcttcggcaagcagttcggcggcaagagaggctgcgactgcctggtgctggagcccagcgagatgatcgtggtggagaacgccaaggacaacgaggacagcatcctgcagagagagatccccgccagacagagcagaagaagattcagaaagatcaactacaagggcgagagacagaccatcaccgacgacgtggaggtgaacagctacctgagcctgcccgccgacctgaccaagatgcacctgaccgagaacccccacccccaggtgacccacgtgagcagcagccagagcggctgcagcatcgccagcgacagcggcagcagcagcctgagcgacatctaccaggccaccgagagcgaggtgggcgacgtggacctgaccagactgcccgagggccccgtggacagcgaggacgacgaggaggaggacgaggagatcgacagaaccgaccccctgcagggcagagacctggtgagagagtgcctggagaaggagcccgccgacaagaccgacgacgacatcgagcagctgctggagttcatgcaccagctgcccgccttcgccaacatgaccatgagcgtgagaagagagctgtgcagcgtgatgatcttcgaggtggtggagcaggccggcgccatcatcctggaggacggccaggagctggacagctggtacgtgatcctgaacggcaccgtggagatcagccaccccgacggcaaggtggagaacctgttcatgggcaacagcttcggcatcacccccaccctggacaagcagtacatgcacggcatcgtgagaaccaaggtggacgactgccagttcgtgtgcatcgcccagcaggactactggagaatcctgaaccacgtggagaagaacacccacaaggtggaggaggagggcgagatcgtgatggtgcacgagcacagagagctggacagaagcggcaccagaaagggccacatcgtgatcaaggccacccccgagagactgatcatgcacctgatcgaggagcacagcatcgtggaccccacctacatcgaggacttcctgctgacctacagaaccttcctggagagccccctggacgtgggcatcaagctgctggagtggttcaagatcgacagcctgagagacaaggtgaccagaatcgtgctgctgtgggtgaacaaccacttcaacgacttcgagggcgaccccgccatgaccagattcctggaggagttcgagaagaacctggaggacaccaagatgaacggccacctgagactgctgaacatcgcctgcgccgccaaggccaagtggagacaggtggtgctgcagaaggccagcagagagagccccctgcagttcagcctgaacggcggcagcgagaagggcttcggcatcttcgtggagggcgtggagcccggcagcaaggccgccgacagcggcctgaagagaggcgaccagatcatggaggtgaacggccagaacttcgagaacatcaccttcatgaaggccgtggagatcctgagaaacaacacccacctggccctgaccgtgaagaccaacatcttcgtgttcaaggagctgctgttcagaaccgagcaggagaagagcggcgtgccccacatccccaagatcgccgagaagaagagcaacagacacagcatccagcacgtgcccggcgacatcgagcagaccagccaggagaagggcagcaagaaggtgaaggccaacaccgtgagcggcggcagaaacaagatcagaaagatcctggacaagaccagattcagcatcctgccccccaagctgttcagcgacggcggcctgagccagagccaggacgacagcatcgtgggcaccagacactgcagacacagcctggccatcatgcccatccccggcaccctgagcagcagcagccccgacctgctgcagcccaccaccagcatgctggacttcagcaaccccagcgccgtgggcttctactacatccccgaccaggtgatcagagtgttcaaggtggaccagcagagctgctacatcatcatcagcaaggacaccaccgccaaggaggtggtgttccacgccgtgcacgagttcggcctgaccggcgccagcgacacctacagcctgtgcgaggtgagcgtgacccccgagggcgtgatcaagcagagaagactgcccgaccagttcagcaagctggccgacagaatccagctgaacggcagatactacctgaagaacaacatggagaccgagaccctgtgcagcgacgaggacgcccaggagctggtgaaggagagccagctgagcatgctgcagctgagcaccatcgaggtggccacccagctgagcatgagagacttcgacctgttcagaaacatcgagcccaccgagtacatcgacgacctgttcaagctgaacagcaagaccggcaacacccacctgaagagattcgaggacatcgtgaaccaggagaccttctgggtggccagcgagatcctgaccgaggccaaccagctgaagagaatgaagatcatcaagcacttcatcaagatcgccctgcactgcagagagtgcaagaacttcaacagcatgttcgccatcatcagcggcctgaacctggccagcgtggccagactgagaggcacctgggagaagctgcccagcaagtacgagaagcacctgcaggacctgcaggacatcttcgaccccagcagaaacatggccaagtacagaaacatcctgagcagccagagcatgcagccccccatcatccccctgttccccgtggtgaagaaggacatgaccttcctgcacgagggcaacgacagcaaggtggacggcctggtgaacttcgagaagctgagaatgatcagcaaggagatcagacaggtggtgagaatgaccagcgccaacatggaccccgccatgatgttcagacagagaaagaagagatggagaagcctgggcagcctgagccagggcagcaccaacagcaacatgctggacgtgcagggcggcgcccacaagaagagagccagaagaagcagcctgctgaacgccaagaagctgtacgaggacgcccagatggccagaaaggtgaagcagtacctgagcagcctggacgtggagaccgacgaggagaagttccagatgatgagcctgcagtgggagcccgcctacggcaccctgaccaagaacctgagcgagaagagaagcgccaagagcagcgagatgagccccgtgcccatgagaagcgccggccagaccaccaaggcccacctgcaccagccccacagagtgagccaggtgctgcaggtgcccgccgtgaacctgcaccccatcagaaagaagggccagaccaaggaccccgccctgaacaccagcctgccccagaaggtgctgggcaccaccgaggagatcagcggcaagaagcacaccgaggacaccatcagcgtggccagcagcctgcacagcagcccccccgccagcccccagggcagcccccacaagggctacaccctgatccccagcgccaagagcgacaacctgagcgacagcagccacagcgagatcagcagcagaagcagcatcgtgagcaactgcagcgtggacagcatgagcgccgccctgcaggacgagagatgcagcagccaggccctggccgtgcccgagagcaccggcgccctggagaagaccgagcacgccagcggcatcggcgaccacagccagcacggccccggctggaccctgctgaagcccagcctgatcaagtgcctggccgtgagcagcagcgtgagcaacgaggagatcagccaggagcacatcatcatcgaggccgccgacagcggcagaggcagctggaccagctgcagcagcagcagccacgacaacttccagagcctgcccaaccccaagagctgggacttcctgaacagctacagacacacccacctggacgaccccatcgccgaggtggagcccaccgacagcgagccctacagctgcagcaagagctgcagcagaacctgcggccagtgcaagggcagcctggagagaaagagctggaccagcagcagcagcctgagcgacacctacgagcccaactacggcaccgtgaagcagagagtgctggagagcacccccgccgagagcagcgagggcctggaccccaaggacgccaccgaccccgtgtacaagaccgtgaccagcagcaccgagaagggcctgatcgagaacgagcaggtgagcgccgtgtag

SEQ ID NO: 96335 - DNA, 4530 bp, synthetic construct
  misc_feature 1..4530: note = Description of Artificial Sequence: Synthetic coding sequence
  source 1..4530: mol_type = other DNA
atgaacagccccgtggaccccggcgccagacaggccctgagaaagaagccccccgagagaacccccgaggacctgaacaccatctacagctacctgcacggcatggagatcctgagcaacctgagagagcaccagctgagactgatgagcgccagagccagatacgagagatacagcggcaaccaggtgctgttctgcagcgagaccatcgccagatgctggtacatcctgctgagcggcagcgtgctggtgaagggcagcatggtgctgcccccctgcagcttcggcaagcagttcggcggcaagagaggctgcgactgcctggtgctggagcccagcgagatgatcgtggtggagaacgccaaggacaacgaggacagcatcctgcagagagagatccccgccagacagagcagaagaagattcagaaagatcaactacaagggcgagagacagaccatcaccgacgacgtggaggtgaacagctacctgagcctgcccgccgacctgaccaagatgcacctgaccgagaacccccacccccaggtgacccacgtgagcagcagccagagcggctgcagcatcgccagcgacagcggcagcagcagcctgagcgacatctaccaggccaccgagagcgaggtgggcgacgtggacctgaccagactgcccgagggccccgtggacagcgaggacgacgaggaggaggacgaggagatcgacagaaccgaccccctgcagggcagagacctggtgagagagtgcctggagaaggagcccgccgacaagaccgacgacgacatcgagcagctgctggagttcatgcaccagctgcccgccttcgccaacatgaccatgagcgtgagaagagagctgtgcagcgtgatgatcttcgaggtggtggagcaggccggcgccatcatcctggaggacggccaggagctggacagctggtacgtgatcctgaacggcaccgtggagatcagccaccccgacggcaaggtggagaacctgttcatgggcaacagcttcggcatcacccccaccctggacaagcagtacatgcacggcatcgtgagaaccaaggtggacgactgccagttcgtgtgcatcgcccagcaggactactggagaatcctgaaccacgtggagaagaacacccacaaggtggaggaggagggcgagatcgtgatggtgcacgagcacagagagctggacagaagcggcaccagaaagggccacatcgtgatcaaggccacccccgagagactgatcatgcacctgatcgaggagcacagcatcgtggaccccacctacatcgaggacttcctgctgacctacagaaccttcctggagagccccctggacgtgggcatcaagctgctggagtggttcaagatcgacagcctgagagacaaggtgaccagaatcgtgctgctgtgggtgaacaaccacttcaacgacttcgagggcgaccccgccatgaccagattcctggaggagttcgagaagaacctggaggacaccaagatgaacggccacctgagactgctgaacatcgcctgcgccgccaaggccaagtggagacaggtggtgctgcagaaggccagcagagagagccccctgcagttcagcctgaacggcggcagcgagaagggcttcggcatcttcgtggagggcgtggagcccggcagcaaggccgccgacagcggcctgaagagaggcgaccagatcatggaggtgaacggccagaacttcgagaacatcaccttcatgaaggccgtggagatcctgagaaacaacacccacctggccctgaccgtgaagaccaacatcttcgtgttcaaggagctgctgttcagaaccgagcaggagaagagcggcgtgccccacatccccaagatcgccgagaagaagagcaacagacacagcatccagcacgtgcccggcgacatcgagcagaccagccaggagaagggcagcaagaaggtgaaggccaacaccgtgagcggcggcagaaacaagatcagaaagatcctggacaagaccagattcagcatcctgccccccaagctgttcagcgacggcggcctgagccagagccaggacgacagcatcgtgggcaccagacactgcagacacagcctggccatcatgcccatccccggcaccctgagcagcagcagccccgacctgctgcagcccaccaccagcatgctggacttcagcaaccccagcgccaagggcttcaagaacatccccgaccaggtgatcagagtgttcaaggtggaccagcagagctgctacatcatcatcagcaaggacaccaccgccaaggaggtggtgttccacgccgtgcacgagttcggcctgaccggcgccagcgacacctacagcctgtgcgaggtgagcgtgacccccgagggcgtgatcaagcagagaagactgcccgaccagttcagcaagctggccgacagaatccagctgaacggcagatactacctgaagaacaacatggagaccgagaccctgtgcagcgacgaggacgcccaggagctggtgaaggagagccagctgagcatgctgcagctgagcaccatcgaggtggccacccagctgagcatgagagacttcgacctgttcagaaacatcgagcccaccgagtacatcgacgacctgttcaagctgaacagcaagaccggcaacacccacctgaagagattcgaggacatcgtgaaccaggagaccttctgggtggccagcgagatcctgaccgaggccaaccagctgaagagaatgaagatcatcaagcacttcatcaagatcgccctgcactgcagagagtgcaagaacttcaacagcatgttcgccatcatcagcggcctgaacctggccagcgtggccagactgagaggcacctgggagaagctgcccagcaagtacgagaagcacctgcaggacctgcaggacatcttcgaccccagcagaaacatggccaagtacagaaacatcctgagcagccagagcatgcagccccccatcatccccctgttccccgtggtgaagaaggacatgaccttcctgcacgagggcaacgacagcaaggtggacggcctggtgaacttcgagaagctgagaatgatcagcaaggagatcagacaggtggtgagaatgaccagcgccaacatggaccccgccatgatgttcagacagagaaagaagagatggagaagcctgggcagcctgagccagggcagcaccaacagcaacatgctggacgtgcagggcggcgcccacaagaagagagccagaagaagcagcctgctgaacgccaagaagctgtacgaggacgcccagatggccagaaaggtgaagcagtacctgagcagcctggacgtggagaccgacgaggagaagttccagatgatgagcctgcagtgggagcccgcctacggcaccctgaccaagaacctgagcgagaagagaagcgccaagagcagcgagatgagccccgtgcccatgagaagcgccggccagaccaccaaggcccacctgcaccagccccacagagtgagccaggtgctgcaggtgcccgccgtgaacctgcaccccatcagaaagaagggccagaccaaggaccccgccctgaacaccagcctgccccagaaggtgctgggcaccaccgaggagatcagcggcaagaagcacaccgaggacaccatcagcgtggccagcagcctgcacagcagcccccccgccagcccccagggcagcccccacaagggctacaccctgatccccagcgccaagagcgacaacctgagcgacagcagccacagcgagatcagcagcagaagcagcatcgtgagcaactgcagcgtggacagcatgagcgccgccctgcaggacgagagatgcagcagccaggccctggccgtgcccgagagcaccggcgccctggagaagaccgagcacgccagcggcatcggcgaccacagccagcacggccccggctggaccctgctgaagcccagcctgatcaagtgcctggccgtgagcagcagcgtgagcaacgaggagatcagccaggagcacatcatcatcgaggccgccgacagcggcagaggcagctggaccagctgcagcagcagcagccacgacaacttccagagcctgcccaaccccaagagctgggacttcctgaacagctacagacacacccacctggacgaccccatcgccgaggtggagcccaccgacagcgagccctacagctgcagcaagagctgcagcagaacctgcggccagtgcaagggcagcctggagagaaagagctggaccagcagcagcagcctgagcgacacctacgagcccaactacggcaccgtgaagcagagagtgctggagagcacccccgccgagagcagcgagggcctggaccccaaggacgccaccgaccccgtgtacaagaccgtgaccagcagcaccgagaagggcctgatcggcaagaagcagaccagctacttctag

SEQ ID NO: 96336 - DNA, 4515 bp, synthetic construct
  misc_feature 1..4515: note = Description of Artificial Sequence: Synthetic coding sequence
  source 1..4515: mol_type = other DNA
atgaacagccccgtggaccccggcgccagacaggccctgagaaagaagccccccgagagaacccccgaggacctgaacaccatctacagctacctgcacggcatggagatcctgagcaacctgagagagcaccagctgagactgatgagcgccagagccagatacgagagatacagcggcaaccaggtgctgttctgcagcgagaccatcgccagatgctggtacatcctgctgagcggcagcgtgctggtgaagggcagcatggtgctgcccccctgcagcttcggcaagcagttcggcggcaagagaggctgcgactgcctggtgctggagcccagcgagatgatcgtggtggagaacgccaaggacaacgaggacagcatcctgcagagagagatccccgccagacagagcagaagaagattcagaaagatcaactacaagggcgagagacagaccatcaccgacgacgtggaggtgaacagctacctgagcctgcccgccgacctgaccaagatgcacctgaccgagaacccccacccccaggtgacccacgtgagcagcagccagagcggctgcagcatcgccagcgacagcggcagcagcagcctgagcgacatctaccaggccaccgagagcgaggtgggcgacgtggacctgaccagactgcccgagggccccgtggacagcgaggacgacgaggaggaggacgaggagatcgacagaaccgaccccctgcagggcagagacctggtgagagagtgcctggagaaggagcccgccgacaagaccgacgacgacatcgagcagctgctggagttcatgcaccagctgcccgccttcgccaacatgaccatgagcgtgagaagagagctgtgcagcgtgatgatcttcgaggtggtggagcaggccggcgccatcatcctggaggacggccaggagctggacagctggtacgtgatcctgaacggcaccgtggagatcagccaccccgacggcaaggtggagaacctgttcatgggcaacagcttcggcatcacccccaccctggacaagcagtacatgcacggcatcgtgagaaccaaggtggacgactgccagttcgtgtgcatcgcccagcaggactactggagaatcctgaaccacgtggagaagaacacccacaaggtggaggaggagggcgagatcgtgatggtgcacgagcacagagagctggacagaagcggcaccagaaagggccacatcgtgatcaaggccacccccgagagactgatcatgcacctgatcgaggagcacagcatcgtggaccccacctacatcgaggacttcctgctgacctacagaaccttcctggagagccccctggacgtgggcatcaagctgctggagtggttcaagatcgacagcctgagagacaaggtgaccagaatcgtgctgctgtgggtgaacaaccacttcaacgacttcgagggcgaccccgccatgaccagattcctggaggagttcgagaagaacctggaggacaccaagatgaacggccacctgagactgctgaacatcgcctgcgccgccaaggccaagtggagacaggtggtgctgcagaaggccagcagagagagccccctgcagttcagcctgaacggcggcagcgagaagggcttcggcatcttcgtggagggcgtggagcccggcagcaaggccgccgacagcggcctgaagagaggcgaccagatcatggaggtgaacggccagaacttcgagaacatcaccttcatgaaggccgtggagatcctgagaaacaacacccacctggccctgaccgtgaagaccaacatcttcgtgttcaaggagctgctgttcagaaccgagcaggagaagagcggcgtgccccacatccccaagatcgccgagaagaagagcaacagacacagcatccagcacgtgcccggcgacatcgagcagaccagccaggagaagggcagcaagaaggtgaaggccaacaccgtgagcggcggcagaaacaagatcagaaagatcctggacaagaccagattcagcatcctgccccccaagctgttcagcgacggcggcctgagccagagccaggacgacagcatcgtgggcaccagacactgcagacacagcctggccatcatgcccatccccggcaccctgagcagcagcagccccgacctgctgcagcccaccaccagcatgctggacttcagcaaccccagcgacatccccgaccaggtgatcagagtgttcaaggtggaccagcagagctgctacatcatcatcagcaaggacaccaccgccaaggaggtggtgttccacgccgtgcacgagttcggcctgaccggcgccagcgacacctacagcctgtgcgaggtgagcgtgacccccgagggcgtgatcaagcagagaagactgcccgaccagttcagcaagctggccgacagaatccagctgaacggcagatactacctgaagaacaacatggagaccgagaccctgtgcagcgacgaggacgcccaggagctggtgaaggagagccagctgagcatgctgcagctgagcaccatcgaggtggccacccagctgagcatgagagacttcgacctgttcagaaacatcgagcccaccgagtacatcgacgacctgttcaagctgaacagcaagaccggcaacacccacctgaagagattcgaggacatcgtgaaccaggagaccttctgggtggccagcgagatcctgaccgaggccaaccagctgaagagaatgaagatcatcaagcacttcatcaagatcgccctgcactgcagagagtgcaagaacttcaacagcatgttcgccatcatcagcggcctgaacctggccagcgtggccagactgagaggcacctgggagaagctgcccagcaagtacgagaagcacctgcaggacctgcaggacatcttcgaccccagcagaaacatggccaagtacagaaacatcctgagcagccagagcatgcagccccccatcatccccctgttccccgtggtgaagaaggacatgaccttcctgcacgagggcaacgacagcaaggtggacggcctggtgaacttcgagaagctgagaatgatcagcaaggagatcagacaggtggtgagaatgaccagcgccaacatggaccccgccatgatgttcagacagagaaagaagagatggagaagcctgggcagcctgagccagggcagcaccaacagcaacatgctggacgtgcagggcggcgcccacaagaagagagccagaagaagcagcctgctgaacgccaagaagctgtacgaggacgcccagatggccagaaaggtgaagcagtacctgagcagcctggacgtggagaccgacgaggagaagttccagatgatgagcctgcagtgggagcccgcctacggcaccctgaccaagaacctgagcgagaagagaagcgccaagagcagcgagatgagccccgtgcccatgagaagcgccggccagaccaccaaggcccacctgcaccagccccacagagtgagccaggtgctgcaggtgcccgccgtgaacctgcaccccatcagaaagaagggccagaccaaggaccccgccctgaacaccagcctgccccagaaggtgctgggcaccaccgaggagatcagcggcaagaagcacaccgaggacaccatcagcgtggccagcagcctgcacagcagcccccccgccagcccccagggcagcccccacaagggctacaccctgatccccagcgccaagagcgacaacctgagcgacagcagccacagcgagatcagcagcagaagcagcatcgtgagcaactgcagcgtggacagcatgagcgccgccctgcaggacgagagatgcagcagccaggccctggccgtgcccgagagcaccggcgccctggagaagaccgagcacgccagcggcatcggcgaccacagccagcacggccccggctggaccctgctgaagcccagcctgatcaagtgcctggccgtgagcagcagcgtgagcaacgaggagatcagccaggagcacatcatcatcgaggccgccgacagcggcagaggcagctggaccagctgcagcagcagcagccacgacaacttccagagcctgcccaaccccaagagctgggacttcctgaacagctacagacacacccacctggacgaccccatcgccgaggtggagcccaccgacagcgagccctacagctgcagcaagagctgcagcagaacctgcggccagtgcaagggcagcctggagagaaagagctggaccagcagcagcagcctgagcgacacctacgagcccaactacggcaccgtgaagcagagagtgctggagagcacccccgccgagagcagcgagggcctggaccccaaggacgccaccgaccccgtgtacaagaccgtgaccagcagcaccgagaagggcctgatcgagaacgagcaggtgagcgccgtgtag

SEQ ID NO: 96337 - DNA, 4806 bp, synthetic construct
  misc_feature 1..4806: note = Description of Artificial Sequence: Synthetic coding sequence
  source 1..4806: mol_type = other DNA
atgaacagccccgtggaccccggcgccagacaggccctgagaaagaagccccccgagagaacccccgaggacctgaacaccatctacagctacctgcacggcatggagatcctgagcaacctgagagagcaccagctgagactgatgagcgccagagccagatacgagagatacagcggcaaccaggtgctgttctgcagcgagaccatcgccagatgctggtacatcctgctgagcggcagcgtgctggtgaagggcagcatggtgctgcccccctgcagcttcggcaagcagttcggcggcaagagaggctgcgactgcctggtgctggagcccagcgagatgatcgtggtggagaacgccaaggacaacgaggacagcatcctgcagagagagatccccgccagacagagcagaagaagattcagaaagatcaactacaagggcgagagacagaccatcaccgacgacgtggaggtgaacagctacctgagcctgcccgccgacctgaccaagatgcacctgaccgagaacccccacccccaggtgacccacgtgagcagcagccagagcggctgcagcatcgccagcgacagcggcagcagcagcctgagcgacatctaccaggccaccgagagcgaggtgggcgacgtggacctgaccagactgcccgagggccccgtggacagcgaggacgacgaggaggaggacgaggagatcgacagaaccgaccccctgcagggcagagacctggtgagagagtgcctggagaaggagcccgccgacaagaccgacgacgacatcgagcagctgctggagttcatgcaccagctgcccgccttcgccaacatgaccatgagcgtgagaagagagctgtgcagcgtgatgatcttcgaggtggtggagcaggccggcgccatcatcctggaggacggccaggagctggacagctggtacgtgatcctgaacggcaccgtggagatcagccaccccgacggcaaggtggagaacctgttcatgggcaacagcttcggcatcacccccaccctggacaagcagtacatgcacggcatcgtgagaaccaaggtggacgactgccagttcgtgtgcatcgcccagcaggactactggagaatcctgaaccacgtggagaagaacacccacaaggtggaggaggagggcgagatcgtgatggtgcacgagcacagagagctggacagaagcggcaccagaaagggccacatcgtgatcaaggccacccccgagagactgatcatgcacctgatcgaggagcacagcatcgtggaccccacctacatcgaggacttcctgctgacctacagaaccttcctggagagccccctggacgtgggcatcaagctgctggagtggttcaagatcgacagcctgagagacaaggtgaccagaatcgtgctgctgtgggtgaacaaccacttcaacgacttcgagggcgaccccgccatgaccagattcctggaggagttcgagaagaacctggaggacaccaagatgaacggccacctgagactgctgaacatcgcctgcgccgccaaggccaagtggagacaggtggtgctgcagaaggccagcagagagagccccctgcagttcagcctgaacggcggcagcgagaagggcttcggcatcttcgtggagggcgtggagcccggcagcaaggccgccgacagcggcctgaagagaggcgaccagatcatggaggtgaacggccagaacttcgagaacatcaccttcatgaaggccgtggagatcctgagaaacaacacccacctggccctgaccgtgaagaccaacatcttcgtgttcaaggagctgctgttcagaaccgagcaggagaagagcggcgtgccccacatccccaagatcgccgagaagaagagcaacagacacagcatccagcacgtgcccggcgacatcgagcagaccagccaggagaagggcagcaagaaggtgaaggccaacaccgtgagcggcggcagaaacaagatcagaaagatcctggacaagaccagattcagcatcctgccccccaagctgttcagcgacggcggcctgagccagagccaggacgacagcatcgtgggcaccagacactgcagacacagcctggccatcatgcccatccccggcaccctgagcagcagcagccccgacctgctgcagcccaccaccagcatgctggacttcagcaaccccagcgacatccccgaccaggtgatcagagtgttcaaggtggaccagcagagctgctacatcatcatcagcaaggacaccaccgccaaggaggtggtgttccacgccgtgcacgagttcggcctgaccggcgccagcgacacctacagcctgtgcgaggtgagcgtgacccccgagggcgtgatcaagcagagaagactgcccgaccagttcagcaagctggccgacagaatccagctgaacggcagatactacctgaagaacaacatggagaccgagaccctgtgcagcgacgaggacgcccaggagctggtgaaggagagccagctgagcatgctgcagctgagcaccatcgaggtggccacccagctgagcatgagagacttcgacctgttcagaaacatcgagcccaccgagtacatcgacgacctgttcaagctgaacagcaagaccggcaacacccacctgaagagattcgaggacatcgtgaaccaggagaccttctgggtggccagcgagatcctgaccgaggccaaccagctgaagagaatgaagatcatcaagcacttcatcaagatcgccctgcactgcagagagtgcaagaacttcaacagcatgttcgccatcatcagcggcctgaacctggccagcgtggccagactgagaggcacctgggagaagctgcccagcaagtacgagaagcacctgcaggacctgcaggacatcttcgaccccagcagaaacatggccaagtacagaaacatcctgagcagccagagcatgcagccccccatcatccccctgttccccgtggtgaagaaggacatgaccttcctgcacgagggcaacgacagcaaggtggacggcctggtgaacttcgagaagctgagaatgatcagcaaggagatcagacaggtggtgagaatgaccagcgccaacatggaccccgccatgatgttcagacagagaagcctgagccagggcagcaccaacagcaacatgctggacgtgcagggcggcgcccacaagaagagagccagaagaagcagcctgctgaacgccaagaagctgtacgaggacgcccagatggccagaaaggtgaagcagtacctgagcagcctggacgtggagaccgacgaggagaagttccagatgatgagcctgcagtgggagcccgcctacggcaccctgaccaagaacctgagcgagaagagaagcgccaagagcagcgagatgagccccgtgcccatgagaagcgccggccagaccaccaaggcccacctgcaccagccccacagagtgagccaggtgctgcaggtgcccgccgtgaacctgcaccccatcagaaagaagggccagaccaaggaccccgccctgaacaccagcctgccccagaaggtgctgggcaccaccgaggagatcagcggcaagaagcacaccgaggacaccatcagcgtggccagcagcctgcacagcagcccccccgccagcccccagggcagcccccacaagggctacaccctgatccccagcgccaagagcgacaacctgagcgacagcagccacagcgagatcagcagcagaagcagcatcgtgagcaactgcagcgtggacagcatgagcgccgccctgcaggacgagagatgcagcagccaggccctggccgtgcccgagagcaccggcgccctggagaagaccgagcacgccagcggcatcggcgaccacagccagcacggccccggctggaccctgctgaagcccagcctgatcaagtgcctggccgtgagcagcagcgtgagcaacgaggagatcagccaggagcacatcatcatcgaggccgccgacagcggcagaggcagctggaccagctgcagcagcagcagccacgacaacttccagagcctgcccaaccccaagagctgggacttcctgaacagctacagacacacccacctggacgaccccatcgccgaggtggagcccaccgacagcgagccctacagctgcagcaagagctgcagcagaacctgcggccagtgcaagggcagcctggagagaaagagctggaccagcagcagcagcctgagcgacacctacgagcccaactacggcaccgtgaagcagagagtgctggagagcacccccgccgagagcagcgagggcctggaccccaaggacgccaccgaccccgtgtacaagaccgtgaccagcagcaccgagaagggcctgatcgtgtactgcgtgaccagccccaagaaggacgacagatacagagagcccccccccaccccccccggctacctgggcatcagcctggccgacctgaaggagggcccccacacccacctgaagccccccgactacagcgtggccgtgcagagaagcaagatgatgcacaacagcctgagcagactgccccccgccagcctgagcagcaacctggtggcctgcgtgcccagcaagatcgtgacccagccccagagacacaacctgcagcccttccaccccaagctgggcgacgtgaccgacgccgacagcgaggccgacgagaacgagcaggtgagcgccgtgtag

SEQ ID NO: 96338 - DNA, 3615 bp, synthetic construct
  misc_feature 1..3615: note = Description of Artificial Sequence: Synthetic coding sequence
  source 1..3615: mol_type = other DNA
atgaacagccccgtggaccccggcgccagacaggccctgagaaagaagccccccgagagaacccccgaggacctgaacaccatctacagctacctgcacggcatggagatcctgagcaacctgagagagcaccagctgagactgatgagcgccagagccagatacgagagatacagcggcaaccaggtgctgttctgcagcgagaccatcgccagatgctggtacatcctgctgagcggcagcgtgctggtgaagggcagcatggtgctgcccccctgcagcttcggcaagcagttcggcggcaagagaggctgcgactgcctggtgctggagcccagcgagatgatcgtggtggagaacgccaaggacaacgaggacagcatcctgcagagagagatccccgccagacagagcagaagaagattcagaaagatcaactacaagggcgagagacagaccatcaccgacgacgtggaggtgaacagctacctgagcctgcccgccgacctgaccaagatgcacctgaccgagaacccccacccccaggtgacccacgtgagcagcagccagagcggctgcagcatcgccagcgacagcggcagcagcagcctgagcgacatctaccaggccaccgagagcgaggtgggcgacgtggacctgaccagactgcccgagggccccgtggacagcgaggacgacgaggaggaggacgaggagatcgacagaaccgaccccctgcagggcagagacctggtgagagagtgcctggagaaggagcccgccgacaagaccgacgacgacatcgagcagctgctggagttcatgcaccagctgcccgccttcgccaacatgaccatgagcgtgagaagagagctgtgcagcgtgatgatcttcgaggtggtggagcaggccggcgccatcatcctggaggacggccaggagctggacagctggtacgtgatcctgaacggcaccgtggagatcagccaccccgacggcaaggtggagaacctgttcatgggcaacagcttcggcatcacccccaccctggacaagcagtacatgcacggcatcgtgagaaccaaggtggacgactgccagttcgtgtgcatcgcccagcaggactactggagaatcctgaaccacgtggagaagaacacccacaaggtggaggaggagggcgagatcgtgatggtgcacgagcacagagagctggacagaagcggcaccagaaagggccacatcgtgatcaaggccacccccgagagactgatcatgcacctgatcgaggagcacagcatcgtggaccccacctacatcgaggacttcctgctgacctacagaaccttcctggagagccccctggacgtgggcatcaagctgctggagtggttcaagatcgacagcctgagagacaaggtgaccagaatcgtgctgctgtgggtgaacaaccacttcaacgacttcgagggcgaccccgccatgaccagattcctggaggagttcgagaagaacctggaggacaccaagatgaacggccacctgagactgctgaacatcgcctgcgccgccaaggccaagtggagacaggtggtgctgcagaaggccagcagagagagccccctgcagttcagcctgaacggcggcagcgagaagggcttcggcatcttcgtggagggcgtggagcccggcagcaaggccgccgacagcggcctgaagagaggcgaccagatcatggaggtgaacggccagaacttcgagaacatcaccttcatgaaggccgtggagatcctgagaaacaacacccacctggccctgaccgtgaagaccaacatcttcgtgttcaaggagctgctgttcagaaccgagcaggagaagagcggcgtgccccacatccccaagatcgccgagaagaagagcaacagacacagcatccagcacgtgcccggcgacatcgagcagaccagccaggagaagggcagcaagaaggtgaaggccaacaccgtgagcggcggcagaaacaagatcagaaagatcctggacaagaccagattcagcatcctgccccccaagctgttcagcgacggcggcctgagccagagccaggacgacagcatcgtgggcaccagacactgcagacacagcctggccatcatgcccatccccggcaccctgagcagcagcagccccgacctgctgcagcccaccaccagcatgctggacttcagcaaccccagcgacatccccgaccaggtgatcagagtgttcaaggtggaccagcagagctgctacatcatcatcagcaaggacaccaccgccaaggaggtggtgttccacgccgtgcacgagttcggcctgaccggcgccagcgacacctacagcctgtgcgaggtgagcgtgacccccgagggcgtgatcaagcagagaagactgcccgaccagttcagcaagctggccgacagaatccagctgaacggcagatactacctgaagaacaacatggagaccgagaccctgtgcagcgacgaggacgcccaggagctggtgaaggagagccagctgagcatgctgcagctgagcaccatcgaggtggccacccagctgagcatgagagacttcgacctgttcagaaacatcgagcccaccgagtacatcgacgacctgttcaagctgaacagcaagaccggcaacacccacctgaagagattcgaggacatcgtgaaccaggagaccttctgggtggccagcgagatcctgaccgaggccaaccagctgaagagaatgaagatcatcaagcacttcatcaagatcgccctgcactgcagagagtgcaagaacttcaacagcatgttcgccatcatcagcggcctgaacctggccagcgtggccagactgagaggcacctgggagaagctgcccagcaagtacgagaagcacctgcaggacctgcaggacatcttcgaccccagcagaaacatggccaagtacagaaacatcctgagcagccagagcatgcagccccccatcatccccctgttccccgtggtgaagaaggacatgaccttcctgcacgagggcaacgacagcaaggtggacggcctggtgaacttcgagaagctgagaatgatcagcaaggagatcagacaggtggtgagaatgaccagcgccaacatggaccccgccatgatgttcagacagagaagcctgagccagggcagcaccaacagcaacatgctggacgtgcagggcggcgcccacaagaagagagccagaagaagcagcctgctgaacgccaagaagctgtacgaggacgcccagatggccagaaaggtgaagcagtacctgagcagcctggacgtggagaccgacgaggagaagttccagatgatgagcctgcagtgggagcccgcctacggcaccctgaccaagaacctgagcgagaagagaagcgccaagagcagcgagatgagccccgtgcccatgagaagcgccggccagaccaccaaggcccacctgcaccagccccacagagtgagccaggtgctgcaggtgcccgccgtgaacctgcaccccatcagaaagaagggccagaccaaggaccccgccctgatgtag

SEQ ID NO: 96339 - DNA, 4176 bp, synthetic construct
  misc_feature 1..4176: note = Description of Artificial Sequence: Synthetic coding sequence
  source 1..4176: mol_type = other DNA
atgaacagccccgtggaccccggcgccagacaggccctgagaaagaagccccccgagagaacccccgaggacctgaacaccatctacagctacctgcacggcatggagatcctgagcaacctgagagagcaccagctgagactgatgagcgccagagccagatacgagagatacagcggcaaccaggtgctgttctgcagcgagaccatcgccagatgctggtacatcctgctgagcggcagcgtgctggtgaagggcagcatggtgctgcccccctgcagcttcggcaagcagttcggcggcaagagaggctgcgactgcctggtgctggagcccagcgagatgatcgtggtggagaacgccaaggacaacgaggacagcatcctgcagagagagatccccgccagacagagcagaagaagattcagaaagatcaactacaagggcgagagacagaccatcaccgacgacgtggaggtgaacagctacctgagcctgcccgccgacctgaccaagatgcacctgaccgagaacccccacccccaggtgacccacgtgagcagcagccagagcggctgcagcatcgccagcgacagcggcagcagcagcctgagcgacatctaccaggccaccgagagcgaggtgggcgacgtggacctgaccagactgcccgagggccccgtggacagcgaggacgacgaggaggaggacgaggagatcgacagaaccgaccccctgcagggcagagacctggtgagagagtgcctggagaaggagcccgccgacaagaccgacgacgacatcgagcagctgctggagttcatgcaccagctgcccgccttcgccaacatgaccatgagcgtgagaagagagctgtgcagcgtgatgatcttcgaggtggtggagcaggccggcgccatcatcctggaggacggccaggagctggacagctggtacgtgatcctgaacggcaccgtggagatcagccaccccgacggcaaggtggagaacctgttcatgggcaacagcttcggcatcacccccaccctggacaagcagtacatgcacggcatcgtgagaaccaaggtggacgactgccagttcgtgtgcatcgcccagcaggactactggagaatcctgaaccacgtggagaagaacacccacaaggtggaggaggagggcgagatcgtgatggtgcacgagcacagagagctggacagaagcggcaccagaaagggccacatcgtgatcaaggccacccccgagagactgatcatgcacctgatcgaggagcacagcatcgtggaccccacctacatcgaggacttcctgctgacctacagaaccttcctggagagccccctggacgtgggcatcaagctgctggagtggttcaagatcgacagcctgagagacaaggtgaccagaatcgtgctgctgtgggtgaacaaccacttcaacgacttcgagggcgaccccgccatgaccagattcctggaggagttcgagaagaacctggaggacaccaagatgaacggccacctgagactgctgaacatcgcctgcgccgccaaggccaagtggagacaggtggtgctgcagaaggccagcagagagagccccctgcagttcagcctgaacggcggcagcgagaagggcttcggcatcttcgtggagggcgtggagcccggcagcaaggccgccgacagcggcctgaagagaggcgaccagatcatggaggtgaacggccagaacttcgagaacatcaccttcatgaaggccgtggagatcctgagaaacaacacccacctggccctgaccgtgaagaccaacatcttcgtgttcaaggagctgctgttcagaaccgagcaggagaagagcggcgtgccccacatccccaagatcgccgagaagaagagcaacagacacagcatccagcacgtgcccggcgacatcgagcagaccagccaggagaagggcagcaagaaggtgaaggccaacaccgtgagcggcggcagaaacaagatcagaaagatcctggacaagaccagattcagcatcctgccccccaagctgttcagcgacggcggcctgagccagagccaggacgacagcatcgtgggcaccagacactgcagacacagcctggccatcatgcccatccccggcaccctgagcagcagcagccccgacctgctgcagcccaccaccagcatgctggacttcagcaaccccagcgacatccccgaccaggtgatcagagtgttcaaggtggaccagcagagctgctacatcatcatcagcaaggacaccaccgccaaggaggtggtgttccacgccgtgcacgagttcggcctgaccggcgccagcgacacctacagcctgtgcgaggtgagcgtgacccccgagggcgtgatcaagcagagaagactgcccgaccagttcagcaagctggccgacagaatccagctgaacggcagatactacctgaagaacaacatggagaccgagaccctgtgcagcgacgaggacgcccaggagctggtgaaggagagccagctgagcatgctgcagctgagcaccatcgaggtggccacccagctgagcatgagagacttcgacctgttcagaaacatcgagcccaccgagtacatcgacgacctgttcaagctgaacagcaagaccggcaacacccacctgaagagattcgaggacatcgtgaaccaggagaccttctgggtggccagcgagatcctgaccgaggccaaccagctgaagagaatgaagatcatcaagcacttcatcaagatcgccctgcactgcagagagtgcaagaacttcaacagcatgttcgccatcatcagcggcctgaacctggccagcgtggccagactgagaggcacctgggagaagctgcccagcaagtacgagaagcacctgcaggacctgcaggacatcttcgaccccagcagaaacatggccaagtacagaaacatcctgagcagccagagcatgcagccccccatcatccccctgttccccgtggtgaagaaggacatgaccttcctgcacgagggcaacgacagcaaggtggacggcctggtgaacttcgagaagctgagaatgatcagcaaggagatcagacaggtggtgagaatgaccagcgccaacatggaccccgccatgatgttcagacagagaagcctgagccagggcagcaccaacagcaacatgctggacgtgcagggcggcgcccacaagaagagagccagaagaagcagcctgctgaacgccaagaagctgtacgaggacgcccagatggccagaaaggtgaagcagtacctgagcagcctggacgtggagaccgacgaggagaagttccagatgatgagcctgcagtgggagcccgcctacggcaccctgaccaagaacctgagcgagaagagaagcgccaagagcagcgagatgagccccgtgcccatgagaagcgccggccagaccaccaaggcccacctgcaccagccccacagagtgagccaggtgctgcaggtgcccgccgtgaacctgcaccccatcagaaagaagggccagaccaaggaccccgccctgaacaccagcctgccccagaaggtgctgggcaccaccgaggagatcagcggcaagaagcacaccgaggacaccatcagcgtggccagcagcctgcacagcagcccccccgccagcccccagggcagcccccacaaggtgggcagcatcatcagcgaccacagcagcaagatcagcggccagagctgccccggcatcggcggcgcctacctgcagaagaagatcctgcagatcaccagaagcaccgccaagagaaccgacagcaccgagaaggccaccgaggagaacagagacagaaccagctgcgagaacaccaccagaaagagaatgaccagccccttcagaagactgagagagagaatgctgagcagagagagactggtgaacagccagaaggaggacaccgaccacaaccaggccaccgagagctgcgagaaggtgaaggacgtgggcagcaacatcaaggacgagaagggcagcgccatcttcaacagcaacagccagggcaacagcaacaccctgaactgcttctacaccagattcaagagcaagagaagaaagaccctgtag

SEQ ID NO: 96340 - DNA, 2484 bp, synthetic construct
  misc_feature 1..2484: note = Description of Artificial Sequence: Synthetic coding sequence
  source 1..2484: mol_type = other DNA
atgaacagccccgtggaccccggcgccagacaggccctgagaaagaagccccccgagagaacccccgaggacctgaacaccatctacagctacctgcacggcatggagatcctgagcaacctgagagagcaccagctgagactgatgagcgccagagccagatacgagagatacagcggcaaccaggtgctgttctgcagcgagaccatcgccagatgctggtacatcctgctgagcggcagcgtgctggtgaagggcagcatggtgctgcccccctgcagcttcggcaagcagttcggcggcaagagaggctgcgactgcctggtgctggagcccagcgagatgatcgtggtggagaacgccaaggacaacgaggacagcatcctgcagagagagatccccgccagacagagcagaagaagattcagaaagatcaactacaagggcgagagacagaccatcaccgacgacgtggaggtgaacagctacctgagcctgcccgccgacctgaccaagatgcacctgaccgagaacccccacccccaggtgacccacgtgagcagcagccagagcggctgcagcatcgccagcgacagcggcagcagcagcctgagcgacatctaccaggccaccgagagcgaggtgggcgacgtggacctgaccagactgcccgagggccccgtggacagcgaggacgacgaggaggaggacgaggagatcgacagaaccgaccccctgcagggcagagacctggtgagagagtgcctggagaaggagcccgccgacaagaccgacgacgacatcgagcagctgctggagttcatgcaccagctgcccgccttcgccaacatgaccatgagcgtgagaagagagctgtgcagcgtgatgatcttcgaggtggtggagcaggccggcgccatcatcctggaggacggccaggagctggacagctggtacgtgatcctgaacggcaccgtggagatcagccaccccgacggcaaggtggagaacctgttcatgggcaacagcttcggcatcacccccaccctggacaagcagtacatgcacggcatcgtgagaaccaaggtggacgactgccagttcgtgtgcatcgcccagcaggactactggagaatcctgaaccacgtggagaagaacacccacaaggtggaggaggagggcgagatcgtgatggtgcacgagcacagagagctggacagaagcggcaccagaaagggccacatcgtgatcaaggccacccccgagagactgatcatgcacctgatcgaggagcacagcatcgtggaccccacctacatcgaggacttcctgctgacctacagaaccttcctggagagccccctggacgtgggcatcaagctgctggagtggttcaagatcgacagcctgagagacaaggtgaccagaatcgtgctgctgtgggtgaacaaccacttcaacgacttcgagggcgaccccgccatgaccagattcctggaggagttcgagaagaacctggaggacaccaagatgaacggccacctgagactgctgaacatcgcctgcgccgccaaggccaagtggagacaggtggtgctgcagaaggccagcagagagagccccctgcagttcagcctgaacggcggcagcgagaagggcttcggcatcttcgtggagggcgtggagcccggcagcaaggccgccgacagcggcctgaagagaggcgaccagatcatggaggtgaacggccagaacttcgagaacatcaccttcatgaaggccgtggagatcctgagaaacaacacccacctggccctgaccgtgaagaccaacatcttcgtgttcaaggagctgctgttcagaaccgagcaggagaagagcggcgtgccccacatccccaagatcgccgagaagaagagcaacagacacagcatccagcacgtgcccggcgacatcgagcagaccagccaggagaagggcagcaagaaggtgaaggccaacaccgtgagcggcggcagaaacaagatcagaaagatcctggacaagaccagattcagcatcctgccccccaagctgttcagcgacggcggcctgagccagagccaggacgacagcatcgtgggcaccagacactgcagacacagcctggccatcatgcccatccccggcaccctgagcagcagcagccccgacctgctgcagcccaccaccagcatgctggacttcagcaaccccagcgacatccccgaccaggtgatcagagtgttcaaggtggaccagcagagctgctacatcatcatcagcaaggacaccaccgccaaggaggtggtgttccacgccgtgcacgagttcggcctgaccggcgccagcgacacctacagcctgtgcgaggtgagcgtgacccccgagggcgtgatcaagcagagaagactgcccgaccagttcagcaagctggccgacagaatccagctgaacggcagatag

SEQ ID NO: 96341 - DNA, 1551 bp, synthetic construct
  misc_feature 1..1551: note = Description of Artificial Sequence: Synthetic coding sequence
  source 1..1551: mol_type = other DNA
atggccgacaacctgagcgacaccctgaagaagctgaagatcaccgccgtggacaagaccgaggacagcctggagggctgcctggactgcctgctgcaggccctggcccagaacaacaccgagaccagcgagaagatccaggccagcggcatcctgcagctgttcgccagcctgctgaccccccagagcagctgcaaggccaaggtggccaacatcatcgccgaggtggccaagaacgagttcatgagaatcccctgcgtggacgccggcctgatcagccccctggtgcagctgctgaacagcaaggaccaggaggtgctgctgcagaccggcagagccctgggcaacatctgctacgacagccagagcagcaaggagcagttcgccagcaccaacatcgccgaggagctggtgaagctgttcaagaagcagatcgagcacgacaagagagagatgatcttcgaggtgctggcccccctggccgagaacgacgccatcaagctgcagctggtggaggccggcctggtggagtgcctgctggagatcgtgcagcagaaggtggacagcgacaaggaggacgacatcaccgagctgaagaccggcagcgacctgatggtgctgctgctgctgggcgacgagagcatgcagaagctgttcgagggcggcaagggcagcgtgttccagagagtgctgagctggatccccagcaacaaccaccagctgcagctggccggcgccctggccatcgccaacttcgccagaaacgacgccaactgcatccacatggtggacaacggcatcgtggagaagctgatggacctgctggacagacacgtggaggacggcaacgtgaccgtgcagcacgccgccctgagcgccctgagaaacctggccatccccgtgatcaacaaggccaagatgctgagcgccggcgtgaccgaggccgtgctgaagttcctgaagagcgagatgccccccgtgcagttcaagctgctgggcaccctgagaatgctgatcgacgcccaggccgaggccgccgagcagctgggcaagaacgtgaagctggtggagagactggtggagtggtgcgaggccaaggaccacgccggcgtgatgggcgagagcaacagactgctgagcgccctgatcagacacagcaagagcaaggacgtgatcaagaccatcgtgcagagcggcggcatcaagcacctggtgaccatggccaccagcgagcacgtgatcatgcagaacgaggccctggtggccctggccctgatcgccgccctggagctgggcaccgccgagaaggacctggagagcgccaagctggtgcagatcctgcacagactgctggccgacgagagaagcgcccccgagatcaagtacaacagcatggtgctgatctgcgccctgatgggcagcgagtgcctgcacaaggaggtgcaggacctggccttcctggacgtggtgagcaagctgagaagccacgagaacaagagcgtggcccagcaggccagcctgaccgagcagagactgaccgtggagagctag

SEQ ID NO: 96342 - DNA, 1827 bp, synthetic construct
  misc_feature 1..1827: note = Description of Artificial Sequence: Synthetic coding sequence
  source 1..1827: mol_type = other DNA
atggccgacaacctgagcgacaccctgaagaagctgaagatcaccgccgtggacaagaccgaggacagcctggagggctgcctggactgcctgctgcaggccctggcccagaacaacaccgagaccagcgagaagatccaggccagcggcatcctgcagctgttcgccagcctgctgaccccccagagcagctgcaaggccaaggtggccaacatcatcgccgaggtggccaagaacgagttcatgagaatcccctgcgtggacgccggcctgatcagccccctggtgcagctgctgaacagcaaggaccaggaggtgctgctgcagaccggcagagccctgggcaacatctgctacgacagccacgagggcagaagcgccgtggaccaggccggcggcgcccagatcgtgatcgaccacctgagaagcctgtgcagcatcaccgaccccgccaacgagaagctgctgaccgtgttctgcggcatgctgatgaactacagcaacgagaacgacagcctgcaggcccagctgatcaacatgggcgtgatccccaccctggtgaagctgctgggcatccactgccagaacgccgccctgaccgagatgtgcctggtggccttcggcaacctggccgagctggagagcagcaaggagcagttcgccagcaccaacatcgccgaggagctggtgaagctgttcaagaagcagatcgagcacgacaagagagagatgatcttcgaggtgctggcccccctggccgagaacgacgccatcaagctgcagctggtggaggccggcctggtggagtgcctgctggagatcgtgcagcagaaggtggacagcgacaaggaggacgacatcaccgagctgaagaccggcagcgacctgatggtgctgctgctgctgggcgacgagagcatgcagaagctgttcgagggcggcaagggcagcgtgttccagagagtgctgagctggatccccagcaacaaccaccagctgcagctggccggcgccctggccatcgccaacttcgccagaaacgacgccaactgcatccacatggtggacaacggcatcgtggagaagctgatggacctgctggacagacacgtggaggacggcaacgtgaccgtgcagcacgccgccctgagcgccctgagaaacctggccatccccgtgatcaacaaggccaagatgctgagcgccggcgtgaccgaggccgtgctgaagttcctgaagagcgagatgccccccgtgcagttcaagctgctgggcaccctgagaatgctgatcgacgcccaggccgaggccgccgagcagctgggcaagaacgtgaagctggtggagagactggtggagtggtgcgaggccaaggaccacgccggcgtgatgggcgagagcaacagactgctgagcgccctgatcagacacagcaagagcaaggacgtgatcaagaccatcgtgcagagcggcggcatcaagcacctggtgaccatggccaccagcgagcacgtgatcatgcagaacgaggccctggtggccctggccctgatcgccgccctggagctgggcaccgccgagaaggacctggagagcgccaagctggtgcagatcctgcacagactgctggccgacgagagaagcgcccccgagatcaagtacaacagcatggtgctgatctgcgccctgatgggcagcgagtgcctgcacaaggaggtgcaggacctggccttcctggacgtggtgagcaagctgagaagccacgagaacaagagcgtggcccagcaggccagcctgaccgagcagagactgaccgtggagagctag

SEQ ID NO: 96343 - DNA, 1680 bp, synthetic construct
  misc_feature 1..1680: note = Description of Artificial Sequence: Synthetic coding sequence
  source 1..1680: mol_type = other DNA
atggccgacaacctgagcgacaccctgaagaagctgaagatcaccgccgtggacaagaccgaggacagcctggagggctgcctggactgcctgctgcaggccctggcccagaacaacaccgagaccagcgagaagatccaggccagcggcatcctgcagctgttcgccagcctgctgaccccccagagcagctgcaaggccaaggtggccaacatcatcgccgaggtggccaagaacgagttcatgagaatcccctgcgtggacgccggcctgatcagccccctggtgcagctgctgaacagcaaggaccaggaggtgctgctgcagaccggcagagccctgggcaacatctgctacgacagccacagcctgcaggcccagctgatcaacatgggcgtgatccccaccctggtgaagctgctgggcatccactgccagaacgccgccctgaccgagatgtgcctggtggccttcggcaacctggccgagctggagagcagcaaggagcagttcgccagcaccaacatcgccgaggagctggtgaagctgttcaagaagcagatcgagcacgacaagagagagatgatcttcgaggtgctggcccccctggccgagaacgacgccatcaagctgcagctggtggaggccggcctggtggagtgcctgctggagatcgtgcagcagaaggtggacagcgacaaggaggacgacatcaccgagctgaagaccggcagcgacctgatggtgctgctgctgctgggcgacgagagcatgcagaagctgttcgagggcggcaagggcagcgtgttccagagagtgctgagctggatccccagcaacaaccaccagctgcagctggccggcgccctggccatcgccaacttcgccagaaacgacgccaactgcatccacatggtggacaacggcatcgtggagaagctgatggacctgctggacagacacgtggaggacggcaacgtgaccgtgcagcacgccgccctgagcgccctgagaaacctggccatccccgtgatcaacaaggccaagatgctgagcgccggcgtgaccgaggccgtgctgaagttcctgaagagcgagatgccccccgtgcagttcaagctgctgggcaccctgagaatgctgatcgacgcccaggccgaggccgccgagcagctgggcaagaacgtgaagctggtggagagactggtggagtggtgcgaggccaaggaccacgccggcgtgatgggcgagagcaacagactgctgagcgccctgatcagacacagcaagagcaaggacgtgatcaagaccatcgtgcagagcggcggcatcaagcacctggtgaccatggccaccagcgagcacgtgatcatgcagaacgaggccctggtggccctggccctgatcgccgccctggagctgggcaccgccgagaaggacctggagagcgccaagctggtgcagatcctgcacagactgctggccgacgagagaagcgcccccgagatcaagtacaacagcatggtgctgatctgcgccctgatgggcagcgagtgcctgcacaaggaggtgcaggacctggccttcctggacgtggtgagcaagctgagaagccacgagaacaagagcgtggcccagcaggccagcctgaccgagcagagactgaccgtggagagctag

SEQ ID NO: 96344 - DNA, 1677 bp, synthetic construct
  misc_feature 1..1677: note = Description of Artificial Sequence: Synthetic coding sequence
  source 1..1677: mol_type = other DNA
atggacaacctgagcgacaccctgaagaagctgaagatcaccgccgtggacaagaccgaggacagcctggagggctgcctggactgcctgctgcaggccctggcccagaacaacaccgagaccagcgagaagatccaggccagcggcatcctgcagctgttcgccagcctgctgaccccccagagcagctgcaaggccaaggtggccaacatcatcgccgaggtggccaagaacgagttcatgagaatcccctgcgtggacgccggcctgatcagccccctggtgcagctgctgaacagcaaggaccaggaggtgctgctgcagaccggcagagccctgggcaacatctgctacgacagccacagcctgcaggcccagctgatcaacatgggcgtgatccccaccctggtgaagctgctgggcatccactgccagaacgccgccctgaccgagatgtgcctggtggccttcggcaacctggccgagctggagagcagcaaggagcagttcgccagcaccaacatcgccgaggagctggtgaagctgttcaagaagcagatcgagcacgacaagagagagatgatcttcgaggtgctggcccccctggccgagaacgacgccatcaagctgcagctggtggaggccggcctggtggagtgcctgctggagatcgtgcagcagaaggtggacagcgacaaggaggacgacatcaccgagctgaagaccggcagcgacctgatggtgctgctgctgctgggcgacgagagcatgcagaagctgttcgagggcggcaagggcagcgtgttccagagagtgctgagctggatccccagcaacaaccaccagctgcagctggccggcgccctggccatcgccaacttcgccagaaacgacgccaactgcatccacatggtggacaacggcatcgtggagaagctgatggacctgctggacagacacgtggaggacggcaacgtgaccgtgcagcacgccgccctgagcgccctgagaaacctggccatccccgtgatcaacaaggccaagatgctgagcgccggcgtgaccgaggccgtgctgaagttcctgaagagcgagatgccccccgtgcagttcaagctgctgggcaccctgagaatgctgatcgacgcccaggccgaggccgccgagcagctgggcaagaacgtgaagctggtggagagactggtggagtggtgcgaggccaaggaccacgccggcgtgatgggcgagagcaacagactgctgagcgccctgatcagacacagcaagagcaaggacgtgatcaagaccatcgtgcagagcggcggcatcaagcacctggtgaccatggccaccagcgagcacgtgatcatgcagaacgaggccctggtggccctggccctgatcgccgccctggagctgggcaccgccgagaaggacctggagagcgccaagctggtgcagatcctgcacagactgctggccgacgagagaagcgcccccgagatcaagtacaacagcatggtgctgatctgcgccctgatgggcagcgagtgcctgcacaaggaggtgcaggacctggccttcctggacgtggtgagcaagctgagaagccacgagaacaagagcgtggcccagcaggccagcctgaccgagcagagactgaccgtggagagctag

SEQ ID NO: 96345 - DNA, 1824 bp, synthetic construct
  misc_feature 1..1824: note = Description of Artificial Sequence: Synthetic coding sequence
  source 1..1824: mol_type = other DNA
atggacaacctgagcgacaccctgaagaagctgaagatcaccgccgtggacaagaccgaggacagcctggagggctgcctggactgcctgctgcaggccctggcccagaacaacaccgagaccagcgagaagatccaggccagcggcatcctgcagctgttcgccagcctgctgaccccccagagcagctgcaaggccaaggtggccaacatcatcgccgaggtggccaagaacgagttcatgagaatcccctgcgtggacgccggcctgatcagccccctggtgcagctgctgaacagcaaggaccaggaggtgctgctgcagaccggcagagccctgggcaacatctgctacgacagccacgagggcagaagcgccgtggaccaggccggcggcgcccagatcgtgatcgaccacctgagaagcctgtgcagcatcaccgaccccgccaacgagaagctgctgaccgtgttctgcggcatgctgatgaactacagcaacgagaacgacagcctgcaggcccagctgatcaacatgggcgtgatccccaccctggtgaagctgctgggcatccactgccagaacgccgccctgaccgagatgtgcctggtggccttcggcaacctggccgagctggagagcagcaaggagcagttcgccagcaccaacatcgccgaggagctggtgaagctgttcaagaagcagatcgagcacgacaagagagagatgatcttcgaggtgctggcccccctggccgagaacgacgccatcaagctgcagctggtggaggccggcctggtggagtgcctgctggagatcgtgcagcagaaggtggacagcgacaaggaggacgacatcaccgagctgaagaccggcagcgacctgatggtgctgctgctgctgggcgacgagagcatgcagaagctgttcgagggcggcaagggcagcgtgttccagagagtgctgagctggatccccagcaacaaccaccagctgcagctggccggcgccctggccatcgccaacttcgccagaaacgacgccaactgcatccacatggtggacaacggcatcgtggagaagctgatggacctgctggacagacacgtggaggacggcaacgtgaccgtgcagcacgccgccctgagcgccctgagaaacctggccatccccgtgatcaacaaggccaagatgctgagcgccggcgtgaccgaggccgtgctgaagttcctgaagagcgagatgccccccgtgcagttcaagctgctgggcaccctgagaatgctgatcgacgcccaggccgaggccgccgagcagctgggcaagaacgtgaagctggtggagagactggtggagtggtgcgaggccaaggaccacgccggcgtgatgggcgagagcaacagactgctgagcgccctgatcagacacagcaagagcaaggacgtgatcaagaccatcgtgcagagcggcggcatcaagcacctggtgaccatggccaccagcgagcacgtgatcatgcagaacgaggccctggtggccctggccctgatcgccgccctggagctgggcaccgccgagaaggacctggagagcgccaagctggtgcagatcctgcacagactgctggccgacgagagaagcgcccccgagatcaagtacaacagcatggtgctgatctgcgccctgatgggcagcgagtgcctgcacaaggaggtgcaggacctggccttcctggacgtggtgagcaagctgagaagccacgagaacaagagcgtggcccagcaggccagcctgaccgagcagagactgaccgtggagagctag

SEQ ID NO: 96346 - DNA, 1824 bp, synthetic construct
  misc_feature 1..1824: note = Description of Artificial Sequence: Synthetic coding sequence
  source 1..1824: mol_type = other DNA
atggccgacaacctgagcgacaccctgaagaagctgaagatcaccgccgtggacaagaccgaggacagcctggagggctgcctggactgcctgctgcaggccctggcccagaacaacaccgagaccagcgagaagatccaggccagcggcatcctgcagctgttcgccagcctgctgaccccccagagcagctgcaaggccaaggtggccaacatcatcgccgaggtggccaagaacgagttcatgagaatcccctgcgtggacgccggcctgatcagccccctggtgcagctgctgaacagcaaggaccaggaggtgctgctgcagaccggcagagccctgggcaacatctgctacgacagccacgagggcagaagcgccgtggaccaggccggcggcgcccagatcgtgatcgaccacctgagaagcctgtgcagcatcaccgaccccgccaacgagaagctgctgaccgtgttctgcggcatgctgatgaactacagcaacgagaacgacagcctgcaggcccagctgatcaacatgggcgtgatccccaccctggtgaagctgctgggcatccactgccagaacgccgccctgaccgagatgtgcctggtggccttcggcaacctggccgagctggagagcagcaaggagcagttcgccagcaccaacatcgccgaggagctggtgaagctgttcaagaagcagatcgagcacgacaagagagagatgatcttcgaggtgctggcccccctggccgagaacgacgccatcaagctgcagctggtggaggccggcctggtggagtgcctgctggagatcgtgcagcagaaggtggacagcgacaaggaggacgacatcaccgagctgaagaccggcagcgacctgatggtgctgctgctgctgggcgacgagagcatgcagaagctgttcgagggcggcaagggcagcgtgttccagagagtgctgagctggatccccagcaacaaccaccagctgcagctggccggcgccctggccatcgccaacttcgccagaaacgacgccaactgcatccacatggtggacaacggcatcgtggagaagctgatggacctgctggacagacacgtggaggacggcaacgtgaccgtgcagcacgccgccctgagcgccctgagaaacctggccatccccgtgatcaacaaggccaagatgctgagcgccggcgtgaccgaggccgtgctgaagttcctgaagagcgagatgccccccgtgcagttcaagctgctgggcaccctgagaatgctgatcgacgcccaggaggccgccgagcagctgggcaagaacgtgaagctggtggagagactggtggagtggtgcgaggccaaggaccacgccggcgtgatgggcgagagcaacagactgctgagcgccctgatcagacacagcaagagcaaggacgtgatcaagaccatcgtgcagagcggcggcatcaagcacctggtgaccatggccaccagcgagcacgtgatcatgcagaacgaggccctggtggccctggccctgatcgccgccctggagctgggcaccgccgagaaggacctggagagcgccaagctggtgcagatcctgcacagactgctggccgacgagagaagcgcccccgagatcaagtacaacagcatggtgctgatctgcgccctgatgggcagcgagtgcctgcacaaggaggtgcaggacctggccttcctggacgtggtgagcaagctgagaagccacgagaacaagagcgtggcccagcaggccagcctgaccgagcagagactgaccgtggagagctag

SEQ ID NO: 96347 - DNA, 555 bp, synthetic construct
  misc_feature 1..555: note = Description of Artificial Sequence: Synthetic coding sequence
  source 1..555: mol_type = other DNA
atgagagagtacaagctggtggtgctgggcagcggcggcgtgggcaagagcgccctgaccgtgcagttcgtgcagggcatcttcgtggagaagtacgaccccaccatcgaggacagctacagaaagcaggtggaggtggacgcccagcagtgcatgctggagatcctggacaccgccggcaccgagcagttcaccgccatgagagacctgtacatgaagaacggccagggcttcgccctggtgtacagcatcaccgcccagagcaccttcaacgacctgcaggacctgagagagcagatcctgagagtgaaggacaccgacgacgtgcccatgatcctggtgggcaacaagtgcgacctggaggacgagagagtggtgggcaaggagcagggccagaacctggccagacagtggaacaactgcgccttcctggagagcagcgccaagagcaagatcaacgtgaacgagatcttctacgacctggtgagacagatcaacagaaagacccccgtgcccggcaaggccagaaagaagagcagctgccagctgctgtag

SEQ ID NO: 96348 - DNA, 555 bp, synthetic construct; identical to SEQ ID NO: 96347
  misc_feature 1..555: note = Description of Artificial Sequence: Synthetic coding sequence
  source 1..555: mol_type = other DNA

SEQ ID NO: 96349 - DNA, 357 bp, synthetic construct
  misc_feature 1..357: note = Description of Artificial Sequence: Synthetic coding sequence
  source 1..357: mol_type = other DNA
atgagagacctgtacatgaagaacggccagggcttcgccctggtgtacagcatcaccgcccagagcaccttcaacgacctgcaggacctgagagagcagatcctgagagtgaaggacaccgacgacgtgcccatgatcctggtgggcaacaagtgcgacctggaggacgagagagtggtgggcaaggagcagggccagaacctggccagacagtggaacaactgcgccttcctggagagcagcgccaagagcaagatcaacgtgaacgagatcttctacgacctggtgagacagatcaacagaaagacccccgtgcccggcaaggccagaaagaagagcagctgccagctgctgtag

SEQ ID NO: 96350 - DNA, 555 bp, synthetic construct; identical to SEQ ID NO: 96347
  misc_feature 1..555: note = Description of Artificial Sequence: Synthetic coding sequence
  source 1..555: mol_type = other DNA

SEQ ID NO: 96351 - DNA, 99 bp, synthetic construct
  misc_feature 1..99: note = Description of Artificial Sequence: Synthetic coding sequence
  source 1..99: mol_type = other DNA
atgagagagtacaagctggtggtgctgggcagcggcggcgtgggcaagagcgccctgaccgtgcagttcgtgcagggcatcttcgtggagaagtactag

SEQ ID NO: 96352 - DNA, 429 bp, synthetic construct
  misc_feature 1..429: note = Description of Artificial Sequence: Synthetic coding sequence
  source 1..429: mol_type = other DNA
atgagagagtacaagctggtggtgctgggcagcggcggcgtgggcaagagcgccctggagcagttcaccgccatgagagacctgtacatgaagaacggccagggcttcgccctggtgtacagcatcaccgcccagagcaccttcaacgacctgcaggacctgagagagcagatcctgagagtgaaggacaccgacgacgtgcccatgatcctggtgggcaacaagtgcgacctggaggacgagagagtggtgggcaaggagcagggccagaacctggccagacagtggaacaactgcgccttcctggagagcagcgccaagagcaagatcaacgtgaacgagatcttctacgacctggtgagacagatcaacagaaagacccccgtgcccggcaaggccagaaagaagagcagctgccagctgctgtag

SEQ ID NO: 96353 - DNA, 384 bp, synthetic construct
  misc_feature 1..384: note = Description of Artificial Sequence: Synthetic coding sequence
  source 1..384: mol_type = other DNA
atgagagagtacaagctggtggtgctgggcagcggcggcgtgggcaagagcgccctgaccgtgcagttcgtgcagggcatcttcgtggagaagtacgaccccaccatcgaggacagctacagaaagcaggtggaggtggacgcccagcagtgcatgctggagatcctggacaccgccggcaccgagcagttcaccgccatgagagacctgtacatgaagaacggccagggcttcgccctggtgtacagcatcaccgcccagagcaccttcaacgacctgcaggacctgagagagcagatcctgagagtgaaggacaccgacgacgtgcccatgatcctggtgggcaacaagtgcgacctggaggacgagagagtggtgggctag

SEQ ID NO: 96354 - DNA, 429 bp, synthetic construct
  misc_feature 1..429: note = Description of Artificial Sequence: Synthetic coding sequence
  source 1..429: mol_type = other DNA
atgagagagtacaagctggtggtgctgggcagcggcggcgtgggcaagagcgccctgaccgtgcagttcgtgcagggcatcttcgtggagaagtacgaccccaccatcgaggacagctacagaaagcaggtggaggtggacgcccagcagtgcatgctggagatcctggacaccgccggcaccgagcagttcaccgccatgagagacctgtacatgaagaacggccagggcttcgccctggtgtacagcatcaccgcccagagcaccttcaacgacctgcaggacctgagagagcagatcctgagagtgaaggacaccgacgacgtgcccatgatcctggtgggcaacaagtgcgacctggaggacgagagagtggtgggcaaggagcagggccagaacctggacaacggcaccaccgtgcacagctag

SEQ ID NO: 96355 - DNA, 147 bp, synthetic construct
  misc_feature 1..147: note = Description of Artificial Sequence: Synthetic coding sequence
  source 1..147: mol_type = other DNA
atgagagagtacaagctggtggtgctgggcagcggcggcgtgggcaagagcgccctgaccgtgcagttcgtgcagggcatcttcgtggagaagtacgaccccaccatcgaggacagctacagaaagcaggtggaggtggacgcctag

SEQ ID NO: 96356 - DNA, 36 bp, synthetic construct
  misc_feature 1..36: note = Description of Artificial Sequence: Synthetic coding sequence
  source 1..36: mol_type = other DNA
atgagagagtacaagctggtggtgctgggcagctag

SEQ ID NO: 96357 - DNA, 264 bp, synthetic construct
  misc_feature 1..264: note = Description of Artificial Sequence: Synthetic coding sequence
  source 1..264: mol_type = other DNA
atgagagagtacaagctggtggtgctgggcagcggcggcgtgggcaagagcgccctgaccgtgcagttcgtgcagggcatcttcgtggagaagtacgaccccaccatcgaggacagctacagaaagcaggtggaggtggacgcccagcagtgcatgctggagatcctggacaccgccggcaccgagcagttcaccgccatgagagacctgtacatgaagaacggccagggcttcgccctggtgtacagcatcaccgcccagtag

SEQ ID NO: 96358 - DNA, 555 bp, synthetic construct; identical to SEQ ID NO: 96347
  misc_feature 1..555: note = Description of Artificial Sequence: Synthetic coding sequence
  source 1..555: mol_type = other DNA

SEQ ID NO: 96359 - DNA, 306 bp, synthetic construct
  misc_feature 1..306: note = Description of Artificial Sequence: Synthetic coding sequence
  source 1..306: mol_type = other DNA
atgagagagtacaagctggtggtgctgggcagcggcggcgtgggcaagagcgccctgaccgtgcagttcgtgcagggcatcttcgtggagaagtacgaccccaccatcgaggacagctacagaaagcaggtggaggtggacgcccagcagtgcatgctggagatcctggacaccgccggcaccgagcagttcaccgccatgagagacctgtacatgaagaacggccagggcttcgccctggtgtacagcatcaccgcccagagcaccttcaacgacctgcaggacctgagagagcagatcctgtag

SEQ ID NO: 96360 - DNA, 162 bp, synthetic construct
  misc_feature 1..162: note = Description of Artificial Sequence: Synthetic coding sequence
  source 1..162: mol_type = other DNA
atgagagagtacaagctggtggtgctgggcagcggcggcgtgggcaagagcgccctgaccgtgcagttcgtgcagggcatcttcgtggagaagtacgaccccaccatcgaggacagctacagaaagcaggtggaggtggacgcccagcagtgcatgctgtag

SEQ ID NO: 96361 - DNA, 429 bp, synthetic construct; identical to SEQ ID NO: 96352
  misc_feature 1..429: note = Description of Artificial Sequence: Synthetic coding sequence
  source 1..429: mol_type = other DNA

SEQ ID NO: 96362 - DNA, 498 bp, synthetic construct
  misc_feature 1..498: note = Description of Artificial Sequence: Synthetic coding sequence
  source 1..498: mol_type = other DNA
atgagagagtacaagctggtggtgctgggcagcggcggcgtgggcaagagcgccctgaccgtgcagttcgtgcagggcatcttcgtggagaagtacgaccccaccatcgaggacagctacagaaaggagcagttcaccgccatgagagacctgtacatgaagaacggccagggcttcgccctggtgtacagcatcaccgcccagagcaccttcaacgacctgcaggacctgagagagcagatcctgagagtgaaggacaccgacgacgtgcccatgatcctggtgggcaacaagtgcgacctggaggacgagagagtggtgggcaaggagcagggccagaacctggccagacagtggaacaactgcgccttcctggagagcagcgccaagagcaagatcaacgtgaacgagatcttctacgacctggtgagacagatcaacagaaagacccccgtgcccggcaaggccagaaagaagagcagctgccagctgctgtag

SEQ ID NO: 96363 - DNA, 420 bp, synthetic construct
  misc_feature 1..420: note = Description of Artificial Sequence: Synthetic coding sequence
  source 1..420: mol_type = other DNA
atgagagagtacaagctggtggtgctgggcagcggcggcgtgggcaagagcgccctgaccgtgcagttcgtgcagggcatcttcgtggagaagtacgaccccaccatcgaggacagctacagaaagcaggtggaggtggacgcccagcagtgcatgctggagatcctggacaccgccggcaccgagcagttcaccgccatgagagacctgtacatgaagaacggccagggcttcgccctggtgtacagcatcaccgcccagagcaccttcaacgacctgcaggacctgagagagcagatcctgagagtgaaggacaccgacgacgtgcccatgatcctggtgggcaacaagtgcgacctggaggacgagagagtggtgggcaaggagcagggccagaacctggccagacagtggaactag

SEQ ID NO: 96364 - DNA, 282 bp, synthetic construct
  misc_feature 1..282: note = Description of Artificial Sequence: Synthetic coding sequence
  source 1..282: mol_type = other DNA
atgagagagtacaagctggtggtgctgggcagcggcggcgtgggcaagagcgccctgaccgtgcagttcgtgcagggcatcttcgtggagaagtacgaccccaccatcgaggacagctacagaaagcaggtggaggtggacgcccagcagtgcatgctggagatcctggacaccgccggcaccgagcagttcaccgccatgagagacctgtacatgaagaacggccagggcttcgccctggtgtacagcatcaccgcccagagcaccttcaacgacctgtag

SEQ ID NO: 96365 - DNA, 36 bp, synthetic construct; identical to SEQ ID NO: 96356
  misc_feature 1..36: note = Description of Artificial Sequence: Synthetic coding sequence
  source 1..36: mol_type = other DNA

SEQ ID NO: 96366 - DNA, 297 bp, synthetic construct
  misc_feature 1..297: note = Description of Artificial Sequence: Synthetic coding sequence
  source 1..297: mol_type = other DNA
atgagagagtacaagctggtggtgctgggcagcggcggcgtgggcaagagcgccctgaccgtgcagttcgtgcagggcatcttcgtggagaagtacgaccccaccatcgaggacagctacagaaagcaggtggaggtggacgcccagcagtgcatgctggagatcctggacaccgccggcaccgagcagttcaccgccatgagagacctgtacatgaagaacggccagggcttcgccctggtgtacagcatcaccgcccagagcaccttcaacgacctgcaggacctgagagagtag

SEQ ID NO: 96367 - DNA, 414 bp, synthetic construct
  misc_feature 1..414: note = Description of Artificial Sequence: Synthetic coding sequence
  source 1..414: mol_type = other DNA
atgagagagtacaagctggtggtgctgggcagcggcggcgtgggcaagagcgccctgaccgtgcagttcgtgcagggcatcttcgtggagaagtacgaccccaccatcgaggacagctacagaaagcaggtggaggtggacgcccagcagtgcatgctggagatcctggacaccgccggcaccgtgcccatgatcctggtgggcaacaagtgcgacctggaggacgagagagtggtgggcaaggagcagggccagaacctggccagacagtggaacaactgcgccttcctggagagcagcgccaagagcaagatcaacgtgaacgagatcttctacgacctggtgagacagatcaacagaaagacccccgtgcccggcaaggccagaaagaagagcagctgccagctgctgtag

SEQ ID NO: 96368 - DNA, 357 bp, synthetic construct; identical to SEQ ID NO: 96349
  misc_feature 1..357: note = Description of Artificial Sequence: Synthetic coding sequence
  source 1..357: mol_type = other DNA

SEQ ID NO: 96369 - DNA, 369 bp, synthetic construct
  misc_feature 1..369: note = Description of Artificial Sequence: Synthetic coding sequence
  source 1..369: mol_type = other DNA
atgagagagtacaagctggtggtgctgggcagcggcggcgtgggcaagagcgccctgaccgtgcagttcgtgcagggcatcttcgtggagaagtacgaccccaccatcgaggacagctacagaaagcaggtggaggtggacgcccagcagtgcatgctggagatcctggacaccgccggcaccgagcagttcaccgccatgagagacctgtacatgaagaacggccagggcttcgccctggtgtacagcatcaccgcccagagcaccttcaacgacctgcaggacctgagagagcagatcctgagagtgaaggacaccgacgacgtgcccatgatcctggtgggcaacaagtgcgacctggaggactag

SEQ ID NO: 96370 - DNA, 258 bp, synthetic construct
  misc_feature 1..258: note = Description of Artificial Sequence: Synthetic coding sequence
  source 1..258: mol_type = other DNA
atgagagagtacaagctggtggtgctgggcagcggcggcgtgggcaagagcgccctgaccgtgcagttcgtgcagggcatcttcgtggagaagtacgaccccaccatcgaggacagctacagaaagcaggtggaggtggacgcccagcagtgcatgctggagatcctggacaccgccggcaccgagcagttcaccgccatgagagacctgtacatgaagaacggccagggcttcgccctggtgtacagcatcacctag

SEQ ID NO: 96371 - DNA, 552 bp, synthetic construct
  misc_feature 1..552: note = Description of Artificial Sequence: Synthetic coding sequence
  source 1..552: mol_type = other DNA
atgagagagtacaaggtggtggtgctgggcagcggcggcgtgggcaagagcgccctgaccgtgcagttcgtgaccggcaccttcatcgagaagtacgaccccaccatcgaggacttctacagaaaggagatcgaggtggacagcagccccagcgtgctggagatcctggacaccgccggcaccgagcagttcgccagcatgagagacctgtacatcaagaacggccagggcttcatcctggtgtacagcctggtgaaccagcagagcttccaggacatcaagcccatgagagaccagatcatcagagtgaagagatacgagaaggtgcccgtgatcctggtgggcaacaaggtggacctggagagcgagagagaggtgagcagcagcgagggcagagccctggccgaggagtggggctgccccttcatggagaccagcgccaagagcaagaccatggtggacgagctgttcgccgagatcgtgagacagatgaactacgccgcccagcccgacaaggacgacccctgctgcagcgcctgcaacatccagtag

SEQ ID NO: 96372 - DNA, 1671 bp, synthetic construct
  misc_feature 1..1671: note = Description of Artificial Sequence: Synthetic coding sequence
  source 1..1671: mol_type = other DNA
atgaacgagggcgcccccggcgacagcgacctggagaccgaggccagagtgccctggagcatcatgggccactgcctgagaaccggccaggccagaatgagcgccacccccacccccgccggcgagggcgccagaagagacgagctgttcggcatcctgcagatcctgcaccagtgcatcctgagcagcggcgacgccttcgtgctgaccggcgtgtgctgcagctggagacagaacggcaagcccccctacagccagaaggaggacaaggaggtgcagaccggctacatgaacgcccagatcgagatcatcccctgcaagatctgcggcgacaagagcagcggcatccactacggcgtgatcacctgcgagggctgcaagggcttcttcagaagaagccagcagagcaacgccacctacagctgccccagacagaagaactgcctgatcgacagaaccagcagaaacagatgccagcactgcagactgcagaagtgcctggccgtgggcatgagcagagacgccgtgaagttcggcagaatgagcaagaagcagagagacagcctgtacgccgaggtgcagaagcacagaatgcagcagcagcagagagaccaccagcagcagcccggcgaggccgagcccctgacccccacctacaacatcagcgccaacggcctgaccgagctgcacgacgacctgagcaactacatcgacggccacacccccgagggcagcaaggccgacagcgccgtgagcagcttctacctggacatccagcccagccccgaccagagcggcctggacatcaacggcatcaagcccgagcccatctgcgactacacccccgccagcggcttcttcccctactgcagcttcaccaacggcgagaccagccccaccgtgagcatggccgagctggagcacctggcccagaacatcagcaagagccacctggagacctgccagtacctgagagaggagctgcagcagatcacctggcagaccttcctgcaggaggagatcgagaactaccagaacaagcagagagaggtgatgtggcagctgtgcgccatcaagatcaccgaggccatccagtacgtggtggagttcgccaagagaatcgacggcttcatggagctgtgccagaacgaccagatcgtgctgctgaaggccggcagcctggaggtggtgttcatcagaatgtgcagagccttcgacagccagaacaacaccgtgtacttcgacggcaagtacgccagccccgacgtgttcaagagcctgggctgcgaggacttcatcagcttcgtgttcgagttcggcaagagcctgtgcagcatgcacctgaccgaggacgagatcgccctgttcagcgccttcgtgctgatgagcgccgacagaagctggctgcaggagaaggtgaagatcgagaagctgcagcagaagatccagctggccctgcagcacgtgctgcagaagaaccacagagaggacggcatcctgaccaagctgatctgcaaggtgagcaccctgagagccctgtgcggcagacacaccgagaagctgatggccttcaaggccatctaccccgacatcgtgagactgcacttcccccccctgtacaaggagctgttcaccagcgagttcgagcccgccatgcagatcgacggctag

SEQ ID NO: 96373 - DNA, 1647 bp, synthetic construct
  misc_feature 1..1647: note = Description of Artificial Sequence: Synthetic coding sequence
  source 1..1647: mol_type = other DNA
atgaacgagggcgcccccggcgacagcgacctggagaccgaggccagagtgccctggagcatcatgggccactgcctgagaaccggccaggccagaatgagcgccacccccacccccgccggcgagggcgccagaagcagcagcacctgcagcagcctgagcagactgttctggagccagctggagcacatcaactgggacggcgccaccgccaagaacttcatcaacctgagagagttcttcagcttcctgctgcccgccctgagaaaggcccagatcgagatcatcccctgcaagatctgcggcgacaagagcagcggcatccactacggcgtgatcacctgcgagggctgcaagggcttcttcagaagaagccagcagagcaacgccacctacagctgccccagacagaagaactgcctgatcgacagaaccagcagaaacagatgccagcactgcagactgcagaagtgcctggccgtgggcatgagcagagacgccgtgaagttcggcagaatgagcaagaagcagagagacagcctgtacgccgaggtgcagaagcacagaatgcagcagcagcagagagaccaccagcagcagcccggcgaggccgagcccctgacccccacctacaacatcagcgccaacggcctgaccgagctgcacgacgacctgagcaactacatcgacggccacacccccgagggcagcaaggccgacagcgccgtgagcagcttctacctggacatccagcccagccccgaccagagcggcctggacatcaacggcatcaagcccgagcccatctgcgactacacccccgccagcggcttcttcccctactgcagcttcaccaacggcgagaccagccccaccgtgagcatggccgagctggagcacctggcccagaacatcagcaagagccacctggagacctgccagtacctgagagaggagctgcagcagatcacctggcagaccttcctgcaggaggagatcgagaactaccagaacaagcagagagaggtgatgtggcagctgtgcgccatcaagatcaccgaggccatccagtacgtggtggagttcgccaagagaatcgacggcttcatggagctgtgccagaacgaccagatcgtgctgctgaaggccggcagcctggaggtggtgttcatcagaatgtgcagagccttcgacagccagaacaacaccgtgtacttcgacggcaagtacgccagccccgacgtgttcaagagcctgggctgcgaggacttcatcagcttcgtgttcgagttcggcaagagcctgtgcagcatgcacctgaccgaggacgagatcgccctgttcagcgccttcgtgctgatgagcgccgacagaagctggctgcaggagaaggtgaagatcgagaagctgcagcagaagatccagctggccctgcagcacgtgctgcagaagaaccacagagaggacggcatcctgaccaagctgatctgcaaggtgagcaccctgagagccctgtgcggcagacacaccgagaagctgatggccttcaaggccatctaccccgacatcgtgagactgcacttcccccccctgtacaaggagctgttcaccagcgagttcgagcccgccatgcagatcgacggctag

SEQ ID NO: 96374 - DNA, 1572 bp, synthetic construct
  misc_feature 1..1572: note = Description of Artificial Sequence: Synthetic coding sequence
  source 1..1572: mol_type = other DNA
atggagagcgcccccgccgcccccgaccccgccgccagcgagcccggcagcagcggcgccgacgccgccgccggcagcagagagacccccctgaaccaggagagcgccagaaagagcgagccccccgcccccgtgagaagacagagctacagcagcaccagcagaggcatcagcgtgaccaagaagacccacaccagccagatcgagatcatcccctgcaagatctgcggcgacaagagcagcggcatccactacggcgtgatcacctgcgagggctgcaagggcttcttcagaagaagccagcagagcaacgccacctacagctgccccagacagaagaactgcctgatcgacagaaccagcagaaacagatgccagcactgcagactgcagaagtgcctggccgtgggcatgagcagagacgccgtgaagttcggcagaatgagcaagaagcagagagacagcctgtacgccgaggtgcagaagcacagaatgcagcagcagcagagagaccaccagcagcagcccggcgaggccgagcccctgacccccacctacaacatcagcgccaacggcctgaccgagctgcacgacgacctgagcaactacatcgacggccacacccccgagggcagcaaggccgacagcgccgtgagcagcttctacctggacatccagcccagccccgaccagagcggcctggacatcaacggcatcaagcccgagcccatctgcgactacacccccgccagcggcttcttcccctactgcagcttcaccaacggcgagaccagccccaccgtgagcatggccgagctggagcacctggcccagaacatcagcaagagccacctggagacctgccagtacctgagagaggagctgcagcagatcacctggcagaccttcctgcaggaggagatcgagaactaccagaacaagcagagagaggtgatgtggcagctgtgcgccatcaagatcaccgaggccatccagtacgtggtggagttcgccaagagaatcgacggcttcatggagctgtgccagaacgaccagatcgtgctgctgaaggccggcagcctggaggtggtgttcatcagaatgtgcagagccttcgacagccagaacaacaccgtgtacttcgacggcaagtacgccagccccgacgtgttcaagagcctgggctgcgaggacttcatcagcttcgtgttcgagttcggcaagagcctgtgcagcatgcacctgaccgaggacgagatcgccctgttcagcgccttcgtgctgatgagcgccgacagaagctggctgcaggagaaggtgaagatcgagaagctgcagcagaagatccagctggccctgcagcacgtgctgcagaagaaccacagagaggacggcatcctgaccaagctgatctgcaaggtgagcaccctgagagccctgtgcggcagacacaccgagaagctgatggccttcaaggccatctaccccgacatcgtgagactgcacttcccccccctgtacaaggagctgttcaccagcgagttcgagcccgccatgcagatcgacggctag

SEQ ID NO: 96375 - DNA, 1407 bp, synthetic construct
  misc_feature 1..1407: note = Description of Artificial Sequence: Synthetic coding sequence
  source 1..1407: mol_type = other DNA
atgatgtacttcgtgatcgccgccatgaaggcccagatcgagatcatcccctgcaagatctgcggcgacaagagcagcggcatccactacggcgtgatcacctgcgagggctgcaagggcttcttcagaagaagccagcagagcaacgccacctacagctgccccagacagaagaactgcctgatcgacagaaccagcagaaacagatgccagcactgcagactgcagaagtgcctggccgtgggcatgagcagagacgccgtgaagttcggcagaatgagcaagaagcagagagacagcctgtacgccgaggtgcagaagcacagaatgcagcagcagcagagagaccaccagcagcagcccggcgaggccgagcccctgacccccacctacaacatcagcgccaacggcctgaccgagctgcacgacgacctgagcaactacatcgacggccacacccccgagggcagcaaggccgacagcgccgtgagcagcttctacctggacatccagcccagccccgaccagagcggcctggacatcaacggcatcaagcccgagcccatctgcgactacacccccgccagcggcttcttcccctactgcagcttcaccaacggcgagaccagccccaccgtgagcatggccgagctggagcacctggcccagaacatcagcaagagccacctggagacctgccagtacctgagagaggagctgcagcagatcacctggcagaccttcctgcaggaggagatcgagaactaccagaacaagcagagagaggtgatgtggcagctgtgcgccatcaagatcaccgaggccatccagtacgtggtggagttcgccaagagaatcgacggcttcatggagctgtgccagaacgaccagatcgtgctgctgaaggccggcagcctggaggtggtgttcatcagaatgtgcagagccttcgacagccagaacaacaccgtgtacttcgacggcaagtacgccagccccgacgtgttcaagagcctgggctgcgaggacttcatcagcttcgtgttcgagttcggcaagagcctgtgcagcatgcacctgaccgaggacgagatcgccctgttcagcgccttcgtgctgatgagcgccgacagaagctggctgcaggagaaggtgaagatcgagaagctgcagcagaagatccagctggccctgcagcacgtgctgcagaagaaccacagagaggacggcatcctgaccaagctgatctgcaaggtgagcaccctgagagccctgtgcggcagacacaccgagaagctgatggccttcaaggccatctaccccgacatcgtgagactgcacttcccccccctgtacaaggagctgttcaccagcgagttcgagcccgccatgcagatcgacggctag

SEQ ID NO: 96376 - DNA, 1557 bp, synthetic construct
  misc_feature 1..1557: note = Description of Artificial Sequence: Synthetic coding sequence
  source 1..1557: mol_type = other DNA
atggacagagccccccagagacagcacagagccagcagagagctgctggccgccaagaagacccacaccagccagatcgaggtgatcccctgcaagatctgcggcgacaagagcagcggcatccactacggcgtgatcacctgcgagggctgcaagggcttcttcagaagaagccagagatgcaacgccgcctacagctgcaccagacagcagaactgccccatcgacagaaccagcagaaacagatgccagcactgcagactgcagaagtgcctggccctgggcatgagcagagacgccgtgaagttcggcagaatgagcaagaagcagagagacagcctgcacgccgaggtgcagaagcagctgcagcagagacagcagcagcagcaggagcccgtggtgaagaccccccccgccggcgcccagggcgccgacaccctgacctacaccctgggcctgcccgacggccagctgcccctgggcagcagccccgacctgcccgaggccagcgcctgcccccccggcctgctgaaggccagcggcagcggccccagctacagcaacaacctggccaaggccggcctgaacggcgccagctgccacctggagtacagccccgagagaggcaaggccgagggcagagagagcttctacagcaccggcagccagctgacccccgacagatgcggcctgagattcgaggagcacagacaccccggcctgggcgagctgggccagggccccgacagctacggcagccccagcttcagaagcacccccgaggccccctacgccagcctgaccgagatcgagcacctggtgcagagcgtgtgcaagagctacagagagacctgccagctgagactggaggacctgctgagacagagaagcaacatcttcagcagagaggaggtgaccggctaccagagaaagagcatgtgggagatgtgggagagatgcgcccaccacctgaccgaggccatccagtacgtggtggagttcgccaagagactgagcggcttcatggagctgtgccagaacgaccagatcgtgctgctgaaggccggcgccatggaggtggtgctggtgagaatgtgcagagcctacaacgccgacaacagaaccgtgttcttcgagggcaagtacggcggcatggagctgttcagagccctgggctgcagcgagctgatcagcagcatcttcgacttcagccacagcctgagcgccctgcacttcagcgaggacgagatcgccctgtacaccgccctggtgctgatcaacgcccacagacccggcctgcaggagaagagaaaggtggagcagctgcagtacaacctggagctggccttccaccaccacctgtgcaagacccacagacagagcatcctggccaagctgccccccaagggcaagctgagaagcctgtgcagccagcacgtggagagactgcagatcttccagcacctgcaccccatcgtggtgcaggccgccttcccccccctgtacaaggagctgttcagcaccgagaccgagagccccgtgggcctgagcaagtag

SEQ ID NO: 96377 - DNA, 1494 bp, synthetic construct
  misc_feature 1..1494: note = Description of Artificial Sequence: Synthetic coding sequence
  source 1..1494: mol_type = other DNA
atgagaacccagatcgaggtgatcccctgcaagatctgcggcgacaagagcagcggcatccactacggcgtgatcacctgcgagggctgcaagggcttcttcagaagaagccagagatgcaacgccgcctacagctgcaccagacagcagaactgccccatcgacagaaccagcagaaacagatgccagcactgcagactgcagaagtgcctggccctgggcatgagcagagacgccgtgaagttcggcagaatgagcaagaagcagagagacagcctgcacgccgaggtgcagaagcagctgcagcagagacagcagcagcagcaggagcccgtggtgaagaccccccccgccggcgcccagggcgccgacaccctgacctacaccctgggcctgcccgacggccagctgcccctgggcagcagccccgacctgcccgaggccagcgcctgcccccccggcctgctgaaggccagcggcagcggccccagctacagcaacaacctggccaaggccggcctgaacggcgccagctgccacctggagtacagccccgagagaggcaaggccgagggcagagagagcttctacagcaccggcagccagctgacccccgacagatgcggcctgagattcgaggagcacagacaccccggcctgggcgagctgggccagggccccgacagctacggcagccccagcttcagaagcacccccgaggccccctacgccagcctgaccgagatcgagcacctggtgcagagcgtgtgcaagagctacagagagacctgccagctgagactggaggacctgctgagacagagaagcaacatcttcagcagagaggaggtgaccggctaccagagaaagagcatgtgggagatgtgggagagatgcgcccaccacctgaccgaggccatccagtacgtggtggagttcgccaagagactgagcggcttcatggagctgtgccagaacgaccagatcgtgctgctgaaggccggcgccatggaggtggtgctggtgagaatgtgcagagcctacaacgccgacaacagaaccgtgttcttcgagggcaagtacggcggcatggagctgttcagagccctgggctgcagcgagctgatcagcagcatcttcgacttcagccacagcctgagcgccctgcacttcagcgaggacgagatcgccctgtacaccgccctggtgctgatcaacgcccacagacccggcctgcaggagaagagaaaggtggagcagctgcagtacaacctggagctggccttccaccaccacctgtgcaagacccacagacagagcatcctggccaagctgccccccaagggcaagctgagaagcctgtgcagccagcacgtggagagactgcagatcttccagcacctgcaccccatcgtggtgcaggccgccttcccccccctgtacaaggagctgttcagcaccgagaccgagagccccgtgggcctgagcaagtag

SEQ ID NO: 96378 - DNA, 1719 bp, synthetic construct
  misc_feature 1..1719: note = Description of Artificial Sequence: Synthetic coding sequence
  source 1..1719: mol_type = other DNA
atgtggggcaccggccccagcgccggcaaggacagaatgagcggcagaccctggccccacccctggagcaagagcggcacccccagcgagcaggacagaagagccaccggcctggtgagctgcgagcacggcggcggcaagttcgagggccagagccaccaggcccccggcccccccggcggcggcagaaccggctgcctggagctgctggccgccaagaagacccacaccagccagatcgaggtgatcccctgcaagatctgcggcgacaagagcagcggcatccactacggcgtgatcacctgcgagggctgcaagggcttcttcagaagaagccagagatgcaacgccgcctacagctgcaccagacagcagaactgccccatcgacagaaccagcagaaacagatgccagcactgcagactgcagaagtgcctggccctgggcatgagcagagacgccgtgaagttcggcagaatgagcaagaagcagagagacagcctgcacgccgaggtgcagaagcagctgcagcagagacagcagcagcagcaggagcccgtggtgaagaccccccccgccggcgcccagggcgccgacaccctgacctacaccctgggcctgcccgacggccagctgcccctgggcagcagccccgacctgcccgaggccagcgcctgcccccccggcctgctgaaggccagcggcagcggccccagctacagcaacaacctggccaaggccggcctgaacggcgccagctgccacctggagtacagccccgagagaggcaaggccgagggcagagagagcttctacagcaccggcagccagctgacccccgacagatgcggcctgagattcgaggagcacagacaccccggcctgggcgagctgggccagggccccgacagctacggcagccccagcttcagaagcacccccgaggccccctacgccagcctgaccgagatcgagcacctggtgcagagcgtgtgcaagagctacagagagacctgccagctgagactggaggacctgctgagacagagaagcaacatcttcagcagagaggaggtgaccggctaccagagaaagagcatgtgggagatgtgggagagatgcgcccaccacctgaccgaggccatccagtacgtggtggagttcgccaagagactgagcggcttcatggagctgtgccagaacgaccagatcgtgctgctgaaggccggcgccatggaggtggtgctggtgagaatgtgcagagcctacaacgccgacaacagaaccgtgttcttcgagggcaagtacggcggcatggagctgttcagagccctgggctgcagcgagctgatcagcagcatcttcgacttcagccacagcctgagcgccctgcacttcagcgaggacgagatcgccctgtacaccgccctggtgctgatcaacgcccacagacccggcctgcaggagaagagaaaggtggagcagctgcagtacaacctggagctggccttccaccaccacctgtgcaagacccacagacagagcatcctggccaagctgccccccaagggcaagctgagaagcctgtgcagccagcacgtggagagactgcagatcttccagcacctgcaccccatcgtggtgcaggccgccttcccccccctgtacaaggagctgttcagcaccgagaccgagagccccgtgggcctgagcaagtag

SEQ ID NO: 96379 - DNA, 2835 bp, synthetic construct
  misc_feature 1..2835: note = Description of Artificial Sequence: Synthetic coding sequence
  source 1..2835: mol_type = other DNA
atgctggacagcttcagccaggagagcaccctgcccttcagagaggccagaaagagaaccagcttccagcccgtgcaggtgtggagaaacttcaccgccagccagaccaccgagagccccgcctgcagcggcgccagcctgggcgagatgaccgcctggaccatgggcgccagaggcctggacaagagaggcagcttcttcaagctgatcgacaccatcgccagcgagatcggcgagctgaagcaggagatggtgagaaccgacgtgaacctggagaacggcctggagcccgccgagacccacagcatggtgagacacaaggacggcggctacagcgaggaggaggacgtgaagacctgcgccagagacagcggctacgacagcctgagcaacagactgagcatcctggacagactgctgcacacccaccccatctggctgcagctgagcctgagcgaggaggaggccgccgaggtgctgcaggcccagccccccggcatcttcctggtgcacaagagcaccaagatgcagaagaaggtgctgagcctgagactgccctgcgagttcggcgcccccctgaaggagttcgccatcaaggagagcacctacaccttcagcctggagggcagcggcatcagcttcgccgacctgttcagactgatcgccttctactgcatcagcagagacgtgctgcccttcaccctgaagctgccctacgccatcagcaccgccaagagcgaggcccagctggaggagctggcccagatgggcctgaacttctggagcagccccgccgacagcaagccccccaacctgccccccccccacagacccctgagcagcgacggcgtgtgccccgccagcctgagacagctgtgcctgatcaacggcgtgcacagcatcaagaccagaacccccagcgagctggagtgcagccagaccaacggcgccctgtgcttcatcaaccccctgttcctgaaggtgcacagccaggacctgagcggcggcctgaagagacccagcaccagaacccccaacgccaacggcaccgagagaaccagaagccccccccccagaccccccccccccgccatcaacagcctgcacaccagccccagactggccagaaccgagacccagaccagcatgcccgagaccgtgaaccacaacaagcacggcaacgtggccctgcccggcaccaagcccacccccatccccccccccagactgaagaagcaggccagcttcctggaggccgagggcggcgccaagaccctgagcggcggcagacccggcgccggccccgagctggagctgggcaccgccggcagccccggcggcgccccccccgaggccgcccccggcgactgcaccagagcccccccccccagcagcgagagcagacccccctgccacggcggcagacagagactgagcgacatgagcatcagcaccagcagcagcgacagcctggagttcgacagaagcatgcccctgttcggctacgaggccgacaccaacagcagcctggaggactacgagggcgagagcgaccaggagaccatggccccccccatcaagagcaagaagaagagaagcagcagcttcgtgctgcccaagctggtgaagagccagctgcagaaggtgagcggcgtgttcagcagcttcatgacccccgagaagagaatggtgagaagaatcgccgagctgagcagagacaagtgcacctacttcggctgcctggtgcaggactacgtgagcttcctgcaggagaacaaggagtgccacgtgagcagcaccgacatgctgcagaccatcagacagttcatgacccaggtgaagaactacctgagccagagcagcgagctggacccccccatcgagagcctgatccccgaggaccagatcgacgtggtgctggagaaggccatgcacaagtgcatcctgaagcccctgaagggccacgtggaggccatgctgaaggacttccacatggccgacggcagctggaagcagctgaaggagaacctgcagctggtgagacagagaaacccccaggagctgggcgtgttcgcccccacccccgacttcgtggacgtggagaagatcaaggtgaagttcatgaccatgcagaagatgtacagccccgagaagaaggtgatgctgctgctgagagtgtgcaagctgatctacaccgtgatggagaacaacagcggcagaatgtacggcgccgacgacttcctgcccgtgctgacctacgtgatcgcccagtgcgacatgctggagctggacaccgagatcgagtacatgatggagctgctggaccccagcctgctgcacggcgagggcggctactacctgaccagcgcctacggcgccctgagcctgatcaagaacttccaggaggagcaggccgccagactgctgagcagcgagaccagagacaccctgagacagtggcacaagagaagaaccaccaacagaaccatccccagcgtggacgacttccagaactacctgagagtggccttccaggaggtgaacagcggctgcaccggcaagaccctgctggtgagaccctacatcaccaccgaggacgtgtgccagatctgcgccgagaagttcaaggtgggcgaccccgaggagtacagcctgttcctgttcgtggacgagacctggcagcagctggccgaggacacctacccccagaagatcaaggccgagctgcacagcagaccccagccccacatcttccacttcgtgtacaagagaatcaagaacgacccctacggcatcatcttccagaacggcgaggaggacctgaccaccagctag

SEQ ID NO: 96380 - DNA, 1389 bp, synthetic construct
  misc_feature 1..1389: note = Description of Artificial Sequence: Synthetic coding sequence
  source 1..1389: mol_type = other DNA
atgaccgcctggaccatgggcgccagaggcctggacaagagaggcagcttcttcaagctgatcgacaccatcgccagcgagatcggcgagctgaagcaggagatggtgagaaccgacgtgaacctggagaacggcctggagcccgccgagacccacagcatggtgagacacaaggacggcggctacagcgaggaggaggacgtgaagacctgcgccagagacagcggctacgacagcctgagcaacagactgagcatcctggacagactgctgcacacccaccccatctggctgcagctgagcctgagcgaggaggaggccgccgaggtgctgcaggcccagccccccggcatcttcctggtgcacaagagcaccaagatgcagaagaaggtgctgagcctgagactgccctgcgagttcggcgcccccctgaaggagttcgccatcaaggagagcacctacaacgtggtgctggagaaggccatgcacaagtgcatcctgaagcccctgaagggccacgtggaggccatgctgaaggacttccacatggccgacggcagctggaagcagctgaaggagaacctgcagctggtgagacagagaaacccccaggagctgggcgtgttcgcccccacccccgacttcgtggacgtggagaagatcaaggtgaagttcatgaccatgcagaagatgtacagccccgagaagaaggtgatgctgctgctgagagtgtgcaagctgatctacaccgtgatggagaacaacagcggcagaatgtacggcgccgacgacttcctgcccgtgctgacctacgtgatcgcccagtgcgacatgctggagctggacaccgagatcgagtacatgatggagctgctggaccccagcctgctgcacggcgagggcggctactacctgaccagcgcctacggcgccctgagcctgatcaagaacttccaggaggagcaggccgccagactgctgagcagcgagaccagagacaccctgagacagtggcacaagagaagaaccaccaacagaaccatccccagcgtggacgacttccagaactacctgagagtggccttccaggaggtgaacagcggctgcaccggcaagaccctgctggtgagaccctacatcaccaccgaggacgtgtgccagatctgcgccgagaagttcaaggtgggcgaccccgaggagtacagcctgttcctgttcgtggacgagacctggcagcagctggccgaggacacctacccccagaagatcaaggccgagctgcacagcagaccccagccccacatcttccacttcgtgtacaagagaatcaagaacgacccctacggcatcatcttccagaacggcgaggaggacctgaccaccagctag

SEQ ID NO: 96381 - DNA, 717 bp, synthetic construct
  misc_feature 1..717: note = Description of Artificial Sequence: Synthetic coding sequence
  source 1..717: mol_type = other DNA
atgagcagcggctacagcagcctggaggaggacgccgaggacttcttcttcaccgccagaaccagcttcttcagaagagccccccagggcaagcccagaagcggccagcaggacgtggagaaggagaaggagacccacagctacctgagcaaggaggagatcaaggagaaggtgcacaagtacaacctggccgtgaccgacaagctgaagatgaccctgaacagcaacggcatctacaccggcttcatcaaggtgcagatggagctgtgcaagcccccccagaccagccccaacagcggcaagctgagccccagcagcaacggctgcatgaacaccctgcacatcagcagcaccaacaccgtgggcgaggtgatcgaggccctgctgaagaagttcctggtgaccgagagccccgccaagttcgccctgtacaagagatgccacagagaggaccaggtgtacgcctgcaagctgagcgacagagagcaccccctgtacctgagactggtggccggccccagaaccgacaccctgagcttcgtgctgagagagcacgagatcggcgagtgggaggccttcagcctgcccgagctgcagaacttcctgagaatcctggacaaggaggaggacgagcagctgcagaacctgaagagaagatacaccgcctacagacagaagctggaggaggccctgagagaggtgtggaagcccgactag

SEQ ID NO: 96382 - DNA, 507 bp, synthetic construct
  misc_feature 1..507: note = Description of Artificial Sequence: Synthetic coding sequence
  source 1..507: mol_type = other DNA
atgaccctgaacagcaacggcatctacaccggcttcatcaaggtgcagatggagctgtgcaagcccccccagaccagccccaacagcggcaagctgagccccagcagcaacggctgcatgaacaccctgcacatcagcagcaccaacaccgtgggcgaggtgatcgaggccctgctgaagaagttcctggtgaccgagagccccgccaagttcgccctgtacaagagatgccacagagaggaccaggtgtacgcctgcaagctgagcgacagagagcaccccctgtacctgagactggtggccggccccagaaccgacaccctgagcttcgtgctgagagagcacgagatcggcgagtgggaggccttcagcctgcccgagctgcagaacttcctgagaatcctggacaaggaggaggacgagcagctgcagaacctgaagagaagatacaccgcctacagacagaagctggaggaggccctgagagaggtgtggaagcccgactag

SEQ ID NO: 96383 - DNA, 717 bp, synthetic construct; identical to SEQ ID NO: 96381
  misc_feature 1..717: note = Description of Artificial Sequence: Synthetic coding sequence
  source 1..717: mol_type = other DNA

SEQ ID NO: 96384 - DNA, 1014 bp, synthetic construct
  misc_feature 1..1014: note = Description of Artificial Sequence: Synthetic coding sequence
  source 1..1014: mol_type = other DNA
atgaccatgatggcccaccagtaccccagctggatcttcatcaacgagaagaccttcatcaccagagagcagctgaacagcctgctgaagacctacaacatcttctacgagaaccagaagaacctgcacatcctgtacggcgagaccgaggacggcaagctgatcgtggagggcatgctggacatcttctggggcgtgaagagacccatccagctgaagatccaggacgagaagcccttcagcagcttcaccagcatgaagagcagcgacgtgttcagcagcaagggcatgaccagatggggcgagttcgacgacctgtacagaatcagcgagctggacagaacccagatccccatgagcgagaagagaaacagccaggaggactacctgagctaccacagcaacaccctgaagccccacgccaaggacgagcccgacagccccgtgctgtacagaaccatgagcgaggccgccctggtgagaaagagaatgaagcccctgatgatggacagaaaggagagacagaagaacagagccagcatcaacggccacttctacaaccacgagaccagcatcttcatccccgccttcgagagcgagaccaaggtgagagtgaacagcaacatgagaaccgaggaggtgatcaagcagctgctgcagaagttcaagatcgagaacagcccccaggacttcgccctgcacatcatcttcgccaccggcgagcagagaagactgaagaagaccgacatccccctgctgcagagactgctgcagggccccagcgagaagaacgccagaatcttcctgatggacaaggacgccgaggagatcagcagcgacgtggcccagtacatcaacttccacttcagcctgctggagagcatcctgcagagactgaacgaggaggagaagagagagatccagagaatcgtgaccaagttcaacaaggagaaggccatcatcctgaagtgcctgcagaacaagctggtgatcaagaccgagaccaccgtgtag

SEQ ID NO: 96385 - DNA, 978 bp, synthetic construct
  misc_feature 1..978: note = Description of Artificial Sequence: Synthetic coding sequence
  source 1..978: mol_type = other DNA
atgctgtgggaggagaccggcgccgcccccgcccccgccagagccagcgacctgccctacagaatccacttcctgagcagcggcctgatcctggtgaccagacagctgaccgaggacggcaagctgatcgtggagggcatgctggacatcttctggggcgtgaagagacccatccagctgaagatccaggacgagaagcccttcagcagcttcaccagcatgaagagcagcgacgtgttcagcagcaagggcatgaccagatggggcgagttcgacgacctgtacagaatcagcgagctggacagaacccagatccccatgagcgagaagagaaacagccaggaggactacctgagctaccacagcaacaccctgaagccccacgccaaggacgagcccgacagccccgtgctgtacagaaccatgagcgaggccgccctggtgagaaagagaatgaagcccctgatgatggacagaaaggagagacagaagaacagagccagcatcaacggccacttctacaaccacgagaccagcatcttcatccccgccttcgagagcgagaccaaggtgagagtgaacagcaacatgagaaccgaggaggtgatcaagcagctgctgcagaagttcaagatcgagaacagcccccaggacttcgccctgcacatcatcttcgccaccggcgagcagagaagactgaagaagaccgacatccccctgctgcagagactgctgcagggccccagcgagaagaacgccagaatcttcctgatggacaaggacgccgaggagatcagcagcgacgtggcccagtacatcaacttccacttcagcctgctggagagcatcctgcagagactgaacgaggaggagaagagagagatccagagaatcgtgaccaagttcaacaaggagaaggccatcatcctgaagtgcctgcagaacaagctggtgatcaagaccgagaccaccgtgtag

SEQ ID NO: 96386 - DNA, 1110 bp, synthetic construct
  misc_feature 1..1110: note = Description of Artificial Sequence: Synthetic coding sequence
  source 1..1110: mol_type = other DNA
atgctgtgggaggagaccggcgccgcccccgcccccgccagagccagcgacctgccctacagaatcagcagcgaccacctgaagaaggaggagaagatgaccatgatggcccaccagtaccccagctggatcttcatcaacgagaagaccttcatcaccagagagcagctgaacagcctgctgaagacctacaacatcttctacgagaaccagaagaacctgcacatcctgtacggcgagaccgaggacggcaagctgatcgtggagggcatgctggacatcttctggggcgtgaagagacccatccagctgaagatccaggacgagaagcccttcagcagcttcaccagcatgaagagcagcgacgtgttcagcagcaagggcatgaccagatggggcgagttcgacgacctgtacagaatcagcgagctggacagaacccagatccccatgagcgagaagagaaacagccaggaggactacctgagctaccacagcaacaccctgaagccccacgccaaggacgagcccgacagccccgtgctgtacagaaccatgagcgaggccgccctggtgagaaagagaatgaagcccctgatgatggacagaaaggagagacagaagaacagagccagcatcaacggccacttctacaaccacgagaccagcatcttcatccccgccttcgagagcgagaccaaggtgagagtgaacagcaacatgagaaccgaggaggtgatcaagcagctgctgcagaagttcaagatcgagaacagcccccaggacttcgccctgcacatcatcttcgccaccggcgagcagagaagactgaagaagaccgacatccccctgctgcagagactgctgcagggccccagcgagaagaacgccagaatcttcctgatggacaaggacgccgaggagatcagcagcgacgtggcccagtacatcaacttccacttcagcctgctggagagcatcctgcagagactgaacgaggaggagaagagagagatccagagaatcgtgaccaagttcaacaaggagaaggccatcatcctgaagtgcctgcagaacaagctggtgatcaagaccgagaccaccgtgtag

SEQ ID NO: 96387 - DNA, 912 bp, synthetic construct
  misc_feature 1..912: note = Description of Artificial Sequence: Synthetic coding sequence
  source 1..912: mol_type = other DNA
atgaccatgatggcccaccagtaccccagctggatcttcatcaacgagaagaccttcatcaccagagagcagctgaacagcctgctgaagacctacaacatcttctacgagaaccagaagaacctgcacatcctgtacggcgagaccgaggacggcaagctgatcgtggagggcatgctggacatcttctggggcgtgaagagacccatccagctgaagatccaggacgagaagcccttcagcagcttcaccagcatgaagagcagcgacgtgttcagcagcaagggcatgaccagatggggcgagttcgacgacctgtacagaatcagcgagctggacagaacccagatccccatgagcgagaagagaaacagccaggaggactacctgagctaccacagcaacaccctgaagccccacgccaaggacgagcccgacagccccgtgctgtacagaaccatgagcgaggccgccctggtgagaaagagaatgaagcccctgatgatggacagaaaggagagacagaagaacagagccagcatcaacggccacttctacaaccacgagatcgagaacagcccccaggacttcgccctgcacatcatcttcgccaccggcgagcagagaagactgaagaagaccgacatccccctgctgcagagactgctgcagggccccagcgagaagaacgccagaatcttcctgatggacaaggacgccgaggagatcagcagcgacgtggcccagtacatcaacttccacttcagcctgctggagagcatcctgcagagactgaacgaggaggagaagagagagatccagagaatcgtgaccaagttcaacaaggagaaggccatcatcctgaagtgcctgcagaacaagctggtgatcaagaccgagaccaccgtgtag

SEQ ID NO: 96388 - DNA, 3141 bp, synthetic construct
  misc_feature 1..3141: note = Description of Artificial Sequence: Synthetic coding sequence
  source 1..3141: mol_type = other DNA
atgctgagcagaaccctgagctacaagtacagagacctggacagcaccttcagcagcctgggcgccagcgacgaccccgccgagctgagcacccagctgagcgcccccggcgtgctgaaggtgttcggcgacagcgtgtgcaccggcacccactacaagagcgtgctggccaccggcaccagcagcgccagagagctggtgaaggaggccctggagagatacgccctggaccccagacaggccggccagtacgtgctgtgcgacgtggtgggccaggccggcgacgccggccagagatggcaggccagatgcttcagagtgttcggcgacagcgagaagcccctgctgatccaggagctgtggaagcccagagagggcctgagcagaagattcgagctgagaaagagaagcgacgtggaggagctggccgccaaggaggtggacaccatcaccgccggcatcaacgcccaggccagaagactgcagagaagcagagccaagggcacccccacccccgccctgggcgacgccagaagcagccccccccccagactgagaagaaccgtgagcgagaccagcctgagccccgtgaacgccctgcccgccgccgcccagggccccgaggagcccggccccgacgccatgagatacagcctgtaccagagcccccacctgctgctgctgcagggctacagccagcagcaccccggcgtgtgcgcccagcccggccccgcccacggcggccccgccgaccccagcaagcccagcatcagcctgagcgcccccgacatcctgcccctgcactgcaccatcagaagacagcccctgcccgacagcggccaggccgccggcagactggtgctggagcccatccccggcgcccacatcagcgtgaacttcagcgaggtgggccacagaaccgtggtgctgcaccacggcgacctgctgagcctgggcctgtactacctgctgctgttcaaggaccccgcccaggcccagcccctgcccgccagagccctggccagactgagagccgtgccccagagctgcagactgtgcggcgccgccctgggcgccagaggcgccgccagccccacccaggccgccctgcccagaagacagcagctgctgctggagttcgagccccacctggaggacaccctgctgcagagaatcatgaccctgatcgagcccggcggcgacgaccacaagctgacccccgccttcctgctgtgcctgtgcatccagcacagcgccacccacttccagcccggcaccttcggccagctgctgctgaagatcgccagactgatcagagagaccgtgtgggagaagaccaaggagctggccgagaagcaggcccagctgcaggagcccatcagcctggccagctgcgccatggccgacctggtgcccgacctgcagcccatcctgttctggatgagcaacagcatcgagctgctgtacttcatccagcagaagtgccccctgtacatgcagagcatggaggagcagctggacatcaccggcagcaaggagagcctgttcagctgcaccctgaccgccagcgaggaggccatggccgtgctggaggaggtggtgctgtacgccttccagcagtgcgtgtactacgtgagcaagagcctgtacatctgcctgcccgccctgctggagtgcccccccttccagaccgagagaagagagagctggagcagcgcccccgagctgcccgaggagctgagaagagtggtgagcgtgtaccaggccgccctggacctgctgagacagctgcaggtgcaccccgaggtggccagccagatgctggcctacctgttcttcttcagcggcaccctgctgctgaaccagctgctggacagaggccccagcctgagctgcttccactggcccagaggcgtgcaggcctgcgccagactgcagcagctgctggagtggatgagaagcgccggcttcggcgccgccggcgagcacttcttccagaagctgagctgcaccctgaacctgctggccacccccagagcccagctgatccagatgagctggaccgccctgagagccgccttccccgccctgagccccgcccagctgcacagactgctgacccactaccagctggccagcgccatgggccccatgagcacctgggagcccggcgcccaggacagccccgaggccttcagaagcgaggacgtgctggagagctacgagaaccccccccccatcgtgctgcccagcgacggcttccaggtggacctggaggccaactgcctggacgacagcatctaccagcacctgctgtacgtgagacacttcctgtggggcctgagaagcagagccagccccggcagccccggcagacccggcagcggcgccagccagcccgtgtgccccgagggcatgcaccacgtggtgctggacggccacctggaggcccccagctgccccctggcccccagagaccccggccccgccgccagagaggtggcccccgagagaaccctgcccctgagaggcgccccctgggcccaggccccccccggcagacagcccagcagaggcggcagccaggccggccccccccacaccgacagcagctgcctgctgaccccccccagcacccccctgggccccgagcccggcgaccccgactggcccgagagcggcggcccctgcggcaaggccctgcccgagagacagagaaacggcctgagcggcctgagaggcgccgcccccgagggcgacagcgccgccctggccgaggagagcccccccgcccccagcagcagaagcagcagcaccgaggacttctgctacgtgttcaccgtggagctggagagaggccccagcggcctgggcatgggcctgatcgacggcatgcacacccacctgggcgcccccggcctgtacatccagaccctgctgcccggcagccccgccgccgccgacggcagactgagcctgggcgacagaatcctggaggtgaacggcagcagcctgctgggcctgggctacctgagagccgtggacctgatcagacacggcggcaagaagatgagattcctggtggccaagagcgacgtggagaccgccaagaagatccacttcagaaccccccccctgtag

SEQ ID NO: 96389 - DNA, 3228 bp, synthetic construct
  misc_feature 1..3228: note = Description of Artificial Sequence: Synthetic coding sequence
  source 1..3228: mol_type = other DNA
atgttctacggcacccacttcatcatgagcccccccaccaagagcaagctgaagagacagagccagctgctgagcagcatgctgagcagaaccctgagctacaagtacagagacctggacagcaccttcagcagcctgggcgccagcgacgaccccgccgagctgagcacccagctgagcgcccccggcgtgctgaaggtgttcggcgacagcgtgtgcaccggcacccactacaagagcgtgctggccaccggcaccagcagcgccagagagctggtgaaggaggccctggagagatacgccctggaccccagacaggccggccagtacgtgctgtgcgacgtggtgggccaggccggcgacgccggccagagatggcaggccagatgcttcagagtgttcggcgacagcgagaagcccctgctgatccaggagctgtggaagcccagagagggcctgagcagaagattcgagctgagaaagagaagcgacgtggaggagctggccgccaaggaggtggacaccatcaccgccggcatcaacgcccaggccagaagactgcagagaagcagagccaagggcacccccacccccgccctgggcgacgccagaagcagccccccccccagactgagaagaaccgtgagcgagaccagcctgagccccgtgaacgccctgcccgccgccgcccagggccccgaggagcccggccccgacgccatgagatacagcctgtaccagagcccccacctgctgctgctgcagggctacagccagcagcacgacagcctggtgtacgtgctgaacagagacagacacaccgtgggccagagaacccccagcagcaagcccagcatcagcctgagcgcccccgacatcctgcccctgcactgcaccatcagaagacagcccctgcccgacagcggccaggccgccggcagactggtgctggagcccatccccggcgcccacatcagcgtgaacttcagcgaggtgggccacagaaccgtggtgctgcaccacggcgacctgctgagcctgggcctgtactacctgctgctgttcaaggaccccgcccaggcccagcccctgcccgccagagccctggccagactgagagccgtgccccagagctgcagactgtgcggcgccgccctgggcgccagaggcgccgccagccccacccaggccgccctgcccagaagacagcagctgctgctggagttcgagccccacctggaggacaccctgctgcagagaatcatgaccctgatcgagcccggcggcgacgaccacaagctgacccccgccttcctgctgtgcctgtgcatccagcacagcgccacccacttccagcccggcaccttcggccagctgctgctgaagatcgccagactgatcagagagaccgtgtgggagaagaccaaggagctggccgagaagcaggcccagctgcaggagcccatcagcctggccagctgcgccatggccgacctggtgcccgacctgcagcccatcctgttctggatgagcaacagcatcgagctgctgtacttcatccagcagaagtgccccctgtacatgcagagcatggaggagcagctggacatcaccggcagcaaggagagcctgttcagctgcaccctgaccgccagcgaggaggccatggccgtgctggaggaggtggtgctgtacgccttccagcagtgcgtgtactacgtgagcaagagcctgtacatctgcctgcccgccctgctggagtgcccccccttccagaccgagagaagagagagctggagcagcgcccccgagctgcccgaggagctgagaagagtggtgagcgtgtaccaggccgccctggacctgctgagacagctgcaggtgcaccccgaggtggccagccagatgctggcctacctgttcttcttcagcggcaccctgctgctgaaccagctgctggacagaggccccagcctgagctgcttccactggcccagaggcgtgcaggcctgcgccagactgcagcagctgctggagtggatgagaagcgccggcttcggcgccgccggcgagcacttcttccagaagctgagctgcaccctgaacctgctggccacccccagagcccagctgatccagatgagctggaccgccctgagagccgccttccccgccctgagccccgcccagctgcacagactgctgacccactaccagctggccagcgccatgggccccatgagcacctgggagcccggcgcccaggacagccccgaggccttcagaagcgaggacgtgctggagagctacgagaaccccccccccatcgtgctgcccagcgacggcttccaggtggacctggaggccaactgcctggacgacagcatctaccagcacctgctgtacgtgagacacttcctgtggggcctgagaagcagagccagccccggcagccccggcagacccggcagcggcgccagccagcccgtgtgccccgagggcatgcaccacgtggtgctggacggccacctggaggcccccagctgccccctggcccccagagaccccggccccgccgccagagaggtggcccccgagagaaccctgcccctgagaggcgccccctgggcccaggccccccccggcagacagcccagcagaggcggcagccaggccggccccccccacaccgacagcagctgcctgctgaccccccccagcacccccctgggccccgagcccggcgaccccgactggcccgagagcggcggcccctgcggcaaggccctgcccgagagacagagaaacggcctgagcggcctgagaggcgccgcccccgagggcgacagcgccgccctggccgaggagagcccccccgcccccagcagcagaagcagcagcaccgaggacttctgctacgtgttcaccgtggagctggagagaggccccagcggcctgggcatgggcctgatcgacggcatgcacacccacctgggcgcccccggcctgtacatccagaccctgctgcccggcagccccgccgccgccgacggcagactgagcctgggcgacagaatcctggaggtgaacggcagcagcctgctgggcctgggctacctgagagccgtggacctgatcagacacggcggcaagaagatgagattcctggtggccaagagcgacgtggagaccgccaagaagatccacttcagaaccccccccctgtag

SEQ ID NO: 96390 - DNA, 405 bp, synthetic construct
  misc_feature 1..405: note = Description of Artificial Sequence: Synthetic coding sequence
  source 1..405: mol_type = other DNA
atgttctacggcacccacttcatcatgagcccccccaccaagagcaagctgaagagacagagccagctgctgagcagcatgctgagcagaaccctgagctacaagtacagagacctggacagcaccttcagcagcctgggcgccagcgacgaccccgccgagctgagcacccagctgagcgcccccggcgtgctgaaggtgttcggcgacagcgtgtgcaccggcacccactacaagagcgtgctggccaccggcaccagcagcgccagagagctggtgaaggaggccctggagagatacgccctggaccccagacaggccggccagtacgtgctgtgcgacgtggtgggccaggccggcgacgccggccagagatggcaggccagatgcttcagagtgttctag

SEQ ID NO: 96391 - DNA, 1629 bp, synthetic construct
  misc_feature 1..1629: note = Description of Artificial Sequence: Synthetic coding sequence
  source 1..1629: mol_type = other DNA
atgttctacggcacccacttcatcatgagcccccccaccaagagcaagctgaagagacagagccagctgctgagcagcatgctgagcagaaccctgagctacaagtacagagacctggacagcaccttcagcagcctgggcgccagcgacgaccccgccgagctgagcacccagctgagcgcccccggcgtgctgaaggtgttcggcgacagcgtgtgcaccggcacccactacaagagcgtgctggccaccggcaccagcagcgccagagagctggtgaaggaggccctggagagatacgccctggaccccagacaggccggccagtacgtgctgtgcgacgtggtgggccaggccggcgacgccggccagagatggcaggccagatgcttcagagtgttcggcgacagcgagaagcccctgctgatccaggagctgtggaagcccagagagggcctgagcagaagattcgagctgagaaagagaagcgacgtggaggagctggccgccaaggaggtggacaccatcaccgccggcatcaacgcccaggccagaagactgcagagaagcagagccaagggcacccccacccccgccctgggcgacgccagaagcagccccccccccagactgagaagaaccgtgagcgagaccagcctgagccccgtgaacgccctgcccgccgccgcccagggccccgaggagcccggccccgacgccatgagatacagcctgtaccagagcccccacctgctgctgctgcagggctacagccagcagcacgacagcctggtgtacgtgctgaacagagacagacacaccgtgggccagagaacccccagcagcaagcccagcatcagcctgagcgcccccgacatcctgcccctgcactgcaccatcagaagacagcccctgcccgacagcggccaggccgccggcagactggtgctggagcccatccccggcgcccacatcagcgtgaacttcagcgaggtgggccacagaaccgtggtgctgcaccacggcgacctgctgagcctgggcctgtactacctgctgctgttcaaggaccccgcccaggcccagcccctgcccgccagagccctggccagactgagagccgtgccccagagctgcagactgtgcggcgccgccctgggcgccagaggcgccgccagccccacccaggccgccctgcccagaagacagcagctgctgctggagttcgagccccacctggaggacaccctgctgcagagaatcatgaccctgatcgagcccggcggcgacgaccacaagctgacccccgccttcctgctgtgcctgtgcatccagcacagcgccacccacttccagcccggcaccttcggccagctgctgctgaagatcgccagactgatcagagagaccgtgtgggagaagaccaaggagctggccgagaagcaggcccagctgctggagggcatcgccgtgctgctgcacgccgacggccagagaggcggccacggcggcgccggcggcggcggcgccgtgagactgcccgccgtgagactgctgtgcctgcaggtgcccgtgcacctgccccccggcacccccggcgtgcccgccatccccgacggcgccccctag

SEQ ID NO: 96392 - DNA, 2508 bp, synthetic construct
  misc_feature 1..2508: note = Description of Artificial Sequence: Synthetic coding sequence
  source 1..2508: mol_type = other DNA
atgagatacagcctgtaccagagcccccacctgctgctgctgcagggctacagccagcagcacgacagcctggtgtacgtgctgaacagagacagacacaccgtgggccagagaacccccagcagcaagcccagcatcagcctgagcgcccccgacatcctgcccctgcactgcaccatcagaagacagcccctgcccgacagcggccaggccgccggcagactggtgctggagcccatccccggcgcccacatcagcgtgaacttcagcgaggtgggccacagaaccgtggtgctgcaccacggcgacctgctgagcctgggcctgtactacctgctgctgttcaaggaccccgcccaggcccagcccctgcccgccagagccctggccagactgagagccgtgccccagagctgcagactgtgcggcgccgccctgggcgccagaggcgccgccagccccacccaggccgccctgcccagaagacagcagctgctgctggagttcgagccccacctggaggacaccctgctgcagagaatcatgaccctgatcgagcccggcggcgacgaccacaagctgacccccgccttcctgctgtgcctgtgcatccagcacagcgccacccacttccagcccggcaccttcggccagctgctgctgaagatcgccagactgatcagagagaccgtgtgggagaagaccaaggagctggccgagaagcaggcccagctgcaggagcccatcagcctggccagctgcgccatggccgacctggtgcccgacctgcagcccatcctgttctggatgagcaacagcatcgagctgctgtacttcatccagcagaagtgccccctgtacatgcagagcatggaggagcagctggacatcaccggcagcaaggagagcctgttcagctgcaccctgaccgccagcgaggaggccatggccgtgctggaggaggtggtgctgtacgccttccagcagtgcgtgtactacgtgagcaagagcctgtacatctgcctgcccgccctgctggagtgcccccccttccagaccgagagaagagagagctggagcagcgcccccgagctgcccgaggagctgagaagagtggtgagcgtgtaccaggccgccctggacctgctgagacagctgcaggtgcaccccgaggtggccagccagatgctggcctacctgttcttcttcagcggcaccctgctgctgaaccagctgctggacagaggccccagcctgagctgcttccactggcccagaggcgtgcaggcctgcgccagactgcagcagctgctggagtggatgagaagcgccggcttcggcgccgccggcgagcacttcttccagaagctgagctgcaccctgaacctgctggccacccccagagcccagctgatccagatgagctggaccgccctgagagccgccttccccgccctgagccccgcccagctgcacagactgctgacccactaccagctggccagcgccatgggccccatgagcacctgggagcccggcgcccaggacagccccgaggccttcagaagcgaggacgtgctggagagctacgagaaccccccccccatcgtgctgcccagcgacggcttccaggtggacctggaggccaactgcctggacgacagcatctaccagcacctgctgtacgtgagacacttcctgtggggcctgagaagcagagccagccccggcagccccggcagacccggcagcggcgccagccagcccgtgtgccccgagggcatgcaccacgtggtgctggacggccacctggaggcccccagctgccccctggcccccagagaccccggccccgccgccagagaggtggcccccgagagaaccctgcccctgagaggcgccccctgggcccaggccccccccggcagacagcccagcagaggcggcagccaggccggccccccccacaccgacagcagctgcctgctgaccccccccagcacccccctgggccccgagcccggcgaccccgactggcccgagagcggcggcccctgcggcaaggccctgcccgagagacagagaaacggcctgagcggcctgagaggcgccgcccccgagggcgacagcgccgccctggccgaggagagcccccccgcccccagcagcagaagcagcagcaccgaggacttctgctacgtgttcaccgtggagctggagagaggccccagcggcctgggcatgggcctgatcgacggcatgcacacccacctgggcgcccccggcctgtacatccagaccctgctgcccggcagccccgccgccgccgacggcagactgagcctgggcgacagaatcctggaggtgaacggcagcagcctgctgggcctgggctacctgagagccgtggacctgatcagacacggcggcaagaagatgagattcctggtggccaagagcgacgtggagaccgccaagaagatccacttcagaaccccccccctgtag

SEQ ID NO: 96393 - DNA, 2085 bp, synthetic construct
  misc_feature 1..2085: note = Description of Artificial Sequence: Synthetic coding sequence
  source 1..2085: mol_type = other DNA
atgtgcagcaccggcaccggcaccagatgggccagcggccccccccccgccagccccgccagcgccagccagccccccaccagctgcctgtacaccgcccccagcgccggcaacagaagcagaaccgccgccagacccagaggcggctggctggagcccatccccggcgcccacatcagcgtgaacttcagcgaggtgggccacagaaccgtggtgctgcaccacggcgacctgctgagcctgggcctgtactacctgctgctgttcaaggaccccgcccaggcccagcccctgcccgccagagccctggccagactgagagccgtgccccagagctgcagactgtgcggcgccgccctgggcgccagaggcgccgccagccccacccaggccgccctgcccagaagacagcagctgctgctggagttcgagccccacctggaggacaccctgctgcagagaatcatgaccctgatcgagcccggcggcgacgaccacaagctgacccccgccttcctgctgtgcctgtgcatccagcacagcgccacccacttccagcccggcaccttcggccagctgctgctgaagatcgccagactgatcagagagaccgtgtgggagaagaccaaggagctggccgagaagcaggcccagctgcaggagcccatcagcctggccagctgcgccatggccgacctggtgcccgacctgcagcccatcctgttctggatgagcaacagcatcgagctgctgtacttcatccagcagaagtgccccctgtacatgcagagcatggaggagcagctggacatcaccggcagcaaggagagcctgttcagctgcaccctgaccgccagcgaggaggccatggccgtgctggaggaggtggtgctgtacgccttccagcagtgcgtgtactacgtgagcaagagcctgtacatctgcctgcccgccctgctggagtgcccccccttccagaccgagagaagagagagctggagcagcgcccccgagctgcccgaggagctgagaagagtggtgagcgtgtaccaggccgccctggacctgctgagacagctgcaggtgcaccccgaggtggccagccagatgctggcctacctgttcttcttcagcggcaccctgctgctgaaccagctgctggacagaggccccagcctgagctgcttccactggcccagaggcgtgcaggcctgcgccagactgcagcagctgctggagtggatgagaagcgccggcttcggcgccgccggcgagcacttcttccagaagctgagctgcaccctgaacctgctggccacccccagagcccagctgatccagatgagctggaccgccctgagagccgccttccccgccctgagccccgcccagctgcacagactgctgacccactaccagctggccagcgccatgggccccatgagcacctgggagcccggcgcccaggacagccccgaggccttcagaagcgaggacgtgctggagagctacgagaaccccccccccatcgtgctgcccagcgacggcttccaggtggacctggaggccaactgcctggacgacagcatctaccagcacctgctgtacgtgagacacttcctgtggggcctgagaagcagagccagccccggcagccccggcagacccggcagcggcgccagccagcccgtgtgccccgagggcatgcaccacgtggtgctggacggccacctggaggcccccagctgccccctggcccccagagaccccggccccgccgccagagaggtggcccccgagagaaccctgcccctgagaggcgccccctgggcccaggccccccccggcagacagccccccggcctgtacatccagaccctgctgcccggcagccccgccgccgccgacggcagactgagcctgggcgacagaatcctggaggtgaacggcagcagcctgctgggcctgggctacctgagagccgtggacctgatcagacacggcggcaagaagatgagattcctggtggccaagagcgacgtggagaccgccaagaagatccacttcagaaccccccccctgtag

SEQ ID NO: 96394 - DNA, 369 bp, synthetic construct
  misc_feature 1..369: note = Description of Artificial Sequence: Synthetic coding sequence
  source 1..369: mol_type = other DNA
atgaagctggccgccatgatcaagaagatgtgccccagcgacagcgagctgagcatccccgccaagaactgctacagaatggtgatcctgggcagcagcaaggtgggcaagaccgccatcgtgagcagattcctgaccggcagattcgaggacgcctacacccccaccatcgaggacttccacagaaagttctacagcatcagaggcgaggtgtaccagctggacatcctggacaccagcggcaaccaccccttccccgccatgagaagactgagcatcctgaccgaccccagacaccaggtgctgccccaggagcagaaccagggcgagagaggcagagcccccggccacctgagacagcagggctag

SEQ ID NO: 96395 - DNA, 2394 bp, synthetic construct
  misc_feature 1..2394: note = Description of Artificial Sequence: Synthetic coding sequence
  source 1..2394: mol_type = other DNA
atgggcaccctgggcaaggccagagaggcccccagaaagcccagccacggctgcagagccgccagcaaggccagactggaggccaagcccgccaacagccccttccccagccaccccagcctggcccacatcacccagttcagaatgatggtgagcctgggccacctggccaagggcgccagcctggacgacctgatcgacagctgcatccagagcttcgacgccgacggcaacctgtgcagaagcaaccagctgctgcaggtgatgctgaccatgcacagaatcgtgatcagcagcgccgagctgctgcagaaggtgatcaccctgtacaaggacgccctggccaagaacagccccggcctgtgcctgaagatctgctacttcgtgagatactggatcaccgagttctgggtgatgttcaagatggacgccagcctgaccgacaccatggaggagttccaggagctggtgaaggccaagggcgaggagctgcactgcagactgatcgacaccacccagatcaacgccagagactggagcagaaagctgacccagagaatcaagagcaacaccagcaagaagagaaaggtgagcctgctgttcgaccacctggagcccgaggagctgagcgagcacctgacctacctggagttcaagagcttcagaagaatcagcttcagcgactaccagaactacctggtgaacagctgcgtgaaggagaaccccaccatggagagaagcatcgccctgtgcaacggcatcagccagtgggtgcagctgatggtgctgagcagacccaccccccagctgagagccgaggtgttcatcaagttcatccaggtggcccagaagctgcaccagctgcagaacttcaacaccctgatggccgtgatcggcggcctgtgccacagcagcatcagcagactgaaggagaccagcagccacgtgccccacgagatcaacaaggtgctgggcgagatgaccgagctgctgagcagcagcagaaactacgacaactacagaagagcctacggcgagtgcaccgacttcaagatccccatcctgggcgtgcacctgaaggacctgatcagcctgtacgaggccatgcccgactacctggaggacggcaaggtgaacgtgcacaagctgctggccctgtacaaccacatcagcgagctggtgcagctgcaggaggtggccccccccctggaggccaacaaggacctggtgcacctgctgaccctgagcctggacctgtactacaccgaggacgagatctacgagctgagctacgccagagagcccagaaaccacagagccccccccctgacccccagcaagccccccgtggtggtggactgggccagcggcgtgagccccaagcccgaccccaagaccatcagcaagcacgtgcagagaatggtggacagcgtgttcaagaactacgaccacgaccaggacggctacatcagccaggaggagttcgagaagatcgccgccagcttccccttcagcttctgcgtgatggacaaggacagagagggcctgatcagcagagacgagatcaccgcctacttcatgagagccagcagcatctacagcaagctgggcctgggcttcccccacaacttccaggagaccacctacctgaagcccaccttctgcgacaactgcgccggcttcctgtggggcgtgatcaagcagggctacagatgcaaggactgcggcatgaactgccacaagcagtgcaaggacctggtggtgttcgagtgcaagaagagagccaagaaccccgtggcccccaccgagaacaacaccagcgtgggccccgtgagcaacctgtgcagcctgggcgccaaggacctgctgcacgcccccgaggagggccccttcaccttccccaacggcgaggccgtggagcacggcgaggagagcaaggacagaaccatcatgctgatgggcgtgagcagccagaagatcagcctgagactgaagagagccgtggcccacaaggccacccagaccgagagccagccctggatcggcagcgagggccccagcggccccttcgtgctgagcagccccagaaagaccgcccaggacaccctgtacgtgctgcccagccccaccagcccctgccccagccccgtgctggtgagaaagagagccttcgtgaagtgggagaacaaggacagcctgatcaagagcaaggaggagctgagacacctgagactgcccacctaccaggagctggagcaggagatcaacaccctgaaggccgacaacgacgccctgaagatccagctgaagtacgcccagaagaagatcgagagcctgcagctggagaagagcaaccacgtgctggcccagatggagcagggcgactgcagctag

SEQ ID NO: 96396 - DNA, 1794 bp, synthetic construct
  misc_feature 1..1794: note = Description of Artificial Sequence: Synthetic coding sequence
  source 1..1794: mol_type = other DNA
atgggcaccctgggcaaggccagagaggcccccagaaagcccagccacggctgcagagccgccagcaaggccagactggaggccaagcccgccaacagccccttccccagccaccccagcctggcccacatcacccagttcagaatgatggtgagcctgggccacctggccaagggcgccagcctggacgacctgatcgacagctgcatccagagcttcgacgccgacggcaacctgtgcagaagcaaccagctgctgcaggtgatgctgaccatgcacagaatcgtgatcagcagcgccgagctgctgcagaaggtgatcaccctgtaccccgacgccctggccaagaacagccccggcctgtgcctgaagatctgctacttcgtgagatactggatcaccgagttctgggtgatgttcaagatggacgccagcctgaccgacaccatggaggagttccaggagctggtgaaggccaagggcgaggagctgcactgcagactgatcgacaccacccagatcaacgccagagactggagcagaaagctgacccagagaatcaagagcaacaccagcaagaagagaaaggtgagcctgctgttcgaccacctggagcccgaggagctgagcgagcacctgacctacctggagttcaagagcttcagaagaatcagcttcagcgactaccagaactacctggtgaacagctgcgtgaaggagaaccccaccatggagagaagcatcgccctgtgcaacggcatcagccagtgggtgcagctgatggtgctgagcagacccaccccccagctgagagccgaggtgttcatcaagttcatccaggtggcccagaagctgcaccagctgcagaacttcaacaccctgatggccgtgatcggcggcctgtgccacagcagcatcagcagactgaaggagaccagcagccacgtgccccacgagatcaacaaggtgctgggcgagatgaccgagctgctgagcagcagcagaaactacgacaactacagaagagcctacggcgagtgcaccgacttcaagatccccatcctgggcgtgcacctgaaggacctgatcagcctgtacgaggccatgcccgactacctggaggacggcaaggtgaacgtgcacaagctgctggccctgtacaaccacatcagcgagctggtgcagctgcaggaggtggccccccccctggaggccaacaaggacctggtgcacctgctgaccctgagcctggacctgtactacaccgaggacgagatctacgagctgagctacgccagagagcccagaaaccacagagcccccagcgtgttcaagaactacgaccacgaccaggacggctacatcagccaggaggagttcgagaagatcgccgccagcttccccttcagcttctgcgtgatggacaaggacagagagggcctgatcagcagagacgagatcaccgcctacttcatgagagccagcagcatctacagcaagctgggcctgggcttcccccacaacttccaggagaccacctacctgaagcccaccttctgcgacaactgcgccggcttcctgtggggcgtgatcaagcagggctacagatgcaaggactgcggcatgaactgccacaagcagtgcaaggacctggtggtgttcgagtgcaagaagagagccaagaaccccgtggcccccaccgagaacaacaccagcgtgggccccgtgagcaacctgtgcagcctgggcgccaaggacctgctgcacggcaacaagtacagcgagagcagatag

SEQ ID NO: 96397 - DNA, 1641 bp, synthetic construct
  misc_feature 1..1641: note = Description of Artificial Sequence: Synthetic coding sequence
  source 1..1641: mol_type = other DNA
atgggcaccctgggcaaggccagagaggcccccagaaagcccagccacggctgcagagccgccagcaaggccagactggaggccaagcccgccaacagccccttccccagccaccccagcctggcccacatcacccagttcagaatgatggtgagcctgggccacctggccaagggcgccagcctggacgacctgatcgacagctgcatccagagcttcgacgccgacggcaacctgtgcagaagcaaccagctgctgcaggtgatgctgaccatgcacagaatcgtgatcagcagcgccgagctgctgcagaaggtgatcaccctgtaccccgacgccctggccaagaacagccccggcctgtgcctgaagatctgctacttcgtgagatactggatcaccgagttctgggtgatgttcaagatggacgccagcctgaccgacaccatggaggagttccaggagctggtgaaggccaagggcgaggagctgcactgcagactgatcgacaccacccagatcaacgccagagactggagcagaaagctgacccagagaatcaagagcaacaccagcaagaagagaaaggtgagcctgctgttcgaccacctggagcccgaggagctgagcgagcacctgacctacctggagttcaagagcttcagaagaatcagcttcagcgactaccagaactacctggtgaacagctgcgtgaaggagaaccccaccatggagagaagcatcgccctgtgcaacggcatcagccagtgggtgcagctgatggtgctgagcagacccaccccccagctgagagccgaggtgttcatcaagttcatccaggtggcccagaagctgcaccagctgcagaacttcaacaccctgatggccgtgatcggcggcctgtgccacagcagcatcagcagactgaaggagaccagcagccacgtgccccacgagatcaacaaggtgctgggcgagatgaccgagctgctgagcagcagcagaaactacgacaactacagaagagcctacggcgagtgcaccgacttcaagatccccatcctgggcgtgcacctgaaggacctgatcagcctgtacgaggccatgcccgactacctggaggacggcaaggtgaacgtgcacaagctgctggccctgtacaaccacatcagcgagctggtgcagctgcaggaggtggccccccccctggaggccaacaaggacctggtgcacctgctgaccctgagcctggacctgtactacaccgaggacgagatctacgagctgagctacgccagagagcccagaaaccacagagcccccagcgtgttcaagaactacgaccacgaccaggacggctacatcagccaggaggagttcgagaagatcgccgccagcttccccttcagcttctgcgtgatggacaaggacagagagggcctgatcagcagagacgagatcaccgcctacttcatgagagccagcagcatctacagcaagctgggcctgggcttcccccacaacttccaggagaccacctacctgaagcccaccttctgcgacaactgcgccggcttcctgtggggcgtgatcaagcagggctacagatgcaagggcaacaagtacagcgagagcagatag

SEQ ID NO: 96398 - DNA, 2289 bp, synthetic construct
  misc_feature 1..2289: note = Description of Artificial Sequence: Synthetic coding sequence
  source 1..2289: mol_type = other DNA
atgggcaccctgggcaaggccagagaggcccccagaaagcccagccacggctgcagagccgccagcaaggccagactggaggccaagcccgccaacagccccttccccagccaccccagcctggcccacatcacccagttcagaatgatggtgagcctgggccacctggccaagggcgccagcctggacgacctgatcgacagctgcatccagagcttcgacgccgacggcaacctgtgcagaagcaaccagctgctgcaggtgatgctgaccatgcacagaatcgtgatcagcagcgccgagctgctgcagaaggtgatcaccctgtacaaggacgccctggccaagaacagccccggcctgtgcctgaagatctgctacttcgtgagatactggatcaccgagttctgggtgatgttcaagatggacgccagcctgaccgacaccatggaggagttccaggagctggtgaaggccaagggcgaggagctgcactgcagactgatcgacaccacccagatcaacgccagagactggagcagaaagctgacccagagaatcaagagcaacaccagcaagaagagaaaggtgagcctgctgttcgaccacctggagcccgaggagctgagcgagcacctgacctacctggagttcaagagcttcagaagaatcagcttcagcgactaccagaactacctggtgaacagctgcgtgaaggagaaccccaccatggagagaagcatcgccctgtgcaacggcatcagccagtgggtgcagctgatggtgctgagcagacccaccccccagctgagagccgaggtgttcatcaagttcatccaggtggcccagaagctgcaccagctgcagaacttcaacaccctgatggccgtgatcggcggcctgtgccacagcagcatcagcagactgaaggagaccagcagccacgtgccccacgagatcaacaaggtgctgggcgagatgaccgagctgctgagcagcagcagaaactacgacaactacagaagagcctacggcgagtgcaccgacttcaagatccccatcctgggcgtgcacctgaaggacctgatcagcctgtacgaggccatgcccgactacctggaggacggcaaggtgaacgtgcacaagctgctggccctgtacaaccacatcagcgagctggtgcagctgcaggaggtggccccccccctggaggccaacaaggacctggtgcacctgctgaccctgagcctggacctgtactacaccgaggacgagatctacgagctgagctacgccagagagcccagaaaccacagagcccccagcgtgttcaagaactacgaccacgaccaggacggctacatcagccaggaggagttcgagaagatcgccgccagcttccccttcagcttctgcgtgatggacaaggacagagagggcctgatcagcagagacgagatcaccgcctacttcatgagagccagcagcatctacagcaagctgggcctgggcttcccccacaacttccaggagaccacctacctgaagcccaccttctgcgacaactgcgccggcttcctgtggggcgtgatcaagcagggctacagatgcaaggactgcggcatgaactgccacaagcagtgcaaggacctggtggtgttcgagtgcaagaagagagccaagaaccccgtggcccccaccgagaacaacaccagcgtgggccccgtgagcaacctgtgcagcctgggcgccaaggacctgctgcacgcccccgaggagggccccttcaccttccccaacggcgaggccgtggagcacggcgaggagagcaaggacagaaccatcatgctgatgggcgtgagcagccagaagatcagcctgagactgaagagagccgtggcccacaaggccacccagaccgagagccagccctggatcggcagcgagggccccagcggccccttcgtgctgagcagccccagaaagaccgcccaggacaccctgtacgtgctgcccagccccaccagcccctgccccagccccgtgctggtgagaaagagagccttcgtgaagtgggagaacaaggacagcctgatcaagagcaaggaggagctgagacacctgagactgcccacctaccaggagctggagcaggagatcaacaccctgaaggccgacaacgacgccctgaagatccagctgaagtacgcccagaagaagatcgagagcctgcagctggagaagagcaaccacgtgctggcccagatggagcagggcgactgcagctag

SEQ ID NO: 96399 - DNA, 2250 bp, synthetic construct
  misc_feature 1..2250: note = Description of Artificial Sequence: Synthetic coding sequence
  source 1..2250: mol_type = other DNA
atgatggtgagcctgggccacctggccaagggcgccagcctggacgacctgatcgacagctgcatccagagcttcgacgccgacggcaacctgtgcagaagcaaccagctgctgcaggtgatgctgaccatgcacagaatcgtgatcagcagcgccgagctgctgcagaaggtgatcaccctgtacaaggacgccctggccaagaacagccccggcctgtgcctgaagatctgctacttcgtgagatactggatcaccgagttctgggtgatgttcaagatggacgccagcctgaccgacaccatggaggagttccaggagctggtgaaggccaagggcgaggagctgcactgcagactgatcgacaccacccagatcaacgccagagactggagcagaaagctgacccagagaatcaagagcaacaccagcaagaagagaaaggtgagcctgctgttcgaccacctggagcccgaggagctgagcgagcacctgacctacctggagttcaagagcttcagaagaatcagcttcagcgactaccagaactacctggtgaacagctgcgtgaaggagaaccccaccatggagagaagcatcgccctgtgcaacggcatcagccagtgggtgcagctgatggtgctgagcagacccaccccccagctgagagccgaggtgttcatcaagttcatccaggtggcccagaagctgcaccagctgcagaacttcaacaccctgatggccgtgatcggcggcctgtgccacagcagcatcagcagactgaaggagaccagcagccacgtgccccacgagatcaacaaggtgctgggcgagatgaccgagctgctgagcagcagcagaaactacgacaactacagaagagcctacggcgagtgcaccgacttcaagatccccatcctgggcgtgcacctgaaggacctgatcagcctgtacgaggccatgcccgactacctggaggacggcaaggtgaacgtgcacaagctgctggccctgtacaaccacatcagcgagctggtgcagctgcaggaggtggccccccccctggaggccaacaaggacctggtgcacctgctgaccctgagcctggacctgtactacaccgaggacgagatctacgagctgagctacgccagagagcccagaaaccacagagccccccccctgacccccagcaagccccccgtggtggtggactgggccagcggcgtgagccccaagcccgaccccaagaccatcagcaagcacgtgcagagaatggtggacagcgtgttcaagaactacgaccacgaccaggacggctacatcagccaggaggagttcgagaagatcgccgccagcttccccttcagcttctgcgtgatggacaaggacagagagggcctgatcagcagagacgagatcaccgcctacttcatgagagccagcagcatctacagcaagctgggcctgggcttcccccacaacttccaggagaccacctacctgaagcccaccttctgcgacaactgcgccggcttcctgtggggcgtgatcaagcagggctacagatgcaaggactgcggcatgaactgccacaagcagtgcaaggacctggtggtgttcgagtgcaagaagagagccaagaaccccgtggcccccaccgagaacaacaccagcgtgggccccgtgagcaacctgtgcagcctgggcgccaaggacctgctgcacgcccccgaggagggccccttcaccttccccaacggcgaggccgtggagcacggcgaggagagcaaggacagaaccatcatgctgatgggcgtgagcagccagaagatcagcctgagactgaagagagccgtggcccacaaggccacccagaccgagagccagccctggatcggcagcgagggccccagcggccccttcgtgctgagcagccccagaaagaccgcccaggacaccctgtacgtgctgcccagccccaccagcccctgccccagccccgtgctggtgagaaagagagccttcgtgaagtgggagaacaaggacagcctgatcaagagcaaggaggagctgagacacctgagactgcccacctaccaggagctggagcaggagatcaacaccctgaaggccgacaacgacgccctgaagatccagctgaagtacgcccagaagaagatcgagagcctgcagctggagaagagcaaccacgtgctggcccagatggagcagggcgactgcagctag

SEQ ID NO: 96400 - DNA, 1446 bp, synthetic construct
  misc_feature 1..1446: note = Description of Artificial Sequence: Synthetic coding sequence
  source 1..1446: mol_type = other DNA
atgggcaccctgggcaaggccagagaggcccccagaaagcccagccacggctgcagagccgccagcaaggccagactggaggccaagcccgccaacagccccttccccagccaccccagcctggcccacatcacccagttcagaatgatggtgagcctgggccacctggccaagggcgccagcctggacgacctgatcgacagctgcatccagagcttcgacgccgacggcaacctgtgcagaagcaaccagctgctgcaggtgatgctgaccatgcacagaatcgtgatcagcagcgccgagctgctgcagaaggtgatcaccctgtaccccgacgccctggccaagaacagccccggcctgtgcctgaagatctgctacttcgtgagatactggatcaccgagttctgggtgatgttcaagatggacgccagcctgaccgacaccatggaggagttccaggagctggtgaaggccaagggcgaggagctgcactgcagactgatcgacaccacccagatcaacgccagagactggagcagaaagctgacccagagaatcaagagcaacaccagcaagaagagaaaggtgagcctgctgttcgaccacctggagcccgaggagctgagcgagcacctgacctacctggagttcaagagcttcagaagaatcagcttcagcgactaccagaactacctggtgaacagctgcgtgaaggagaaccccaccatggagagaagcatcgccctgtgcaacggcatcagccagtgggtgcagctgatggtgctgagcagacccaccccccagctgagagccgaggtgttcatcaagttcatccaggtggcccagaagctgcaccagctgcagaacttcaacaccctgatggccgtgatcggcggcctgtgccacagcagcatcagcagactgaaggagaccagcagccacgtgccccacgagatcaacaaggtgctgggcgagatgaccgagctgctgagcagcagcagaaactacgacaactacagaagagcctacggcgagtgcaccgacttcaagatccccatcctgggcgtgcacctgaaggacctgatcagcctgtacgaggccatgcccgactacctggaggacggcaaggtgaacgtgcacaagctgctggccctgtacaaccacatcagcgagctggtgcagctgcaggaggtggccccccccctggaggccaacaaggacctggtgcacctgctgaccctgagcctggacctgtactacaccgaggacgagatctacgagctgagctacgccagagagcccagaaaccacagagcccccagcgtgttcaagaactacgaccacgaccaggacggctacatcagccaggaggagttcgagaagatcgccgccagcttccccttcagcttctgcgtgatggacaaggacagaagcggcgcctag

SEQ ID NO: 96401 - DNA, 1641 bp, synthetic construct
  misc_feature 1..1641: note = Description of Artificial Sequence: Synthetic coding sequence
  source 1..1641: mol_type = other DNA
atgggcaccctgggcaaggccagagaggcccccagaaagcccagccacggctgcagagccgccagcaaggccagactggaggccaagcccgccaacagccccttccccagccaccccagcctggcccacatcacccagttcagaatgatggtgagcctgggccacctggccaagggcgccagcctggacgacctgatcgacagctgcatccagagcttcgacgccgacggcaacctgtgcagaagcaaccagctgctgcaggtgatgctgaccatgcacagaatcgtgatcagcagcgccgagctgctgcagaaggtgatcaccctgtacaaggacgccctggccaagaacagccccggcctgtgcctgaagatctgctacttcgtgagatactggatcaccgagttctgggtgatgttcaagatggacgccagcctgaccgacaccatggaggagttccaggagctggtgaaggccaagggcgaggagctgcactgcagactgatcgacaccacccagatcaacgccagagactggagcagaaagctgacccagagaatcaagagcaacaccagcaagaagagaaaggtgagcctgctgttcgaccacctggagcccgaggagctgagcgagcacctgacctacctggagttcaagagcttcagaagaatcagcttcagcgactaccagaactacctggtgaacagctgcgtgaaggagaaccccaccatggagagaagcatcgccctgtgcaacggcatcagccagtgggtgcagctgatggtgctgagcagacccaccccccagctgagagccgaggtgttcatcaagttcatccaggtggcccagaagctgcaccagctgcagaacttcaacaccctgatggccgtgatcggcggcctgtgccacagcagcatcagcagactgaaggagaccagcagccacgtgccccacgagatcaacaaggtgctgggcgagatgaccgagctgctgagcagcagcagaaactacgacaactacagaagagcctacggcgagtgcaccgacttcaagatccccatcctgggcgtgcacctgaaggacctgatcagcctgtacgaggccatgcccgactacctggaggacggcaaggtgaacgtgcacaagctgctggccctgtacaaccacatcagcgagctggtgcagctgcaggaggtggccccccccctggaggccaacaaggacctggtgcacctgctgaccctgagcctggacctgtactacaccgaggacgagatctacgagctgagctacgccagagagcccagaaaccacagagcccccagcgtgttcaagaactacgaccacgaccaggacggctacatcagccaggaggagttcgagaagatcgccgccagcttccccttcagcttctgcgtgatggacaaggacagagagggcctgatcagcagagacgagatcaccgcctacttcatgagagccagcagcatctacagcaagctgggcctgggcttcccccacaacttccaggagaccacctacctgaagcccaccttctgcgacaactgcgccggcttcctgtggggcgtgatcaagcagggctacagatgcaagggcaacaagtacagcgagagcagatag

SEQ ID NO: 96402 - DNA, 1794 bp, synthetic construct
  misc_feature 1..1794: note = Description of Artificial Sequence: Synthetic coding sequence
  source 1..1794: mol_type = other DNA
atgggcaccctgggcaaggccagagaggcccccagaaagcccagccacggctgcagagccgccagcaaggccagactggaggccaagcccgccaacagccccttccccagccaccccagcctggcccacatcacccagttcagaatgatggtgagcctgggccacctggccaagggcgccagcctggacgacctgatcgacagctgcatccagagcttcgacgccgacggcaacctgtgcagaagcaaccagctgctgcaggtgatgctgaccatgcacagaatcgtgatcagcagcgccgagctgctgcagaaggtgatcaccctgtacaaggacgccctggccaagaacagccccggcctgtgcctgaagatctgctacttcgtgagatactggatcaccgagttctgggtgatgttcaagatggacgccagcctgaccgacaccatggaggagttccaggagctggtgaaggccaagggcgaggagctgcactgcagactgatcgacaccacccagatcaacgccagagactggagcagaaagctgacccagagaatcaagagcaacaccagcaagaagagaaaggtgagcctgctgttcgaccacctggagcccgaggagctgagcgagcacctgacctacctggagttcaagagcttcagaagaatcagcttcagcgactaccagaactacctggtgaacagctgcgtgaaggagaaccccaccatggagagaagcatcgccctgtgcaacggcatcagccagtgggtgcagctgatggtgctgagcagacccaccccccagctgagagccgaggtgttcatcaagttcatccaggtggcccagaagctgcaccagctgcagaacttcaacaccctgatggccgtgatcggcggcctgtgccacagcagcatcagcagactgaaggagaccagcagccacgtgccccacgagatcaacaaggtgctgggcgagatgaccgagctgctgagcagcagcagaaactacgacaactacagaagagcctacggcgagtgcaccgacttcaagatccccatcctgggcgtgcacctgaaggacctgatcagcctgtacgaggccatgcccgactacctggaggacggcaaggtgaacgtgcacaagctgctggccctgtacaaccacatcagcgagctggtgcagctgcaggaggtggccccccccctggaggccaacaaggacctggtgcacctgctgaccctgagcctggacctgtactacaccgaggacgagatctacgagctgagctacgccagagagcccagaaaccacagagcccccagcgtgttcaagaactacgaccacgaccaggacggctacatcagccaggaggagttcgagaagatcgccgccagcttccccttcagcttctgcgtgatggacaaggacagagagggcctgatcagcagagacgagatcaccgcctacttcatgagagccagcagcatctacagcaagctgggcctgggcttcccccacaacttccaggagaccacctacctgaagcccaccttctgcgacaactgcgccggcttcctgtggggcgtgatcaagcagggctacagatgcaaggactgcggcatgaactgccacaagcagtgcaaggacctggtggtgttcgagtgcaagaagagagccaagaaccccgtggcccccaccgagaacaacaccagcgtgggccccgtgagcaacctgtgcagcctgggcgccaaggacctgctgcacggcaacaagtacagcgagagcagatag

SEQ ID NO: 96403 - DNA, 1830 bp, synthetic construct
  misc_feature 1..1830: note = Description of Artificial Sequence: Synthetic coding sequence
  source 1..1830: mol_type = other DNA
atggccggcaccctggacctggacaagggctgcaccgtggaggagctgctgagaggctgcatcgaggccttcgacgacagcggcaaggtgagagacccccagctggtgagaatgttcctgatgatgcacccctggtacatccccagcagccagctggccgccaagctgctgcacatctaccagcagagcagaaaggacaacagcaacagcctgcaggtgaagacctgccacctggtgagatactggatcagcgccttccccgccgagttcgacctgaaccccgagctggccgagcagatcaaggagctgaaggccctgctggaccaggagggcaacagaagacacagcagcctgatcgacatcgacagcgtgcccacctacaagtggaagagacaggtgacccagagaaaccccgtgggccagaagaagagaaagatgagcctgctgttcgaccacctggagcccatggagctggccgagcacctgacctacctggagtacagaagcttctgcaagatcctgttccaggactaccacagcttcgtgacccacggctgcaccgtggacaaccccgtgctggagagattcatcagcctgttcaacagcgtgagccagtgggtgcagctgatgatcctgagcaagcccaccgccccccagagagccctggtgatcacccacttcgtgcacgtggccgagaagctgctgcagctgcagaacttcaacaccctgatggccgtggtgggcggcctgagccacagcagcatcagcagactgaaggagacccacagccacgtgagccccgagaccatcaagctgtgggagggcctgaccgagctggtgaccgccaccggcaactacggcaactacagaagaagactggccgcctgcgtgggcttcagattccccatcctgggcgtgcacctgaaggacctggtggccctgcagctggccctgcccgactggctggaccccgccagaaccagactgaacggcgccaagatgaagcagctgttcagcatcctggaggagctggccatggtgaccagcctgagaccccccgtgcaggccaaccccgacctgctgagcctgctgaccgtgagcctggaccagtaccagaccgaggacgagctgtaccagctgagcctgcagagagagcccagaagcaagagcagccccaccagccccaccagctgcacccccccccccagaccccccgtgctggaggagtggaccagcgccgccaagcccaagctggaccaggccctggtggtggagcacatcgagaagatggtggagagcgtgttcagaaacttcgacgtggacggcgacggccacatcagccaggaggagttccagatcatcagaggcaacttcccctacctgagcgccttcggcgacctggaccagaaccaggacggctgcatcagcagagaggagatggtgagctacttcctgagaagcagcagcgtgctgggcggcagaatgggcttcgtgcacaacttccaggagagcaacagcctgagacccgtggcctgcagacactgcaaggccctgatcctgggcatctacaagcagggcctgaagtgcagagcctgcggcgtgaactgccacaagcagtgcaaggacagactgagcgtggagtgcagaagaagagcccagagcgtgagcctggagggcagcgcccccagccccagccccatgcacagccaccaccacagagccttcagcttcagcctgcccagacccggcagaagaggcagcagaccccccgagatcagagaggaggaggtgcagaccgtggaggacggcgtgttcgacatccacctgtag

SEQ ID NO: 96404 - DNA, 1833 bp, synthetic construct
  misc_feature 1..1833: note = Description of Artificial Sequence: Synthetic coding sequence
  source 1..1833: mol_type = other DNA
atggccggcaccctggacctggacaagggctgcaccgtggaggagctgctgagaggctgcatcgaggccttcgacgacagcggcaaggtgagagacccccagctggtgagaatgttcctgatgatgcacccctggtacatccccagcagccagctggccgccaagctgctgcacatctaccagcagagcagaaaggacaacagcaacagcctgcaggtgaagacctgccacctggtgagatactggatcagcgccttccccgccgagttcgacctgaaccccgagctggccgagcagatcaaggagctgaaggccctgctggaccaggagggcaacagaagacacagcagcctgatcgacatcgacagcgtgcccacctacaagtggaagagacaggtgacccagagaaaccccgtgggccagaagaagagaaagatgagcctgctgttcgaccacctggagcccatggagctggccgagcacctgacctacctggagtacagaagcttctgcaagatcctgttccaggactaccacagcttcgtgacccacggctgcaccgtggacaaccccgtgctggagagattcatcagcctgttcaacagcgtgagccagtgggtgcagctgatgatcctgagcaagcccaccgccccccagagagccctggtgatcacccacttcgtgcacgtggccgagaagctgctgcagctgcagaacttcaacaccctgatggccgtggtgggcggcctgagccacagcagcatcagcagactgaaggagacccacagccacgtgagccccgagaccatcaagctgtgggagggcctgaccgagctggtgaccgccaccggcaactacggcaactacagaagaagactggccgcctgcgtgggcttcagattccccatcctgggcgtgcacctgaaggacctggtggccctgcagctggccctgcccgactggctggaccccgccagaaccagactgaacggcgccaagatgaagcagctgttcagcatcctggaggagctggccatggtgaccagcctgagaccccccgtgcaggccaaccccgacctgctgagcctgctgaccgtgagcctggaccagtaccagaccgaggacgagctgtaccagctgagcctgcagagagagcccagaagcaagagcagccccaccagccccaccagctgcacccccccccccagaccccccgtgctggaggagtggaccagcgccgccaagcccaagctggaccaggccctggtggtggagcacatcgagaagatggtggagagcgtgttcagaaacttcgacgtggacggcgacggccacatcagccaggaggagttccagatcatcagaggcaacttcccctacctgagcgccttcggcgacctggaccagaaccaggacggctgcatcagcagagaggagatggtgagctacttcctgagaagcagcagcgtgctgggcggcagaatgggcttcgtgcacaacttccaggagagcaacagcctgagacccgtggcctgcagacactgcaaggccctgatcctgggcatctacaagcagggcctgaagtgcagagcctgcggcgtgaactgccacaagcagtgcaaggacagactgagcgtggagtgcagaagaagagcccagagcgtgagcctggagggcagcgcccccagccccagccccatgcacagccaccaccacagagccttcagcttcagcctgcccagacccggcagaagaggcagcagaccccccgccgagatcagagaggaggaggtgcagaccgtggaggacggcgtgttcgacatccacctgtag

SEQ ID NO: 96405 - DNA, 1830 bp, synthetic construct; identical to SEQ ID NO: 96403
  misc_feature 1..1830: note = Description of Artificial Sequence: Synthetic coding sequence
  source 1..1830: mol_type = other DNA

SEQ ID NO: 96406 - DNA, 1830 bp, synthetic construct; identical to SEQ ID NO: 96403
  misc_feature 1..1830: note = Description of Artificial Sequence: Synthetic coding sequence
  source 1..1830: mol_type = other DNA

SEQ ID NO: 96407 - DNA, 432 bp, synthetic construct
  misc_feature 1..432: note = Description of Artificial Sequence: Synthetic coding sequence
  source 1..432: mol_type = other DNA
atggccggcaccctggacctggacaagggctgcaccgtggaggagctgctgagaggctgcatcgaggccttcgacgacagcggcaaggtgagagacccccagctggtgagaatgttcctgatgatgcacccctggtacatccccagcagccagctggccgccaagctgctgcacatctaccagcagagcagaaaggacaacagcaacagcctgcaggtgaagacctgccacctggtgagatactggatcagcgccttccccgccgagttcgacctgaaccccgagctggccgagcagatcaaggagctgaaggccctgctggaccaggagggcaacagaagacacagcagcctgatcgacatcgacagcgtgtgcgtgggcgagcacagaggcctgggcggccacagcgtgagctacaccatctgcgcctag

SEQ ID NO: 96408 - DNA, 1731 bp, synthetic construct
  misc_feature 1..1731: note = Description of Artificial Sequence: Synthetic coding sequence
  source 1..1731: mol_type = other DNA
atgaacagaaaggacagcaagagaaagagccaccaggagtgcaccggcaagatcggcggcagaggcagacccagacaggtgagaagacacaagacctgccccagccccagagagatcagcaaggtgatggccagcatgaacctgggcctgctgagcgagggcggctgcagcgaggacgagctgctggagaagtgcatccagagcttcgacagcgccggcagcctgtgccacgaggaccacatgctgaacatggtgctggccatgcacagctgggtgctgcccagcgccgacctggccgccagactgctgaccagctaccagaaggccaccggcgacacccaggagctgagaagactgcagatctgccacctggtgagatactggctgatgagacaccccgaggtgatgcaccaggacccccagctggaggaggtgatcggcagattctgggccaccgtggccagagagggcaacagcgcccagagaagactgggcgacagcagcgacctgctgagccccggcggccccggcccccccctgcccatgagcagccccggcctgggcaagaagagaaaggtgagcctgctgttcgaccacctggagaccggcgagctggcccagcacctgacctacctggagttcagaagcttccaggccatcaccgccctgctggagctgaccgagctgctggccagccacaacaactacgccagatacagaagaacctgggccggctgcgccggcttcagactgcccgtgctgggcgtgcacctgaaggacctggtgagcctgcacgaggcccagcccgacagactgcccgacggcagactgcacctgcccaagctgaacaacctgtacctgagactgcaggagctggtggccctgcagggccagcaccccccctgcagcgccaacgaggacctgctgcacctgctgaccctgagcctggacctgttctacaccgaggacgagatctacgagctgagctacgccagagagcccagatgccccaagagcctgccccccagccccttcaacgcccccctggtggtggagtgggcccccggcgtgacccccaagcccgacagagtgaccctgggcagacacgtggagcagctggtggagagcgtgttcaagaactacgaccccgagggcagaggcaccatcagccaggaggacttcgagagactgagcggcaacttccccttcgcctgccacggcctgcaccccccccccagacagggcagaggcagcttcagcagagaggagctgaccggctacctgctgagagccagcgccatctgcagcaagctgggcctggccttcctgcacaccttccacgaggtgaccttcagaaagcccaccttctgcgacagctgcagcggcttcctgtggggcgtgaccaagcagggctacagatgcagagagtgcggcctgtgctgccacaagcactgcagagaccaggtgaaggtggagtgcaagaagagacccggcgccaagggcgacgccggcccccccggcgcccccgtgcccagcacccccgccccccacgccagctgcggcagcgaggagaaccacagctacaccctgagcctggagcccgagaccggctgccagctgagacacgcctggacccagaccgagagcccccaccccagctgggagaccgacaccgtgccctgccccgtgatggacccccccagcaccgccagcagcaagctggacagctag

SEQ ID NO: 96409 - DNA, 1854 bp, synthetic construct
  misc_feature 1..1854: note = Description of Artificial Sequence: Synthetic coding sequence
  source 1..1854: mol_type = other DNA
atgaacagaaaggacagcaagagaaagagccaccaggagtgcaccggcaagatcggcggcagaggcagacccagacaggtgagaagacacaagacctgccccagccccagagagatcagcaaggtgatggccagcatgaacctgggcctgctgagcgagggcggctgcagcgaggacgagctgctggagaagtgcatccagagcttcgacagcgccggcagcctgtgccacgaggaccacatgctgaacatggtgctggccatgcacagctgggtgctgcccagcgccgacctggccgccagactgctgaccagctaccagaaggccaccggcgacacccaggagctgagaagactgcagatctgccacctggtgagatactggctgatgagacaccccgaggtgatgcaccaggacccccagctggaggaggtgatcggcagattctgggccaccgtggccagagagggcaacagcgcccagagaagactgggcgacagcagcgacctgctgagccccggcggccccggcccccccctgcccatgagcagccccggcctgggcaagaagagaaaggtgagcctgctgttcgaccacctggagaccggcgagctggcccagcacctgacctacctggagttcagaagcttccaggccatcaccccccaggacctgagaagctacgtgctgcagggcagcgtgagaggctgccccgccctggagggcagcgtgggcctgagcaacagcgtgagcagatgggtgcaggtgatggtgctgagcagacccggccccctgcagagagcccaggtgctggacaagttcatccacgtggcccagagactgcaccagctgcagaacttcaacaccctgatggccgtgaccggcggcctgtgccacagcgccatcagcagactgaaggacagccacgcccacctgagccccgacagcaccaaggccctgctggagctgaccgagctgctggccagccacaacaactacgccagatacagaagaacctgggccggctgcgccggcttcagactgcccgtgctgggcgtgcacctgaaggacctggtgagcctgcacgaggcccagcccgacagactgcccgacggcagactgcacctgcccaagctgaacaacctgtacctgagactgcaggagctggtggccctgcagggccagcaccccccctgcagcgccaacgaggacctgctgcacctgctgaccctgagcctggacctgttctacaccgaggacgagatctacgagctgagctacgccagagagcccagatgccccaagagcctgccccccagccccttcaacgcccccctggtggtggagtgggcccccggcgtgacccccaagcccgacagagtgaccctgggcagacacgtggagcagctggtggagagcgtgttcaagaactacgaccccgagggcagaggcaccatcagccaggaggacttcgagagactgagcggcaacttccccttcgcctgccacggcctgcaccccccccccagacagggcagaggcagcttcagcagagaggagctgaccggctacctgctgagagccagcgccatctgcagcaagctgggcctggccttcctgcacaccttccacgaggtgaccttcagaaagcccaccttctgcgacagctgcagcggcttcctgtggggcgtgaccaagcagggctacagatgcagaggcgagtggggcgtgagcgagtgggagggcagcctgggcccccaggccggcagaatggacgacaccgacagaacccccgccgccgccttcccccagagcgccggctgcgtggccaccaacaccgccgagaccagatag

SEQ ID NO: 96410 - DNA, 1455 bp, synthetic construct
  misc_feature 1..1455: note = Description of Artificial Sequence: Synthetic coding sequence
  source 1..1455: mol_type = other DNA
atgaacagaaaggacagcaagagaaagagccaccaggagtgcaccggcaagatcggcggcagaggcagacccagacaggtgagaagacacaagacctgccccagccccagagagatcagcaaggtgatggccagcatgaacctgggcctgctgagcgagggcggctgcagcgaggacgagctgctggagaagtgcatccagagcttcgacagcgccggcagcctgtgccacgaggaccacatgctgaacatggtgctggccatgcacagctgggtgctgcccagcgccgacctggccgccagactgctgaccagctaccagaaggccaccggcgacacccaggagctgagaagactgcagatctgccacctggtgagatactggctgatgagacaccccgaggtgatgcaccaggacccccagctggaggaggtgatcggcagattctgggccaccgtggccagagagggcaacagcgcccagagaagactgggcgacagcagcgacctgctgagccccggcggccccggcccccccctgcccatgagcagccccggcctgggcaagaagagaaaggtgagcctgctgttcgaccacctggagaccggcgagctggcccagcacctgacctacctggagttcagaagcttccaggccatcaccctgagcctggacctgttctacaccgaggacgagatctacgagctgagctacgccagagagcccagatgccccaagagcctgccccccagccccttcaacgcccccctggtggtggagtgggcccccggcgtgacccccaagcccgacagagtgaccctgggcagacacgtggagcagctggtggagagcgtgttcaagaactacgaccccgagggcagaggcaccatcagccaggaggacttcgagagactgagcggcaacttccccttcgcctgccacggcctgcaccccccccccagacagggcagaggcagcttcagcagagaggagctgaccggctacctgctgagagccagcgccatctgcagcaagctgggcctggccttcctgcacaccttccacgaggtgaccttcagaaagcccaccttctgcgacagctgcagcggcttcctgtggggcgtgaccaagcagggctacagatgcagagagtgcggcctgtgctgccacaagcactgcagagaccaggtgaaggtggagtgcaagaagagacccggcgccaagggcgacgccggcccccccggcgcccccgtgcccagcacccccgccccccacgccagctgcggcagcgaggagaaccacagctacaccctgagcctggagcccgagaccggctgccagctgagacacgcctggacccagaccgagagcccccaccccagctgggagaccgacaccgtgccctgccccgtgatggacccccccagcaccgccagcagcaagctggacagctag

SEQ ID NO: 96411 - DNA, 1746 bp, synthetic construct
  misc_feature 1..1746: note = Description of Artificial Sequence: Synthetic coding sequence
  source 1..1746: mol_type = other DNA
atgaacagaaaggacagcaagagaaagagccaccaggagtgcaccggcaagatcggcggcagaggcagacccagacaggtgagaagacacaagacctgccccagccccagagagatcagcaaggtgatggccagcatgaacctgggcctgctgagcgagggcggctgcagcgaggacgagctgctggagaagtgcatccagagcttcgacagcgccggcagcctgtgccacgaggaccacatgctgaacatggtgctggccatgcacagctgggtgctgcccagcgccgacctggccgccagactgctgaccagctaccagaaggccaccggcgacacccaggagctgagaagactgcagatctgccacctggtgagatactggctgatgagacaccccgaggtgatgcaccaggacccccagctggaggaggtgatcggcagattctgggccaccgtggccagagagggcaacagcgcccagagaagactgggcgacagcagcgacctgctgagccccggcggccccggcccccccctgcccatgagcagccccggcctgggcaagaagagaaaggtgagcctgctgttcgaccacctggagaccggcgagctggcccagcacctgacctacctggagttcagaagcttccaggccatcaccccccaggacctgagaagctacgtgctgcagggcagcgtgagaggctgccccgccctggagggcagcgtgggcctgagcaacagcgtgagcagatgggtgcaggtgatggtgctgagcagacccggccccctgcagagagcccaggtgctggacaagttcatccacgtggcccagagactgcaccagctgcagaacttcaacaccctgatggccgtgaccggcggcctgtgccacagcgccatcagcagactgaaggacagccacgcccacctgagccccgacagcaccaagctgagcctggacctgttctacaccgaggacgagatctacgagctgagctacgccagagagcccagatgccccaagagcctgccccccagccccttcaacgcccccctggtggtggagtgggcccccggcgtgacccccaagcccgacagagtgaccctgggcagacacgtggagcagctggtggagagcgtgttcaagaactacgaccccgagggcagaggcaccatcagccaggaggacttcgagagactgagcggcaacttccccttcgcctgccacggcctgcaccccccccccagacagggcagaggcagcttcagcagagaggagctgaccggctacctgctgagagccagcgccatctgcagcaagctgggcctggccttcctgcacaccttccacgaggtgaccttcagaaagcccaccttctgcgacagctgcagcggcttcctgtggggcgtgaccaagcagggctacagatgcagagagtgcggcctgtgctgccacaagcactgcagagaccaggtgaaggtggagtgcaagaagagacccggcgccaagggcgacgccggcccccccggcgcccccgtgcccagcacccccgccccccacgccagctgcggcagcgaggagaaccacagctacaccctgagcctggagcccgagaccggctgccagctgagacacgcctggacccagaccgagagcccccaccccagctgggagaccgacaccgtgccctgccccgtgatggacccccccagcaccgccagcagcaagctggacagctag

SEQ ID NO: 96412 - DNA, 2022 bp, synthetic construct
  misc_feature 1..2022: note = Description of Artificial Sequence: Synthetic coding sequence
  source 1..2022: mol_type = other DNA
atgaacagaaaggacagcaagagaaagagccaccaggagtgcaccggcaagatcggcggcagaggcagacccagacaggtgagaagacacaagacctgccccagccccagagagatcagcaaggtgatggccagcatgaacctgggcctgctgagcgagggcggctgcagcgaggacgagctgctggagaagtgcatccagagcttcgacagcgccggcagcctgtgccacgaggaccacatgctgaacatggtgctggccatgcacagctgggtgctgcccagcgccgacctggccgccagactgctgaccagctaccagaaggccaccggcgacacccaggagctgagaagactgcagatctgccacctggtgagatactggctgatgagacaccccgaggtgatgcaccaggacccccagctggaggaggtgatcggcagattctgggccaccgtggccagagagggcaacagcgcccagagaagactgggcgacagcagcgacctgctgagccccggcggccccggcccccccctgcccatgagcagccccggcctgggcaagaagagaaaggtgagcctgctgttcgaccacctggagaccggcgagctggcccagcacctgacctacctggagttcagaagcttccaggccatcaccccccaggacctgagaagctacgtgctgcagggcagcgtgagaggctgccccgccctggagggcagcgtgggcctgagcaacagcgtgagcagatgggtgcaggtgatggtgctgagcagacccggccccctgcagagagcccaggtgctggacaagttcatccacgtggcccagagactgcaccagctgcagaacttcaacaccctgatggccgtgaccggcggcctgtgccacagcgccatcagcagactgaaggacagccacgcccacctgagccccgacagcaccaaggccctgctggagctgaccgagctgctggccagccacaacaactacgccagatacagaagaacctgggccggctgcgccggcttcagactgcccgtgctgggcgtgcacctgaaggacctggtgagcctgcacgaggcccagcccgacagactgcccgacggcagactgcacctgcccaagctgaacaacctgtacctgagactgcaggagctggtggccctgcagggccagcaccccccctgcagcgccaacgaggacctgctgcacctgctgaccctgagcctggacctgttctacaccgaggacgagatctacgagctgagctacgccagagagcccagatgccccaagagcctgccccccagccccttcaacgcccccctggtggtggagtgggcccccggcgtgacccccaagcccgacagagtgaccctgggcagacacgtggagcagctggtggagagcgtgttcaagaactacgaccccgagggcagaggcaccatcagccaggaggacttcgagagactgagcggcaacttccccttcgcctgccacggcctgcaccccccccccagacagggcagaggcagcttcagcagagaggagctgaccggctacctgctgagagccagcgccatctgcagcaagctgggcctggccttcctgcacaccttccacgaggtgaccttcagaaagcccaccttctgcgacagctgcagcggcttcctgtggggcgtgaccaagcagggctacagatgcagagagtgcggcctgtgctgccacaagcactgcagagaccaggtgaaggtggagtgcaagaagagacccggcgccaagggcgacgccggcccccccggcgcccccgtgcccagcacccccgccccccacgccagctgcggcagcgaggagaaccacagctacaccctgagcctggagcccgagaccggctgccagctgagacacgcctggacccagaccgagagcccccaccccagctgggagaccgacaccgtgccctgccccgtgatggacccccccagcaccgccagcagcaagctggacagctag

SEQ ID NO: 96413 - DNA, 1980 bp, synthetic construct
  misc_feature 1..1980: note = Description of Artificial Sequence: Synthetic coding sequence
  source 1..1980: mol_type = other DNA
atgaacagaaaggacagcaagagaaagagccaccaggagtgcaccggcaagatcggcggcagaggcagacccagacaggtgagaagacacaagacctgccccagccccagagagatcagcaaggtgatggccagcatgaacctgggcctgctgagcgagggcggctgcagcgaggacgagctgctggagaagtgcatccagagcttcgacagcgccggcagcctgtgccacgaggaccacatgctgaacatggtgctggccatgcacagctgggtgctgcccagcgccgacctggccgccagactgctgaccagctaccagaaggccaccggcgacacccaggagctgagaagactgcagatctgccacctggtgagatactggctgatgagacaccccgaggtgatgcaccaggacccccagctggaggaggtgatcggcagattctgggccaccgtggccagagagggcaacagcgcccagagaagactgggcgacagcagcgacctgcccggcctgggcaagaagagaaaggtgagcctgctgttcgaccacctggagaccggcgagctggcccagcacctgacctacctggagttcagaagcttccaggccatcaccccccaggacctgagaagctacgtgctgcagggcagcgtgagaggctgccccgccctggagggcagcgtgggcctgagcaacagcgtgagcagatgggtgcaggtgatggtgctgagcagacccggccccctgcagagagcccaggtgctggacaagttcatccacgtggcccagagactgcaccagctgcagaacttcaacaccctgatggccgtgaccggcggcctgtgccacagcgccatcagcagactgaaggacagccacgcccacctgagccccgacagcaccaaggccctgctggagctgaccgagctgctggccagccacaacaactacgccagatacagaagaacctgggccggctgcgccggcttcagactgcccgtgctgggcgtgcacctgaaggacctggtgagcctgcacgaggcccagcccgacagactgcccgacggcagactgcacctgcccaagctgaacaacctgtacctgagactgcaggagctggtggccctgcagggccagcaccccccctgcagcgccaacgaggacctgctgcacctgctgaccctgagcctggacctgttctacaccgaggacgagatctacgagctgagctacgccagagagcccagatgccccaagagcctgccccccagccccttcaacgcccccctggtggtggagtgggcccccggcgtgacccccaagcccgacagagtgaccctgggcagacacgtggagcagctggtggagagcgtgttcaagaactacgaccccgagggcagaggcaccatcagccaggaggacttcgagagactgagcggcaacttccccttcgcctgccacggcctgcaccccccccccagacagggcagaggcagcttcagcagagaggagctgaccggctacctgctgagagccagcgccatctgcagcaagctgggcctggccttcctgcacaccttccacgaggtgaccttcagaaagcccaccttctgcgacagctgcagcggcttcctgtggggcgtgaccaagcagggctacagatgcagagagtgcggcctgtgctgccacaagcactgcagagaccaggtgaaggtggagtgcaagaagagacccggcgccaagggcgacgccggcccccccggcgcccccgtgcccagcacccccgccccccacgccagctgcggcagcgaggagaaccacagctacaccctgagcctggagcccgagaccggctgccagctgagacacgcctggacccagaccgagagcccccaccccagctgggagaccgacaccgtgccctgccccgtgatggacccccccagcaccgccagcagcaagctggacagctag

SEQ ID NO: 96414 - DNA, 1815 bp, synthetic construct
  misc_feature 1..1815: note = Description of Artificial Sequence: Synthetic coding sequence
  source 1..1815: mol_type = other DNA
atgaacagaaaggacagcaagagaaagagccaccaggagtgcaccggcaagatcggcggcagaggcagacccagacaggtgagaagacacaagacctgccccagccccagagagatcagcaaggtgatggccagcatgaacctgggcctgctgagcgagggcggctgcagcgaggacgagctgctggagaagtgcatccagagcttcgacagcgccggcagcctgtgccacgaggaccacatgctgaacatggtgctggccatgcacagctgggtgctgcccagcgccgacctggccgccagactgctgaccagctaccagaaggccaccggcgacacccaggagctgagaagactgcagatctgccacctggtgagatactggctgatgagacaccccgaggtgatgcaccaggacccccagctggaggaggtgatcggcagattctgggccaccgtggccagagagggcaacagcgcccagagaagactgggcgacagcagcgacctgctgagccccggcggccccggcccccccctgcccatgagcagccccggcctgggcaagaagagaaaggtgagcctgctgttcgaccacctggagaccggcgagctggcccagcacctgacctacctggagttcagaagcttccaggccatcaccccccaggacctgagaagctacgtgctgcagggcagcgtgagaggctgccccgccctggagggcagcgtgggcctgagcaacagcgtgagcagatgggtgcaggtgatggtgctgagcagacccggccccctgcagagagcccaggtgctggacaagttcatccacgtggcccagagactgcaccagctgcagaacttcaacaccctgatggccgtgaccggcggcctgtgccacagcgccatcagcagactgaaggacagccacgcccacctgagccccgacagcaccaaggagctggtggccctgcagggccagcaccccccctgcagcgccaacgaggacctgctgcacctgctgaccctgagcctggacctgttctacaccgaggacgagatctacgagctgagctacgccagagagcccagatgccccaagagcctgccccccagccccttcaacgcccccctggtggtggagtgggcccccggcgtgacccccaagcccgacagagtgaccctgggcagacacgtggagcagctggtggagagcgtgttcaagaactacgaccccgagggcagaggcaccatcagccaggaggacttcgagagactgagcggcaacttccccttcgcctgccacggcctgcaccccccccccagacagggcagaggcagcttcagcagagaggagctgaccggctacctgctgagagccagcgccatctgcagcaagctgggcctggccttcctgcacaccttccacgaggtgaccttcagaaagcccaccttctgcgacagctgcagcggcttcctgtggggcgtgaccaagcagggctacagatgcagagagtgcggcctgtgctgccacaagcactgcagagaccaggtgaaggtggagtgcaagaagagacccggcgccaagggcgacgccggcccccccggcgcccccgtgcccagcacccccgccccccacgccagctgcggcagcgaggagaaccacagctacaccctgagcctggagcccgagaccggctgccagctgagacacgcctggacccagaccgagagcccccaccccagctgggagaccgacaccgtgccctgccccgtgatggacccccccagcaccgccagcagcaagctggacagctag

SEQ ID NO: 96415 - DNA, 1857 bp, synthetic construct
  misc_feature 1..1857: note = Description of Artificial Sequence: Synthetic coding sequence
  source 1..1857: mol_type = other DNA
atgaagaaggacgtgagaatcctgctggtgggcgagcccagagtgggcaagaccagcctgatcatgagcctggtgagcgaggagttccccgaggaggtgccccccagagccgaggagatcaccatccccgccgacgtgacccccgagagagtgcccacccacatcgtggactacagcgaggccgagcagagcgacgagcagctgcaccaggagatcagccaggccaacgtgatctgcatcgtgtacgccgtgaacaacaagcacagcatcgacaaggtgaccagcagatggatccccctgatcaacgagagaaccgacaaggacagcagactgcccctgatcctggtgggcaacaagagcgacctggtggagtacagcagcatggagaccatcctgcccatcatgaaccagtacaccgagatcgagacctgcgtggagtgcagcgccaagaacctgaagaacatcagcgagctgttctactacgcccagaaggccgtgctgcaccccaccggccccctgtactgccccgaggagaaggagatgaagcccgcctgcatcaaggccctgaccagaatcttcaagatcagcgaccaggacaacgacggcaccctgaacgacgccgagctgaacttcttccagagaatctgcttcaacacccccctggccccccaggccctggaggacgtgaagaacgtggtgagaaagcacatcagcgacggcgtggccgacagcggcctgaccctgaagggcttcctgttcctgcacaccctgttcatccagagaggcagacacgagaccacctggaccgtgctgagaagattcggctacgacgacgacctggacctgacccccgagtacctgttccccctgctgaagatcccccccgactgcaccaccgagctgaaccaccacgcctacctgttcctgcagagcaccttcgacaagcacgacctggacagagactgcgccctgagccccgacgagctgaaggacctgttcaaggtgttcccctacatcccctggggccccgacgtgaacaacaccgtgtgcaccaacgagagaggctggatcacctaccagggcttcctgagccagtggaccctgaccacctacctggacgtgcagagatgcctggagtacctgggctacctgggctacagcatcctgaccgagcaggagagccaggccagcgccgtgaccgtgaccagagacaagaagatcgacctgcagaagaagcagacccagagaaacgtgttcagatgcaacgtgatcggcgtgaagaactgcggcaagagcggcgtgctgcaggccctgctgggcagaaacctgatgagacagaagaagatcagagaggaccacaagagctactacgccatcaacaccgtgtacgtgtacggccaggagaagtacctgctgctgcacgacatcagcgagagcgagttcctgaccgaggccgagatcatctgcgacgtggtgtgcctggtgtacgacgtgagcaaccccaagagcttcgagtactgcgccagaatcttcaagcagcacttcatggacagcagaatcccctgcctgatcgtggccgccaagagcgacctgcacgaggtgaagcaggagtacagcatcagccccaccgacttctgcagaaagcacaagatgccccccccccaggccttcacctgcaacaccgccgacgcccccagcaaggacatcttcgtgaagctgaccaccatggccatgtacccccacgtgacccaggccgacctgaagagcagcaccttctggctgagagccagcttcggcgccaccgtgttcgccgtgctgggcttcgccatgtacaaggccctgctgaagcagagatag

SEQ ID NO: 96416 - DNA, 1980 bp, synthetic construct
  misc_feature 1..1980: note = Description of Artificial Sequence: Synthetic coding sequence
  source 1..1980: mol_type = other DNA
atgaagaaggacgtgagaatcctgctggtgggcgagcccagagtgggcaagaccagcctgatcatgagcctggtgagcgaggagttccccgaggaggtgccccccagagccgaggagatcaccatccccgccgacgtgacccccgagagagtgcccacccacatcgtggactacagcgaggccgagcagagcgacgagcagctgcaccaggagatcagccaggccaacgtgatctgcatcgtgtacgccgtgaacaacaagcacagcatcgacaaggtgaccagcagatggatccccctgatcaacgagagaaccgacaaggacagcagactgcccctgatcctggtgggcaacaagagcgacctggtggagtacagcagcatggagaccatcctgcccatcatgaaccagtacaccgagatcgagacctgcgtggagtgcagcgccaagaacctgaagaacatcagcgagctgttctactacgcccagaaggccgtgctgcaccccaccggccccctgtactgccccgaggagaaggagatgaagcccgcctgcatcaaggccctgaccagaatcttcaagatcagcgaccaggacaacgacggcaccctgaacgacgccgagctgaacttcttccagagaatctgcttcaacacccccctggccccccaggccctggaggacgtgaagaacgtggtgagaaagcacatcagcgacggcgtggccgacagcggcctgaccctgaagggcttcctgttcctgcacaccctgttcatccagagaggcagacacgagaccacctggaccgtgctgagaagattcggctacgacgacgacctggacctgacccccgagtacctgttccccctgctgaagatcccccccgactgcaccaccgagctgaaccaccacgcctacctgttcctgcagagcaccttcgacaagcacgacctggacagagactgcgccctgagccccgacgagctgaaggacctgttcaaggtgttcccctacatcccctggggccccgacgtgaacaacaccgtgtgcaccaacgagagaggctggatcacctaccagggcttcctgagccagtggaccctgaccacctacctggacgtgcagagatgcctggagtacctgggctacctgggctacagcatcctgaccgagcaggagagccaggccagcgccgtgaccgtgaccagagacaagaagatcgacctgcagaagaagcagacccagagaaacgtgttcagatgcaacgtgatcggcgtgaagaactgcggcaagagcggcgtgctgcaggccctgctgggcagaaacctgatgagacagaagaagatcagagaggaccacaagagctactacgccatcaacaccgtgtacgtgtacggccaggagaagtacctgctgctgcacgacatcagcgagagcgagttcctgaccgaggccgagatcatctgcgacgtggtgtgcctggtgtacgacgtgagcaaccccaagagcttcgagtactgcgccagaatcttcaagcagcacttcatggacagcagaatcccctgcctgatcgtggccgccaagagcgacctgcacgaggtgaagcaggagtacagcatcagccccaccgacttctgcagaaagcacaagatgccccccccccaggccttcacctgcaacaccgccgacgcccccagcaaggacatcttcgtgaagctgaccaccatggccatgtacccccacgccagactgagatgcatgtgcacctgcaacagatgcaccttctgcatctgccagaacttcctgaacagcgacctgctgcagagcgtgaagaacaagatcttcaccgccgtgctgaacagacacgtgacccaggccgacctgaagagcagcaccttctggctgagagccagcttcggcgccaccgtgttcgccgtgctgggcttcgccatgtacaaggccctgctgaagcagagatag

SEQ ID NO: 96417 - DNA, 2076 bp, synthetic construct
  misc_feature 1..2076: note = Description of Artificial Sequence: Synthetic coding sequence
  source 1..2076: mol_type = other DNA
atgaagaaggacgtgagaatcctgctggtgggcgagcccagagtgggcaagaccagcctgatcatgagcctggtgagcgaggagttccccgaggaggtgccccccagagccgaggagatcaccatccccgccgacgtgacccccgagagagtgcccacccacatcgtggactacagcgaggccgagcagagcgacgagcagctgcaccaggagatcagccaggccaacgtgatctgcatcgtgtacgccgtgaacaacaagcacagcatcgacaaggtgaccagcagatggatccccctgatcaacgagagaaccgacaaggacagcagactgcccctgatcctggtgggcaacaagagcgacctggtggagtacagcagcatggagaccatcctgcccatcatgaaccagtacaccgagatcgagacctgcgtggagtgcagcgccaagaacctgaagaacatcagcgagctgttctactacgcccagaaggccgtgctgcaccccaccggccccctgtactgccccgaggagaaggagatgaagcccgcctgcatcaaggccctgaccagaatcttcaagatcagcgaccaggacaacgacggcaccctgaacgacgccgagctgaacttcttccagagaatctgcttcaacacccccctggccccccaggccctggaggacgtgaagaacgtggtgagaaagcacatcagcgacggcgtggccgacagcggcctgaccctgaagggcttcctgttcctgcacaccctgttcatccagagaggcagacacgagaccacctggaccgtgctgagaagattcggctacgacgacgacctggacctgacccccgagtacctgttccccctgctgaagatcccccccgactgcaccaccgagctgaaccaccacgcctacctgttcctgcagagcaccttcgacaagcacgacctggacagagactgcgccctgagccccgacgagctgaaggacctgttcaaggtgttcccctacatcccctggggccccgacgtgaacaacaccgtgtgcaccaacgagagaggctggatcacctaccagggcttcctgagccagtggaccctgaccacctacctggacgtgcagagatgcctggagtacctgggctacctgggctacagcatcctgaccgagcaggagagccaggccagcgccgtgaccgtgaccagagacaagaagatcgacctgcagaagaagcagacccagagaaacgtgttcagatgcaacgtgatcggcgtgaagaactgcggcaagagcggcgtgctgcaggccctgctgggcagaaacctgatgagacagaagaagatcagagaggaccacaagagctactacgccatcaacaccgtgtacgtgtacggccaggagaagtacctgctgctgcacgacatcagcgagagcgagttcctgaccgaggccgagatcatctgcgacgtggtgtgcctggtgtacgacgtgagcaaccccaagagcttcgagtactgcgccagaatcttcaagcagcacttcatggacagcagaatcccctgcctgatcgtggccgccaagagcgacctgcacgaggtgaagcaggagtacagcatcagccccaccgacttctgcagaaagcacaagatgccccccccccaggccttcacctgcaacaccgccgacgcccccagcaaggacatcttcgtgaagctgaccaccatggccatgtaccccgaggaccactacagagacagactgagcagagacatgggccacaccgacagaatcgagaacctgagaaagatctgggtgttcctgaagaccgccttccacgccagactgagatgcatgtgcacctgcaacagatgcaccttctgcatctgccagaacttcctgaacagcgacctgctgcagagcgtgaagaacaagatcttcaccgccgtgctgaacagacacgtgacccaggccgacctgaagagcagcaccttctggctgagagccagcttcggcgccaccgtgttcgccgtgctgggcttcgccatgtacaaggccctgctgaagcagagatag

SEQ ID NO: 96418 - DNA, 1953 bp, synthetic construct
  misc_feature 1..1953: note = Description of Artificial Sequence: Synthetic coding sequence
  source 1..1953: mol_type = other DNA
atgaagaaggacgtgagaatcctgctggtgggcgagcccagagtgggcaagaccagcctgatcatgagcctggtgagcgaggagttccccgaggaggtgccccccagagccgaggagatcaccatccccgccgacgtgacccccgagagagtgcccacccacatcgtggactacagcgaggccgagcagagcgacgagcagctgcaccaggagatcagccaggccaacgtgatctgcatcgtgtacgccgtgaacaacaagcacagcatcgacaaggtgaccagcagatggatccccctgatcaacgagagaaccgacaaggacagcagactgcccctgatcctggtgggcaacaagagcgacctggtggagtacagcagcatggagaccatcctgcccatcatgaaccagtacaccgagatcgagacctgcgtggagtgcagcgccaagaacctgaagaacatcagcgagctgttctactacgcccagaaggccgtgctgcaccccaccggccccctgtactgccccgaggagaaggagatgaagcccgcctgcatcaaggccctgaccagaatcttcaagatcagcgaccaggacaacgacggcaccctgaacgacgccgagctgaacttcttccagagaatctgcttcaacacccccctggccccccaggccctggaggacgtgaagaacgtggtgagaaagcacatcagcgacggcgtggccgacagcggcctgaccctgaagggcttcctgttcctgcacaccctgttcatccagagaggcagacacgagaccacctggaccgtgctgagaagattcggctacgacgacgacctggacctgacccccgagtacctgttccccctgctgaagatcccccccgactgcaccaccgagctgaaccaccacgcctacctgttcctgcagagcaccttcgacaagcacgacctggacagagactgcgccctgagccccgacgagctgaaggacctgttcaaggtgttcccctacatcccctggggccccgacgtgaacaacaccgtgtgcaccaacgagagaggctggatcacctaccagggcttcctgagccagtggaccctgaccacctacctggacgtgcagagatgcctggagtacctgggctacctgggctacagcatcctgaccgagcaggagagccaggccagcgccgtgaccgtgaccagagacaagaagatcgacctgcagaagaagcagacccagagaaacgtgttcagatgcaacgtgatcggcgtgaagaactgcggcaagagcggcgtgctgcaggccctgctgggcagaaacctgatgagacagaagaagatcagagaggaccacaagagctactacgccatcaacaccgtgtacgtgtacggccaggagaagtacctgctgctgcacgacatcagcgagagcgagttcctgaccgaggccgagatcatctgcgacgtggtgtgcctggtgtacgacgtgagcaaccccaagagcttcgagtactgcgccagaatcttcaagcagcacttcatggacagcagaatcccctgcctgatcgtggccgccaagagcgacctgcacgaggtgaagcaggagtacagcatcagccccaccgacttctgcagaaagcacaagatgccccccccccaggccttcacctgcaacaccgccgacgcccccagcaaggacatcttcgtgaagctgaccaccatggccatgtaccccgaggaccactacagagacagactgagcagagacatgggccacaccgacagaatcgagaacctgagaaagatctgggtgttcctgaagaccgccctgcacgtgacccaggccgacctgaagagcagcaccttctggctgagagccagcttcggcgccaccgtgttcgccgtgctgggcttcgccatgtacaaggccctgctgaagcagagatag

SEQ ID NO: 96419 - DNA, 744 bp, synthetic construct
  misc_feature 1..744: note = Description of Artificial Sequence: Synthetic coding sequence
  source 1..744: mol_type = other DNA
atgaagaaggacgtgagaatcctgctggtgggcgagcccagagtgggcaagaccagcctgatcatgagcctggtgagcgaggagttccccgaggaggtgccccccagagccgaggagatcaccatccccgccgacgtgacccccgagagagtgcccacccacatcgtggactacagcgaggccgagcagagcgacgagcagctgcaccaggagatcagccaggccaacgtgatctgcatcgtgtacgccgtgaacaacaagcacagcatcgacaaggtgaccagcagatggatccccctgatcaacgagagaaccgacaaggacagcagactgcccctgatcctggtgggcaacaagagcgacctggtggagtacagcagcatggagaccatcctgcccatcatgaaccagtacaccgagatcgagacctgcgtggagtgcagcgccaagaacctgaagaacatcagcgagctgttctactacgcccagaaggccgtgctgcaccccaccggccccctgtactgccccgaggagaaggagatgaagcccgcctgcatcaaggccctgaccagaatcttcaagatcagcgaccaggacaacgacggcaccctgaacgacgccgagctgaacttcttccagagaatctgcttcaacacccccctggcccccagattcggcttcgagcaggtgctggtgctgctgttcctgcagttctgggccctgctgtgcaccaagcactactag

SEQ ID NO: 96420 - DNA, 1857 bp, synthetic construct
  misc_feature 1..1857: note = Description of Artificial Sequence: Synthetic coding sequence
  source 1..1857: mol_type = other DNA
atgagaagagacgtgagaatcctgctgctgggcgaggcccaggtgggcaagaccagcctgatcctgagcctggtgggcgaggagttccccgaggaggtgccccccagagccgaggagatcaccatccccgccgacgtgacccccgagaaggtgcccacccacatcgtggactacagcgaggccgagcagaccgacgaggagctgagagaggagatccacaaggccaacgtggtgtgcgtggtgtacgacgtgagcgaggaggccaccatcgagaagatcagaaccaagtggatccccctggtgaacggcggcaccacccagggccccagagtgcccatcatcctggtgggcaacaagagcgacctgagaagcggcagcagcatggaggccgtgctgcccatcatgagccagttccccgagatcgagacctgcgtggagtgcagcgccaagaacctgagaaacatcagcgagctgttctactacgcccagaaggccgtgctgcaccccaccgcccccctgtacgaccccgaggccaagcagctgagacccgcctgcgcccaggccctgaccagaatcttcagactgagcgaccaggacctggaccaggccctgagcgacgaggagctgaacgccttccagaagagctgcttcggccaccccctggccccccaggccctggaggacgtgaagaccgtggtgtgcagaaacgtggccggcggcgtgagagaggacagactgaccctggacggcttcctgttcctgaacaccctgttcatccagagaggcagacacgagaccacctggaccatcctgagaagattcggctacagcgacgccctggagctgaccgccgactacctgagccccctgatccacgtgccccccggctgcagcaccgagctgaaccacctgggctaccagttcgtgcagagagtgttcgagaagcacgaccaggacagagacggcgccctgagccccgtggagctgcagagcctgttcagcgtgttccccgccgccccctggggccccgagctgcccagaaccgtgagaaccgaggccggcagactgcccctgcacggctacctgtgccagtggaccctggtgacctacctggacgtgagaagctgcctgggccacctgggctacctgggctaccccaccctgtgcgagcaggaccaggcccacgccatcaccgtgaccagagagaagagactggaccaggagaagggccagacccagagaagcgtgctgctgtgcaaggtggtgggcgccagaggcgtgggcaagagcgccttcctgcaggccttcctgggcagaggcctgggccaccaggacaccagagagcagccccccggctacgccatcgacaccgtgcaggtgaacggccaggagaagtacctgatcctgtgcgaggtgggcaccgacggcctgctggccaccagcctggacgccacctgcgacgtggcctgcctgatgttcgacggcagcgaccccaagagcttcgcccactgcgccagcgtgtacaagcaccactacatggacggccagaccccctgcctgttcgtgagcagcaaggccgacctgcccgagggcgtggccgtgagcggccccagccccgccgagttctgcagaaagcacagactgcccgcccccgtgcccttcagctgcgccggccccgccgagcccagcaccaccatcttcacccagctggccaccatggccgccttcccccacctggtgcacgccgagctgcaccccagcagcttctggctgagaggcctgctgggcgtggtgggcgccgccgtggccgccgtgctgagcttcagcctgtacagagtgctggtgaagagccagtag

SEQ ID NO: 96421 - DNA, 777 bp, synthetic construct
  misc_feature 1..777: note = Description of Artificial Sequence: Synthetic coding sequence
  source 1..777: mol_type = other DNA
atgcccccccagcagggcgaccccgccttccccgacagatgcgaggccccccccgtgccccccagaagagagagaggcggcagaggcggcagaggccccggcgagcccggcggcagaggcagagccggcggcgccgagggcagaggcgtgaagtgcgtgctggtgggcgacggcgccgtgggcaagaccagcctggtggtgagctacaccaccaacggctaccccaccgagtacatccccaccgccttcgacaacttcagcgccgtggtgagcgtggacggcagacccgtgagactgcagctgtgcgacaccgccggccaggacgagttcgacaagctgagacccctgtgctacaccaacaccgacatcttcctgctgtgcttcagcgtggtgagccccagcagcttccagaacgtgagcgagaagtgggtgcccgagatcagatgccactgccccaaggcccccatcatcctggtgggcacccagagcgacctgagagaggacgtgaaggtgctgatcgagctggacaagtgcaaggagaagcccgtgcccgaggaggccgccaagctgtgcgccgaggagatcaaggccgccagctacatcgagtgcagcgccctgacccagaagaacctgaaggaggtgttcgacgccgccatcgtggccggcatccagtacagcgacacccagcagcagcccaagaagagcaagagcagaacccccgacaagatgaagaacctgagcaagagctggtggaagaagtactgctgcttcgtgtag

SEQ ID NO: 96422 - DNA, 1527 bp, synthetic construct
  misc_feature 1..1527: note = Description of Artificial Sequence: Synthetic coding sequence
  source 1..1527: mol_type = other DNA
atggaccacctgggcgccagcctgtggccccaggtgggcagcctgtgcctgctgctggccggcgccgcctgggcccccccccccaacctgcccgaccccaagttcgagagcaaggccgccctgctggccgccagaggccccgaggagctgctgtgcttcaccgagagactggaggacctggtgtgcttctgggaggaggccgccagcgccggcgtgggccccggcaactacagcttcagctaccagctggaggacgagccctggaagctgtgcagactgcaccaggcccccaccgccagaggcgccgtgagattctggtgcagcctgcccaccgccgacaccagcagcttcgtgcccctggagctgagagtgaccgccgccagcggcgcccccagataccacagagtgatccacatcaacgaggtggtgctgctggacgcccccgtgggcctggtggccagactggccgacgagagcggccacgtggtgctgagatggctgcccccccccgagacccccatgaccagccacatcagatacgaggtggacgtgagcgccggcaacggcgccggcagcgtgcagagagtggagatcctggagggcagaaccgagtgcgtgctgagcaacctgagaggcagaaccagatacaccttcgccgtgagagccagaatggccgagcccagcttcggcggcttctggagcgcctggagcgagcccgtgagcctgctgacccccagcgacctggaccccctgatcctgaccctgagcctgatcctggtggtgatcctggtgctgctgaccgtgctggccctgctgagccacagaagagccctgaagcagaagatctggcccggcatccccagccccgagagcgagttcgagggcctgttcaccacccacaagggcaacttccagctgtggctgtaccagaacgacggctgcctgtggtggagcccctgcacccccttcaccgaggacccccccgccagcctggaggtgctgagcgagagatgctggggcaccatgcaggccgtggagcccggcaccgacgacgagggccccctgctggagcccgtgggcagcgagcacgcccaggacacctacctggtgctggacaagtggctgctgcccagaaacccccccagcgaggacctgcccggccccggcggcagcgtggacatcgtggccatggacgagggcagcgaggccagcagctgcagcagcgccctggccagcaagcccagccccgagggcgccagcgccgccagcttcgagtacaccatcctggaccccagcagccagctgctgagaccctggaccctgtgccccgagctgccccccacccccccccacctgaagtacctgtacctggtggtgagcgacagcggcatcagcaccgactacagcagcggcgacagccagggcgcccagggcggcctgagcgacggcccctacagcaacccctacgagaacagcctgatccccgccgccgagcccctgccccccagctacgtggcctgcagctag

SEQ ID NO: 96423 - DNA, 2550 bp, synthetic construct
  misc_feature 1..2550: note = Description of Artificial Sequence: Synthetic coding sequence
  source 1..2550: mol_type = other DNA
atggccgccgccgcccccgccgccgccgccgccagcagcgaggcccccgccgccagcgccaccgccgagcccgaggccggcgaccaggacagcagagaggtgagagtgctgcagagcctgagaggcaagatctgcgaggccaagaacctgctgccctacctgggcccccacaagatgagagactgcttctgcaccatcaacctggaccaggaggaggtgtacagaacccaggtggtggagaagagcctgagccccttcttcagcgaggagttctacttcgagatccccagaaccttccagtacctgagcttctacgtgtacgacaagaacgtgctgcagagagacctgagaatcggcaaggtggccatcaagaaggaggacctgtgcaaccacagcggcaaggagacctggttcagcctgcagcccgtggacagcaacagcgaggtgcagggcaaggtgcacctggagctgaagctgaacgagctgatcaccgagaacggcaccgtgtgccagcagctggtggtgcacatcaaggcctgccacggcctgcccctgatcaacggccagagctgcgacccctacgccaccgtgagcctggtgggccccagcagaaacgaccagaagaagaccaaggtgaagaagaagaccagcaacccccagttcaacgagatcttctacttcgaggtgaccagaagcagcagctacaccagaaagagccagttccaggtggaggaggaggacatcgagaagctggagatcagaatcgacctgtggaacaacggcaacctggtgcaggacgtgttcctgggcgagatcaaggtgcccgtgaacgtgctgagaaccgacagcagccaccaggcctggtacctgctgcagcccagagacaacggcaacaagagcagcaagaccgacgacctgggcagcctgagactgaacatctgctacaccgaggactacgtgctgcccagcgagtactacggccccctgaagaccctgctgctgaagagccccgacgtgcagcccatcagcgccagcgccgcctacatcctgagcgagatctgcagagacaagaacgacgccgtgctgcccctggtgagactgctgctgcaccacgacaagctggtgcccttcgccaccgccgtggccgagctggacctgaaggacacccaggacgccaacaccatcttcagaggcaacagcctggccaccagatgcctggacgagatgatgaagatcgtgggcggccactacctgaaggtgaccctgaagcccatcctggacgagatctgcgacagcagcaagagctgcgagatcgaccccatcaagctgaaggagggcgacaacgtggagaacaacaaggagaacctgagatactacgtggacaagctgttcaacaccatcgtgaagagcagcatgagctgccccaccgtgatgtgcgacatcttctacagcctgagacagatggccacccagagattccccaacgacccccacgtgcagtacagcgccgtgagcagcttcgtgttcctgagattcttcgccgtggccgtggtgagcccccacaccttccacctgagaccccaccaccccgacgcccagaccatcagaaccctgaccctgatcagcaagaccatccagaccctgggcagctggggcagcctgagcaagagcaagagcagcttcaaggagaccttcatgtgcgagttcttcaagatgttccaggaggagggctacatcatcgccgtgaagaagttcctggacgagatcagcagcaccgagaccaaggagagcagcggcaccagcgagcccgtgcacctgaaggagggcgagatgtacaagagagcccagggcagaaccagaatcggcaagaagaacttcaagaagagatggttctgcctgaccagcagagagctgacctaccacaagcagcccggcaaggacgccatctacaccatccccgtgaagaacatcctggccgtggagaagctggaggagagcagcttcaacaagaagaacatgttccaggtgatccacaccgagaagcccctgtacgtgcaggccaacaactgcgtggaggccaacgagtggatcgacgtgctgtgcagagtgagcagatgcaaccagaacagactgagcttctaccaccccagcgtgtacctgaacggcaactggctgtgctgccaggagaccggcgagaacaccctgggctgcaagccctgcaccgccggcgtgcccgccgacatccagatcgacatcgacgaggacagagagaccgagagaatctacagcctgttcaccctgagcctgctgaagctgcagaagatggaggaggcctgcggcaccatcgccgtgtaccagggcccccagaaggagcccgacgactacagcaacttcgtgatcgaggacagcgtgaccaccttcaagaccatccagcagatcaagagcatcatcgagaagctggacgagccccacgagaagtacagaaagaagagaagcagcagcgccaagtacggcagcaaggagaaccccatcgtgggcaaggccagctag

SEQ ID NO: 96424 - DNA, 834 bp, synthetic construct
  misc_feature 1..834: note = Description of Artificial Sequence: Synthetic coding sequence
  source 1..834: mol_type = other DNA
atgatgaagatcgtgggcggccactacctgaaggtgaccctgaagcccatcctggacgagatctgcgacagcagcaagagctgcgagatcgaccccatcaagctgaaggagggcgacaacgtggagaacaacaaggagaacctgagatactacgtggacaagctgttcaacaccatcgtgaagagcagcatgagctgccccaccgtgatgtgcgacatcttctacagcctgagacagatggccacccagagattccccaacgacccccacgtgcagtacagcgccgtgagcagcttcgtgttcctgagattcttcgccgtggccgtggtgagcccccacaccttccacctgagaccccaccaccccgacgcccagaccatcagaaccctgaccctgatcagcaagaccatccagaccctgggcagctggggcagcctgagcaagagcaagagcagcttcaaggagaccttcatgtgcgagttcttcaagatgttccaggaggagggctacatcatcgccgtgaagaagttcctggacgagatcagcagcaccgagaccaaggagagcagcggcaccagcgagcccgtgcacctgaaggagggcgagatgtacaagagagcccagggcagaaccagaatcggcaagaagaacttcaagaagagatggttctgcctgaccagcagagagctgacctaccacaagcagcccggcagctgcgtgtacgccctgctgtggggcttcagctggttcagcgtgaaggtgagcctgcccctgatcgtgaccctggtgaaccccttcagcaacatcaccgtggtgtacggcttcagccactag

SEQ ID NO: 96425 - DNA, 2553 bp, synthetic construct
  misc_feature 1..2553: note = Description of Artificial Sequence: Synthetic coding sequence
  source 1..2553: mol_type = other DNA
atggccgccgccgcccccgccgccgccgccgccagcagcgaggcccccgccgccagcgccaccgccgagcccgaggccggcgaccaggacagcagagaggtgagagtgctgcagagcctgagaggcaagatctgcgaggccaagaacctgctgccctacctgggcccccacaagatgagagactgcttctgcaccatcaacctggaccaggaggaggtgtacagaacccaggtggtggagaagagcctgagccccttcttcagcgaggagttctacttcgagatccccagaaccttccagtacctgagcttctacgtgtacgacaagaacgtgctgcagagagacctgagaatcggcaaggtggccatcaagaaggaggacctgtgcaaccacagcggcaaggagacctggttcagcctgcagcccgtggacagcaacagcgaggtgcagggcaaggtgcacctggagctgaagctgaacgagctgatcaccgagaacggcaccgtgtgccagcagctggtggtgcacatcaaggcctgccacggcctgcccctgatcaacggccagagctgcgacccctacgccaccgtgagcctggtgggccccagcagaaacgaccagaagaagaccaaggtgaagaagaagaccagcaacccccagttcaacgagatcttctacttcgaggtgaccagaagcagcagctacaccagaaagagccagttccaggtggaggaggaggacatcgagaagctggagatcagaatcgacctgtggaacaacggcaacctggtgcaggacgtgttcctgggcgagatcaaggtgcccgtgaacgtgctgagaaccgacagcagccaccaggcctggtacctgctgcagcccagagacaacggcaacaagagcagcaagaccgacgacctgggcagcctgagactgaacatctgctacaccgaggactacgtgctgcccagcgagtactacggccccctgaagaccctgctgctgaagagccccgacgtgcagcccatcagcgccagcgccgcctacatcctgagcgagatctgcagagacaagaacgacgccgtgctgcccctggtgagactgctgctgcaccacgacaagctggtgcccttcgccaccgccgtggccgagctggacctgaaggacacccaggacgccaacaccatcttcagaggcaacagcctggccaccagatgcctggacgagatgatgaagatcgtgggcggccactacctgaaggtgaccctgaagcccatcctggacgagatctgcgacagcagcaagagctgcgagatcgaccccatcaagctgaaggagggcgacaacgtggagaacaacaaggagaacctgagatactacgtggacaagctgttcaacaccatcgtgaagagcagcatgagctgccccaccgtgatgtgcgacatcttctacagcctgagacagatggccacccagagattccccaacgacccccacgtgcagtacagcgccgtgagcagcttcgtgttcctgagattcttcgccgtggccgtggtgagcccccacaccttccacctgagaccccaccaccccgacgcccagaccatcagaaccctgaccctgatcagcaagaccatccagaccctgggcagctggggcagcctgagcaagagcaagagcagcttcaaggagaccttcatgtgcgagttcttcaagatgttccaggaggagggctacatcatcgccgtgaagaagttcctggacgagatcagcagcaccgagaccaaggagagcagcggcaccagcgagcccgtgcacctgaaggagggcgagatgtacaagagagcccagggcagaaccagaatcggcaagaagaacttcaagaagagatggttctgcctgaccagcagagagctgacctaccacaagcagcccggcagcaaggacgccatctacaccatccccgtgaagaacatcctggccgtggagaagctggaggagagcagcttcaacaagaagaacatgttccaggtgatccacaccgagaagcccctgtacgtgcaggccaacaactgcgtggaggccaacgagtggatcgacgtgctgtgcagagtgagcagatgcaaccagaacagactgagcttctaccaccccagcgtgtacctgaacggcaactggctgtgctgccaggagaccggcgagaacaccctgggctgcaagccctgcaccgccggcgtgcccgccgacatccagatcgacatcgacgaggacagagagaccgagagaatctacagcctgttcaccctgagcctgctgaagctgcagaagatggaggaggcctgcggcaccatcgccgtgtaccagggcccccagaaggagcccgacgactacagcaacttcgtgatcgaggacagcgtgaccaccttcaagaccatccagcagatcaagagcatcatcgagaagctggacgagccccacgagaagtacagaaagaagagaagcagcagcgccaagtacggcagcaaggagaaccccatcgtgggcaaggccagctag

SEQ ID NO: 96426 - DNA, 2505 bp, synthetic construct
  misc_feature 1..2505: note = Description of Artificial Sequence: Synthetic coding sequence
  source 1..2505: mol_type = other DNA
atggccgtggaggacgagggcctgagagtgttccagagcgtgaagatcaagatcggcgaggccaagaacctgcccagctaccccggccccagcaagatgagagactgctactgcaccgtgaacctggaccaggaggaggtgttcagaaccaagatcgtggagaagagcctgtgccccttctacggcgaggacttctactgcgagatccccagaagcttcagacacctgagcttctacatcttcgacagagacgtgttcagaagagacagcatcatcggcaaggtggccatccagaaggaggacctgcagaagtaccacaacagagacacctggttccagctgcagcacgtggacgccgacagcgaggtgcagggcaaggtgcacctggagctgagactgagcgaggtgatcaccgacaccggcgtggtgtgccacaagctggccaccagaatcgtggagtgccagggcctgcccatcgtgaacggccagtgcgacccctacgccaccgtgaccctggccggccccttcagaagcgaggccaagaagaccaaggtgaagagaaagaccaacaacccccagttcgacgaggtgttctacttcgaggtgaccagaccctgcagctacagcaagaagagccacttcgacttcgaggaggaggacgtggacaagctggagatcagagtggacctgtggaacgccagcaacctgaagttcggcgacgagttcctgggcgagctgagaatccccctgaaggtgctgagacagagcagcagctacgaggcctggtacttcctgcagcccagagacaacggcagcaagagcctgaagcccgacgacctgggcagcctgagactgaacgtggtgtacaccgaggaccacgtgttcagcagcgactactacagccccctgagagacctgctgctgaagagcgccgacgtggagcccgtgagcgccagcgccgcccacatcctgggcgaggtgtgcagagagaagcaggaggccgccgtgcccctggtgagactgttcctgcactacggcagagtggtgcccttcatcagcgccatcgccagcgccgaggtgaagagaacccaggaccccaacaccatcttcagaggcaacagcctggccagcaagtgcatcgacgagaccatgaagctggccggcatgcactacctgcacgtgaccctgaagcccgccatcgaggagatctgccagagccacaagccctgcgagatcgaccccgtgaagctgaaggacggcgagaacctggagaacaacatggagaacctgagacagtacgtggacagagtgttccacgccatcaccgagagcggcgtgagctgccccaccgtgatgtgcgacatcttcttcagcctgagagaggccgccgccaagagattccaggacgaccccgacgtgagatacaccgccgtgagcagcttcatcttcctgagattcttcgcccccgccatcctgagccccaacctgttccagctgaccccccaccacaccgacccccagaccagcagaaccctgaccctgatcagcaagaccgtgcagaccctgggcagcctgagcaagagcaagagcgccagcttcaaggagagctacatggccaccttctacgagttcttcaacgagcagaagtacgccgacgccgtgaagaacttcctggacctgatcagcagcagcggcagaagagaccccaagagcgtggagcagcccatcgtgctgaaggagggcttcatgatcaagagagcccagggcagaaagagattcggcatgaagaacttcaagaagagatggttcagactgaccaaccacgagttcacctaccacaagagcaagggcgaccagcccctgtacagcatccccatcgagaacatcctggccgtggagaagctggaggaggagagcttcaagatgaagaacatgttccaggtgatccagcccgagagagccctgtacatccaggccaacaactgcgtggaggccaaggactggatcgacatcctgaccaaggtgagccagtgcaaccagaagagactgaccgtgtaccaccccagcgcctacctgagcggccactggctgtgctgcagagcccccagcgacagcgcccccggctgcagcccctgcaccggcggcctgcccgccaacatccagctggacatcgacggcgacagagagaccgagagaatctacagcctgttcaacctgtacatgagcaagctggagaagatgcaggaggcctgcggcagcaagagcgtgtacgacggccccgagcaggaggagtacagcaccttcgtgatcgacgacccccaggagacctacaagaccctgaagcaggtgatcgccggcgtgggcgccctggagcaggagcacgcccagtacaagagagacaagttcaagaagaccaagtacggcagccaggagcaccccatcggcgacaagagcttccagaactacatcagacagcagagcgagaccagcacccacagcatctag

SEQ ID NO: 96427 - DNA, 2409 bp, synthetic construct
  misc_feature 1..2409: note = Description of Artificial Sequence: Synthetic coding sequence
  source 1..2409: mol_type = other DNA
atgagagactgctactgcaccgtgaacctggaccaggaggaggtgttcagaaccaagatcgtggagaagagcctgtgccccttctacggcgaggacttctactgcgagatccccagaagcttcagacacctgagcttctacatcttcgacagagacgtgttcagaagagacagcatcatcggcaaggtggccatccagaaggaggacctgcagaagtaccacaacagagacacctggttccagctgcagcacgtggacgccgacagcgaggtgcagggcaaggtgcacctggagctgagactgagcgaggtgatcaccgacaccggcgtggtgtgccacaagctggccaccagaatcgtggagtgccagggcctgcccatcgtgaacggccagtgcgacccctacgccaccgtgaccctggccggccccttcagaagcgaggccaagaagaccaaggtgaagagaaagaccaacaacccccagttcgacgaggtgttctacttcgaggtgaccagaccctgcagctacagcaagaagagccacttcgacttcgaggaggaggacgtggacaagctggagatcagagtggacctgtggaacgccagcaacctgaagttcggcgacgagttcctgggcgagctgagaatccccctgaaggtgctgagacagagcagcagctacgaggcctggtacttcctgcagcccagagacaacggcagcaagagcctgaagcccgacgacctgggcagcctgagactgaacgtggtgtacaccgaggaccacgtgttcagcagcgactactacagccccctgagagacctgctgctgaagagcgccgacgtggagcccgtgagcgccagcgccgcccacatcctgggcgaggtgtgcagagagaagcaggaggccgccgtgcccctggtgagactgttcctgcactacggcagagtggtgcccttcatcagcgccatcgccagcgccgaggtgaagagaacccaggaccccaacaccatcttcagaggcaacagcctggccagcaagtgcatcgacgagaccatgaagctggccggcatgcactacctgcacgtgaccctgaagcccgccatcgaggagatctgccagagccacaagccctgcgagatcgaccccgtgaagctgaaggacggcgagaacctggagaacaacatggagaacctgagacagtacgtggacagagtgttccacgccatcaccgagagcggcgtgagctgccccaccgtgatgtgcgacatcttcttcagcctgagagaggccgccgccaagagattccaggacgaccccgacgtgagatacaccgccgtgagcagcttcatcttcctgagattcttcgcccccgccatcctgagccccaacctgttccagctgaccccccaccacaccgacccccagaccagcagaaccctgaccctgatcagcaagaccgtgcagaccctgggcagcctgagcaagagcaagagcgccagcttcaaggagagctacatggccaccttctacgagttcttcaacgagcagaagtacgccgacgccgtgaagaacttcctggacctgatcagcagcagcggcagaagagaccccaagagcgtggagcagcccatcgtgctgaaggagggcttcatgatcaagagagcccagggcagaaagagattcggcatgaagaacttcaagaagagatggttcagactgaccaaccacgagttcacctaccacaagagcaagggcgaccagcccctgtacagcatccccatcgagaacatcctggccgtggagaagctggaggaggagagcttcaagatgaagaacatgttccaggtgatccagcccgagagagccctgtacatccaggccaacaactgcgtggaggccaaggactggatcgacatcctgaccaaggtgagccagtgcaaccagaagagactgaccgtgtaccaccccagcgcctacctgagcggccactggctgtgctgcagagcccccagcgacagcgcccccggctgcagcccctgcaccggcggcctgcccgccaacatccagctggacatcgacggcgacagagagaccgagagaatctacagcctgttcaacctgtacatgagcaagctggagaagatgcaggaggcctgcggcagcaagagcgtgtacgacggccccgagcaggaggagtacagcaccttcgtgatcgacgacccccaggagacctacaagaccctgaagcaggtgatcgccggcgtgggcgccctggagcaggagcacgcccagtacaagagagacaagttcaagaagaccaagtacggcagccaggagcaccccatcggcgacaagagcttccagaactacatcagacagcagagcgagaccagcacccacagcatctag

SEQ ID NO: 96428 - DNA, 399 bp, synthetic construct
  misc_feature 1..399: note = Description of Artificial Sequence: Synthetic coding sequence
  source 1..399: mol_type = other DNA
atggccgtggaggacgagggcctgagagtgttccagagcgtgaagatcaagatcggcgaggccaagaacctgcccagctaccccggccccagcaagatgagagactgctactgcaccgtgaacctggaccaggaggaggtgttcagaaccaagatcgtggagaagagcctgtgccccttctacggcgaggacttctactgcgagatccccagaagcttcagacacctgagcttctacatcttcgacagagacgtgttcagaagagacagcatcatcggccagagcgcccccggcgccgccgccgagagaggccaccacagacactggggcagactgccccaggccagacacacccacagaagagtgcccggccccccccacagagagtgggccatgtag

SEQ ID NO: 96429 - DNA, 2412 bp, synthetic construct
  misc_feature 1..2412: note = Description of Artificial Sequence: Synthetic coding sequence
  source 1..2412: mol_type = other DNA
atggccaagagaagcagcctgtacatcagaatcgtggagggcaagaacctgcccgccaaggacatcaccggcagcagcgacccctactgcatcgtgaaggtggacaacgagcccatcatcagaaccgccaccgtgtggaagaccctgtgccccttctggggcgaggagtaccaggtgcacctgccccccaccttccacgccgtggccttctacgtgatggacgaggacgccctgagcagagacgacgtgatcggcaaggtgtgcctgaccagagacaccatcgccagccaccccaagggcttcagcggctgggcccacctgaccgaggtggaccccgacgaggaggtgcagggcgagatccacctgagactggaggtgtggcccggcgccagagcctgcagactgagatgcagcgtgctggaggccagagacctggcccccaaggacagaaacggcaccagcgaccccttcgtgagagtgagatacaagggcagaaccagagagaccagcatcgtgaagaagagctgctaccccagatggaacgagaccttcgagttcgagctgcaggagggcgccatggaggccctgtgcgtggaggcctgggactgggacctggtgagcagaaacgacttcctgggcaaggtggtgatcgacgtgcagagactgagagtggtgcagcaggaggagggctggttcagactgcagcccgaccagagcaagagcagaagacacgacgagggcaacctgggcagcctgcagctggaggtgagactgagagacgagaccgtgctgcccagcagctactaccagcccctggtgcacctgctgtgccacgaggtgaagctgggcatgcagggccccggccagctgatccccctgatcgaggagaccaccagcaccgagtgcagacaggacgtggccaccaacctgctgaagctgttcctgggccagggcctggccaaggacttcctggacctgctgttccagctggagctgagcagaaccagcgagaccaacaccctgttcagaagcaacagcctggccagcaagagcatggagagcttcctgaaggtggccggcatgcagtacctgcacggcgtgctgggccccatcatcaacaaggtgttcgaggagaagaagtacgtggagctggaccccagcaaggtggaggtgaaggacgtgggctgcagcggcctgcacagaccccagaccgaggccgaggtgctggagcagagcgcccagaccctgagagcccacctgggcgccctgctgagcgccctgagcagaagcgtgagagcctgccccgccgtggtgagagccaccttcagacagctgttcagaagagtgagagagagattccccggcgcccagcacgagaacgtgcccttcatcgccgtgaccagcttcctgtgcctgagattcttcagccccgccatcatgagccccaagctgttccacctgagagagagacacgccgacgccagaaccagcagaaccctgctgctgctggccaaggccgtgcagaacgtgggcaacatggacacccccgccagcagagccaaggaggcctggatggagcccctgcagcccaccgtgagacagggcgtggcccagctgaaggacttcatcaccaagctggtggacatcgaggagaaggacgagctggacctgcagagaaccctgagcctgcaggccccccccgtgaaggagggccccctgttcatccacagaaccaagggcaagggccccctgatgagcagcagcttcaagaagctgtacttcagcctgaccaccgaggccctgagcttcgccaagacccccagcagcaagaagagcgccctgatcaagctggccaacatcagagccgccgagaaggtggaggagaagagcttcggcggcagccacgtgatgcaggtgatctacaccgacgacgccggcagaccccagaccgcctacctgcagtgcaagtgcgtgaacgagctgaaccagtggctgagcgccctgagaaaggtgagcatcaacaacaccggcctgctgggcagctaccaccccggcgtgttcagaggcgacaagtggagctgctgccaccagaaggagaagaccggccagggctgcgacaagaccagaagcagagtgaccctgcaggagtggaacgaccccctggaccacgacctggaggcccagctgatctacagacacctgctgggcgtggaggccatgctgtgggagagacacagagagctgagcggcggcgccgaggccggcaccgtgcccaccagccccggcaaggtgcccgaggacagcctggccagactgctgagagtgctgcaggacctgagagaggcccacagcagcagccccgccggcagcccccccagcgagcccaactgcctgctggagctgcagacctag

SEQ ID NO: 96430 - DNA, 2274 bp, synthetic construct
  misc_feature 1..2274: note = Description of Artificial Sequence: Synthetic coding sequence
  source 1..2274: mol_type = other DNA
atggccaagagaagcagcctgtacatcagaatcgtggagggcaagaacctgcccgccaaggacatcaccggcagcagcgacccctactgcatcgtgaaggtggacaacgagcccatcatcagaaccgccaccgtgtggaagaccctgtgccccttctggggcgaggagtaccaggtgcacctgccccccaccttccacgccgtggccttctacgtgatggacgaggacgccctgagcagagacgacgtgatcggcaaggtgtgcctgaccagagacaccatcgccagccaccccaagggcttcagcggctgggcccacctgaccgaggtggaccccgacgaggaggtgcagggcgagatccacctgagactggaggtgtggcccggcgccagagcctgcagactgagatgcagcgtgctggaggccagagacctggcccccaaggacagaaacggcaccagcgaccccttcgtgagagtgagatacaagggcagaaccagagagaccagcatcgtgaagaagagctgctaccccagatggaacgagaccttcgagttcgagctgcaggagggcgccatggaggccctgtgcgtggaggcctgggactgggacctggtgagcagaaacgacttcctgggcaaggtggtgatcgacgtgcagagactgagagtggtgcagcaggaggagggctggttcagactgcagcccgaccagagcaagagcagaagacacgacgagggcaacctgggcagcctgcagctggaggtgagactgagagacgagaccgtgctgcccagcagctactaccagcccctggtgcacctgctgtgccacgaggtgaagctgggcatgcagggccccggccagctgatccccctgatcgaggagaccaccagcaccgagtgcagacaggacgtggccaccaacctgctgaagctgttcctgggccagggcctggccaaggacttcctggacctgctgttccagctggagctgagcagaaccagcgagaccaacaccctgttcagaagcaacagcctggccagcaagagcatggagagcttcctgaaggtggccggcatgcagtacctgcacggcgtgctgggccccatcatcaacaaggtgttcgaggagaagaagtacgtggagctggaccccagcaaggtggaggtgaaggacgtgggctgcagcggcctgcacagaccccagaccgaggccgaggtgctggagcagagcgcccagaccctgagagcccacctgggcgccctgctgagcgccctgagcagaagcgtgagagcctgccccgccgtggtgagagccaccttcagacagctgttcagaagagtgagagagagattccccggcgcccagcacgagaacgtgcccttcatcgccgtgaccagcttcctgtgcctgagattcttcagccccgccatcatgagccccaagctgttccacctgagagagagacacgccgacgccagaaccagcagaaccctgctgctgctggccaaggccgtgcagaacgtgggcaacatggacacccccgccagcagagccaaggaggcctggatggagcccctgcagcccaccgtgagacagggcgtggcccagctgaaggacttcatcaccaagctggtggacatcgaggagaaggacgagctggacctgcagagaaccctgagcctgcaggccccccccgtgaaggagggccccctgttcatccacagaaccaagggcaagggccccctgatgagcagcagcttcaagaagctgtacttcagcctgaccaccgaggccctgagcttcgccaagacccccagcagcaagtgcgtgaacgagctgaaccagtggctgagcgccctgagaaaggtgagcatcaacaacaccggcctgctgggcagctaccaccccggcgtgttcagaggcgacaagtggagctgctgccaccagaaggagaagaccggccagggctgcgacaagaccagaagcagagtgaccctgcaggagtggaacgaccccctggaccacgacctggaggcccagctgatctacagacacctgctgggcgtggaggccatgctgtgggagagacacagagagctgagcggcggcgccgaggccggcaccgtgcccaccagccccggcaaggtgcccgaggacagcctggccagactgctgagagtgctgcaggacctgagagaggcccacagcagcagccccgccggcagcccccccagcgagcccaactgcctgctggagctgcagacctag

SEQ ID NO: 96431 - DNA, 2196 bp, synthetic construct
  misc_feature 1..2196: note = Description of Artificial Sequence: Synthetic coding sequence
  source 1..2196: mol_type = other DNA
atggacgaggacgccctgagcagagacgacgtgatcggcaaggtgtgcctgaccagagacaccatcgccagccaccccaagggcttcagcggctgggcccacctgaccgaggtggaccccgacgaggaggtgcagggcgagatccacctgagactggaggtgtggcccggcgccagagcctgcagactgagatgcagcgtgctggaggccagagacctggcccccaaggacagaaacggcaccagcgaccccttcgtgagagtgagatacaagggcagaaccagagagaccagcatcgtgaagaagagctgctaccccagatggaacgagaccttcgagttcgagctgcaggagggcgccatggaggccctgtgcgtggaggcctgggactgggacctggtgagcagaaacgacttcctgggcaaggtggtgatcgacgtgcagagactgagagtggtgcagcaggaggagggctggttcagactgcagcccgaccagagcaagagcagaagacacgacgagggcaacctgggcagcctgcagctggaggtgagactgagagacgagaccgtgctgcccagcagctactaccagcccctggtgcacctgctgtgccacgaggtgaagctgggcatgcagggccccggccagctgatccccctgatcgaggagaccaccagcaccgagtgcagacaggacgtggccaccaacctgctgaagctgttcctgggccagggcctggccaaggacttcctggacctgctgttccagctggagctgagcagaaccagcgagaccaacaccctgttcagaagcaacagcctggccagcaagagcatggagagcttcctgaaggtggccggcatgcagtacctgcacggcgtgctgggccccatcatcaacaaggtgttcgaggagaagaagtacgtggagctggaccccagcaaggtggaggtgaaggacgtgggctgcagcggcctgcacagaccccagaccgaggccgaggtgctggagcagagcgcccagaccctgagagcccacctgggcgccctgctgagcgccctgagcagaagcgtgagagcctgccccgccgtggtgagagccaccttcagacagctgttcagaagagtgagagagagattccccggcgcccagcacgagaacgtgcccttcatcgccgtgaccagcttcctgtgcctgagattcttcagccccgccatcatgagccccaagctgttccacctgagagagagacacgccgacgccagaaccagcagaaccctgctgctgctggccaaggccgtgcagaacgtgggcaacatggacacccccgccagcagagccaaggaggcctggatggagcccctgcagcccaccgtgagacagggcgtggcccagctgaaggacttcatcaccaagctggtggacatcgaggagaaggacgagctggacctgcagagaaccctgagcctgcaggccccccccgtgaaggagggccccctgttcatccacagaaccaagggcaagggccccctgatgagcagcagcttcaagaagctgtacttcagcctgaccaccgaggccctgagcttcgccaagacccccagcagcaagaagagcgccctgatcaagctggccaacatcagagccgccgagaaggtggaggagaagagcttcggcggcagccacgtgatgcaggtgatctacaccgacgacgccggcagaccccagaccgcctacctgcagtgcaagtgcgtgaacgagctgaaccagtggctgagcgccctgagaaaggtgagcatcaacaacaccggcctgctgggcagctaccaccccggcgtgttcagaggcgacaagtggagctgctgccaccagaaggagaagaccggccagggctgcgacaagaccagaagcagagtgaccctgcaggagtggaacgaccccctggaccacgacctggaggcccagctgatctacagacacctgctgggcgtggaggccatgctgtgggagagacacagagagctgagcggcggcgccgaggccggcaccgtgcccaccagccccggcaaggtgcccgaggacagcctggccagactgctgagagtgctgcaggacctgagagaggcccacagcagcagccccgccggcagcccccccagcgagcccaactgcctgctggagctgcagacctag

SEQ ID NO: 96432 - DNA, 2415 bp, synthetic construct
  misc_feature 1..2415: note = Description of Artificial Sequence: Synthetic coding sequence
  source 1..2415: mol_type = other DNA
atggccaagagcagcagcctgaacgtgagagtggtggagggcagagccctgcccgccaaggacgtgagcggcagcagcgacccctactgcctggtgaaggtggacgacgaggtggtggccagaaccgccaccgtgtggagaagcctgggccccttctggggcgaggagtacaccgtgcacctgcccctggacttccaccagctggccttctacgtgctggacgaggacaccgtgggccacgacgacatcatcggcaagatcagcctgagcagagaggccatcaccgccgaccccagaggcatcgacagctggatcaacctgagcagagtggaccccgacgccgaggtgcagggcgagatctgcctgagcgtgcagatgctggaggacggccagggcagatgcctgagatgccacgtgctgcaggccagagacctggcccccagagacatcagcggcaccagcgaccccttcgccagagtgttctggggcagccagagcctggagaccagcaccatcaagaagaccagattcccccactgggacgaggtgctggagctgagagagatgcccggcgcccccagccccctgagagtggagctgtgggactgggacatggtgggcaagaacgacttcctgggcatggtggagttcagccccaagaccctgcagcagaagccccccaagggctggttcagactgctgcccttccccagagccgaggaggacagcggcggcaacctgggcgccctgagagtgaaggtgagactgatcgaggacagagtgctgcccagccagtgctaccagcccctgatggagctgctgatggagagcgtgcagggccccgccgaggaggacaccgccagccccctggccctgctggaggagctgaccctgggcgactgcagacaggacctggccaccaagctggtgaagctgttcctgggcagaggcctggccggcagattcctggactacctgaccagaagagaggtggccagaaccatggaccccaacaccctgttcagaagcaacagcctggccagcaagagcatggagcagttcatgaagctggtgggcatgccctacctgcacgaggtgctgaagcccgtgatcagcagagtgttcgaggagaagaagtacatggagctggacccctgcaagatggacctgggcagaaccagaagaatcagcttcaagggcgccctgagcgaggagcagatgagagagaccagcctgggcctgctgaccggctacctgggccccatcgtggacgccatcgtgggcagcgtgggcagatgcccccccgccatgagactggccttcaagcagctgcacagaagagtggaggagagattcccccaggccgagcaccaggacgtgaagtacctggccatcagcggcttcctgttcctgagattcttcgcccccgccatcctgacccccaagctgttcgacctgagagaccagcacgccgacccccagaccagcagaagcctgctgctgctggccaaggccgtgcagagcatcggcaacctgggccagcagctgggccagggcaaggagctgtggatggcccccctgcaccccttcctgctgcagtgcgtgagcagagtgagagacttcctggacagactggtggacgtggacggcgacgaggccggcgtgcccgccagagccctgttcccccccagcgccatcgtgagagagggctacctgctgaagagaaaggaggagcccgccggcctggccaccagattcgccttcaagaagagatacgtgtggctgagcggcgagaccctgagcttcagcaagagccccgagtggcagatgtgccacagcatccccgtgagccacatcagagccgtggagagagtggacgagggcgccttccagctgccccacgtgatgcaggtggtgacccaggacggcaccggcgccctgcacaccacctacctgcagtgcaagaacgtgaacgagctgaaccagtggctgagcgccctgagaaaggccagcgcccccaaccccaacaagctggccgcctgccaccccggcgccttcagaagcgccagatggacctgctgcctgcaggccgagagaagcgccgccggctgcagcagaacccacagcgccgtgaccctgggcgactggagcgaccccctggaccccgacgccgaggcccagaccgtgtacagacagctgctgctgggcagagaccagctgagactgaagctgctggaggacagcaacatggacaccaccctggaggccgacaccggcgcctgccccgaggtgctggccagacagagagccgccaccgccagactgctggaggtgctggccgacctggacagagcccacgaggagttccagcagcaggagagaggcaaggccgccctgggccccctgggcccctag

SEQ ID NO: 96433 - DNA, 2331 bp, synthetic construct
  misc_feature 1..2331: note = Description of Artificial Sequence: Synthetic coding sequence
  source 1..2331: mol_type = other DNA
atggccaagagcagcagcctgaacgtgagagtggtggagggcagagccctgcccgccaaggacgtgagcggcagcagcgacccctactgcctggtgaaggtggacgacgaggtggtggccagaaccgccaccgtgtggagaagcctgggccccttctggggcgaggagtacaccgtgcacctgcccctggacttccaccagctggccttctacgtgctggacgaggacaccgtgggccacgacgacatcatcggcaagatcagcctgagcagagaggccatcaccgccgaccccagaggcatcgacagctggatcaacctgagcagagtggaccccgacgccgaggtgcagggcgagatctgcctgagcgtgcagatgctggaggacggccagggcagatgcctgagatgccacgtgctgcaggccagagacctggcccccagagacatcagcggcaccagcgaccccttcgccagagtgttctggggcagccagagcctggagaccagcaccatcaagaagaccagattcccccactgggacgaggtgctggagctgagagagatgcccggcgcccccagccccctgagagtggagctgtgggactgggacatggtgggcaagaacgacttcctgggcatggtggagttcagccccaagaccctgcagcagaagccccccaagggctggttcagactgctgcccttccccagagccgaggaggacagcggcggcaacctgggcgccctgagagtgaaggtgagactgatcgaggacagagtgctgcccagccagtgctaccagcccctgatggagctgctgatggagagcgtgcagggccccgccgaggaggacaccgccagccccctggccctgctggaggagctgaccctgggcgactgcagacaggacctggccaccaagctggtgaagctgttcctgggcagaggcctggccggcagattcctggactacctgaccagaagagaggtggccagaaccatggaccccaacaccctgttcagaagcaacagcctggccagcaagagcatggagcagttcatgaagctggtgggcatgccctacctgcacgaggtgctgaagcccgtgatcagcagagtgttcgaggagaagaagtacatggagctggacccctgcaagatggacctgggcagaaccagaagaatcagcttcaagggcgccctgagcgaggagcagatgagagagaccagcctgggcctgctgaccggctacctgggccccatcgtggacgccatcgtgggcagcgtgggcagatgcccccccgccatgagactggccttcaagcagctgcacagaagagtggaggagagattcccccaggccgagcaccaggacgtgaagtacctggccatcagcggcttcctgttcctgagattcttcgcccccgccatcctgacccccaagctgttcgacctgagagaccagcacgccgacccccagaccagcagaagcctgctgctgctggccaaggccgtgcagagcatcggcaacctgggccagcagctgggccagggcaaggagctgtggatggcccccctgcaccccttcctgctgcagtgcgtgagcagagtgagagacttcctggacagactggtggacgtggacggcgacgaggccggcgtgcccgccagagccctgttcccccccagcgccatcgtgagagagggctacctgctgaagagaaaggaggagcccgccggcctggccaccagattcgccttcaagaagagatacgtgtggctgagcggcgagaccctgagcttcagcaagagccccgagtggcaggtggtgacccaggacggcaccggcgccctgcacaccacctacctgcagtgcaagaacgtgaacgagctgaaccagtggctgagcgccctgagaaaggccagcgcccccaaccccaacaagctggccgcctgccaccccggcgccttcagaagcgccagatggacctgctgcctgcaggccgagagaagcgccgccggctgcagcagaacccacagcgccgtgaccctgggcgactggagcgaccccctggaccccgacgccgaggcccagaccgtgtacagacagctgctgctgggcagagaccagctgagactgaagctgctggaggacagcaacatggacaccaccctggaggccgacaccggcgcctgccccgaggtgctggccagacagagagccgccaccgccagactgctggaggtgctggccgacctggacagagcccacgaggagttccagcagcaggagagaggcaaggccgccctgggccccctgggcccctag

SEQ ID NO: 96434 - DNA, 2421 bp, synthetic construct
  misc_feature 1..2421: note = Description of Artificial Sequence: Synthetic coding sequence
  source 1..2421: mol_type = other DNA
atggccaagagcagcagcctgaacgtgagagtggtggagggcagagccctgcccgccaaggacgtgagcggcagcagcgacccctactgcctggtgaaggtggacgacgaggtggtggccagaaccgccaccgtgtggagaagcctgggccccttctggggcgaggagtacaccgtgcacctgcccctggacttccaccagctggccttctacgtgctggacgaggacaccgtgggccacgacgacatcatcggcaagatcagcctgagcagagaggccatcaccgccgaccccagaggcatcgacagctggatcaacctgagcagagtggaccccgacgccgaggtgcagggcgagatctgcctgagcgtgcagatgctggaggacggccagggcagatgcctgagatgccacgtgctgcaggccagagacctggcccccagagacatcagcggcaccagcgaccccttcgccagagtgttctggggcagccagagcctggagaccagcaccatcaagaagaccagattcccccactgggacgaggtgctggagctgagagagatgcccggcgcccccagccccctgagagtggagctgtgggactgggacatggtgggcaagaacgacttcctgggcatggtggagttcagccccaagaccctgcagcagaagccccccaagggctggttcagactgctgcccttccccagagccgaggaggacagcggcggcaacctgggcgccctgagagtgaaggtgagactgatcgaggacagagtgctgcccagccagtgctaccagcccctgatggagctgctgatggagagcgtgcagggccccgccgaggaggacaccgccagccccctggccctgctggaggagctgaccctgggcgactgcagacaggacctggccaccaagctggtgaagctgttcctgggcagaggcctggccggcagattcctggactacctgaccagaagagaggtggccagaaccatggaccccaacaccctgttcagaagcaacagcctggccagcaagagcatggagcagttcatgaagctggtgggcatgccctacctgcacgaggtgctgaagcccgtgatcagcagagtgttcgaggagaagaagtacatggagctggacccctgcaagatggacctgggcagaaccagaagaatcagcttcaagggcgccctgagcgaggagcagatgagagagaccagcctgggcctgctgaccggctacctgggccccatcgtggacgccatcgtgggcagcgtgggcagatgcccccccgccatgagactggccttcaagcagctgcacagaagagtggaggagagattcccccaggccgagcaccagcaggacgtgaagtacctggccatcagcggcttcctgttcctgagattcttcgcccccgccatcctgacccccaagctgttcgacctgagagaccagcacgccgacccccagaccagcagaagcctgctgctgctggccaaggccgtgcagagcatcggcaacctgggccagcagctgggccagggcaaggagctgtggatggcccccctgcaccccttcctgctgcagtgcgtgagcagagtgagagacttcctggacagactggtggacgtggacggcgacgaggaggccggcgtgcccgccagagccctgttcccccccagcgccatcgtgagagagggctacctgctgaagagaaaggaggagcccgccggcctggccaccagattcgccttcaagaagagatacgtgtggctgagcggcgagaccctgagcttcagcaagagccccgagtggcagatgtgccacagcatccccgtgagccacatcagagccgtggagagagtggacgagggcgccttccagctgccccacgtgatgcaggtggtgacccaggacggcaccggcgccctgcacaccacctacctgcagtgcaagaacgtgaacgagctgaaccagtggctgagcgccctgagaaaggccagcgcccccaaccccaacaagctggccgcctgccaccccggcgccttcagaagcgccagatggacctgctgcctgcaggccgagagaagcgccgccggctgcagcagaacccacagcgccgtgaccctgggcgactggagcgaccccctggaccccgacgccgaggcccagaccgtgtacagacagctgctgctgggcagagaccagctgagactgaagctgctggaggacagcaacatggacaccaccctggaggccgacaccggcgcctgccccgaggtgctggccagacagagagccgccaccgccagactgctggaggtgctggccgacctggacagagcccacgaggagttccagcagcaggagagaggcaaggccgccctgggccccctgggcccctag

SEQ ID NO: 96435 - DNA, 3714 bp, synthetic construct
  misc_feature 1..3714: note = Description of Artificial Sequence: Synthetic coding sequence
  source 1..3714: mol_type = other DNA
atgcagaagagcgtgagatacaacgagggccacgccctgtacctggccttcctggccagaaaggagggcaccaagagaggcttcctgagcaagaagaccgccgaggccagcagatggcacgagaagtggttcgccctgtaccagaacgtgctgttctacttcgagggcgagcagagctgcagacccgccggcatgtacctgctggagggctgcagctgcgagagaacccccgccccccccagagccggcgccggccagggcggcgtgagagacgccctggacaagcagtactacttcaccgtgctgttcggccacgagggccagaagcccctggagctgagatgcgaggaggagcaggacggcaaggagtggatggaggccatccaccaggccagctacgccgacatcctgatcgagagagaggtgctgatgcagaagtacatccacctggtgcagatcgtggagaccgagaagatcgccgccaaccagctgagacaccagctggaggaccaggacaccgagatcgagagactgaagagcgagatcatcgccctgaacaagaccaaggagagaatgagaccctaccagagcaaccaggaggacgaggaccccgacatcaagaagatcaagaaggtgcagagcttcatgagaggctggctgtgcagaagaaagtggaagaccatcgtgcaggactacatctgcagcccccacgccgagagcatgagaaagagaaaccagatcgtgttcaccatggtggaggccgagagcgagtacgtgcaccagctgtacatcctggtgaacggcttcctgagacccctgagaatggccgccagcagcaagaagccccccatcagccacgacgacgtgagcagcatcttcctgaacagcgagaccatcatgttcctgcacgagatcttccaccagggcctgaaggccagaatcgccaactggcccaccctgatcctggccgacctgttcgacatcctgctgcccatgctgaacatctaccaggagttcgtgagaaaccaccagtacagcctgcaggtgctggccaactgcaagcagaacagagacttcgacaagctgctgaagcagtacgaggccaaccccgcctgcgagggcagaatgctggagaccttcctgacctaccccatgttccagatccccagatacatcatcaccctgcacgagctgctggcccacaccccccacgagcacgtggagagaaagagcctggagttcgccaagagcaagctggaggagctgagcagagtgatgcacgacgaggtgagcgacaccgagaacatcagaaagaacctggccatcgagagaatgatcgtggagggctgcgacatcctgctggacaccagccagaccttcatcagacagggcagcctgatccaggtgcccagcgtggagagaggcaagctgagcaaggtgagactgggcagcctgagcctgaagaaggagggcgagagacagtgcttcctgttcaccaagcacttcctgatctgcaccagaagcagcggcggcaagctgcacctgctgaagaccggcggcgtgctgagcctgatcgactgcaccctgatcgaggagcccgacgccagcgacgacgacagcaagggcagcggccaggtgttcggccacctggacttcaagatcgtggtggagccccccgacgccgccgccttcaccgtggtgctgctggcccccagcagacaggagaaggccgcctggatgagcgacatcagccagtgcgtggacaacatcagatgcaacggcctgatgaccatcgtgttcgaggagaacagcaaggtgaccgtgccccacatgatcaagagcgacgccagactgcacaaggacgacaccgacatctgcttcagcaagaccctgaacagctgcaaggtgccccagatcagatacgccagcgtggagagactgctggagagactgaccgacctgagattcctgagcatcgacttcctgaacaccttcctgcacacctacagaatcttcaccaccgccgccgtggtgctgggcaagctgagcgacatctacaagagacccttcaccagcatccccgtgagaagcctggagctgttcttcgccaccagccagaacaacagaggcgagcacctggtggacggcaagagccccagactgtgcagaaagttcagcagccccccccccctggccgtgagcagaaccagcagccccgtgagagccagaaagctgagcctgaccagccccctgaacagcaagatcggcgccctggacctgaccaccagcagcagccccaccaccaccacccagagccccgccgccagcccccccccccacaccggccagatccccctggacctgagcagaggcctgagcagccccgagcagagccccggcaccgtggaggagaacgtggacaaccccagagtggacctgtgcaacaagctgaagagaagcatccagaaggccgtgctggagagcgcccccgccgacagagccggcgtggagagcagccccgccgccgacaccaccgagctgagcccctgcagaagccccagcacccccagacacctgagatacagacagcccggcggccagaccgccgacaacgcccactgcagcgtgagccccgccagcgccttcgccatcgccaccgccgccgccggccacggcagcccccccggcttcaacaacaccgagagaacctgcgacaaggagttcatcatcagaagaaccgccaccaacagagtgctgaacgtgctgagacactgggtgagcaagcacgcccaggacttcgagctgaacaacgagctgaagatgaacgtgctgaacctgctggaggaggtgctgagagaccccgacctgctgccccaggagagaaaggccgccgccaacatcctgagagccctgagccaggacgaccaggacgacatccacctgaagctggaggacatcatccagatgaccgactgcatgaaggccgagtgcttcgagagcctgagcgccatggagctggccgagcagatcaccctgctggaccacgtgatcttcagaagcatcccctacgaggagttcctgggccagggctggatgaagctggacaagaacgagagaaccccctacatcatgaagaccagccagcacttcaacgacatgagcaacctggtggccagccagatcatgaactacgccgacgtgagcagcagagccaacgccatcgagaagtgggtggccgtggccgacatctgcagatgcctgcacaactacaacggcgtgctggagatcaccagcgccctgaacagaagcgccatctacagactgaagaagacctgggccaaggtgagcaagcagaccaaggccctgatggacaagctgcagaagaccgtgagcagcgagggcagattcaagaacctgagagagaccctgaagaactgcaacccccccgccgtgccctacctgggcatgtacctgaccgacctggccttcatcgaggagggcacccccaacttcaccgaggagggcctggtgaacttcagcaagatgagaatgatcagccacatcatcagagagatcagacagttccagcagaccagctacagaatcgaccaccagcccaaggtggcccagtacctgctggacaaggacctgatcatcgacgaggacaccctgtacgagctgagcctgaagatcgagcccagactgcccgcctag

SEQ ID NO: 96436 - DNA, 4431 bp, synthetic construct
  misc_feature 1..4431: note = Description of Artificial Sequence: Synthetic coding sequence
  source 1..4431: mol_type = other DNA
atgaccagcagcagccccgccggcctggagggcagcgacctgagcagcatcaacaccatgatgagcgccgtgatgagcgtgggcaaggtgaccgagaacggcggcagcccccagggcatcaagagccccagcaagccccccggccccaacagaatcggcagaagaaaccaggagaccaaggaggagaagagcagctacaactgccccctgtgcgagaagatctgcaccacccagcaccagctgaccatgcacatcagacagcacaacaccgacaccggcggcgccgaccacagctgcagcatctgcggcaagagcctgagcagcgccagcagcctggacagacacatgctggtgcacagcggcgagagaccctacaagtgcaccgtgtgcggccagagcttcaccaccaacggcaacatgcacagacacatgaagatccacgagaaggaccccaacagcgccaccgccaccgccccccccagccccctgaagagaagaagactgagcagcaagagaaagctgagccacgacgccgagagcgagagagaggaccccgcccccgccaagaagatggtggaggacggccagagcggcgacctggagaagaaggccgacgaggtgttccactgccccgtgtgcttcaaggagttcgtgtgcaagtacggcctggagacccacatggagacccacagcgacaaccccctgagatgcgacatctgctgcgtgaccttcagaacccacagaggcctgctgagacacaacgccctggtgcacaagcagctgcccagagacgccatgggcagacccttcatccagaacaaccccagcatccccgccggcttccacgacctgggcttcaccgacttcagctgcagaaagttccccagaatcagccaggcctggtgcgagaccaacctgagaagatgcatcagcgagcagcacagattcgtgtgcgacacctgcgacaaggccttccccatgctgtgcagcctggccctgcacaagcagacccacgtggccgccgaccagggccaggagaagccccaggccacccccctgcccggcgacgccctggaccagaagggcttcctggccctgctgggcctgcagcacaccaaggacgtgagacccgcccccgccgaggagcccctgcccgacgacaaccaggccatccagctgcagaccctgaagtgccagctgccccaggaccccggctgcaccaacctgctgagcctgagccccttcgaggccgccagcctgggcggcagcctgaccgtgctgcccgccaccaaggacagcatcaagcacctgagcctgcagcccttccagaagggcttcatcatccagcccgacagcagcatcgtggtgaagcccatcagcggcgagagcgccatcgagctggccgacatccagcagatcctgaagatggccgccagcgcccccccccagatcagcctgccccccttcagcaaggcccccgccgcccccctgcaggccatcttcaagcacatgccccccctgaagcccaagcccctggtgacccccagaaccgtggtggccaccagcacccccccccccctgatcaacgcccagcaggccagccccggctgcatcagccccagcctgccccccccccccctgaagctgctgaagggcagcgtggaggccgccagcaacgcccacctgctgcagagcaagagcggcacccagccccacgccgccaccagactgagcctgcagcagcccagagccgagctgcccggccagcccgagatgaagacccagctggagcaggacagcatcatcgaggccctgctgcccctgagcatggaggccaagatcaagcaggagatcaccgagggcgagctgaaggccttcatgaccgcccccggcggcaagaagacccccgccatgagaaaggtgctgtacccctgcagattctgcaaccaggtgttcgccttcagcggcgtgctgagagcccacgtgagaagccacctgggcatcagcccctaccagtgcaacatctgcgactacatcgccgccgacaaggccgccctgatcagacacctgagaacccacagcggcgagagaccctacatctgcaagatctgccactaccccttcaccgtgaaggccaactgcgagagacacctgagaaagaagcacctgaaggccaccagaaaggacatcgagaagaacatcgagtacgtgagcagcagcgccgccgagctggtggacgccttctgcgcccccgacaccgtgtgcagactgtgcggcgaggacctgaagcactacagagccctgagaatccacatgagaacccactgcggcagaggcctgggcggcggccacaagggcagaaagcccttcgagtgcaaggagtgcagcgccgccttcgccgccaagagaaactgcatccaccacatcctgaagcagcacctgcacgtgcccgagcaggacatcgagagctacgtgctggccgccgacggcctgggccccgccgaggcccccgccgccgaggccagcggcagaggcgaggacagcggctgcgccgccctgggcgactgcaagcccctgaccgccttcctggagccccagaacggcttcctgcacagaggccccacccagcccccccccccccacgtgagcatcaagctggagcccgccagcagcttcgccgtggacttcaacgagcccctggacttcagccagaagggcctggccctggtgcaggtgaagcaggagaacatcagcttcctgagccccagcagcctggtgccctacgactgcagcatggagcccatcgacctgagcatccccaagaacttcagaaagggcgacaaggacctggccacccccagcgaggccaagaagcccgaggaggaggccggcagcagcgagcagcccagcccctgccccgcccccggccccagcctgcccgtgaccctgggccccagcggcatcctggagagccccatggcccccgcccccgccgccacccccgagccccccgcccagcccctgcagggccccgtgcagctggccgtgcccatctacagcagcgccctggtgagcagcccccccctggtgggcagcagcgccctgctgagcggcaccgccctgctgagacccctgagacccaagccccccctgctgctgcccaagccccccgtgaccgaggagctgccccccctggccagcatcgcccagatcatcagcagcgtgagcagcgcccccaccctgctgaagaccaaggtggccgaccccggccccgccagcaccggcagcaacaccaccgccagcgacagcctgggcggcagcgtgcccaaggccgccaccaccgccacccccgccgccaccaccagccccaaggagagcagcgagccccccgcccccgccagcagccccgaggccgccagccccaccgagcagggccccgccggcaccagcaagaagagaggcagaaagagaggcatgagaagcagacccagagccaacagcggcggcgtggacctggacagcagcggcgagttcgccagcatcgagaagatgctggccaccaccgacaccaacaagttcagccccttcctgcagaccgccgaggacaacacccaggacgaggtggccggcgcccccgccgaccaccacggccccagcgacgaggagcagggcagcccccccgaggacaagctgctgagagccaagagaaacagctacaccaactgcctgcagaagatcacctgcccccactgccccagagtgttcccctgggccagcagcctgcagagacacatgctgacccacaccggccagaagcccttcccctgccagaagtgcgacgccttcttcagcaccaagagcaactgcgagagacaccagctgagaaagcacggcgtgaccacctgcagcctgagaagaaacggcctgatcccccagagcaaggagagcgacgtgggcagccacgacagcaccggcgagagaccctacaagtgccagacctgcgagagaaccttcaccctgaagcacagcctggtgagacaccagagaatccaccagaaggccagacacgccaagcaccacggcaaggacagcgacaaggaggagagaggcgaggaggacagcgagaacgagagcacccacagcggcaacaacgccgtgagcgagaacgaggccgagctggcccccaacgccagcaaccacatggccgtgaccagaagcagaaaggagggcctggccagcgccaccaaggactgcagccacagagaggagaaggtgaccgccggctggcccagcgagcccggccagggcgacctgaaccccgagagccccgccgccctgggccaggacctgctggagcccagaagcaagagacccgcccaccccatcctggccaccgccgacggcgccagccagctggtgggcatggagtag

SEQ ID NO: 96437 - DNA, 5064 bp, synthetic construct
  misc_feature 1..5064: note = Description of Artificial Sequence: Synthetic coding sequence
  source 1..5064: mol_type = other DNA
atgaccagcagcagccccgccggcctggagggcagcgacctgagcagcatcaacaccatgatgagcgccgtgatgagcgtgggcaaggtgaccgagaacggcggcagcccccagggcatcaagagccccagcaagccccccggccccaacagaatcggcagaagaaaccaggagaccaaggaggagaagagcagctacaactgccccctgtgcgagaagatctgcaccacccagcaccagctgaccatgcacatcagacagcacaacaccgacaccggcggcgccgaccacagctgcagcatctgcggcaagagcctgagcagcgccagcagcctggacagacacatgctggtgcacagcggcgagagaccctacaagtgcaccgtgtgcggccagagcttcaccaccaacggcaacatgcacagacacatgaagatccacgagaaggaccccaacagcgccaccgccaccgccccccccagccccctgaagagaagaagactgagcagcaagagaaagctgagccacgacgccgagagcgagagagaggaccccgcccccgccaagaagatggtggaggacggccagagcggcgacctggagaagaaggccgacgaggtgttccactgccccgtgtgcttcaaggagttcgtgtgcaagtacggcctggagacccacatggagacccacagcgacaaccccctgagatgcgacatctgctgcgtgaccttcagaacccacagaggcctgctgagacacaacgccctggtgcacaagcagctgcccagagacgccatgggcagacccttcatccagaacaaccccagcatccccgccggcttccacgacctgggcttcaccgacttcagctgcagaaagttccccagaatcagccaggcctggtgcgagaccaacctgagaagatgcatcagcgagcagcacagattcgtgtgcgacacctgcgacaaggccttccccatgctgtgcagcctggccctgcacaagcagacccacgtggccgccgaccagggccaggagaagccccaggccacccccctgcccggcgacgccctggaccagaagggcttcctggccctgctgggcctgcagcacaccaaggacgtgagacccgcccccgccgaggagcccctgcccgacgacaaccaggccatccagctgcagaccctgaagtgccagctgccccaggaccccggctgcaccaacctgctgagcctgagccccttcgaggccgccagcctgggcggcagcctgaccgtgctgcccgccaccaaggacagcatcaagcacctgagcctgcagcccttccagaagggcttcatcatccagcccgacagcagcatcgtggtgaagcccatcagcggcgagagcgccatcgagctggccgacatccagcagatcctgaagatggccgccagcgcccccccccagatcagcctgccccccttcagcaaggcccccgccgcccccctgcaggccatcttcaagcacatgccccccctgaagcccaagcccctggtgacccccagaaccgtggtggccaccagcacccccccccccctgatcaacgcccagcaggccagccccggctgcatcagccccagcctgccccccccccccctgaagctgctgaagggcagcgtggaggccgccagcaacgcccacctgctgcagagcaagagcggcacccagccccacgccgccaccagactgagcctgcagcagcccagagccgagctgcccggccagcccgagatgaagacccagctggagcaggacagcatcatcgaggccctgctgcccctgagcatggaggccaagatcaagcaggagatcaccgagggcgagctgaaggccttcatgaccgcccccggcggcaagaagacccccgccatgagaaaggtgctgtacccctgcagattctgcaaccaggtgttcgccttcagcggcgtgctgagagcccacgtgagaagccacctgggcatcagcccctaccagtgcaacatctgcgactacatcgccgccgacaaggccgccctgatcagacacctgagaacccacagcggcgagagaccctacatctgcaagatctgccactaccccttcaccgtgaaggccaactgcgagagacacctgagaaagaagcacctgaaggccaccagaaaggacatcgagaagaacatcgagtacgtgagcagcagcgccgccgagctggtggacgccttctgcgcccccgacaccgtgtgcagactgtgcggcgaggacctgaagcactacagagccctgagaatccacatgagaacccactgcggcagaggcctgggcggcggccacaagggcagaaagcccttcgagtgcaaggagtgcagcgccgccttcgccgccaagagaaactgcatccaccacatcctgaagcagcacctgcacgtgcccgagcaggacatcgagagctacgtgctggccgccgacggcctgggccccgccgaggcccccgccgccgaggccagcggcagaggcgaggacagcggctgcgccgccctgggcgactgcaagcccctgaccgccttcctggagccccagaacggcttcctgcacagaggccccacccagcccccccccccccacgtgagcatcaagctggagcccgccagcagcttcgccgtggacttcaacgagcccctggacttcagccagaagggcctggccctggtgcaggtgaagcaggagaacatcagcttcctgagccccagcagcctggtgccctacgactgcagcatggagcccatcgacctgagcatccccaagaacttcagaaagggcgacaaggacctggccacccccagcgaggccaagaagcccgaggaggaggccggcagcagcgagcagcccagcccctgccccgcccccggccccagcctgcccgtgaccctgggccccagcggcatcctggagagccccatggcccccgcccccgccgccacccccgagccccccgcccagcccctgcagggccccgtgcagctggccgtgcccatctacagcagcgccctggtgagcagcccccccctggtgggcagcagcgccctgctgagcggcaccgccctgctgagacccctgagacccaagccccccctgctgctgcccaagccccccgtgaccgaggagctgccccccctggccagcatcgcccagatcatcagcagcgtgagcagcgcccccaccctgctgaagaccaaggtggccgaccccggccccgccagcaccggcagcaacaccaccgccagcgacagcctgggcggcagcgtgcccaaggccgccaccaccgccacccccgccgccaccaccagccccaaggagagcagcgagccccccgcccccgccagcagccccgaggccgccagccccaccgagcagggccccgccggcaccagcaagaagagaggcagaaagagaggcatgagaagcagacccagagccaacagcggcggcgtggacctggacagcagcggcgagttcgccagcatcgagaagatgctggccaccaccgacaccaacaagttcagccccttcctgcagaccgccgaggacaacacccaggacgaggtggccggcgcccccgccgaccaccacggccccagcgacgaggagcagggcagcccccccgaggacaagctgctgagagccaagagaaacagctacaccaactgcctgcagaagatcacctgcccccactgccccagagtgttcccctgggccagcagcctgcagagacacatgctgacccacaccgacagccagagcgacgccgagaccgccgccgccgccggcgaggtgctggacctgaccagcagagacagagagcagcccagcgagggcgccaccgagctgagacaggtggccggcgacgcccccgtggagcaggccaccgccgagaccgccagccccgtgcacagagaggagcacggcagaggcgagagccacgagcccgaggaggagcacggcaccgaggagagcaccggcgacgccgacggcgccgaggaggacgccagcagcaaccagagcctggacctggacttcgccaccaagctgatggacttcaagctggccgagggcgacggcgaggccggcgccggcggcgccgccagccaggagcagaagctggcctgcgacacctgcggcaagagcttcaagttcctgggcaccctgagcagacacagaaaggcccacggcagacaggagcccaaggacgagaagggcgacggcgccagcaccgccgaggagggcccccagcccgcccccgagcaggaggagaagccccccgagacccccgccgaggtggtggagagcgcccccggcgccggcgaggcccccgccgagaagctggccgaggagaccgagggccccagcgacggcgagagcgccgccgagaagagaagcagcgagaagagcgacgacgacaagaagcccaagaccgacagccccaagagcgtggccagcaaggccgacaagagaaagaaggtgtgcagcgtgtgcaacaagagattctggagcctgcaggacctgaccagacacatgagaagccacaccggcgagagaccctacaagtgccagacctgcgagagaaccttcaccctgaagcacagcctggtgagacaccagagaatccaccagaaggccagacacgccaagcaccacggcaaggacagcgacaaggaggagagaggcgaggaggacagcgagaacgagagcacccacagcggcaacaacgccgtgagcgagaacgaggccgagctggcccccaacgccagcaaccacatggccgtgaccagaagcagaaaggagggcctggccagcgccaccaaggactgcagccacagagaggagaaggtgaccgccggctggcccagcgagcccggccagggcgacctgaaccccgagagccccgccgccctgggccaggacctgctggagcccagaagcaagagacccgcccaccccatcctggccaccgccgacggcgccagccagctggtgggcatggagtag

SEQ ID NO: 96438 - DNA, 5064 bp, synthetic construct; identical to SEQ ID NO: 96437
  misc_feature 1..5064: note = Description of Artificial Sequence: Synthetic coding sequence
  source 1..5064: mol_type = other DNA

SEQ ID NO: 96439 - DNA, 5229 bp, synthetic construct
  misc_feature 1..5229: note = Description of Artificial Sequence: Synthetic coding sequence
  source 1..5229: mol_type = other DNA
atgaccagcagcagccccgccggcctggagggcagcgacctgagcagcatcaacaccatgatgagcgccgtgatgagcgtgggcaaggtgaccgagaacggcggcagcccccagggcatcaagagccccagcaagccccccggccccaacagaatcggcagaagaaaccaggagaccaaggaggagaagagcagctacaactgccccctgtgcgagaagatctgcaccacccagcaccagctgaccatgcacatcagacagcacaacaccgacaccggcggcgccgaccacagctgcagcatctgcggcaagagcctgagcagcgccagcagcctggacagacacatgctggtgcacagcggcgagagaccctacaagtgcaccgtgtgcggccagagcttcaccaccaacggcaacatgcacagacacatgaagatccacgagaaggaccccaacagcgccaccgccaccgccccccccagccccctgaagagaagaagactgagcagcaagagaaagctgagccacgacgccgagagcgagagagaggaccccgcccccgccaagaagatggtggaggacggccagagcggcgacctggagaagaaggccgacgaggtgttccactgccccgtgtgcttcaaggagttcgtgtgcaagtacggcctggagacccacatggagacccacagcgacaaccccctgagatgcgacatctgctgcgtgaccttcagaacccacagaggcctgctgagacacaacgccctggtgcacaagcagctgcccagagacgccatgggcagacccttcatccagaacaaccccagcatccccgccggcttccacgacctgggcttcaccgacttcagctgcagaaagttccccagaatcagccaggcctggtgcgagaccaacctgagaagatgcatcagcgagcagcacagattcgtgtgcgacacctgcgacaaggccttccccatgctgtgcagcctggccctgcacaagcagacccacgtggccgccgaccagggccaggagaagccccaggccacccccctgcccggcgacgccctggaccagaagggcttcctggccctgctgggcctgcagcacaccaaggacgtgagacccgcccccgccgaggagcccctgcccgacgacaaccaggccatccagctgcagaccctgaagtgccagctgccccaggaccccggctgcaccaacctgctgagcctgagccccttcgaggccgccagcctgggcggcagcctgaccgtgctgcccgccaccaaggacagcatcaagcacctgagcctgcagcccttccagaagggcttcatcatccagcccgacagcagcatcgtggtgaagcccatcagcggcgagagcgccatcgagctggccgacatccagcagatcctgaagatggccgccagcgcccccccccagatcagcctgccccccttcagcaaggcccccgccgcccccctgcaggccatcttcaagcacatgccccccctgaagcccaagcccctggtgacccccagaaccgtggtggccaccagcacccccccccccctgatcaacgcccagcaggccagccccggctgcatcagccccagcctgccccccccccccctgaagctgctgaagggcagcgtggaggccgccagcaacgcccacctgctgcagagcaagagcggcacccagccccacgccgccaccagactgagcctgcagcagcccagagccgagctgcccggccagcccgagatgaagacccagctggagcaggacagcatcatcgaggccctgctgcccctgagcatggaggccaagatcaagcaggagatcaccgagggcgagctgaaggccttcatgaccgcccccggcggcaagaagacccccgccatgagaaaggtgctgtacccctgcagattctgcaaccaggtgttcgccttcagcggcgtgctgagagcccacgtgagaagccacctgggcatcagcccctaccagtgcaacatctgcgactacatcgccgccgacaaggccgccctgatcagacacctgagaacccacagcggcgagagaccctacatctgcaagatctgccactaccccttcaccgtgaaggccaactgcgagagacacctgagaaagaagcacctgaaggccaccagaaaggacatcgagaagaacatcgagtacgtgagcagcagcgccgccgagctggtggacgccttctgcgcccccgacaccgtgtgcagactgtgcggcgaggacctgaagcactacagagccctgagaatccacatgagaacccactgcggcagaggcctgggcggcggccacaagggcagaaagcccttcgagtgcaaggagtgcagcgccgccttcgccgccaagagaaactgcatccaccacatcctgaagcagcacctgcacgtgcccgagcaggacatcgagagctacgtgctggccgccgacggcctgggccccgccgaggcccccgccgccgaggccagcggcagaggcgaggacagcggctgcgccgccctgggcgactgcaagcccctgaccgccttcctggagccccagaacggcttcctgcacagaggccccacccagcccccccccccccacgtgagcatcaagctggagcccgccagcagcttcgccgtggacttcaacgagcccctggacttcagccagaagggcctggccctggtgcaggtgaagcaggagaacatcagcttcctgagccccagcagcctggtgccctacgactgcagcatggagcccatcgacctgagcatccccaagaacttcagaaagggcgacaaggacctggccacccccagcgaggccaagaagcccgaggaggaggccggcagcagcgagcagcccagcccctgccccgcccccggccccagcctgcccgtgaccctgggccccagcggcatcctggagagccccatggcccccgcccccgccgccacccccgagccccccgcccagcccctgcagggccccgtgcagctggccgtgcccatctacagcagcgccctggtgagcagcccccccctggtgggcagcagcgccctgctgagcggcaccgccctgctgagacccctgagacccaagccccccctgctgctgcccaagccccccgtgaccgaggagctgccccccctggccagcatcgcccagatcatcagcagcgtgagcagcgcccccaccctgctgaagaccaaggtggccgaccccggccccgccagcaccggcagcaacaccaccgccagcgacagcctgggcggcagcgtgcccaaggccgccaccaccgccacccccgccgccaccaccagccccaaggagagcagcgagccccccgcccccgccagcagccccgaggccgccagccccaccgagcagggccccgccggcaccagcaagaagagaggcagaaagagaggcatgagaagcagacccagagccaacagcggcggcgtggacctggacagcagcggcgagttcgccagcatcgagaagatgctggccaccaccgacaccaacaagttcagccccttcctgcagaccgccgaggacaacacccaggacgaggtggccggcgcccccgccgaccaccacggccccagcgacgaggagcagggcagcccccccgaggacaagctgctgagagccaagagaaacagctacaccaactgcctgcagaagatcacctgcccccactgccccagagtgttcccctgggccagcagcctgcagagacacatgctgacccacaccggccagaagcccttcccctgccagaagtgcgacgccttcttcagcaccaagagcaactgcgagagacaccagctgagaaagcacggcgtgaccacctgcagcctgagaagaaacggcctgatcccccagagcaaggagagcgacgtgggcagccacgacagcaccgacagccagagcgacgccgagaccgccgccgccgccggcgaggtgctggacctgaccagcagagacagagagcagcccagcgagggcgccaccgagctgagacaggtggccggcgacgcccccgtggagcaggccaccgccgagaccgccagccccgtgcacagagaggagcacggcagaggcgagagccacgagcccgaggaggagcacggcaccgaggagagcaccggcgacgccgacggcgccgaggaggacgccagcagcaaccagagcctggacctggacttcgccaccaagctgatggacttcaagctggccgagggcgacggcgaggccggcgccggcggcgccgccagccaggagcagaagctggcctgcgacacctgcggcaagagcttcaagttcctgggcaccctgagcagacacagaaaggcccacggcagacaggagcccaaggacgagaagggcgacggcgccagcaccgccgaggagggcccccagcccgcccccgagcaggaggagaagccccccgagacccccgccgaggtggtggagagcgcccccggcgccggcgaggcccccgccgagaagctggccgaggagaccgagggccccagcgacggcgagagcgccgccgagaagagaagcagcgagaagagcgacgacgacaagaagcccaagaccgacagccccaagagcgtggccagcaaggccgacaagagaaagaaggtgtgcagcgtgtgcaacaagagattctggagcctgcaggacctgaccagacacatgagaagccacaccggcgagagaccctacaagtgccagacctgcgagagaaccttcaccctgaagcacagcctggtgagacaccagagaatccaccagaaggccagacacgccaagcaccacggcaaggacagcgacaaggaggagagaggcgaggaggacagcgagaacgagagcacccacagcggcaacaacgccgtgagcgagaacgaggccgagctggcccccaacgccagcaaccacatggccgtgaccagaagcagaaaggagggcctggccagcgccaccaaggactgcagccacagagaggagaaggtgaccgccggctggcccagcgagcccggccagggcgacctgaaccccgagagccccgccgccctgggccaggacctgctggagcccagaagcaagagacccgcccaccccatcctggccaccgccgacggcgccagccagctggtgggcatggagtag

SEQ ID NO: 96440 - DNA, 15 bp, synthetic construct
  misc_feature 1..15: note = Description of Artificial Sequence: Synthetic coding sequence
  source 1..15: mol_type = other DNA
atgaccagcagctag

SEQ ID NO: 96441 - DNA, 495 bp, synthetic construct
  misc_feature 1..495: note = Description of Artificial Sequence: Synthetic coding sequence
  source 1..495: mol_type = other DNA
atgaccagcagcagccccgccggcctggagggcagcgacctgagcagcatcaacaccatgatgagcgccgtgatgagcgtgggcaaggtgaccgagaacggcggcagcccccagggcatcaagagccccagcaagccccccggccccaacagaatcggcagaagaaaccaggagaccaaggaggagaagagcagctacaactgccccctgtgcgagaagatctgcaccacccagcaccagctgaccatgcacatcagacagcacaacaccgacaccggcggcgccgaccacagctgcagcatctgcggcaagagcctgagcagcgccagcagcctggacagacacatgctggtgcacagcggcgagagaccctacaagtgcaccgtgtgcggccagagcttcaccaccaacggcaacatgcacagacacatgaagatccacgagaaggaccccaacagcgccaccgccaccgccccccccagccccctgaagtag

SEQ ID NO: 96442 - DNA, 2337 bp, synthetic construct
  misc_feature 1..2337: note = Description of Artificial Sequence: Synthetic coding sequence
  source 1..2337: mol_type = other DNA
atgaccagcagcagccccgccggcctggagggcagcgacctgagcagcatcaacaccatgatgagcgccgtgatgagcgtgggcaaggtgaccgagaacggcggcagcccccagggcatcaagagccccagcaagccccccggccccaacagaatcggcagaagaaaccaggagaccaaggaggagaagagcagctacaactgccccctgtgcgagaagatctgcaccacccagcaccagctgaccatgcacatcagacagcacaacaccgacaccggcggcgccgaccacagctgcagcatctgcggcaagagcctgagcagcgccagcagcctggacagacacatgctggtgcacagcggcgagagaccctacaagtgcaccgtgtgcggccagagcttcaccaccaacggcaacatgcacagacacatgaagatccacgagaaggaccccaacagcgccaccgccaccgccccccccagccccctgaagagaagaagactgagcagcaagagaaagctgagccacgacgccgagagcgagagagaggaccccgcccccgccaagaagatggtggaggacggccagagcggcgacctggagaagaaggccgacgaggtgttccactgccccgtgtgcttcaaggagttcgtgtgcaagtacggcctggagacccacatggagacccacagcgacaaccccctgagatgcgacatctgctgcgtgaccttcagaacccacagaggcctgctgagacacaacgccctggtgcacaagcagctgcccagagacgccatgggcagacccttcatccagaacaaccccagcatccccgccggcttccacgacctgggcttcaccgacttcagctgcagaaagttccccagaatcagccaggcctggtgcgagaccaacctgagaagatgcatcagcgagcagcacagattcgtgtgcgacacctgcgacaaggccttccccatgctgtgcagcctggccctgcacaagcagacccacgtggccgccgaccagggccaggagaagccccaggccacccccctgcccggcgacgccctggaccagaagggcttcctggccctgctgggcctgcagcacaccaaggacgtgagacccgcccccgccgaggagcccctgcccgacgacaaccaggccatccagctgcagaccctgaagtgccagctgccccaggaccccggctgcaccaacctgctgagcctgagccccttcgaggccgccagcctgggcggcagcctgaccgtgctgcccgccaccaaggacagcatcaagcacctgagcctgcagcccttccagaagggcttcatcatccagcccgacagcagcatcgtggtgaagcccatcagcggcgagagcgccatcgagctggccgacatccagcagatcctgaagatggccgccagcgcccccccccagatcagcctgccccccttcagcaaggcccccgccgcccccctgcaggccatcttcaagcacatgccccccctgaagcccaagcccctggtgacccccagaaccgtggtggccaccagcacccccccccccctgatcaacgcccagcaggccagccccggctgcatcagccccagcctgccccccccccccctgaagctgctgaagggcagcgtggaggccgccagcaacgcccacctgctgcagagcaagagcggcacccagccccacgccgccaccagactgagcctgcagcagcccagagccgagctgcccggccagcccgagatgaagacccagctggagcaggacagcatcatcgaggccctgctgcccctgagcatggaggccaagatcaagcaggagatcaccgagggcgagctgaaggccttcatgaccgcccccggcggcaagaagacccccgccatgagaaaggtgctgtacccctgcagattctgcaaccaggtgttcgccttcagcggcgtgctgagagcccacgtgagaagccacctgggcatcagcccctaccagtgcaacatctgcgactacatcgccgccgacaaggccgccctgatcagacacctgagaacccacagcggcgagagaccctacatctgcaagatctgccactaccccttcaccgtgaaggccaactgcgagagacacctgagaaagaagcacctgaaggccaccagaaaggacatcgagaagaacatcgagtacgtgagcagcagcgccgccgagctggtggacgccttctgcgcccccgacaccgtgtgcagactgtgcggcgaggacctgaagcactacagagccctgagaatccacatgagaacccactgcggcagatag

SEQ ID NO: 96443 - DNA, 411 bp, synthetic construct
  misc_feature 1..411: note = Description of Artificial Sequence: Synthetic coding sequence
  source 1..411: mol_type = other DNA
atgaccagcagcagccccgccggcctggagggcagcgacctgagcagcatcaacaccatgatgagcgccgtgatgagcgtgggcaaggtgaccgagaacggcggcagcccccagggcatcaagagccccagcaagccccccggccccaacagaatcggcagaagaaaccaggagaccaaggaggagaagagcagctacaactgccccctgtgcgagaagatctgcaccacccagcaccagctgaccatgcacatcagacagcacaacaccgacaccggcggcgccgaccacagctgcagcatctgcggcaagagcctgagcagcgccagcagcctggacagacacatgctggtgcacagcggcgagagaccctacaagtgcaccgtgtgcggccagagcttcaccacctag

SEQ ID NO: 96444 - DNA, 189 bp, synthetic construct
  misc_feature 1..189: note = Description of Artificial Sequence: Synthetic coding sequence
  source 1..189: mol_type = other DNA
atgaccagcagcagccccgccggcctggagggcagcgacctgagcagcatcaacaccatgatgagcgccgtgatgagcgtgggcaaggtgaccgagaacggcggcagcccccagggcatcaagagccccagcaagccccccggccccaacagaatcggcagaagaaaccaggtgagcgtgcacacctag

SEQ ID NO: 96445 - DNA, 834 bp, synthetic construct
  misc_feature 1..834: note = Description of Artificial Sequence: Synthetic coding sequence
  source 1..834: mol_type = other DNA
atgagcaagagcctgaagaagctggtggaggagagcagagagaagaaccagcccgaggtggacatgagcgacagaggcatcagcaacatgctggacgtgaacggcctgttcaccctgagccacatcacccagctggtgctgagccacaacaagctgaccatggtgccccccaacatcgccgagctgaagaacctggaggtgctgaacttcttcaacaaccagatcgaggagctgcccacccagatcagcagcctgcagaagctgaagcacctgaacctgggcatgaacagactgaacaccctgcccagaggcttcggcagcctgcccgccctggaggtgctggacctgacctacaacaacctgagcgagaacagcctgcccggcaacttcttctacctgaccaccctgagagccctgtacctgagcgacaacgacttcgagatcctgccccccgacatcggcaagctgaccaagctgcagatcctgagcctgagagacaacgacctgatcagcctgcccaaggagatcggcgagctgacccagctgaaggagctgcacatccagggcaacagactgaccgtgctgccccccgagctgggcaacctggacctgaccggccagaagcaggtgttcaaggccgagaacaacccctgggtgacccccatcgccgaccagttccagctgggcgtgagccacgtgttcgagtacatcagaagcgagacctacaagtacctgtacggcagacacatgcaggccaaccccgagccccccaagaagaacaacgacaagagcaagaagatcagcagaaagcccctggccgccaagaacagatag

SEQ ID NO: 96446 - DNA, 675 bp, synthetic construct
  misc_feature 1..675: note = Description of Artificial Sequence: Synthetic coding sequence
  source 1..675: mol_type = other DNA
atggtgccccccaacatcgccgagctgaagaacctggaggtgctgaacttcttcaacaaccagatcgaggagctgcccacccagatcagcagcctgcagaagctgaagcacctgaacctgggcatgaacagactgaacaccctgcccagaggcttcggcagcctgcccgccctggaggtgctggacctgacctacaacaacctgagcgagaacagcctgcccggcaacttcttctacctgaccaccctgagagccctgtacctgagcgacaacgacttcgagatcctgccccccgacatcggcaagctgaccaagctgcagatcctgagcctgagagacaacgacctgatcagcctgcccaaggagatcggcgagctgacccagctgaaggagctgcacatccagggcaacagactgaccgtgctgccccccgagctgggcaacctggacctgaccggccagaagcaggtgttcaaggccgagaacaacccctgggtgacccccatcgccgaccagttccagctgggcgtgagccacgtgttcgagtacatcagaagcgagacctacaagtacctgtacggcagacacatgcaggccaaccccgagccccccaagaagaacaacgacaagagcaagaagatcagcagaaagcccctggccgccaagaacagatag

SEQ ID NO: 96447 - DNA, 834 bp, synthetic construct; identical to SEQ ID NO: 96445
  misc_feature 1..834: note = Description of Artificial Sequence: Synthetic coding sequence
  source 1..834: mol_type = other DNA

SEQ ID NO: 96448 - DNA, 945 bp, synthetic construct
  misc_feature 1..945: note = Description of Artificial Sequence: Synthetic coding sequence
  source 1..945: mol_type = other DNA
atggccgccaccgccagcgccggcgccggcggcatcgacggcaagcccagaaccagccccaagagcgtgaagttcctgttcggcggcctggccggcatgggcgccaccgtgttcgtgcagcccctggacctggtgaagaacagaatgcagctgagcggcgagggcgccaagaccagagagtacaagaccagcttccacgccctgaccagcatcctgaaggccgagggcctgagaggcatctacaccggcctgagcgccggcctgctgagacaggccacctacaccaccaccagactgggcatctacaccgtgctgttcgagagactgaccggcgccgacggcaccccccccggcttcctgctgaaggccgtgatcggcatgaccgccggcgccaccggcgccttcgtgggcacccccgccgaggtggccctgatcagaatgaccgccgacggcagactgcccgccgaccagagaagaggctacaagaacgtgttcaacgccctgatcagaatcaccagagaggagggcgtgctgaccctgtggagaggctgcatccccaccatggccagagccgtggtggtgaacgccgcccagctggccagctacagccagagcaagcagttcctgctggacagcggctacttcagcgacaacatcctgtgccacttctgcgccagcatgatcagcggcctggtgaccaccgccgccagcatgcccgtggacatcgccaagaccagaatccagaacatgagaatgatcgacggcaagcccgagtacaagaacggcctggacgtgctgttcaaggtggtgagatacgagggcttcttcagcctgtggaagggcttcaccccctactacgccagactgggcccccacaccgtgctgaccttcatcttcctggagcagatgaacaaggcctacaagagactgttcctgagcggctag

SEQ ID NO: 96449 - DNA, 1530 bp, synthetic construct; identical to SEQ ID NO: 73304
  misc_feature 1..1530: note = Description of Artificial Sequence: Synthetic coding sequence
  source 1..1530: mol_type = other DNA

SEQ ID NO: 96450 - DNA, 600 bp, synthetic construct
  misc_feature 1..600: note = Description of Artificial Sequence: Synthetic coding sequence
  source 1..600: mol_type = other DNA
atggccaagagcgccgaggtgaagctggccatcttcggcagagccggcgtgggcaagagcgccctggtggtgagattcctgaccaagagattcatctgggagtacgaccccaccctggagagcacctacagacaccaggccaccatcgacgacgaggtggtgagcatggagatcctggacaccgccggccaggaggacaccatccagagagagggccacatgagatggggcgagggcttcgtgctggtgtacgacatcaccgacagaggcagcttcgaggaggtgctgcccctgaagaacatcctggacgagatcaagaagcccaagaacgtgaccctgatcctggtgggcaacaaggccgacctggaccacagcagacaggtgagcaccgaggagggcgagaagctggccaccgagctggcctgcgccttctacgagtgcagcgcctgcaccggcgagggcaacatcaccgagatcttctacgagctgtgcagagaggtgagaagaagaagaatggtgcagggcaagaccagaagaagaagcagcaccacccacgtgaagcaggccatcaacaagatgctgaccaagatcagcagctag

SEQ ID NO: 96451 - DNA, 120 bp, synthetic construct
  misc_feature 1..120: note = Description of Artificial Sequence: Synthetic coding sequence
  source 1..120: mol_type = other DNA
atggccaagagcgccgaggtgaagctggccatcttcggcagagccggcgtgggcaagagcgccctggtggtgagattcctgaccaagagattcatctgggagtacgaccccaccctgtag

SEQ ID NO: 96452 - DNA, 600 bp, synthetic construct; identical to SEQ ID NO: 96450
  misc_feature 1..600: note = Description of Artificial Sequence: Synthetic coding sequence
  source 1..600: mol_type = other DNA

SEQ ID NO: 96453 - DNA, 600 bp, synthetic construct; identical to SEQ ID NO: 96450
  misc_feature 1..600: note = Description of Artificial Sequence: Synthetic coding sequence
  source 1..600: mol_type = other DNA

SEQ ID NO: 96454 - DNA, 543 bp, synthetic construct
  misc_feature 1..543: note = Description of Artificial Sequence: Synthetic coding sequence
  source 1..543: mol_type = other DNA
atggccaagagcgccgaggtgaagctggccatcttcggcagagccggcgtgggcaagagcgagagcacctacagacaccaggccaccatcgacgacgaggtggtgagcatggagatcctggacaccgccggccaggaggacaccatccagagagagggccacatgagatggggcgagggcttcgtgctggtgtacgacatcaccgacagaggcagcttcgaggaggtgctgcccctgaagaacatcctggacgagatcaagaagcccaagaacgtgaccctgatcctggtgggcaacaaggccgacctggaccacagcagacaggtgagcaccgaggagggcgagaagctggccaccgagctggcctgcgccttctacgagtgcagcgcctgcaccggcgagggcaacatcaccgagatcttctacgagctgtgcagagaggtgagaagaagaagaatggtgcagggcaagaccagaagaagaagcagcaccacccacgtgaagcaggccatcaacaagatgctgaccaagatcagcagctag

SEQ ID NO: 96455 - DNA, 612 bp, synthetic construct
  misc_feature 1..612: note = Description of Artificial Sequence: Synthetic coding sequence
  source 1..612: mol_type = other DNA
atggtgagcacctacagagtggccgtgctgggcgccagaggcgtgggcaagagcgccatcgtgagacagttcctgtacaacgagttcagcgaggtgtgcgtgcccaccaccgccagaagactgtacctgcccgccgtggtgatgaacggccacgtgcacgacctgcagatcctggacttcccccccatcagcgccttccccgtgaacaccctgcaggagtgggccgacacctgctgcagaggcctgagaagcgtgcacgcctacatcctggtgtacgacatctgctgcttcgacagcttcgagtacgtgaagaccatcagacagcagatcctggagaccagagtgatcggcaccagcgagacccccatcatcatcgtgggcaacaagagagacctgcagagaggcagagtgatccccagatggaacgtgagccacctggtgagaaagacctggaagtgcggctacgtggagtgcagcgccaagtacaactggcacatcctgctgctgttcagcgagctgctgaagagcgtgggctgcgccagatgcaagcacgtgcacgccgccctgagattccagggcgccctgagaagaaacagatgcgccatcatgtag

SEQ ID NO: 96456 - DNA, 729 bp, synthetic construct
  misc_feature 1..729: note = Description of Artificial Sequence: Synthetic coding sequence
  source 1..729: mol_type = other DNA
atgagacccctgagcatgagcggccacttcctgctggcccccatccccgagagcagcagcgactacctgctgcccaaggacatcaagctggccgtgctgggcgccggcagagtgggcaagagcgccatgatcgtgagattcctgaccaagagattcatcggcgactacgagcccaacaccggcaagctgtacagcagactggtgtacgtggagggcgaccagctgagcctgcagatccaggacacccccggcggcgtgcagatccaggacagcctgccccaggtggtggacagcctgagcaagtgcgtgcagtgggccgagggcttcctgctggtgtacagcatcaccgactacgacagctacctgagcatcagacccctgtaccagcacatcagaaaggtgcaccccgacagcaaggcccccgtgatcatcgtgggcaacaagggcgacctgctgcacgccagacaggtgcagacccaggacggcatccagctggccaacgagctgggcagcctgttcctggagatcagcaccagcgagaactacgaggacgtgtgcgacgtgttccagcacctgtgcaaggaggtgagcaagatgcacggcctgagcggcgagagaagaagagccagcatcatccccagacccagaagccccaacatgcaggacctgaagagaagattcaagcaggccctgagccccaaggtgaaggcccccagcgccctgggctag

SEQ ID NO: 96457 - DNA, 747 bp, synthetic construct
  misc_feature 1..747: note = Description of Artificial Sequence: Synthetic coding sequence
  source 1..747: mol_type = other DNA
atgagactgatccagaacatgtgcaccatcgccgagtaccccgcccccggcaacgccgccgccagcgactgctgcgtgggcgccgccggcagaagactggtgaagatcgccgtggtgggcgccagcggcgtgggcaagaccgccctggtggtgagattcctgaccaagagattcatcggcgactacgagagaaacgccggcaacctgtacaccagacaggtgcagatcgagggcgagaccctggccctgcaggtgcaggacacccccggcatccaggtgcacgagaacagcctgagctgcagcgagcagctgaacagatgcatcagatgggccgacgccgtggtgatcgtgttcagcatcaccgactacaagagctacgagctgatcagccagctgcaccagcacgtgcagcagctgcacctgggcaccagactgcccgtggtggtggtggccaacaaggccgacctgctgcacatcaagcaggtggacccccagctgggcctgcagctggccagcatgctgggctgcagcttctacgaggtgagcgtgagcgagaactacaacgacgtgtacagcgccttccacgtgctgtgcaaggaggtgagccacaagcagcagcccagcagcacccccgagaagagaagaaccagcctgatccccagacccaagagccccaacatgcaggacctgaagagaagattcaagcaggccctgagcgccaaggtgagaaccgtgaccagcgtgtag

SEQ ID NO: 96458 - DNA, 927 bp, synthetic construct
  misc_feature 1..927: note = Description of Artificial Sequence: Synthetic coding sequence
  source 1..927: mol_type = other DNA
atgaccctgaacggcggcggcagcggcgccggcggcagcagaggcggcggccaggagagagagagaagaagaggcagcaccccctggggccccgccccccccctgcacagaagaagcatgcccgtggacgagagagacctgcaggccgccctgacccccggcgccctgaccgccgccgccgccggcaccggcacccagggccccagactggactggcccgaggacagcgaggacagcctgagcagcggcggcagcgacagcgacgagagcgtgtacaaggtgctgctgctgggcgcccccggcgtgggcaagagcgccctggccagaatcttcggcggcgtggaggacggccccgaggccgaggccgccggccacacctacgacagaagcatcgtggtggacggcgaggaggccagcctgatggtgtacgacatctgggagcaggacggcggcagatggctgcccggccactgcatggccatgggcgacgcctacgtgatcgtgtacagcgtgaccgacaagggcagcttcgagaaggccagcgagctgagagtgcagctgagaagagccagacagaccgacgacgtgcccatcatcctggtgggcaacaagagcgacctggtgagaagcagagaggtgagcgtggacgagggcagagcctgcgccgtggtgttcgactgcaagttcatcgagaccagcgccgccctgcaccacaacgtgcaggccctgttcgagggcgtggtgagacagatcagactgagaagagacagcaaggaggccaacgccagaagacaggccggcaccagaagaagagagagcctgggcaagaaggccaagagattcctgggcagaatcgtggccagaaacagcagaaagatggccttcagagccaagagcaagagctgccacgacctgagcgtgctgtag

SEQ ID NO: 96459 - DNA, 927 bp, synthetic construct; identical to SEQ ID NO: 96458
  misc_feature 1..927: note = Description of Artificial Sequence: Synthetic coding sequence
  source 1..927: mol_type = other DNA

SEQ ID NO: 96460 - DNA, 579 bp, synthetic construct
  misc_feature 1..579: note = Description of Artificial Sequence: Synthetic coding sequence
  source 1..579: mol_type = other DNA
atgcaggccatcaagtgcgtggtggtgggcgacggcgccgtgggcaagacctgcctgctgatcagctacaccaccaacgccttccccggcgagtacatccccaccgtgttcgacaactacagcgccaacgtgatggtggacggcaagcccgtgaacctgggcctgtgggacaccgccggccaggaggactacgacagactgagacccctgagctacccccagaccgacgtgttcctgatctgcttcagcctggtgagccccgccagcttcgagaacgtgagagccaagtggtaccccgaggtgagacaccactgcccccacacccccatcctgctggtgggcaccaagctggacctgagagacgacaaggacaccatcgagagactgagagacaagaagctggcccccatcacctacccccagggcctggccatggccagagagatcggcagcgtgaagtacctggagtgcagcgccctgacccagagaggcctgaagaccgtgttcgacgaggccatcagagccgtgctgtgccccccccccgtgaagaagcccggcaagaagtgcaccgtgttctag

SEQ ID NO: 96461 - DNA, 942 bp, synthetic construct
  misc_feature 1..942: note = Description of Artificial Sequence: Synthetic coding sequence
  source 1..942: mol_type = other DNA
atgcccaacaccgccatgaagaagaaggtgctgctgatgggcaagagcggcagcggcaagaccagcatgagaagcatcatcttcgccaactacatcgccagagacaccagaagactgggcgccaccatcgacgtggagcacagccacgtgagattcctgggcaacctggtgctgaacctgtgggactgcggcggccaggacaccttcatggagaactacttcaccagccagagagacaacatcttcagaaacgtggaggtgctgatctacgtgttcgacgtggagagcagagagctggagaaggacatgcactactaccagagctgcctggaggccatcctgcagaacagccccgacgccaagatcttctgcctggtgcacaagatggacctggtgcaggaggaccagagagacctgatcttcaaggagagagaggaggacctgagaagactgagcagacccctggagtgcgcctgcttcagaaccagcatctgggacgagaccctgtacaaggcctggagcagcatcgtgtaccagctgatccccaacgtgcagcagctggagatgaacctgagaaacttcgcccagatcatcgaggccgacgaggtgctgctgttcgagagagccaccttcctggtgatcagccactaccagtgcaaggagcagagagacgtgcacagattcgagaagatcagcaacatcatcaagcagttcaagctgagctgcagcaagctggccgccagcttccagagcatggaggtgagaaacagcaacttcgccgccttcatcgacatcttcaccagcaacacctacgtgatggtggtgatgagcgaccccagcatccccagcgccgccaccctgatcaacatcagaaacgccagaaagcacttcgagaagctggagagagtggacggccccaagcacagcctgctgatgagatag

SEQ ID NO: 96462 - DNA, 1125 bp, synthetic construct
  misc_feature 1..1125: note = Description of Artificial Sequence: Synthetic coding sequence
  source 1..1125: mol_type = other DNA
atggaggagagcgacagcgagaagaccaccgagaaggagaacctgggccccagaatggacccccccctgggcgagcccgagggcagcctgggctgggtgctgcccaacaccgccatgaagaagaaggtgctgctgatgggcaagagcggcagcggcaagaccagcatgagaagcatcatcttcgccaactacatcgccagagacaccagaagactgggcgccaccatcctggacagaatccacagcctgcagatcaacagcagcctgagcacctacagcctggtggacagcgtgggcaacaccaagaccttcgacgtggagcacagccacgtgagattcctgggcaacctggtgctgaacctgtgggactgcggcggccaggacaccttcatggagaactacttcaccagccagagagacaacatcttcagaaacgtggaggtgctgatctacgtgttcgacgtggagagcagagagctggagaaggacatgcactactaccagagctgcctggaggccatcctgcagaacagccccgacgccaagatcttctgcctggtgcacaagatggacctggtgcaggaggaccagagagacctgatcttcaaggagagagaggaggacctgagaagactgagcagacccctggagtgcagctgcttcagaaccagcatctgggacgagaccctgtacaaggcctggagcagcatcgtgtaccagctgatccccaacgtgcagcagctggagatgaacctgagaaacttcgccgagatcatcgaggccgacgaggtgctgctgttcgagagagccaccttcctggtgatcagccactaccagtgcaaggagcagagagacgcccacagattcgagaagatcagcaacatcatcaagcagttcaagctgagctgcagcaagctggccgccagcttccagagcatggaggtgagaaacagcaacttcgccgccttcatcgacatcttcaccagcaacacctacgtgatggtggtgatgagcgaccccagcatccccagcgccgccaccctgatcaacatcagaaacgccagaaagcacttcgagaagctggagagagtggacggccccaagcagtgcctgctgatgagatag

SEQ ID NO: 96463 - DNA, 1041 bp, synthetic construct
  misc_feature 1..1041: note = Description of Artificial Sequence: Synthetic coding sequence
  source 1..1041: mol_type = other DNA
atggaggagagcgacagcgagaagaccaccgagaaggagaacctgggccccagaatggacccccccctgggcgagcccgagggcagcctgggctgggtgctgcccaacaccgccatgaagaagaaggtgctgctgatgggcaagagcggcagcggcaagaccagcatgagaagcatcatcttcgccaactacatcgccagagacaccagaagactgggcgccaccatcgacgtggagcacagccacgtgagattcctgggcaacctggtgctgaacctgtgggactgcggcggccaggacaccttcatggagaactacttcaccagccagagagacaacatcttcagaaacgtggaggtgctgatctacgtgttcgacgtggagagcagagagctggagaaggacatgcactactaccagagctgcctggaggccatcctgcagaacagccccgacgccaagatcttctgcctggtgcacaagatggacctggtgcaggaggaccagagagacctgatcttcaaggagagagaggaggacctgagaagactgagcagacccctggagtgcagctgcttcagaaccagcatctgggacgagaccctgtacaaggcctggagcagcatcgtgtaccagctgatccccaacgtgcagcagctggagatgaacctgagaaacttcgccgagatcatcgaggccgacgaggtgctgctgttcgagagagccaccttcctggtgatcagccactaccagtgcaaggagcagagagacgcccacagattcgagaagatcagcaacatcatcaagcagttcaagctgagctgcagcaagctggccgccagcttccagagcatggaggtgagaaacagcaacttcgccgccttcatcgacatcttcaccagcaacacctacgtgatggtggtgatgagcgaccccagcatccccagcgccgccaccctgatcaacatcagaaacgccagaaagcacttcgagaagctggagagagtggacggccccaagcagtgcctgctgatgagatag

SEQ ID NO: 96464 - DNA, 585 bp, synthetic construct
  misc_feature 1..585: note = Description of Artificial Sequence: Synthetic coding sequence
  source 1..585: mol_type = other DNA
atgaagaagaaggtgctgctgatgggcaagagcggcagcggcaagaccagcatgagaagcatcatcttcgccaactacatcgccagagacaccagaagactgggcgccaccatcgacgtggagcacagccacgtgagattcctgggcaacctggtgctgaacctgtgggactgcggcggccaggacaccttcatggagaactacttcaccagccagagagacaacatcttcagaaacgtggaggtgctgatctacgtgttcgacgtggagagcagagagctggagaaggacatgcactactaccagagctgcctggaggccatcctgcagaacagccccgacgccaagatcttctgcctggtgcacaagatggacctggtgcaggaggaccagagagacctgatcttcaaggagagagaggaggacctgagaagactgagcagacccctggagtgcagctgcttcagaaccagcatctgggacgagaccctgtacaaggcctggagcagcatcgtgtaccagctgatccccaacgtgcagcagctggagatgaacctgagaaacttcgccgagatcatcgagtag

SEQ ID NO: 96465 - DNA, 1200 bp, synthetic construct
  misc_feature 1..1200: note = Description of Artificial Sequence: Synthetic coding sequence
  source 1..1200: mol_type = other DNA
atgagcctgcagtacggcgccgaggagacccccctggccggcagctacggcgccgccgacagcttccccaaggacttcggctacggcgtggaggaggaggaggaggaggccgccgccgccggcggcggcgtgggcgccggcgccggcggcggctgcggccccggcggcgccgacagcagcaagcccagaatcctgctgatgggcctgagaagaagcggcaagagcagcatccagaaggtggtgttccacaagatgagccccaacgagaccctgttcctggagagcaccaacaagatctacaaggacgacatcagcaacagcagcttcgtgaacttccagatctgggacttccccggccagatggacttcttcgaccccaccttcgactacgagatgatcttcagaggcaccggcgccctgatctacgtgatcgacgcccaggacgactacatggaggccctgaccagactgcacatcaccgtgagcaaggcctacaaggtgaaccccgacatgaacttcgaggtgttcatccacaaggtggacggcctgagcgacgaccacaagatcgagacccagagagacatccaccagagagccaacgacgacctggccgacgccggcctggagaagctgcacctgagcttctacctgaccagcatctacgaccacagcatcttcgaggccttcagcaaggtggtgcagaagctgatcccccagctgcccaccctggagaacctgctgaacatcttcatcagcaacagcggcatcgagaaggccttcctgttcgacgtggtgagcaagatctacatcgccaccgacagcagccccgtggacatgcagagctacgagctgtgctgcgacatgatcgacgtggtgatcgacgtgagctgcatctacggcctgaaggaggacggcagcggcagcgcctacgacaaggagagcatggccatcatcaagctgaacaacaccaccgtgctgtacctgaaggaggtgaccaagttcctggccctggtgtgcatcctgagagaggagagcttcgagagaaagggcctgatcgactacaacttccactgcttcagaaaggccatccacgaggtgttcgaggtgggcgtgaccagccacagaagctgcggccaccagaccagcgccagcagcctgaaggccctgacccacaacggcacccccagaaacgccatctag

SEQ ID NO: 96466 - DNA, 750 bp, synthetic construct
  misc_feature 1..750: note = Description of Artificial Sequence: Synthetic coding sequence
  source 1..750: mol_type = other DNA
atggaggccctggccagactgcacctgaccgtgaccagagcctacaaggtgaacaccgacatcaacttcgaggtgttcatccacaaggtggacggcctgagcgacgaccacaagatcgagacccagagagacatccaccagagagccaacgacgacctggccgacgccggcctggagaagatccacctgagcttctacctgaccagcatctacgaccacagcatcttcgaggccttcagcaaggtggtgcagaagctgatcccccagctgcccaccctggagaacctgctgaacatcttcatcagcaacagcggcatcgagaaggccttcctgttcgacgtggtgagcaagatctacatcgccaccgacagcacccccgtggacatgcagacctacgagctgtgctgcgacatgatcgacgtggtgatcgacatcagctgcatctacggcctgaaggaggacggcgccggcaccccctacgacaaggagagcaccgccatcatcaagctgaacaacaccaccgtgctgtacctgaaggaggtgaccaagttcctggccctggtgtgcttcgtgagagaggagagcttcgagagaaagggcctgatcgactacaacttccactgcttcagaaaggccatccacgaggtgttcgaggtgagaatgaaggtggtgaagagcagaaaggtgcagaacagactgcagaagaagaagagagccacccccaacggcacccccagagtgctgctgtag

SEQ ID NO: 96467 - DNA, 1203 bp, synthetic construct
  misc_feature 1..1203: note = Description of Artificial Sequence: Synthetic coding sequence
  source 1..1203: mol_type = other DNA
atgagccaggtgctgggcaagccccagccccaggacgaggacgacgccgaggaggaggaggaggaggacgagctggtgggcctggccgactacggcgacggccccgacagcagcgacgccgaccccgacagcggcaccgaggagggcgtgctggacttcagcgaccccttcagcaccgaggtgaagcccagaatcctgctgatgggcctgagaagaagcggcaagagcagcatccagaaggtggtgttccacaagatgagccccaacgagaccctgttcctggagagcaccaacaagatctgcagagaggacgtgagcaacagcagcttcgtgaacttccagatctgggacttccccggccagatcgacttcttcgaccccaccttcgactacgagatgatcttcagaggcaccggcgccctgatcttcgtgatcgacagccaggacgactacatggaggccctggccagactgcacctgaccgtgaccagagcctacaaggtgaacaccgacatcaacttcgaggtgttcatccacaaggtggacggcctgagcgacgaccacaagatcgagacccagagagacatccaccagagagccaacgacgacctggccgacgccggcctggagaagatccacctgagcttctacctgaccagcatctacgaccacagcatcttcgaggccttcagcaaggtggtgcagaagctgatcccccagctgcccaccctggagaacctgctgaacatcttcatcagcaacagcggcatcgagaaggccttcctgttcgacgtggtgagcaagatctacatcgccaccgacagcacccccgtggacatgcagacctacgagctgtgctgcgacatgatcgacgtggtgatcgacatcagctgcatctacggcctgaaggaggacggcgccggcaccccctacgacaaggagagcaccgccatcatcaagctgaacaacaccaccgtgctgtacctgaaggaggtgaccaagttcctggccctggtgtgcttcgtgagagaggagagcttcgagagaaagggcctgatcgactacaacttccactgcttcagaaaggccatccacgaggtgttcgaggtgagaatgaaggtggtgaagagcagaaaggtgcagaacagactgcagaagaagaagagagccacccccaacggcacccccagagtgctgctgtag

SEQ ID NO: 96468 - DNA, 348 bp, synthetic construct
  misc_feature 1..348: note = Description of Artificial Sequence: Synthetic coding sequence
  source 1..348: mol_type = other DNA
atgctgagagacaccatgaagagctggaacgacagccagagcgacctgtgcagcaccgaccaggaggaggaggaggagatgatcttcggcgagaacgaggacgacctggacgagatgatggacctgagcgacctgcccaccagcctgttcgcctgcagcgtgcacgaggccgtgttcgaggccagagagcagaaggagagaaacatgaacttcaccagagagcagagcagacaccccgcctggtggttcatgagcgtgaaggtgaagctgaagagaaagaagagacagaagacccccaacagaaagctgcccagaagaggcgcccccaccctgagaccccagagatag

SEQ ID NO: 96469 - DNA, 726 bp, synthetic construct
  misc_feature 1..726: note = Description of Artificial Sequence: Synthetic coding sequence
  source 1..726: mol_type = other DNA
atgctgagagacaccatgaagagctggaacgacagccagagcgacctgtgcagcaccgaccaggaggaggaggaggagatgatcttcggcgagaacgaggacgacctggacgagatgatggacctgagcgacctgcccaccagcctgttcgcctgcagcgtgcacgaggccgtgttcgaggccagagagcagaaggagagattcgaggccctgttcaccatctacgacgaccaggtgaccttccagctgttcaagagcttcagaagagtgagaatcaacttcagcaagcccgaggccgccgccagagccagaatcgagctgcacgagaccgacttcaacggccagaagctgaagctgtacttcgcccaggtgcagatgagcggcgaggtgagagacaagagctacctgctgcccccccagcccgtgaagcagttcctgatcagcccccccgccagcccccccgtgggctggaagcagagcgaggacgccatgcccgtgatcaactacgacctgctgtgcgccgtgagcaagctgggccccggcgagaagtacgagctgcacgccggcaccgagagcacccccagcgtggtggtgcacgtgtgcgagagcgagaccgaggaggaggaggagaccaagaaccccaagcagaagatcgcccagaccagaagacccgacccccccaccgccgccctgaacgagccccagaccttcgactgcgccctgtag

SEQ ID NO: 96470 - DNA, 522 bp, synthetic construct
  misc_feature 1..522: note = Description of Artificial Sequence: Synthetic coding sequence
  source 1..522: mol_type = other DNA
atgctgagagacaccatgaagagctggaacgacagccagagcgacctgtgcagcaccgaccaggaggaggaggaggagatgatcttcggcgagaacgaggacgacctggacgagatgatggacctgagcgacctgcccaccagcctgttcgcctgcagcgtgcacgaggccgtgttcgaggccagagagcagaaggagagattcgaggccctgttcaccatctacgacgaccaggtgaccttccagctgttcaagagcttcagaagagtgagaatcaacttcagcaagcccgaggccgccgccagagccagaatcgagctgcacgagaccgacttcaacggccagaagctgaagctgtacttcgcccaggagagaaacatgaacttcaccagagagcagagcagacaccccgcctggtggttcatgagcgtgaaggtgaagctgaagagaaagaagagacagaagacccccaacagaaagctgcccagaagaggcgcccccaccctgagaccccagagatag

SEQ ID NO: 96471 - DNA, 198 bp, synthetic construct
  misc_feature 1..198: note = Description of Artificial Sequence: Synthetic coding sequence
  source 1..198: mol_type = other DNA
atgctgagagacaccatgaagagctggaacgacagccagagcgacctgtgcagcaccgaccaggaggaggaggaggagatgatcttcggcgagaacgaggacgacctggacgagatgatggacctgagcgacctgcccaccagcctgttcgcctgcagcgtgcacgaggccgtgttcgaggccagagagcagaagtag

SEQ ID NO: 96472 - DNA, 696 bp, synthetic construct
  misc_feature 1..696: note = Description of Artificial Sequence: Synthetic coding sequence
  source 1..696: mol_type = other DNA
atgctgagagacaccatgaagagctggaacgacagccagagcgacctgtgcagcaccgaccaggaggaggaggaggagatgatcttcggcgagaacgaggacgacctggacgagatgatggacctgagcgacctgcccaccagcctgttcgcctgcagcgtgcacgaggccgtgttcgaggccagagagcagaaggagagattcgaggccctgttcaccatctacgacgaccaggtgaccttccagctgttcaagagcttcagaagagtgagaatcaacttcagcaagcccgaggccgccgccagagccagaatcgagctgcacgagaccgacttcaacggccagaagctgaagctgtacttcgcccagagctacctgctgcccccccagcccgtgaagcagttcctgatcagcccccccgccagcccccccgtgggctggaagcagagcgaggacgccatgcccgtgatcaactacgacctgctgtgcgccgtgagcaagctgggccccggcgagaagtacgagctgcacgccggcaccgagagcacccccagcgtggtggtgcacgtgtgcgagagcgagaccgaggaggaggaggagaccaagaaccccaagcagaagatcgcccagaccagaagacccgacccccccaccgccgccctgaacgagccccagaccttcgactgcgccctgtag

SEQ ID NO: 96473 - DNA, 552 bp, synthetic construct
  misc_feature 1..552: note = Description of Artificial Sequence: Synthetic coding sequence
  source 1..552: mol_type = other DNA
atgctgagagacaccatgaagagctggaacgacagccagagcgacctgtgcagcaccgaccaggaggaggaggaggagatgatcttcggcgagaacgaggacgacctggacgagatgatggacctgagcgacctgcccaccagcctgttcgcctgcagcgtgcacgaggccgtgttcgaggccagagagcagaaggtgcagatgagcggcgaggtgagagacaagagctacctgctgcccccccagcccgtgaagcagttcctgatcagcccccccgccagcccccccgtgggctggaagcagagcgaggacgccatgcccgtgatcaactacgacctgctgtgcgccgtgagcaagctgggccccggcgagaagtacgagctgcacgccggcaccgagagcacccccagcgtggtggtgcacgtgtgcgagagcgagaccgaggaggaggaggagaccaagaaccccaagcagaagatcgcccagaccagaagacccgacccccccaccgccgccctgaacgagccccagaccttcgactgcgccctgtag

SEQ ID NO: 96474 - DNA, 900 bp, synthetic construct
  misc_feature 1..900: note = Description of Artificial Sequence: Synthetic coding sequence
  source 1..900: mol_type = other DNA
atgcacagcctggccaccgccgcccccgtgcccaccaccctggcccaggtggacagagagaagatctaccagtggatcaacgagctgagcagccccgagaccagagagaacgccctgctggagctgagcaagaagagagagagcgtgcccgacctggcccccatgctgtggcacagcttcggcaccatcgccgccctgctgcaggagatcgtgaacatctaccccagcatcaacccccccaccctgaccgcccaccagagcaacagagtgtgcaacgccctggccctgctgcagtgcgtggccagccaccccgagaccagaagcgccttcctggccgcccacatccccctgttcctgtaccccttcctgcacaccgtgagcaagaccagacccttcgagtacctgagactgaccagcctgggcgtgatcggcgccctggtgaagaccgacgagcaggaggtgatcaacttcctgctgaccaccgagatcatccccctgtgcctgagaatcatggagagcggcagcgagctgagcaagaccgtggccaccttcatcctgcagaagatcctgctggacgacaccggcctggcctacatctgccagacctacgagagattcagccacgtggccatgatcctgggcaagatggtgctgcagctgagcaaggagcccagcgccagactgctgaagcacgtggtgagatgctacctgagactgagcgacaaccccagagccagagaggccctgagacagtgcctgcccgaccagctgaaggacaccaccttcgcccaggtgctgaaggacgacaccaccaccaagagatggctggcccagctggtgaagaacctgcaggagggccaggtgaccgaccccagaggcatccccctgcccccccagtag

SEQ ID NO: 96475 - DNA, 996 bp, synthetic construct
  misc_feature 1..996: note = Description of Artificial Sequence: Synthetic coding sequence
  source 1..996: mol_type = other DNA
atgcacagcctggccaccgccgcccccgtgcccaccaccctggcccaggtggacagagagaagatctaccagtggatcaacgagctgagcagccccgagaccagagagaacgccctgctggagctgagcaagaagagagagagcgtgcccgacctggcccccatgctgtggcacagcttcggcaccatcgccgccctgctgcaggagatcgtgaacatctaccccagcatcaacccccccaccctgaccgcccaccagagcaacagagtgtgcaacgccctggccctgctgcagtgcgtggccagccaccccgagaccagaagcgccttcctggccgcccacatccccctgttcctgtaccccttcctgcacaccgtgagcaagaccagacccttcgagtacctgagactgaccagcctgggcgtgatcgtggagaccggcttccaccacgtgggccaggccgacctggagctgcccaccagcagcgacctgcccgccagcgccagccagagcgccggcatcaccggcgccctggtgaagaccgacgagcaggaggtgatcaacttcctgctgaccaccgagatcatccccctgtgcctgagaatcatggagagcggcagcgagctgagcaagaccgtggccaccttcatcctgcagaagatcctgctggacgacaccggcctggcctacatctgccagacctacgagagattcagccacgtggccatgatcctgggcaagatggtgctgcagctgagcaaggagcccagcgccagactgctgaagcacgtggtgagatgctacctgagactgagcgacaaccccagagccagagaggccctgagacagtgcctgcccgaccagctgaaggacaccaccttcgcccaggtgctgaaggacgacaccaccaccaagagatggctggcccagctggtgaagaacctgcaggagggccaggtgaccgaccccagaggcatccccctgcccccccagtag

SEQ ID NO: 96476 - DNA, 900 bp, synthetic construct; identical to SEQ ID NO: 96474
  misc_feature 1..900: note = Description of Artificial Sequence: Synthetic coding sequence
  source 1..900: mol_type = other DNA

SEQ ID NO: 96477 - DNA, 777 bp, synthetic construct
  misc_feature 1..777: note = Description of Artificial Sequence: Synthetic coding sequence
  source 1..777: mol_type = other DNA
atgcacagcctggccaccgccgcccccgtgcccaccaccctggcccaggtggacagagagaagatctaccagtggatcaacgagctgagcagccccgagaccagagagaacgccctgctggagctgagcaagaagagagagagcgtgcccgacctggcccccatgctgtggcacagcttcggcaccatcgccgccctgctgcaggagatcgtgaacatctaccccagcatcaacccccccaccctgaccgcccaccagagcaacagagtgtgcaacgccctggccctgctgcagtgcgtggccagccaccccgagaccagaagcgccttcctggccgcccacatccccctgttcctgtaccccttcctgcacaccgtgagcaagaccagacccttcgagtacctgagactgaccagcctgggcgtgatcggcgccctggtgaagaccgacgagcaggaggtgatcaacttcctgctgaccaccgagatcatccccctgtgcctgagaatcatggagagcggcagcgagctgagcaagaccgtggccaccttcatcctgcagaagatcctgctggacgacaccggcctggcctacatctgccagacctacgagagattcagccacgtggccatgatcctgggcaagatggtgctgcagctgagcaaggagcccagcgccagactgctgaagcacgtggtgagatgctacctgagactgagcgacaaccccagattcagcgacctgaccttctgctggagcagcttccagagaaagtag

SEQ ID NO: 96478 - DNA, 990 bp, synthetic construct
  misc_feature 1..990: note = Description of Artificial Sequence: Synthetic coding sequence
  source 1..990: mol_type = other DNA
atggccgccctgggcggcgacggcctgagactgctgagcgtgagcagacccgagagaccccccgagagcgccgccctgggcggcctgggccccggcctgtgctgctgggtgagcgtgttcagctgcctgagcctggcctgcagctacgtgggcagcctgtacgtgtggaagagcgagctgcccagagaccaccccgccgtgatcaagagaagattcaccagcgtgctggtggtgagcagcctgagccccctgtgcgtgctgctgtggagagagctgaccggcatccagcccggcaccagcctgctgaccctgatgggcttcagactggagggcatcttccccgccgccctgctgcccctgctgctgaccatgatcctgttcctgggccccctgatgcagctgagcatggactgcccctgcgacctggccgacggcctgaaggtggtgctggcccccagaagctgggccagatgcctgaccgacatgagatggctgagaaaccaggtgatcgcccccctgaccgaggagctggtgttcagagcctgcatgctgcccatgctggccccctgcatgggcctgggccccgccgtgttcacctgccccctgttcttcggcgtggcccacttccaccacatcatcgagcagctgagattcagacagagcagcgtgggcaacatcttcctgagcgccgccttccagttcagctacaccgccgtgttcggcgcctacaccgccttcctgttcatcagaaccggccacctgatcggccccgtgctgtgccacagcttctgcaactacatgggcttccccgccgtgtgcgccgccctggagcacccccagagaagacccctgctggccggctacgccctgggcgtgggcctgttcctgctgctgctgcagcccctgaccgaccccaagctgtacggcagcctgcccctgtgcgtgctgctggagagagccggcgacagcgaggcccccctgtgcagctag

SEQ ID NO: 96479 - DNA, 927 bp, synthetic construct
  misc_feature 1..927: note = Description of Artificial Sequence: Synthetic coding sequence
  source 1..927: mol_type = other DNA
atggccgccctgggcggcgacggcctgagactgctgagcgtgagcagacccgagagaccccccgagagcgccgccctgggcggcctgggccccggcctgtgctgctgggtgagcgtgttcagctgcctgagcctggcctgcagctacgtgggcagcctgtacgtgtggaagagcgagctgcccagagaccaccccgccgtgatcaagagaagattcaccagcgtgctggtggtgagcagcctgagccccctgtgcgtgctgctgtggagagagctgaccggcatccagcccggcaccagcctgctgaccctgatgggcttcagactggagggcatcttccccgccgccctgctgcccctgctgctgaccatgatcctgttcctgggccccctgatgcagctgagcatggactgcccctgcgacctggccgacggcctgaaggtggtgctggcccccagaagctgggccagatgcctgaccgacatgagatggctgagaaaccaggtgatcgcccccctgaccgaggagctggtgttcagagcctgcatgctgcccatgctggccccctgcatgggcctgggccccgccgtgttcacctgccccctgttcttcggcgtggcccacttccaccacatcatcgagcagctgagattcagacagagcagcgtgggcaacatcttcctgagcgccggccacctgatcggccccgtgctgtgccacagcttctgcaactacatgggcttccccgccgtgtgcgccgccctggagcacccccagagaagacccctgctggccggctacgccctgggcgtgggcctgttcctgctgctgctgcagcccctgaccgaccccaagctgtacggcagcctgcccctgtgcgtgctgctggagagagccggcgacagcgaggcccccctgtgcagctag

SEQ ID NO: 96480 - DNA, 1164 bp, synthetic construct
  misc_feature 1..1164: note = Description of Artificial Sequence: Synthetic coding sequence
  source 1..1164: mol_type = other DNA
atggtgcccaagggcgccaccatgctggtgatcccccccggcctgagcgaggaggaggaggccctgcagaagaagttcaacaagctgaagaagaagaagaaggccctgctggccctgaagaagcagagcagcagcagcaccaccagccagggcggcgtgaagagaagcctgagcgagcagcccgtgatggacaccgccaccgccaccgagcaggccaagcagctggtgaagagcggcgccatcagcgccatcaaggccgagaccaagaacagcggcttcaagagaagcagaaccctggagggcaagctgaaggaccccgagaagggccccgtgcccaccttccagcccttccagagaagcatcagcgccgacgacgacctgcaggagagcagcagaagaccccagagaaagagcctgtacgagagcttcgtgagcagcagcgacagactgagagagctgggccccgacggcgaggaggccgagggccccggcgccggcgacggcccccccagaagcttcgactggggctacgaggagagaagcggcgcccacagcagcgccagcccccccagaagcagaagcagagacagaagccacgagagaaacagagacagagacagagacagagagagagacagagacagagacagagacagagacagagagagagacagagacagagacagagacagagacagagacagagagagagacagagacagagagagagacagagacagagacagagagggccccttcagaagaagcgacagcttccccgagagaagagcccccagaaagggcaacaccctgtacgtgtacggcgaggacatgacccccaccctgctgagaggcgccttcagccccttcggcaacatcatcgacctgagcatggacccccccagaaactgcgccttcgtgacctacgagaagatggagagcgccgaccaggccgtggccgagctgaacggcacccaggtggagagcgtgcagctgaaggtgaacatcgccagaaagcagcccatgctggacgccgccaccggcaagagcgtgtggggcagcctggccgtgcagaacagccccaagggctgccacagagacaagagaacccagatcgtgtacagcgacgacgtgtacaaggagaacctggtggacggcttctag

SEQ ID NO: 96481 - DNA, 1143 bp, synthetic construct
  misc_feature 1..1143: note = Description of Artificial Sequence: Synthetic coding sequence
  source 1..1143: mol_type = other DNA
atgctggtgatcccccccggcctgagcgaggaggaggaggccctgcagaagaagttcaacaagctgaagaagaagaagaaggccctgctggccctgaagaagcagagcagcagcagcaccaccagccagggcggcgtgaagagaagcctgagcgagcagcccgtgatggacaccgccaccgccaccgagcaggccaagcagctggtgaagagcggcgccatcagcgccatcaaggccgagaccaagaacagcggcttcaagagaagcagaaccctggagggcaagctgaaggaccccgagaagggccccgtgcccaccttccagcccttccagagaagcatcagcgccgacgacgacctgcaggagagcagcagaagaccccagagaaagagcctgtacgagagcttcgtgagcagcagcgacagactgagagagctgggccccgacggcgaggaggccgagggccccggcgccggcgacggcccccccagaagcttcgactggggctacgaggagagaagcggcgcccacagcagcgccagcccccccagaagcagaagcagagacagaagccacgagagaaacagagacagagacagagacagagagagagacagagacagagacagagacagagacagagagagagacagagacagagacagagacagagacagagacagagagagagacagagacagagagagagacagagacagagacagagagggccccttcagaagaagcgacagcttccccgagagaagagcccccagaaagggcaacaccctgtacgtgtacggcgaggacatgacccccaccctgctgagaggcgccttcagccccttcggcaacatcatcgacctgagcatggacccccccagaaactgcgccttcgtgacctacgagaagatggagagcgccgaccaggccgtggccgagctgaacggcacccaggtggagagcgtgcagctgaaggtgaacatcgccagaaagcagcccatgctggacgccgccaccggcaagagcgtgtggggcagcctggccgtgcagaacagccccaagggctgccacagagacaagagaacccagatcgtgtacagcgacgacgtgtacaaggagaacctggtggacggcttctag

SEQ ID NO: 96482 - DNA, 1143 bp, synthetic construct; identical to SEQ ID NO: 96481
  misc_feature 1..1143: note = Description of Artificial Sequence: Synthetic coding sequence
  source 1..1143: mol_type = other DNA

SEQ ID NO: 96483 - DNA, 1143 bp, synthetic construct; identical to SEQ ID NO: 96481
  misc_feature 1..1143: note = Description of Artificial Sequence: Synthetic coding sequence
  source 1..1143: mol_type = other DNA

SEQ ID NO: 96484 - DNA, 885 bp, synthetic construct
  misc_feature 1..885: note = Description of Artificial Sequence: Synthetic coding sequence
  source 1..885: mol_type = other DNA
atgctggtgatcccccccggcctgagcgaggaggaggaggccctgcagaagaagttcaacaagctgaagaagaagaagaaggccctgctggccctgaagaagcagagcagcagcagcaccaccagccagggcggcgtgaagagaagcctgagcgagcagcccgtgatggacaccgccaccgccaccgagcaggccaagcagctggtgaagagcggcgccatcagcgccatcaaggccgagaccaagaacagcggcttcaagagaagcagaaccctggagggcaagctgaaggaccccgagaagggccccgtgcccaccttccagcccttccagagaagcatcagcgccgacgacgacctgcaggagagcagcagaagaccccagagaaagagcctgtacgagagcttcgtgagcagcagcgacagactgagagagctgggccccgacggcgaggaggccgagggccccggcgccggcgacggcccccccagaagcttcgactggggctacgaggagagaagcggcgcccacagcagcgccagcccccccagaagcagaagcagagacagaagccacgagagaaacagagacagagacagagacagagagagagacagagacagagacagagacagagacagagagagagacagagacagagacagagacagagacagagacagagagagagacagagacagagagagagacagagacagagacagagagggccccttcagaagaagcgacagcttccccgagagaagagcccccagaaagggcaacaccctgtacgtgtacggcgaggacatgacccccaccctgctgagaggcgccttcagccccttcggcaacatcatcgacctgagcatggaccccccctag

SEQ ID NO: 96485 - DNA, 480 bp, synthetic construct
  misc_feature 1..480: note = Description of Artificial Sequence: Synthetic coding sequence
  source 1..480: mol_type = other DNA
atgctggtgatcccccccggcctgagcgaggaggaggaggccctgcagaagaagttcaacaagctgaagaagaagaagaaggccctgctggccctgaagaagcagagcagcagcagcaccaccagccagggcggcgtgaagagaagcctgagcgagcagcccgtgatggacaccgccaccgccaccgagcaggccaagcagctggtgaagagcggcgccatcagcgccatcaaggccgagaccaagaacagcggcttcaagagaagcagaaccctggagggcaagctgaaggaccccgagaagggccccgtgcccaccttccagcccttccagagaagcatcagcgccgacgacgacctgcaggagagcagcagaagaccccagagaaagagcctgtacgagagcttcgtgagcagcagcgacagactgagagagctgggccccgacggcgaggaggccgagggccccggcgccggctag

SEQ ID NO: 96486 - DNA, 723 bp, synthetic construct
  misc_feature 1..723: note = Description of Artificial Sequence: Synthetic coding sequence
  source 1..723: mol_type = other DNA
atgctggtgatcccccccggcctgagcgaggaggaggaggccctgcagaagaagttcaacaagctgaagaagaagaagaaggccctgctggccctgaagaagcagagcagcagcagcaccaccagccagggcggcgtgaagagaagcctgagcgagcagcccgtgatggacaccgccaccgccaccgagcaggccaagcagctggtgaagagcggcgccatcagcgccatcaaggccgagaccaagaacagcggcttcaagagaagcagaaccctggagggcaagctgaaggaccccgagaagggccccgtgcccaccttccagcccttccagagaagcatcagcgccgacgacgacctgcaggagagcagcagaagaccccagagaaagagcctgtacgagagcgacagactgagagagctgggccccgacggcgaggaggccgagggccccggcgccggcgacggcccccccagaagcttcgactggggctacgaggagagaagcggcgcccacagcagcgccagcccccccagaagcagaagcagagacagaagccacgagagaaacagagacagagacagagacagagagagagacagagacagagacagagacagagacagagagagagacagagacagagacagagacagagacagagacagagagagagacagagacagagagagagacagagacagagacagagagggcccctag

SEQ ID NO: 96487 - DNA, 480 bp, synthetic construct; identical to SEQ ID NO: 96485
  misc_feature 1..480: note = Description of Artificial Sequence: Synthetic coding sequence
  source 1..480: mol_type = other DNA

SEQ ID NO: 96488 - DNA, 480 bp, synthetic construct; identical to SEQ ID NO: 96485
  misc_feature 1..480: note = Description of Artificial Sequence: Synthetic coding sequence
  source 1..480: mol_type = other DNA

SEQ ID NO: 96489 - DNA, 1005 bp, synthetic construct
  misc_feature 1..1005: note = Description of Artificial Sequence: Synthetic coding sequence
  source 1..1005: mol_type = other DNA
atgctggtgatcccccccggcctgagcgaggaggaggaggccctgcagaagaagttcaacaagctgaagaagaagaagaaggccctgctggccctgaagaagcagagcagcagcagcaccaccagccagggcggcgtgaagagaagcctgagcgagcagcccgtgatggacaccgccaccgccaccgagcaggccaagcagctggtgaagagcggcgccatcagcgccatcaaggccgagaccaagaacagcggcttcaagagaagcagaaccctggagggcaagctgaaggaccccgagaagggccccgtgcccaccttccagcccttccagagaagcatcagcgccgacgacgacctgcaggagagcagcagaagaccccagagaaagagcctgtacgagagcgacagactgagagagctgggccccgacggcgaggaggccgagggccccggcgccggcgacggcccccccagaagcttcgactggggctacgaggagagaagcggcgcccacagcagcgccagcccccccagaagcagaagcagagacagaagccacgagagaaacagagacagagacagagacagagagagagacagagacagagacagagacagagacagagagagagacagagacagagacagagacagagacagagacagagagagagacagagacagagagagagacagagacagagacagagagggccccttcagaagaagcgacagcttccccgagagaagagcccccagaaagggcaacaccctgtacgtgtacggcgaggacatgacccccaccctgctgagaggcgccttcagccccttcggcaacatcatcgacctgagcatggacccccccagaaactgcgccttcgtgacctacgagaagatggagagcgccgaccaggccgtggccgagctgaacggcacccaggtggagagcgtgcagctgaaggtgaacatcgccagaaagcagcccatgctggacgccgcctag

SEQ ID NO: 96490 - DNA, 723 bp, synthetic construct; identical to SEQ ID NO: 96486
  misc_feature 1..723: note = Description of Artificial Sequence: Synthetic coding sequence
  source 1..723: mol_type = other DNA

SEQ ID NO: 96491 - DNA, 480 bp, synthetic construct; identical to SEQ ID NO: 96485
  misc_feature 1..480: note = Description of Artificial Sequence: Synthetic coding sequence
  source 1..480: mol_type = other DNA

SEQ ID NO: 96492 - DNA, 1005 bp, synthetic construct; identical to SEQ ID NO: 96489
  misc_feature 1..1005: note = Description of Artificial Sequence: Synthetic coding sequence
  source 1..1005: mol_type = other DNA

SEQ ID NO: 96493 - DNA, 480 bp, synthetic construct; identical to SEQ ID NO: 96485
  misc_feature 1..480: note = Description of Artificial Sequence: Synthetic coding sequence
  source 1..480: mol_type = other DNA

SEQ ID NO: 96494 - DNA, 1143 bp, synthetic construct; identical to SEQ ID NO: 96481
  misc_feature 1..1143: note = Description of Artificial Sequence: Synthetic coding sequence
  source 1..1143: mol_type = other DNA

SEQ ID NO: 96495 - DNA, 885 bp, synthetic construct; identical to SEQ ID NO: 96484
  misc_feature 1..885: note = Description of Artificial Sequence: Synthetic coding sequence
  source 1..885: mol_type = other DNA

SEQ ID NO: 96496 - DNA, 723 bp, synthetic construct; identical to SEQ ID NO: 96486
  misc_feature 1..723: note = Description of Artificial Sequence: Synthetic coding sequence
  source 1..723: mol_type = other DNA

SEQ ID NO: 96497 - DNA, 885 bp, synthetic construct; identical to SEQ ID NO: 96484
  misc_feature 1..885: note = Description of Artificial Sequence: Synthetic coding sequence
  source 1..885: mol_type = other DNA

SEQ ID NO: 96498 - DNA, 1005 bp, synthetic construct; identical to SEQ ID NO: 96489
  misc_feature 1..1005: note = Description of Artificial Sequence: Synthetic coding sequence
  source 1..1005: mol_type = other DNA

SEQ ID NO: 96499 - DNA, 1005 bp, synthetic construct; identical to SEQ ID NO: 96489
  misc_feature 1..1005: note = Description of Artificial Sequence: Synthetic coding sequence
  source 1..1005: mol_type = other DNA

SEQ ID NO: 96500 - DNA, 1005 bp, synthetic construct; identical to SEQ ID NO: 96489
  misc_feature 1..1005: note = Description of Artificial Sequence: Synthetic coding sequence
  source 1..1005: mol_type = other DNA

SEQ ID NO: 96501 - DNA, 1053 bp, synthetic construct
  misc_feature 1..1053: note = Description of Artificial Sequence: Synthetic coding sequence
  source 1..1053: mol_type = other DNA
atgctggtgatcccccccggcctgagcgaggaggaggaggccctgcagaagaagttcaacaagctgaagaagaagaagaaggccctgctggccctgaagaagcagagcagcagcagcaccaccagccagggcggcgtgaagagaagcctgagcgagcagcccgtgatggacaccgccaccgccaccgagcaggccaagcagctggtgaagagcggcgccatcagcgccatcaaggccgagaccaagaacagcggcttcaagagaagcagaaccctggagggcaagctgaaggaccccgagaagggccccgtgcccaccttccagcccttccagagaagcatcagcgccgacgacgacctgcaggagagcagcagaagaccccagagaaagagcctgtacgagagcttcgactggggctacgaggagagaagcggcgcccacagcagcgccagcccccccagaagcagaagcagagacagaagccacgagagaaacagagacagagacagagacagagagagagacagagacagagacagagacagagacagagagagagacagagacagagacagagacagagacagagacagagagagagacagagacagagagagagacagagacagagacagagagggccccttcagaagaagcgacagcttccccgagagaagagcccccagaaagggcaacaccctgtacgtgtacggcgaggacatgacccccaccctgctgagaggcgccttcagccccttcggcaacatcatcgacctgagcatggacccccccagaaactgcgccttcgtgacctacgagaagatggagagcgccgaccaggccgtggccgagctgaacggcacccaggtggagagcgtgcagctgaaggtgaacatcgccagaaagcagcccatgctggacgccgccaccggcaagagcgtgtggggcagcctggccgtgcagaacagccccaagggctgccacagagacaagagaacccagatcgtgtacagcgacgacgtgtacaaggagaacctggtggacggcttctag

SEQ ID NO: 96502 - DNA, 1143 bp, synthetic construct; identical to SEQ ID NO: 96481
  misc_feature 1..1143: note = Description of Artificial Sequence: Synthetic coding sequence
  source 1..1143: mol_type = other DNA

SEQ ID NO: 96503 - DNA, 723 bp, synthetic construct; identical to SEQ ID NO: 96486
  misc_feature 1..723: note = Description of Artificial Sequence: Synthetic coding sequence
  source 1..723: mol_type = other DNA

SEQ ID NO: 96504 - DNA, 1005 bp, synthetic construct; identical to SEQ ID NO: 96489
  misc_feature 1..1005: note = Description of Artificial Sequence: Synthetic coding sequence
  source 1..1005: mol_type = other DNA

SEQ ID NO: 96505 - DNA, 885 bp, synthetic construct; identical to SEQ ID NO: 96484
  misc_feature 1..885: note = Description of Artificial Sequence: Synthetic coding sequence
  source 1..885: mol_type = other DNA

SEQ ID NO: 96506 - DNA, 885 bp, synthetic construct; identical to SEQ ID NO: 96484
  misc_feature 1..885: note = Description of Artificial Sequence: Synthetic coding sequence
  source 1..885: mol_type = other DNA

SEQ ID NO: 96507 - DNA, 885 bp, synthetic construct; identical to SEQ ID NO: 96484
  misc_feature 1..885: note = Description of Artificial Sequence: Synthetic coding sequence
  source 1..885: mol_type = other DNA

SEQ ID NO: 96508 - DNA, 723 bp, synthetic construct; identical to SEQ ID NO: 96486
  misc_feature 1..723: note = Description of Artificial Sequence: Synthetic coding sequence
  source 1..723: mol_type = other DNA

SEQ ID NO: 96509 - DNA, 1143 bp, synthetic construct; identical to SEQ ID NO: 96481
  misc_feature 1..1143: note = Description of Artificial Sequence: Synthetic coding sequence
  source 1..1143: mol_type = other DNA

SEQ ID NO: 96510 - DNA, 480 bp, synthetic construct; identical to SEQ ID NO: 96485
  misc_feature 1..480: note = Description of Artificial Sequence: Synthetic coding sequence
  source 1..480: mol_type = other DNA

SEQ ID NO: 96511 - DNA, 1164 bp, synthetic construct; identical to SEQ ID NO: 96480
  misc_feature 1..1164: note = Description of Artificial Sequence: Synthetic coding sequence
  source 1..1164: mol_type = other DNA

SEQ ID NO: 96512 - DNA, 1164 bp, synthetic construct; identical to SEQ ID NO: 96480
  misc_feature 1..1164: note = Description of Artificial Sequence: Synthetic coding sequence
  source 1..1164: mol_type = other DNA

SEQ ID NO: 96513 - DNA, 1164 bp, synthetic construct; identical to SEQ ID NO: 96480
  misc_feature 1..1164: note = Description of Artificial Sequence: Synthetic coding sequence
  source 1..1164: mol_type = other DNA

SEQ ID NO: 96514 - DNA, 1164 bp, synthetic construct; identical to SEQ ID NO: 96480
  misc_feature 1..1164: note = Description of Artificial Sequence: Synthetic coding sequence
  source 1..1164: mol_type = other DNA

SEQ ID NO: 96515 - DNA, 1164 bp, synthetic construct; identical to SEQ ID NO: 96480
  misc_feature 1..1164: note = Description of Artificial Sequence: Synthetic coding sequence
  source 1..1164: mol_type = other DNA

SEQ ID NO: 96516 - DNA, 3294 bp, synthetic construct
  misc_feature 1..3294: note = Description of Artificial Sequence: Synthetic coding sequence
  source 1..3294: mol_type = other DNA
atggccacccaggtgatgggccagagcagcggcggcggcggcctgttcaccagcagcggcaacatcggcatggccctgcccaacgacatgtacgacctgcacgacctgagcaaggccgagctggccgccccccagctgatcatgctggccaacgtggccctgaccggcgaggtgaacggcagctgctgcgactacctggtgggcgaggagagacagatggccgagctgatgcccgtgggcgacaacaacttcagcgacagcgaggagggcgagggcctggaggagagcgccgacatcaagggcgagccccacggcctggagaacatggagctgagaagcctggagctgagcgtggtggagccccagcccgtgttcgaggccagcggcgcccccgacatctacagcagcaacaaggacctgccccccgagacccccggcgccgaggacaagggcaagagcagcaagaccaagcccttcagatgcaagccctgccagtacgaggccgagagcgaggagcagttcgtgcaccacatcagagtgcacagcgccaagaagttcttcgtggaggagagcgccgagaagcaggccaaggccagagagagcggcagcagcaccgccgaggagggcgacttcagcaagggccccatcagatgcgacagatgcggctacaacaccaacagatacgaccactacaccgcccacctgaagcaccacaccagagccggcgacaacgagagagtgtacaagtgcatcatctgcacctacaccaccgtgagcgagtaccactggagaaagcacctgagaaaccacttccccagaaaggtgtacacctgcggcaagtgcaactacttcagcgacagaaagaacaactacgtgcagcacgtgagaacccacaccggcgagagaccctacaagtgcgagctgtgcccctacagcagcagccagaagacccacctgaccagacacatgagaacccacagcggcgagaagcccttcaagtgcgaccagtgcagctacgtggccagcaaccagcacgaggtgaccagacacgccagacaggtgcacaacggccccaagcccctgaactgcccccactgcgactacaagaccgccgacagaagcaacttcaagaagcacgtggagctgcacgtgaaccccagacagttcaactgccccgtgtgcgactacgccgccagcaagaagtgcaacctgcagtaccacttcaagagcaagcaccccacctgccccaacaagaccatggacgtgagcaaggtgaagctgaagaagaccaagaagagagaggccgacctgcccgacaacatcaccaacgagaagaccgagatcgagcagaccaagatcaagggcgacgtggccggcaagaagaacgagaagagcgtgaaggccgagaagagagacgtgagcaaggagaagaagcccagcaacaacgtgagcgtgatccaggtgaccaccagaaccagaaagagcgtgaccgaggtgaaggagatggacgtgcacaccggcagcaacagcgagaagttcagcaagaccaagaagagcaagagaaagctggaggtggacagccacagcctgcacggccccgtgaacgacgaggagagcagcaccaagaagaagaagaaggtggagagcaagagcaagaacaacagccaggaggtgcccaagggcgacagcaaggtggaggagaacaagaagcagaacacctgcatgaagaagagcaccaagaagaagaccctgaagaacaagagcagcaagaagagcagcaagcccccccagaaggagcccgtggagaagggcagcgcccagatggaccccccccagatgggccccgcccccaccgaggccgtgcagaagggccccgtgcaggtggagccccccccccccatggagcacgcccagatggagggcgcccagatcagacccgcccccgacgagcccgtgcagatggaggtggtgcaggagggccccgcccagaaggagctgctgccccccgtggagcccgcccagatggtgggcgcccagatcgtgctggcccacatggagctgcccccccccatggagaccgcccagaccgaggtggcccagatgggccccgcccccatggagcccgcccagatggaggtggcccaggtggagagcgcccccatgcaggtggtgcagaaggagcccgtgcagatggagctgagcccccccatggaggtggtgcagaaggagcccgtgcagatcgagctgagcccccccatggaggtggtgcagaaggagcccgtgaagatcgagctgagcccccccatcgaggtggtgcagaaggagcccgtgcagatggagctgagcccccccatgggcgtggtgcagaaggagcccgcccagagagagccccccccccccagagagccccccctgcacatggagcccatcagcaagaagccccccctgagaaaggacaagaaggagaagagcaacatgcagagcgagagagccagaaaggagcaggtgctgatcgaggtgggcctggtgcccgtgaaggacagctggctgctgaaggagagcgtgagcaccgaggacctgagcccccccagcccccccctgcccaaggagaacctgagagaggaggccagcggcgaccagaagctgctgaacaccggcgagggcaacaaggaggcccccctgcagaaggtgggcgccgaggaggccgacgagagcctgcccggcctggccgccaacatcaacgagagcacccacatcagcagcagcggccagaacctgaacacccccgagggcgagaccctgaacggcaagcaccagaccgacagcatcgtgtgcgagatgaagatggacaccgaccagaacaccagagagaacctgaccggcatcaacagcaccgtggaggagcccgtgagccccatgctgccccccagcgccgtggaggagagagaggccgtgagcaagaccgccctggccagcccccccgccaccatggccgccaacgagagccaggagatcgacgaggacgagggcatccacagccacgagggcagcgacctgagcgacaacatgagcgagggcagcgacgacagcggcctgcacggcgccagacccgtgccccaggagagcagcagaaagaacgccaaggaggccctggccgtgaaggccgccaagggcgacttcgtgtgcatcttctgcgacagaagcttcagaaagggcaaggactacagcaagcacctgaacagacacctggtgaacgtgtactacctggaggaggccgcccagggccaggagtag

SEQ ID NO: 96517 - DNA, 3225 bp, synthetic construct
  misc_feature 1..3225: note = Description of Artificial Sequence: Synthetic coding sequence
  source 1..3225: mol_type = other DNA
atggccacccaggtgatgggccagagcagcggcggcggcggcctgttcaccagcagcggcaacatcggcatggccctgcccaacgacatgtacgacctgcacgacctgagcaaggccgagctggccgccccccagctgatcatgctggccaacgtggccctgaccggcgaggtgaacggcagctgctgcgactacctggtgggcgaggagagacagatggccgagctgatgcccgtgggcgacaacaacttcagcgacagcgaggagggcgagggcctggaggagagcgccgacatcaagggcgagccccacggcctggagaacatggagctgagaagcctggagctgagcgtggtggagccccagcccgtgttcgaggccagcggcgcccccgacatctacagcagcaacaaggacctgccccccgagacccccggcgccgaggacaagggcaagagcagcaagaccaagcccttcagatgcaagccctgccagtacgaggccgagagcgaggagcagttcgtgcaccacatcagagtgcacagcgccaagaagttcttcgtggaggagagcgccgagaagcaggccaaggccagagagagcggcagcagcaccgccgaggagggcgacttcagcaagggccccatcagatgcgacagatgcggctacaacaccaacagatacgaccactacaccgcccacctgaagcaccacaccagagccggcgacaacgagagagtgtacaagtgcatcatctgcacctacaccaccgtgagcgagtaccactggagaaagcacctgagaaaccacttccccagaaaggtgtacacctgcggcaagtgcaactacttcagcgacagaaagaacaactacgtgcagcacgtgagaacccacaccggcaagagacccagcggcgagaagcccttcaagtgcgaccagtgcagctacgtggccagcaaccagcacgaggtgaccagacacgccagacaggtgcacaacggccccaagcccctgaactgcccccactgcgactacaagaccgccgacagaagcaacttcaagaagcacgtggagctgcacgtgaaccccagacagttcaactgccccgtgtgcgactacgccgccagcaagaagtgcaacctgcagtaccacttcaagagcaagcaccccacctgccccaacaagaccatggacgtgagcaaggtgaagctgaagaagaccaagaagagagaggccgacctgcccgacaacatcaccaacgagaagaccgagatcgagcagaccaagatcaagggcgacgtggccggcaagaagaacgagaagagcgtgaaggccgagaagagagacgtgagcaaggagaagaagcccagcaacaacgtgagcgtgatccaggtgaccaccagaaccagaaagagcgtgaccgaggtgaaggagatggacgtgcacaccggcagcaacagcgagaagttcagcaagaccaagaagagcaagagaaagctggaggtggacagccacagcctgcacggccccgtgaacgacgaggagagcagcaccaagaagaagaagaaggtggagagcaagagcaagaacaacagccaggaggtgcccaagggcgacagcaaggtggaggagaacaagaagcagaacacctgcatgaagaagagcaccaagaagaagaccctgaagaacaagagcagcaagaagagcagcaagcccccccagaaggagcccgtggagaagggcagcgcccagatggaccccccccagatgggccccgcccccaccgaggccgtgcagaagggccccgtgcaggtggagccccccccccccatggagcacgcccagatggagggcgcccagatcagacccgcccccgacgagcccgtgcagatggaggtggtgcaggagggccccgcccagaaggagctgctgccccccgtggagcccgcccagatggtgggcgcccagatcgtgctggcccacatggagctgcccccccccatggagaccgcccagaccgaggtggcccagatgggccccgcccccatggagcccgcccagatggaggtggcccaggtggagagcgcccccatgcaggtggtgcagaaggagcccgtgcagatggagctgagcccccccatggaggtggtgcagaaggagcccgtgcagatcgagctgagcccccccatggaggtggtgcagaaggagcccgtgaagatcgagctgagcccccccatcgaggtggtgcagaaggagcccgtgcagatggagctgagcccccccatgggcgtggtgcagaaggagcccgcccagagagagccccccccccccagagagccccccctgcacatggagcccatcagcaagaagccccccctgagaaaggacaagaaggagaagagcaacatgcagagcgagagagccagaaaggagcaggtgctgatcgaggtgggcctggtgcccgtgaaggacagctggctgctgaaggagagcgtgagcaccgaggacctgagcccccccagcccccccctgcccaaggagaacctgagagaggaggccagcggcgaccagaagctgctgaacaccggcgagggcaacaaggaggcccccctgcagaaggtgggcgccgaggaggccgacgagagcctgcccggcctggccgccaacatcaacgagagcacccacatcagcagcagcggccagaacctgaacacccccgagggcgagaccctgaacggcaagcaccagaccgacagcatcgtgtgcgagatgaagatggacaccgaccagaacaccagagagaacctgaccggcatcaacagcaccgtggaggagcccgtgagccccatgctgccccccagcgccgtggaggagagagaggccgtgagcaagaccgccctggccagcccccccgccaccatggccgccaacgagagccaggagatcgacgaggacgagggcatccacagccacgagggcagcgacctgagcgacaacatgagcgagggcagcgacgacagcggcctgcacggcgccagacccgtgccccaggagagcagcagaaagaacgccaaggaggccctggccgtgaaggccgccaagggcgacttcgtgtgcatcttctgcgacagaagcttcagaaagggcaaggactacagcaagcacctgaacagacacctggtgaacgtgtactacctggaggaggccgcccagggccaggagtag

SEQ ID NO: 96518 - DNA, 1383 bp, synthetic construct
  misc_feature 1..1383: note = Description of Artificial Sequence: Synthetic coding sequence
  source 1..1383: mol_type = other DNA
atggccacccaggtgatgggccagagcagcggcggcggcggcctgttcaccagcagcggcaacatcggcatggccctgcccaacgacatgtacgacctgcacgacctgagcaaggccgagctggccgccccccagctgatcatgctggccaacgtggccctgaccggcgaggtgaacggcagctgctgcgactacctggtgggcgaggagagacagatggccgagctgatgcccgtgggcgacaacaacttcagcgacagcgaggagggcgagggcctggaggagagcgccgacatcaagggcgagccccacggcctggagaacatggagctgagaagcctggagctgagcgtggtggagccccagcccgtgttcgaggccagcggcgcccccgacatctacagcagcaacaaggacctgccccccgagacccccggcgccgaggacaagggcaagagcagcaagaccaagcccttcagatgcaagccctgccagtacgaggccgagagcgaggagcagttcgtgcaccacatcagagtgcacagcgccaagaagttcttcgtggaggagagcgccgagaagcaggccaaggccagagagagcggcagcagcaccgccgaggagggcgacttcagcaagggccccatcagatgcgacagatgcggctacaacaccaacagatacgaccactacaccgcccacctgaagcaccacaccagagccggcgacaacgagagagtgtacaagtgcatcatctgcacctacaccaccgtgagcgagtaccactggagaaagcacctgagaaaccacttccccagaaaggtgtacacctgcggcaagtgcaactacttcagcgacagaaagaacaactacgtgcagcacgtgagaacccacaccggcgagagaccctacaagtgcgagctgtgcccctacagcagcagccagaagacccacctgaccagacacatgagaacccacagcggcgagaagcccttcaagtgcgaccagtgcagctacgtggccagcaaccagcacgaggtgaccagacacgccagacaggtgcacaacggccccaagcccctgaactgcccccactgcgactacaagaccgccgacagaagcaacttcaagaagcacgtggagctgcacgtgaaccccagacagttcaactgccccgtgtgcgactacgccgccagcaagaagtgcaacctgcagtaccacttcaagagcaagcaccccacctgccccaacaagaccatggacgtgagcaaggtgaagctgaagaagaccaagaagagagaggccgacctgcccgacaacatcaccaacgagaagaccgagatcgagcagaccaagaagaagaagaagaagaagaagaagtag

SEQ ID NO: 96519 - DNA, 5745 bp, synthetic construct
  misc_feature 1..5745: note = Description of Artificial Sequence: Synthetic coding sequence
  source 1..5745: mol_type = other DNA
atggccgacggcaagggcgacgccgccgccgtggccggcgccggcgccgaggcccccgccgtggccggcgccggcgacggcgtggagaccgagagcatggtgagaggccacagacccgtgagccccgcccccggcgccagcggcctgagaccctgcctgtggcagctggagaccgagctgagagagcaggaggtgagcgaggtgagcagcctgaactactgcagaagcttctgccagaccctgctgcagtacgccagcaacaagaacgccagcgagcacatcgtgtacctgctggaggtgtacagactggccatccagagcttcgccagcgccagaccctacctgaccaccgagtgcgaggacgtgctgctggtgctgggcagactggtgctgagctgcttcgagctgctgctgagcgtgagcgagagcgagctgccctgcgaggtgtggctgcccttcctgcagagcctgcaggagagccacgacgccctgctggagttcggcaacaacaacctgcagatcctggtgcacgtgaccaaggagggcgtgtggaagaaccccgtgctgctgaagatcctgagccagcagcccgtggagaccgaggaggtgaacaagctgatcgcccaggagggccccagcttcctgcagatgagaatcaagcacctgctgaagagcaactgcatcccccaggccaccgccctgagcaagctgtgcgccgagagcaaggagatcagcaacgtgagcagcttccagcaggcctacatcacctgcctgtgcagcatgctgcccaacgaggacgccatcaaggagatcgccaaggtggactgcaaggaggtgctggacatcatctgcaacctggagagcgagggccaggacaacaccgccttcgtgctgtgcaccacctacctgacccagcagctgcagaccgccagcgtgtactgcagctgggagctgaccctgttctggagcaagctgcagagaagaatcgaccccagcctggacaccttcctggagagatgcagacagttcggcgtgatcgccaagacccagcagcacctgttctgcctgatcagagtgatccagaccgaggcccaggacgccggcctgggcgtgagcatcctgctgtgcgtgagagccctgcagctgagaagcagcgaggacgaggagatgaaggccagcgtgtgcaagaccatcgcctgcctgctgcccgaggacctggaggtgagaagagcctgccagctgaccgagttcctgatcgagcccagcctggacggcttcaacatgctggaggagctgtacctgcagcccgaccagaagttcgacgaggagaacgcccccgtgcccaacagcctgagatgcgagctgctgctggccctgaaggcccactggcccttcgaccccgagttctgggactggaagaccctgaagagacactgccaccagctgctgggccaggaggccagcgacagcgacgacgacctgagcggctacgagatgagcatcaacgacaccgacgtgctggagagcttcctgagcgactacgacgagggcaaggaggacaagcagtacagaagaagagacctgaccgaccagcacaaggagaagagagacaagaagcccatcggcagcagcgagagataccagagatggctgcagtacaagttcttctgcctgctgtgcaagagagagtgcatcgaggccagaatcctgcaccacagcaagatgcacatggaggacggcatctacacctgccccgtgtgcatcaagaagttcaagagaaaggagatgttcgtgccccacgtgatggagcacgtgaagatgccccccagcagaagagacagaagcaagaagaagctgctgctgaagggcagccagaagggcatctgccccaagagccccagcgccatccccgagcagaaccacagcctgaacgaccaggccaagggcgagagccacgagtacgtgaccttcagcaagctggaggactgccacctgcaggacagagacctgtacccctgccccggcaccgactgcagcagagtgttcaagcagttcaagtacctgagcgtgcacctgaaggccgagcaccagaacaacgacgagaacgccaagcactacctggacatgaagaacagaagagagaagtgcacctactgcagaagacacttcatgagcgccttccacctgagagagcacgagcaggtgcactgcggcccccagccctacatgtgcgtgagcatcgactgctacgccagattcggcagcgtgaacgagctgctgaaccacaagcagaagcacgacgacctgagatacaagtgcgagctgaacggctgcaacatcgtgttcagcgacctgggccagctgtaccaccacgaggcccagcacttcagagacgccagctacacctgcaacttcctgggctgcaagaagttctactacagcaagatcgagtaccagaaccacctgagcatgcacaacgtggagaacagcaacggcgacatcaagaagagcgtgaagctggaggagagcgccaccggcgagaagcaggactgcatcaaccagccccacctgctgaaccagaccgacaagagccacctgcccgaggacctgttctgcgccgagagcgccaacagccagatcgacaccgagaccgccgagaacctgaaggagaacagcgacagcaacagcagcgaccagctgagccacagcagcagcgccagcatgaacgaggagctgatcgacaccctggaccacagcgagaccatgcaggacgtgctgctgagcaacgagaaggtgttcggccccagcagcctgaaggagaagtgcagcagcatggccgtgtgcttcgacggcaccaagttcacctgcggcttcgacggctgcggcagcacctacaagaacgccagaggcatgcagaagcacctgagaaaggtgcacccctaccacttcaagcccaagaagatcaagaccaaggacctgttccccagcctgggcaacgagcacaaccagaccaccgagaagctggacgccgagcccaagccctgcagcgacaccaacagcgacagccccgacgagggcctggaccacaacatccacatcaagtgcaagagagagcaccagggctacagcagcgagagcagcatctgcgccagcaagagaccctgcaccgaggacaccatgctggagctgctgctgagactgaagcacctgagcctgaagaacagcatcacccacggcagcttcagcggcagcctgcagggctaccccagcagcggcgccaagagcctgcagagcgtgagcagcatcagcgacctgaacttccagaaccaggacgagaacatgcccagccagtacctggcccagctggccgccaagcccttcttctgcgagctgcagggctgcaagtacgagttcgtgaccagagaggccctgctgatgcactacctgaagaagcacaactacagcaaggagaaggtgctgcagctgaccatgttccagcacagatacagccccttccagtgccacatctgccagagaagcttcaccagaaagacccacctgagaatccactacaagaacaagcaccagatcggcagcgacagagccacccacaagctgctggacaacgagaagtgcgaccacgagggcccctgcagcgtggacagactgaagggcgactgcagcgccgagctgggcggcgaccccagcagcaacagcgagaagccccactgccaccccaagaaggacgagtgcagcagcgagaccgacctggagagcagctgcgaggagaccgagagcaagaccagcgacatcagcagccccatcggcagccacagagaggagcaggagggcagagagggcagaggcagcagaagaaccgtggccaagggcaacctgtgctacatcctgaacaagtaccacaagcccttccactgcatccacaagacctgcaacagcagcttcaccaacctgaagggcctgatcagacactacagaaccgtgcaccagtacaacaaggagcagctgtgcctggagaaggacaaggccagaaccaagagagagctggtgaagtgcaagaagatcttcgcctgcaagtacaaggagtgcaacaagagattcctgtgcagcaaggccctggccaagcactgcagcgacagccacaacctggaccacatcgaggagcccaaggtgctgagcgaggccggcagcgccgccagattcagctgcaaccagccccagtgccccgccgtgttctacaccttcaacaagctgaagcaccacctgatggagcagcacaacatcgagggcgagatccacagcgactacgagatccactgcgacctgaacggctgcggccagatcttcacccacagaagcaactacagccagcacgtgtactacagacacaaggactactacgacgacctgttcagaagccagaaggtggccaacgagagactgctgagaagcgagaaggtgtgccagaccgccgacacccagggccacgagcaccagaccaccagaagaagcttcaacgccaagagcaagaagtgcggcctgatcaaggagaagaaggcccccatcagcttcaagaccagagccgaggccctgcacatgtgcgtggagcacagcgagcacacccagtacccctgcatggtgcagggctgcctgagcgtggtgaagctggagagcagcatcgtgagacactacaagagaacccaccagatgagcagcgcctacctggagcagcagatggagaacctggtggtgtgcgtgaagtacggcaccaagatcaaggaggagccccccagcgaggccgacccctgcatcaagaaggaggagaacagaagctgcgagagcgagagaaccgagcacagccacagccccggcgacagcagcgcccccatccagaacaccgactgctgccacagcagcgagagagacggcggccagaagggctgcatcgagagcagcagcgtgttcgacgccgacaccctgctgtacagaggcaccctgaagtgcaaccacagcagcaagaccaccagcctggagcagtgcaacatcgtgcagcccccccccccctgcaagatcgagaacagcatccccaaccccaacggcaccgagagcggcacctacttcaccagcttccagctgcccctgcccagaatcaaggagagcgagaccagacagcacagcagcggccaggagaacaccgtgaagaaccccacccacgtgcccaaggagaacttcagaaagcacagccagcccagaagcttcgacctgaagacctacaagcccatgggcttcgagagcagcttcctgaagttcatccaggagagcgaggagaaggaggacgacttcgacgactgggagcccagcgagcacctgaccctgagcaacagcagccagagcagcaacgacctgaccggcaacgtggtggccaacaacatggtgaacgacagcgagcccgaggtggacatcccccacagcagcagcgacagcaccatccacgagaacctgaccgccatcccccccctgatcgtggccgagaccaccaccgtgcccagcctggagaacctgagagtggtgctggacaaggccctgaccgactgcggcgagctggccctgaagcagctgcactacctgagacccgtggtggtgctggagagaagcaagttcagcacccccatcctggacctgttccccaccaagaagaccgacgagctgtgcgtgggcagcagctag

SEQ ID NO: 96520 - DNA, 4824 bp, synthetic construct
  misc_feature 1..4824: note = Description of Artificial Sequence: Synthetic coding sequence
  source 1..4824: mol_type = other DNA
atgttctaccacgacctgttctacagagagctgaccctgttctggagcaagctgcagagaagaatcgaccccagcctggacaccttcctggagagatgcagacagttcggcgtgatcgccaagacccagcagcacctgttctgcctgatcagagtgatccagaccgaggcccaggacgccggcctgggcgtgagcatcctgctgtgcgtgagagccctgcagctgagaagcagcgaggacgaggagatgaaggccagcgtgtgcaagaccatcgcctgcctgctgcccgaggacctggaggtgagaagagcctgccagctgaccgagttcctgatcgagcccagcctggacggcttcaacatgctggaggagctgtacctgcagcccgaccagaagttcgacgaggagaacgcccccgtgcccaacagcctgagatgcgagctgctgctggccctgaaggcccactggcccttcgaccccgagttctgggactggaagaccctgaagagacactgccaccagctgctgggccaggaggccagcgacagcgacgacgacctgagcggctacgagatgagcatcaacgacaccgacgtgctggagagcttcctgagcgactacgacgagggcaaggaggacaagcagtacagaagaagagacctgaccgaccagcacaaggagaagagagacaagaagcccatcggcagcagcgagagataccagagatggctgcagtacaagttcttctgcctgctgtgcaagagagagtgcatcgaggccagaatcctgcaccacagcaagatgcacatggaggacggcatctacacctgccccgtgtgcatcaagaagttcaagagaaaggagatgttcgtgccccacgtgatggagcacgtgaagatgccccccagcagaagagacagaagcaagaagaagctgctgctgaagggcagccagaagggcatctgccccaagagccccagcgccatccccgagcagaaccacagcctgaacgaccaggccaagggcgagagccacgagtacgtgaccttcagcaagctggaggactgccacctgcaggacagagacctgtacccctgccccggcaccgactgcagcagagtgttcaagcagttcaagtacctgagcgtgcacctgaaggccgagcaccagaacaacgacgagaacgccaagcactacctggacatgaagaacagaagagagaagtgcacctactgcagaagacacttcatgagcgccttccacctgagagagcacgagcaggtgcactgcggcccccagccctacatgtgcgtgagcatcgactgctacgccagattcggcagcgtgaacgagctgctgaaccacaagcagaagcacgacgacctgagatacaagtgcgagctgaacggctgcaacatcgtgttcagcgacctgggccagctgtaccaccacgaggcccagcacttcagagacgccagctacacctgcaacttcctgggctgcaagaagttctactacagcaagatcgagtaccagaaccacctgagcatgcacaacgtggagaacagcaacggcgacatcaagaagagcgtgaagctggaggagagcgccaccggcgagaagcaggactgcatcaaccagccccacctgctgaaccagaccgacaagagccacctgcccgaggacctgttctgcgccgagagcgccaacagccagatcgacaccgagaccgccgagaacctgaaggagaacagcgacagcaacagcagcgaccagctgagccacagcagcagcgccagcatgaacgaggagctgatcgacaccctggaccacagcgagaccatgcaggacgtgctgctgagcaacgagaaggtgttcggccccagcagcctgaaggagaagtgcagcagcatggccgtgtgcttcgacggcaccaagttcacctgcggcttcgacggctgcggcagcacctacaagaacgccagaggcatgcagaagcacctgagaaaggtgcacccctaccacttcaagcccaagaagatcaagaccaaggacctgttccccagcctgggcaacgagcacaaccagaccaccgagaagctggacgccgagcccaagccctgcagcgacaccaacagcgacagccccgacgagggcctggaccacaacatccacatcaagtgcaagagagagcaccagggctacagcagcgagagcagcatctgcgccagcaagagaccctgcaccgaggacaccatgctggagctgctgctgagactgaagcacctgagcctgaagaacagcatcacccacggcagcttcagcggcagcctgcagggctaccccagcagcggcgccaagagcctgcagagcgtgagcagcatcagcgacctgaacttccagaaccaggacgagaacatgcccagccagtacctggcccagctggccgccaagcccttcttctgcgagctgcagggctgcaagtacgagttcgtgaccagagaggccctgctgatgcactacctgaagaagcacaactacagcaaggagaaggtgctgcagctgaccatgttccagcacagatacagccccttccagtgccacatctgccagagaagcttcaccagaaagacccacctgagaatccactacaagaacaagcaccagatcggcagcgacagagccacccacaagctgctggacaacgagaagtgcgaccacgagggcccctgcagcgtggacagactgaagggcgactgcagcgccgagctgggcggcgaccccagcagcaacagcgagaagccccactgccaccccaagaaggacgagtgcagcagcgagaccgacctggagagcagctgcgaggagaccgagagcaagaccagcgacatcagcagccccatcggcagccacagagaggagcaggagggcagagagggcagaggcagcagaagaaccgtggccaagggcaacctgtgctacatcctgaacaagtaccacaagcccttccactgcatccacaagacctgcaacagcagcttcaccaacctgaagggcctgatcagacactacagaaccgtgcaccagtacaacaaggagcagctgtgcctggagaaggacaaggccagaaccaagagagagctggtgaagtgcaagaagatcttcgcctgcaagtacaaggagtgcaacaagagattcctgtgcagcaaggccctggccaagcactgcagcgacagccacaacctggaccacatcgaggagcccaaggtgctgagcgaggccggcagcgccgccagattcagctgcaaccagccccagtgccccgccgtgttctacaccttcaacaagctgaagcaccacctgatggagcagcacaacatcgagggcgagatccacagcgactacgagatccactgcgacctgaacggctgcggccagatcttcacccacagaagcaactacagccagcacgtgtactacagacacaaggactactacgacgacctgttcagaagccagaaggtggccaacgagagactgctgagaagcgagaaggtgtgccagaccgccgacacccagggccacgagcaccagaccaccagaagaagcttcaacgccaagagcaagaagtgcggcctgatcaaggagaagaaggcccccatcagcttcaagaccagagccgaggccctgcacatgtgcgtggagcacagcgagcacacccagtacccctgcatggtgcagggctgcctgagcgtggtgaagctggagagcagcatcgtgagacactacaagagaacccaccagatgagcagcgcctacctggagcagcagatggagaacctggtggtgtgcgtgaagtacggcaccaagatcaaggaggagccccccagcgaggccgacccctgcatcaagaaggaggagaacagaagctgcgagagcgagagaaccgagcacagccacagccccggcgacagcagcgcccccatccagaacaccgactgctgccacagcagcgagagagacggcggccagaagggctgcatcgagagcagcagcgtgttcgacgccgacaccctgctgtacagaggcaccctgaagtgcaaccacagcagcaagaccaccagcctggagcagtgcaacatcgtgcagcccccccccccctgcaagatcgagaacagcatccccaaccccaacggcaccgagagcggcacctacttcaccagcttccagctgcccctgcccagaatcaaggagagcgagaccagacagcacagcagcggccaggagaacaccgtgaagaaccccacccacgtgcccaaggagaacttcagaaagcacagccagcccagaagcttcgacctgaagacctacaagcccatgggcttcgagagcagcttcctgaagttcatccaggagagcgaggagaaggaggacgacttcgacgactgggagcccagcgagcacctgaccctgagcaacagcagccagagcagcaacgacctgaccggcaacgtggtggccaacaacatggtgaacgacagcgagcccgaggtggacatcccccacagcagcagcgacagcaccatccacgagaacctgaccgccatcccccccctgatcgtggccgagaccaccaccgtgcccagcctggagaacctgagagtggtgctggacaaggccctgaccgactgcggcgagctggccctgaagcagctgcactacctgagacccgtggtggtgctggagagaagcaagttcagcacccccatcctggacctgttccccaccaagaagaccgacgagctgtgcgtgggcagcagctag

SEQ ID NO: 96521 - DNA, 1641 bp, synthetic construct
  misc_feature 1..1641: note = Description of Artificial Sequence: Synthetic coding sequence
  source 1..1641: mol_type = other DNA
atgttctactaccccaacgtgctgcagagacacaccggctgcttcgccaccatctggctggccgccaccagaggcagcagactggtgaagagagagtacctgagagtgaacgtggtgaagacctgcgaggagatcctgaactacgtgctggtgagagtgcagcccccccagcccggcctgcccagacccagattcagcctgtacctgagcgcccagctgcagatcggcgtgatcagagtgtacagccagcagtgccagtacctggtggaggacatccagcacatcctggagagactgcacagagcccagctgcagatcagaatcgacatggagaccgagctgcccagcctgctgctgcccaaccacctggccatgatggagaccctggaggacgcccccgaccccttcttcggcatgatgagcgtggaccccagactgcccagccccttcgacatcccccagatcagacacctgctggaggccgccatccccgagagagtggaggagatcccccccgaggtgcccaccgagcccagagagcccgagagaatccccgtgaccgtgctgccccccgaggccatcaccatcctggaggccgagcccatcagaatgctggagatcgagggcgagagagagctgcccgaggtgagcagaagagagctggacctgctgatcgccgaggaggaggccatcctgctggagatccccagactgcccccccccgcccccgccgaggtggagggcatcggcgaggccctgggccccgaggagctgagactgaccggctgggagcccggcgccctgctgatggaggtgaccccccccgaggagctgagactgcccgccccccccagccccgagagaagaccccccgtgccccccccccccagaagaagaagaagaagaagactgctgttctgggacaaggagacccagatcagccccgagaagttccaggagcagctgcagaccagagcccactgctgggagtgccccatggtgcagccccccgagagaaccatcagaggccccgccgagctgttcagaacccccaccctgagcggctggctgccccccgagctgctgggcctgtggacccactgcgcccagcccccccccaaggccctgagaagagagctgcccgaggaggccgccgccgaggaggagagaagaaagatcgaggtgcccagcgagatcgaggtgcccagagaggccctggagcccagcgtgcccctgatggtgagcctggagatcagcctggaggccgccgaggaggagaagagcagaatcagcctgatcccccccgaggagagatgggcctggcccgaggtggaggcccccgaggcccccgccctgcccgtggtgcccgagctgcccgaggtgcccatggagatgcccctggtgctgccccccgagctggagctgctgagcctggaggccgtgcacagagccgtggccctggagctgcaggccaacagagagcccgacttcagcagcctggtgagccccctgagccccagaagaatggccgccagagtgttctacctgctgctggtgctgagcgcccagcagatcctgcacgtgaagcaggagaagccctacggcagactgctgatccagcccggccccagattccactag

SEQ ID NO: 96522 - DNA, 1590 bp, synthetic construct
  misc_feature 1..1590: note = Description of Artificial Sequence: Synthetic coding sequence
  source 1..1590: mol_type = other DNA
atgttctactaccccaacgtgctgcagagacacaccggctgcttcgccaccatctggctggccgccaccagaggcagcagactggtgaagagagagtacctgagagtgaacgtggtgaagacctgcgaggagatcctgaactacgtgctggtgagagtgcagcccccccagcccggcctgcccagacccagattcagcctgtacctgagcgcccagctgcagatcggcgtgatcagagtgtacagccagcagtgccagtacctggtggaggacatccagcacatcctggagagactgcacagagcccagctgcagatcagaatcgacatggagaccgagctgcccagcctgctgctgcccaaccacctggccatgatggagaccctggaggacgcccccgaccccttcttcggcatgatgagcgtggaccccagactgcccagccccttcgacatcccccagatcagacacctgctggaggccgccatccccgagagagtggaggagatcccccccgaggtgcccaccgagcccagagagcccgagagaatccccgtgaccgtgctgccccccgaggccatcaccatcctggaggccgagcccatcagaatgctggagatcgagggcgagagagagctgcccgaggtgagcagaagagagctggacctgctgatcgccgaggaggaggccatcctgctggagatccccagactgcccccccccgcccccgccgaggtggagggcatcggcgaggccctgggccccgaggagctgagactgaccggctgggagcccggcgccctgctgatgagaagaccccccgtgccccccccccccagaagaagaagaagaagaagactgctgttctgggacaaggagacccagatcagccccgagaagttccaggagcagctgcagaccagagcccactgctgggagtgccccatggtgcagccccccgagagaaccatcagaggccccgccgagctgttcagaacccccaccctgagcggctggctgccccccgagctgctgggcctgtggacccactgcgcccagcccccccccaaggccctgagaagagagctgcccgaggaggccgccgccgaggaggagagaagaaagatcgaggtgcccagcgagatcgaggtgcccagagaggccctggagcccagcgtgcccctgatggtgagcctggagatcagcctggaggccgccgaggaggagaagagcagaatcagcctgatcccccccgaggagagatgggcctggcccgaggtggaggcccccgaggcccccgccctgcccgtggtgcccgagctgcccgaggtgcccatggagatgcccctggtgctgccccccgagctggagctgctgagcctggaggccgtgcacagagccgtggccctggagctgcaggccaacagagagcccgacttcagcagcctggtgagccccctgagccccagaagaatggccgccagagtgttctacctgctgctggtgctgagcgcccagcagatcctgcacgtgaagcaggagaagccctacggcagactgctgatccagcccggccccagattccactag

SEQ ID NO: 96523 - DNA, 225 bp, synthetic construct
  misc_feature 1..225: note = Description of Artificial Sequence: Synthetic coding sequence
  source 1..225: mol_type = other DNA
atgttctactaccccaacgtgctgcagagacacaccggctgcttcgccaccatctggctggccgccaccagaggcagcagactggtgaagagagagtacctgagagtgaacgtggtgaagacctgcgaggagatcctgaactacgtgctggtgagagtgcagcccccccagcccggcctgcccagacccagattcagcctgtacctgagcgcccagctgcagtag

SEQ ID NO: 96524 - DNA, 1641 bp, synthetic construct; identical to SEQ ID NO: 96521
  misc_feature 1..1641: note = Description of Artificial Sequence: Synthetic coding sequence
  source 1..1641: mol_type = other DNA

SEQ ID NO: 96525 - DNA, 699 bp, synthetic construct
  misc_feature 1..699: note = Description of Artificial Sequence: Synthetic coding sequence
  source 1..699: mol_type = other DNA
atggccggcgacaccgaggtgtggaagcagatgttccaggagctgatgagagaggtgaagccctggcacagatggaccctgagacccgacaagggcctgctgcccaacgtgctgaagcccggctggatgcagtaccagcagtggaccttcgccagattccagtgcagcagctgcagcagaaactgggccagcgcccaggtgctggtgctgttccacatgaactggagcgaggagaagagcagaggccaggtgaagatgagagtgttcacccagagatgcaagaagtgcccccagcccctgttcgaggaccccgagttcacccaggagaacatcagcagaatcctgaagaacctggtgttcagaatcctgaagaagtgctacagaggcagattccagctgatcgaggaggtgcccatgatcaaggacatcagcctggagggcccccacaacagcgacaactgcgaggcctgcctgcagggcttctgcgccggccccatccaggtgaccagcctgccccccagccagacccccagagtgcacagcatctacaaggtggaggaggtggtgaagccctgggccagcggcgagaacgtgtacagctacgcctgccagaaccacatctgcagaaacctgagcatcttctgctgctgcgtgatcctgatcgtgatcgtggtgatcgtggtgaagaccgccatctag

SEQ ID NO: 96526 - DNA, 741 bp, synthetic construct
  misc_feature 1..741: note = Description of Artificial Sequence: Synthetic coding sequence
  source 1..741: mol_type = other DNA
atggtggtggacttctggacctgggagcagaccttccaggagctgatccaggaggccaagcccagagccacctggaccctgaagctggacggcaacctgcagctggactgcctggcccagggctggaagcagtaccagcagagagccttcggctggttcagatgcagcagctgccagagaagctgggccagcgcccaggtgcagatcctgtgccacacctactgggagcactggaccagccagggccaggtgagaatgagactgttcggccagagatgccagaagtgcagctggagccagtacgagatgcccgagttcagcagcgacagcaccatgagaatcctgagcaacctggtgcagcacatcctgaagaagtactacggcaacggcaccagaaagagccccgagatgcccgtgatcctggaggtgagcctggagggcagccacgacaccgccaactgcgaggcctgcaccctgggcatctgcggccagggcctgaagagctgcatgaccaagcccagcaagagcctgctgccccacctgaagaccggcaacagcagccccggcatcggcgccgtgtacctggccaaccaggccaagaaccagagcgccgaggccaaggaggccaagggcagcggctacgagaagctgggccccagcagagaccccgaccccctgaacatctgcgtgttcatcctgctgctggtgttcatcgtggtgaagtgcttcaccagcgagtag

SEQ ID NO: 96527 - DNA, 447 bp, synthetic construct
  misc_feature 1..447: note = Description of Artificial Sequence: Synthetic coding sequence
  source 1..447: mol_type = other DNA
atggccagagccctgtgcagactgcccagaagaggcctgtggctgctgctggcccaccacctgttcatgaccaccgcctgccaggaggccaactacggcgccctgctgagagagctgtgcctgacccagttccaggtggacatggaggccgtgggcgagaccctgtggtgcgactggggcagaaccatcagaagctacagagagctggccgactgcacctggcacatggccgagaagctgggctgcttctggcccaacgccgaggtggacagattcttcctggccgtgcacggcagatacttcagaagctgccccatcagcggcagagccgtgagagacccccccggcagcatcctgtaccccttcatcgtggtgcccatcaccgtgaccctgctggtgaccgccctggtggtgtggcagagcaagagaaccgagggcatcgtgtag

SEQ ID NO: 96528 - DNA, 381 bp, synthetic construct
  misc_feature 1..381: note = Description of Artificial Sequence: Synthetic coding sequence
  source 1..381: mol_type = other DNA
atgaccaccgcctgccaggaggccaactacggcgccctgctgagagagctgtgcctgacccagttccaggtggacatggaggccgtgggcgagaccctgtggtgcgactggggcagaaccatcagaagctacagagagctggccgactgcacctggcacatggccgagaagctgggctgcttctggcccaacgccgaggtggacagattcttcctggccgtgcacggcagatacttcagaagctgccccatcagcggcagagccgtgagagacccccccggcagcatcctgtaccccttcatcgtggtgcccatcaccgtgaccctgctggtgaccgccctggtggtgtggcagagcaagagaaccgagggcatcgtgtag

SEQ ID NO: 96529 - DNA, 381 bp, synthetic construct; identical to SEQ ID NO: 96528
  misc_feature 1..381: note = Description of Artificial Sequence: Synthetic coding sequence
  source 1..381: mol_type = other DNA

SEQ ID NO: 96530 - DNA, 381 bp, synthetic construct; identical to SEQ ID NO: 96528
  misc_feature 1..381: note = Description of Artificial Sequence: Synthetic coding sequence
  source 1..381: mol_type = other DNA

SEQ ID NO: 96531 - DNA, 528 bp, synthetic construct
  misc_feature 1..528: note = Description of Artificial Sequence: Synthetic coding sequence
  source 1..528: mol_type = other DNA
atggccagcctgagagtggagagagccggcggccccagactgcccagaaccagagtgggcagacccgccgccctgagactgctgctgctgctgggcgccgtgctgaacccccacgaggccctggcccagcccctgcccaccaccggcacccccggcagcgagggcggcaccgtgaagaactacgagaccgccgtgcagttctgctggaaccactacaaggaccagatggaccccatcgagaaggactggtgcgactgggccatgatcagcagaccctacagcaccctgagagactgcctggagcacttcgccgagctgttcgacctgggcttccccaaccccctggccgagagaatcatcttcgagacccaccagatccacttcgccaactgcagcctggtgcagcccaccttcagcgacccccccgaggacgtgctgctggccatgatcatcgcccccatctgcctgatccccttcctgatcaccctggtggtgtggagaagcaaggacagcgaggcccaggcctag

SEQ ID NO: 96532 - DNA, 447 bp, synthetic construct
  misc_feature 1..447: note = Description of Artificial Sequence: Synthetic coding sequence
  source 1..447: mol_type = other DNA
atggagaccggcgccctgagaagaccccagctgctgcccctgctgctgctgctgtgcggcggctgccccagagccggcggctgcaacgagaccggcatgctggagagactgcccctgtgcggcaaggccttcgccgacatgatgggcaaggtggacgtgtggaagtggtgcaacctgagcgagttcatcgtgtactacgagagcttcaccaactgcaccgagatggaggccaacgtggtgggctgctactggcccaaccccctggcccagggcttcatcaccggcatccacagacagttcttcagcaactgcaccgtggacagagtgcacctggaggacccccccgacgaggtgctgatccccctgatcgtgatccccgtggtgctgaccgtggccatggccggcctggtggtgtggagaagcaagagaaccgacaccctgctgtag

SEQ ID NO: 96533 - DNA, 447 bp, synthetic construct; identical to SEQ ID NO: 96532
  misc_feature 1..447: note = Description of Artificial Sequence: Synthetic coding sequence
  source 1..447: mol_type = other DNA

SEQ ID NO: 96534 - DNA, 456 bp, synthetic construct
  misc_feature 1..456: note = Description of Artificial Sequence: Synthetic coding sequence
  source 1..456: mol_type = other DNA
atggagaccggcgccctgagaagaccccagctgctgcccctgctgctgctgctgtgcggcggctgccccagagccggcggctgcaacgagaccggcatgctggagagactgcccctgtgcggcaaggccttcgccgacatgatgggcaaggtggacgtgtggaagtggtgcaacctgagcgagttcatcgtgtactacgagagcttcaccaactgcaccgagatggaggccaacgtggtgggctgctactggcccaaccccctggcccagggcttcatcaccggcatccacagacagttcttcagcaactgcaccgtggacagagtgcacctggaggacccccccgacgaggtgctgatccccctgatcgtgatccccgtggtgctgaccgtggccatggccggcctggtggtgtggagaagcaagagaaccgacaccctgctgtgcggcaactag

SEQ ID NO: 96535 - DNA, 606 bp, synthetic construct
  misc_feature 1..606: note = Description of Artificial Sequence: Synthetic coding sequence
  source 1..606: mol_type = other DNA
atggtgagctggatcatcagcagactggtggtgctgatcttcggcaccctgtaccccgcctactacagctacaaggccgtgaagagcaaggacatcaaggagtacgtgaagtggatgatgtactggatcatcttcgccctgttcaccaccgccgagaccttcaccgacatcttcctgtgctggttccccttctactacgagctgaagatcgccttcgtggcctggctgctgagcccctacaccaagggcagcagcctgctgtacagaaagttcgtgcaccccaccctgagcagcaaggagaaggagatcgacgactgcctggtgcaggccaaggacagaagctacgacgccctggtgcacttcggcaagagaggcctgaacgtggccgccaccgccgccgtgatggccgccagcaagggccagggcgccctgagcgagagactgagaagcttcagcatgcaggacctgaccaccatcagaggcgacggcgcccccgcccccagcggcccccccccccccggcagcggcagagccagcggcaagcacggccagcccaagatgagcagaagcgccagcgagagcgccagcagcagcggcaccgcctag

SEQ ID NO: 96536 - DNA, 525 bp, synthetic construct
  misc_feature 1..525: note = Description of Artificial Sequence: Synthetic coding sequence
  source 1..525: mol_type = other DNA
atggaccacctgcaggccggcggcgtgaagtggatgatgtactggatcatcttcgccctgttcaccaccgccgagaccttcaccgacatcttcctgtgctggttccccttctactacgagctgaagatcgccttcgtggcctggctgctgagcccctacaccaagggcagcagcctgctgtacagaaagttcgtgcaccccaccctgagcagcaaggagaaggagatcgacgactgcctggtgcaggccaaggacagaagctacgacgccctggtgcacttcggcaagagaggcctgaacgtggccgccaccgccgccgtgatggccgccagcaagggccagggcgccctgagcgagagactgagaagcttcagcatgcaggacctgaccaccatcagaggcgacggcgcccccgcccccagcggcccccccccccccggcagcggcagagccagcggcaagcacggccagcccaagatgagcagaagcgccagcgagagcgccagcagcagcggcaccgcctag

SEQ ID NO: 96537 - DNA, 627 bp, synthetic construct
  misc_feature 1..627: note = Description of Artificial Sequence: Synthetic coding sequence
  source 1..627: mol_type = other DNA
atgcagaaggtgctgagcaacggccagaccgaggaggtgagaagcggcagcagactgatcttcggcaccctgtaccccgcctactacagctacaaggccgtgaagagcaaggacatcaaggagtacgtgaagtggatgatgtactggatcatcttcgccctgttcaccaccgccgagaccttcaccgacatcttcctgtgctggttccccttctactacgagctgaagatcgccttcgtggcctggctgctgagcccctacaccaagggcagcagcctgctgtacagaaagttcgtgcaccccaccctgagcagcaaggagaaggagatcgacgactgcctggtgcaggccaaggacagaagctacgacgccctggtgcacttcggcaagagaggcctgaacgtggccgccaccgccgccgtgatggccgccagcaagggccagggcgccctgagcgagagactgagaagcttcagcatgcaggacctgaccaccatcagaggcgacggcgcccccgcccccagcggcccccccccccccggcagcggcagagccagcggcaagcacggccagcccaagatgagcagaagcgccagcgagagcgccagcagcagcggcaccgcctag

SEQ ID NO: 96538 - DNA, 543 bp, synthetic construct
  misc_feature 1..543: note = Description of Artificial Sequence: Synthetic coding sequence
  source 1..543: mol_type = other DNA
atgagcctgcacccctgcagactgaacaacctgcccaaccaggtgaagtggatgatgtactggatcatcttcgccctgttcaccaccgccgagaccttcaccgacatcttcctgtgctggttccccttctactacgagctgaagatcgccttcgtggcctggctgctgagcccctacaccaagggcagcagcctgctgtacagaaagttcgtgcaccccaccctgagcagcaaggagaaggagatcgacgactgcctggtgcaggccaaggacagaagctacgacgccctggtgcacttcggcaagagaggcctgaacgtggccgccaccgccgccgtgatggccgccagcaagggccagggcgccctgagcgagagactgagaagcttcagcatgcaggacctgaccaccatcagaggcgacggcgcccccgcccccagcggcccccccccccccggcagcggcagagccagcggcaagcacggccagcccaagatgagcagaagcgccagcgagagcgccagcagcagcggcaccgcctag

SEQ ID NO: 96539 - DNA, 432 bp, synthetic construct
  misc_feature 1..432: note = Description of Artificial Sequence: Synthetic coding sequence
  source 1..432: mol_type = other DNA
atggtgagctggatcatcagcagactggtggtgctgatcttcggcaccctgtaccccgcctactacagctacaaggccgtgaagagcaaggacatcaaggagtacgtgaagtggatgatgtactggatcatcttcgccctgttcaccaccgccgagaccttcaccgacatcttcctgtgctgggacagagtgccctacagaagagactgcggcgccagcgcctgcagaaccagcccccccagcggcgagaccgcccccctgctgcccagagccccccaccacagaggcctgggcggccccgccgccaacaccgccagcctgagatgccccggcgtgctgctgagagccctggccgcccaggccccccccagaatcctgagaagcagattcagaaagaagagcaccagcagcagcgccaccgagaccacctag

SEQ ID NO: 96540 - DNA, 759 bp, synthetic construct
  misc_feature 1..759: note = Description of Artificial Sequence: Synthetic coding sequence
  source 1..759: mol_type = other DNA
atggtgagctggatcatcagcagactggtggtgctgatcttcggcaccctgtaccccgcctacagcagctacaaggccgtgaagaccaagaacgtgaaggagtacgtgaagtggatgatgtactggatcgtgttcgccttcttcaccaccgccgagaccctgaccgacatcgtgctgagctggttccccttctacttcgagctgaagatcgccttcgtgatctggctgctgagcccctacaccaagggcagcagcgtgctgtacagaaagttcgtgcaccccaccctgagcaacaaggagaaggagatcgacgagtacatcacccaggccagagacaagagctacgagaccatgatgagagtgggcaagagaggcctgaacctggccgccaacgccgccgtgaccgccgccgccaagggcgtgctgagcgagaagctgagaagcttcagcatgcaggacctgaccctgatcagagacgaggacgccctgcccctgcagagacccgacggcagactgagacccagccccggcagcctgctggacaccatcgaggacctgggcgacgaccccgccctgagcctgagaagcagcaccaaccccgccgacagcagaaccgaggccagcgaggacgacatgggcgacaaggcccccaagagagccaagcccatcaagaaggcccccaaggccgagcccctggccagcaagaccctgaagaccagacccaagaagaagaccagcggcggcggcgacagcgcctag

SEQ ID NO: 96541 - DNA, 765 bp, synthetic construct
  misc_feature 1..765: note = Description of Artificial Sequence: Synthetic coding sequence
  source 1..765: mol_type = other DNA
atggtgagctggatcatcagcagactggtggtgctgatcttcggcaccctgtaccccgcctacagcagctacaaggccgtgaagaccaagaacgtgaaggagtacgtgaagtggatgatgtactggatcgtgttcgccttcttcaccaccgccgagaccctgaccgacatcgtgctgagctggttccccttctacttcgagctgaagatcgccttcgtgatctggctgctgagcccctacaccaagggcagcagcgtgctgtacagaaagttcgtgcaccccaccctgagcaacaaggagaaggagatcgacgagtacatcacccaggccagagacaagagctacgagaccatgatgagagtgggcaagagaggcctgaacctggccgccaacgccgccgtgaccgccgccgccaagggccagggcgtgctgagcgagaagctgagaagcttcagcatgcaggacctgaccctgatcagagacgaggacgccctgcccctgcagagacccgacggcagactgagacccagccccggcagcctgctggacaccatcgaggacctgggcgacgaccccgccctgagcctgagaagcagcaccaaccccgccgacagcagaaccgaggccagcgaggacgacatgggcgacaaggcccccaagagagccaagcccatcaagaaggcccccaaggccgagcccctggccagcaagaccctgaagaccagacccaagaagaagaccagcggcggcggcgacagcgcctag

SEQ ID NO: 96542 - DNA, 723 bp, synthetic construct
  misc_feature 1..723: note = Description of Artificial Sequence: Synthetic coding sequence
  source 1..723: mol_type = other DNA
atgctgtaccccgcctactacagctacaaggccgtgaagaccaagaacgtgaaggagtacgtgagatggatgatgtactggatcgtgttcgccctgtacaccgtgatcgagaccgtggccgaccagaccgtggcctggttccccctgtactacgagctgaagatcgccttcgtgatctggctgctgagcccctacaccaagggcgccagcctgatctacagaaagttcctgcaccccctgctgagcagcaaggagagagagatcgacgactacatcgtgcaggccaaggagagaggctacgagaccatggtgaacttcggcagacagggcctgaacctggccgccaccgccgccgtgaccgccgccgtgaagagccagggcgccatcaccgagagactgagaagcttcagcatgcacgacctgaccaccatccagggcgacgagcccgtgggccagagaccctaccagcccctgcccgaggccaagaagaagagcaagcccgcccccagcgagagcgccggctacggcatccccctgaaggacggcgacgagaagaccgacgaggaggccgagggcccctacagcgacaacgagatgctgacccacaagggcctgagaagaagccagagcatgaagagcgtgaagaccaccaagggcagaaaggaggtgagatacggcagcctgaagtacaaggtgaagaagagaccccaggtgtacttctag

SEQ ID NO: 96543 - DNA, 768 bp, synthetic construct
  misc_feature 1..768: note = Description of Artificial Sequence: Synthetic coding sequence
  source 1..768: mol_type = other DNA
atggtgagctggatgatcagcagagccgtggtgctggtgttcggcatgctgtaccccgcctactacagctacaaggccgtgaagaccaagaacgtgaaggagtacgtgagatggatgatgtactggatcgtgttcgccctgtacaccgtgatcgagaccgtggccgaccagaccgtggcctggttccccctgtactacgagctgaagatcgccttcgtgatctggctgctgagcccctacaccaagggcgccagcctgatctacagaaagttcctgcaccccctgctgagcagcaaggagagagagatcgacgactacatcgtgcaggccaaggagagaggctacgagaccatggtgaacttcggcagacagggcctgaacctggccgccaccgccgccgtgaccgccgccgtgaagagccagggcgccatcaccgagagactgagaagcttcagcatgcacgacctgaccaccatccagggcgacgagcccgtgggccagagaccctaccagcccctgcccgaggccaagaagaagagcaagcccgcccccagcgagagcgccggctacggcatccccctgaaggacggcgacgagaagaccgacgaggaggccgagggcccctacagcgacaacgagatgctgacccacaagggcctgagaagaagccagagcatgaagagcgtgaagaccaccaagggcagaaaggaggtgagatacggcagcctgaagtacaaggtgaagaagagaccccaggtgtacttctag

SEQ ID NO: 96544 - DNA, 774 bp, synthetic construct
  misc_feature 1..774: note = Description of Artificial Sequence: Synthetic coding sequence
  source 1..774: mol_type = other DNA
ctgatgatgtggctgctggtggagagagccctgatccagctggtgttcggcatgctgtaccccgcctactacagctacaaggccgtgaagaccaagaacgtgaaggagtacgtgagatggatgatgtactggatcgtgttcgccctgtacaccgtgatcgagaccgtggccgaccagaccgtggcctggttccccctgtactacgagctgaagatcgccttcgtgatctggctgctgagcccctacaccaagggcgccagcctgatctacagaaagttcctgcaccccctgctgagcagcaaggagagagagatcgacgactacatcgtgcaggccaaggagagaggctacgagaccatggtgaacttcggcagacagggcctgaacctggccgccaccgccgccgtgaccgccgccgtgaagagccagggcgccatcaccgagagactgagaagcttcagcatgcacgacctgaccaccatccagggcgacgagcccgtgggccagagaccctaccagcccctgcccgaggccaagaagaagagcaagcccgcccccagcgagagcgccggctacggcatccccctgaaggacggcgacgagaagaccgacgaggaggccgagggcccctacagcgacaacgagatgctgacccacaagggcctgagaagaagccagagcatgaagagcgtgaagaccaccaagggcagaaaggaggtgagatacggcagcctgaagtacaaggtgaagaagagaccccaggtgtacttctag

SEQ ID NO: 96545 - DNA, 774 bp, synthetic construct
  misc_feature 1..774: note = Description of Artificial Sequence: Synthetic coding sequence
  source 1..774: mol_type = other DNA
atggtgagctggatgatctgcagactggtggtgctggtgttcggcatgctgtgccccgcctacgccagctacaaggccgtgaagaccaagaacatcagagagtacgtgagatggatgatgtactggatcgtgttcgccctgttcatggccgccgagatcgtgaccgacatcttcatcagctggttccccttctactacgagatcaagatggccttcgtgctgtggctgctgagcccctacaccaagggcgccagcctgctgtacagaaagttcgtgcaccccagcctgagcagacacgagaaggagatcgacgcctacatcgtgcaggccaaggagagaagctacgagaccgtgctgagcttcggcaagagaggcctgaacatcgccgccagcgccgccgtgcaggccgccaccaagagccagggcgccctggccggcagactgagaagcttcagcatgcaggacctgagaagcatcagcgacgcccccgcccccgcctaccacgaccccctgtacctggaggaccaggtgagccacagaagaccccccatcggctacagagccggcggcctgcaggacagcgacaccgaggacgagtgctggagcgacaccgaggccgtgcccagagcccccgccagacccagagagaagcccctgatcagaagccagagcctgagagtggtgaagagaaagccccccgtgagagagggcaccagcagaagcctgaaggtgagaaccagaaagaagaccgtgcccagcgacgtggacagctag

SEQ ID NO: 96546 - DNA, 522 bp, synthetic construct
  misc_feature 1..522: note = Description of Artificial Sequence: Synthetic coding sequence
  source 1..522: mol_type = other DNA
atggtgagctggatgatctgcagactggtggtgctggtgttcggcatgctgtgccccgcctacgccagctacaaggccgtgaagaccaagaacatcagagagtacgtgagatggatgatgtactggatcgtgttcgccctgttcatggccgccgagatcgtgaccgacatcttcatcagctggttccccttctactacgagatcaagatggccttcgtgctgtggctgctgagcccctacaccaagggcgccagcctgctgtacagaaagttcgtgcaccccagcctgagcagacacgagaaggagatcgacgcctacatcgtgcaggccaaggagagaagctacgagaccgtgctgagcttcggcaagagaggcctgaacatcgccgccagcgccgccgtgcaggccgccaccaagggcaccggccccggcgcctgcagaaccgccacccccagaatgagcgtgggccagatcctgagacagagccccggcagacagcccggccccgagagaagcccctag

SEQ ID NO: 96547 - DNA, 570 bp, synthetic construct
  misc_feature 1..570: note = Description of Artificial Sequence: Synthetic coding sequence
  source 1..570: mol_type = other DNA
atgagcgccgccatgagagagagattcgacagattcctgcacgagaagaactgcatgaccgacctgctggccaagctggaggccaagaccggcgtgaacagaagcttcatcgccctgggcgtgatcggcctggtggccctgtacctggtgttcggctacggcgccagcctgctgtgcaacctgatcggcttcggctaccccgcctacatcagcatcaaggccatcgagagccccaacaaggaggacgacacccagtggctgacctactgggtggtgtacggcgtgttcagcatcgccgagttcttcagcgacatcttcctgagctggttccccttctactacatgctgaagtgcggcttcctgctgtggtgcatggcccccagccccagcaacggcgccgagctgctgtacaagagaatcatcagacccttcttcctgaagcacgagagccagatggacagcgtggtgaaggacctgaaggacaaggccaaggagaccgccgacgccatcaccaaggaggccaagaaggccaccgtgaacctgctgggcgaggagaagaagagcacctag

SEQ ID NO: 96548 - DNA, 396 bp, synthetic construct
  misc_feature 1..396: note = Description of Artificial Sequence: Synthetic coding sequence
  source 1..396: mol_type = other DNA
atgagcgccgccatgagagagagattcgacagattcctgcacgagaagaactgcatgaccgacctgctggccaagctggaggccaagaccggcgtgaacagaagcttcatcgccctgggcgtgatcggcctggtggccctgtacctggtgttcggctacggcgccagcctgctgtgcaacctgatcggcttcggctaccccgcctacatcagcatcaaggccatcgagagccccaacaaggaggacgacacccagtggctgacctactgggtggtgtacggcgtgttcagcatcgccgagttcttcagcgacatcttcctgagctggttccccttctactacatgctgaaggtgtggagcggcctgggcttcctgctgcccagatgcctgctgtag

SEQ ID NO: 96549 - DNA, 1413 bp, synthetic construct
  misc_feature 1..1413: note = Description of Artificial Sequence: Synthetic coding sequence
  source 1..1413: mol_type = other DNA
atgcacttcagcatccccgagaccgagagcagaagcggcgacagcggcggcagcgcctacgtggcctacaacatccacgtgaacggcgtgctgcactgcagagtgagatacagccagctgctgggcctgcacgagcagctgagaaaggagtacggcgccaacgtgctgcccgccttcccccccaagaagctgttcagcctgacccccgccgaggtggagcagagaagagagcagctggagaagtacatgcaggccgtgagacaggaccccctgctgggcagcagcgagaccttcaacagcttcctgagaagagcccagcaggagacccagcaggtgcccaccgaggaggtgagcctggaggtgctgctgagcaacggccagaaggtgctggtgaacgtgctgaccagcgaccagaccgaggacgtgctggaggccgtggccgccaagctggacctgcccgacgacctgatcggctacttcagcctgttcctggtgagagagaaggaggacggcgccttcagcttcgtgagaaagctgcaggagttcgagctgccctacgtgagcgtgaccagcctgagaagccaggagtacaagatcgtgctgagaaagagctactgggacagcgcctacgacgacgacgtgatggagaacagagtgggcctgaacctgctgtacgcccagaccgtgagcgacatcgagagaggctggatcctggtgaccaaggagcagcacagacagctgaagagcctgcaggagaaggtgagcaagaaggagttcctgagactggcccagaccctgagacactacggctacctgagattcgacgcctgcgtggccgacttccccgagaaggactgccccgtggtggtgagcgccggcaacagcgagctgagcctgcagctgagactgcccggccagcagctgagagagggcagcttcagagtgaccagaatgagatgctggagagtgaccagcagcgtgcccctgcccagcggcagcaccagcagccccggcagaggcagaggcgaggtgagactggagctggccttcgagtacctgatgagcaaggacagactgcagtgggtgaccatcaccagcccccaggccatcatgatgagcatctgcctgcagagcatggtggacgagctgatggtgaagaagagcggcggcagcatcagaaagatgctgagaagaagagtgggcggcaccctgagaagaagcgacagccagcaggccgtgaagagcccccccctgctggagagccccgacgccaccagagagagcatggtgaagctgagcagcaagctgagcgccgtgagcctgagaggcatcggcagccccagcaccgacgccagcgccagcgacgtgcacggcaacttcgccttcgagggcatcggcgacgaggacctgtag

SEQ ID NO: 96550 - DNA, 2814 bp, synthetic construct
  misc_feature 1..2814: note = Description of Artificial Sequence: Synthetic coding sequence
  source 1..2814: mol_type = other DNA
atgcacagacccagaagaagaggcaccagaccccccctgctggccctgctggccgccctgctgctggccgccagaggcgccgccgcccaggagaccgagctgagcgtgagcgccgagctggtgcccaccagcagctggaacatcagcagcgagctgaacaaggacagctacctgaccctggacgagcccatgaacaacatcaccaccagcctgggccagaccgccgagctgcactgcaaggtgagcggcaaccccccccccaccatcagatggttcaagaacgacgcccccgtggtgcaggagcccagaagactgagcttcagaagcaccatctacggcagcagactgagaatcagaaacctggacaccaccgacaccggctacttccagtgcgtggccaccaacggcaaggaggtggtgagcagcaccggcgtgctgttcgtgaagttcggccccccccccaccgccagccccggctacagcgacgagtacgaggaggacggcttctgccagccctacagaggcatcgcctgcgccagattcatcggcaacagaaccgtgtacatggagagcctgcacatgcagggcgagatcgagaaccagatcaccgccgccttcaccatgatcggcaccagcagccacctgagcgacaagtgcagccagttcgccatccccagcctgtgccactacgccttcccctactgcgacgagaccagcagcgtgcccaagcccagagacctgtgcagagacgagtgcgagatcctggagaacgtgctgtgccagaccgagtacatcttcgccagaagcaaccccatgatcctgatgagactgaagctgcccaactgcgaggacctgccccagcccgagagccccgaggccgccaactgcatcagaatcggcatccccatggccgaccccatcaacaagaaccacaagtgctacaacagcaccggcgtggactacagaggcaccgtgagcgtgaccaagagcggcagacagtgccagccctggaacagccagtacccccacacccacaccttcaccgccctgagattccccgagctgaacggcggccacagctactgcagaaaccccggcaaccagaaggaggccccctggtgcttcaccctggacgagaacttcaagagcgacctgtgcgacatccccgcctgcgacagcaaggacagcaaggagaagaacaagatggagatcctgtacatcctggtgcccagcgtggccatccccctggccatcgccctgctgttcttcttcatctgcgtgtgcagaaacaaccagaagagcagcagcgcccccgtgcagagacagcccaagcacgtgagaggccagaacgtggagatgagcatgctgaacgcctacaagcccaagagcaaggccaaggagctgcccctgagcgccgtgagattcatggaggagctgggcgagtgcgccttcggcaagatctacaagggccacctgtacctgcccggcatggaccacgcccagctggtggccatcaagaccctgaaggactacaacaacccccagcagtggaccgagttccagcaggaggccagcctgatggccgagctgcaccaccccaacatcgtgtgcctgctgggcgccgtgacccaggagcagcccgtgtgcatgctgttcgagtacatcaaccagggcgacctgcacgagttcctgatcatgagaagcccccacagcgacgtgggctgcagcagcgacgaggacggcaccgtgaagagcagcctggaccacggcgacttcctgcacatcgccatccagatcgccgccggcatggagtacctgagcagccacttcttcgtgcacaaggacctggccgccagaaacatcctgatcggcgagcagctgcacgtgaagatcagcgacctgggcctgagcagagagatctacagcgccgactactacagagtgcagagcaagagcctgctgcccatcagatggatgccccccgaggccatcatgtacggcaagttcagcagcgacagcgacatctggagcttcggcgtggtgctgtgggagatcttcagcttcggcctgcagccctactacggcttcagcaaccaggaggtgatcgagatggtgagaaagagacagctgctgccctgcagcgaggactgcccccccagaatgtacagcctgatgaccgagtgctggaacgagatccccagcagaagacccagattcaaggacatccacgtgagactgagaagctgggagggcctgagcagccacaccagcagcaccacccccagcggcggcaacgccaccacccagaccaccagcctgagcgccagccccgtgagcaacctgagcaaccccagataccccaactacatgttccccagccagggcatcaccccccagggccagatcgccggcttcatcggcccccccatcccccagaaccagagattcatccccatcaacggctaccccatcccccccggctacgccgccttccccgccgcccactaccagcccaccggcccccccagagtgatccagcactgccccccccccaagagcagaagccccagcagcgccagcggcagcaccagcaccggccacgtgaccagcctgcccagcagcggcagcaaccaggaggccaacatccccctgctgccccacatgagcatccccaaccaccccggcggcatgggcatcaccgtgttcggcaacaagagccagaagccctacaagatcgacagcaagcaggccagcctgctgggcgacgccaacatccacggccacaccgagagcatgatcagcgccgagctgtag

SEQ ID NO: 96551 - DNA, 1182 bp, synthetic construct
  misc_feature 1..1182: note = Description of Artificial Sequence: Synthetic coding sequence
  source 1..1182: mol_type = other DNA
atgcacagacccagaagaagaggcaccagaccccccctgctggccctgctggccgccctgctgctggccgccagaggcgccgccgcccaggagaccgagctgagcgtgagcgccgagctggtgcccaccagcagctggaacatcagcagcgagctgaacaaggacagctacctgaccctggacgagcccatgaacaacatcaccaccagcctgggccagaccgccgagctgcactgcaaggtgagcggcaaccccccccccaccatcagatggttcaagaacgacgcccccgtggtgcaggagcccagaagactgagcttcagaagcaccatctacggcagcagactgagaatcagaaacctggacaccaccgacaccggctacttccagtgcgtggccaccaacggcaaggaggtggtgagcagcaccggcgtgctgttcgtgaagttcggccccccccccaccgccagccccggctacagcgacgagtacgaggaggacggcttctgccagccctacagaggcatcgcctgcgccagattcatcggcaacagaaccgtgtacatggagagcctgcacatgcagggcgagatcgagaaccagatcaccgccgccttcaccatgatcggcaccagcagccacctgagcgacaagtgcagccagttcgccatccccagcctgtgccactacgccttcccctactgcgacgagaccagcagcgtgcccaagcccagagacctgtgcagagacgagtgcgagatcctggagaacgtgctgtgccagaccgagtacatcttcgccagaagcaaccccatgatcctgatgagactgaagctgcccaactgcgaggacctgccccagcccgagagccccgaggccgccaactgcatcagaatcggcatccccatggccgaccccatcaacaagaaccacaagtgctacaacagcaccggcgtggactacagaggcaccgtgagcgtgaccaagagcggcagacagtgccagccctggaacagccagtacccccacacccacaccttcaccgccctgagattccccgagctgaacggcggccacagctactgcagaaaccccggcaaccagaaggaggccccctggtgcttcaccctggacgagaacttcaagagcgacctgtgcgacatccccgcctgcggcaagtag

SEQ ID NO: 96552 - DNA, 2823 bp, synthetic construct
  misc_feature 1..2823: note = Description of Artificial Sequence: Synthetic coding sequence
  source 1..2823: mol_type = other DNA
agagccagaggctgcagcgccagaagaagaggcaccagaccccccctgctggccctgctggccgccctgctgctggccgccagaggcgccgccgcccaggagaccgagctgagcgtgagcgccgagctggtgcccaccagcagctggaacatcagcagcgagctgaacaaggacagctacctgaccctggacgagcccatgaacaacatcaccaccagcctgggccagaccgccgagctgcactgcaaggtgagcggcaaccccccccccaccatcagatggttcaagaacgacgcccccgtggtgcaggagcccagaagactgagcttcagaagcaccatctacggcagcagactgagaatcagaaacctggacaccaccgacaccggctacttccagtgcgtggccaccaacggcaaggaggtggtgagcagcaccggcgtgctgttcgtgaagttcggccccccccccaccgccagccccggctacagcgacgagtacgaggaggacggcttctgccagccctacagaggcatcgcctgcgccagattcatcggcaacagaaccgtgtacatggagagcctgcacatgcagggcgagatcgagaaccagatcaccgccgccttcaccatgatcggcaccagcagccacctgagcgacaagtgcagccagttcgccatccccagcctgtgccactacgccttcccctactgcgacgagaccagcagcgtgcccaagcccagagacctgtgcagagacgagtgcgagatcctggagaacgtgctgtgccagaccgagtacatcttcgccagaagcaaccccatgatcctgatgagactgaagctgcccaactgcgaggacctgccccagcccgagagccccgaggccgccaactgcatcagaatcggcatccccatggccgaccccatcaacaagaaccacaagtgctacaacagcaccggcgtggactacagaggcaccgtgagcgtgaccaagagcggcagacagtgccagccctggaacagccagtacccccacacccacaccttcaccgccctgagattccccgagctgaacggcggccacagctactgcagaaaccccggcaaccagaaggaggccccctggtgcttcaccctggacgagaacttcaagagcgacctgtgcgacatccccgcctgcgacagcaaggacagcaaggagaagaacaagatggagatcctgtacatcctggtgcccagcgtggccatccccctggccatcgccctgctgttcttcttcatctgcgtgtgcagaaacaaccagaagagcagcagcgcccccgtgcagagacagcccaagcacgtgagaggccagaacgtggagatgagcatgctgaacgcctacaagcccaagagcaaggccaaggagctgcccctgagcgccgtgagattcatggaggagctgggcgagtgcgccttcggcaagatctacaagggccacctgtacctgcccggcatggaccacgcccagctggtggccatcaagaccctgaaggactacaacaacccccagcagtggaccgagttccagcaggaggccagcctgatggccgagctgcaccaccccaacatcgtgtgcctgctgggcgccgtgacccaggagcagcccgtgtgcatgctgttcgagtacatcaaccagggcgacctgcacgagttcctgatcatgagaagcccccacagcgacgtgggctgcagcagcgacgaggacggcaccgtgaagagcagcctggaccacggcgacttcctgcacatcgccatccagatcgccgccggcatggagtacctgagcagccacttcttcgtgcacaaggacctggccgccagaaacatcctgatcggcgagcagctgcacgtgaagatcagcgacctgggcctgagcagagagatctacagcgccgactactacagagtgcagagcaagagcctgctgcccatcagatggatgccccccgaggccatcatgtacggcaagttcagcagcgacagcgacatctggagcttcggcgtggtgctgtgggagatcttcagcttcggcctgcagccctactacggcttcagcaaccaggaggtgatcgagatggtgagaaagagacagctgctgccctgcagcgaggactgcccccccagaatgtacagcctgatgaccgagtgctggaacgagatccccagcagaagacccagattcaaggacatccacgtgagactgagaagctgggagggcctgagcagccacaccagcagcaccacccccagcggcggcaacgccaccacccagaccaccagcctgagcgccagccccgtgagcaacctgagcaaccccagataccccaactacatgttccccagccagggcatcaccccccagggccagatcgccggcttcatcggcccccccatcccccagaaccagagattcatccccatcaacggctaccccatcccccccggctacgccgccttccccgccgcccactaccagcccaccggcccccccagagtgatccagcactgccccccccccaagagcagaagccccagcagcgccagcggcagcaccagcaccggccacgtgaccagcctgcccagcagcggcagcaaccaggaggccaacatccccctgctgccccacatgagcatccccaaccaccccggcggcatgggcatcaccgtgttcggcaacaagagccagaagccctacaagatcgacagcaagcaggccagcctgctgggcgacgccaacatccacggccacaccgagagcatgatcagcgccgagctgtag

SEQ ID NO: 96553 - DNA, 1167 bp, synthetic construct
  misc_feature 1..1167: note = Description of Artificial Sequence: Synthetic coding sequence
  source 1..1167: mol_type = other DNA
atgctgttcgagtacatcaaccagggcgacctgcacgagttcctgatcatgagaagcccccacagcgacgtgggctgcagcagcgacgaggacggcaccgtgaagagcagcctggaccacggcgacttcctgcacatcgccatccagatcgccgccggcatggagtacctgagcagccacttcttcgtgcacaaggacctggccgccagaaacatcctgatcggcgagcagctgcacgtgaagatcagcgacctgggcctgagcagagagatctacagcgccgactactacagagtgcagagcaagagcctgctgcccatcagatggatgccccccgaggccatcatgtacggcaagttcagcagcgacagcgacatctggagcttcggcgtggtgctgtgggagatcttcagcttcggcctgcagccctactacggcttcagcaaccaggaggtgatcgagatggtgagaaagagacagctgctgccctgcagcgaggactgcccccccagaatgtacagcctgatgaccgagtgctggaacgagatccccagcagaagacccagattcaaggacatccacgtgagactgagaagctgggagggcctgagcagccacaccagcagcaccacccccagcggcggcaacgccaccacccagaccaccagcctgagcgccagccccgtgagcaacctgagcaaccccagataccccaactacatgttccccagccagggcatcaccccccagggccagatcgccggcttcatcggcccccccatcccccagaaccagagattcatccccatcaacggctaccccatcccccccggctacgccgccttccccgccgcccactaccagcccaccggcccccccagagtgatccagcactgccccccccccaagagcagaagccccagcagcgccagcggcagcaccagcaccggccacgtgaccagcctgcccagcagcggcagcaaccaggaggccaacatccccctgctgccccacatgagcatccccaaccaccccggcggcatgggcatcaccgtgttcggcaacaagagccagaagccctacaagatcgacagcaagcaggccagcctgctgggcgacgccaacatccacggccacaccgagagcatgatcagcgccgagctgtag

SEQ ID NO: 96554 - DNA, 2832 bp, synthetic construct
  misc_feature 1..2832: note = Description of Artificial Sequence: Synthetic coding sequence
  source 1..2832: mol_type = other DNA
atggccagaggcagcgccctgcccagaagacccctgctgtgcatccccgccgtgtgggccgccgccgccctgctgctgagcgtgagcagaaccagcggcgaggtggaggtgctggaccccaacgaccccctgggccccctggacggccaggacggccccatccccaccctgaagggctacttcctgaacttcctggagcccgtgaacaacatcaccatcgtgcagggccagaccgccatcctgcactgcaaggtggccggcaaccccccccccaacgtgagatggctgaagaacgacgcccccgtggtgcaggagcccagaagaatcatcatcagaaagaccgagtacggcagcagactgagaatccaggacctggacaccaccgacaccggctactaccagtgcgtggccaccaacggcatgaagaccatcaccgccaccggcgtgctgttcgtgagactgggccccacccacagccccaaccacaacttccaggacgactaccacgaggacggcttctgccagccctacagaggcatcgcctgcgccagattcatcggcaacagaaccatctacgtggacagcctgcagatgcagggcgagatcgagaacagaatcaccgccgccttcaccatgatcggcaccagcacccacctgagcgaccagtgcagccagttcgccatccccagcttctgccacttcgtgttccccctgtgcgacgccagaagcagaacccccaagcccagagagctgtgcagagacgagtgcgaggtgctggagagcgacctgtgcagacaggagtacaccatcgccagaagcaaccccctgatcctgatgagactgcagctgcccaagtgcgaggccctgcccatgcccgagagccccgacgccgccaactgcatgagaatcggcatccccgccgagagactgggcagataccaccagtgctacaacggcagcggcatggactacagaggcaccgccagcaccaccaagagcggccaccagtgccagccctgggccctgcagcacccccacagccaccacctgagcagcaccgacttccccgagctgggcggcggccacgcctactgcagaaaccccggcggccagatggagggcccctggtgcttcacccagaacaagaacgtgagaatggagctgtgcgacgtgcccagctgcagccccagagacagcagcaagatgggcatcctgtacatcctggtgcccagcatcgccatccccctggtgatcgcctgcctgttcttcctggtgtgcatgtgcagaaacaagcagaaggccagcgccagcaccccccagagaagacagctgatggccagccccagccaggacatggagatgcccctgatcaaccagcacaagcaggccaagctgaaggagatcagcctgagcgccgtgagattcatggaggagctgggcgaggacagattcggcaaggtgtacaagggccacctgttcggccccgcccccggcgagcagacccaggccgtggccatcaagaccctgaaggacaaggccgagggccccctgagagaggagttcagacacgaggccatgctgagagccagactgcagcaccccaacgtggtgtgcctgctgggcgtggtgaccaaggaccagcccctgagcatgatcttcagctactgcagccacggcgacctgcacgagttcctggtgatgagaagcccccacagcgacgtgggcagcaccgacgacgacagaaccgtgaagagcgccctggagccccccgacttcgtgcacctggtggcccagatcgccgccggcatggagtacctgagcagccaccacgtggtgcacaaggacctggccaccagaaacgtgctggtgtacgacaagctgaacgtgaagatcagcgacctgggcctgttcagagaggtgtacgccgccgactactacaagctgctgggcaacagcctgctgcccatcagatggatggcccccgaggccatcatgtacggcaagttcagcatcgacagcgacatctggagctacggcgtggtgctgtgggaggtgttcagctacggcctgcagccctactgcggctacagcaaccaggacgtggtggagatgatcagaaacagacaggtgctgccctgccccgacgactgccccgcctgggtgtacgccctgatgatcgagtgctggaacgagttccccagcagaagacccagattcaaggacatccacagcagactgagagcctggggcaacctgagcaactacaacagcagcgcccagaccagcggcgccagcaacaccacccagaccagcagcctgagcaccagccccgtgagcaacgtgagcaacgccagatacgtgggccccaagcagaaggccccccccttcccccagccccagttcatccccatgaagggccagatcagacccatggtgccccccccccagctgtacgtgcccgtgaacggctaccagcccgtgcccgcctacggcgcctacctgcccaacttctaccccgtgcagatccccatgcagatggccccccagcaggtgcccccccagatggtgcccaagcccagcagccaccacagcggcagcggcagcaccagcaccggctacgtgaccaccgcccccagcaacaccagcatggccgacagagccgccctgctgagcgagggcgccgacgacacccagaacgcccccgaggacggcgcccagagcaccgtgcaggaggccgaggaggaggaggagggcagcgtgcccgagaccgagctgctgggcgactgcgacaccctgcaggtggacgaggcccaggtgcagctggaggcctag

SEQ ID NO: 96555 - DNA, 1239 bp, synthetic construct
  misc_feature 1..1239: note = Description of Artificial Sequence: Synthetic coding sequence
  source 1..1239: mol_type = other DNA
atgggccaggaccagaccaagcagcagatcgagaagggcctgcagctgtaccagagcaaccagaccgagaaggccctgcaggtgtggaccaaggtgctggagaagagcagcgacctgatgggcagattcagagtgctgggctgcctggtgaccgcccacagcgagatgggcagatacaaggagatgctgaagttcgccgtggtgcagatcgacaccgccagagagctggaggacgccgacttcctgctggagagctacctgaacctggccagaagcaacgagaagctgtgcgagttccacaagaccatcagctactgcaagacctgcctgggcctgcccggcaccagagccggcgcccagctgggcggccaggtgagcctgagcatgggcaacgccttcctgggcctgagcgtgttccagaaggccctggagagcttcgagaaggccctgagatacgcccacaacaacgacgacgccatgctggagtgcagagtgtgctgcagcctgggcagcttctacgcccaggtgaaggactacgagaaggccctgttcttcccctgcaaggccgccgagctggtgaacaactacggcaagggctggagcctgaagtacagagccatgagccagtaccacatggccgtggcctacagactgctgggcagactgggcagcgccatggagtgctgcgaggagagcatgaagatcgccctgcagcacggcgacagacccctgcaggccctgtgcctgctgtgcttcgccgacatccacagaagcagaggcgacctggagaccgccttccccagatacgacagcgccatgagcatcatgaccgagatcggcaacagactgggccaggtgcaggccctgctgggcgtggccaagtgctgggtggccagaaaggccctggacaaggccctggacgccatcgagagagcccaggacctggccgaggaggtgggcaacaagctgagccagctgaagctgcactgcctgagcgagagcatctacagaagcaagggcctgcagagagagctgagagcccacgtggtgagattccacgagtgcgtggaggagaccgagctgtactgcggcctgtgcggcgagagcatcggcgagaagaacagcagactgcaggccctgccctgcagccacatcttccacctgagatgcctgcagaacaacggcaccagaagctgccccaactgcagaagaagcagcatgaagcccggcttcgtgtag

SEQ ID NO: 96556 - DNA, 1062 bp, synthetic construct
  misc_feature 1..1062: note = Description of Artificial Sequence: Synthetic coding sequence
  source 1..1062: mol_type = other DNA
atgggccaggaccagaccaagcagcagatcgagaagggcctgcagctgtaccagagcaaccagaccgagaaggccctgcaggtgtggaccaaggtgctggagaagagcagcgacctgatgggcagattcagagtgctgggctgcctggtgaccgcccacagcgagatgggcagatacaaggagatgctgaagttcgccgtggtgcagatcgacaccgccagagagctggaggacgccgacttcctgctggagagctacctgaacctggccagaagcaacgagaagctgtgcgagttccacaagaccatcagctactgcaagacctgcctgggcctgcccggcaccagagccggcgcccagctgggcggccaggtgagcctgagcatgggcaacgccttcctgggcctgagcgtgttccagaaggccctggagagcttcgagaaggccctgagatacgcccacaacaacgacgacgccatgctggagtgcagagtgtgctgcagcctgggcagcttctacgcccaggtgaaggactacgagaaggccctgttcttcccctgcaaggccgccgagctggtgaacaactacggcaagggctggagcctgaagtacagagccatgagccagtaccacatggccgtggcctacagactgctgggcagactgggcagcgccatggagtgctgcgaggagagcatgaagatcgccctgcagcacggcgacagacccctgcaggccctgtgcctgctgtgcttcgccgacatccacagaagcagaggcgacctggagctgagccagctgaagctgcactgcctgagcgagagcatctacagaagcaagggcctgcagagagagctgagagcccacgtggtgagattccacgagtgcgtggaggagaccgagctgtactgcggcctgtgcggcgagagcatcggcgagaagaacagcagactgcaggccctgccctgcagccacatcttccacctgagatgcctgcagaacaacggcaccagaagctgccccaactgcagaagaagcagcatgaagcccggcttcgtgtag

SEQ ID NO: 96557 - DNA, 2010 bp, synthetic construct
  misc_feature 1..2010: note = Description of Artificial Sequence: Synthetic coding sequence
  source 1..2010: mol_type = other DNA
atgggcaccgccctggtgtaccacgaggacatgaccgccaccagactgctgtgggacgaccccgagtgcgagatcgagagacccgagagactgaccgccgccctggacagactgagacagagaggcctggagcagagatgcctgagactgagcgccagagaggccagcgaggaggagctgggcctggtgcacagccccgagtacgtgagcctggtgagagagacccaggtgctgggcaaggaggagctgcaggccctgagcggccagttcgacgccatctacttccaccccagcaccttccactgcgccagactggccgccggcgccggcctgcagctggtggacgccgtgctgaccggcgccgtgcagaacggcctggccctggtgagaccccccggccaccacggccagagagccgccgccaacggcttctgcgtgttcaacaacgtggccatcgccgccgcccacgccaagcagaagcacggcctgcacagaatcctggtggtggactgggacgtgcaccacggccagggcatccagtacctgttcgaggacgaccccagcgtgctgtacttcagctggcacagatacgagcacggcagattctggcccttcctgagagagagcgacgccgacgccgtgggcagaggccagggcctgggcttcaccgtgaacctgccctggaaccaggtgggcatgggcaacgccgactacgtggccgccttcctgcacctgctgctgcccctggccttcgagttcgaccccgagctggtgctggtgagcgccggcttcgacagcgccatcggcgaccccgagggccagatgcaggccacccccgagtgcttcgcccacctgacccagctgctgcaggtgctggccggcggcagagtgtgcgccgtgctggagggcggctaccacctggagagcctggccgagagcgtgtgcatgaccgtgcagaccctgctgggcgaccccgccccccccctgagcggccccatggccccctgccagagcgccctggagagcatccagagcgccagagccgcccaggccccccactggaagagcctgcagcagcaggacgtgaccgccgtgcccatgagccccagcagccacagccccgagggcagacccccccccctgctgcccggcggccccgtgtgcaaggccgccgccagcgcccccagcagcctgctggaccagccctgcctgtgccccgcccccagcgtgagaaccgccgtggccctgaccacccccgacatcaccctggtgctgccccccgacgtgatccagcaggaggccagcgccctgagagaggagaccgaggcctgggccagaccccacgagagcctggccagagaggaggccctgaccgccctgggcaagctgctgtacctgctggacggcatgctggacggccaggtgaacagcggcatcgccgccacccccgccagcgccgccgccgccaccctggacgtggccgtgagaagaggcctgagccacggcgcccagagactgctgtgcgtggccctgggccagctggacagaccccccgacctggcccacgacggcagaagcctgtggctgaacatcagaggcaaggaggccgccgccctgagcatgttccacgtgagcacccccctgcccgtgatgaccggcggcttcctgagctgcatcctgggcctggtgctgcccctggcctacggcttccagcccgacctggtgctggtggccctgggccccggccacggcctgcagggcccccacgccgccctgctggccgccatgctgagaggcctggccggcggcagagtgctggccctgctggaggagaacagcaccccccagctggccggcatcctggccagagtgctgaacggcgaggccccccccagcctgggccccagcagcgtggccagccccgaggacgtgcaggccctgatgtacctgagaggccagctggagccccagtggaagatgctgcagtgccacccccacctggtggcctag

SEQ ID NO: 96558 - DNA, 1206 bp, synthetic construct
  misc_feature 1..1206: note = Description of Artificial Sequence: Synthetic coding sequence
  source 1..1206: mol_type = other DNA
atgcagagatgctggcagggcgaccccagagtgagacccaccttccaggagatcaccagcgagaccgaggacctgtgcgagaagcccgacgacgaggtgaaggagaccgcccacgacctggacgtgaagagcccccccgagcccagaagcgaggtggtgcccgccagactgaagagagccagcgcccccaccttcgacaacgactacagcctgagcgagctgctgagccagctggacagcggcgtgagccaggccgtggagggccccgaggagctgagcagaagcagcagcgagagcaagctgcccagcagcggcagcggcaagagactgagcggcgtgagcagcgtggacagcgccttcagcagcagaggcagcctgagcctgagcttcgagagagagcccagcaccagcgacctgggcaccaccgacgtgcagaagaagaagctggtggacgccatcgtgagcggcgacaccagcaagctgatgaagatcctgcagccccaggacgtggacctggccctggacagcggcgccagcctgctgcacctggccgtggaggccggccaggaggagtgcgccaagtggctgctgctgaacaacgccaaccccaacctgagcaacagaagaggcagcacccccctgcacatggccgtggagagaagagtgagaggcgtggtggagctgctgctggccagaaagatcagcgtgaacgccaaggacgaggaccagtggaccgccctgcacttcgccgcccagaacggcgacgagagcagcaccagactgctgctggagaagaacgccagcgtgaacgaggtggacttcgagggcagaacccccatgcacgtggcctgccagcacggccaggagaacatcgtgagaatcctgctgagaagaggcgtggacgtgagcctgcagggcaaggacgcctggcactgcaccaccctggccggcccccccgcccacagacaggccgccggccaggccgccggcggcgagtgcgagagacccgacgccggctgggaggacgccatcgcccccggcagaaccgccagagccctgcccagaggcccccacccccacagacccgtgctgagaagacagagactgcagcccgccggcaccgacacccccgccagacccagaagaagaggcaccagagccctgcccggctgcagctgcatcggcgccctggccagaagaccctag

SEQ ID NO: 96559 - DNA, 2355 bp, synthetic construct
  misc_feature 1..2355: note = Description of Artificial Sequence: Synthetic coding sequence
  source 1..2355: mol_type = other DNA
atggagggcgacggcggcaccccctgggccctggccctgctgagaaccttcgacgccggcgagttcaccggctgggagaaggtgggcagcggcggcttcggccaggtgtacaaggtgagacacgtgcactggaagacctggctggccatcaagtgcagccccagcctgcacgtggacgacagagagagaatggagctgctggaggaggccaagaagatggagatggccaagttcagatacatcctgcccgtgtacggcatctgcagagagcccgtgggcctggtgatggagtacatggagaccggcagcctggagaagctgctggccagcgagcccctgccctgggacctgagattcagaatcatccacgagaccgccgtgggcatgaacttcctgcactgcatggccccccccctgctgcacctggacctgaagcccgccaacatcctgctggacgcccactaccacgtgaagatcagcgacttcggcctggccaagtgcaacggcctgagccacagccacgacctgagcatggacggcctgttcggcaccatcgcctacctgccccccgagagaatcagagagaagagcagactgttcgacaccaagcacgacgtgtacagcttcgccatcgtgatctggggcgtgctgacccagaagaagcccttcgccgacgagaagaacatcctgcacatcatggtgaaggtggtgaagggccacagacccgagctgccccccgtgtgcagagccagacccagagcctgcagccacctgatcagactgatgcagagatgctggcagggcgaccccagagtgagacccaccttccaggagatcaccagcgagaccgaggacctgtgcgagaagcccgacgacgaggtgaaggagaccgcccacgacctggacgtgaagagcccccccgagcccagaagcgaggtggtgcccgccagactgaagagagccagcgcccccaccttcgacaacgactacagcctgagcgagctgctgagccagctggacagcggcgtgagccaggccgtggagggccccgaggagctgagcagaagcagcagcgagagcaagctgcccagcagcggcagcggcaagagactgagcggcgtgagcagcgtggacagcgccttcagcagcagaggcagcctgagcctgagcttcgagagagagcccagcaccagcgacctgggcaccaccgacgtgcagaagaagaagctggtggacgccatcgtgagcggcgacaccagcaagctgatgaagatcctgcagccccaggacgtggacctggccctggacagcggcgccagcctgctgcacctggccgtggaggccggccaggaggagtgcgccaagtggctgctgctgaacaacgccaaccccaacctgagcaacagaagaggcagcacccccctgcacatggccgtggagagaagagtgagaggcgtggtggagctgctgctggccagaaagatcagcgtgaacgccaaggacgaggaccagtggaccgccctgcacttcgccgcccagaacggcgacgagagcagcaccagactgctgctggagaagaacgccagcgtgaacgaggtggacttcgagggcagaacccccatgcacgtggcctgccagcacggccaggagaacatcgtgagaatcctgctgagaagaggcgtggacgtgagcctgcagggcaaggacgcctggctgcccctgcactacgccgcctggcagggccacctgcccatcgtgaagctgctggccaagcagcccggcgtgagcgtgaacgcccagaccctggacggcagaacccccctgcacctggccgcccagagaggccactacagagtggccagaatcctgatcgacctgtgcagcgacgtgaacgtgtgcagcctgctggcccagacccccctgcacgtggccgccgagaccggccacaccagcaccgccagactgctgctgcacagaggcgccggcaaggaggccatgaccagcgacggctacaccgccctgcacctggccgccagaaacggccacctggccaccgtgaagctgctggtggaggagaaggccgacgtgctggccagaggccccctgaaccagaccgccctgcacctggccgccgcccacggccacagcgaggtggtggaggagctggtgagcgccgacgtgatcgacctgttcgacgagcagggcctgagcgccctgcacctggccgcccagggcagacacgcccagaccgtggagaccctgctgagacacggcgcccacatcaacctgcagagcctgaagttccagggcggccacggccccgccgccaccctgctgagaagaagcaagacctag

SEQ ID NO: 96560 - DNA, 2499 bp, synthetic construct
  misc_feature 1..2499: note = Description of Artificial Sequence: Synthetic coding sequence
  source 1..2499: mol_type = other DNA
atggagggcgacggcggcaccccctgggccctggccctgctgagaaccttcgacgccggcgagttcaccggctgggagaaggtgggcagcggcggcttcggccaggtgtacaaggtgagacacgtgcactggaagacctggctggccatcaagtgcagccccagcctgcacgtggacgacagagagagaatggagctgctggaggaggccaagaagatggagatggccaagttcagatacatcctgcccgtgtacggcatctgcagagagcccgtgggcctggtgatggagtacatggagaccggcagcctggagaagctgctggccagcgagcccctgccctgggacctgagattcagaatcatccacgagaccgccgtgggcatgaacttcctgcactgcatggccccccccctgctgcacctggacctgaagcccgccaacatcctgctggacgcccactaccacgtgaagatcagcgacttcggcctggccaagtgcaacggcctgagccacagccacgacctgagcatggacggcctgttcggcaccatcgcctacctgccccccgagagaatcagagagaagagcagactgttcgacaccaagcacgacgtgtacagcttcgccatcgtgatctggggcgtgctgacccagaagaagcccttcgccgacgagaagaacatcctgcacatcatggtgaaggtggtgaagggccacagacccgagctgccccccgtgtgcagagccagacccagagcctgcagccacctgatcagactgatgcagagatgctggcagggcgaccccagagtgagacccaccttccagggcaacggcctgaacggcgagctgatcagacaggtgctggccgccctgctgcccgtgaccggcagatggagaagccccggcgagggcttcagactggagagcgaggtgatcatcagagtgacctgccccctgagcagcccccaggagatcaccagcgagaccgaggacctgtgcgagaagcccgacgacgaggtgaaggagaccgcccacgacctggacgtgaagagcccccccgagcccagaagcgaggtggtgcccgccagactgaagagagccagcgcccccaccttcgacaacgactacagcctgagcgagctgctgagccagctggacagcggcgtgagccaggccgtggagggccccgaggagctgagcagaagcagcagcgagagcaagctgcccagcagcggcagcggcaagagactgagcggcgtgagcagcgtggacagcgccttcagcagcagaggcagcctgagcctgagcttcgagagagagcccagcaccagcgacctgggcaccaccgacgtgcagaagaagaagctggtggacgccatcgtgagcggcgacaccagcaagctgatgaagatcctgcagccccaggacgtggacctggccctggacagcggcgccagcctgctgcacctggccgtggaggccggccaggaggagtgcgccaagtggctgctgctgaacaacgccaaccccaacctgagcaacagaagaggcagcacccccctgcacatggccgtggagagaagagtgagaggcgtggtggagctgctgctggccagaaagatcagcgtgaacgccaaggacgaggaccagtggaccgccctgcacttcgccgcccagaacggcgacgagagcagcaccagactgctgctggagaagaacgccagcgtgaacgaggtggacttcgagggcagaacccccatgcacgtggcctgccagcacggccaggagaacatcgtgagaatcctgctgagaagaggcgtggacgtgagcctgcagggcaaggacgcctggctgcccctgcactacgccgcctggcagggccacctgcccatcgtgaagctgctggccaagcagcccggcgtgagcgtgaacgcccagaccctggacggcagaacccccctgcacctggccgcccagagaggccactacagagtggccagaatcctgatcgacctgtgcagcgacgtgaacgtgtgcagcctgctggcccagacccccctgcacgtggccgccgagaccggccacaccagcaccgccagactgctgctgcacagaggcgccggcaaggaggccatgaccagcgacggctacaccgccctgcacctggccgccagaaacggccacctggccaccgtgaagctgctggtggaggagaaggccgacgtgctggccagaggccccctgaaccagaccgccctgcacctggccgccgcccacggccacagcgaggtggtggaggagctggtgagcgccgacgtgatcgacctgttcgacgagcagggcctgagcgccctgcacctggccgcccagggcagacacgcccagaccgtggagaccctgctgagacacggcgcccacatcaacctgcagagcctgaagttccagggcggccacggccccgccgccaccctgctgagaagaagcaagacctag

SEQ ID NO: 96561 - DNA, 2166 bp, synthetic construct
  misc_feature 1..2166: note = Description of Artificial Sequence: Synthetic coding sequence
  source 1..2166: mol_type = other DNA
atggagctgctggaggaggccaagaagatggagatggccaagttcagatacatcctgcccgtgtacggcatctgcagagagcccgtgggcctggtgatggagtacatggagaccggcagcctggagaagctgctggccagcgagcccctgccctgggacctgagattcagaatcatccacgagaccgccgtgggcatgaacttcctgcactgcatggccccccccctgctgcacctggacctgaagcccgccaacatcctgctggacgcccactaccacgtgaagatcagcgacttcggcctggccaagtgcaacggcctgagccacagccacgacctgagcatggacggcctgttcggcaccatcgcctacctgccccccgagagaatcagagagaagagcagactgttcgacaccaagcacgacgtgtacagcttcgccatcgtgatctggggcgtgctgacccagaagaagcccttcgccgacgagaagaacatcctgcacatcatggtgaaggtggtgaagggccacagacccgagctgccccccgtgtgcagagccagacccagagcctgcagccacctgatcagactgatgcagagatgctggcagggcgaccccagagtgagacccaccttccaggagatcaccagcgagaccgaggacctgtgcgagaagcccgacgacgaggtgaaggagaccgcccacgacctggacgtgaagagcccccccgagcccagaagcgaggtggtgcccgccagactgaagagagccagcgcccccaccttcgacaacgactacagcctgagcgagctgctgagccagctggacagcggcgtgagccaggccgtggagggccccgaggagctgagcagaagcagcagcgagagcaagctgcccagcagcggcagcggcaagagactgagcggcgtgagcagcgtggacagcgccttcagcagcagaggcagcctgagcctgagcttcgagagagagcccagcaccagcgacctgggcaccaccgacgtgcagaagaagaagctggtggacgccatcgtgagcggcgacaccagcaagctgatgaagatcctgcagccccaggacgtggacctggccctggacagcggcgccagcctgctgcacctggccgtggaggccggccaggaggagtgcgccaagtggctgctgctgaacaacgccaaccccaacctgagcaacagaagaggcagcacccccctgcacatggccgtggagagaagagtgagaggcgtggtggagctgctgctggccagaaagatcagcgtgaacgccaaggacgaggaccagtggaccgccctgcacttcgccgcccagaacggcgacgagagcagcaccagactgctgctggagaagaacgccagcgtgaacgaggtggacttcgagggcagaacccccatgcacgtggcctgccagcacggccaggagaacatcgtgagaatcctgctgagaagaggcgtggacgtgagcctgcagggcaaggacgcctggctgcccctgcactacgccgcctggcagggccacctgcccatcgtgaagctgctggccaagcagcccggcgtgagcgtgaacgcccagaccctggacggcagaacccccctgcacctggccgcccagagaggccactacagagtggccagaatcctgatcgacctgtgcagcgacgtgaacgtgtgcagcctgctggcccagacccccctgcacgtggccgccgagaccggccacaccagcaccgccagactgctgctgcacagaggcgccggcaaggaggccatgaccagcgacggctacaccgccctgcacctggccgccagaaacggccacctggccaccgtgaagctgctggtggaggagaaggccgacgtgctggccagaggccccctgaaccagaccgccctgcacctggccgccgcccacggccacagcgaggtggtggaggagctggtgagcgccgacgtgatcgacctgttcgacgagcagggcctgagcgccctgcacctggccgcccagggcagacacgcccagaccgtggagaccctgctgagacacggcgcccacatcaacctgcagagcctgaagttccagggcggccacggccccgccgccaccctgctgagaagaagcaagacctag

SEQ ID NO: 96562 - DNA, 2166 bp, synthetic construct; identical to SEQ ID NO: 96561
  misc_feature 1..2166: note = Description of Artificial Sequence: Synthetic coding sequence
  source 1..2166: mol_type = other DNA

SEQ ID NO: 96563 - DNA, 3132 bp, synthetic construct
  misc_feature 1..3132: note = Description of Artificial Sequence: Synthetic coding sequence
  source 1..3132: mol_type = other DNA
atggccgccagcttcccccccaccctgggcctgagcagcgcccccgacgagatccagcacccccacatcaagttcagcgagtggaagttcaagctgttcagagtgagaagcttcgagaagacccccgaggaggcccagaaggagaagaaggacagcttcgagggcaagcccagcctggagcagagccccgccgtgctggacaaggccgacggccagaagcccgtgcccacccagcccctgctgaaggcccaccccaagttcagcaagaagttccacgacaacgagaaggccagaggcaaggccatccaccaggccaacctgagacacctgtgcagaatctgcggcaacagcttcagagccgacgagcacaacagaagataccccgtgcacggccccgtggacggcaagaccctgggcctgctgagaaagaaggagaagagagccaccagctggcccgacctgatcgccaaggtgttcagaatcgacgtgaaggccgacgtggacagcatccaccccaccgagttctgccacaactgctggagcatcatgcacagaaagttcagcagcgccccctgcgaggtgtacttccccagaaacgtgaccatggagtggcacccccacacccccagctgcgacatctgcaacaccgccagaagaggcctgaagagaaagagcctgcagcccaacctgcagctgagcaagaagctgaagaccgtgctggaccaggccagacaggccagacagcacaagagaagagcccaggccagaatcagcagcaaggacgtgatgaagaagatcgccaactgcagcaagatccacctgagcaccaagctgctggccgtggacttccccgagcacttcgtgaagagcatcagctgccagatctgcgagcacatcctggccgaccccgtggagaccaactgcaagcacgtgttctgcagagtgtgcatcctgagatgcctgaaggtgatgggcagctactgccccagctgcagatacccctgcttccccaccgacctggagagccccgtgaagagcttcctgagcgtgctgaacagcctgatggtgaagtgccccgccaaggagtgcaacgaggaggtgagcctggagaagtacaaccaccacatcagcagccacaaggagagcaaggagatcttcgtgcacatcaacaagggcggcagacccagacagcacctgctgagcctgaccagaagagcccagaagcacagactgagagagctgaagctgcaggtgaaggccttcgccgacaaggaggagggcggcgacgtgaagagcgtgtgcatgaccctgttcctgctggccctgagagccagaaacgagcacagacaggccgacgagctggaggccatcatgcagggcaagggcagcggcctgcagcccgccgtgtgcctggccatcagagtgaacaccttcctgagctgcagccagtaccacaagatgtacagaaccgtgaaggccatcaccggcagacagatcttccagcccctgcacgccctgagaaacgccgagaaggtgctgctgcccggctaccaccacttcgagtggcagccccccctgaagaacgtgagcagcagcaccgacgtgggcatcatcgacggcctgagcggcctgagcagcagcgtggacgactaccccgtggacaccatcgccaagagattcagatacgacagcgccctggtgagcgccctgatggacatggaggaggacatcctggagggcatgagaagccaggacctggacgactacctgaacggccccttcaccgtggtggtgaaggagagctgcgacggcatgggcgacgtgagcgagaagcacggcagcggccccgtggtgcccgagaaggccgtgagattcagcttcaccatcatgaagatcaccatcgcccacagcagccagaacgtgaaggtgttcgaggaggccaagcccaacagcgagctgtgctgcaagcccctgtgcctgatgctggccgacgagagcgaccacgagaccctgaccgccatcctgagccccctgatcgccgagagagaggccatgaagagcagcgagctgatgctggagctgggcggcatcctgagaaccttcaagttcatcttcagaggcaccggctacgacgagaagctggtgagagaggtggagggcctggaggccagcggcagcgtgtacatctgcaccctgtgcgacgccaccagactggaggccagccagaacctggtgttccacagcatcaccagaagccacgccgagaacctggagagatacgaggtgtggagaagcaacccctaccacgagagcgtggaggagctgagagacagagtgaagggcgtgagcgccaagcccttcatcgagaccgtgcccagcatcgacgccctgcactgcgacatcggcaacgccgccgagttctacaagatcttccagctggagatcggcgaggtgtacaagaaccccaacgccagcaaggaggagagaaagagatggcaggccaccctggacaagcacctgagaaagaagatgaacctgaagcccatcatgagaatgaacggcaacttcgccagaaagctgatgaccaaggagaccgtggacgccgtgtgcgagctgatccccagcgaggagagacacgaggccctgagagagctgatggacctgtacctgaagatgaagcccgtgtggagaagcagctgccccgccaaggagtgccccgagagcctgtgccagtacagcttcaacagccagagattcgccgagctgctgagcaccaagttcaagtacagatacgagggcaagatcaccaactacttccacaagaccctggcccacgtgcccgagatcatcgagagagacggcagcatcggcgcctgggccagcgagggcaacgagagcggcaacaagctgttcagaagattcagaaagatgaacgccagacagagcaagtgctacgagatggaggacgtgctgaagcaccactggctgtacaccagcaagtacctgcagaagttcatgaacgcccacaacgccctgaagaccagcggcttcaccatgaacccccaggccagcctgggcgaccccctgggcatcgaggacagcctggagagccaggacagcatggagttctag

SEQ ID NO: 96564 - DNA, 1584 bp, synthetic construct
  misc_feature 1..1584: note = Description of Artificial Sequence: Synthetic coding sequence
  source 1..1584: mol_type = other DNA
atgagcctgcagatggtgaccgtgagcaacaacatcgccctgatccagcccggcttcagcctgatgaacttcgacggccaggtgttcttcttcggccagaagggctggcccaagagaagctgccccaccggcgtgttccacctggacgtgaagcacaaccacgtgaagctgaagcccaccatcttcagcaaggacagctgctacctgccccccctgagataccccgccacctgcaccttcaagggcagcctggagagcgagaagcaccagtacatcatccacggcggcaagacccccaacaacgaggtgagcgacaagatctacgtgatgagcatcgtgtgcaagaacaacaagaaggtgaccttcagatgcaccgagaaggacctggtgggcgacgtgcccgaggccagatacggccacagcatcaacgtggtgtacagcagaggcaagagcatgggcgtgctgttcggcggcagaagctacatgcccagcacccacagaaccaccgagaagtggaacagcgtggccgactgcctgccctgcgtgttcctggtggacttcgagttcggctgcgccaccagctacatcctgcccgagctgcaggacggcctgagcttccacgtgagcatcgccaagaacgacaccatctacatcctgggcggccacagcctggccaacaacatcagacccgccaacctgtacagaatcagagtggacctgcccctgggcagccccgccgtgaactgcaccgtgctgcccggcggcatcagcgtgagcagcgccatcctgacccagaccaacaacgacgagttcgtgatcgtgggcggctaccagctggagaaccagaagagaatgatctgcaacatcatcagcctggaggacaacaagatcgagatcagagagatggagacccccgactggacccccgacatcaagcacagcaagatctggttcggcagcaacatgggcaacggcaccgtgttcctgggcatccccggcgacaacaagcaggtggtgagcgagggcttctacttctacatgctgaagtgcgccgaggacgacaccaacgaggagcagaccaccttcaccaacagccagaccagcaccgaggaccccggcgacagcacccccttcgaggacagcgaggagttctgcttcagcgccgaggccaacagcttcgacggcgacgacgagttcgacacctacaacgaggacgacgaggaggacgagagcgagaccggctactggatcacctgctgccccacctgcgacgtggacatcaacacctgggtgcccttctacagcaccgagctgaacaagcccgccatgatctactgcagccacggcgacggccactgggtgcacgcccagtgcatggacctggccgagagaaccctgatccacctgagcgccggcagcaacaagtactactgcaacgagcacgtggagatcgccagagccctgcacaccccccagagagtgctgcccctgaagaagccccccatgaagagcctgagaaagaagggcagcggcaagatcctgacccccgccaagaagagcttcctgagaagactgttcgactag

SEQ ID NO: 96565 - DNA, 216 bp, synthetic construct
  misc_feature 1..216: note = Description of Artificial Sequence: Synthetic coding sequence
  source 1..216: mol_type = other DNA
atgagcctgcagatggtgaccgtgagcaacaacatcgccctgatccagcccggcttcagcctgatgaacttcgacggccaggtgttcttcttcggccagaagggctggcccaagagaagctgccccaccggcgtgttccacctggacgtgaagcacaaccacgtgaagctgaagcccaccatcttcagcaaggacagctgctacctgcccccctag

SEQ ID NO: 96566 - DNA, 453 bp, synthetic construct
  misc_feature 1..453: note = Description of Artificial Sequence: Synthetic coding sequence
  source 1..453: mol_type = other DNA
atgagcctgcagatggtgaccgtgagcaacaacatcgccctgatccagcccggcttcagcctgatgaacttcgacggccaggtgttcttcttcggccagaagggctggcccaagagaagctgccccaccggcgtgttccacctggacgtgaagcacaaccacgtgaagctgaagcccaccatcttcagcaaggacagctgctacctgccccccctgagataccccgccacctgcaccttcaagggcagcctggagagcgagaagcaccagtacatcatccacggcggcaagacccccaacaacgaggtgagcgacaagatctacgtgatgagcatcgtgtgcaagaacaacaagaaggtgaccttcagatgcaccgagaaggacctggtgggcgacgtgcccgaggccagatacggccacagcatcaacgtggtgtacagcagaggcaagtag

SEQ ID NO: 96567 - skipped

SEQ ID NO: 96568 - DNA, 1503 bp, synthetic construct
  misc_feature 1..1503: note = Description of Artificial Sequence: Synthetic coding sequence
  source 1..1503: mol_type = other DNA
atggaccacaccgagggcagccccgccgaggagccccccgcccacgcccccagccccggcaagttcggcgagagacccccccccaagagactgaccagagaggccatgagaaactacctgaaggagagaggcgaccagaccgtgctgatcctgcacgccaaggtggcccagaagagctacggcaacgagaagagattcttctgcccccccccctgcgtgtacctgatgggcagcggctggaagaagaagaaggagcagatggagagagacggctgcagcgagcaggagagccagccctgcgccttcatcggcatcggcaacagcgaccaggagatgcagcagctgaacctggagggcaagaactactgcaccgccaagaccctgtacatcagcgacagcgacaagagaaagcacttcatgctgagcgtgaagatgttctacggcaacagcgacgacatcggcgtgttcctgagcaagagaatcaaggtgatcagcaagcccagcaagaagaagcagagcctgaagaacgccgacctgtgcatcgccagcggcaccaaggtggccctgttcaacagactgagaagccagaccgtgagcaccagatacctgcacgtggagggcggcaacttccacgccagcagccagcagtggggcgccttcttcatccacctgctggacgacgacgagagcgagggcgaggagttcaccgtgagagacggctacatccactacggccagaccgtgaagctggtgtgcagcgtgaccggcatggccctgcccagactgatcatcagaaaggtggacaagcagaccgccctgctggacgccgacgaccccgtgagccagctgcacaagtgcgccttctacctgaaggacaccgagagaatgtacctgtgcctgagccaggagagaatcatccagttccaggccaccccctgccccaaggagcccaacaaggagatgatcaacgacggcgccagctggaccatcatcagcaccgacaaggccgagtacaccttctacgagggcatgggccccgtgctggcccccgtgacccccgtgcccgtggtggagagcctgcagctgaacggcggcggcgacgtggccatgctggagctgaccggccagaacttcacccccaacctgagagtgtggttcggcgacgtggaggccgagaccatgtacagatgcggcgagagcatgctgtgcgtggtgcccgacatcagcgccttcagagagggctggagatgggtgagacagcccgtgcaggtgcccgtgaccctggtgagaaacgacggcatcatctacagcaccagcctgaccttcacctacacccccgagcccggccccagaccccactgcagcgccgccggcgccatcctgagagccaacagcagccaggtgccccccaacgagagcaacaccaacagcgagggcagctacaccaacgccagcaccaacagcaccagcgtgaccagcagcaccgccaccgtggtgagctag

SEQ ID NO: 96569 - DNA, 1461 bp, synthetic construct
  misc_feature 1..1461: note = Description of Artificial Sequence: Synthetic coding sequence
  source 1..1461: mol_type = other DNA
atggcctggatcaagagaaagttcggcgagagacccccccccaagagactgaccagagaggccatgagaaactacctgaaggagagaggcgaccagaccgtgctgatcctgcacgccaaggtggcccagaagagctacggcaacgagaagagattcttctgcccccccccctgcgtgtacctgatgggcagcggctggaagaagaagaaggagcagatggagagagacggctgcagcgagcaggagagccagccctgcgccttcatcggcatcggcaacagcgaccaggagatgcagcagctgaacctggagggcaagaactactgcaccgccaagaccctgtacatcagcgacagcgacaagagaaagcacttcatgctgagcgtgaagatgttctacggcaacagcgacgacatcggcgtgttcctgagcaagagaatcaaggtgatcagcaagcccagcaagaagaagcagagcctgaagaacgccgacctgtgcatcgccagcggcaccaaggtggccctgttcaacagactgagaagccagaccgtgagcaccagatacctgcacgtggagggcggcaacttccacgccagcagccagcagtggggcgccttcttcatccacctgctggacgacgacgagagcgagggcgaggagttcaccgtgagagacggctacatccactacggccagaccgtgaagctggtgtgcagcgtgaccggcatggccctgcccagactgatcatcagaaaggtggacaagcagaccgccctgctggacgccgacgaccccgtgagccagctgcacaagtgcgccttctacctgaaggacaccgagagaatgtacctgtgcctgagccaggagagaatcatccagttccaggccaccccctgccccaaggagcccaacaaggagatgatcaacgacggcgccagctggaccatcatcagcaccgacaaggccgagtacaccttctacgagggcatgggccccgtgctggcccccgtgacccccgtgcccgtggtggagagcctgcagctgaacggcggcggcgacgtggccatgctggagctgaccggccagaacttcacccccaacctgagagtgtggttcggcgacgtggaggccgagaccatgtacagatgcggcgagagcatgctgtgcgtggtgcccgacatcagcgccttcagagagggctggagatgggtgagacagcccgtgcaggtgcccgtgaccctggtgagaaacgacggcatcatctacagcaccagcctgaccttcacctacacccccgagcccggccccagaccccactgcagcgccgccggcgccatcctgagagccaacagcagccaggtgccccccaacgagagcaacaccaacagcgagggcagctacaccaacgccagcaccaacagcaccagcgtgaccagcagcaccgccaccgtggtgagctag

SEQ ID NO: 96570 - DNA, 1458 bp, synthetic construct
  misc_feature 1..1458: note = Description of Artificial Sequence: Synthetic coding sequence
  source 1..1458: mol_type = other DNA
atgggcggctgcagaaagttcggcgagagacccccccccaagagactgaccagagaggccatgagaaactacctgaaggagagaggcgaccagaccgtgctgatcctgcacgccaaggtggcccagaagagctacggcaacgagaagagattcttctgcccccccccctgcgtgtacctgatgggcagcggctggaagaagaagaaggagcagatggagagagacggctgcagcgagcaggagagccagccctgcgccttcatcggcatcggcaacagcgaccaggagatgcagcagctgaacctggagggcaagaactactgcaccgccaagaccctgtacatcagcgacagcgacaagagaaagcacttcatgctgagcgtgaagatgttctacggcaacagcgacgacatcggcgtgttcctgagcaagagaatcaaggtgatcagcaagcccagcaagaagaagcagagcctgaagaacgccgacctgtgcatcgccagcggcaccaaggtggccctgttcaacagactgagaagccagaccgtgagcaccagatacctgcacgtggagggcggcaacttccacgccagcagccagcagtggggcgccttcttcatccacctgctggacgacgacgagagcgagggcgaggagttcaccgtgagagacggctacatccactacggccagaccgtgaagctggtgtgcagcgtgaccggcatggccctgcccagactgatcatcagaaaggtggacaagcagaccgccctgctggacgccgacgaccccgtgagccagctgcacaagtgcgccttctacctgaaggacaccgagagaatgtacctgtgcctgagccaggagagaatcatccagttccaggccaccccctgccccaaggagcccaacaaggagatgatcaacgacggcgccagctggaccatcatcagcaccgacaaggccgagtacaccttctacgagggcatgggccccgtgctggcccccgtgacccccgtgcccgtggtggagagcctgcagctgaacggcggcggcgacgtggccatgctggagctgaccggccagaacttcacccccaacctgagagtgtggttcggcgacgtggaggccgagaccatgtacagatgcggcgagagcatgctgtgcgtggtgcccgacatcagcgccttcagagagggctggagatgggtgagacagcccgtgcaggtgcccgtgaccctggtgagaaacgacggcatcatctacagcaccagcctgaccttcacctacacccccgagcccggccccagaccccactgcagcgccgccggcgccatcctgagagccaacagcagccaggtgccccccaacgagagcaacaccaacagcgagggcagctacaccaacgccagcaccaacagcaccagcgtgaccagcagcaccgccaccgtggtgagctag

SEQ ID NO: 96571 - DNA, 1464 bp, synthetic construct
  misc_feature 1..1464: note = Description of Artificial Sequence: Synthetic coding sequence
  source 1..1464: mol_type = other DNA
atggcccccgtggtgaccggcaagttcggcgagagacccccccccaagagactgaccagagaggccatgagaaactacctgaaggagagaggcgaccagaccgtgctgatcctgcacgccaaggtggcccagaagagctacggcaacgagaagagattcttctgcccccccccctgcgtgtacctgatgggcagcggctggaagaagaagaaggagcagatggagagagacggctgcagcgagcaggagagccagccctgcgccttcatcggcatcggcaacagcgaccaggagatgcagcagctgaacctggagggcaagaactactgcaccgccaagaccctgtacatcagcgacagcgacaagagaaagcacttcatgctgagcgtgaagatgttctacggcaacagcgacgacatcggcgtgttcctgagcaagagaatcaaggtgatcagcaagcccagcaagaagaagcagagcctgaagaacgccgacctgtgcatcgccagcggcaccaaggtggccctgttcaacagactgagaagccagaccgtgagcaccagatacctgcacgtggagggcggcaacttccacgccagcagccagcagtggggcgccttcttcatccacctgctggacgacgacgagagcgagggcgaggagttcaccgtgagagacggctacatccactacggccagaccgtgaagctggtgtgcagcgtgaccggcatggccctgcccagactgatcatcagaaaggtggacaagcagaccgccctgctggacgccgacgaccccgtgagccagctgcacaagtgcgccttctacctgaaggacaccgagagaatgtacctgtgcctgagccaggagagaatcatccagttccaggccaccccctgccccaaggagcccaacaaggagatgatcaacgacggcgccagctggaccatcatcagcaccgacaaggccgagtacaccttctacgagggcatgggccccgtgctggcccccgtgacccccgtgcccgtggtggagagcctgcagctgaacggcggcggcgacgtggccatgctggagctgaccggccagaacttcacccccaacctgagagtgtggttcggcgacgtggaggccgagaccatgtacagatgcggcgagagcatgctgtgcgtggtgcccgacatcagcgccttcagagagggctggagatgggtgagacagcccgtgcaggtgcccgtgaccctggtgagaaacgacggcatcatctacagcaccagcctgaccttcacctacacccccgagcccggccccagaccccactgcagcgccgccggcgccatcctgagagccaacagcagccaggtgccccccaacgagagcaacaccaacagcgagggcagctacaccaacgccagcaccaacagcaccagcgtgaccagcagcaccgccaccgtggtgagctag

SEQ ID NO: 96572 - DNA, 1461 bp, synthetic construct; identical to SEQ ID NO: 96569
  misc_feature 1..1461: note = Description of Artificial Sequence: Synthetic coding sequence
  source 1..1461: mol_type = other DNA

SEQ ID NO: 96573 - DNA, 1503 bp, synthetic construct; identical to SEQ ID NO: 96568
  misc_feature 1..1503: note = Description of Artificial Sequence: Synthetic coding sequence
  source 1..1503: mol_type = other DNA

SEQ ID NO: 96574 - DNA, 432 bp, synthetic construct
  misc_feature 1..432: note = Description of Artificial Sequence: Synthetic coding sequence
  source 1..432: mol_type = other DNA
atgagaaactacctgaaggagagaggcgaccagaccgtgctgatcctgcacgccaaggtggcccagaagagctacggcaacgagaagagattcttctgcccccccccctgcgtgtacctgatgggcagcggctggaagaagaagaaggagcagatggagagagacggctgcagcgagcaggagagccagccctgcgccttcatcggcatcggcaacagcgaccaggagatgcagcagctgaacctggagggcaagaactactgcaccgccaagaccctgtacatcagcgacagcgacaagagaaagcacttcatgctgagcgtgaagatgttctacggcaacagcgacgacatcggcgtgttcctgagcaagagaatcaaggtgatcagcaagcccagcaagaagaagcagagcctgaagaacgccgactag

SEQ ID NO: 96575 - DNA, 87 bp, synthetic construct
  misc_feature 1..87: note = Description of Artificial Sequence: Synthetic coding sequence
  source 1..87: mol_type = other DNA
atggcctggatcaagagaaagttcggcgagagacccccccccaagagactgaccagagaggccatgagaaactacctgaaggagtag

SEQ ID NO: 96576 - DNA, 294 bp, synthetic construct
  misc_feature 1..294: note = Description of Artificial Sequence: Synthetic coding sequence
  source 1..294: mol_type = other DNA
atggcctggatcaagagaaagttcggcgagagacccccccccaagagactgaccagagaggccatgagaaactacctgaaggagagaggcgaccagaccgtgctgatcctgcacgccaaggtggcccagaagagctacggcaacgagaagagattcttctgcccccccccctgcgtgtacctgatgggcagcggctggaagaagaagaaggagcagatggagagagacggctgcagcgagcaggagagccagccctgcgccttcatcggcatcggcaacagcgaccaggagtag

SEQ ID NO: 96577 - DNA, 1398 bp, synthetic construct
  misc_feature 1..1398: note = Description of Artificial Sequence: Synthetic coding sequence
  source 1..1398: mol_type = other DNA
atgagaaactacctgaaggagagaggcgaccagaccgtgctgatcctgcacgccaaggtggcccagaagagctacggcaacgagaagagattcttctgcccccccccctgcgtgtacctgatgggcagcggctggaagaagaagaaggagcagatggagagagacggctgcagcgagcaggagagccagccctgcgccttcatcggcatcggcaacagcgaccaggagatgcagcagctgaacctggagggcaagaactactgcaccgccaagaccctgtacatcagcgacagcgacaagagaaagcacttcatgctgagcgtgaagatgttctacggcaacagcgacgacatcggcgtgttcctgagcaagagaatcaaggtgatcagcaagcccagcaagaagaagcagagcctgaagaacgccgacctgtgcatcgccagcggcaccaaggtggccctgttcaacagactgagaagccagaccgtgagcaccagatacctgcacgtggagggcggcaacttccacgccagcagccagcagtggggcgccttcttcatccacctgctggacgacgacgagagcgagggcgaggagttcaccgtgagagacggctacatccactacggccagaccgtgaagctggtgtgcagcgtgaccggcatggccctgcccagactgatcatcagaaaggtggacaagcagaccgccctgctggacgccgacgaccccgtgagccagctgcacaagtgcgccttctacctgaaggacaccgagagaatgtacctgtgcctgagccaggagagaatcatccagttccaggccaccccctgccccaaggagcccaacaaggagatgatcaacgacggcgccagctggaccatcatcagcaccgacaaggccgagtacaccttctacgagggcatgggccccgtgctggcccccgtgacccccgtgcccgtggtggagagcctgcagctgaacggcggcggcgacgtggccatgctggagctgaccggccagaacttcacccccaacctgagagtgtggttcggcgacgtggaggccgagaccatgtacagatgcggcgagagcatgctgtgcgtggtgcccgacatcagcgccttcagagagggctggagatgggtgagacagcccgtgcaggtgcccgtgaccctggtgagaaacgacggcatcatctacagcaccagcctgaccttcacctacacccccgagcccggccccagaccccactgcagcgccgccggcgccatcctgagagccaacagcagccaggtgccccccaacgagagcaacaccaacagcgagggcagctacaccaacgccagcaccaacagcaccagcgtgaccagcagcaccgccaccgtggtgagctag

SEQ ID NO: 96578 - DNA, 474 bp, synthetic construct
  misc_feature 1..474: note = Description of Artificial Sequence: Synthetic coding sequence
  source 1..474: mol_type = other DNA
atgagaaactacctgaaggagagaggcgaccagaccgtgctgatcctgcacgccaaggtggcccagaagagctacggcaacgagaagagattcttctgcccccccccctgcgtgtacctgatgggcagcggctggaagaagaagaaggagcagatggagagagacggctgcagcgagcaggagagccagccctgcgccttcatcggcatcggcaacagcgaccaggagatgcagcagctgaacctggagggcaagaactactgcaccgccaagaccctgtacatcagcgacagcgacaagagaaagcacttcatgctgagcgtgaagatgttctacggcaacagcgacgacatcggcgtgttcctgagcaagagaatcaaggtgatcagcaagcccagcaagaagaagcagagcctgaagaacgccgacctgtgcatcgccagcggcaccaaggtggccctgttcaacagatag

SEQ ID NO: 96579 - DNA, 150 bp, synthetic construct
  misc_feature 1..150: note = Description of Artificial Sequence: Synthetic coding sequence
  source 1..150: mol_type = other DNA
atggcctggatcaagagaaagttcggcgagagacccccccccaagagactgaccagagaggccatgagaaactacctgaaggagagaggcgaccagaccgtgctgatcctgcacgccaaggtggcccagaagagctacggcaacgagtag

SEQ ID NO: 96580 - DNA, 324 bp, synthetic construct
  misc_feature 1..324: note = Description of Artificial Sequence: Synthetic coding sequence
  source 1..324: mol_type = other DNA
atggcctggatcaagagaaagttcggcgagagacccccccccaagagactgaccagagaggccatgagaaactacctgaaggagagaggcgaccagaccgtgctgatcctgcacgccaaggtggcccagaagagctacggcaacgagaagagattcttctgcccccccccctgcgtgtacctgatgggcagcggctggaagaagaagaaggagcagatggagagagacggctgcagcgagcaggagagccagccctgcgccttcatcggcatcggcaacagcgaccaggagatgcagcagctgaacctggagggcaagaactag

SEQ ID NO: 96581 - DNA, 285 bp, synthetic construct
  misc_feature 1..285: note = Description of Artificial Sequence: Synthetic coding sequence
  source 1..285: mol_type = other DNA
atggcctggatcaagagaaagttcggcgagagacccccccccaagagactgaccagagaggccatgagaaactacctgaaggagagaggcgaccagaccgtgctgatcctgcacgccaaggtggcccagaagagctacggcaacgagaagagattcttctgcccccccccctgcgtgtacctgatgggcagcggctggaagaagaagaaggagcagatggagagagacggctgcagcgagcaggagagccagccctgcgccttcatcggcatcggcaacagctag

SEQ ID NO: 96582 - DNA, 537 bp, synthetic construct
  misc_feature 1..537: note = Description of Artificial Sequence: Synthetic coding sequence
  source 1..537: mol_type = other DNA
atggaccacaccgagggcagccccgccgaggagccccccgcccacgcccccagccccggcaagttcggcgagagacccccccccaagagactgaccagagaggccatgagaaactacctgaaggagagaggcgaccagaccgtgctgatcctgcacgccaaggtggcccagaagagctacggcaacgagaagagattcttctgcccccccccctgcgtgtacctgatgggcagcggctggaagaagaagaaggagcagatggagagagacggctgcagcgagcaggagagccagccctgcgccttcatcggcatcggcaacagcgaccaggagatgcagcagctgaacctggagggcaagaactactgcaccgccaagaccctgtacatcagcgacagcgacaagagaaagcacttcatgctgagcgtgaagatgttctacggcaacagcgacgacatcggcgtgttcctgagcaagagaatcaaggtgatcagcaagcccagcaagaagaagcagagcctgaagaacgccgactag

SEQ ID NO: 96583 - DNA, 333 bp, synthetic construct
  misc_feature 1..333: note = Description of Artificial Sequence: Synthetic coding sequence
  source 1..333: mol_type = other DNA
atggcctggatcaagagaaagttcggcgagagacccccccccaagagactgaccagagaggccatgagaaactacctgaaggagagaggcgaccagaccgtgctgatcctgcacgccaaggtggcccagaagagctacggcaacgagaagagattcttctgcccccccccctgcgtgtacctgatgggcagcggctggaagaagaagaaggagcagatggagagagacggctgcagcgagcaggagagccagccctgcgccttcatcggcatcggcaacagcgaccaggagatgcagcagctgaacctggagggcaagaactactgcacctag

SEQ ID NO: 96584 - DNA, 342 bp, synthetic construct
  misc_feature 1..342: note = Description of Artificial Sequence: Synthetic coding sequence
  source 1..342: mol_type = other DNA
atggcctggatcaagagaaagttcggcgagagacccccccccaagagactgaccagagaggccatgagaaactacctgaaggagagaggcgaccagaccgtgctgatcctgcacgccaaggtggcccagaagagctacggcaacgagaagagattcttctgcccccccccctgcgtgtacctgatgggcagcggctggaagaagaagaaggagcagatggagagagacggctgcagcgagcaggagagccagccctgcgccttcatcggcatcggcaacagcgaccaggagatgcagcagctgaacctggagggcaagaactactgcaccgccaagacctag

SEQ ID NO: 96585 - DNA, 147 bp, synthetic construct
  misc_feature 1..147: note = Description of Artificial Sequence: Synthetic coding sequence
  source 1..147: mol_type = other DNA
atggcctggatcaagagaaagttcggcgagagacccccccccaagagactgaccagagaggccatgagaaactacctgaaggagagaggcgaccagaccgtgctgatcctgcacgccaaggtggcccagaagagctacggcaactag

SEQ ID NO: 96586 - DNA, 570 bp, synthetic construct
  misc_feature 1..570: note = Description of Artificial Sequence: Synthetic coding sequence
  source 1..570: mol_type = other DNA
atgagaaactacctgaaggagagaggcgaccagaccgtgctgatcctgcacgccaaggtggcccagaagagctacggcaacgagaagagattcttctgcccccccccctgcgtgtacctgatgggcagcggctggaagaagaagaaggagcagatggagagagacggctgcagcgagcaggagagccagccctgcgccttcatcggcatcggcaacagcgaccaggagatgcagcagctgaacctggagggcaagaactactgcaccgccaagaccctgtacatcagcgacagcgacaagagaaagcacttcatgctgagcgtgaagatgttctacggcaacagcgacgacatcggcgtgttcctgagcaagagaatcaaggtgatcagcaagcccagcaagaagaagcagagcctgaagaacgccgacctgtgcatcgccagcggcaccaaggtggccctgttcaacagactgagaagccagaccgtgagcaccagatacctgcacgtggagggcggcaacttccacgccagcagccagcagtggggcgccttcttcatccacctgtag

SEQ ID NO: 96587 - DNA, 600 bp, synthetic construct
  misc_feature 1..600: note = Description of Artificial Sequence: Synthetic coding sequence
  source 1..600: mol_type = other DNA
atggccagcgtgagcgccctgaccgaggagctggacagcatcaccagcgagctgcacgccgtggagatccagatccaggagctgaccgagagacagcaggagctgatccagaagaagaaggtgctgaccaagaagatcaagcagtgcctggaggacagcgacgccggcgccagcaacgagtacgacagcagccccgccgcctggaacaaggaggacttcccctggagcggcaaggtgaaggacatcctgcagaacgtgttcaagctggagaagttcagacccctgcagctggagaccatcaacgtgaccatggccggcaaggaggtgttcctggtgatgcccaccggcggcggcaagagcctgtgctaccagctgcccgccctgtgcagcgacggcttcaccctggtgatctgccccctgatcagcctgatggaggaccagctgatggtgctgaagcagctgggcatcagcgccaccatgctgaacgccagcagcagcaaggagcacgtgaagtgggtgcacgccgagatggtgaacaagaacagcgagctgaagctgatctacgtgacccccgagaagatcgccaagagcaagatgtag

SEQ ID NO: 96588 - DNA, 636 bp, synthetic construct
  misc_feature 1..636: note = Description of Artificial Sequence: Synthetic coding sequence
  source 1..636: mol_type = other DNA
atggccagcgtgagcgccctgaccgaggagctggacagcatcaccagcgagctgcacgccgtggagatccagatccaggagctgaccgagagacagcaggagctgatccagaagaagaaggtgctgaccaagaagatcaagcagtgcctggaggacagcgacgccggcgccagcaacgagtacgacagcagccccgccgcctggaacaaggaggacttcccctggagcggcaaggtgaaggacatcctgcagaacgtgttcaagctggagaagttcagacccctgcagctggagaccatcaacgtgaccatggccggcaaggaggtgttcctggtgatgcccaccggcggcggcaagagcctgtgctaccagctgcccgccctgtgcagcgacggcttcaccctggtgatctgccccctgatcagcctgatggaggaccagctgatggtgctgaagcagctgggcatcagcgccaccatgctgaacgccagcagcagcaaggagcacgtgaagtgggtgcacgccgagatggtgaacaagaacagcgagctgaagctgatctacgtgacccccgagaagatcgccaagagcaagatgttcatgagcagactggagaaggcctacgaggccagatag

SEQ ID NO: 96589 - DNA, 1950 bp, synthetic construct
  misc_feature 1..1950: note = Description of Artificial Sequence: Synthetic coding sequence
  source 1..1950: mol_type = other DNA
atggccagcgtgagcgccctgaccgaggagctggacagcatcaccagcgagctgcacgccgtggagatccagatccaggagctgaccgagagacagcaggagctgatccagaagaagaaggtgctgaccaagaagatcaagcagtgcctggaggacagcgacgccggcgccagcaacgagtacgacagcagccccgccgcctggaacaaggaggacttcccctggagcggcaaggtgaaggacatcctgcagaacgtgttcaagctggagaagttcagacccctgcagctggagaccatcaacgtgaccatggccggcaaggaggtgttcctggtgatgcccaccggcggcggcaagagcctgtgctaccagctgcccgccctgtgcagcgacggcttcaccctggtgatctgccccctgatcagcctgatggaggaccagctgatggtgctgaagcagctgggcatcagcgccaccatgctgaacgccagcagcagcaaggagcacgtgaagtgggtgcacgccgagatggtgaacaagaacagcgagctgaagctgatctacgtgacccccgagaagatcgccaagagcaagatgttcatgagcagactggagaaggcctacgaggccagaagattcaccagaatcgccgtggacgaggtgcactgctgcagccagtggggccacgacttcagacccgactacaaggccctgggcatcctgaagagacagttccccaacgccagcctgatcggcctgaccgccaccgccaccaaccacgtgctgaccgacgcccagaagatcctgtgcatcgagaagtgcttcaccttcaccgccagcttcaacagacccaacctgtactacgaggtgagacagaagcccagcaacaccgaggacttcatcgaggacatcgtgaagctgatcaacggcagatacaagggccagagcggcatcatctactgcttcagccagaaggacagcgagcaggtgaccgtgagcctgcagaacctgggcatccacgccggcgcctaccacgccaacctggagcccgaggacaagaccaccgtgcacagaaagtggagcgccaacgagatccaggtggtggtggccaccgtggccttcggcatgggcatcgacaagcccgacgtgagattcgtgatccaccacagcatgagcaagagcatggagaactactaccaggagagcggcagagccggcagagacgacatgaaggccgactgcatcctgtactacggcttcggcgacatcttcagaatcagcagcatggtggtgatggagaacgtgggccagcagaagctgtacgagatggtgagctactgccagaacatcagcaagtgcagaagagtgctgatggcccagcacttcgacgaggtgtggaacagcgaggcctgcaacaagatgtgcgacaactgctgcaaggacagcgccttcgagagaaagaacatcaccgagtactgcagagacctgatcaagatcctgaagcaggccgaggagctgaacgagaagctgacccccctgaagctgatcgacagctggatgggcaagggcgccgccaagctgagagtggccggcgtggtggcccccaccctgcccagagaggacctggagaagatcatcgcccacttcctgatccagcagtacctgaaggaggactacagcttcaccgcctacgccaccatcagctacctgaagatcggccccaaggccaacctgctgaacaacgaggcccacgccatcaccatgcaggtgaccaagagcacccagaacagcttcagagccgagagcagccagacctgccacagcgagcagggcgacaagaagatggaggagaagaacagcggcaacttccagaagaaggccgccaacatgctgcagcagagcggcagcaagaacaccggcgccaagaagagaaagatcgacgacgcctag

SEQ ID NO: 96590 - DNA, 1950 bp, synthetic construct; identical to SEQ ID NO: 96589
  misc_feature 1..1950: note = Description of Artificial Sequence: Synthetic coding sequence
  source 1..1950: mol_type = other DNA

SEQ ID NO: 96591 - DNA, 321 bp, synthetic construct
  misc_feature 1..321: note = Description of Artificial Sequence: Synthetic coding sequence
  source 1..321: mol_type = other DNA
atggccagcgtgagcgccctgaccgaggagctggacagcatcaccagcgagctgcacgccgtggagatccagatccaggagctgaccgagagacagcaggagctgatccagaagaagaaggtgctgaccaagaagatcaagcagtgcctggaggacagcgacgccggcgccagcaacgagtacgacagcagccccgccgcctggaacaaggaggacttcccctggagcggcaaggtgaaggacatcctgcagaacgtgttcaagctggagaagttcagacccctgcagctggagaccatcaacgtgaccatggccggctag

SEQ ID NO: 96592 - DNA, 294 bp, synthetic construct
  misc_feature 1..294: note = Description of Artificial Sequence: Synthetic coding sequence
  source 1..294: mol_type = other DNA
atggccagcgtgagcgccctgaccgaggagctggacagcatcaccagcgagctgcacgccgtggagatccagatccaggagctgaccgagagacagcaggagctgatccagaagaagaaggtgctgaccaagaagatcaagcagtgcctggaggacagcgacgccggcgccagcaacgagtacgacagcagccccgccgcctggaacaaggaggacttcccctggagcggcaaggtgaaggacatcctgcagaacgtgttcaagctggagaagttcagacccctgcagctgtag

SEQ ID NO: 96593 - DNA, 219 bp, synthetic construct
  misc_feature 1..219: note = Description of Artificial Sequence: Synthetic coding sequence
  source 1..219: mol_type = other DNA
atggccagcgtgagcgccctgaccgaggagctggacagcatcaccagcgagctgcacgccgtggagatccagatccaggagctgaccgagagacagcaggagctgatccagaagaagaaggtgctgaccaagaagatcaagcagtgcctggaggacagcgacgccggcgccagcaacgagtacgacagcagccccgccgcctggaacaaggaggactag

SEQ ID NO: 96594 - DNA, 396 bp, synthetic construct
  misc_feature 1..396: note = Description of Artificial Sequence: Synthetic coding sequence
  source 1..396: mol_type = other DNA
atggccagcgtgagcgccctgaccgaggagctggacagcatcaccagcgagctgcacgccgtggagatccagatccaggagctgaccgagagacagcaggagctgatccagaagaagaaggtgctgaccaagaagatcaagcagtgcctggaggacagcgacgccggcgccagcaacgagtacgacagcagccccgccgcctggaacaaggaggacttcccctggagcggcaaggtgaaggacatcctgcagaacgtgttcaagctggagaagttcagacccctgcagctggagaccatcaacgtgaccatggccggcaaggaggtgttcctggtgatgcccaccggcggcggcaagagcctgtgctaccagctgcccgccctgtgcagcgactag

SEQ ID NO: 96595 - DNA, 2976 bp, synthetic construct
  misc_feature 1..2976: note = Description of Artificial Sequence: Synthetic coding sequence
  source 1..2976: mol_type = other DNA
atgagcagccaccacaccaccttccccttcgaccccgagagaagagtgagaagcaccctgaagaaggtgttcggcttcgacagcttcaagacccccctgcaggagagcgccaccatggccgtggtgaagggcaacaaggacgtgttcgtgtgcatgcccaccggcgccggcaagagcctgtgctaccagctgcccgccctgctggccaagggcatcaccatcgtggtgagccccctgatcgccctgatccaggaccaggtggaccacctgctgaccctgaaggtgagagtgagcagcctgaacagcaagctgagcgcccaggagagaaaggagctgctggccgacctggagagagagaagccccagaccaagatcctgtacatcacccccgagatggccgccagcagcagcttccagcccaccctgaacagcctggtgagcagacacctgctgagctacctggtggtggacgaggcccactgcgtgagccagtggggccacgacttcagacccgactacctgagactgggcgccctgagaagcagactgggccacgccccctgcgtggccctgaccgccaccgccaccccccaggtgcaggaggacgtgttcgccgccctgcacctgaagaagcccgtggccatcttcaagaccccctgcttcagagccaacctgttctacgacgtgcagttcaaggagctgatcagcgacccctacggcaacctgaaggacttctgcctgaaggccctgggccaggaggccgacaagggcctgagcggctgcggcatcgtgtactgcagaaccagagaggcctgcgagcagctggccatcgagctgagctgcagaggcgtgaacgccaaggcctaccacgccggcctgaaggccagcgagagaaccctggtgcagaacgactggatggaggagaaggtgcccgtgatcgtggccaccatcagcttcggcatgggcgtggacaaggccaacgtgagattcgtggcccactggaacatcgccaagagcatggccggctactaccaggagagcggcagagccggcagagacggcaagcccagctggtgcagactgtactacagcagaaacgacagagaccaggtgagcttcctgatcagaaaggaggtggccaagctgcaggagaagagaggcaacaaggccagcgacaaggccaccatcatggccttcgacgccctggtgaccttctgcgaggagctgggctgcagacacgccgccatcgccaagtacttcggcgacgccctgcccgcctgcgccaagggctgcgaccactgccagaaccccaccgccgtgagaagaagactggaggccctggagagaagcagcagctggagcaagacctgcatcggccccagccagggcaacggcttcgaccccgagctgtacgagggcggcagaaagggctacggcgacttcagcagatacgacgagggcagcggcggcagcggcgacgagggcagagacgaggcccacaagagagagtggaacctgttctaccagaagcagatgcagctgagaaagggcaaggaccccaagatcgaggagttcgtgccccccgacgagaactgccccctgaaggaggccagcagcagaagaatccccagactgaccgtgaaggccagagagcactgcctgagactgctggaggaggccctgagcagcaacagacagagcaccagaaccgccgacgaggccgacctgagagccaaggccgtggagctggagcacgagaccttcagaaacgccaaggtggccaacctgtacaaggccagcgtgctgaagaaggtggccgacatccacagagccagcaaggacggccagccctacgacatgggcggcagcgccaagagctgcagcgcccaggccgagccccccgagcccaacgagtacgacatcccccccgccagccacgtgtacagcctgaagcccaagagagtgggcgccggcttccccaagggcagctgccccttccagaccgccaccgagctgatggagaccaccagaatcagagagcaggccccccagcccgagagaggcggcgagcacgagccccccagcagaccctgcggcctgctggacgaggacggcagcgagcccctgcccggccccagaggcgaggtgcccggcggcagcgcccactacggcggccccagccccgagaagaaggccaagagcagcagcggcggcagcagcctggccaagggcagagccagcaagaagcagcagctgctggccaccgccgcccacaaggacagccagagcatcgccagattcttctgcagaagagtggagagccccgccctgctggccagcgcccccgaggccgagggcgcctgccccagctgcgagggcgtgcagggcccccccatggcccccgagaagtacaccggcgaggaggacggcgccggcggccacagccccgcccccccccagaccgaggagtgcctgagagagagacccagcacctgcccccccagagaccagggcacccccgaggtgcagcccacccccgccaaggacacctggaagggcaagagacccagaagccagcaggagaaccccgagagccagccccagaagagacccagacccagcgccaagcccagcgtggtggccgaggtgaagggcagcgtgagcgccagcgagcagggcaccctgaaccccaccgcccaggaccccttccagctgagcgcccccggcgtgagcctgaaggaggccgccaacgtggtggtgaagtgcctgacccccttctacaaggagggcaagttcgccagcaaggagctgttcaagggcttcgccagacacctgagccacctgctgacccagaagaccagccccggcagaagcgtgaaggaggaggcccagaacctgatcagacacttcttccacggcagagccagatgcgagagcgaggccgactggcacggcctgtgcggcccccagagatag

SEQ ID NO: 96596 - DNA, 1308 bp, synthetic construct
  misc_feature 1..1308: note = Description of Artificial Sequence: Synthetic coding sequence
  source 1..1308: mol_type = other DNA
atgagcagccaccacaccaccttccccttcgaccccgagagaagagtgagaagcaccctgaagaaggtgttcggcttcgacagcttcaagacccccctgcaggagagcgccaccatggccgtggtgaagggcaacaaggacgtgttcgtgtgcatgcccaccggcgccggcaagagcctgtgctaccagctgcccgccctgctggccaagggcatcaccatcgtggtgagccccctgatcgccctgatccaggaccaggtggaccacctgctgaccctgaaggtgagagtgagcagcctgaacagcaagctgagcgcccaggagagaaaggagctgctggccgacctggagagagagaagccccagaccaagatcctgtacatcacccccgagatggccgccagcagcagcttccagcccaccctgaacagcctggtgagcagacacctgctgagctacctggtggtggacgaggcccactgcgtgagccagtggggccacgacttcagacccgactacctgagactgggcgccctgagaagcagactgggccacgccccctgcgtggccctgaccgccaccgccaccccccaggtgcaggaggacgtgttcgccgccctgcacctgaagaagcccgtggccatcttcaagaccccctgcttcagagccaacctgttctacgacgtgcagttcaaggagctgatcagcgacccctacggcaacctgaaggacttctgcctgaaggccctgggccaggaggccgacaagggcctgagcggctgcggcatcgtgtactgcagaaccagagaggcctgcgagcagctggccatcgagctgagctgcagaggcgtgaacgccaaggcctaccacgccggcctgaaggccagcgagagaaccctggtgcagaacgactggatggaggagaaggtgcccgtgatcgtggccaccatcagcttcggcatgggcgtggacaaggccaacgtgagattcgtggcccactggaacatcgccaagagcatggccggctactaccaggagagcggcagagccggcagagacggcaagcccagctggtgcagactgtactacagcagaaacgacagagaccaggtgagcttcctgatcagaaaggaggtggccaagctgcaggagaagagaggcaacaaggccagcgacaaggccaccatcatggccttcgacgccctggtgaccttctgcgaggagctgggcagatggggcagaggccacggcaagagcctgagagccgcctggtgcagccaggtggtgagcagacacgccgagctgtag

SEQ ID NO: 96597 - DNA, 1233 bp, synthetic construct
  misc_feature 1..1233: note = Description of Artificial Sequence: Synthetic coding sequence
  source 1..1233: mol_type = other DNA
atgagcagccaccacaccaccttccccttcgaccccgagagaagagtgagaagcaccctgaagaaggtgttcggcttcgacagcttcaagacccccctgcaggagagcgccaccatggccgtggtgaagggcaacaaggacgtgttcgtgtgcatgcccaccggcgccggcaagagcctgtgctaccagctgcccgccctgctggccaagggcatcaccatcgtggtgagccccctgatcgccctgatccaggaccaggtggaccacctgctgaccctgaaggtgagagtgagcagcctgaacagcaagctgagcgcccaggagagaaaggagctgctggccgacctggagagagagaagccccagaccaagatcctgtacatcacccccgagatggccgccagcagcagcttccagcccaccctgaacagcctggtgagcagacacctgctgagctacctggtggtggacgaggcccactgcgtgagccagtggggccacgacttcagacccgactacctgagactgggcgccctgagaagcagactgggccacgccccctgcgtggccctgaccgccaccgccaccccccaggtgcaggaggacgtgttcgccgccctgcacctgaagaagcccgtggccatcttcaagaccccctgcttcagagccaacctgttctacgacgtgcagttcaaggagctgatcagcgacccctacggcaacctgaaggacttctgcctgaaggccctgggccaggaggccgacaagggcctgagcggctgcggcatcgtgtactgcagaaccagagaggcctgcgagcagctggccatcgagctgagctgcagaggcgtgaacgccaaggcctaccacgccggcctgaaggccagcgagagaaccctggtgcagaacgactggatggaggagaaggtgcccgtgatcgtggccaccatcagcttcggcatgggcgtggacaaggccaacgtgagattcgtggcccactggaacatcgccaagagcatggccggctactaccaggagagcggcagagccggcagagacggcaagcccagctggtgcagactgtactacagcagaaacgacagagaccaggtgagcttcctgatcagaaaggaggtggccaagctgcaggagaagagaggcaacaaggccagcgacaaggccaccatcatggccttcgacgccctggtgaccttctgcgaggagctgggctag

SEQ ID NO: 96598 - DNA, 3057 bp, synthetic construct
  misc_feature 1..3057: note = Description of Artificial Sequence: Synthetic coding sequence
  source 1..3057: mol_type = other DNA
atgagcagccaccacaccaccttccccttcgaccccgagagaagagtgagaagcaccctgaagaaggtgttcggcttcgacagcttcaagacccccctgcaggagagcgccaccatggccgtggtgaagggcaacaaggacgtgttcgtgtgcatgcccaccggcgccggcaagagcctgtgctaccagctgcccgccctgctggccaagggcatcaccatcgtggtgagccccctgatcgccctgatccaggaccaggtggaccacctgctgaccctgaaggtgagagtgagcagcctgaacagcaagctgagcgcccaggagagaaaggagctgctggccgacctggagagagagaagccccagaccaagatcctgtacatcacccccgagatggccgccagcagcagcttccagcccaccctgaacagcctggtgagcagacacctgctgagctacctggtggtggacgaggcccactgcgtgagccagtggggccacgacttcagacccgactacctgagactgggcgccctgagaagcagactgggccacgccccctgcgtggccctgaccgccaccgccaccccccaggtgcaggaggacgtgttcgccgccctgcacctgaagaagcccgtggccatcttcaagaccccctgcttcagagccaacctgttctacgacgtgcagttcaaggagctgatcagcgacccctacggcaacctgaaggacttctgcctgaaggccctgggccaggaggccgacaagggcctgagcggctgcggcatcgtgtactgcagaaccagagaggcctgcgagcagctggccatcgagctgagctgcagaggcgtgaacgccaaggcctaccacgccggcctgaaggccagcgagagaaccctggtgcagaacgactggatggaggagaaggtgcccgtgatcgtggccaccatcagcttcggcatgggcgtggacaaggccaacgtgagattcgtggcccactggaacatcgccaagagcatggccggctactaccaggagagcggcagagccggcagagacggcaagcccagctggtgcagactgtactacagcagaaacgacagagaccaggtgagcttcctgatcagaaaggaggtggccaagctgcaggagaagagaggcaacaaggccagcgacaaggccaccatcatggccttcgacgccctggtgaccttctgcgaggagctgggctgcagacacgccgccatcgccaagtacttcggcgacgccctgcccgcctgcgccaagggctgcgaccactgccagaaccccaccgccgtgagaagaagactggaggccctggagagaagcagcagctggagcaagacctgcatcggccccagccagggcaacggcttcgaccccgagctgtacgagggcggcagaaagggctacggcgacttcagcagatacgacgagggcagcggcggcagcggcgacgagggcagagacgaggcccacaagagagagtggaacctgttctaccagaagcagatgcagctgagaaagggcaaggaccccaagatcgaggagttcgtgccccccgacgagaactgccccctgaaggaggccagcagcagaagaatccccagactgaccgtgaaggccagagagcactgcctgagactgctggaggaggccctgagcagcaacagacagagcaccagaaccgccgacgaggccgacctgagagccaaggccgtggagctggagcacgagaccttcagaaacgccaaggtggccaacctgtacaaggccagcgtgctgaagaaggtggccgacatccacagagccagcaaggacggccagccctacgacatgggcggcagcgccaagagctgcagcgcccaggccgagccccccgagcccaacgagtacgacatcccccccgccagccacgtgtacagcctgaagcccaagagagtgggcgccggcttccccaagggcagctgccccttccagaccgccaccgagctgatggagaccaccagaatcagagagcaggccccccagcccgagagaggcggcgagcacgagccccccagcagaccctgcggcctgctggacgaggacggcagcgagcccctgcccggccccagaggcgaggtgcccggcggcagcgcccactacggcggccccagccccgagaagaaggccaagagcagcagcggcggcagcagcctggccaagggcagagccagcaagaagcagcagctgctggccaccgccgcccacaaggacagccagagcatcgccagattcttctgcagaagagtggagagccccgccctgctggccagcgcccccgaggccgagggcgcctgccccagctgcgagggcgtgcagggcccccccatggcccccgagaagtacaccggcgaggaggacggcgccggcggccacagccccgcccccccccagaccgaggagtgcctgagagagagacccagcacctgcccccccagagaccagggcacccccgaggtgcagcccacccccgccaaggacacctggaagggcaagagacccagaagccagcaggagaaccccgagagccagccccagaagagacccagacccagcgccaagcccagcgtggtggccgaggtgaagggcagcgtgagcgccagcgagcagggcaccctgaaccccaccgcccaggaccccttccagctgagcgcccccggcgtgagcctgaaggaggccgccaacgtggtggtgaagtgcctgacccccttctacaaggagggcaagttcgccagcaaggagctgttcaagggcttcgccagacacctgagccacctgctgacccagaagaccagccccggcagaagcgtgaaggaggaggcccagaacctgatcagacacttcttccacggcagagccagatgcgagagcggcccccacggctgggtgttctgggacacctgcagaggccagaaggtggagggcggcggcgccgccgccggcagaagaggcagaaagagcggccccagccccagcagcaagagcggctag

SEQ ID NO: 96599 - DNA, 1761 bp, synthetic construct
  misc_feature 1..1761: note = Description of Artificial Sequence: Synthetic coding sequence
  source 1..1761: mol_type = other DNA
atgttcctggtgagatgcagacacgccgccatcgccaagtacttcggcgacgccctgcccgcctgcgccaagggctgcgaccactgccagaaccccaccgccgtgagaagaagactggaggccctggagagaagcagcagctggagcaagacctgcatcggccccagccagggcaacggcttcgaccccgagctgtacgagggcggcagaaagggctacggcgacttcagcagatacgacgagggcagcggcggcagcggcgacgagggcagagacgaggcccacaagagagagtggaacctgttctaccagaagcagatgcagctgagaaagggcaaggaccccaagatcgaggagttcgtgccccccgacgagaactgccccctgaaggaggccagcagcagaagaatccccagactgaccgtgaaggccagagagcactgcctgagactgctggaggaggccctgagcagcaacagacagagcaccagaaccgccgacgaggccgacctgagagccaaggccgtggagctggagcacgagaccttcagaaacgccaaggtggccaacctgtacaaggccagcgtgctgaagaaggtggccgacatccacagagccagcaaggacggccagccctacgacatgggcggcagcgccaagagctgcagcgcccaggccgagccccccgagcccaacgagtacgacatcccccccgccagccacgtgtacagcctgaagcccaagagagtgggcgccggcttccccaagggcagctgccccttccagaccgccaccgagctgatggagaccaccagaatcagagagcaggccccccagcccgagagaggcggcgagcacgagccccccagcagaccctgcggcctgctggacgaggacggcagcgagcccctgcccggccccagaggcgaggtgcccggcggcagcgcccactacggcggccccagccccgagaagaaggccaagagcagcagcggcggcagcagcctggccaagggcagagccagcaagaagcagcagctgctggccaccgccgcccacaaggacagccagagcatcgccagattcttctgcagaagagtggagagccccgccctgctggccagcgcccccgaggccgagggcgcctgccccagctgcgagggcgtgcagggcccccccatggcccccgagaagtacaccggcgaggaggacggcgccggcggccacagccccgcccccccccagaccgaggagtgcctgagagagagacccagcacctgcccccccagagaccagggcacccccgaggtgcagcccacccccgccaaggacacctggaagggcaagagacccagaagccagcaggagaaccccgagagccagccccagaagagacccagacccagcgccaagcccagcgtggtggccgaggtgaagggcagcgtgagcgccagcgagcagggcaccctgaaccccaccgcccaggaccccttccagctgagcgcccccggcgtgagcctgaaggaggccgccaacgtggtggtgaagtgcctgacccccttctacaaggagggcaagttcgccagcaaggagctgttcaagggcttcgccagacacctgagccacctgctgacccagaagaccagccccggcagaagcgtgaaggaggaggcccagaacctgatcagacacttcttccacggcagagccagatgcgagagcgaggccgactggcacggcctgtgcggcccccagagatag

SEQ ID NO: 96600 - DNA, 1200 bp, synthetic construct; identical to SEQ ID NO: 86527
  misc_feature 1..1200: note = Description of Artificial Sequence: Synthetic coding sequence
  source 1..1200: mol_type = other DNA

SEQ ID NO: 96601 - DNA, 528 bp, synthetic construct
  misc_feature 1..528: note = Description of Artificial Sequence: Synthetic coding sequence
  source 1..528: mol_type = other DNA
atgctgccccccatggccctgcccagcgtgagctggatgctgctgagctgcctgatcctgctgtgccaggtgcagggcgaggagacccagaaggagctgcccagccccagaatcagctgccccaagggcagcaaggcctacggcagcccctgctacgccctgttcctgagccccaagagctggatggacgccgacctggcctgccagaagagacccagcggcaagctggtgagcgtgctgagcggcgccgagggcagcttcgtgagcagcctggtgagaagcatcagcaacagctacagctacatctggatcggcctgcacgaccccacccagggcagcgagcccgacggcgacggctgggagtggagcagcaccgacgtgatgaactacttcgcctgggagaagaaccccagcaccatcctgaaccccggccactgcggcagcctgagcagaagcaccggcttcctgaagtggaaggactacaactgcgacgccaagctgccctacgtgtgcaagttcaaggactag

SEQ ID NO: 96602 - DNA, 528 bp, synthetic construct; identical to SEQ ID NO: 96601
  misc_feature 1..528: note = Description of Artificial Sequence: Synthetic coding sequence
  source 1..528: mol_type = other DNA

SEQ ID NO: 96603 - DNA, 390 bp, synthetic construct
  misc_feature 1..390: note = Description of Artificial Sequence: Synthetic coding sequence
  source 1..390: mol_type = other DNA
atgctgccccccatggccctgcccagcgtgagctggatgctgctgagctgcctgatcctgctgtgccaggtgcagggcgaggagacccagaaggagctgcccagccccagaatcagctgccccaagggcagcaaggcctacggcagcccctgctacgccctgttcctgagccccaagagctggatggacgccgacggcagcgagcccgacggcgacggctgggagtggagcagcaccgacgtgatgaactacttcgcctgggagaagaaccccagcaccatcctgaaccccggccactgcggcagcctgagcagaagcaccggcttcctgaagtggaaggactacaactgcgacgccaagctgccctacgtgtgcaagttcaaggactag

SEQ ID NO: 96604 - DNA, 477 bp, synthetic construct
  misc_feature 1..477: note = Description of Artificial Sequence: Synthetic coding sequence
  source 1..477: mol_type = other DNA
atggccagcagaagcatgagactgctgctgctgctgagctgcctggccaagaccggcgtgctgggcgacatcatcatgagacccagctgcgcccccggctggttctaccacaagagcaactgctacggctacttcagaaagctgagaaactggagcgacgccgagctggagtgccagagctacggcaacggcgcccacctggccagcatcctgagcctgaaggaggccagcaccatcgccgagtacatcagcggctaccagagaagccagcccatctggatcggcctgcacgacccccagaagagacagcagtggcagtggatcgacggcgccatgtacctgtacagaagctggagcggcaagagcatgggcggcaacaagcactgcgccgagatgagcagcaacaacaacttcctgacctggagcagcaacgagtgcaacaagagacagcacttcctgtgcaagtacagaccctag

SEQ ID NO: 96605 - DNA, 477 bp, synthetic construct; identical to SEQ ID NO: 96604
  misc_feature 1..477: note = Description of Artificial Sequence: Synthetic coding sequence
  source 1..477: mol_type = other DNA

SEQ ID NO: 96606 - DNA, 405 bp, synthetic construct
  misc_feature 1..405: note = Description of Artificial Sequence: Synthetic coding sequence
  source 1..405: mol_type = other DNA
atggccagcagaagcatgagactgctgctgctgctgagctgcctggccaagaccggcgtgctgggcgacatcatcatgagacccagctgcgcccccggctggttctaccacaagagcaactgctacggctacttcagaaagctgagaaactggagcgacgccgaggtgagaaacctgctgcccgcctggcccggcctgagcagagccaaggaccagcccgagccccagatcagcttcgacagcggcagcagcgtgctgcccggccactacgaggagaagcccctgtggctggtgaagtggagagaggagggctgcgtgttcaacagcttcaacagcgtgagcatcgccgaggccggcgccgtgtgccagaccctggacggcctgcaggcccacaccgacacctag

SEQ ID NO: 96607 - DNA, 375 bp, synthetic construct
  misc_feature 1..375: note = Description of Artificial Sequence: Synthetic coding sequence
  source 1..375: mol_type = other DNA
atggccagcagaagcatgagactgctgctgctgctgagctgcctggccaagaccggcgtgctgggcgacatcatcatgagacccagctgcgcccccggctggttctaccacaagagcaactgctacggctacttcagaaagctgagaaactggagcgacgccgagctggagtgccagagctacggcaacggcgcccacctggccagcatcctgagcctgaaggaggccagcaccatcgccgagtacatcagcggctaccagagaagccagcccatctggatcggcctgcacgacccccagaagcagcccctgaacagctgcctgttcttcctgtggccctgggagggcctgcccgtggagagcctgctgggctag

SEQ ID NO: 96608 - DNA, 900 bp, synthetic construct
  misc_feature 1..900: note = Description of Artificial Sequence: Synthetic coding sequence
  source 1..900: mol_type = other DNA
atgagcagcatcaagatcgagtgcgtgctgcccgagaactgcagatgcggcgagagccccgtgtgggaggaggtgagcaacagcctgctgttcgtggacatccccgccaagaaggtgtgcagatgggacagcttcaccaagcaggtgcagagagtgaccatggacgcccccgtgagcagcgtggccctgagacagagcggcggctacgtggccaccatcggcaccaagttctgcgccctgaactggaaggagcagagcgccgtggtgctggccaccgtggacaacgacaagaagaacaacagattcaacgacggcaaggtggaccccgccggcagatacttcgccggcaccatggccgaggagaccgcccccgccgtgctggagagacaccagggcgccctgtacagcctgttccccgaccaccacgtgaagaagtacttcgaccaggtggacatcagcaacggcctggactggagcctggaccacaagatcttctactacatcgacagcctgagctacagcgtggacgccttcgactacgacctgcagaccggccagatcagcaacagaagaagcgtgtacaagctggagaaggaggagcagatccccgacggcatgtgcatcgacgccgagggcaagctgtgggtggcctgctacaacggcggcagagtgatcagactggaccccgtgaccggcaagagactgcagaccgtgaagctgcccgtggacaagaccaccagctgctgcttcggcggcaagaactacagcgagatgtacgtgacctgcgccagagacggcatggaccccgagggcctgctgagacagcccgaggccggcggcatcttcaagatcaccggcctgggcgtgaagggcatcgccccctacagctacgccggctag

SEQ ID NO: 96609 - DNA, 900 bp, synthetic construct; identical to SEQ ID NO: 96608
  misc_feature 1..900: note = Description of Artificial Sequence: Synthetic coding sequence
  source 1..900: mol_type = other DNA

SEQ ID NO: 96610 - DNA, 900 bp, synthetic construct; identical to SEQ ID NO: 96608
  misc_feature 1..900: note = Description of Artificial Sequence: Synthetic coding sequence
  source 1..900: mol_type = other DNA

SEQ ID NO: 96611 - DNA, 684 bp, synthetic construct
  misc_feature 1..684: note = Description of Artificial Sequence: Synthetic coding sequence
  source 1..684: mol_type = other DNA
atgagcagcatcaagatcgagtgcgtgctgcccgagaactgcagatgcggcgagagccccgtgtgggaggaggtgagcaacagcctgctgttcgtggacatccccgccaagaaggtgtgcagatgggacagcttcaccaagcaggtgcagagagtgaccatggacgcccccgtgagcagcgtggccctgagacagagcggcggctacgtggccaccatcggcaccaagttctgcgccctgaactggaaggagcagagcgccgtggtgctggccaccgtggacaacgacaagaagaacaacagattcaacgacggcaaggtggaccccgccggcagatacttcgccgccaacagaagaagcgtgtacaagctggagaaggaggagcagatccccgacggcatgtgcatcgacgccgagggcaagctgtgggtggcctgctacaacggcggcagagtgatcagactggaccccgtgaccggcaagagactgcagaccgtgaagctgcccgtggacaagaccaccagctgctgcttcggcggcaagaactacagcgagatgtacgtgacctgcgccagagacggcatggaccccgagggcctgctgagacagcccgaggccggcggcatcttcaagatcaccggcctgggcgtgaagggcatcgccccctacagctacgccggctag

SEQ ID NO: 96612 - DNA, 3876 bp, synthetic construct
  misc_feature 1..3876: note = Description of Artificial Sequence: Synthetic coding sequence
  source 1..3876: mol_type = other DNA
atgagcagcgccgtgggccccagaggccccagaccccccaccgtgcccccccccatgcaggagctgcccgacctgagccacctgaccgaggaggagagaaacatcatcatggccgtgatggacagacagaaggaggaggaggagaaggaggaggccatgctgaagtgcgtggtgagagacatggccaagcccgccgcctgcaagacccccagaaacgccgagaaccagccccaccagcccagccccagactgcaccagcagttcgagagctacaaggagcaggtgagaaagatcggcgaggaggccagaagataccagggcgagcacaaggacgacgcccccacctgcggcatctgccacaagaccaagttcgccgacggctgcggccacctgtgcagctactgcagaaccaagttctgcgccagatgcggcggcagagtgagcctgagaagcaacaacgaggacaagtacgtgatgtgggtgtgcaacctgtgcagaaagcagcaggagatcctgaccaagagcggcgcctggttcttcggcagcggcccccagcagaccagccaggacggcaccctgagcgacaccgccaccggcgccggcagcgaggtgcccagagagaagaaggccagactgcaggagagaagcagaagccagacccccctgagcaccgccgccgccagcagccaggacgccgccccccccagcgccccccccgacagaagcaagggcgccgagcccagccagcaggccctgggccccgagcagaagcaggccagcagcagaagcagaagcgagccccccagagagagaaagaagacccccggcctgagcgagcagaacggcaagggcgccctgaagagcgagagaaagagagtgcccaagaccagcgcccagcccgtggagggcgccgtggaggagagagagagaaaggagagaagagagagcagaagactggagaagggcagaagccaggactaccccgacacccccgagaagagagacgagggcaaggccgccgacgaggagaagcagagaaaggaggaggactaccagaccagatacagaagcgaccccaacctggccagataccccgtgaagcccccccccgaggagcagcagatgagaatgcacgccagagtgagcagagccagacacgagagaagacacagcgacgtggccctgcccagaaccgaggccggcgccgccctgcccgagggcaaggccggcaagagagcccccgccgccgccagagccagcccccccgacagccccagagcctacagcgccgagagaaccgccgagaccagagcccccggcgccaagcagctgaccaaccacagcccccccgcccccagacacggccccgtgcccgccgaggcccccgagctgaaggcccaggagcccctgagaaagcagagcagactggaccccagcagcgccgtgctgatgagaaaggccaagagagagaaggtggagaccatgctgagaaacgacagcctgagcagcgaccagagcgagagcgtgagacccagcccccccaagccccacagaagcaagagaggcggcaagaagagacagatgagcgtgagcagcagcgaggaggagggcgtgagcacccccgagtacaccagctgcgaggacgtggagctggagagcgagagcgtgagcgagaagggcgacctggactactactggctggaccccgccacctggcacagcagagagaccagccccatcagcagccaccccgtgacctggcagcccagcaaggagggcgacagactgatcggcagagtgatcctgaacaagagaaccaccatgcccaaggacagcggcgccctgctgggcctgaaggtggtgggcggcaagatgaccgacctgggcagactgggcgccttcatcaccaaggtgaagaagggcagcctggccgacgtggtgggccacctgagagccggcgacgaggtgctggagtggaacggcaagcccctgcccggcgccaccaacgaggaggtgtacaacatcatcctggagagcaagagcgagccccaggtggagatcatcgtgagcagacccatcggcgacatccccagaatccccgagagcagccacccccccctggagagcagcagcagcagcttcgagagccagaagatggagagacccagcatcagcgtgatcagccccaccagccccggcgccctgaaggacgccccccaggtgctgcccggccagctgagcgtgaagctgtggtacgacaaggtgggccaccagctgatcgtgaacgtgctgcaggccaccgacctgcccgccagagtggacggcagacccagaaacccctacgtgaagatgtacttcctgcccgacagaagcgacaagagcaagagaagaaccaagaccgtgaagaagatcctggagcccaagtggaaccagaccttcgtgtacagccacgtgcacagaagagacttcagagagagaatgctggagatcaccgtgtgggaccagcccagagtgcaggaggaggagagcgagttcctgggcgagatcctgatcgagctggagaccgccctgctggacgacgagccccactggtacaagctgcagacccacgacgagagcagcctgcccctgccccagcccagccccttcatgcccagaagacacatccacggcgagagcagcagcaagaagctgcagagaagccagagaatcagcgacagcgacatcagcgactacgaggtggacgacggcatcggcgtggtgccccccggctacagaagcagcgccagagagagcaagagcaccaccctgaccgtgcccgagcagcagagaaccacccaccacagaagcagaagcgtgagcccccacagaggcaacgaccagggcaagcccagaagcagactgcccaacgtgcccctgcagagaagcctggacgagatccaccccaccagaagaagcagaagccccaccagacaccacgacgccagcagaagccccgtggaccacagaaccagagacgtggacagccagtacctgagcgagcaggacagaatgcacagacagagaagccccacccagagcccccccgccgacaccagcttcagcagcagaagaggcagacagctgccccaggtgcccgtgagaagcggcagcatcgagcaggagagcggccacaagaagctgaagagcaccatccagagaagcaccgagaccggcatggccgccgagatgagaaagatggtgagacagcccagcagagagagcaccgacggcagcatcaacagctacagcagcgagggcaacctgatcttccccggcgtgagactgggcgccgacagccagttcagcgacttcctggacggcctgggccccgcccagctggtgggcagacagaccctggccacccccgccatgggcgacatccagatcggcatggaggacaagaagggccagctggaggtggaggtgatcagagccagaagcctgacccagaagcccggcagcaagagcacccccgccccctacgtgaaggtgtacctgctggagaacggcgcctgcatcgccaagaagaagaccagaatcgccagaaagaccctggaccccctgtaccagcagagcctggtgttcgacgagagcccccagggcaaggtgctgcaggtgatcgtgtggggcgactacggcagaatggaccacaagtgcttcatgggcgtggcccagatcctgctggaggagctggacctgagcagcatggtgatcggctggtacaagctgttcccccccagcagcctggtggaccccaccctgacccccctgaccagaagagccagccagagcagcctggagagcagcaccggccccccctgcatcagaagctag

SEQ ID NO: 96613 - DNA, 4428 bp, synthetic construct
  misc_feature 1..4428: note = Description of Artificial Sequence: Synthetic coding sequence
  source 1..4428: mol_type = other DNA
atgagcagcgccgtgggccccagaggccccagaccccccaccgtgcccccccccatgcaggagctgcccgacctgagccacctgaccgaggaggagagaaacatcatcatggccgtgatggacagacagaaggaggaggaggagaaggaggaggccatgctgaagtgcgtggtgagagacatggccaagcccgccgcctgcaagacccccagaaacgccgagaaccagccccaccagcccagccccagactgcaccagcagttcgagagctacaaggagcaggtgagaaagatcggcgaggaggccagaagataccagggcgagcacaaggacgacgcccccacctgcggcatctgccacaagaccaagttcgccgacggctgcggccacctgtgcagctactgcagaaccaagttctgcgccagatgcggcggcagagtgagcctgagaagcaacaacgaggacatctgcgtgatgtgggtgtgcaacctgtgcagaaagcagcaggagatcctgaccaagagcggcgcctggttcttcggcagcggcccccagcagaccagccaggacggcaccctgagcgacaccgccaccggcgccggcagcgaggtgcccagagagaagaaggccagactgcaggagagaagcagaagccagacccccctgagcaccgccgccgccagcagccaggacgccgccccccccagcgccccccccgacagaagcaagggcgccgagcccagccagcaggccctgggccccgagcagaagcaggccagcagcagaagcagaagcgagccccccagagagagaaagaagacccccggcctgagcgagcagaacggcaagggcgccctgaagagcgagagaaagagagtgcccaagaccagcgcccagcccgtggagggcgccgtggaggagagagagagaaaggagagaagagagagcagaagactggagaagggcagaagccaggactaccccgacacccccgagaagagagacgagggcaaggccgccgacgaggagaagcagagaaaggaggaggactaccagaccagatacagaagcgaccccaacctggccagataccccgtgaagcccccccccgaggagcagcagatgagaatgcacgccagagtgagcagagccagacacgagagaagacacagcgacgtggccctgcccagaaccgaggccggcgccgccctgcccgagggcaaggccggcaagagagcccccgccgccgccagagccagcccccccgacagccccagagcctacagcgccgagagaaccgccgagaccagagcccccggcgccaagcagctgaccaaccacagcccccccgcccccagacacggccccgtgcccgccgaggcccccgagctgaaggcccaggagcccctgagaaagcagagcagactggaccccagcagcgccgtgctgatgagaaaggccaagagagagaaggtggagaccatgctgagaaacgacagcctgagcagcgaccagagcgagagcgtgagacccagcccccccaagccccacagaagcaagagaggcggcaagaagagacagatgagcgtgagcagcagcgaggaggagggcgtgagcacccccgagtacaccagctgcgaggacgtggagctggagagcgagagcgtgagcgagaagggcgacctggactactactggctggaccccgccacctggcacagcagagagaccagccccatcagcagccaccccgtgacctggcagcccagcaaggagggcgacagactgatcggcagagtgatcctgaacaagagaaccaccatgcccaaggacagcggcgccctgctgggcctgaaggtggtgggcggcaagatgaccgacctgggcagactgggcgccttcatcaccaaggtgaagaagggcagcctggccgacgtggtgggccacctgagagccggcgacgaggtgctggagtggaacggcaagcccctgcccggcgccaccaacgaggaggtgtacaacatcatcctggagagcaagagcgagccccaggtggagatcatcgtgagcagacccatcggcgacatccccagaatccccgagagcagccacccccccctggagagcagcagcagcagcttcgagagccagaagatggagagacccagcatcagcgtgatcagccccaccagccccggcgccctgaaggacgccccccaggtgctgcccggccagctgagcgtgaagctgtggtacgacaaggtgggccaccagctgatcgtgaacgtgctgcaggccaccgacctgcccgccagagtggacggcagacccagaaacccctacgtgaagatgtacttcctgcccgacagaagcgacaagagcaagagaagaaccaagaccgtgaagaagatcctggagcccaagtggaaccagaccttcgtgtacagccacgtgcacagaagagacttcagagagagaatgctggagatcaccgtgtgggaccagcccagagtgcaggaggaggagagcgagttcctgggcgagatcctgatcgagctggagaccgccctgctggacgacgagccccactggtacaagctgcagacccacgacgagagcagcctgcccctgccccagcccagccccttcatgcccagaagacacatccacggcgagagcagcagcaagaagctgcagagaagccagagaatcagcgacagcgacatcagcgactacgaggtggacgacggcatcggcgtggtgccccccggctacagaagcagcgccagagagagcaagagcaccaccctgaccgtgcccgagcagcagagaaccacccaccacagaagcagaagcgtgagcccccacagaggcaacgaccagggcaagcccagaagcagactgcccaacgtgcccctgcagagaagcctggacgagatccaccccaccagaagaagcagaagccccaccagacaccacgacgccagcagaagccccgtggaccacagaaccagagacgtggacagccagtacctgagcgagcaggacagcgagctgctgatgctgcccagagccaagagaggcagaagcgccgagtgcctgcacaccaccagaatgcacagacagagaagccccacccagagcccccccgccgacaccagcttcagcagcagaagaggcagacagctgccccaggtgcccgtgagaagcggcagcatcgagcaggccagcctggtggtggaggagagaaccagacagatgaagatgaaggtgcacagattcaagcagaccaccggcagcggcagcagccaggagctggacagagagcagtacagcaagtacaacatccacaaggaccagtacagaagctgcgacaacgtgagcgccaagagcagcgacagcgacgtgagcgacgtgagcgccatcagcagaaccagcagcgccagcagactgagcagcaccagcttcatgagcgagcagagcgagagacccagaggcagaatcagaagaatgggcaccagcggcagaagcatcatgaagagcaccagcgtgagcggcgagatgtacaccctggagcacaacgacggcagccagagcgacaccgccgtgggcaccgtgggcgccggcggcaagaagagaagaagcagcctgagcgccaaggtggtggccatcgtgagcagaagaagcagaagcaccagccagctgagccagaccgagagcggccacaagaagctgaagagcaccatccagagaagcaccgagaccggcatggccgccgagatgagaaagatggtgagacagcccagcagagagagcaccgacggcagcatcaacagctacagcagcgagggcaacctgatcttccccggcgtgagactgggcgccgacagccagttcagcgacttcctggacggcctgggccccgcccagctggtgggcagacagaccctggccacccccgccatgggcgacatccagatcggcatggaggacaagaagggccagctggaggtggaggtgatcagagccagaagcctgacccagaagcccggcagcaagagcacccccgccccctacgtgaaggtgtacctgctggagaacggcgcctgcatcgccaagaagaagaccagaatcgccagaaagaccctggaccccctgtaccagcagagcctggtgttcgacgagagcccccagggcaaggtgctgcaggtgatcgtgtggggcgactacggcagaatggaccacaagtgcttcatgggcgtggcccagatcctgctggaggagctggacctgagcagcatggtgatcggctggtacaagctgttcccccccagcagcctggtggaccccaccctgacccccctgaccagaagagccagccagagcagcctggagagcagcaccggccccccctgcatcagaagctag

SEQ ID NO: 96614 - DNA, 4116 bp, synthetic construct
  misc_feature 1..4116: note = Description of Artificial Sequence: Synthetic coding sequence
  source 1..4116: mol_type = other DNA
atgagcagcgccgtgggccccagaggccccagaccccccaccgtgcccccccccatgcaggagctgcccgacctgagccacctgaccgaggaggagagaaacatcatcatggccgtgatggacagacagaaggaggaggaggagaaggaggaggccatgctgaagtgcgtggtgagagacatggccaagcccgccgcctgcaagacccccagaaacgccgagaaccagccccaccagcccagccccagactgcaccagcagttcgagagctacaaggagcaggtgagaaagatcggcgaggaggccagaagataccagggcgagcacaaggacgacgcccccacctgcggcatctgccacaagaccaagttcgccgacggctgcggccacctgtgcagctactgcagaaccaagttctgcgccagatgcggcggcagagtgagcctgagaagcaacaacgagaacaagatcgtgatgtgggtgtgcaacctgtgcagaaagcagcaggagatcctgaccaagagcggcgcctggttcttcggcagcggcccccagcagaccagccaggacggcaccctgagcgacaccgccaccggcgccggcagcgaggtgcccagagagaagaaggccagactgcaggagagaagcagaagccagacccccctgagcaccgccgccgccagcagccaggacgccgccccccccagcgccccccccgacagaagcaagggcgccgagcccagccagcaggccctgggccccgagcagaagcaggccagcagcagaagcagaagcgagccccccagagagagaaagaagacccccggcctgagcgagcagaacggcaagggcgccctgaagagcgagagaaagagagtgcccaagaccagcgcccagcccgtggagggcgccgtggaggagagagagagaaaggagagaagagagagcagaagactggagaagggcagaagccaggactaccccgacacccccgagaagagagacgagggcaaggccgccgacgaggagaagcagagaaaggaggaggactaccagaccagatacagaagcgaccccaacctggccagataccccgtgaagcccccccccgaggagcagcagatgagaatgcacgccagagtgagcagagccagacacgagagaagacacagcgacgtggccctgcccagaaccgaggccggcgccgccctgcccgagggcaaggccggcaagagagcccccgccgccgccagagccagcccccccgacagccccagagcctacagcgccgagagaaccgccgagaccagagcccccggcgccaagcagctgaccaaccacagcccccccgcccccagacacggccccgtgcccgccgaggcccccgagctgaaggcccaggagcccctgagaaagcagagcagactggaccccagcagcgccgtgctgatgagaaaggccaagagagagaaggtggagaccatgctgagaaacgacagcctgagcagcgaccagagcgagagcgtgagacccagcccccccaagccccacagaagcaagagaggcggcaagaagagacagatgagcgtgagcagcagcgaggaggagggcgtgagcacccccgagtacaccagctgcgaggacgtggagctggagagcgagagcgtgagcgagaagggcgacctggactactactggctggaccccgccacctggcacagcagagagaccagccccatcagcagccaccccgtgacctggcagcccagcaaggagggcgacagactgatcggcagagtgatcctgaacaagagaaccaccatgcccaaggacagcggcgccctgctgggcctgaaggtggtgggcggcaagatgaccgacctgggcagactgggcgccttcatcaccaaggtgaagaagggcagcctggccgacgtggtgggccacctgagagccggcgacgaggtgctggagtggaacggcaagcccctgcccggcgccaccaacgaggaggtgtacaacatcatcctggagagcaagagcgagccccaggtggagatcatcgtgagcagacccatcggcgacatccccagaatccccgagagcagccacccccccctggagagcagcagcagcagcttcgagagccagaagatggagagacccagcatcagcgtgatcagccccaccagccccggcgccctgaaggacgccccccaggtgctgcccggccagctgagcgtgaagctgtggtacgacaaggtgggccaccagctgatcgtgaacgtgctgcaggccaccgacctgcccgccagagtggacggcagacccagaaacccctacgtgaagatgtacttcctgcccgacagaagcgacaagagcaagagaagaaccaagaccgtgaagaagatcctggagcccaagtggaaccagaccttcgtgtacagccacgtgcacagaagagacttcagagagagaatgctggagatcaccgtgtgggaccagcccagagtgcaggaggaggagagcgagttcctgggcgagatcctgatcgagctggagaccgccctgctggacgacgagccccactggtacaagctgcagacccacgacgagagcagcctgcccctgccccagcccagccccttcatgcccagaagacacatccacggcgagagcagcagcaagaagctgcagagaagccagagaatcagcgacagcgacatcagcgactacgaggtggacgacggcatcggcgtggtgccccccgtgggctacagaagcagcgccagagagagcaagagcaccaccctgaccgtgcccgagcagcagagaaccacccaccacagaagcagaagcgtgagcccccacagaggcaacgaccagggcaagcccagaagcagactgcccaacgtgcccctgcagagaagcctggacgagatccaccccaccagaagaagcagaagccccaccagacaccacgacgccagcagaagccccgtggaccacagaaccagagacgtggacagccagtacctgagcgagcaggacagcgagctgctgatgctgcccagagccaagagaggcagaagcgccgagtgcctgcacaccaccagcgagctgcagcccttcctggacagagccagaagcgccagcaccaactgcctgagacccgacaccagcctgcacagccccgagagagagagaggcagatggagccccagcctggacagaagaagaccccccagccccagaatccagatccagcacgccagccccgagaacgacagaatgcacagacagagaagccccacccagagcccccccgccgacaccagcttcagcagcagaagaggcagacagctgccccaggtgcccgtgagaagcggcagcatcgagcaggagagcggccacaagaagctgaagagcaccatccagagaagcaccgagaccggcatggccgccgagatgagaaagatggtgagacagcccagcagagagagcaccgacggcagcatcaacagctacagcagcgagggcaacctgatcttccccggcgtgagactgggcgccgacagccagttcagcgacttcctggacggcctgggccccgcccagctggtgggcagacagaccctggccacccccgccatgggcgacatccagatcggcatggaggacaagaagggccagctggaggtggaggtgatcagagccagaagcctgacccagaagcccggcagcaagagcacccccgccccctacgtgaaggtgtacctgctggagaacggcgcctgcatcgccaagaagaagaccagaatcgccagaaagaccctggaccccctgtaccagcagagcctggtgttcgacgagagcccccagggcaaggtgctgcaggtgatcgtgtggggcgactacggcagaatggaccacaagtgcttcatgggcgtggcccagatcctgctggaggagctggacctgagcagcatggtgatcggctggtacaagctgttcccccccagcagcctggtggaccccaccctgacccccctgaccagaagagccagccagagcagcctggagagcagcaccggccccccctgcatcagaagctag

SEQ ID NO: 96615 - DNA, 4626 bp, synthetic construct
  misc_feature 1..4626: note = Description of Artificial Sequence: Synthetic coding sequence
  source 1..4626: mol_type = other DNA
atgagcagcgccgtgggccccagaggccccagaccccccaccgtgcccccccccatgcaggagctgcccgacctgagccacctgaccgaggaggagagaaacatcatcatggccgtgatggacagacagaaggaggaggaggagaaggaggaggccatgctgaagtgcgtggtgagagacatggccaagcccgccgcctgcaagacccccagaaacgccgagaaccagccccaccagcccagccccagactgcaccagcagttcgagagctacaaggagcaggtgagaaagatcggcgaggaggccagaagataccagggcgagcacaaggacgacgcccccacctgcggcatctgccacaagaccaagttcgccgacggctgcggccacctgtgcagctactgcagaaccaagttctgcgccagatgcggcggcagagtgagcctgagaagcaacaacgaggacaagtacgtgatgtgggtgtgcaacctgtgcagaaagcagcaggagatcctgaccaagagcggcgcctggttcttcggcagcggcccccagcagaccagccaggacggcaccctgagcgacaccgccaccggcgccggcagcgaggtgcccagagagaagaaggccagactgcaggagagaagcagaagccagacccccctgagcaccgccgccgccagcagccaggacgccgccccccccagcgccccccccgacagaagcaagggcgccgagcccagccagcaggccctgggccccgagcagaagcaggccagcagcagaagcagaagcgagccccccagagagagaaagaagacccccggcctgagcgagcagaacggcaagggcgccctgaagagcgagagaaagagagtgcccaagaccagcgcccagcccgtggagggcgccgtggaggagagagagagaaaggagagaagagagagcagaagactggagaagggcagaagccaggactaccccgacacccccgagaagagagacgagggcaaggccgccgacgaggagaagcagagaaaggaggaggactaccagaccagatacagaagcgaccccaacctggccagataccccgtgaagcccccccccgaggagcagcagatgagaatgcacgccagagtgagcagagccagacacgagagaagacacagcgacgtggccctgcccagaaccgaggccggcgccgccctgcccgagggcaaggccggcaagagagcccccgccgccgccagagccagcccccccgacagccccagagcctacagcgccgagagaaccgccgagaccagagcccccggcgccaagcagctgaccaaccacagcccccccgcccccagacacggccccgtgcccgccgaggcccccgagctgaaggcccaggagcccctgagaaagcagagcagactggaccccagcagcgccgtgctgatgagaaaggccaagagagagaaggtggagaccatgctgagaaacgacagcctgagcagcgaccagagcgagagcgtgagacccagcccccccaagccccacagaagcaagagaggcggcaagaagagacagatgagcgtgagcagcagcgaggaggagggcgtgagcacccccgagtacaccagctgcgaggacgtggagctggagagcgagagcgtgagcgagaagggcgacctggactactactggctggaccccgccacctggcacagcagagagaccagccccatcagcagccaccccgtgacctggcagcccagcaaggagggcgacagactgatcggcagagtgatcctgaacaagagaaccaccatgcccaaggacagcggcgccctgctgggcctgaaggtggtgggcggcaagatgaccgacctgggcagactgggcgccttcatcaccaaggtgaagaagggcagcctggccgacgtggtgggccacctgagagccggcgacgaggtgctggagtggaacggcaagcccctgcccggcgccaccaacgaggaggtgtacaacatcatcctggagagcaagagcgagccccaggtggagatcatcgtgagcagacccatcggcgacatccccagaatccccgagagcagccacccccccctggagagcagcagcagcagcttcgagagccagaagatggagagacccagcatcagcgtgatcagccccaccagccccggcgccctgaaggacgccccccaggtgctgcccggccagctgagcgtgaagctgtggtacgacaaggtgggccaccagctgatcgtgaacgtgctgcaggccaccgacctgcccgccagagtggacggcagacccagaaacccctacgtgaagatgtacttcctgcccgacagaagcgacaagagcaagagaagaaccaagaccgtgaagaagatcctggagcccaagtggaaccagaccttcgtgtacagccacgtgcacagaagagacttcagagagagaatgctggagatcaccgtgtgggaccagcccagagtgcaggaggaggagagcgagttcctgggcgagatcctgatcgagctggagaccgccctgctggacgacgagccccactggtacaagctgcagacccacgacgagagcagcctgcccctgccccagcccagccccttcatgcccagaagacacatccacggcgagagcagcagcaagaagctgcagagaagccagagaatcagcgacagcgacatcagcgactacgaggtggacgacggcatcggcgtggtgccccccgtgggctacagaagcagcgccagagagagcaagagcaccaccctgaccgtgcccgagcagcagagaaccacccaccacagaagcagaagcgtgagcccccacagaggcaacgaccagggcaagcccagaagcagactgcccaacgtgcccctgcagagaagcctggacgagatccaccccaccagaagaagcagaagccccaccagacaccacgacgccagcagaagccccgtggaccacagaaccagagacgtggacagccagtacctgagcgagcaggacagcgagctgctgatgctgcccagagccaagagaggcagaagcgccgagtgcctgcacaccaccagacacctggtgagacactacaagaccctgccccccaagatgcccctgctgcagagcagcagccactggaacatctacagcgagctgcagcccttcctggacagagccagaagcgccagcaccaactgcctgagacccgacaccagcctgcacagccccgagagagagagaatgcacagacagagaagccccacccagagcccccccgccgacaccagcttcagcagcagaagaggcagacagctgccccaggtgcccgtgagaagcggcagcatcgagcaggccagcctggtggtggaggagagaaccagacagatgaagatgaaggtgcacagattcaagcagaccaccggcagcggcagcagccaggagctggacagagagcagtacagcaagtacaacatccacaaggaccagtacagaagctgcgacaacgtgagcgccaagagcagcgacagcgacgtgagcgacgtgagcgccatcagcagaaccagcagcgccagcagactgagcagcaccagcttcatgagcgagcagagcgagagacccagaggcagaatcagcagcttcacccccaagatgcagggcagaagaatgggcaccagcggcagaagcatcatgaagagcaccagcgtgagcggcgagatgtacaccctggagcacaacgacggcagccagagcgacaccgccgtgggcaccgtgggcgccggcggcaagaagagaagaagcagcctgagcgccaaggtggtggccatcgtgagcagaagaagcagaagcaccagccagctgagccagaccgagagcggccacaagaagctgaagagcaccatccagagaagcaccgagaccggcatggccgccgagatgagaaagatggtgagacagcccagcagagagagcaccgacggcagcatcaacagctacagcagcgagggcaacctgatcttccccggcgtgagactgggcgccgacagccagttcagcgacttcctggacggcctgggccccgcccagctggtgggcagacagaccctggccacccccgccatgggcgacatccagatcggcatggaggacaagaagggccagctggaggtggaggtgatcagagccagaagcctgacccagaagcccggcagcaagagcacccccgccccctacgtgaaggtgtacctgctggagaacggcgcctgcatcgccaagaagaagaccagaatcgccagaaagaccctggaccccctgtaccagcagagcctggtgttcgacgagagcccccagggcaaggtgctgcaggtgatcgtgtggggcgactacggcagaatggaccacaagtgcttcatgggcgtggcccagatcctgctggaggagctggacctgagcagcatggtgatcggctggtacaagctgttcccccccagcagcctggtggaccccaccctgacccccctgaccagaagagccagccagagcagcctggagagcagcaccggccccccctgcatcagaagctag

SEQ ID NO: 96616 - DNA, 4446 bp, synthetic construct
  misc_feature 1..4446: note = Description of Artificial Sequence: Synthetic coding sequence
  source 1..4446: mol_type = other DNA
atgagcagcgccgtgggccccagaggccccagaccccccaccgtgcccccccccatgcaggagctgcccgacctgagccacctgaccgaggaggagagaaacatcatcatggccgtgatggacagacagaaggaggaggaggagaaggaggaggccatgctgaagtgcgtggtgagagacatggccaagcccgccgcctgcaagacccccagaaacgccgagaaccagccccaccagcccagccccagactgcaccagcagttcgagagctacaaggagcaggtgagaaagatcggcgaggaggccagaagataccagggcgagcacaaggacgacgcccccacctgcggcatctgccacaagaccaagttcgccgacggctgcggccacctgtgcagctactgcagaaccaagttctgcgccagatgcggcggcagagtgagcctgagaagcaacaacgagaacaagatcgtgatgtgggtgtgcaacctgtgcagaaagcagcaggagatcctgaccaagagcggcgcctggttcttcggcagcggcccccagcagaccagccaggacggcaccctgagcgacaccgccaccggcgccggcagcgaggtgcccagagagaagaaggccagactgcaggagagaagcagaagccagacccccctgagcaccgccgccgccagcagccaggacgccgccccccccagcgccccccccgacagaagcaagggcgccgagcccagccagcaggccctgggccccgagcagaagcaggccagcagcagaagcagaagcgagccccccagagagagaaagaagacccccggcctgagcgagcagaacggcaagggcgccctgaagagcgagagaaagagagtgcccaagaccagcgcccagcccgtggagggcgccgtggaggagagagagagaaaggagagaagagagagcagaagactggagaagggcagaagccaggactaccccgacacccccgagaagagagacgagggcaaggccgccgacgaggagaagcagagaaaggaggaggactaccagaccagatacagaagcgaccccaacctggccagataccccgtgaagcccccccccgaggagcagcagatgagaatgcacgccagagtgagcagagccagacacgagagaagacacagcgacgtggccctgcccagaaccgaggccggcgccgccctgcccgagggcaaggccggcaagagagcccccgccgccgccagagccagcccccccgacagccccagagcctacagcgccgagagaaccgccgagaccagagcccccggcgccaagcagctgaccaaccacagcccccccgcccccagacacggccccgtgcccgccgaggcccccgagctgaaggcccaggagcccctgagaaagcagagcagactggaccccagcagcgccgtgctgatgagaaaggccaagagagagaaggtggagaccatgctgagaaacgacagcctgagcagcgaccagagcgagagcgtgagacccagcccccccaagccccacagaagcaagagaggcggcaagaagagacagatgagcgtgagcagcagcgaggaggagggcgtgagcacccccgagtacaccagctgcgaggacgtggagctggagagcgagagcgtgagcgagaagggcgacctggactactactggctggaccccgccacctggcacagcagagagaccagccccatcagcagccaccccgtgacctggcagcccagcaaggagggcgacagactgatcggcagagtgatcctgaacaagagaaccaccatgcccaaggacagcggcgccctgctgggcctgaaggtggtgggcggcaagatgaccgacctgggcagactgggcgccttcatcaccaaggtgaagaagggcagcctggccgacgtggtgggccacctgagagccggcgacgaggtgctggagtggaacggcaagcccctgcccggcgccaccaacgaggaggtgtacaacatcatcctggagagcaagagcgagccccaggtggagatcatcgtgagcagacccatcggcgacatccccagaatccccgagagcagccacccccccctggagagcagcagcagcagcttcgagagccagaagatggagagacccagcatcagcgtgatcagccccaccagccccggcgccctgaaggacgccccccaggtgctgcccggccagctgagcgtgaagctgtggtacgacaaggtgggccaccagctgatcgtgaacgtgctgcaggccaccgacctgcccgccagagtggacggcagacccagaaacccctacgtgaagatgtacttcctgcccgacagaagcgacaagagcaagagaagaaccaagaccgtgaagaagatcctggagcccaagtggaaccagaccttcgtgtacagccacgtgcacagaagagacttcagagagagaatgctggagatcaccgtgtgggaccagcccagagtgcaggaggaggagagcgagttcctgggcgagatcctgatcgagctggagaccgccctgctggacgacgagccccactggtacaagctgcagacccacgacgagagcagcctgcccctgccccagcccagccccttcatgcccagaagacacatccacggcgagagcagcagcaagaagctgcagagaagccagagaatcagcgacagcgacatcagcgactacgaggtggacgacggcatcggcgtggtgccccccgtgggctacagaagcagcgccagagagagcaagagcaccaccctgaccgtgcccgagcagcagagaaccacccaccacagaagcagaagcgtgagcccccacagaggcaacgaccagggcaagcccagaagcagactgcccaacgtgcccctgcagagaagcctggacgagatccaccccaccagaagaagcagaagccccaccagacaccacgacgccagcagaagccccgtggaccacagaaccagagacgtggacagccagtacctgagcgagcaggacagcgagctgctgatgctgcccagagccaagagaggcagaagcgccgagtgcctgcacaccaccagcgagctgcagcccttcctggacagagccagaagcgccagcaccaactgcctgagacccgacaccagcctgcacagccccgagagagagagaatgcacagacagagaagccccacccagagcccccccgccgacaccagcttcagcagcagaagaggcagacagctgccccaggtgcccgtgagaagcggcagcatcgagcaggccagcctggtggtggaggagagaaccagacagatgaagatgaaggtgcacagattcaagcagaccaccggcagcggcagcagccaggagctggacagagagcagtacagcaagtacaacatccacaaggaccagtacagaagctgcgacaacgtgagcgccaagagcagcgacagcgacgtgagcgacgtgagcgccatcagcagaaccagcagcgccagcagactgagcagcaccagcttcatgagcgagcagagcgagagacccagaggcagaatcagcagcttcacccccaagatgcagggcagaagaatgggcaccagcggcagaagcatcatgaagagcaccagcgtgagcggcgagatgtacaccctggagcacaacgacggcagccagagcgacaccgccgtgggcaccgtgggcgccggcggcaagaagagaagaagcagcctgagcgccaaggtggtggccatcgtgagcagaagaagcagaagcaccagccagctgagccagaccgagagcggccacaagaagctgaagagcaccatccagagaagcaccgagaccggcatggccgccgagatgagaaagatggtgagacagcccagcagagagagcaccgacggcagcatcaacagctacagcagcgagggcaacctgatcttccccggcgtgagactgggcgccgacagccagttcagcgacttcctggacggcctgggccccgcccagctggtgggcagacagaccctggccacccccgccatggccccctacgtgaaggtgtacctgctggagaacggcgcctgcatcgccaagaagaagaccagaatcgccagaaagaccctggaccccctgtaccagcagagcctggtgttcgacgagagcccccagggcaaggtgctgcaggtgatcgtgtggggcgactacggcagaatggaccacaagtgcttcatgggcgtggcccagatcctgctggaggagctggacctgagcagcatggtgatcggctggtacaagctgttcccccccagcagcctggtggaccccaccctgacccccctgaccagaagagccagccagagcagcctggagagcagcaccggccccccctgcatcagaagctag

SEQ ID NO: 96617 - DNA, 4446 bp, synthetic construct
  misc_feature 1..4446: note = Description of Artificial Sequence: Synthetic coding sequence
  source 1..4446: mol_type = other DNA
atgagcagcgccgtgggccccagaggccccagaccccccaccgtgcccccccccatgcaggagctgcccgacctgagccacctgaccgaggaggagagaaacatcatcatggccgtgatggacagacagaaggaggaggaggagaaggaggaggccatgctgaagtgcgtggtgagagacatggccaagcccgccgcctgcaagacccccagaaacgccgagaaccagccccaccagcccagccccagactgcaccagcagttcgagagctacaaggagcaggtgagaaagatcggcgaggaggccagaagataccagggcgagcacaaggacgacgcccccacctgcggcatctgccacaagaccaagttcgccgacggctgcggccacctgtgcagctactgcagaaccaagttctgcgccagatgcggcggcagagtgagcctgagaagcaacaacgaggacaaggtggtgatgtgggtgtgcaacctgtgcagaaagcagcaggagatcctgaccaagagcggcgcctggttcttcggcagcggcccccagcagaccagccaggacggcaccctgagcgacaccgccaccggcgccggcagcgaggtgcccagagagaagaaggccagactgcaggagagaagcagaagccagacccccctgagcaccgccgccgccagcagccaggacgccgccccccccagcgccccccccgacagaagcaagggcgccgagcccagccagcaggccctgggccccgagcagaagcaggccagcagcagaagcagaagcgagccccccagagagagaaagaagacccccggcctgagcgagcagaacggcaagggcgccctgaagagcgagagaaagagagtgcccaagaccagcgcccagcccgtggagggcgccgtggaggagagagagagaaaggagagaagagagagcagaagactggagaagggcagaagccaggactaccccgacacccccgagaagagagacgagggcaaggccgccgacgaggagaagcagagaaaggaggaggactaccagaccagatacagaagcgaccccaacctggccagataccccgtgaagcccccccccgaggagcagcagatgagaatgcacgccagagtgagcagagccagacacgagagaagacacagcgacgtggccctgcccagaaccgaggccggcgccgccctgcccgagggcaaggccggcaagagagcccccgccgccgccagagccagcccccccgacagccccagagcctacagcgccgagagaaccgccgagaccagagcccccggcgccaagcagctgaccaaccacagcccccccgcccccagacacggccccgtgcccgccgaggcccccgagctgaaggcccaggagcccctgagaaagcagagcagactggaccccagcagcgccgtgctgatgagaaaggccaagagagagaaggtggagaccatgctgagaaacgacagcctgagcagcgaccagagcgagagcgtgagacccagcccccccaagccccacagaagcaagagaggcggcaagaagagacagatgagcgtgagcagcagcgaggaggagggcgtgagcacccccgagtacaccagctgcgaggacgtggagctggagagcgagagcgtgagcgagaagggcgacctggactactactggctggaccccgccacctggcacagcagagagaccagccccatcagcagccaccccgtgacctggcagcccagcaaggagggcgacagactgatcggcagagtgatcctgaacaagagaaccaccatgcccaaggacagcggcgccctgctgggcctgaaggtggtgggcggcaagatgaccgacctgggcagactgggcgccttcatcaccaaggtgaagaagggcagcctggccgacgtggtgggccacctgagagccggcgacgaggtgctggagtggaacggcaagcccctgcccggcgccaccaacgaggaggtgtacaacatcatcctggagagcaagagcgagccccaggtggagatcatcgtgagcagacccatcggcgacatccccagaatccccgagagcagccacccccccctggagagcagcagcagcagcttcgagagccagaagatggagagacccagcatcagcgtgatcagccccaccagccccggcgccctgaaggacgccccccaggtgctgcccggccagctgagcgtgaagctgtggtacgacaaggtgggccaccagctgatcgtgaacgtgctgcaggccaccgacctgcccgccagagtggacggcagacccagaaacccctacgtgaagatgtacttcctgcccgacagaagcgacaagagcaagagaagaaccaagaccgtgaagaagatcctggagcccaagtggaaccagaccttcgtgtacagccacgtgcacagaagagacttcagagagagaatgctggagatcaccgtgtgggaccagcccagagtgcaggaggaggagagcgagttcctgggcgagatcctgatcgagctggagaccgccctgctggacgacgagccccactggtacaagctgcagacccacgacgagagcagcctgcccctgccccagcccagccccttcatgcccagaagacacatccacggcgagagcagcagcaagaagctgcagagaagccagagaatcagcgacagcgacatcagcgactacgaggtggacgacggcatcggcgtggtgccccccgtgggctacagaagcagcgccagagagagcaagagcaccaccctgaccgtgcccgagcagcagagaaccacccaccacagaagcagaagcgtgagcccccacagaggcaacgaccagggcaagcccagaagcagactgcccaacgtgcccctgcagagaagcctggacgagatccaccccaccagaagaagcagaagccccaccagacaccacgacgccagcagaagccccgtggaccacagaaccagagacgtggacagccagtacctgagcgagcaggacagcgagctgctgatgctgcccagagccaagagaggcagaagcgccgagtgcctgcacaccaccagcgagctgcagcccttcctggacagagccagaagcgccagcaccaactgcctgagacccgacaccagcctgcacagccccgagagagagagaatgcacagacagagaagccccacccagagcccccccgccgacaccagcttcagcagcagaagaggcagacagctgccccaggtgcccgtgagaagcggcagcatcgagcaggccagcctggtggtggaggagagaaccagacagatgaagatgaaggtgcacagattcaagcagaccaccggcagcggcagcagccaggagctggacagagagcagtacagcaagtacaacatccacaaggaccagtacagaagctgcgacaacgtgagcgccaagagcagcgacagcgacgtgagcgacgtgagcgccatcagcagaaccagcagcgccagcagactgagcagcaccagcttcatgagcgagcagagcgagagacccagaggcagaatcagcagcttcacccccaagatgcagggcagaagaatgggcaccagcggcagaagcatcatgaagagcaccagcgtgagcggcgagatgtacaccctggagcacaacgacggcagccagagcgacaccgccgtgggcaccgtgggcgccggcggcaagaagagaagaagcagcctgagcgccaaggtggtggccatcgtgagcagaagaagcagaagcaccagccagctgagccagaccgagagcggccacaagaagctgaagagcaccatccagagaagcaccgagaccggcatggccgccgagatgagaaagatggtgagacagcccagcagagagagcaccgacggcagcatcaacagctacagcagcgagggcaacctgatcttccccggcgtgagactgggcgccgacagccagttcagcgacttcctggacggcctgggccccgcccagctggtgggcagacagaccctggccacccccgccatggccccctacgtgaaggtgtacctgctggagaacggcgcctgcatcgccaagaagaagaccagaatcgccagaaagaccctggaccccctgtaccagcagagcctggtgttcgacgagagcccccagggcaaggtgctgcaggtgatcgtgtggggcgactacggcagaatggaccacaagtgcttcatgggcgtggcccagatcctgctggaggagctggacctgagcagcatggtgatcggctggtacaagctgttcccccccagcagcctggtggaccccaccctgacccccctgaccagaagagccagccagagcagcctggagagcagcaccggccccccctgcatcagaagctag

SEQ ID NO: 96618 - DNA, 5079 bp, synthetic construct
  misc_feature 1..5079: note = Description of Artificial Sequence: Synthetic coding sequence
  source 1..5079: mol_type = other DNA
atgagcagcgccgtgggccccagaggccccagaccccccaccgtgcccccccccatgcaggagctgcccgacctgagccacctgaccgaggaggagagaaacatcatcatggccgtgatggacagacagaaggaggaggaggagaaggaggaggccatgctgaagtgcgtggtgagagacatggccaagcccgccgcctgcaagacccccagaaacgccgagaaccagccccaccagcccagccccagactgcaccagcagttcgagagctacaaggagcaggtgagaaagatcggcgaggaggccagaagataccagggcgagcacaaggacgacgcccccacctgcggcatctgccacaagaccaagttcgccgacggctgcggccacctgtgcagctactgcagaaccaagttctgcgccagatgcggcggcagagtgagcctgagaagcaacaacgaggacaaggtggtgatgtgggtgtgcaacctgtgcagaaagcagcaggagatcctgaccaagagcggcgcctggttcttcggcagcggcccccagcagaccagccaggacggcaccctgagcgacaccgccaccggcgccggcagcgaggtgcccagagagaagaaggccagactgcaggagagaagcagaagccagacccccctgagcaccgccgccgccagcagccaggacgccgccccccccagcgccccccccgacagaagcaagggcgccgagcccagccagcaggccctgggccccgagcagaagcaggccagcagcagaagcagaagcgagccccccagagagagaaagaagacccccggcctgagcgagcagaacggcaagggcgccctgaagagcgagagaaagagagtgcccaagaccagcgcccagcccgtggagggcgccgtggaggagagagagagaaaggagagaagagagagcagaagactggagaagggcagaagccaggactaccccgacacccccgagaagagagacgagggcaaggccgccgacgaggagaagcagagaaaggaggaggactaccagaccagatacagaagcgaccccaacctggccagataccccgtgaagcccccccccgaggagcagcagatgagaatgcacgccagagtgagcagagccagacacgagagaagacacagcgacgtggccctgcccagaaccgaggccggcgccgccctgcccgagggcaaggccggcaagagagcccccgccgccgccagagccagcccccccgacagccccagagcctacagcgccgagagaaccgccgagaccagagcccccggcgccaagcagctgaccaaccacagcccccccgcccccagacacggccccgtgcccgccgaggcccccgagctgaaggcccaggagcccctgagaaagcagagcagactggaccccagcagcgccgtgctgatgagaaaggccaagagagagaaggtggagaccatgctgagaaacgacagcctgagcagcgaccagagcgagagcgtgagacccagcccccccaagccccacagaagcaagagaggcggcaagaagagacagatgagcgtgagcagcagcgaggaggagggcgtgagcacccccgagtacaccagctgcgaggacgtggagctggagagcgagagcgtgagcgagaagggcgacctggactactactggctggaccccgccacctggcacagcagagagaccagccccatcagcagccaccccgtgacctggcagcccagcaaggagggcgacagactgatcggcagagtgatcctgaacaagagaaccaccatgcccaaggacagcggcgccctgctgggcctgaaggtggtgggcggcaagatgaccgacctgggcagactgggcgccttcatcaccaaggtgaagaagggcagcctggccgacgtggtgggccacctgagagccggcgacgaggtgctggagtggaacggcaagcccctgcccggcgccaccaacgaggaggtgtacaacatcatcctggagagcaagagcgagccccaggtggagatcatcgtgagcagacccatcggcgacatccccagaatccccgagagcagccacccccccctggagagcagcagcagcagcttcgagagccagaagatggagagacccagcatcagcgtgatcagccccaccagccccggcgccctgaaggacgccccccaggtgctgcccggccagctgagcgtgaagctgtggtacgacaaggtgggccaccagctgatcgtgaacgtgctgcaggccaccgacctgcccgccagagtggacggcagacccagaaacccctacgtgaagatgtacttcctgcccgacagaagcgacaagagcaagagaagaaccaagaccgtgaagaagatcctggagcccaagtggaaccagaccttcgtgtacagccacgtgcacagaagagacttcagagagagaatgctggagatcaccgtgtgggaccagcccagagtgcaggaggaggagagcgagttcctgggcgagatcctgatcgagctggagaccgccctgctggacgacgagccccactggtacaagctgcagacccacgacgagagcagcctgcccctgccccagcccagccccttcatgcccagaagacacatccacggcgagagcagcagcaagaagctgcagagaagccagagaatcagcgacagcgacatcagcgactacgaggtggacgacggcatcggcgtggtgccccccgtgggctacagaagcagcgccagagagagcaagagcaccaccctgaccgtgcccgagcagcagagaaccacccaccacagaagcagaagcgtgagcccccacagaggcaacgaccagggcaagcccagaagcagactgcccaacgtgcccctgcagagaagcctggacgagatccaccccaccagaagaagcagaagccccaccagacaccacgacgccagcagaagccccgtggaccacagaaccagagacgtggacagccagtacctgagcgagcaggacagcgagctgctgatgctgcccagagccaagagaggcagaagcgccgagtgcctgcacaccaccagacacctggtgagacactacaagaccctgccccccaagatgcccctgctgcagagcagcagccactggaacatctacagcagcatcctgcccgcccacaccaagaccaagagcgtgaccagacaggacatcagcctgcaccacgagtgcttcaacagcaccgtgctgagattcaccgacgagatcctggtgagcgagctgcagcccttcctggacagagccagaagcgccagcaccaactgcctgagacccgacaccagcctgcacagccccgagagagagagaggcagatggagccccagcctggacagaagaagaccccccagccccagaatccagatccagcacgccagccccgagaacgacagacacagcagaaagagcgagagaagcagcatccagaagcagaccagaaagggcaccgccagcgacgccgagagagtgctgcccacctgcctgagcagaagaggccacgccgcccccagagccaccgaccagcccgtgatcagaggcaagcaccccgccagaagcagaagcagcgagcacagcagcatcagaaccctgtgcagcatgcaccacctggtgcccggcggcagcgccccccccagccccctgctgaccagaatgcacagacagagaagccccacccagagcccccccgccgacaccagcttcagcagcagaagaggcagacagctgccccaggtgcccgtgagaagcggcagcatcgagcaggccagcctggtggtggaggagagaaccagacagatgaagatgaaggtgcacagattcaagcagaccaccggcagcggcagcagccaggagctggacagagagcagtacagcaagtacaacatccacaaggaccagtacagaagctgcgacaacgtgagcgccaagagcagcgacagcgacgtgagcgacgtgagcgccatcagcagaaccagcagcgccagcagactgagcagcaccagcttcatgagcgagcagagcgagagacccagaggcagaatcagcagcttcacccccaagatgcagggcagaagaatgggcaccagcggcagaagcatcatgaagagcaccagcgtgagcggcgagatgtacaccctggagcacaacgacggcagccagagcgacaccgccgtgggcaccgtgggcgccggcggcaagaagagaagaagcagcctgagcgccaaggtggtggccatcgtgagcagaagaagcagaagcaccagccagctgagccagaccgagagcggccacaagaagctgaagagcaccatccagagaagcaccgagaccggcatggccgccgagatgagaaagatggtgagacagcccagcagagagagcaccgacggcagcatcaacagctacagcagcgagggcaacctgatcttccccggcgtgagactgggcgccgacagccagttcagcgacttcctggacggcctgggccccgcccagctggtgggcagacagaccctggccacccccgccatgggcgacatccagatcggcatggaggacaagaagggccagctggaggtggaggtgatcagagccagaagcctgacccagaagcccggcagcaagagcacccccgccccctacgtgaaggtgtacctgctggagaacggcgcctgcatcgccaagaagaagaccagaatcgccagaaagaccctggaccccctgtaccagcagagcctggtgttcgacgagagcccccagggcaaggtgctgcaggtgatcgtgtggggcgactacggcagaatggaccacaagtgcttcatgggcgtggcccagatcctgctggaggagctggacctgagcagcatggtgatcggctggtacaagctgttcccccccagcagcctggtggaccccaccctgacccccctgaccagaagagccagccagagcagcctggagagcagcaccggccccccctgcatcagaagctag

SEQ ID NO: 96619 - DNA, 1497 bp, synthetic construct
  misc_feature 1..1497: note = Description of Artificial Sequence: Synthetic coding sequence
  source 1..1497: mol_type = other DNA
atgctgcccagagccaagagaggcagaagcgccgagtgcctgcacaccaccagacacagcagaaagagcgagagaagcagcatccagaagcagaccagaaagggcaccgccagcgacgccgagagaatgcacagacagagaagccccacccagagcccccccgccgacaccagcttcagcagcagaagaggcagacagctgccccaggtgcccgtgagaagcggcagcatcgagcaggagcaggagaagtacaacagcagcaccaaggccagcctggtggtggaggagagaaccagacagatgaagatgaaggtgcacagattcaagcagaccaccggcagcggcagcagccaggagctggacagagagcagtacagcaagtacaacatccacaaggaccagtacagaagctgcgacaacgtgagcgccaagagcagcgacagcgacgtgagcgacgtgagcgccatcagcagaaccagcagcgccagcagactgagcagcaccagcttcatgagcgagcagagcgagagacccagaggcagaatcagcagcttcacccccaagatgcagggcagaagaatgggcaccagcggcagaagcatcatgaagagcaccagcgtgagcggcgagatgtacaccctggagcacaacgacggcagccagagcgacaccgccgtgggcaccgtgggcgccggcggcaagaagagaagaagcagcctgagcgccaaggtggtggccatcgtgagcagaagaagcagaagcaccagccagctgagccagaccgagagcggccacaagaagctgaagagcaccatccagagaagcaccgagaccggcatggccgccgagatgagaaagatggtgagacagcccagcagagagagcaccgacggcagcatcaacagctacagcagcgagggcaacctgatcttccccggcgtgagactgggcgccgacagccagttcagcgacttcctggacggcctgggccccgcccagctggtgggcagacagaccctggccacccccgccatgggcgacatccagatcggcatggaggacaagaagggccagctggaggtggaggtgatcagagccagaagcctgacccagaagcccggcagcaagagcacccccgccccctacgtgaaggtgtacctgctggagaacggcgcctgcatcgccaagaagaagaccagaatcgccagaaagaccctggaccccctgtaccagcagagcctggtgttcgacgagagcccccagggcaaggtgctgcaggtgatcgtgtggggcgactacggcagaatggaccacaagtgcttcatgggcgtggcccagatcctgctggaggagctggacctgagcagcatggtgatcggctggtacaagctgttcccccccagcagcctggtggaccccaccctgacccccctgaccagaagagccagccagagcagcctggagagcagcaccggccccccctgcatcagaagctag

SEQ ID NO: 96620 - DNA, 3039 bp, synthetic construct
  misc_feature 1..3039: note = Description of Artificial Sequence: Synthetic coding sequence
  source 1..3039: mol_type = other DNA
atgtgcgcccccggcatccacgtgagcagcgagggctgggaggaggtgagaagcgtggacagcgaggagggcaccatcgaggccagaagagccgtggccggcgacctggactactactggctggaccccgccacctggcacagcagagagaccagccccatcagcagccaccccgtgacctggcagcccagcaaggagggcgacagactgatcggcagagtgatcctgaacaagagaaccaccatgcccaaggacagcggcgccctgctgggcctgaaggtggtgggcggcaagatgaccgacctgggcagactgggcgccttcatcaccaaggtgaagaagggcagcctggccgacgtggtgggccacctgagagccggcgacgaggtgctggagtggaacggcaagcccctgcccggcgccaccaacgaggaggtgtacaacatcatcctggagagcaagagcgagccccaggtggagatcatcgtgagcagacccatcggcgacatccccagaatccccgagagcagccacccccccctggagagcagcagcagcagcttcgagagccagaagatggagagacccagcatcagcgtgatcagccccaccagccccggcgccctgaaggacgccccccaggtgctgcccggccagctgagcgtgaagctgtggtacgacaaggtgggccaccagctgatcgtgaacgtgctgcaggccaccgacctgcccgccagagtggacggcagacccagaaacccctacgtgaagatgtacttcctgcccgacagaagcgacaagagcaagagaagaaccaagaccgtgaagaagatcctggagcccaagtggaaccagaccttcgtgtacagccacgtgcacagaagagacttcagagagagaatgctggagatcaccgtgtgggaccagcccagagtgcaggaggaggagagcgagttcctgggcgagatcctgatcgagctggagaccgccctgctggacgacgagccccactggtacaagctgcagacccacgacgagagcagcctgcccctgccccagcccagccccttcatgcccagaagacacatccacggcgagagcagcagcaagaagctgcagagaagccagagaatcagcgacagcgacatcagcgactacgaggtggacgacggcatcggcgtggtgccccccggctacagaagcagcgccagagagagcaagagcaccaccctgaccgtgcccgagcagcagagaaccacccaccacagaagcagaagcgtgagcccccacagaggcaacgaccagggcaagcccagaagcagactgcccaacgtgcccctgcagagaagcctggacgagatccaccccaccagaagaagcagaagccccaccagacaccacgacgccagcagaagccccgtggaccacagaaccagagacgtggacagccagtacctgagcgagcaggacagcgagctgctgatgctgcccagagccaagagaggcagaagcgccgagtgcctgcacaccaccagcgagctgcagcccttcctggacagagccagaagcgccagcaccaactgcctgagacccgacaccagcctgcacagccccgagagagagagacacagcagaaagagcgagagaagcagcatccagaagcagaccagaaagggcaccgccagcgacgccgagagaatgcacagacagagaagccccacccagagcccccccgccgacaccagcttcagcagcagaagaggcagacagctgccccaggtgcccgtgagaagcggcagcatcgagcaggccagcctggtggtggaggagagaaccagacagatgaagatgaaggtgcacagattcaagcagaccaccggcagcggcagcagccaggagctggacagagagcagtacagcaagtacaacatccacaaggaccagtacagaagctgcgacaacgtgagcgccaagagcagcgacagcgacgtgagcgacgtgagcgccatcagcagaaccagcagcgccagcagactgagcagcaccagcttcatgagcgagcagagcgagagacccagaggcagaatcagcagcttcacccccaagatgcagggcagaagaatgggcaccagcggcagaagcatcatgaagagcaccagcgtgagcggcgagatgtacaccctggagcacaacgacggcagccagagcgacaccgccgtgggcaccgtgggcgccggcggcaagaagagaagaagcagcctgagcgccaaggtggtggccatcgtgagcagaagaagcagaagcaccagccagctgagccagaccgagagcggccacaagaagctgaagagcaccatccagagaagcaccgagaccggcatggccgccgagatgagaaagatggtgagacagcccagcagagagagcaccgacggcagcatcaacagctacagcagcgagggcaacctgatcttccccggcgtgagactgggcgccgacagccagttcagcgacttcctggacggcctgggccccgcccagctggtgggcagacagaccctggccacccccgccatgggcgacatccagatcggcatggaggacaagaagggccagctggaggtggaggtgatcagagccagaagcctgacccagaagcccggcagcaagagcacccccgccccctacgtgaaggtgtacctgctggagaacggcgcctgcatcgccaagaagaagaccagaatcgccagaaagaccctggaccccctgtaccagcagagcctggtgttcgacgagagcccccagggcaaggtgctgcaggtgatcgtgtggggcgactacggcagaatggaccacaagtgcttcatgggcgtggcccagatcctgctggaggagctggacctgagcagcatggtgatcggctggtacaagctgttcccccccagcagcctggtggaccccaccctgacccccctgaccagaagagccagccagagcagcctggagagcagcaccggccccccctgcatcagaagctag

SEQ ID NO: 96621 - DNA, 660 bp, synthetic construct
  misc_feature 1..660: note = Description of Artificial Sequence: Synthetic coding sequence
  source 1..660: mol_type = other DNA
atggccgccgagatgagaaagatggtgagacagcccagcagagagagcaccgacggcagcatcaacagctacagcagcgagggcaacctgatcttccccggcgtgagactgggcgccgacagccagttcagcgacttcctggacggcctgggccccgcccagctggtgggcagacagaccctggccacccccgccatgggcgacatccagatcggcatggaggacaagaagggccagctggaggtggaggtgatcagagccagaagcctgacccagaagcccggcagcaagagcacccccgccccctacgtgaaggtgtacctgctggagaacggcgcctgcatcgccaagaagaagaccagaatcgccagaaagaccctggaccccctgtaccagcagagcctggtgttcgacgagagcccccagggcaaggtgctgcaggtgatcgtgtggggcgactacggcagaatggaccacaagtgcttcatgggcgtggcccagatcctgctggaggagctggacctgagcagcatggtgatcggctggtacaagctgttcccccccagcagcctggtggaccccaccctgacccccctgaccagaagagccagccagagcagcctggagagcagcaccggccccccctgcatcagaagctag

SEQ ID NO: 96622 - DNA, 2283 bp, synthetic construct
  misc_feature 1..2283: note = Description of Artificial Sequence: Synthetic coding sequence
  source 1..2283: mol_type = other DNA
atgcccaaggacagcggcgccctgctgggcctgaaggtggtgggcggcaagatgaccgacctgggcagactgggcgccttcatcaccaaggtgaagaagggcagcctggccgacgtggtgggccacctgagagccggcgacgaggtgctggagtggaacggcaagcccctgcccggcgccaccaacgaggaggtgtacaacatcatcctggagagcaagagcgagccccaggtggagatcatcgtgagcagacccatcggcgacatccccagaatccccgagagcagccacccccccctggagagcagcagcagcagcttcgagagccagaagatggagagacccagcatcagcgtgatcagccccaccagccccggcgccctgaaggacgccccccaggtgctgcccggccagctgagcgtgaagctgtggtacgacaaggtgggccaccagctgatcgtgaacgtgctgcaggccaccgacctgcccgccagagtggacggcagacccagaaacccctacgtgaagatgtacttcctgcccgacagaagcgacaagagcaagagaagaaccaagaccgtgaagaagatcctggagcccaagtggaaccagaccttcgtgtacagccacgtgcacagaagagacttcagagagagaatgctggagatcaccgtgtgggaccagcccagagtgcaggaggaggagagcgagttcctgggcgagatcctgatcgagctggagaccgccctgctggacgacgagccccactggtacaagctgcagacccacgacgagagcagcctgcccctgccccagcccagccccttcatgcccagaagacacatccacggcgagagcagcagcaagaagctgcagagaagccagagaatcagcgacagcgacatcagcgactacgaggtggacgacggcatcggcgtggtgccccccgtgggctacagaagcagcgccagagagagcaagagcaccaccctgaccgtgcccgagcagcagagaaccacccaccacagaagcagaagcgtgagcccccacagaggcaacgaccagggcaagcccagaagcagactgcccaacgtgcccctgcagagaagcctggacgagatccaccccaccagaagaagcagaagccccaccagacaccacgacgccagcagaagccccgtggaccacagaaccagagacgtggacagccagtacctgagcgagcaggacagcgagctgctgatgctgcccagagccaagagaggcagaagcgccgagtgcctgcacaccaccagcgagctgcagcccttcctggacagagccagaagcgccagcaccaactgcctgagacccgacaccagcctgcacagccccgagagagagagacacagcagaaagagcgagagaagcagcatccagaagcagaccagaaagggcaccgccagcgacgccgagagaatgcacagacagagaagccccacccagagcccccccgccgacaccagcttcagcagcagaagaggcagacagctgccccaggtgcccgtgagaagcggcagcatcgagcaggagagcggccacaagaagctgaagagcaccatccagagaagcaccgagaccggcatggccgccgagatgagaaagatggtgagacagcccagcagagagagcaccgacggcagcatcaacagctacagcagcgagggcaacctgatcttccccggcgtgagactgggcgccgacagccagttcagcgacttcctggacggcctgggccccgcccagctggtgggcagacagaccctggccacccccgccatgggcgacatccagatcggcatggaggacaagaagggccagctggaggtggaggtgatcagagccagaagcctgacccagaagcccggcagcaagagcacccccgccccctacgtgaaggtgtacctgctggagaacggcgcctgcatcgccaagaagaagaccagaatcgccagaaagaccctggaccccctgtaccagcagagcctggtgttcgacgagagcccccagggcaaggtgctgcaggtgatcgtgtggggcgactacggcagaatggaccacaagtgcttcatgggcgtggcccagatcctgctggaggagctggacctgagcagcatggtgatcggctggtacaagctgttcccccccagcagcctggtggaccccaccctgacccccctgaccagaagagccagccagagcagcctggagagcagcaccggccccccctgcatcagaagctag

SEQ ID NO: 96623 - DNA, 2481 bp, synthetic construct
  misc_feature 1..2481: note = Description of Artificial Sequence: Synthetic coding sequence
  source 1..2481: mol_type = other DNA
atgttcgccggcttcctgcagttcctgctgctgcacaccctgcacagcggcaccggcgacctggactactactggctggaccccgccacctggcacagcagagagaccagccccatcagcagccaccccgtgacctggcagcccagcaaggagggcgacagactgatcggcagagtgatcctgaacaagagaaccaccatgcccaaggacagcggcgccctgctgggcctgaaggtggtgggcggcaagatgaccgacctgggcagactgggcgccttcatcaccaaggtgaagaagggcagcctggccgacgtggtgggccacctgagagccggcgacgaggtgctggagtggaacggcaagcccctgcccggcgccaccaacgaggaggtgtacaacatcatcctggagagcaagagcgagccccaggtggagatcatcgtgagcagacccatcggcgacatccccagaatccccgagagcagccacccccccctggagagcagcagcagcagcttcgagagccagaagatggagagacccagcatcagcgtgatcagccccaccagccccggcgccctgaaggacgccccccaggtgctgcccggccagctgagcgtgaagctgtggtacgacaaggtgggccaccagctgatcgtgaacgtgctgcaggccaccgacctgcccgccagagtggacggcagacccagaaacccctacgtgaagatgtacttcctgcccgacagaagcgacaagagcaagagaagaaccaagaccgtgaagaagatcctggagcccaagtggaaccagaccttcgtgtacagccacgtgcacagaagagacttcagagagagaatgctggagatcaccgtgtgggaccagcccagagtgcaggaggaggagagcgagttcctgggcgagatcctgatcgagctggagaccgccctgctggacgacgagccccactggtacaagctgcagacccacgacgagagcagcctgcccctgccccagcccagccccttcatgcccagaagacacatccacggcgagagcagcagcaagaagctgcagagaagccagagaatcagcgacagcgacatcagcgactacgaggtggacgacggcatcggcgtggtgccccccgtgggctacagaagcagcgccagagagagcaagagcaccaccctgaccgtgcccgagcagcagagaaccacccaccacagaagcagaagcgtgagcccccacagaggcaacgaccagggcaagcccagaagcagactgcccaacgtgcccctgcagagaagcctggacgagatccaccccaccagaagaagcagaagccccaccagacaccacgacgccagcagaagccccgtggaccacagaaccagagacgtggacagccagtacctgagcgagcaggacagcgagctgctgatgctgcccagagccaagagaggcagaagcgccgagtgcctgcacaccaccagcgagctgcagcccttcctggacagagccagaagcgccagcaccaactgcctgagacccgacaccagcctgcacagccccgagagagagagacacagcagaaagagcgagagaagcagcatccagaagcagaccagaaagggcaccgccagcgacgccgagagaatgcacagacagagaagccccacccagagcccccccgccgacaccagcttcagcagcagaagaggcagacagctgccccaggtgcccgtgagaagcggcagcatcgagcaggagagcggccacaagaagctgaagagcaccatccagagaagcaccgagaccggcatggccgccgagatgagaaagatggtgagacagcccagcagagagagcaccgacggcagcatcaacagctacagcagcgagggcaacctgatcttccccggcgtgagactgggcgccgacagccagttcagcgacttcctggacggcctgggccccgcccagctggtgggcagacagaccctggccacccccgccatgggcgacatccagatcggcatggaggacaagaagggccagctggaggtggaggtgatcagagccagaagcctgacccagaagcccggcagcaagagcacccccgccccctacgtgaaggtgtacctgctggagaacggcgcctgcatcgccaagaagaagaccagaatcgccagaaagaccctggaccccctgtaccagcagagcctggtgttcgacgagagcccccagggcaaggtgctgcaggtgatcgtgtggggcgactacggcagaatggaccacaagtgcttcatgggcgtggcccagatcctgctggaggagctggacctgagcagcatggtgatcggctggtacaagctgttcccccccagcagcctggtggaccccaccctgacccccctgaccagaagagccagccagagcagcctggagagcagcaccggccccccctgcatcagaagctag

SEQ ID NO: 96624 - DNA, 2454 bp, synthetic construct
  misc_feature 1..2454: note = Description of Artificial Sequence: Synthetic coding sequence
  source 1..2454: mol_type = other DNA
atgtgcgcccccggcatccacgtgagcagcgagggctgggaggaggtgagaagcgtggacagcgaggagggcaccatcgaggccagaagagccgtggccggcgacctggactactactggctggaccccgccacctggcacagcagagagaccagccccatcagcagccaccccgtgacctggcagcccagcaaggagggcgacagactgatcggcagagtgatcctgaacaagagaaccaccatgcccaaggacagcggcgccctgctgggcctgaaggtggtgggcggcaagatgaccgacctgggcagactgggcgccttcatcaccaaggtgaagaagggcagcctggccgacgtggtgggccacctgagagccggcgacgaggtgctggagtggaacggcaagcccctgcccggcgccaccaacgaggaggtgtacaacatcatcctggagagcaagagcgagccccaggtggagatcatcgtgagcagacccatcggcgacatccccagaatccccgagagcagccacccccccctggagagcagcagcagcagcttcgagagccagaagatggagagacccagcatcagcgtgatcagccccaccagccccggcgccctgaaggacgccccccaggtgctgcccggccagctgagcgtgaagctgtggtacgacaaggtgggccaccagctgatcgtgaacgtgctgcaggccaccgacctgcccgccagagtggacggcagacccagaaacccctacgtgaagatgtacttcctgcccgacagaagcgacaagagcaagagaagaaccaagaccgtgaagaagatcctggagcccaagtggaaccagaccttcgtgtacagccacgtgcacagaagagacttcagagagagaatgctggagatcaccgtgtgggaccagcccagagtgcaggaggaggagagcgagttcctgggcgagatcctgatcgagctggagaccgccctgctggacgacgagccccactggtacaagctgcagacccacgacgagagcagcctgcccctgccccagcccagccccttcatgcccagaagacacatccacggcgagagcagcagcaagaagctgcagagaagccagagaatcagcgacagcgacatcagcgactacgaggtggacgacggcatcggcgtggtgccccccgtgggctacagaagcagcgccagagagagcaagagcaccaccctgaccgtgcccgagcagcagagaaccacccaccacagaagcagaagcgtgagcccccacagaggcaacgaccagggcaagcccagaagcagactgcccaacgtgcccctgcagagaagcctggacgagatccaccccaccagaagaagcagaagccccaccagacaccacgacgccagcagaagccccgtggaccacagaaccagagacgtggacagccagtacctgagcgagcaggacagcgagctgctgatgctgcccagagccaagagaggcagaagcgccgagtgcctgcacaccaccagcgagctgcagcccttcctggacagagccagaagcgccagcaccaactgcctgagacccgacaccagcctgcacagccccgagagagagagaatgcacagacagagaagccccacccagagcccccccgccgacaccagcttcagcagcagaagaggcagacagctgccccaggtgcccgtgagaagcggcagcatcgagcaggagagcggccacaagaagctgaagagcaccatccagagaagcaccgagaccggcatggccgccgagatgagaaagatggtgagacagcccagcagagagagcaccgacggcagcatcaacagctacagcagcgagggcaacctgatcttccccggcgtgagactgggcgccgacagccagttcagcgacttcctggacggcctgggccccgcccagctggtgggcagacagaccctggccacccccgccatgggcgacatccagatcggcatggaggacaagaagggccagctggaggtggaggtgatcagagccagaagcctgacccagaagcccggcagcaagagcacccccgccccctacgtgaaggtgtacctgctggagaacggcgcctgcatcgccaagaagaagaccagaatcgccagaaagaccctggaccccctgtaccagcagagcctggtgttcgacgagagcccccagggcaaggtgctgcaggtgatcgtgtggggcgactacggcagaatggaccacaagtgcttcatgggcgtggcccagatcctgctggaggagctggacctgagcagcatggtgatcggctggtacaagctgttcccccccagcagcctggtggaccccaccctgacccccctgaccagaagagccagccagagcagcctggagagcagcaccggccccccctgcatcagaagctag

SEQ ID NO: 96625 - DNA, 3567 bp, synthetic construct
  misc_feature 1..3567: note = Description of Artificial Sequence: Synthetic coding sequence
  source 1..3567: mol_type = other DNA
atgcagttcgagaccctgagacaggtgtgcaacagcgtgctgagccacttccacggcgtgttcagcagcccccccaacatcctgcagaacgagctgttcggccagaccctgaacaacgccagaaagagaagccccagcgtgagcagagaccagaacagaagatacgaccagagagaggagagagaggagtacagccagtacgccaccagcgacaccgccatgcccagaagccccagcgactacgccgacagaagaagccagcacgagccccagttctacgaggacagcgaccacctgagctacagagacagcaacagaagaagccacagacacagcaaggagtacatcgtggacgacgaggacgtggagagcagagacgagtacgagagacagagaagagaggaggagtaccagagcagatacagaagcgaccccaacctggccagataccccgtgaagccccagccctacgaggagcagatgagaatccacgccgaggtgagcagagccagacacgagagaagacacagcgacgtgagcctggccaacgccgacctggaggacagcagaatcagcatgctgagaatggacagacccagcagacagagaagcatcagcgagagaagagccgccatggagaaccagagaagctacagcatggagagaaccagagaggcccagggccccagcagctacgcccagagaaccaccaaccacagcccccccacccccagaagaagccccctgcccatcgacagacccgacctgagaagaaccgacagcctgagaaagcagcaccacctggaccccagcagcgccgtgagaaagaccaagagagagaagatggagaccatgctgagaaacgacagcctgagcagcgaccagagcgagagcgtgagaccccccccccccaagccccacaagagcaagaagggcggcaagatgagacagatcagcctgagcagcagcgaggaggagctggccagcacccccgagtacaccagctgcgacgacgtggagatcgagagcgagagcgtgagcgagaagggcgacagccagaagggcaagagaaagaccagcgagcaggccgtgctgagcgacagcaacaccagaagcgagagacagaaggagatgatgtacttcggcggccacagcctggaggaggacctggagtggagcgagccccagatcaaggacagcggcgtggacacctgcagcagcaccaccctgaacgaggagcacagccacagcgacaagcaccccgtgacctggcagcccagcaaggacggcgacagactgatcggcagaatcctgctgaacaagagactgaaggacggcagcgtgcccagagacagcggcgccatgctgggcctgaaggtggtgggcggcaagatgaccgagagcggcagactgtgcgccttcatcaccaaggtgaagaagggcagcctggccgacaccgtgggccacctgagacccggcgacgaggtgctggagtggaacggcagactgctgcagggcgccaccttcgaggaggtgtacaacatcatcctggagagcaagcccgagccccaggtggagctggtggtgagcagacccatcggcgacatccccagaatccccgacagcacccacgcccagctggagagcagcagcagcagcttcgagagccagaagatggacagacccagcatcagcgtgaccagccccatgagccccggcatgctgagagacgtgccccagttcctgagcggccagctgagcatcaagctgtggttcgacaaggtgggccaccagctgatcgtgaccatcctgggcgccaaggacctgcccagcagagaggacggcagacccagaaacccctacgtgaagatctacttcctgcccgacagaagcgacaagaacaagagaagaaccaagaccgtgaagaagaccctggagcccaagtggaaccagaccttcatctacagccccgtgcacagaagagagttcagagagagaatgctggagatcaccctgtgggaccaggccagagtgagagaggaggagagcgagttcctgggcgagatcctgatcgagctggagaccgccctgctggacgacgagccccactggtacaagctgcagacccacgacgtgagcagcctgcccctgccccaccccagcccctacatgcccagaagacagctgcacggcgagagccccaccagaagactgcagagaagcaagagaatcagcgacagcgaggtgagcgactacgactgcgacgacggcatcggcgtggtgagcgactacagacacgacggcagagacctgcagagcagcaccctgagcgtgcccgagcaggtgatgagcagcaaccactgcagccccagcggcagcccccacagagtggacgtgatcggcagaaccagaagctggagccccagcgtgccccccccccagagcagaaacgtggagcagggcctgagaggcaccagaaccatgaccggccactacaacaccatcagcagaatggacagacacagagtgatggacgaccactacagccccgacagagacagagactgcgaggccgccgacagacagccctaccacagaagcagaagcaccgagcagagacccctgctggagagaaccaccaccagaagcagaagcaccgagagacccgacaccaacctgatgagaagcatgcccagcctgatgaccggcagaagcgccccccccagccccgccctgagcagaagccaccccagaaccggcagcgtgcagaccagccccagcagcacccccgtggccggcagaagaggcagacagctgccccagctgccccccaagggcaccctggacagaaaggccggcggcaagaagctgagaagcaccgtgcagagaagcaccgagaccggcctggccgtggagatgagaaactggatgaccagacaggccagcagagagagcaccgacggcagcatgaacagctacagcagcgagggcaacctgatcttccccggcgtgagactggccagcgacagccagttcagcgacttcctggacggcctgggccccgcccagctggtgggcagacagaccctggccacccccgccatgggcgacatccaggtgggcatgatggacaagaagggccagctggaggtggagatcatcagagccagaggcctggtggtgaagcccggcagcaagaccctgcccgccccctacgtgaaggtgtacctgctggacaacggcgtgtgcatcgccaagaagaagaccaaggtggccagaaagaccctggagcccctgtaccagcagctgctgagcttcgaggagagcccccagggcaaggtgctgcagatcatcgtgtggggcgactacggcagaatggaccacaagagcttcatgggcgtggcccagatcctgctggacgagctggagctgagcaacatggtgatcggctggttcaagctgttcccccccagcagcctggtggaccccaccctggcccccctgaccagaagagccagccagagcagcctggagagcagcaccggccccagctacagcagaagctag

SEQ ID NO: 96626 - DNA, 4161 bp, synthetic construct
  misc_feature 1..4161: note = Description of Artificial Sequence: Synthetic coding sequence
  source 1..4161: mol_type = other DNA
atgagcgcccccgtgggccccagaggcagactggcccccatccccgccgccagccagccccccctgcagcccgagatgcccgacctgagccacctgaccgaggaggagagaaagatcatcctggccgtgatggacagacagaagaaggaggtgaaggaggagcacaagccccagctgacccagtggttccccttcagcggcatcaccgagctggtgaacaacgtgctgcagccccagcagaagcagcagaacgagaaggagccccagaccaagctgcaccagcagttcgagatgtacaaggagcaggtgaagaagatgggcgaggagagccagcagcagcaggagcagaagggcgacgcccccacctgcggcatctgccacaagaccaagttcgccgacggctgcggccacaactgcagctactgccagaccaagttctgcgccagatgcggcggcagagtgagcctgagaagcaacaaggtgatgtgggtgtgcaacctgtgcagaaagcagcaggagatcctgaccaagagcggcgcctggttctacaacagcggcagcaacaccccccagcagcccgaccagaaggtgctgagaggcctgagaaacgaggaggccccccaggagaagaagcccaagctgcacgagcagacccagttccagggccccagcggcgacctgagcgtgcccgccgtggagaagagcagaagccacggcctgaccagacagcacagcatcaagaacggcagcggcgtgaagcaccacatcgccagcgacatcgccagcgacagaaagagaagccccagcgtgagcagagaccagaacagaagatacgaccagagagaggagagagaggagtacagccagtacgccaccagcgacaccgccatgcccagaagccccagcgactacgccgacagaagaagccagcacgagccccagttctacgaggacagcgaccacctgagctacagagacagcaacagaagaagccacagacacagcaaggagtacatcgtggacgacgaggacgtggagagcagagacgagtacgagagacagagaagagaggaggagtaccagagcagatacagaagcgaccccaacctggccagataccccgtgaagccccagccctacgaggagcagatgagaatccacgccgaggtgagcagagccagacacgagagaagacacagcgacgtgagcctggccaacgccgacctggaggacagcagaatcagcatgctgagaatggacagacccagcagacagagaagcatcagcgagagaagagccgccatggagaaccagagaagctacagcatggagagaaccagagaggcccagggccccagcagctacgcccagagaaccaccaaccacagcccccccacccccagaagaagccccctgcccatcgacagacccgacctgagaagaaccgacagcctgagaaagcagcaccacctggaccccagcagcgccgtgagaaagaccaagagagagaagatggagaccatgctgagaaacgacagcctgagcagcgaccagagcgagagcgtgagaccccccccccccaagccccacaagagcaagaagggcggcaagatgagacagatcagcctgagcagcagcgaggaggagctggccagcacccccgagtacaccagctgcgacgacgtggagatcgagagcgagagcgtgagcgagaagggcgacatggactacaactggctggaccacaccagctggcacagcagcgaggccagccccatgagcctgcaccccgtgacctggcagcccagcaaggacggcgacagactgatcggcagaatcctgctgaacaagagactgaaggacggcagcgtgcccagagacagcggcgccatgctgggcctgaaggtggtgggcggcaagatgaccgagagcggcagactgtgcgccttcatcaccaaggtgaagaagggcagcctggccgacaccgtgggccacctgagacccggcgacgaggtgctggagtggaacggcagactgctgcagggcgccaccttcgaggaggtgtacaacatcatcctggagagcaagcccgagccccaggtggagctggtggtgagcagacccatcggcgacatccccagaatccccgacagcacccacgcccagctggagagcagcagcagcagcttcgagagccagaagatggacagacccagcatcagcgtgaccagccccatgagccccggcatgctgagagacgtgccccagttcctgagcggccagctgagcatcaagctgtggttcgacaaggtgggccaccagctgatcgtgaccatcctgggcgccaaggacctgcccagcagagaggacggcagacccagaaacccctacgtgaagatctacttcctgcccgacagaagcgacaagaacaagagaagaaccaagaccgtgaagaagaccctggagcccaagtggaaccagaccttcatctacagccccgtgcacagaagagagttcagagagagaatgctggagatcaccctgtgggaccaggccagagtgagagaggaggagagcgagttcctgggcgagatcctgatcgagctggagaccgccctgctggacgacgagccccactggtacaagctgcagacccacgacgtgagcagcctgcccctgccccaccccagcccctacatgcccagaagacagctgcacggcgagagccccaccagaagactgcagagaagcaagagaatcagcgacagcgaggtgagcgactacgactgcgacgacggcatcggcgtggtgagcgactacagacacgacggcagagacctgcagagcagcaccctgagcgtgcccgagcaggtgatgagcagcaaccactgcagccccagcggcagcccccacagagtggacgtgatcggcagaaccagaagctggagccccagcgtgccccccccccagagcagaaacgtggagcagggcctgagaggcaccagaaccatgaccggccactacaacaccatcagcagaatggacagacacagagtgatggacgaccactacagccccgacagagacagccacttcctgaccctgcccagaagcagatacagccagaccatcgaccaccaccacagagacggcagagactgcgaggccgccgacagacagccctaccacagaagcagaagcaccgagcagagacccctgctggagagaaccaccaccagaagcagaagcaccgagagacccgacaccaacctgatgagaagcatgcccagcctgatgaccggcagaagcgccccccccagccccgccctgagcagaagccaccccagaaccggcagcgtgcagaccagccccagcagcacccccgtggccggcagaagaggcagacagctgccccagctgccccccaagggcaccctggacagaaaggccggcggcaagaagctgagaagcaccgtgcagagaagcaccgagaccggcctggccgtggagatgagaaactggatgaccagacaggccagcagagagagcaccgacggcagcatgaacagctacagcagcgagggcaacctgatcttccccggcgtgagactggccagcgacagccagttcagcgacttcctggacggcctgggccccgcccagctggtgggcagacagaccctggccacccccgccatgggcgacatccaggtgggcatgatggacaagaagggccagctggaggtggagatcatcagagccagaggcctggtggtgaagcccggcagcaagaccctgcccgccccctacgtgaaggtgtacctgctggacaacggcgtgtgcatcgccaagaagaagaccaaggtggccagaaagaccctggagcccctgtaccagcagctgctgagcttcgaggagagcccccagggcaaggtgctgcagatcatcgtgtggggcgactacggcagaatggaccacaagagcttcatgggcgtggcccagatcctgctggacgagctggagctgagcaacatggtgatcggctggttcaagctgttcccccccagcagcctggtggaccccaccctggcccccctgaccagaagagccagccagagcagcctggagagcagcaccggccccagctacagcagaagctag

SEQ ID NO: 96627 - DNA, 858 bp, synthetic construct
  misc_feature 1..858: note = Description of Artificial Sequence: Synthetic coding sequence
  source 1..858: mol_type = other DNA
atgggcagacagggcctgggcggcgccagcgccgccggcagaagcatgcagagaagccagagcagaagcagcctgagcgccagcttcgaggccctggccggctacttcccctgcatgaacagcctggaggaggaggagggcgaggccggcggcaagaagctgagaagcaccgtgcagagaagcaccgagaccggcctggccgtggagatgagaaactggatgaccagacaggccagcagagagagcaccgacggcagcatgaacagctacagcagcgagggcaacctgatcttccccggcgtgagactggccagcgacagccagttcagcgacttcctggacggcctgggccccgcccagctggtgggcagacagaccctggccacccccgccatgggcgacatccaggtgggcatgatggacaagaagggccagctggaggtggagatcatcagagccagaggcctggtggtgaagcccggcagcaagaccctgcccgccccctacgtgaaggtgtacctgctggacaacggcgtgtgcatcgccaagaagaagaccaaggtggccagaaagaccctggagcccctgtaccagcagctgctgagcttcgaggagagcccccagggcaaggtgctgcagatcatcgtgtggggcgactacggcagaatggaccacaagagcttcatgggcgtggcccagatcctgctggacgagctggagctgagcaacatggtgatcggctggttcaagctgttcccccccagcagcctggtggaccccaccctggcccccctgaccagaagagccagccagagcagcctggagagcagcaccggccccagctacagcagaagctag

SEQ ID NO: 96628 - DNA, 384 bp, synthetic construct
  misc_feature 1..384: note = Description of Artificial Sequence: Synthetic coding sequence
  source 1..384: mol_type = other DNA
atgaccgagagcggcagactgtgcgccttcatcaccaaggtgaagaagggcagcctggccgacaccgtgggccacctgagacccggcgacgaggtgctggagtggaacggcagactgctgcagggcgccaccttcgaggaggtgtacaacatcatcctggagagcaagcccgagccccaggtggagctggtggtgagcagacccatcggcgacatccccagaatccccgacagcacccacgcccagctggagagcagcctgcccggcctggcctggtggctgaccagagtgatccccgccctgtgggaggccgaggccggcggcagcagaggccaggagatcgagaccatcctggccaacaccgtgaagcccagactgtactag

SEQ ID NO: 96629 - DNA, 4236 bp, synthetic construct
  misc_feature 1..4236: note = Description of Artificial Sequence: Synthetic coding sequence
  source 1..4236: mol_type = other DNA
atgagcgcccccgtgggccccagaggcagactggcccccatccccgccgccagccagccccccctgcagcccgagatgcccgacctgagccacctgaccgaggaggagagaaagatcatcctggccgtgatggacagacagaagaaggaggtgaaggaggagcacaagccccagctgacccagtggttccccttcagcggcatcaccgagctggtgaacaacgtgctgcagccccagcagaagcagcagaacgagaaggagccccagaccaagctgcaccagcagttcgagatgtacaaggagcaggtgaagaagatgggcgaggagagccagcagcagcaggagcagaagggcgacgcccccacctgcggcatctgccacaagaccaagttcgccgacggctgcggccacaactgcagctactgccagaccaagttctgcgccagatgcggcggcagagtgagcctgagaagcaacaaggtgatgtgggtgtgcaacctgtgcagaaagcagcaggagatcctgaccaagagcggcgcctggttctacaacagcggcagcaacaccccccagcagcccgaccagaaggtgctgagaggcctgagaaacgaggaggccccccaggagaagaagcccaagctgcacgagcagacccagttccagggccccagcggcgacctgagcgtgcccgccgtggagaagagcagaagccacggcctgaccagacagcacagcatcaagaacggcagcggcgtgaagcaccacatcgccagcgacatcgccagcgacagaaagagaagccccagcgtgagcagagaccagaacagaagatacgaccagagagaggagagagaggagtacagccagtacgccaccagcgacaccgccatgcccagaagccccagcgactacgccgacagaagaagccagcacgagccccagttctacgaggacagcgaccacctgagctacagagacagcaacagaagaagccacagacacagcaaggagtacatcgtggacgacgaggacgtggagagcagagacgagtacgagagacagagaagagaggaggagtaccagagcagatacagaagcgaccccaacctggccagataccccgtgaagccccagccctacgaggagcagatgagaatccacgccgaggtgagcagagccagacacgagagaagacacagcgacgtgagcctggccaacgccgacctggaggacagcagaatcagcatgctgagaatggacagacccagcagacagagaagcatcagcgagagaagagccgccatggagaaccagagaagctacagcatggagagaaccagagaggcccagggccccagcagctacgcccagagaaccaccaaccacagcccccccacccccagaagaagccccctgcccatcgacagacccgacctgagaagaaccgacagcctgagaaagcagcaccacctggaccccagcagcgccgtgagaaagaccaagagagagaagatggagaccatgctgagaaacgacagcctgagcagcgaccagagcgagagcgtgagaccccccccccccaagccccacaagagcaagaagggcggcaagatgagacagatcagcctgagcagcagcgaggaggagctggccagcacccccgagtacaccagctgcgacgacgtggagatcgagagcgagagcgtgagcgagaagggcgacagccagaagggcaagagaaagaccagcgagcaggccgtgctgagcgacagcaacaccagaagcgagagacagaaggagatgatgtacttcggcggccacagcctggaggaggacctggagtggagcgagccccagatcaaggacagcggcgtggacacctgcagcagcaccaccctgaacgaggagcacagccacagcgacaagcaccccgtgacctggcagcccagcaaggacggcgacagactgatcggcagaatcctgctgaacaagagactgaaggacggcagcgtgcccagagacagcggcgccatgctgggcctgaaggtggtgggcggcaagatgaccgagagcggcagactgtgcgccttcatcaccaaggtgaagaagggcagcctggccgacaccgtgggccacctgagacccggcgacgaggtgctggagtggaacggcagactgctgcagggcgccaccttcgaggaggtgtacaacatcatcctggagagcaagcccgagccccaggtggagctggtggtgagcagacccatcggcgacatccccagaatccccgacagcacccacgcccagctggagagcagcagcagcagcttcgagagccagaagatggacagacccagcatcagcgtgaccagccccatgagccccggcatgctgagagacgtgccccagttcctgagcggccagctgagcatcaagctgtggttcgacaaggtgggccaccagctgatcgtgaccatcctgggcgccaaggacctgcccagcagagaggacggcagacccagaaacccctacgtgaagatctacttcctgcccgacagaagcgacaagaacaagagaagaaccaagaccgtgaagaagaccctggagcccaagtggaaccagaccttcatctacagccccgtgcacagaagagagttcagagagagaatgctggagatcaccctgtgggaccaggccagagtgagagaggaggagagcgagttcctgggcgagatcctgatcgagctggagaccgccctgctggacgacgagccccactggtacaagctgcagacccacgacgtgagcagcctgcccctgccccaccccagcccctacatgcccagaagacagctgcacggcgagagccccaccagaagactgcagagaagcaagagaatcagcgacagcgaggtgagcgactacgactgcgacgacggcatcggcgtggtgagcgactacagacacgacggcagagacctgcagagcagcaccctgagcgtgcccgagcaggtgatgagcagcaaccactgcagccccagcggcagcccccacagagtggacgtgatcggcagaaccagaagctggagccccagcgtgccccccccccagagcagaaacgtggagcagggcctgagaggcaccagaaccatgaccggccactacaacaccatcagcagaatggacagacacagagtgatggacgaccactacagccccgacagagacagagactgcgaggccgccgacagacagccctaccacagaagcagaagcaccgagcagagacccctgctggagagaaccaccaccagaagcagaagcaccgagagacccgacaccaacctgatgagaagcatgcccagcctgatgaccggcagaagcgccccccccagccccgccctgagcagaagccaccccagaaccggcagcgtgcagaccagccccagcagcacccccgtggccggcagaagaggcagacagctgccccagctgccccccaagggcaccctggacagaaaggccggcggcaagaagctgagaagcaccgtgcagagaagcaccgagaccggcctggccgtggagatgagaaactggatgaccagacaggccagcagagagagcaccgacggcagcatgaacagctacagcagcgagggcaacctgatcttccccggcgtgagactggccagcgacagccagttcagcgacttcctggacggcctgggccccgcccagctggtgggcagacagaccctggccacccccgccatgggcgacatccaggtgggcatgatggacaagaagggccagctggaggtggagatcatcagagccagaggcctggtggtgaagcccggcagcaagaccctgcccgccccctacgtgaaggtgtacctgctggacaacggcgtgtgcatcgccaagaagaagaccaaggtggccagaaagaccctggagcccctgtaccagcagctgctgagcttcgaggagagcccccagggcaaggtgctgcagatcatcgtgtggggcgactacggcagaatggaccacaagagcttcatgggcgtggcccagatcctgctggacgagctggagctgagcaacatggtgatcggctggttcaagctgttcccccccagcagcctggtggaccccaccctggcccccctgaccagaagagccagccagagcagcctggagagcagcaccggccccagctacagcagaagctag

SEQ ID NO: 96630 - DNA, 4050 bp, synthetic construct
  misc_feature 1..4050: note = Description of Artificial Sequence: Synthetic coding sequence
  source 1..4050: mol_type = other DNA
atgagcgcccccgtgggccccagaggcagactggcccccatccccgccgccagccagccccccctgcagcccgagatgcccgacctgagccacctgaccgaggaggagagaaagatcatcctggccgtgatggacagacagaagaaggaggaggagaaggagcagagcgtgctgaagaagctgcaccagcagttcgagatgtacaaggagcaggtgaagaagatgggcgaggagagccagcagcagcaggagcagaagggcgacgcccccacctgcggcatctgccacaagaccaagttcgccgacggctgcggccacaactgcagctactgccagaccaagttctgcgccagatgcggcggcagagtgagcctgagaagcaacaaggtgatgtgggtgtgcaacctgtgcagaaagcagcaggagatcctgaccaagagcggcgcctggttctacaacagcggcagcaacaccccccagcagcccgaccagaaggtgctgagaggcctgagaaacgaggaggccccccaggagaagaagcccaagctgcacgagcagacccagttccagggccccagcggcgacctgagcgtgcccgccgtggagaagagcagaagccacggcctgaccagacagcacagcatcaagaacggcagcggcgtgaagcaccacatcgccagcgacatcgccagcgacagaaagagaagccccagcgtgagcagagaccagaacagaagatacgaccagagagaggagagagaggagtacagccagtacgccaccagcgacaccgccatgcccagaagccccagcgactacgccgacagaagaagccagcacgagccccagttctacgaggacagcgaccacctgagctacagagacagcaacagaagaagccacagacacagcaaggagtacatcgtggacgacgaggacgtggagagcagagacgagtacgagagacagagaagagaggaggagtaccagagcagatacagaagcgaccccaacctggccagataccccgtgaagccccagccctacgaggagcagatgagaatccacgccgaggtgagcagagccagacacgagagaagacacagcgacgtgagcctggccaacgccgacctggaggacagcagaatcagcatgctgagaatggacagacccagcagacagagaagcatcagcgagagaagagccgccatggagaaccagagaagctacagcatggagagaaccagagaggcccagggccccagcagctacgcccagagaaccaccaaccacagcccccccacccccagaagaagccccctgcccatcgacagacccgacctgagaagaaccgacagcctgagaaagcagcaccacctggaccccagcagcgccgtgagaaagaccaagagagagaagatggagaccatgctgagaaacgacagcctgagcagcgaccagagcgagagcgtgagaccccccccccccaagccccacaagagcaagaagggcggcaagatgagacagatcagcctgagcagcagcgaggaggagctggccagcacccccgagtacaccagctgcgacgacgtggagatcgagagcgagagcgtgagcgagaagggcgacatggactacaactggctggaccacaccagctggcacagcagcgaggccagccccatgagcctgcaccccgtgacctggcagcccagcaaggacggcgacagactgatcggcagaatcctgctgaacaagagactgaaggacggcagcgtgcccagagacagcggcgccatgctgggcctgaaggtggtgggcggcaagatgaccgagagcggcagactgtgcgccttcatcaccaaggtgaagaagggcagcctggccgacaccgtgggccacctgagacccggcgacgaggtgctggagtggaacggcagactgctgcagggcgccaccttcgaggaggtgtacaacatcatcctggagagcaagcccgagccccaggtggagctggtggtgagcagacccatcggcgacatccccagaatccccgacagcacccacgcccagctggagagcagcagcagcagcttcgagagccagaagatggacagacccagcatcagcgtgaccagccccatgagccccggcatgctgagagacgtgccccagttcctgagcggccagctgagcagccagagcctgagcagaagaaccacccccttcgtgcccagagtgcagatcaagctgtggttcgacaaggtgggccaccagctgatcgtgaccatcctgggcgccaaggacctgcccagcagagaggacggcagacccagaaacccctacgtgaagatctacttcctgcccgacagaagcgacaagaacaagagaagaaccaagaccgtgaagaagaccctggagcccaagtggaaccagaccttcatctacagccccgtgcacagaagagagttcagagagagaatgctggagatcaccctgtgggaccaggccagagtgagagaggaggagagcgagttcctgggcgagatcctgatcgagctggagaccgccctgctggacgacgagccccactggtacaagctgcagacccacgacgtgagcagcctgcccctgccccaccccagcccctacatgcccagaagacagctgcacggcgagagccccaccagaagactgcagagaagcaagagaatcagcgacagcgaggtgagcgactacgactgcgacgacggcatcggcgtggtgagcgactacagacacgacggcagagacctgcagagcagcaccctgagcgtgcccgagcaggtgatgagcagcaaccactgcagccccagcggcagcccccacagagtggacgtgatcggcagaaccagaagctggagccccagcgtgccccccccccagagcagaaacgtggagcagggcctgagaggcaccagaaccatgaccggccactacaacaccatcagcagaatggacagacacagagtgatggacgaccactacagccccgacagagacagagactgcgaggccgccgacagacagccctaccacagaagcagaagcaccgagcagagacccctgctggagagaaccaccaccagaagcagaagcaccgagagacccgacaccaacctgatgagaagcatgcccagcctgatgaccggcagaagcgccccccccagccccgccctgagcagaagccaccccagaaccggcagcgtgcagaccagccccagcagcacccccgtggccggcagaagaggcagacagctgccccagctgccccccaagggcaccctggacagaaaggccggcggcaagaagctgagaagcaccgtgcagagaagcaccgagaccggcctggccgtggagatgagaaactggatgaccagacaggccagcagagagagcaccgacggcagcatgaacagctacagcagcgagggcaacctgatcttccccggcgtgagactggccagcgacagccagttcagcgacttcctggacggcctgggccccgcccagctggtgggcagacagaccctggccacccccgccatgggcgacatccaggtgggcatgatggacaagaagggccagctggaggtggagatcatcagagccagaggcctggtggtgaagcccggcagcaagaccctgcccgccccctacgtgaaggtgtacctgctggacaacggcgtgtgcatcgccaagaagaagaccaaggtggccagaaagaccctggagcccctgtaccagcagctgctgagcttcgaggagagcccccagggcaaggtgctgcagatcatcgtgtggggcgactacggcagaatggaccacaagagcttcatgggcgtggcccagatcctgctggacgagctggagctgagcaacatggtgatcggctggttcaagctgttcccccccagcagcctggtggaccccaccctggcccccctgaccagaagagccagccagagcagcctggagagcagcaccggccccagctacagcagaagctag

SEQ ID NO: 96631 - DNA, 3492 bp, synthetic construct
  misc_feature 1..3492: note = Description of Artificial Sequence: Synthetic coding sequence
  source 1..3492: mol_type = other DNA
atgcagttcgagaccctgagacaggtgtgcaacagcgtgctgagccacttccacggcgtgttcagcagcccccccaacatcctgcagaacgagctgttcggccagaccctgaacaacgccagaaagagaagccccagcgtgagcagagaccagaacagaagatacgaccagagagaggagagagaggagtacagccagtacgccaccagcgacaccgccatgcccagaagccccagcgactacgccgacagaagaagccagcacgagccccagttctacgaggacagcgaccacctgagctacagagacagcaacagaagaagccacagacacagcaaggagtacatcgtggacgacgaggacgtggagagcagagacgagtacgagagacagagaagagaggaggagtaccagagcagatacagaagcgaccccaacctggccagataccccgtgaagccccagccctacgaggagcagatgagaatccacgccgaggtgagcagagccagacacgagagaagacacagcgacgtgagcctggccaacgccgacctggaggacagcagaatcagcatgctgagaatggacagacccagcagacagagaagcatcagcgagagaagagccgccatggagaaccagagaagctacagcatggagagaaccagagaggcccagggccccagcagctacgcccagagaaccaccaaccacagcccccccacccccagaagaagccccctgcccatcgacagacccgacctgagaagaaccgacagcctgagaaagcagcaccacctggaccccagcagcgccgtgagaaagaccaagagagagaagatggagaccatgctgagaaacgacagcctgagcagcgaccagagcgagagcgtgagaccccccccccccaagccccacaagagcaagaagggcggcaagatgagacagatcagcctgagcagcagcgaggaggagctggccagcacccccgagtacaccagctgcgacgacgtggagatcgagagcgagagcgtgagcgagaagggcgacatggactacaactggctggaccacaccagctggcacagcagcgaggccagccccatgagcctgcaccccgtgacctggcagcccagcaaggacggcgacagactgatcggcagaatcctgctgaacaagagactgaaggacggcagcgtgcccagagacagcggcgccatgctgggcctgaaggtggtgggcggcaagatgaccgagagcggcagactgtgcgccttcatcaccaaggtgaagaagggcagcctggccgacaccgtgggccacctgagacccggcgacgaggtgctggagtggaacggcagactgctgcagggcgccaccttcgaggaggtgtacaacatcatcctggagagcaagcccgagccccaggtggagctggtggtgagcagacccatcggcgacatccccagaatccccgacagcacccacgcccagctggagagcagcagcagcagcttcgagagccagaagatggacagacccagcatcagcgtgaccagccccatgagccccggcatgctgagagacgtgccccagttcctgagcggccagctgagcatcaagctgtggttcgacaaggtgggccaccagctgatcgtgaccatcctgggcgccaaggacctgcccagcagagaggacggcagacccagaaacccctacgtgaagatctacttcctgcccgacagaagcgacaagaacaagagaagaaccaagaccgtgaagaagaccctggagcccaagtggaaccagaccttcatctacagccccgtgcacagaagagagttcagagagagaatgctggagatcaccctgtgggaccaggccagagtgagagaggaggagagcgagttcctgggcgagatcctgatcgagctggagaccgccctgctggacgacgagccccactggtacaagctgcagacccacgacgtgagcagcctgcccctgccccaccccagcccctacatgcccagaagacagctgcacggcgagagccccaccagaagactgcagagaagcaagagaatcagcgacagcgaggtgagcgactacgactgcgacgacggcatcggcgtggtgagcgactacagacacgacggcagagacctgcagagcagcaccctgagcgtgcccgagcaggtgatgagcagcaaccactgcagccccagcggcagcccccacagagtggacgtgatcggcagaaccagaagctggagccccagcgtgccccccccccagagcagaaacgtggagcagggcctgagaggcaccagaaccatgaccggccactacaacaccatcagcagaatggacagacacagagtgatggacgaccactacagccccgacagagacagccacttcctgaccctgcccagaagcagatacagccagaccatcgaccaccaccacagagacggcagagactgcgaggccgccgacagacagccctaccacagaagcagaagcaccgagcagagacccctgctggagagaaccaccaccagaagcagaagcaccgagagacccgacaccaacctgatgagaagcatgcccagcctgatgaccggcagaagcgccccccccagccccgccctgagcagaagccaccccagaaccggcagcgtgcagaccagccccagcagcacccccgtggccggcagaagaggcagacagctgccccagctgccccccaagggcaccctggacagaaaggccggcggcaagaagctgagaagcaccgtgcagagaagcaccgagaccggcctggccgtggagatgagaaactggatgaccagacaggccagcagagagagcaccgacggcagcatgaacagctacagcagcgagggcaacctgatcttccccggcgtgagactggccagcgacagccagttcagcgacttcctggacggcctgggccccgcccagctggtgggcagacagaccctggccacccccgccatgggcgacatccaggtgggcatgatggacaagaagggccagctggaggtggagatcatcagagccagaggcctggtggtgaagcccggcagcaagaccctgcccgccccctacgtgaaggtgtacctgctggacaacggcgtgtgcatcgccaagaagaagaccaaggtggccagaaagaccctggagcccctgtaccagcagctgctgagcttcgaggagagcccccagggcaaggtgctgcagatcatcgtgtggggcgactacggcagaatggaccacaagagcttcatgggcgtggcccagatcctgctggacgagctggagctgagcaacatggtgatcggctggttcaagctgttcccccccagcagcctggtggaccccaccctggcccccctgaccagaagagccagccagagcagcctggagagcagcaccggccccagctacagcagaagctag

SEQ ID NO: 96632 - DNA, 927 bp, synthetic construct
  misc_feature 1..927: note = Description of Artificial Sequence: Synthetic coding sequence
  source 1..927: mol_type = other DNA
atgttcaacggcgagcccggccccgccagcagcggcgccagcagaaacgtggtgagaagcagcagcatcagcggcgagatctgcggcagccagcaggccggcggcggcgccggcaccaccaccgccaagaagagaagaagcagcctgggcgccaagatggtggccatcgtgggcctgacccagtggagcaagagcaccctgcagctgccccagcccgagggcgccaccaagaagctgagaagcaacatcagaagaagcaccgagaccggcatcgccgtggagatgagaagcagagtgaccagacagggcagcagagagagcaccgacggcagcaccaacagcaacagcagcgacggcaccttcatcttccccaccaccagactgggcgccgagagccagttcagcgacttcctggacggcctgggccccgcccagatcgtgggcagacagaccctggccaccccccccatgggcgacgtgcacatcgccatcatggacagaagcggccagctggaggtggaggtgatcgaggccagaggcctgacccccaagcccggcagcaagagcctgcccgccacctacatcaaggtgtacctgctggagaacggcgcctgcctggccaagaagaagaccaagatgaccaagaagacctgcgaccccctgtaccagcaggccctgctgttcgacgagggcccccagggcaaggtgctgcaggtgatcgtgtggggcgactacggcagaatggaccacaagtgcttcatgggcatggcccagatcatgctggacgagctggacctgagcgccgccgtgaccggctggtacaagctgttccccaccagcagcgtggccgacagcaccctgggcagcctgaccagaagactgagccagagcagcctggagagcgccaccagccccagctgcagctag

SEQ ID NO: 96633 - DNA, 927 bp, synthetic construct; identical to SEQ ID NO: 96632
  misc_feature 1..927: note = Description of Artificial Sequence: Synthetic coding sequence
  source 1..927: mol_type = other DNA

SEQ ID NO: 96634 - DNA, 810 bp, synthetic construct
  misc_feature 1..810: note = Description of Artificial Sequence: Synthetic coding sequence
  source 1..810: mol_type = other DNA
atggagagaagccagagcagactgagcctgagcgccagcttcgaggccctggccatctacttcccctgcatgaacagcttcgacgacgaggacgccggcgacagcagaagactgaagggcgccatccagagaagcaccgagaccggcctggccgtggagatgcccagcagaaccctgagacaggccagccacgagagcatcgaggacagcatgaacagctacggcagcgagggcaacctgaactacggcggcgtgtgcctggccagcgacgcccagttcagcgacttcctgggcagcatgggccccgcccagttcgtgggcagacagaccctggccaccacccccatgggcgacgtggagatcggcctgcaggagagaaacggccagctggaggtggacatcatccaggccagaggcctgaccgccaagcccggcagcaagaccctgcccgccgcctacatcaaggcctacctgctggagaacggcatctgcatcgccaagaagaagaccaaggtggccagaaagagcctggaccccctgtacaaccaggtgctgctgttccccgagagcccccagggcaaggtgctgcaggtgatcgtgtggggcaactacggcagaatggagagaaagcagttcatgggcgtggccagagtgctgctggaggagctggacctgaccaccctggccgtgggctggtacaagctgttccccaccagcagcatggtggaccccgccaccggccccctgctgagacaggccagccagctgagcctggagagcaccgtgggcccctgcggcgagagaagctag

SEQ ID NO: 96635 - DNA, 813 bp, synthetic construct
  misc_feature 1..813: note = Description of Artificial Sequence: Synthetic coding sequence
  source 1..813: mol_type = other DNA
atggagagaagccagagcagactgagcctgagcgccagcttcgaggccctggccatctacttcccctgcatgaacagcttcgacgacgaggacgccgagggcgacagcagaagactgaagggcgccatccagagaagcaccgagaccggcctggccgtggagatgcccagcagaaccctgagacaggccagccacgagagcatcgaggacagcatgaacagctacggcagcgagggcaacctgaactacggcggcgtgtgcctggccagcgacgcccagttcagcgacttcctgggcagcatgggccccgcccagttcgtgggcagacagaccctggccaccacccccatgggcgacgtggagatcggcctgcaggagagaaacggccagctggaggtggacatcatccaggccagaggcctgaccgccaagcccggcagcaagaccctgcccgccgcctacatcaaggcctacctgctggagaacggcatctgcatcgccaagaagaagaccaaggtggccagaaagagcctggaccccctgtacaaccaggtgctgctgttccccgagagcccccagggcaaggtgctgcaggtgatcgtgtggggcaactacggcagaatggagagaaagcagttcatgggcgtggccagagtgctgctggaggagctggacctgaccaccctggccgtgggctggtacaagctgttccccaccagcagcatggtggaccccgccaccggccccctgctgagacaggccagccagctgagcctggagagcaccgtgggcccctgcggcgagagaagctag

SEQ ID NO: 96636 - DNA, 759 bp, synthetic construct
  misc_feature 1..759: note = Description of Artificial Sequence: Synthetic coding sequence
  source 1..759: mol_type = other DNA
atggaggacggcgtggccggcccccagctgggcgccgccgccgaggccgccgaggccgccgaggccagagccagacccggcgtgaccctgagacccttcgcccccctgagcggcgccgccgaggccgacgagggcggcggcgactggagcttcatcgactgcgagatggaggaggtggacctgcaggacctgcccagcgccaccatcgcctgccacctggaccccagagtgttcgtggacggcctgtgcagagccaagttcgagagcctgttcagaacctacgacaaggacatcaccttccagtacttcaagagcttcaagagagtgagaatcaacttcagcaaccccttcagcgccgccgacgccagactgcagctgcacaagaccgagttcctgggcaaggagatgaagctgtacttcgcccagaccctgcacatcggcagcagccacctggccccccccaaccccgacaagcagttcctgatcagcccccccgccagcccccccgtgggctggaagcaggtggaggacgccacccccgtgatcaactacgacctgctgtacgccatcagcaagctgggccccggcgagaagtacgagctgcacgccgccaccgacaccacccccagcgtggtggtgcacgtgtgcgagagcgaccaggagaaggaggaggaggaggagatggagagaatgagaagacccaagcccaagatcatccagaccagaagacccgagtacacccccatccacctgagctag

SEQ ID NO: 96637 - DNA, 594 bp, synthetic construct
  misc_feature 1..594: note = Description of Artificial Sequence: Synthetic coding sequence
  source 1..594: mol_type = other DNA
atgcacttcagaaacttcaactacagcttcagcagcctgatcgcctgcgtggccaacagcgacatcttcagcgagagcgagaccagagccaagttcgagagcctgttcagaacctacgacaaggacatcaccttccagtacttcaagagcttcaagagagtgagaatcaacttcagcaaccccttcagcgccgccgacgccagactgcagctgcacaagaccgagttcctgggcaaggagatgaagctgtacttcgcccagaccctgcacatcggcagcagccacctggccccccccaaccccgacaagcagttcctgatcagcccccccgccagcccccccgtgggctggaagcaggtggaggacgccacccccgtgatcaactacgacctgctgtacgccatcagcaagctgggccccggcgagaagtacgagctgcacgccgccaccgacaccacccccagcgtggtggtgcacgtgtgcgagagcgaccaggagaaggaggaggaggaggagatggagagaatgagaagacccaagcccaagatcatccagaccagaagacccgagtacacccccatccacctgagctag

SEQ ID NO: 96638 - DNA, 729 bp, synthetic construct
  misc_feature 1..729: note = Description of Artificial Sequence: Synthetic coding sequence
  source 1..729: mol_type = other DNA
atgcagggcgagcagggcagaagactgttcagactgctgctgaacgacctgcccggcagagacagactgccctgcagctacccccagccccacgtggagcaggccagcaccagcgccagccccagactgctggccgtgaacatccccgaggacaccctgctgagctaccccgagagcagcctgcccctgcagagacactgcgccttccacagattcagcaaggccaagttcgagagcctgttcagaacctacgacaaggacatcaccttccagtacttcaagagcttcaagagagtgagaatcaacttcagcaaccccttcagcgccgccgacgccagactgcagctgcacaagaccgagttcctgggcaaggagatgaagctgtacttcgcccagaccctgcacatcggcagcagccacctggccccccccaaccccgacaagcagttcctgatcagcccccccgccagcccccccgtgggctggaagcaggtggaggacgccacccccgtgatcaactacgacctgctgtacgccatcagcaagctgggccccggcgagaagtacgagctgcacgccgccaccgacaccacccccagcgtggtggtgcacgtgtgcgagagcgaccaggagaaggaggaggaggaggagatggagagaatgagaagacccaagcccaagatcatccagaccagaagacccgagtacacccccatccacctgagctag

SEQ ID NO: 96639 - DNA, 354 bp, synthetic construct
  misc_feature 1..354: note = Description of Artificial Sequence: Synthetic coding sequence
  source 1..354: mol_type = other DNA
atgaagctgtacttcgcccagaccctgcacatcggcagcagccacctggccccccccaaccccgacaagcagttcctgatcagcccccccgccagcccccccgtgggctggaagcaggtggaggacgccacccccgtgatcaactacgacctgctgtacgccatcagcaagctgggccccggcgagaagtacgagctgcacgccgccaccgacaccacccccagcgtggtggtgcacgtgtgcgagagcgaccaggagaaggaggaggaggaggagatggagagaatgagaagacccaagcccaagatcatccagaccagaagacccgagtacacccccatccacctgagctag

SEQ ID NO: 96640 - DNA, 354 bp, synthetic construct; identical to SEQ ID NO: 96639
  misc_feature 1..354: note = Description of Artificial Sequence: Synthetic coding sequence
  source 1..354: mol_type = other DNA

SEQ ID NO: 96641 - DNA, 354 bp, synthetic construct; identical to SEQ ID NO: 96639
  misc_feature 1..354: note = Description of Artificial Sequence: Synthetic coding sequence
  source 1..354: mol_type = other DNA

SEQ ID NO: 96642 - DNA, 732 bp, synthetic construct
  misc_feature 1..732: note = Description of Artificial Sequence: Synthetic coding sequence
  source 1..732: mol_type = other DNA
atgagaggcgagagctacttcatcggcatgagaagccccggccagcagggccacgtgcccgaggacggcggcctgttcctgctgtgctgcatcgacagagactgggccgtgaccagatgcttcgccgaggaggccttccaggccatcaccgacttcaacgacctgcccaacagcctgttcgcctgcaacgtgcaccagagcgtgttcgagggcgaggagagcaaggagaagttcgagggcctgttcagaacctacgacgactgcgtgaccttccagctgttcaagagcttcagaagagtgagaatcaacttcagcaaccccaagagcgccgccagagccagaatcgagctgcacgagacccagttcagaggcaagaagctgaagctgtacttcgcccaggtgcagacccccgagaccgacggcgacaagctgcacctggcccccccccagcccgccaagcagttcctgatcagcccccccagcagcccccccgtgggctggcagcccatcaacgacgccacccccgtgctgaactacgacctgctgtacgccgtggccaagctgggccccggcgagaagtacgagctgcacgccggcaccgagagcacccccagcgtggtggtgcacgtgtgcgacagcgacatcgaggaggaggaggaccccaagaccagccccaagcccaagatcatccagaccagaagacccggcctgccccccagcgtgagcaactag

SEQ ID NO: 96643 - DNA, 594 bp, synthetic construct
  misc_feature 1..594: note = Description of Artificial Sequence: Synthetic coding sequence
  source 1..594: mol_type = other DNA
atgcccgcccccagcatggactgcgacgtgagcaccctggtggcctgcgtggtggacgtggaggtgttcaccaaccaggaggtgaaggagaagttcgagggcctgttcagaacctacgacgactgcgtgaccttccagctgttcaagagcttcagaagagtgagaatcaacttcagcaaccccaagagcgccgccagagccagaatcgagctgcacgagacccagttcagaggcaagaagctgaagctgtacttcgcccaggtgcagacccccgagaccgacggcgacaagctgcacctggcccccccccagcccgccaagcagttcctgatcagcccccccagcagcccccccgtgggctggcagcccatcaacgacgccacccccgtgctgaactacgacctgctgtacgccgtggccaagctgggccccggcgagaagtacgagctgcacgccggcaccgagagcacccccagcgtggtggtgcacgtgtgcgacagcgacatcgaggaggaggaggaccccaagaccagccccaagcccaagatcatccagaccagaagacccggcctgccccccagcgtgagcaactag

SEQ ID NO: 96644 - DNA, 732 bp, synthetic construct; identical to SEQ ID NO: 96642
  misc_feature 1..732: note = Description of Artificial Sequence: Synthetic coding sequence
  source 1..732: mol_type = other DNA

SEQ ID NO: 96645 - DNA, 732 bp, synthetic construct; identical to SEQ ID NO: 96642
  misc_feature 1..732: note = Description of Artificial Sequence: Synthetic coding sequence
  source 1..732: mol_type = other DNA

SEQ ID NO: 96646 - DNA, 1596 bp, synthetic construct
  misc_feature 1..1596: note = Description of Artificial Sequence: Synthetic coding sequence
  source 1..1596: mol_type = other DNA
atggtggacgtgggcaagtggcccatcttcaccctgctgagcccccaggagatcgccagcatcagaaaggcctgcgtgttcggcaccagcgccagcgaggccctgtacgtgaccgacaacgacgaggtgttcgtgttcggcctgaactacagcaactgcctgggcaccggcgacaaccagagcaccctggtgcccaagaagctggagggcctgtgcggcaagaagatcaagagcctgagctacggcagcggcccccacgtgctgctgagcaccgaggacggcgtggtgtacgcctggggccacaacggctacagccagctgggcaacggcaccaccaaccagggcatcgcccccgtgcaggtgtgcaccaacctgctgatcaagcaggtggtggaggtggcctgcggcagccaccacagcatggccctggccgccgacggcgaggtgttcgcctggggctacaacaactgcggccaggtgggcagcggcagcaccgccaaccagcccacccccagaaaggtgaccaactgcctgcacatcaagagagtggtgggcatcgcctgcggccagaccagcagcatggccgtgctggacaacggcgaggtgtacggctggggctacaacggcaacggccagctgggcctgggcaacaacggcaaccagctgacccccgtgagagtggccgccctgcacagcgtgtgcgtgaaccagatcgtgtgcggctacgcccacaccctggccctgaccgacgagggcctgctgtacgcctggggcgccaacacctacggccagctgggcaccggcaacaagaacaacctgctgagccccgcccacatcatggtggagaaggagagagtggtggagatcgccgcctgccacagcgcccacaccagcgccgccaagacccagggcggccacgtgtacatgtggggccagtgcagaggccagagcgtgatcctgccccacctgacccacttcagctgcaccgacgacgtgttcgcctgcttcgccacccccgccgtgagctggagactgctgagcgtggagcacgaggacttcctgaccgtggccgagagcctgaagaaggagttcgacagccccgagaccgccgacctgaagttcagaatcgacggcaagtacatccacgtgcacaaggccgtgctgaagatcagatgcgagcacttcagaagcatgttccagagctactggaacgaggacatgaaggaggtgatcgagatcgaccagttcagctaccccgtgtacagagccttcctgcagtacctgtacaccgacaccgtggacctgccccccgaggacgccatcggcctgctggacctggccaccagctactgcgagaacagactgaagaagctgtgccagcacatcatcaagagaggcatcaccgtggagaacgccttcagcctgttcagcgccgccgtgagatacgacgccgaggacctggaggagttctgcttcaagttctgcatcaaccacctgaccgaggtgacccagaccgccgccttctggcagatggacggccccctgctgaaggagttcatcgccaaggccagcaagtgcggcgccttcaagaactag

SEQ ID NO: 96647 - DNA, 1596 bp, synthetic construct; identical to SEQ ID NO: 96646
  misc_feature 1..1596: note = Description of Artificial Sequence: Synthetic coding sequence
  source 1..1596: mol_type = other DNA

SEQ ID NO: 96648 - DNA, 1068 bp, synthetic construct
  misc_feature 1..1068: note = Description of Artificial Sequence: Synthetic coding sequence
  source 1..1068: mol_type = other DNA
atggtggacgtgggcaagtggcccatcttcaccctgctgagcccccaggagatcgccagcatcagaaaggcctgcgtgttcggcaccagcgccagcgaggccctgtacgtgaccgacaacgacgaggtgttcgtgttcggcctgaactacagcaactgcctgggcaccggcgacaaccagagcaccctggtgcccaagaagctggagggcctgtgcggcaagaagatcaagagcctgagctacggcagcggcccccacgtgctgctgagcaccgaggacggcgtggtgtacgcctggggccacaacggctacagccagctgggcaacggcaccaccaaccagggcatcgcccccgtgcaggtgtgcaccaacctgctgatcaagcaggtggtggaggtggcctgcggcagccaccacagcatggccctggccgccgacggcgaggtgttcgcctggggctacaacaactgcggccaggtgggcagcggcagcaccgccaaccagcccacccccagaaaggtgaccaactgcctgcacatcaagagagtggtgggcatcgcctgcggccagaccagcagcatggccgtgctggacaacggcgaggtgtacggctggggctacaacggcaacggccagctgggcctgggcaacaacggcaaccagctgacccccgtgagagtggccgccctgcacagcgtgtgcgtgaaccagatcgtgtgcggctacgcccacaccctggccctgaccgacgagggcctgctgtacgcctggggcgccaacacctacggccagctgggcaccggcaacaagaacaacctgctgagccccgcccacatcatggtggagaaggagagagtggtggagatcgccgcctgccacagcgcccacaccagcgccgccaagacccagggcggccacgtgtacatgtggggccagtgcagaggccagagcgtgatcctgccccacctgacccacttcagctgcaccgacgacgtgttcgcctgcttcgccacccccgccgtgagctggagactgctgagcgtggtgagcatcgtgatcggcaagtag

SEQ ID NO: 96649 - DNA, 1656 bp, synthetic construct
  misc_feature 1..1656: note = Description of Artificial Sequence: Synthetic coding sequence
  source 1..1656: mol_type = other DNA
atggaggaggagctgcccctgttcagcggcgacagcggcaagcccgtgcaggccaccctgagcagcctgaagatgctggacgtgggcaagtggcccatcttcagcctgtgcagcgaggaggagctgcagctgatcagacaggcctgcgtgttcggcagcgccggcaacgaggtgctgtacaccaccgtgaacgacgagatcttcgtgctgggcaccaactgctgcggctgcctgggcctgggcgacgtgcagagcaccatcgagcccagaagactggacagcctgaacggcaagaagatcgcctgcctgagctacggcagcggcccccacatcgtgctggccaccaccgagggcgaggtgttcacctggggccacaacgcctacagccagctgggcaacggcaccaccaaccacggcctggtgccctgccacatcagcaccaacctgagcaacaagcaggtgatcgaggtggcctgcggcagctaccacagcctggtgctgaccagcgacggcgaggtgttcgcctggggctacaacaacagcggccaggtgggcagcggcagcaccgtgaaccagcccatccccagaagagtgaccggctgcctgcagaacaaggtggtggtgaccatcgcctgcggccagatgtgctgcatggccgtggtggacaccggcgaggtgtacgtgtggggctacaacggcaacggccagctgggcctgggcaacagcggcaaccagcccaccccctgcagagtggccgccctgcagggcatcagagtgcagagagtggcctgcggctacgcccacaccctggtgctgaccgacgagggccaggtgtacgcctggggcgccaacagctacggccagctgggcaccggcaacaagagcaaccagagctaccccacccccgtgaccgtggagaaggacagaatcatcgagatcgccgcctgccacagcacccacaccagcgccgccaagacccagggcggccacgtgtacatgtggggccagtgcagaggccagagcgtgatcctgccccacctgacccacttcagctgcaccgacgacgtgttcgcctgcttcgccacccccgccgtgacctggagactgctgagcgtggagcccgacgaccacctgaccgtggccgagagcctgaagagagagttcgacaaccccgacaccgccgacctgaagttcctggtggacggcaagtacatctacgcccacaaggtgctgctgaagatcagatgcgagcacttcagaagcagcctggaggacaacgaggacgacatcgtggagatgagcgagttcagctaccccgtgtacagagccttcctggagtacctgtacaccgacagcatcagcctgagccccgaggaggccgtgggcctgctggacctggccaccttctacagagagaacagactgaagaagctgtgccagcagaccatcaagcagggcatctgcgaggagaacgccatcgccctgctgagcgccgccgtgaagtacgacgcccaggacctggaggagttctgcttcagattctgcatcaaccacctgaccgtggtgacccagaccagcggcttcgccgagatggaccacgacctgctgaagaacttcatcagcaaggccagcagagtgggcgccttcaagaactag

SEQ ID NO: 96650 - DNA, 1671 bp, synthetic construct
  misc_feature 1..1671: note = Description of Artificial Sequence: Synthetic coding sequence
  source 1..1671: mol_type = other DNA
atgagcgccctgcccagagacctggagctgagcaaccccagagagaagctgaccaagcccgtgcaggccaccctgagcagcctgaagatgctggacgtgggcaagtggcccatcttcagcctgtgcagcgaggaggagctgcagctgatcagacaggcctgcgtgttcggcagcgccggcaacgaggtgctgtacaccaccgtgaacgacgagatcttcgtgctgggcaccaactgctgcggctgcctgggcctgggcgacgtgcagagcaccatcgagcccagaagactggacagcctgaacggcaagaagatcgcctgcctgagctacggcagcggcccccacatcgtgctggccaccaccgagggcgaggtgttcacctggggccacaacgcctacagccagctgggcaacggcaccaccaaccacggcctggtgccctgccacatcagcaccaacctgagcaacaagcaggtgatcgaggtggcctgcggcagctaccacagcctggtgctgaccagcgacggcgaggtgttcgcctggggctacaacaacagcggccaggtgggcagcggcagcaccgtgaaccagcccatccccagaagagtgaccggctgcctgcagaacaaggtggtggtgaccatcgcctgcggccagatgtgctgcatggccgtggtggacaccggcgaggtgtacgtgtggggctacaacggcaacggccagctgggcctgggcaacagcggcaaccagcccaccccctgcagagtggccgccctgcagggcatcagagtgcagagagtggcctgcggctacgcccacaccctggtgctgaccgacgagggccaggtgtacgcctggggcgccaacagctacggccagctgggcaccggcaacaagagcaaccagagctaccccacccccgtgaccgtggagaaggacagaatcatcgagatcgccgcctgccacagcacccacaccagcgccgccaagacccagggcggccacgtgtacatgtggggccagtgcagaggccagagcgtgatcctgccccacctgacccacttcagctgcaccgacgacgtgttcgcctgcttcgccacccccgccgtgacctggagactgctgagcgtggagcccgacgaccacctgaccgtggccgagagcctgaagagagagttcgacaaccccgacaccgccgacctgaagttcctggtggacggcaagtacatctacgcccacaaggtgctgctgaagatcagatgcgagcacttcagaagcagcctggaggacaacgaggacgacatcgtggagatgagcgagttcagctaccccgtgtacagagccttcctggagtacctgtacaccgacagcatcagcctgagccccgaggaggccgtgggcctgctggacctggccaccttctacagagagaacagactgaagaagctgtgccagcagaccatcaagcagggcatctgcgaggagaacgccatcgccctgctgagcgccgccgtgaagtacgacgcccaggacctggaggagttctgcttcagattctgcatcaaccacctgaccgtggtgacccagaccagcggcttcgccgagatggaccacgacctgctgaagaacttcatcagcaaggccagcagagtgggcgccttcaagaactag

SEQ ID NO: 96651 - DNA, 1512 bp, synthetic construct
  misc_feature 1..1512: note = Description of Artificial Sequence: Synthetic coding sequence
  source 1..1512: mol_type = other DNA
atgctgcaggacggcagctgcaagcagatgctgctgatgctgctgatcgtgcagcccgtgcaggccaccctgagcagcctgaagatgctggacgtgggcaagtggcccatcttcagcctgtgcagcgaggaggagctgcagctgatcagacaggcctgcgtgttcggcagcgccggcaacgaggtgctgtacaccaccgtgaacgacgagatcttcgtgctgggcaccaactgctgcggctgcctgggcctgggcgacgtgcagagcaccatcgagcccagaagactggacagcctgaacggcaagaagatcgcctgcctgagctacggcagcggcccccacatcgtgctggccaccaccgagggcgaggtgttcacctggggccacaacgcctacagccagctgggcaacggcaccaccaaccacggcctggtgccctgccacatcagcaccaacctgagcaacaagcaggtgatcgaggtggcctgcggcagctaccacagcctggtgctgaccagcgacggcgaggtgttcgcctggggctacaacaacagcggccaggtgggcagcggcagcaccgtgaaccagcccatccccagaagagtgaccggctgcctgcagaacaaggtggtggtgaccatcgcctgcggccagatgtgctgcatggccgtggtggacaccggcgaggtgtacgtgtggggctacaacggcaacggccagctgggcctgggcaacagcggcaaccagcccaccccctgcagagtggccgccctgcagggcatcagagtgcagagagtggcctgcggctacacccacaccagcgccgccaagacccagggcggccacgtgtacatgtggggccagtgcagaggccagagcgtgatcctgccccacctgacccacttcagctgcaccgacgacgtgttcgcctgcttcgccacccccgccgtgacctggagactgctgagcgtggagcccgacgaccacctgaccgtggccgagagcctgaagagagagttcgacaaccccgacaccgccgacctgaagttcctggtggacggcaagtacatctacgcccacaaggtgctgctgaagatcagatgcgagcacttcagaagcagcctggaggacaacgaggacgacatcgtggagatgagcgagttcagctaccccgtgtacagagccttcctggagtacctgtacaccgacagcatcagcctgagccccgaggaggccgtgggcctgctggacctggccaccttctacagagagaacagactgaagaagctgtgccagcagaccatcaagcagggcatctgcgaggagaacgccatcgccctgctgagcgccgccgtgaagtacgacgcccaggacctggaggagttctgcttcagattctgcatcaaccacctgaccgtggtgacccagaccagcggcttcgccgagatggaccacgacctgctgaagaacttcatcagcaaggccagcagagtgggcgccttcaagaactag

SEQ ID NO: 96652 - DNA, 1671 bp, synthetic construct
  misc_feature 1..1671: note = Description of Artificial Sequence: Synthetic coding sequence
  source 1..1671: mol_type = other DNA
ccctgcagcaacagataccccggcggcggcgccgacaaggcccccgcctgcgaggagcccgtgcaggccaccctgagcagcctgaagatgctggacgtgggcaagtggcccatcttcagcctgtgcagcgaggaggagctgcagctgatcagacaggcctgcgtgttcggcagcgccggcaacgaggtgctgtacaccaccgtgaacgacgagatcttcgtgctgggcaccaactgctgcggctgcctgggcctgggcgacgtgcagagcaccatcgagcccagaagactggacagcctgaacggcaagaagatcgcctgcctgagctacggcagcggcccccacatcgtgctggccaccaccgagggcgaggtgttcacctggggccacaacgcctacagccagctgggcaacggcaccaccaaccacggcctggtgccctgccacatcagcaccaacctgagcaacaagcaggtgatcgaggtggcctgcggcagctaccacagcctggtgctgaccagcgacggcgaggtgttcgcctggggctacaacaacagcggccaggtgggcagcggcagcaccgtgaaccagcccatccccagaagagtgaccggctgcctgcagaacaaggtggtggtgaccatcgcctgcggccagatgtgctgcatggccgtggtggacaccggcgaggtgtacgtgtggggctacaacggcaacggccagctgggcctgggcaacagcggcaaccagcccaccccctgcagagtggccgccctgcagggcatcagagtgcagagagtggcctgcggctacgcccacaccctggtgctgaccgacgagggccaggtgtacgcctggggcgccaacagctacggccagctgggcaccggcaacaagagcaaccagagctaccccacccccgtgaccgtggagaaggacagaatcatcgagatcgccgcctgccacagcacccacaccagcgccgccaagacccagggcggccacgtgtacatgtggggccagtgcagaggccagagcgtgatcctgccccacctgacccacttcagctgcaccgacgacgtgttcgcctgcttcgccacccccgccgtgacctggagactgctgagcgtggagcccgacgaccacctgaccgtggccgagagcctgaagagagagttcgacaaccccgacaccgccgacctgaagttcctggtggacggcaagtacatctacgcccacaaggtgctgctgaagatcagatgcgagcacttcagaagcagcctggaggacaacgaggacgacatcgtggagatgagcgagttcagctaccccgtgtacagagccttcctggagtacctgtacaccgacagcatcagcctgagccccgaggaggccgtgggcctgctggacctggccaccttctacagagagaacagactgaagaagctgtgccagcagaccatcaagcagggcatctgcgaggagaacgccatcgccctgctgagcgccgccgtgaagtacgacgcccaggacctggaggagttctgcttcagattctgcatcaaccacctgaccgtggtgacccagaccagcggcttcgccgagatggaccacgacctgctgaagaacttcatcagcaaggccagcagagtgggcgccttcaagaactag

SEQ ID NO: 96653 - DNA, 834 bp, synthetic construct
  misc_feature 1..834: note = Description of Artificial Sequence: Synthetic coding sequence
  source 1..834: mol_type = other DNA
atgagcggcgtgaccaccgagaccggcagcctggacagcgccaccgtggccaccagccagcccctggccgagtggcagctgtgcaaggccagcgtgagcagaggcatcatcgagatcgccgcctgccacagcacccacaccagcgccgccaagacccagggcggccacgtgtacatgtggggccagtgcagaggccagagcgtgatcctgccccacctgacccacttcagctgcaccgacgacgtgttcgcctgcttcgccacccccgccgtgacctggagactgctgagcgtggagcccgacgaccacctgaccgtggccgagagcctgaagagagagttcgacaaccccgacaccgccgacctgaagttcctggtggacggcaagtacatctacgcccacaaggtgctgctgaagatcagatgcgagcacttcagaagcagcctggaggacaacgaggacgacatcgtggagatgagcgagttcagctaccccgtgtacagagccttcctggagtacctgtacaccgacagcatcagcctgagccccgaggaggccgtgggcctgctggacctggccaccttctacagagagaacagactgaagaagctgtgccagcagaccatcaagcagggcatctgcgaggagaacgccatcgccctgctgagcgccgccgtgaagtacgacgcccaggacctggaggagttctgcttcagattctgcatcaaccacctgaccgtggtgacccagaccagcggcttcgccgagatggaccacgacctgctgaagaacttcatcagcaaggccagcagagtgggcgccttcaagaactag

SEQ ID NO: 96654 - DNA, 846 bp, synthetic construct
  misc_feature 1..846: note = Description of Artificial Sequence: Synthetic coding sequence
  source 1..846: mol_type = other DNA
atgctggacgtgggcaagtggcccatcttcagcctgtgcagcgaggaggagctgcagctgatcagacaggcctgcgtgttcggcagcgccggcaacgaggtgctgtacaccaccgtgaacgacgagatcttcgtgctgggcaccaactgctgcggctgcctgggcctgggcgacgtgcagagcaccatcgagcccagaagactggacagcctgaacggcaagaagatcgcctgcctgagctacggcagcggcccccacatcgtgctggccaccaccgagggcgaggtgttcacctggggccacaacgcctacagccagctgggcaacggcaccaccaaccacggcctggtgccctgccacatcagcaccaacctgagcaacaagcaggtgatcgaggtggcctgcggcagctaccacagcctggtgctgaccagcgacggcgaggtgttcgcctggggctacaacaacagcggccaggtgggcagcggcagcaccgtgaaccagcccatccccagaagagtgaccggctgcctgcagaacaaggtggtggtgaccatcgcctgcggccagatgtgctgcatggccgtggtggacaccggcgaggtgtacgtgtggggctacaacggcaacggccagctgggcctgggcaacagcggcaaccagcccaccccctgcagagtggccgccctgcagggcatcagagtgcagagagactacagagactgcagcctgagcctgcacacccacgtgtgcggccaggacgccggctgggccagagtgcacgtgggccccgtgcccggcagcgtgagagacccccccgccccccaccccctgctgctgcactag

SEQ ID NO: 96655 - DNA, 1359 bp, synthetic construct
  misc_feature 1..1359: note = Description of Artificial Sequence: Synthetic coding sequence
  source 1..1359: mol_type = other DNA
atgagccccaagagaatcgccaagagaagaagcccccccgccgacgccatccccaagagcaagaaggtgaaggacaccagagccgccgccagcagaagagtgcccggcgccagaagctgccagggcgcctgcggccccagcccccccgaccagaagaccagacccgtgagccacagaagccacagcaccgagcccggcctggtgctgaccctgggccagggcgacgtgggccagctgggcctgggcgagaacgtgatggagagaaagaagcccgccctggtgagcatccccgaggacgtggtgcaggccgaggccggcggcatgcacaccgtgtgcctgagcaagagcggccaggtgtacagcttcggctgcaacgacgagggcgccctgggcagagacaccagcgtggagggcagcgagatggtgcccggcaaggtggagctgcaggagaaggtggtgcaggtgagcgccggcgacagccacaccgccgccctgaccgacgacggcagagtgttcctgtggggcagcttcagagacaacaacggcgtgatcggcctgctggagcccatgaagaagagcatggtgcccgtgcaggtgcagctggacgtgcccgtggtgaaggtggccagcggcaacgaccacctggtgatgctgaccgccgacggcgacctgtacaccctgggctgcggcgagcagggccagctgggcagagtgcccgagctgttcgccaacagaggcggcagacagggcctggagagactgctggtgcccaagtgcgtgatgctgaagagcagaggcagcagaggccacgtgagattccaggacgccttctgcggcgcctacttcaccttcgccatcagccacgagggccacgtgtacggcttcggcctgagcaactaccaccagctgggcacccccggcaccgagagctgcttcatcccccagaacctgaccagcttcaagaacagcaccaagagctgggtgggcttcagcggcggccagcaccacaccgtgtgcatggacagcgagggcaaggcctacagcctgggcagagccgagtacggcagactgggcctgggcgagggcgccgaggagaagagcatccccaccctgatcagcagactgcccgccgtgagcagcgtggcctgcggcgccagcgtgggctacgccgtgaccaaggacggcagagtgttcgcctggggcatgggcaccaactaccagctgggcaccggccaggacgaggacgcctggagccccgtggagatgatgggcaagcagctggagaacagagtggtgctgagcgtgagcagcggcggccagcacaccgtgctgctggtgaaggacaaggagcagagctag

SEQ ID NO: 96656 - DNA, 1266 bp, synthetic construct
  misc_feature 1..1266: note = Description of Artificial Sequence: Synthetic coding sequence
  source 1..1266: mol_type = other DNA
atgagccccaagagaatcgccaagagaagaagcccccccgccgacgccatccccaagagcaagaaggtgaaggtgagccacagaagccacagcaccgagcccggcctggtgctgaccctgggccagggcgacgtgggccagctgggcctgggcgagaacgtgatggagagaaagaagcccgccctggtgagcatccccgaggacgtggtgcaggccgaggccggcggcatgcacaccgtgtgcctgagcaagagcggccaggtgtacagcttcggctgcaacgacgagggcgccctgggcagagacaccagcgtggagggcagcgagatggtgcccggcaaggtggagctgcaggagaaggtggtgcaggtgagcgccggcgacagccacaccgccgccctgaccgacgacggcagagtgttcctgtggggcagcttcagagacaacaacggcgtgatcggcctgctggagcccatgaagaagagcatggtgcccgtgcaggtgcagctggacgtgcccgtggtgaaggtggccagcggcaacgaccacctggtgatgctgaccgccgacggcgacctgtacaccctgggctgcggcgagcagggccagctgggcagagtgcccgagctgttcgccaacagaggcggcagacagggcctggagagactgctggtgcccaagtgcgtgatgctgaagagcagaggcagcagaggccacgtgagattccaggacgccttctgcggcgcctacttcaccttcgccatcagccacgagggccacgtgtacggcttcggcctgagcaactaccaccagctgggcacccccggcaccgagagctgcttcatcccccagaacctgaccagcttcaagaacagcaccaagagctgggtgggcttcagcggcggccagcaccacaccgtgtgcatggacagcgagggcaaggcctacagcctgggcagagccgagtacggcagactgggcctgggcgagggcgccgaggagaagagcatccccaccctgatcagcagactgcccgccgtgagcagcgtggcctgcggcgccagcgtgggctacgccgtgaccaaggacggcagagtgttcgcctggggcatgggcaccaactaccagctgggcaccggccaggacgaggacgcctggagccccgtggagatgatgggcaagcagctggagaacagagtggtgctgagcgtgagcagcggcggccagcacaccgtgctgctggtgaaggacaaggagcagagctag

SEQ ID NO: 96657 - DNA, 1266 bp, synthetic construct; identical to SEQ ID NO: 96656
  misc_feature 1..1266: note = Description of Artificial Sequence: Synthetic coding sequence
  source 1..1266: mol_type = other DNA

SEQ ID NO: 96658 - DNA, 1266 bp, synthetic construct; identical to SEQ ID NO: 96656
  misc_feature 1..1266: note = Description of Artificial Sequence: Synthetic coding sequence
  source 1..1266: mol_type = other DNA

SEQ ID NO: 96659 - DNA, 693 bp, synthetic construct
  misc_feature 1..693: note = Description of Artificial Sequence: Synthetic coding sequence
  source 1..693: mol_type = other DNA
atgagccccaagagaatcgccaagagaagaagcccccccgccgacgccatccccaagagcaagaaggtgaaggtgagccacagaagccacagcaccgagcccggcctggtgctgaccctgggccagggcgacgtgggccagctgggcctgggcgagaacgtgatggagagaaagaagcccgccctggtgagcatccccgaggacgtggtgcaggccgaggccggcggcatgcacaccgtgtgcctgagcaagagcggccaggtgtacagcttcggctgcaacgacgagggcgccctgggcagagacaccagcgtggagggcagcgagatggtgcccggcaaggtggagctgcaggagaaggtggtgcaggtgagcgccggcgacagccacaccgccgccctgaccgacgacggcagagtgttcctgtggggcagcttcagagacaacaacggcgtgatcggcctgctggagcccatgaagaagagcatggtgcccgtgcaggtgcagctggacgtgcccgtggtgaaggtggccagcggcaacgaccacctggtgatgctgaccgccgacggcgacctgtacaccctgggctgcggcgagcagggccagctgggcagagtgcccgagctgttcgccaacagaggcggcagacagggcctggagagactgctggtgcccaagtgcgtgatgtag

SEQ ID NO: 96660 - DNA, 852 bp, synthetic construct
  misc_feature 1..852: note = Description of Artificial Sequence: Synthetic coding sequence
  source 1..852: mol_type = other DNA
atgagccccaagagaatcgccaagagaagaagcccccccgccgacgccatccccaagagcaagaaggtgaaggtgagccacagaagccacagcaccgagcccggcctggtgctgaccctgggccagggcgacgtgggccagctgggcctgggcgagaacgtgatggagagaaagaagcccgccctggtgagcatccccgaggacgtggtgcaggccgaggccggcggcatgcacaccgtgtgcctgagcaagagcggccaggtgtacagcttcggctgcaacgacgagggcgccctgggcagagacaccagcgtggagggcagcgagatggtgcccggcaaggtggagctgcaggagaaggtggtgcaggtgagcgccggcgacagccacaccgccgccctgaccgacgacggcagagtgttcctgtggggcagcttcagagacaacaacggcgtgatcggcctgctggagcccatgaagaagagcatggtgcccgtgcaggtgcagctggacgtgcccgtggtgaaggtggccagcggcaacgaccacctggtgatgctgaccgccgacggcgacctgtacaccctgggctgcggcgagcagggccagctgggcagagtgcccgagctgttcgccaacagaggcggcagacagggcctggagagactgctggtgcccaagtgcgtgatgctgaagagcagaggcagcagaggccacgtgagattccaggacgccttctgcggcgcctacttcaccttcgccatcagccacgagggccacgtgtacggcttcggcctgagcaactaccaccagctgggcacccccggcaccgagagctgcttcatcccctag

SEQ ID NO: 96661 - DNA, 708 bp, synthetic construct
  misc_feature 1..708: note = Description of Artificial Sequence: Synthetic coding sequence
  source 1..708: mol_type = other DNA
atggccagagaggagtgcaaggccctgctggacggcctgaacaagaccaccgcctgctaccaccacctggtgctgaccgtgggcggcagcgccgacagccagaacctgagacaggagctgcagaagaccagacagaaggcccaggagctggccgtgagcacctgcgccagactgaccgccgtgctgagagacagaggcctggccgccgacgagagagccgagttcgagagactgtgggtggccttcagcggctgcctggacctgctggaggccgacatgagaagagccctggagctgggcgccgccttccccctgcacgcccccagaagacccctggtgagaaccggcgtggccggcgccagcagcggcgtggccgccagagccctgagcaccagaagcctgagactggaggccgagggcgacttcgacgtggccgacctgagagagctggagagagaggtgctgcaggtgggcgagatgatcgacaacatggagatgaaggtgaacgtgcccagatggaccgtgcaggccagacaggccgccggcgccgagctgctgagcaccgtgagcgccggccccagcagcgtggtgagcctgcaggagagaggcggcggctgcgaccccagaaaggccctggccgccatcctgttcggcgccgtgctgctggccgccgtggccctggccgtgtgcgtggccaagctgagctag

SEQ ID NO: 96662 - DNA, 630 bp, synthetic construct
  misc_feature 1..630: note = Description of Artificial Sequence: Synthetic coding sequence
  source 1..630: mol_type = other DNA
atgagagccgccgccatcagcacccccaagctggacaagatgcccggcatgttcttcagcgccaaccccaaggagctgaagggcaccacccacagcctgctggacgacaagatgcagaagagaagacccaagaccttcggcatggacatgaaggcctacctgagaagcatgatcccccacctggagagcggcatgaagagcagcaagagcaaggacgtgctgagcgccgccgaggtgatgcagtggagccagagcctggagaagctgctggccaaccagaccggccagaacgtgttcggcagcttcctgaagagcgagttcagcgaggagaacatcgagttctggctggcctgcgaggactacaagaagaccgagagcgacctgctgccctgcaaggccgaggagatctacaaggccttcgtgcacagcgacgccgccaagcagatcaacatcgacttcagaaccagagagagcaccgccaagaagatcaaggcccccacccccacctgcttcgacgaggcccagaaggtgatctacaccctgatggagaaggacagctaccccagattcctgaagagcgacatctacctgaacctgctgaacgacctgcaggccaacagcctgaagtag

SEQ ID NO: 96663 - DNA, 1044 bp, synthetic construct
  misc_feature 1..1044: note = Description of Artificial Sequence: Synthetic coding sequence
  source 1..1044: mol_type = other DNA
atgcccggcaagcccaagcacctgggcgtgcccaacggcagaatggtgctggccgtgagcgacggcgagctgagcagcaccaccggcccccagggccagggcgagggcagaggcagcagcctgagcatccacagcctgcccagcggccccagcagccccttccccaccttcgtgagcagcaagagcgagagccacagaaagagcctgggcagcaccgagggcgagagcgagagcagacccggcaagtactgctgcgtgtacctgcccgacggcaccgccagcctggccctggccagacccggcctgaccatcagagacatgctggccggcatctgcgagaagagaggcctgagcctgcccgacatcaaggtgtacctggtgggcaacgagcagaaggccctggtgctggaccaggactgcaccgtgctggccgaccaggaggtgagactggagaacagaatcaccttcgagctggagctgaccgccctggagagagtggtgagaatcagcgccaagcccaccaagagactgcaggaggccctgcagcccatcctggagaagcacggcctgagccccctggaggtggtgctgcacagacccggcgagaagcagcccctggacctgggcaagctggtgagcagcgtggccgcccagagactggtgctggacaccctgcccggcgtgaagatcagcaaggccagagacaagagcccctgcagaagccagggctgcccccccagaacccaggacaaggccacccaccccccccccgccagccccagcagcctggtgaaggtgcccagcagcgccaccggcaagagacagacctgcgacatcgagggcctggtggagctgctgaacagagtgcagagcagcggcgcccacgaccagagaggcctgctgagaaaggaggacctggtgctgcccgagttcctgcagctgcccgcccagggccccagcagcgaggagacccccccccagaccaagagcgccgcccagcccatcggcggcagcctgaacagcaccaccgacagcgccctgtag

SEQ ID NO: 96664 - DNA, 1701 bp, synthetic construct
  misc_feature 1..1701: note = Description of Artificial Sequence: Synthetic coding sequence
  source 1..1701: mol_type = other DNA
atgcccggcaagcccaagcacctgggcgtgcccaacggcagaatggtgctggccgtgagcgacggcgagctgagcagcaccaccggcccccagggccagggcgagggcagaggcagcagcctgagcatccacagcctgcccagcggccccagcagccccttccccaccgaggagcagcccgtggccagctgggccctgagcttcgagagactgctgcaggaccccctgggcctggcctacttcaccgagttcctgaagaaggagttcagcgccgagaacgtgaccttctggaaggcctgcgagagattccagcagatccccgccagcgacacccagcagctggcccaggaggccagaaacatctaccaggagttcctgagcagccaggccctgagccccgtgaacatcgacagacaggcctggctgggcgaggaggtgctggccgagcccagacccgacatgttcagagcccagcagctgcagatcttcaacctgatgaagttcgacagctacgccagattcgtgaagagccccctgtacagagagtgcctgctggccgaggccgagggcagacccctgagagagcccggcagcagcagactgggcagccccgacgccaccagaaagaagcccaagctgaagcccggcaagagcctgcccctgggcgtggaggagctgggccagctgccccccgtggagggccccggcggcagacccctgagaaagagcttcagaagagagctgggcggcaccgccaacgccgccctgagaagagagagccagggcagcctgaacagcagcgccagcctggacctgggcttcctggccttcgtgagcagcaagagcgagagccacagaaagagcctgggcagcaccgagggcgagagcgagagcagacccggcaagtactgctgcgtgtacctgcccgacggcaccgccagcctggccctggccagacccggcctgaccatcagagacatgctggccggcatctgcgagaagagaggcctgagcctgcccgacatcaaggtgtacctggtgggcaacgagcaggccctggtgctggaccaggactgcaccgtgctggccgaccaggaggtgagactggagaacagaatcaccttcgagctggagctgaccgccctggagagagtggtgagaatcagcgccaagcccaccaagagactgcaggaggccctgcagcccatcctggagaagcacggcctgagccccctggaggtggtgctgcacagacccggcgagaagcagcccctggacctgggcaagctggtgagcagcgtggccgcccagagactggtgctggacaccctgcccggcgtgaagatcagcaaggccagagacaagagcccctgcagaagccagggctgcccccccagaacccaggacaaggccacccaccccccccccgccagccccagcagcctggtgaaggtgcccagcagcgccaccggcaagagacagacctgcgacatcgagggcctggtggagctgctgaacagagtgcagagcagcggcgcccacgaccagagaggcctgctgagaaaggaggacctggtgctgcccgagttcctgcagctgcccgcccagggccccagcagcgaggagacccccccccagaccaagagcgccgcccagcccatcggcggcagcctgaacagcaccaccgacagcgccctgtag

SEQ ID NO: 96665 - DNA, 1314 bp, synthetic construct
  misc_feature 1..1314: note = Description of Artificial Sequence: Synthetic coding sequence
  source 1..1314: mol_type = other DNA
tgaagccccgtgaacatcgacagacaggcctggctgggcgaggaggtgctggccgagcccagacccgacatgttcagagcccagcagctgcagatcttcaacctgatgaagttcgacagctacgccagattcgtgaagagccccctgtacagagagtgcctgctggccgaggccgagggcagacccctgagagagcccggcagcagcagactgggcagccccgacgccaccagaaagaagcccaagctgaagcccggcaagagcctgcccctgggcgtggaggagctgggccagctgccccccgtggagggccccggcggcagacccctgagaaagagcttcagaagagagctgggcggcaccgccaacgccgccctgagaagagagagccagggcagcctgaacagcagcgccagcctggacctgggcttcctggccttcgtgagcagcaagagcgagagccacagaaagagcctgggcagcaccgagggcgagagcgagagcagacccggcaagtactgctgcgtgtacctgcccgacggcaccgccagcctggccctggccagacccggcctgaccatcagagacatgctggccggcatctgcgagaagagaggcctgagcctgcccgacatcaaggtgtacctggtgggcaacgagcagaaggccctggtgctggaccaggactgcaccgtgctggccgaccaggaggtgagactggagaacagaatcaccttcgagctggagctgaccgccctggagagagtggtgagaatcagcgccaagcccaccaagagactgcaggaggccctgcagcccatcctggagaagcacggcctgagccccctggaggtggtgctgcacagacccggcgagaagcagcccctggacctgggcaagctggtgagcagcgtggccgcccagagactggtgctggacaccctgcccggcgtgaagatcagcaaggccagagacaagagcccctgcagaagccagggctgcccccccagaacccaggacaaggccacccaccccccccccgccagccccagcagcctggtgaaggtgcccagcagcgccaccggcaagagacagacctgcgacatcgagggcctggtggagctgctgaacagagtgcagagcagcggcgcccacgaccagagaggcctgctgagaaaggaggacctggtgctgcccgagttcctgcagctgcccgcccagggccccagcagcgaggagacccccccccagaccaagagcgccgcccagcccatcggcggcagcctgaacagcaccaccgacagcgccctgtag

SEQ ID NO: 96666 - DNA, 609 bp, synthetic construct
  misc_feature 1..609: note = Description of Artificial Sequence: Synthetic coding sequence
  source 1..609: mol_type = other DNA
atgtgcagaaccctggccgccttccccaccacctgcctggagagagccaaggagttcaagaccagactgggcatcttcctgcacaagagcgagctgggctgcgacaccggcagcaccggcaagttcgagtggggcagcaagcacagcaaggagaacagaaacttcagcgaggacgtgctgggctggagagagagcttcgacctgctgctgagcagcaagaacggcgtggccgccttccacgccttcctgaagaccgagttcagcgaggagaacctggagttctggctggcctgcgaggagttcaagaagatcagaagcgccaccaagctggccagcagagcccaccagatcttcgaggagttcatctgcagcgaggcccccaaggaggtgaacatcgaccacgagacccacgagctgaccagaatgaacctgcagaccgccaccgccacctgcttcgacgccgcccagggcaagaccagaaccctgatggagaaggacagctaccccagattcctgaagagccccgcctacagagacctggccgcccaggccagcgccgccagcgccaccctgagcagctgcagcctggacgagcccagccacacctag

SEQ ID NO: 96667 - DNA, 459 bp, synthetic construct
  misc_feature 1..459: note = Description of Artificial Sequence: Synthetic coding sequence
  source 1..459: mol_type = other DNA
atgcccgtgaagtgctgcttctacagaagccccaccgccgagaccatgacctggagcgagaacatggacaccctgctggccaaccaggccggcctggacgccttcagaatcttcctgaagagcgagttcagcgaggagaacgtggagttctggctggcctgcgaggacttcaagaagaccaagaacgccgacaagatcgccagcaaggccaagatgatctacagcgagttcatcgaggccgacgcccccaaggagatcaacatcgacttcggcaccagagacctgatcagcaagaacatcgccgagcccaccctgaagtgcttcgacgaggcccagaagctgatctactgcctgatggccaaggacagcttccccagattcctgaagagcgagatctacaagaagctggtgaacagccagcaggtgcccaaccacaagaagtggctgcccttcctgtag

SEQ ID NO: 96668 - DNA, 1809 bp, synthetic construct
  misc_feature 1..1809: note = Description of Artificial Sequence: Synthetic coding sequence
  source 1..1809: mol_type = other DNA
atggagagaagcctgcacagagtgagcctgggcagcagaagagcccaccccgacctgagcttctacctgaccaccttcggccagctgagactgagcatcgacgcccaggacagagtgctgctgctgcacatcatcgagggcaagggcctgatcagcaagcagcccggcacctgcgacccctacgtgaagatcagcctgatccccgaggacagcagactgagacaccagaagacccagaccgtgcccgactgcagagaccccgccttccacgagcacttcttcttccccgtgcaggaggaggacgaccagaagagactgctggtgaccgtgtggaacagagccagccagagcagacagagcggcctgatcggctgcatgagcttcggcgtgaagagcctgctgacccccgacaaggagatcagcggctggtactacctgctgggcgagcacctgggcagaaccaagcacctgaaggtggccagaagaagactgagacccctgagagaccccctgctgagaatgcccggcggcggcgacaccgagaacggcaagaagctgaagatcaccatccccagaggcaaggacggcttcggcttcaccatctgctgcgacagccccgtgagagtgcaggccgtggacagcggcggccccgccgagagagccggcctgcagcagctggacaccgtgctgcagctgaacgagagacccgtggagcactggaagtgcgtggagctggcccacgagatcagaagctgccccagcgagatcatcctgctggtgtggagaatggtgccccaggtgaagcccggccccgacggcggcgtgctgagaagagccagctgcaagagcacccacgacctgcagagcccccccaacaagagagagaagaactgcacccacggcgtgcaggccagacccgagcagagacacagctgccacctggtgtgcgacagcagcgacggcctgctgctgggcggctgggagagatacaccgaggtggccaagagaggcggccagcacaccctgcccgccctgagcagagccaccgcccccaccgaccccaactacatcatcctggcccccctgaaccccggcagccagctgctgagacccgtgtaccaggaggacaccatccccgaggagagcggcagccccagcaagggcaagagctacaccggcctgggcaagaagagcagactgatgaagaccgtgcagaccatgaagggccacggcaactaccagaactgccccgtggtgagaccccacgccacccacagcagctacggcacctacgtgaccctggcccccaaggtgctggtgttccccgtgttcgtgcagcccctggacctgtgcaaccccgccagaaccctgctgctgagcgaggagctgctgctgtacgagggcagaaacaaggccgccgaggtgaccctgttcgcctacagcgacctgctgctgttcaccaaggaggacgagcccggcagatgcgacgtgctgagaaaccccctgtacctgcagagcgtgaagctgcaggagggcagcagcgaggacctgaagttctgcgtgctgtacctggccgagaaggccgagtgcctgttcaccctggaggcccacagccaggagcagaagaagagagtgtgctggtgcctgagcgagaacatcgccaagcagcagcagctggccgccagcccccccgacagcaagaagctgcaccccttcggcagcctgcagcaggagatgggccccgtgaacagcaccaacgccacccaggacagaagcttcaccagccccggccagaccctgatcggctag

SEQ ID NO: 96669 - DNA, 507 bp, synthetic construct
  misc_feature 1..507: note = Description of Artificial Sequence: Synthetic coding sequence
  source 1..507: mol_type = other DNA
atgaagaacaagctgggcatcttcagaagaagaaacgagagccccggcgccccccccgccggcaaggccgacaagatgatgaagagcttcaagcccaccagcgaggaggccctgaagtggggcgagagcctggagaagctgctggtgcacaagtacggcctggccgtgttccaggccttcctgagaaccgagttcagcgaggagaacctggagttctggctggcctgcgaggacttcaagaaggtgaagagccagagcaagatggccagcaaggccaagaagatcttcgccgagtacatcgccatccaggcctgcaaggaggtgaacctggacagctacaccagagagcacaccaaggacaacctgcagagcgtgaccagaggctgcttcgacctggcccagaagagaatcttcggcctgatggagaaggacagctaccccagattcctgagaagcgacctgtacctggacctgatcaaccagaagaagatgagcccccccctgtag

SEQ ID NO: 96670 - DNA, 2754 bp, synthetic construct
  misc_feature 1..2754: note = Description of Artificial Sequence: Synthetic coding sequence
  source 1..2754: mol_type = other DNA
atgaacagattcaacggcctgtgcaaggtgtgcagcgagagaagatacagacagatcaccatccccagaggcaaggacggcttcggcttcaccatctgctgcgacagccccgtgagagtgcaggccgtggacagcggcggccccgccgagagagccggcctgcagcagctggacaccgtgctgcagctgaacgagagacccgtggagcactggaagtgcgtggagctggcccacgagatcagaagctgccccagcgagatcatcctgctggtgtggagaatggtgccccaggtgaagcccggccccgacggcggcgtgctgagaagagccagctgcaagagcacccacgacctgcagagcccccccaacaagagagagaagaactgcacccacggcgtgcaggccagacccgagcagagacacagctgccacctggtgtgcgacagcagcgacggcctgctgctgggcggctgggagagatacaccgaggtggccaagagaggcggccagcacaccctgcccgccctgagcagagccaccgcccccaccgaccccaactacatcatcctggcccccctgaaccccggcagccagctgctgagacccgtgtaccaggaggacaccatccccgaggagagcggcagccccagcaagggcaagagctacaccggcctgggcaagaagagcagactgatgaagaccgtgcagaccatgaagggccacggcaactaccagaactgccccgtggtgagaccccacgccacccacagcagctacggcacctacgtgaccctggcccccaaggtgctggtgttccccgtgttcgtgcagcccctggacctgtgcaaccccgccagaaccctgctgctgagcgaggagctgctgctgtacgagggcagaaacaaggccgccgaggtgaccctgttcgcctacagcgacctgctgctgttcaccaaggaggacgagcccggcagatgcgacgtgctgagaaaccccctgtacctgcagagcgtgaagctgcaggagggcagcagcgaggacctgaagttctgcgtgctgtacctggccgagaaggccgagtgcctgttcaccctggaggcccacagccaggagcagaagaagagagtgtgctggtgcctgagcgagaacatcgccaagcagcagcagctggccgccagcccccccgacagcaagatgttcgagaccgaggccgacgagaagagagagatggccctggaggagggcaagggccccggcgccgaggacagcccccccagcaaggagcccagccccggccaggagctgccccccggccaggacctgccccccaacaaggacagccccagcggccaggagcccgcccccagccaggagcccctgagcagcaaggacagcgccaccagcgagggcagcccccccggccccgacgccccccccagcaaggacgtgcccccctgccaggagcccccccccgcccaggacctgagcccctgccaggacctgcccgccggccaggagcccctgccccaccaggaccccctgctgaccaaggacctgcccgccatccaggagagccccaccagagacctgcccccctgccaggacctgccccccagccaggtgagcctgcccgccaaggccctgaccgaggacaccatgagcagcggcgacctgctggccgccaccggcgacccccccgccgcccccagacccgccttcgtgatccccgaggtgagactggacagcacctacagccagaaggccggcgccgagcagggctgcagcggcgacgaggaggacgccgaggaggccgaggaggtggaggagggcgaggagggcgaggaggacgaggacgaggacaccagcgacgacaactacggcgagagaagcgaggccaagagaagcagcatgatcgagaccggccagggcgccgagggcggcctgagcctgagagtgcagaacagcctgagaagaagaacccacagcgagggcagcctgctgcaggagcccagaggcccctgcttcgccagcgacaccaccctgcactgcagcgacggcgagggcgccgccagcacctggggcatgcccagccccagcaccctgaagaaggagctgggcagaaacggcggcagcatgcaccacctgagcctgttcttcaccggccacagaaagatgagcggcgccgacaccgtgggcgacgacgacgaggccagcagaaagagaaagagcaagaacctggccaaggacatgaagaacaagctgggcatcttcagaagaagaaacgagagccccggcgccccccccgccggcaaggccgacaagatgatgaagagcttcaagcccaccagcgaggaggccctgaagtggggcgagagcctggagaagctgctggtgcacaagtacggcctggccgtgttccaggccttcctgagaaccgagttcagcgaggagaacctggagttctggctggcctgcgaggacttcaagaaggtgaagagccagagcaagatggccagcaaggccaagaagatcttcgccgagtacatcgccatccaggcctgcaaggaggtgaacctggacagctacaccagagagcacaccaaggacaacctgcagagcgtgaccagaggctgcttcgacctggcccagaagagaatcttcggcctgatggagaaggacagctaccccagattcctgagaagcgacctgtacctggacctgatcaaccagaagaagatgagcccccccctgtag

SEQ ID NO: 96671 - DNA, 3597 bp, synthetic construct
  misc_feature 1..3597: note = Description of Artificial Sequence: Synthetic coding sequence
  source 1..3597: mol_type = other DNA
atgcccgtgatccccgccctgtgggaggtggagatgggcagaagccagggccaggagatcgagaccatcctggccaacagaagccacagcgacagcacccccctgcccaacttcctgagcggcagccacagacccgagtgctgcacctgcagactgctgaccgccagcggcgcccaggacagcctgcccttcggcagaagactgtacagcggcccctggagaagctgcgaggaggtgtgccacgtgagcgtgctgagcgtgctgagcaccagctgcggcctgagcctgagcctgcccatcttccccggctggatggagtggctgagccccgacatcgccctgcccagaagagacgagtggacccagaccagccccgccagaaagagaatcacccacgccaaggtgcagggcgccggccagctgagactgagcatcgacgcccaggacagagtgctgctgctgcacatcatcgagggcaagggcctgatcagcaagcagcccggcacctgcgacccctacgtgaagatcagcctgatccccgaggacagcagactgagacaccagaagacccagaccgtgcccgactgcagagaccccgccttccacgagcacttcttcttccccgtgcaggaggaggacgaccagaagagactgctggtgaccgtgtggaacagagccagccagagcagacagagcggcctgatcggctgcatgagcttcggcgtgaagagcctgctgacccccgacaaggagatcagcggctggtactacctgctgggcgagcacctgggcagaaccaagcacctgaaggtggccagaagaagactgagacccctgagagaccccctgctgagaatgcccggcggcggcgacaccgagaacggcaagaagctgaagatcaccatccccagaggcaaggacggcttcggcttcaccatctgctgcgacagccccgtgagagtgcaggccgtggacagcggcggccccgccgagagagccggcctgcagcagctggacaccgtgctgcagctgaacgagagacccgtggagcactggaagtgcgtggagctggcccacgagatcagaagctgccccagcgagatcatcctgctggtgtggagaatggtgccccaggtgaagcccggccccgacggcggcgtgctgagaagagccagctgcaagagcacccacgacctgcagagcccccccaacaagagagagaagaactgcacccacggcgtgcaggccagacccgagcagagacacagctgccacctggtgtgcgacagcagcgacggcctgctgctgggcggctgggagagatacaccgaggtggccaagagaggcggccagcacaccctgcccgccctgagcagagccaccgcccccaccgaccccaactacatcatcctggcccccctgaaccccggcagccagctgctgagacccgtgtaccaggaggacaccatccccgaggagagcggcagccccagcaagggcaagagctacaccggcctgggcaagaagagcagactgatgaagaccgtgcagaccatgaagggccacggcaactaccagaactgccccgtggtgagaccccacgccacccacagcagctacggcacctacgtgaccctggcccccaaggtgctggtgttccccgtgttcgtgcagcccctggacctgtgcaaccccgccagaaccctgctgctgagcgaggagctgctgctgtacgagggcagaaacaaggccgccgaggtgaccctgttcgcctacagcgacctgctgctgttcaccaaggaggacgagcccggcagatgcgacgtgctgagaaaccccctgtacctgcagagcgtgaagctgcaggagggcagcagcgaggacctgaagttctgcgtgctgtacctggccgagaaggccgagtgcctgttcaccctggaggcccacagccaggagcagaagaagagagtgtgctggtgcctgagcgagaacatcgccaagcagcagcagctggccgccagcccccccgacagcaagatgttcgagaccgaggccgacgagaagagagagatggccctggaggagggcaagggccccggcgccgaggacagcccccccagcaaggagcccagccccggccaggagctgccccccggccaggacctgccccccaacaaggacagccccagcggccaggagcccgcccccagccaggagcccctgagcagcaaggacagcgccaccagcgagggcagcccccccggccccgacgccccccccagcaaggacgtgcccccctgccaggagcccccccccgcccaggacctgagcccctgccaggacctgcccgccggccaggagcccctgccccaccaggaccccctgctgaccaaggacctgcccgccatccaggagagccccaccagagacctgcccccctgccaggacctgccccccagccaggtgagcctgcccgccaaggccctgaccgaggacaccatgagcagcggcgacctgctggccgccaccggcgacccccccgccgcccccagacccgccttcgtgatccccgaggtgagactggacagcacctacagccagaaggccggcgccgagcagggctgcagcggcgacgaggaggacgccgaggaggccgaggaggtggaggagggcgaggagggcgaggaggacgaggacgaggacaccagcgacgacaactacggcgagagaagcgaggccaagagaagcagcatgatcgagaccggccagggcgccgagggcggcctgagcctgagagtgcagaacagcctgagaagaagaacccacagcgagggcagcctgctgcaggagcccagaggcccctgcttcgccagcgacaccaccctgcactgcagcgacggcgagggcgccgccagcacctggggcatgcccagccccagcaccctgaagaaggagctgggcagaaacggcggcagcatgcaccacctgagcctgttcttcaccggccacagaaagatgagcggcgccgacaccgtgggcgacgacgacgaggccagcagaaagagaaagagcaagaacctggccaaggacatgaagaacaagctgggcatcttcagaagaagaaacgagagccccggcgccccccccgccggcaaggccgacaagatgatgaagagcttcaagcccaccagcgaggaggccctgaagtggggcgagagcctggagaagctgctggtgcacaagtacggcctggccgtgttccaggccttcctgagaaccgagttcagcgaggagaacctggagttctggctggcctgcgaggacttcaagaaggtgaagagccagagcaagatggccagcaaggccaagaagatcttcgccgagtacatcgccatccaggcctgcaaggaggtgaacctggacagctacaccagagagcacaccaaggacaacctgcagagcgtgaccagaggctgcttcgacctggcccagaagagaatcttcggcctgatggagaaggacagctaccccagattcctgagaagcgacctgtacctggacctgatcaaccagaagaagatgagcccccccctgtag

SEQ ID NO: 96672 - DNA, 1560 bp, synthetic construct
  misc_feature 1..1560: note = Description of Artificial Sequence: Synthetic coding sequence
  source 1..1560: mol_type = other DNA
atgttcgagaccgaggccgacgagaagagagagatggccctggaggagggcaagggccccggcgccgaggacagcccccccagcaaggagcccagccccggccaggagctgccccccggccaggacctgccccccaacaaggacagccccagcggccaggagcccgcccccagccaggagcccctgagcagcaaggacagcgccaccagcgagggcagcccccccggccccgacgccccccccagcaaggacgtgcccccctgccaggagcccccccccgcccaggacctgagcccctgccaggacctgcccgccggccaggagcccctgccccaccaggaccccctgctgaccaaggacctgcccgccatccaggagagccccaccagagacctgcccccctgccaggacctgccccccagccaggtgagcctgcccgccaaggccctgaccgaggacaccatgagcagcggcgacctgctggccgccaccggcgacccccccgccgcccccagacccgccttcgtgatccccgaggtgagactggacagcacctacagccagaaggccggcgccgagcagggctgcagcggcgacgaggaggacgccgaggaggccgaggaggtggaggagggcgaggagggcgaggaggacgaggacgaggacaccagcgacgacaactacggcgagagaagcgaggccaagagaagcagcatgatcgagaccggccagggcgccgagggcggcctgagcctgagagtgcagaacagcctgagaagaagaacccacagcgagggcagcctgctgcaggagcccagaggcccctgcttcgccagcgacaccaccctgcactgcagcgacggcgagggcgccgccagcacctggggcatgcccagccccagcaccctgaagaaggagctgggcagaaacggcggcagcatgcaccacctgagcctgttcttcaccggccacagaaagatgagcggcgccgacaccgtgggcgacgacgacgaggccagcagaaagagaaagagcaagaacctggccaaggacatgaagaacaagctgggcatcttcagaagaagaaacgagagccccggcgccccccccgccggcaaggccgacaagatgatgaagagcttcaagcccaccagcgaggaggccctgaagtggggcgagagcctggagaagctgctggtgcacaagtacggcctggccgtgttccaggccttcctgagaaccgagttcagcgaggagaacctggagttctggctggcctgcgaggacttcaagaaggtgaagagccagagcaagatggccagcaaggccaagaagatcttcgccgagtacatcgccatccaggcctgcaaggaggtgaacctggacagctacaccagagagcacaccaaggacaacctgcagagcgtgaccagaggctgcttcgacctggcccagaagagaatcttcggcctgatggagaaggacagctaccccagattcctgagaagcgacctgtacctggacctgatcaaccagaagaagatgagcccccccctgtag

SEQ ID NO: 96673 - DNA, 3597 bp, synthetic construct; identical to SEQ ID NO: 96671
  misc_feature 1..3597: note = Description of Artificial Sequence: Synthetic coding sequence
  source 1..3597: mol_type = other DNA

SEQ ID NO: 96674 - DNA, 1776 bp, synthetic construct
  misc_feature 1..1776: note = Description of Artificial Sequence: Synthetic coding sequence
  source 1..1776: mol_type = other DNA
atgaacagattcaacggcctgtgcaaggtgtgcagcgagagaagatacagacagatcaccatccccagaggcaaggacggcttcggcttcaccatctgctgcgacagccccgtgagagtgcaggccgtggacagcggcggccccgccgagagagccggcctgcagcagctggacaccgtgctgcagctgaacgagagacccgtggagcactggaagtgcgtggagctggcccacgagatcagaagctgccccagcgagatcatcctgctggtgtggagaatggtgccccaggtgaagcccggccccgacggcggcgtgctgagaagagccagctgcaagagcacccacgacctgcagagcccccccaacaagagagagaagaactgcacccacggcgtgcaggccagacccgagcagagacacagctgccacctggtgtgcgacagcagcgacggcctgctgctgggcggctgggagagatacaccgaggtggccaagagaggcggccagcacaccctgcccgccctgagcagagccaccgcccccaccgaccccaactacatcatcctggcccccctgaaccccggcagccagctgctgagacccgtgtaccaggaggacaccatccccgaggagagcggcagccccagcaagggcaagagctacaccggcctgggcaagaagagcagactgatgaagaccgtgcagaccatgaagggccacggcaactaccagaactgccccgtggtgagaccccacgccacccacagcagctacggcacctacgtgaccctggcccccaaggtgctggtgttccccgtgttcgtgcagcccctggacctgtgcaaccccgccagaaccctgctgctgagcgaggagctgctgctgtacgagggcagaaacaaggccgccgaggtgaccctgttcgcctacagcgacctgctgctgttcaccaaggaggacgagcccggcagatgcgacgtgctgagaaaccccctgtacctgcagagcgtgaagctgcaggagggcagcagcgaggacctgaagttctgcgtgctgtacctggccgagaaggccgagtgcctgttcaccctggaggcccacagccaggagcagaagaagagagtgtgctggtgcctgagcgagaacatcgccaagcagcagcagctggccgccagcccccccgacagcaagatgagcggcgccgacaccgtgggcgacgacgacgaggccagcagaaagagaaagagcaagaacctggccaaggacatgaagaacaagctgggcatcttcagaagaagaaacgagagccccggcgccccccccgccggcaaggccgacaagatgatgaagagcttcaagcccaccagcgaggaggccctgaagtggggcgagagcctggagaagctgctggtgcacaagtacggcctggccgtgttccaggccttcctgagaaccgagttcagcgaggagaacctggagttctggctggcctgcgaggacttcaagaaggtgaagagccagagcaagatggccagcaaggccaagaagatcttcgccgagtacatcgccatccaggcctgcaaggaggtgaacctggacagctacaccagagagcacaccaaggacaacctgcagagcgtgaccagaggctgcttcgacctggcccagaagagaatcttcggcctgatggagaaggacagctaccccagattcctgagaagcgacctgtacctggacctgatcaaccagaagaagatgagcccccccctgtag

SEQ ID NO: 96675 - DNA, 1560 bp, synthetic construct; identical to SEQ ID NO: 96672
  misc_feature 1..1560: note = Description of Artificial Sequence: Synthetic coding sequence
  source 1..1560: mol_type = other DNA

SEQ ID NO: 96676 - DNA, 936 bp, synthetic construct
  misc_feature 1..936: note = Description of Artificial Sequence: Synthetic coding sequence
  source 1..936: mol_type = other DNA
atggtgaccagaagacccgtgaccaacagctgggactggctgcccgccggcgccgcccccgaggccgtgccctgcagacacatgcccctgagcagactgcccctgagagtgggccagaaggagttcttcttccccctgcccctgctggtgccccccatcagctggctgctgctgagcgagagccagcccagactggtgcccggcagccccgtgatcagacccggcttccagagagcctgcgtggccgccgcctgcaccgtggccgccagatgccccggcagaggcgtgggcgacagaagccagagcggcgccagctacagacccatctgcggccccaaggtgggcggccccaccgagatgctgagaggcatgtacctgaccagaaacggcaacctgcagagaagacacaccatgaaggaggccaaggacatgaagaacaagctgggcatcttcagaagaagaaacgagagccccggcgccccccccgccggcaaggccgacaagatgatgaagagcttcaagcccaccagcgaggaggccctgaagtggggcgagagcctggagaagctgctggtgcacaagtacggcctggccgtgttccaggccttcctgagaaccgagttcagcgaggagaacctggagttctggctggcctgcgaggacttcaagaaggtgaagagccagagcaagatggccagcaaggccaagaagatcttcgccgagtacatcgccatccaggcctgcaaggaggtgaacctggacagctacaccagagagcacaccaaggacaacctgcagagcgtgaccagaggctgcttcgacctggcccagaagagaatcttcggcctgatggagaaggacagctaccccagattcctgagaagcgacctgtacctggacctgatcaaccagaagaagatgagcccccccctgtag

SEQ ID NO: 96677 - DNA, 564 bp, synthetic construct
  misc_feature 1..564: note = Description of Artificial Sequence: Synthetic coding sequence
  source 1..564: mol_type = other DNA
atgaagcacagactgggcttcctgctgcagaagagcgacagctgcgagcacaacagcagccacaacaagaaggacaaggtggtgatctgccagagagtgagccaggaggaggtgaagaagtgggccgagagcctggagaacctgatcagccacgagtgcggcctggccgccttcaaggccttcctgaagagcgagtacagcgaggagaacatcgacttctggatcagctgcgaggagtacaagaagatcaagagccccagcaagctgagccccaaggccaagaagatctacaacgagttcatcagcgtgcaggccaccaaggaggtgaacctggacagctgcaccagagaggagaccagcagaaacatgctggagcccaccatcacctgcttcgacgaggcccagaagaagatcttcaacctgatggagaaggacagctacagaagattcctgaagagcagattctacctggacctggtgaaccccagcagctgcggcgccgagaagcagaagggcgccaagagcagcgccgactgcgccagcctggtgccccagtgcgcctag

SEQ ID NO: 96678 - DNA, 282 bp, synthetic construct
  misc_feature 1..282: note = Description of Artificial Sequence: Synthetic coding sequence
  source 1..282: mol_type = other DNA
atgtgcaagggcctggccggcctgcccgccagctgcctgagaagcgccaaggacatgaagcacagactgggcttcctgctgcagaagagcgacagctgcgagcacaacagcagccacaacaagaaggacaaggtggtgatctgccagagagtgagccaggaggaggtgaagaagtgggccgagagcctggagaacctgatcagccacgagtgcgagcccggcttcctgcaccagggcagagacaagcccgagcacgccagagcctacaacaacctgctgtag

SEQ ID NO: 96679 - DNA, 618 bp, synthetic construct
  misc_feature 1..618: note = Description of Artificial Sequence: Synthetic coding sequence
  source 1..618: mol_type = other DNA
atgtgcaagggcctggccggcctgcccgccagctgcctgagaagcgccaaggacatgaagcacagactgggcttcctgctgcagaagagcgacagctgcgagcacaacagcagccacaacaagaaggacaaggtggtgatctgccagagagtgagccaggaggaggtgaagaagtgggccgagagcctggagaacctgatcagccacgagtgcggcctggccgccttcaaggccttcctgaagagcgagtacagcgaggagaacatcgacttctggatcagctgcgaggagtacaagaagatcaagagccccagcaagctgagccccaaggccaagaagatctacaacgagttcatcagcgtgcaggccaccaaggaggtgaacctggacagctgcaccagagaggagaccagcagaaacatgctggagcccaccatcacctgcttcgacgaggcccagaagaagatcttcaacctgatggagaaggacagctacagaagattcctgaagagcagattctacctggacctggtgaaccccagcagctgcggcgccgagaagcagaagggcgccaagagcagcgccgactgcgccagcctggtgccccagtgcgcctag

SEQ ID NO: 96680 - DNA, 909 bp, synthetic construct
  misc_feature 1..909: note = Description of Artificial Sequence: Synthetic coding sequence
  source 1..909: mol_type = other DNA
atgtacaacatgatgctgctgatccagaagagaaagggcatcggcagccagctgctgagagccggcgaggccgagggcgacagaggcgccggcaccgccgagagaagcagcgactggctggacggcagaagctgggccatcaaggagacccccaccggcctggccggcagaagaagcgaggacagcgacaacatcttcaccggcgaggaggccaagtacgcccagagcagaagccacagcagcagctgcagaatcagcttcctgctggccaacagcaagctgctgaacaagatgtgcaagggcctggccggcctgcccgccagctgcctgagaagcgccaaggacatgaagcacagactgggcttcctgctgcagaagagcgacagctgcgagcacaacagcagccacaacaagaaggacaaggtggtgatctgccagagagtgagccaggaggaggtgaagaagtgggccgagagcctggagaacctgatcagccacgagtgcggcctggccgccttcaaggccttcctgaagagcgagtacagcgaggagaacatcgacttctggatcagctgcgaggagtacaagaagatcaagagccccagcaagctgagccccaaggccaagaagatctacaacgagttcatcagcgtgcaggccaccaaggaggtgaacctggacagctgcaccagagaggagaccagcagaaacatgctggagcccaccatcacctgcttcgacgaggcccagaagaagatcttcaacctgatggagaaggacagctacagaagattcctgaagagcagattctacctggacctggtgaaccccagcagctgcggcgccgagaagcagaagggcgccaagagcagcgccgactgcgccagcctggtgccccagtgcgcctag

SEQ ID NO: 96681 - DNA, 564 bp, synthetic construct; identical to SEQ ID NO: 96677
  misc_feature 1..564: note = Description of Artificial Sequence: Synthetic coding sequence
  source 1..564: mol_type = other DNA

SEQ ID NO: 96682 - DNA, 432 bp, synthetic construct
  misc_feature 1..432: note = Description of Artificial Sequence: Synthetic coding sequence
  source 1..432: mol_type = other DNA
atgaagcacagactgggcttcctgctgcagaagagcgacagctgcgagcacaacagcagccacaacaagaaggacaaggtggtgatctgccagagagtgagccaggaggaggtgaagaagtgggccgagagcctggagaacctgatcagccacgagtgcggcctggccgccttcaaggccttcctgaagagcgagtacagcgaggagaacatcgacttctggatcagctgcgaggagtacaagaagatcaagagccccagcaagctgagccccaaggccaagaagatctacaacgagttcatcagcgtgcaggccaccaaggaggtgaacctggacagctgcaccagagaggagaccagcagaaacatgctggagcccaccatcacctgcttcgacgaggcccagaagaagatcttcaacctgatggagtag

SEQ ID NO: 96683 - DNA, 546 bp, synthetic construct
  misc_feature 1..546: note = Description of Artificial Sequence: Synthetic coding sequence
  source 1..546: mol_type = other DNA
atgtgcaagggcctggccgccctgccccacagctgcctggagagagccaaggagatcaagatcaagctgggcatcctgctgcagaagcccgacagcgtgggcgacctggtgatcccctacaacgagaagcccgagaagcccgccaagacccagaagaccagcctggacgaggccctgcagtggagagacagcctggacaagctgctgcagaacaactacggcctggccagcttcaagagcttcctgaagagcgagttcagcgaggagaacctggagttctggatcgcctgcgaggactacaagaagatcaagagccccgccaagatggccgagaaggccaagcagatctacgaggagttcatccagaccgaggcccccaaggaggtgaacatcgaccacttcaccaaggacatcaccatgaagaacctggtggagcccagcctgagcagcttcgacatggcccagaagagaatccacgccctgatggagaaggacagcctgcccagattcgtgagaagcgagttctaccaggagctgatcaagtag

SEQ ID NO: 96684 - DNA, 606 bp, synthetic construct
  misc_feature 1..606: note = Description of Artificial Sequence: Synthetic coding sequence
  source 1..606: mol_type = other DNA
atgtgcgccagaaacatcagccaggacatcctgatcctgcagatgcacagcgcccactggcacatcaacggcaagtacgaggagaagagcaacctgatgttctgggccaaggagatcaagatcaagctgggcatcctgctgcagaagcccgacagcgtgggcgacctggtgatcccctacaacgagaagcccgagaagcccgccaagacccagaagaccagcctggacgaggccctgcagtggagagacagcctggacaagctgctgcagaacaactacggcctggccagcttcaagagcttcctgaagagcgagttcagcgaggagaacctggagttctggatcgcctgcgaggactacaagaagatcaagagccccgccaagatggccgagaaggccaagcagatctacgaggagttcatccagaccgaggcccccaaggaggtgaacatcgaccacttcaccaaggacatcaccatgaagaacctggtggagcccagcctgagcagcttcgacatggcccagaagagaatccacgccctgatggagaaggacagcctgcccagattcgtgagaagcgagttctaccaggagctgatcaagtag

SEQ ID NO: 96685 - DNA, 222 bp, synthetic construct
  misc_feature 1..222: note = Description of Artificial Sequence: Synthetic coding sequence
  source 1..222: mol_type = other DNA
atggccgagaaggccaagcagatctacgaggagttcatccagaccgaggcccccaaggaggtgaacatcgaccacttcaccaaggacatcaccatgaagaacctggtggagcccagcctgagcagcttcgacatggcccagaagagaatccacgccctgatggagaaggacagcctgcccagattcgtgagaagcgagttctaccaggagctgatcaagtag

SEQ ID NO: 96686 - DNA, 1362 bp, synthetic construct
  misc_feature 1..1362: note = Description of Artificial Sequence: Synthetic coding sequence
  source 1..1362: mol_type = other DNA
atggcccagggcagcggcgaccagagagccgtgggcgtggccgaccccgaggagagcagccccaacatgatcgtgtactgcaagatcgaggacatcatcaccaagatgcaggacgacaagaccggcggcgtgcccatcagaaccgtgaagagcttcctgagcaagatccccagcgtggtgaccggcaccgacatcgtgcagtggctgatgaagaacctgagcatcgaggaccccgtggaggccatccacctgggcagcctgatcgccgcccagggctacatcttccccatcagcgaccacgtgctgaccatgaaggacgacggcaccttctacagattccaggccccctacttctggcccagcaactgctgggagcccgagaacaccgactacgccatctacctgtgcaagagaaccatgcagaacaaggccagactggagctggccgactacgaggccgagaacctggccagactgcagagagccttcgccagaaagtgggagttcatcttcatgcaggccgaggcccaggtgaagatcgacagaaagaaggacaagaccgagagaaagatcctggacagccaggagagagccttctgggacgtgcacagacccgtgcccggctgcgtgaacaccaccgagatggacatcagaaagtgcagaagactgaagaacccccagaaggtgaagaagagcgtgtacggcgtgaccgaggagagccaggcccagagccccgtgcacgtgctgagccagcccatcagaaagaccaccaaggaggacatcagaaagcagatcaccttcctgaacgcccagatcgacagacactgcctgaagatgagcaaggtggccgagagcaaggagcccagccagcagagagtgaagagatggggcttcagcttcgacgagatcctgaaggaccaggtgggcagagaccagttcctgagattcctggagagcgagttcagcagcgagaacctgagattctggctggccgtgcaggacctgaagaagcagcccctgcaggacgtggccaagagagtggaggagatctggcaggagttcctggcccccggcgcccccagcgccatcaacctggacagccacagctacgagatcaccagccagaacgtgaaggacggcggcagatacaccttcgaggacgcccaggagcacatctacaagctgatgaagagcgacagctacgccagattcctgagaagcaacgcctaccaggacctgctgctggccaagaagaagcccgagagcgagcagggcagaagaaccagcctggagaagttcaccagaagcgtgggcaagagcctggccggcaagagactgaccggcctgatgcagagcagctag

SEQ ID NO: 96687 - DNA, 1383 bp, synthetic construct
  misc_feature 1..1383: note = Description of Artificial Sequence: Synthetic coding sequence
  source 1..1383: mol_type = other DNA
atggcccagggcagcggcgaccagagagccgtgggcgtggccgaccccgaggagagcagccccaacatgatcgtgtactgcaagatcgaggacatcatcaccaagatgcaggacgacaagaccggcggcgtgcccatcagaaccgtgaagagcttcctgagcaagatccccagcgtggtgaccggcaccgacatcgtgcagtggctgatgaagaacctgagcatcgaggaccccgtggaggccatccacctgggcagcctgatcgccgcccagggctacatcttccccatcagcgaccacgtgctgaccatgaaggacgacggcaccttctacagattccaggccccctacttctggcccagcaactgctgggagcccgagaacaccgactacgccatctacctgtgcaagagaaccatgcagaacaaggccagactggagctggccgactacgaggccgagaacctggccagactgcagagagccttcgccagaaagtgggagttcatcttcatgcaggccgaggcccaggtgaagatcgacagaaagaaggacaagaccgagagaaagatcctggacagccaggagagagccttctgggacgtgcacagacccgtgcccggctgcgtgaacaccaccgagatggacatcagaaagtgcagaagactgaagaacccccagaaggtgaagaagagcgtgtacggcgtgaccgaggagagccaggcccagagccccgtgcacgtgctgagccagcccatcagaaagaccaccaaggaggacatcagaaagcagatcaccttcctgaacgcccagatcgacagacactgcctgaagatgagcaaggtggccgagagcctgatcgcctacaccgagcagtacgtggagtacgaccccctgatcacccccgccgagcccagcaacccctggatcagcgacgacgtggccctgtgggacatcgagatgagcaaggagcccagccagcagagagtgaagagatggggcttcagcttcgacgagatcctgaaggaccaggtgggcagagaccagttcctgagattcctggagagcgagttcagcagcgagaacctgagattctggctggccgtgcaggacctgaagaagcagcccctgcaggacgtggccaagagagtggaggagatctggcaggagttcctggcccccggcgcccccagcgccatcaacctggacagccacagctacgagatcaccagccagaacgtgaaggacggcggcagatacaccttcgaggacgcccaggagcacatctacaagctgatgaagagcgacagctacgccagattcctgagaagcaacgcctaccaggacctgctgctggccaagaagaaggtgtggctgctgtag

SEQ ID NO: 96688 - DNA, 1419 bp, synthetic construct
  misc_feature 1..1419: note = Description of Artificial Sequence: Synthetic coding sequence
  source 1..1419: mol_type = other DNA
atggcccagggcagcggcgaccagagagccgtgggcgtggccgaccccgaggagagcagccccaacatgatcgtgtactgcaagatcgaggacatcatcaccaagatgcaggacgacaagaccggcggcgtgcccatcagaaccgtgaagagcttcctgagcaagatccccagcgtggtgaccggcaccgacatcgtgcagtggctgatgaagaacctgagcatcgaggaccccgtggaggccatccacctgggcagcctgatcgccgcccagggctacatcttccccatcagcgaccacgtgctgaccatgaaggacgacggcaccttctacagattccaggccccctacttctggcccagcaactgctgggagcccgagaacaccgactacgccatctacctgtgcaagagaaccatgcagaacaaggccagactggagctggccgactacgaggccgagaacctggccagactgcagagagccttcgccagaaagtgggagttcatcttcatgcaggccgaggcccaggtgaagatcgacagaaagaaggacaagaccgagagaaagatcctggacagccaggagagagccttctgggacgtgcacagacccgtgcccggctgcgtgaacaccaccgagatggacatcagaaagtgcagaagactgaagaacccccagaaggtgaagaagagcgtgtacggcgtgaccgaggagagccaggcccagagccccgtgcacgtgctgagccagcccatcagaaagaccaccaaggaggacatcagaaagcagatcaccttcctgaacgcccagatcgacagacactgcctgaagatgagcaaggtggccgagagcctgatcgcctacaccgagcagtacgtggagtacgaccccctgatcacccccgccgagcccagcaacccctggatcagcgacgacgtggccctgtgggacatcgagatgagcaaggagcccagccagcagagagtgaagagatggggcttcagcttcgacgagatcctgaaggaccaggtgggcagagaccagttcctgagattcctggagagcgagttcagcagcgagaacctgagattctggctggccgtgcaggacctgaagaagcagcccctgcaggacgtggccaagagagtggaggagatctggcaggagttcctggcccccggcgcccccagcgccatcaacctggacagccacagctacgagatcaccagccagaacgtgaaggacggcggcagatacaccttcgaggacgcccaggagcacatctacaagctgatgaagagcgacagctacgccagattcctgagaagcaacgcctaccaggacctgctgctggccaagaagaagggcaagagcctggccggcaagagactgaccggcctgatgcagagcagctag

SEQ ID NO: 96689 - DNA, 1443 bp, synthetic construct
  misc_feature 1..1443: note = Description of Artificial Sequence: Synthetic coding sequence
  source 1..1443: mol_type = other DNA
atggcccagggcagcggcgaccagagagccgtgggcgtggccgaccccgaggagagcagccccaacatgatcgtgtactgcaagatcgaggacatcatcaccaagatgcaggacgacaagaccggcggcgtgcccatcagaaccgtgaagagcttcctgagcaagatccccagcgtggtgaccggcaccgacatcgtgcagtggctgatgaagaacctgagcatcgaggaccccgtggaggccatccacctgggcagcctgatcgccgcccagggctacatcttccccatcagcgaccacgtgctgaccatgaaggacgacggcaccttctacagattccaggccccctacttctggcccagcaactgctgggagcccgagaacaccgactacgccatctacctgtgcaagagaaccatgcagaacaaggccagactggagctggccgactacgaggccgagaacctggccagactgcagagagccttcgccagaaagtgggagttcatcttcatgcaggccgaggcccaggtgaagatcgacagaaagaaggacaagaccgagagaaagatcctggacagccaggagagagccttctgggacgtgcacagacccgtgcccggctgcgtgaacaccaccgagatggacatcagaaagtgcagaagactgaagaacccccagaaggtgaagaagagcgtgtacggcgtgaccgaggagagccaggcccagagccccgtgcacgtgctgagccagcccatcagaaagaccaccaaggaggacatcagaaagcagatcaccttcctgaacgcccagatcgacagacactgcctgaagatgagcaaggtggccgagagcctgatcgcctacaccgagcagtacgtggagtacgaccccctgatcacccccgccgagcccagcaacccctggatcagcgacgacgtggccctgtgggacatcgagatgagcaaggagcccagccagcagagagtgaagagatggggcttcagcttcgacgagatcctgaaggaccaggtgggcagagaccagttcctgagattcctggagagcgagttcagcagcgagaacctgagattctggctggccgtgcaggacctgaagaagcagcccctgcaggacgtggccaagagagtggaggagatctggcaggagttcctggcccccggcgcccccagcgccatcaacctggacagccacagctacgagatcaccagccagaacgtgaaggacggcggcagatacaccttcgaggacgcccaggagcacatctacaagctgatgaagagcgacagctacgccagattcctgagaagcaacgcctaccaggacctgctgctggccaagaagaagcccgagagcgagcagggcagaagaaccagcctggagaagttcaccagaagcgtgtgcctgcagctgctgttctag

SEQ ID NO: 96690 - DNA, 1428 bp, synthetic construct
  misc_feature 1..1428: note = Description of Artificial Sequence: Synthetic coding sequence
  source 1..1428: mol_type = other DNA
atggcccagggcagcggcgaccagagagccgtgggcgtggccgaccccgaggagagcagccccaacatgatcgtgtactgcaagatcgaggacatcatcaccaagatgcaggacgacaagaccggcggcgtgcccatcagaaccgtgaagagcttcctgagcaagatccccagcgtggtgaccggcaccgacatcgtgcagtggctgatgaagaacctgagcatcgaggaccccgtggaggccatccacctgggcagcctgatcgccgcccagggctacatcttccccatcagcgaccacgtgctgaccatgaaggacgacggcaccttctacagattccaggccccctacttctggcccagcaactgctgggagcccgagaacaccgactacgccatctacctgtgcaagagaaccatgcagaacaaggccagactggagctggccgactacgaggccgagaacctggccagactgcagagagccttcgccagaaagtgggagttcatcttcatgcaggccgaggcccaggtgaagatcgacagaaagaaggacaagaccgagagaaagatcctggacagccaggagagagccttctgggacgtgcacagacccgtgcccggctgcgtgaacaccaccgagatggacatcagaaagtgcagaagactgaagaacccccagaaggtgaagaagagcgtgtacggcgtgaccgaggagagccaggcccagagccccgtgcacgtgctgagccagcccatcagaaagaccaccaaggaggacatcagaaagcagatcaccttcctgaacgcccagatcgacagacactgcctgaagatgagcaaggtggccgagagcctgatcgcctacaccgagcagtacgtggagtacgaccccctgatcacccccgccgagcccagcaacccctggatcagcgacgacgtggccctgtgggacatcgagatgagcaaggagcccagccagcagagagtgaagagatggggcttcagcttcgacgagatcctgaaggaccaggtgggcagagaccagttcctgagattcctggagagcgagttcagcagcgagaacctgagattctggctggccgtgcaggacctgaagaagcagcccctgcaggacgtggccaagagagtggaggagatctggcaggagttcctggcccccggcgcccccagcgccatcaacctggacagccacagctacgagatcaccagccagaacgtgaaggacggcggcagatacaccttcgaggacgcccaggagcacatctacaagctgatgaagagcgacagctacgccagattcctgagaagcaacgcctaccaggacctgctgctggccaagaagaagcccgagagcgagcagggcagaagaaccagcctggagaagttcaccagaagcgtgggctag

SEQ ID NO: 96691 - DNA, 1434 bp, synthetic construct
  misc_feature 1..1434: note = Description of Artificial Sequence: Synthetic coding sequence
  source 1..1434: mol_type = other DNA
atggcccagggcagcggcgaccagagagccgtgggcgtggccgaccccgaggagagcagccccaacatgatcgtgtactgcaagatcgaggacatcatcaccaagatgcaggacgacaagaccggcggcgtgcccatcagaaccgtgaagagcttcctgagcaagatccccagcgtggtgaccggcaccgacatcgtgcagtggctgatgaagaacctgagcatcgaggaccccgtggaggccatccacctgggcagcctgatcgccgcccagggctacatcttccccatcagcgaccacgtgctgaccatgaaggacgacggcaccttctacagattccaggccccctacttctggcccagcaactgctgggagcccgagaacaccgactacgccatctacctgtgcaagagaaccatgcagaacaaggccagactggagctggccgactacgaggccgagaacctggccagactgcagagagccttcgccagaaagtgggagttcatcttcatgcaggccgaggcccaggtgaagatcgacagaaagaaggacaagaccgagagaaagatcctggacagccaggagagagccttctgggacgtgcacagacccgtgcccggctgcgtgaacaccaccgagatggacatcagaaagtgcagaagactgaagaacccccagaaggtgaagaagagcgtgtacggcgtgaccgaggagagccaggcccagagccccgtgcacgtgctgagccagcccatcagaaagaccaccaaggaggacatcagaaagcagatcaccttcctgaacgcccagatcgacagacactgcctgaagatgagcaaggtggccgagagcctgatcgcctacaccgagcagtacgtggagtacgaccccctgatcacccccgccgagcccagcaacccctggatcagcgacgacgtggccctgtgggacatcgagatgagcaaggagcccagccagcagagagtgaagagatggggcttcagcttcgacgagatcctgaaggaccaggtgggcagagaccagttcctgagattcctggagagcgagttcagcagcgagaacctgagattctggctggccgtgcaggacctgaagaagcagcccctgcaggacgtggccaagagagtggaggagatctggcaggagttcctggcccccggcgcccccagcgccatcaacctggacagccacagctacgagatcaccagccagaacgtgaaggacggcggcagatacaccttcgaggacgcccaggagcacatctacaagctgatgaagagcgacagctacgccagattcctgagaagcaacgcctaccaggacctgctgctggccaagaagaagcccgagagcgagcagggcagaagaaccagcctggagaagttcaccagaagcgtgctgctgttctag

SEQ ID NO: 96692 - DNA, 1620 bp, synthetic construct
  misc_feature 1..1620: note = Description of Artificial Sequence: Synthetic coding sequence
  source 1..1620: mol_type = other DNA
atgaagaacctgagcatcgaggaccccgtggaggccatccacctgggcagcctgatcgccgcccagggctacatcttccccatcagcgaccacgtgctgaccatgaaggacgacggcaccttctacagattccaggccccctacttctggcccagcaactgctgggagcccgagaacaccgactacgccatctacctgtgcaagagaaccatgcagaacaaggccagactggagctggccgactacgaggccgagaacctggccagactgcagagagccttcgccagaaagtgggagttcatcttcatgcaggccgaggcccaggtgaagatcgacagaaagaaggacaagaccgagagaaagatcctggacagccaggagagagccttctgggacgtgcacagacccgtgcccggctgcgtgaacaccaccgagatggacatcagaaagtgcagaagactgaagaacccccagaaggtgaagaagagcgtgtacggcgtgaccgaggagagccaggcccagagccccgtgcacgtgctgagccagcccatcagaaagaccaccaaggaggacatcagaaagcagatcaccttcctgaacgcccagatcgacagacactgcctgaagatgagcaaggtggccgagagcctgatcgcctacaccgagcagtacgtggagtacgaccccctgatcacccccgccgagcccagcaacccctggatcagcgacgacgtggccctgtgggacatcgagatgagcaaggagcccagccagcagagagtgaagagatggggcttcagcttcgacgagatcctgaaggaccaggtgggcagagaccagttcctgagattcctggagagcgagttcagcagcgagaacctgagattctggctggccgtgcaggacctgaagaagcagcccctgcaggacgtggccaagagagtggaggagatctggcaggagttcctggcccccggcgcccccagcgccatcaacctggacagccacagctacgagatcaccagccagaacgtgaaggacggcggcagatacaccttcgaggacgcccaggagcacatctacaagctgatgaagagcgacagctacgccagattcctgagaagcaacgcctaccaggacctgctgctggccaagaagaagcccgagagcgagcagggcagaagaaccagcctggagaagttcaccagaagcgtgaacgtgcagaacaccagacccgccggcgcctggagcatcttcatggccgccctgcccatggccgtgtggctgagaacccccagaagctgccacggcctgagcgagagcagactgctgggcctgcccagcctgcacgacggcctgagagagggccagagcctgccccagagctgccccggcagcagcagcaccgccgccgagggcgccagagagagagccagcaacggcagaagcctggccagaagacagcactgccagtgccacggccagggcgaggagacccagctgtgcctgtggagcagactggagagcagcaagagaagccagagagccagcagcctgagaaccagcaaggccaagaagaagagacagaccgtgaagcagggccccaaggcctggccctag

SEQ ID NO: 96693 - DNA, 1299 bp, synthetic construct
  misc_feature 1..1299: note = Description of Artificial Sequence: Synthetic coding sequence
  source 1..1299: mol_type = other DNA
atcgaggacatcatcaccaagatgcaggacgacaagaccggcggcgtgcccatcagaaccgtgaagagcttcctgagcaagatccccagcgtggtgaccggcaccgacatcgtgcagtggctgatgaagaacctgagcatcgaggaccccgtggaggccatccacctgggcagcctgatcgccgcccagggctacatcttccccatcagcgaccacgtgctgaccatgaaggacgacggcaccttctacagattccaggccccctacttctggcccagcaactgctgggagcccgagaacaccgactacgccatctacctgtgcaagagaaccatgcagaacaaggccagactggagctggccgactacgaggccgagaacctggccagactgcagagagccttcgccagaaagtgggagttcatcttcatgcaggccgaggcccaggtgaagatcgacagaaagaaggacaagaccgagagaaagatcctggacagccaggagagagccttctgggacgtgcacagacccgtgcccggctgcgtgaacaccaccgagatggacatcagaaagtgcagaagactgaagaacccccagaaggtgaagaagagcgtgtacggcgtgaccgaggagagccaggcccagagccccgtgcacgtgctgagccagcccatcagaaagaccaccaaggaggacatcagaaagcagatcaccttcctgaacgcccagatcgacagacactgcctgaagatgagcaaggtggccgagagcctgatcgcctacaccgagcagtacgtggagtacgaccccctgatcacccccgccgagcccagcaacccctggatcagcgacgacgtggccctgtgggacatcgagatgagcaaggagcccagccagcagagagtgaagagatggggcttcagcttcgacgagatcctgaaggaccaggtgggcagagaccagttcctgagattcctggagagcgagttcagcagcgagaacctgagattctggctggccgtgcaggacctgaagaagcagcccctgcaggacgtggccaagagagtggaggagatctggcaggagttcctggcccccggcgcccccagcgccatcaacctggacagccacagctacgagatcaccagccagaacgtgaaggacggcggcagatacaccttcgaggacgcccaggagcacatctacaagctgatgaagagcgacagctacgccagattcctgagaagcaacgcctaccaggacctgctgctggccaagaagaaggtgtggctgctgtag

SEQ ID NO: 96694 - DNA, 1041 bp, synthetic construct
  misc_feature 1..1041: note = Description of Artificial Sequence: Synthetic coding sequence
  source 1..1041: mol_type = other DNA
atgcagaacaaggccagactggagctggccgactacgaggccgagaacctggccagactgcagagagccttcgccagaaagtgggagttcatcttcatgcaggccgaggcccaggtgaagatcgacagaaagaaggacaagaccgagagaaagatcctggacagccaggagagagccttctgggacgtgcacagacccgtgcccggctgcgtgaacaccaccgagatggacatcagaaagtgcagaagactgaagaacccccagaaggtgaagaagagcgtgtacggcgtgaccgaggagagccaggcccagagccccgtgcacgtgctgagccagcccatcagaaagaccaccaaggaggacatcagaaagcagatcaccttcctgaacgcccagatcgacagacactgcctgaagatgagcaaggtggccgagagcctgatcgcctacaccgagcagtacgtggagtacgaccccctgatcacccccgccgagcccagcaacccctggatcagcgacgacgtggccctgtgggacatcgagatgagcaaggagcccagccagcagagagtgaagagatggggcttcagcttcgacgagatcctgaaggaccaggtgggcagagaccagttcctgagattcctggagagcgagttcagcagcgagaacctgagattctggctggccgtgcaggacctgaagaagcagcccctgcaggacgtggccaagagagtggaggagatctggcaggagttcctggcccccggcgcccccagcgccatcaacctggacagccacagctacgagatcaccagccagaacgtgaaggacggcggcagatacaccttcgaggacgcccaggagcacatctacaagctgatgaagagcgacagctacgccagattcctgagaagcaacgcctaccaggacctgctgctggccaagaagaagcccgagagcgagcagggcagaagaaccagcctggagaagttcaccagaagcgtgctgtggctgctgttccccctgggcaagagaccctag

SEQ ID NO: 96695 - DNA, 1473 bp, synthetic construct
  misc_feature 1..1473: note = Description of Artificial Sequence: Synthetic coding sequence
  source 1..1473: mol_type = other DNA
atggcccagggcagcggcgaccagagagccgtgggcgtggccgaccccgaggagagcagccccaacatgatcgtgtactgcaagatcgaggacatcatcaccaagatgcaggacgacaagaccggcggcgtgcccatcagaaccgtgaagagcttcctgagcaagatccccagcgtggtgaccggcaccgacatcgtgcagtggctgatgaagaacctgagcatcgaggaccccgtggaggccatccacctgggcagcctgatcgccgcccagggctacatcttccccatcagcgaccacgtgctgaccatgaaggacgacggcaccttctacagattccaggccccctacttctggcccagcaactgctgggagcccgagaacaccgactacgccatctacctgtgcaagagaaccatgcagaacaaggccagactggagctggccgactacgaggccgagaacctggccagactgcagagagccttcgccagaaagtgggagttcatcttcatgcaggccgaggcccaggtgaagatcgacagaaagaaggacaagaccgagagaaagatcctggacagccaggagagagccttctgggacgtgcacagacccgtgcccggctgcgtgaacaccaccgagatggacatcagaaagtgcagaagactgaagaacccccagaaggtgaagaagagcgtgtacggcgtgaccgaggagagccaggcccagagccccgtgcacgtgctgagccagcccatcagaaagaccaccaaggaggacatcagaaagcagatcaccttcctgaacgcccagatcgacagacactgcctgaagatgagcaaggtggccgagagcctgatcgcctacaccgagcagtacgtggagtacgaccccctgatcacccccgccgagcccagcaacccctggatcagcgacgacgtggccctgtgggacatcgagatgagcaaggagcccagccagcagagagtgaagagatggggcttcagcttcgacgagatcctgaaggaccaggtgggcagagaccagttcctgagattcctggagagcgagttcagcagcgagaacctgagattctggctggccgtgcaggacctgaagaagcagcccctgcaggacgtggccaagagagtggaggagatctggcaggagttcctggcccccggcgcccccagcgccatcaacctggacagccacagctacgagatcaccagccagaacgtgaaggacggcggcagatacaccttcgaggacgcccaggagcacatctacaagctgatgaagagcgacagctacgccagattcctgagaagcaacgcctaccaggacctgctgctggccaagaagaagcccgagagcgagcagggcagaagaaccagcctggagaagttcaccagaagcgtgggcaagagcctggccggcaagagactgaccggcctgatgcagagcagctag

SEQ ID NO: 96696 - DNA, 1419 bp, synthetic construct; identical to SEQ ID NO: 96688
  misc_feature 1..1419: note = Description of Artificial Sequence: Synthetic coding sequence
  source 1..1419: mol_type = other DNA

SEQ ID NO: 96697 - DNA, 1041 bp, synthetic construct
  misc_feature 1..1041: note = Description of Artificial Sequence: Synthetic coding sequence
  source 1..1041: mol_type = other DNA
atgcagaacaaggccagactggagctggccgactacgaggccgagaacctggccagactgcagagagccttcgccagaaagtgggagttcatcttcatgcaggccgaggcccaggtgaagatcgacagaaagaaggacaagaccgagagaaagatcctggacagccaggagagagccttctgggacgtgcacagacccgtgcccggctgcgtgaacaccaccgagatggacatcagaaagtgcagaagactgaagaacccccagaaggtgaagaagagcgtgtacggcgtgaccgaggagagccaggcccagagccccgtgcacgtgctgagccagcccatcagaaagaccaccaaggaggacatcagaaagcagatcaccttcctgaacgcccagatcgacagacactgcctgaagatgagcaaggtggccgagagcctgatcgcctacaccgagcagtacgtggagtacgaccccctgatcacccccgccgagcccagcaacccctggatcagcgacgacgtggccctgtgggacatcgagatgagcaaggagcccagccagcagagagtgaagagatggggcttcagcttcgacgagatcctgaaggaccaggtgggcagagaccagttcctgagattcctggagagcgagttcagcagcgagaacctgagattctggctggccgtgcaggacctgaagaagcagcccctgcaggacgtggccaagagagtggaggagatctggcaggagttcctggcccccggcgcccccagcgccatcaacctggacagccacagctacgagatcaccagccagaacgtgaaggacggcggcagatacaccttcgaggacgcccaggagcacatctacaagctgatgaagagcgacagctacgccagattcctgagaagcaacgcctaccaggacctgctgctggccaagaagaagcccgagagcgagcagggcagaagaaccagcctggagaagttcaccagaagcgtgctgtacagcaacacccccctggccaagagaccctag

SEQ ID NO: 96698 - DNA, 1419 bp, synthetic construct; identical to SEQ ID NO: 96688
  misc_feature 1..1419: note = Description of Artificial Sequence: Synthetic coding sequence
  source 1..1419: mol_type = other DNA

SEQ ID NO: 96699 - DNA, 1473 bp, synthetic construct; identical to SEQ ID NO: 96695
  misc_feature 1..1473: note = Description of Artificial Sequence: Synthetic coding sequence
  source 1..1473: mol_type = other DNA

SEQ ID NO: 96700 - DNA, 1398 bp, synthetic construct
  misc_feature 1..1398: note = Description of Artificial Sequence: Synthetic coding sequence
  source 1..1398: mol_type = other DNA
atggcccagggcagcggcgaccagagagccgtgggcgtggccgaccccgaggagagcagccccaacatgatcgtgtactgcaagatcgaggacatcatcaccaagatgcaggacgacaagaccggcggcgtgcccatcagaaccgtgaagagcttcctgagcaagatccccagcgtggtgaccggcaccgacatcgtgcagtggctgatgaagaacctgagcatcgaggaccccgtggaggccatccacctgggcagcctgatcgccgcccagggctacatcttccccatcagcgaccacgtgctgaccatgaaggacgacggcaccttctacagattccaggccccctacttctggcccagcaactgctgggagcccgagaacaccgactacgccatctacctgtgcaagagaaccatgcagaacaaggccagactggagctggccgactacgaggccgagaacctggccagactgcagagagccttcgccagaaagtgggagttcatcttcatgcaggccgaggcccaggtgaagatcgacagaaagaaggacaagaccgagagaaagatcctggacagccaggagagagccttctgggacgtgcacagacccgtgcccggctgcgtgaacaccaccgagatggacatcagaaagtgcagaagactgaagaacccccagaaggtgaagaagagcgtgtacggcgtgaccgaggagagccaggcccagagccccgtgcacgtgctgagccagcccatcagaaagaccaccaaggaggacatcagaaagcagatcaccttcctgaacgcccagatcgacagacactgcctgaagatgagcaaggtggccgagagcctgatcgcctacaccgagcagtacgtggagtacgaccccctgatcacccccgccgagcccagcaacccctggatcagcgacgacgtggccctgtgggacatcgagatgagcaaggagcccagccagcagagagtgaagagatggggcttcagcttcgacgagatcctgaaggaccaggtgggcagagaccagttcctgagattcctggagagcgagttcagcagcgagaacctgagattctggctggccgtgcaggacctgaagaagcagcccctgcaggacgtggccaagagagtggaggagatctggcaggagttcctggcccccggcgcccccagcgccatcaacctggacagccacagctacgagatcaccagccagaacgtgaaggacggcggcagatacaccttcgaggacgcccaggagcacatctacaagctgatgaagagcgacagctacgccagattcctgagaagcaacgcctaccaggacctgctgctggccaagaagaagaaggtgagcaaggtggtggagctgccctag

SEQ ID NO: 96701 - DNA, 1356 bp, synthetic construct
  misc_feature 1..1356: note = Description of Artificial Sequence: Synthetic coding sequence
  source 1..1356: mol_type = other DNA
atggaggacgtgatcgccagaatgcaggacgagaagaacggcatccccatcagaaccgtgaagagcttcctgagcaagatccccagcgtgttcagcggcagcgacatcgtgcagtggctgatcaagaacctgaccatcgaggaccccgtggaggccctgcacctgggcaccctgatggccgcccacggctacttcttccccatcagcgaccacgtgctgaccctgaaggacgacggcaccttctacagattccagaccccctacttctggcccagcaactgctgggagcccgagaacaccgactacgccgtgtacctgtgcaagagaaccatgcagaacaaggccagactggagctggccgactacgaggccgagagcctggccagactgcagagagccttcgccagaaagtgggagttcatcttcatgcaggccgaggcccaggccaaggtggacaagaagagagacaagatcgagagaaagatcctggacagccaggagagagccttctgggacgtgcacagacccgtgcccggctgcgtgaacaccaccgaggtggacatcaagaagagcagcagaatgagaaacccccacaagaccagaaagagcgtgtacggcctgcagaacgacatcagaagccacagccccacccacacccccacccccgagaccaagccccccaccgaggacgagctgcagcagcagatcaagtactggcagatccagctggacagacacagactgaagatgagcaaggtggccgacagcctgctgagctacaccgagcagtacctggagtacgaccccttcctgctgccccccgaccccagcaacccctggctgagcgacgacaccaccttctgggagctggaggccagcaaggagcccagccagcagagagtgaagagatggggcttcggcatggacgaggccctgaaggaccccgtgggcagagagcagttcctgaagttcctggagagcgagttcagcagcgagaacctgagattctggctggccgtggaggacctgaagaagagacccatcaaggaggtgcccagcagagtgcaggagatctggcaggagttcctggcccccggcgcccccagcgccatcaacctggacagcaagagctacgacaagaccacccagaacgtgaaggagcccggcagatacaccttcgaggacgcccaggagcacatctacaagctgatgaagagcgacagctaccccagattcatcagaagcagcgcctaccaggagctgctgcaggccaagaagaagggcagaaacatccccatcttcccctgccacaagaactgcacccccaccctgagagccagcaccaacctgctgtag

SEQ ID NO: 96702 - DNA, 1275 bp, synthetic construct
  misc_feature 1..1275: note = Description of Artificial Sequence: Synthetic coding sequence
  source 1..1275: mol_type = other DNA
atggcccagggcaacaactacggccagaccagcaacggcgtggccgacgagagccccaacatgctggtgtacagaaagatggaggacgtgatcgccagaatgcaggacgagaagaacggcatccccatcagaaccgtgaagagcttcctgagcaagatccccagcgtgttcagcggcagcgacatcgtgcagtggctgatcaagaacctgaccatcgaggaccccgccgtgtacctgtgcaagagaaccatgcagaacaaggccagactggagctggccgactacgaggccgagagcctggccagactgcagagagccttcgccagaaagtgggagttcatcttcatgcaggccgaggcccaggccaaggtggacaagaagagagacaagatcgagagaaagatcctggacagccaggagagagccttctgggacgtgcacagacccgtgcccggctgcgtgaacaccaccgaggtggacatcaagaagagcagcagaatgagaaacccccacaagaccagaaagagcgtgtacggcctgcagaacgacatcagaagccacagccccacccacacccccacccccgagaccaagccccccaccgaggacgagctgcagcagcagatcaagtactggcagatccagctggacagacacagactgaagatgagcaaggtggccgacagcctgctgagctacaccgagcagtacctggagtacgaccccttcctgctgccccccgaccccagcaacccctggctgagcgacgacaccaccttctgggagctggaggccagcaaggagcccagccagcagagagtgaagagatggggcttcggcatggacgaggccctgaaggaccccgtgggcagagagcagttcctgaagttcctggagagcgagttcagcagcgagaacctgagattctggctggccgtggaggacctgaagaagagacccatcaaggaggtgcccagcagagtgcaggagatctggcaggagttcctggcccccggcgcccccagcgccatcaacctggacagcaagagctacgacaagaccacccagaacgtgaaggagcccggcagatacaccttcgaggacgcccaggagcacatctacaagctgatgaagagcgacagctaccccagattcatcagaagcagcgcctaccaggagctgctgcaggccaagaagaagggcagaaacatccccatcttcccctgccacaagaactgcacccccaccctgagagccagcaccaacctgctgtag

SEQ ID NO: 96703 - DNA, 1410 bp, synthetic construct
  misc_feature 1..1410: note = Description of Artificial Sequence: Synthetic coding sequence
  source 1..1410: mol_type = other DNA
atggcccagggcaacaactacggccagaccagcaacggcgtggccgacgagagccccaacatgctggtgtacagaaagatggaggacgtgatcgccagaatgcaggacgagaagaacggcatccccatcagaaccgtgaagagcttcctgagcaagatccccagcgtgttcagcggcagcgacatcgtgcagtggctgatcaagaacctgaccatcgaggaccccgtggaggccctgcacctgggcaccctgatggccgcccacggctacttcttccccatcagcgaccacgtgctgaccctgaaggacgacggcaccttctacagattccagaccccctacttctggcccagcaactgctgggagcccgagaacaccgactacgccgtgtacctgtgcaagagaaccatgcagaacaaggccagactggagctggccgactacgaggccgagagcctggccagactgcagagagccttcgccagaaagtgggagttcatcttcatgcaggccgaggcccaggccaaggtggacaagaagagagacaagatcgagagaaagatcctggacagccaggagagagccttctgggacgtgcacagacccgtgcccggctgcgtgaacaccaccgaggtggacatcaagaagagcagcagaatgagaaacccccacaagaccagaaagagcgtgtacggcctgcagaacgacatcagaagccacagccccacccacacccccacccccgagaccaagccccccaccgaggacgagctgcagcagcagatcaagtactggcagatccagctggacagacacagactgaagatgagcaaggtggccgacagcctgctgagctacaccgagcagtacctggagtacgaccccttcctgctgccccccgaccccagcaacccctggctgagcgacgacaccaccttctgggagctggaggccagcaaggagcccagccagcagagagtgaagagatggggcttcggcatggacgaggccctgaaggaccccgtgggcagagagcagttcctgaagttcctggagagcgagttcagcagcgagaacctgagattctggctggccgtggaggacctgaagaagagacccatcaaggaggtgcccagcagagtgcaggagatctggcaggagttcctggcccccggcgcccccagcgccatcaacctggacagcaagagctacgacaagaccacccagaacgtgaaggagcccggcagatacaccttcgaggacgcccaggagcacatctacaagctgatgaagagcgacagctaccccagattcatcagaagcagcgcctaccaggagctgctgcaggccaagaagaagggcaagagcctgaccagcaagagactgaccagcctggcccagagctactag

SEQ ID NO: 96704 - DNA, 1434 bp, synthetic construct
  misc_feature 1..1434: note = Description of Artificial Sequence: Synthetic coding sequence
  source 1..1434: mol_type = other DNA
atggcccagggcaacaactacggccagaccagcaacggcgtggccgacgagagccccaacatgctggtgtacagaaagatggaggacgtgatcgccagaatgcaggacgagaagaacggcatccccatcagaaccgtgaagagcttcctgagcaagatccccagcgtgttcagcggcagcgacatcgtgcagtggctgatcaagaacctgaccatcgaggaccccgtggaggccctgcacctgggcaccctgatggccgcccacggctacttcttccccatcagcgaccacgtgctgaccctgaaggacgacggcaccttctacagattccagaccccctacttctggcccagcaactgctgggagcccgagaacaccgactacgccgtgtacctgtgcaagagaaccatgcagaacaaggccagactggagctggccgactacgaggccgagagcctggccagactgcagagagccttcgccagaaagtgggagttcatcttcatgcaggccgaggcccaggccaaggtggacaagaagagagacaagatcgagagaaagatcctggacagccaggagagagccttctgggacgtgcacagacccgtgcccggctgcgtgaacaccaccgaggtggacatcaagaagagcagcagaatgagaaacccccacaagaccagaaagagcgtgtacggcctgcagaacgacatcagaagccacagccccacccacacccccacccccgagaccaagccccccaccgaggacgagctgcagcagcagatcaagtactggcagatccagctggacagacacagactgaagatgagcaaggtggccgacagcctgctgagctacaccgagcagtacctggagtacgaccccttcctgctgccccccgaccccagcaacccctggctgagcgacgacaccaccttctgggagctggaggccagcaaggagcccagccagcagagagtgaagagatggggcttcggcatggacgaggccctgaaggaccccgtgggcagagagcagttcctgaagttcctggagagcgagttcagcagcgagaacctgagattctggctggccgtggaggacctgaagaagagacccatcaaggaggtgcccagcagagtgcaggagatctggcaggagttcctggcccccggcgcccccagcgccatcaacctggacagcaagagctacgacaagaccacccagaacgtgaaggagcccggcagatacaccttcgaggacgcccaggagcacatctacaagctgatgaagagcgacagctaccccagattcatcagaagcagcgcctaccaggagctgctgcaggccaagaagaagggcagaaacatccccatcttcccctgccacaagaactgcacccccaccctgagagccagcaccaacctgctgtag

SEQ ID NO: 96705 - DNA, 1410 bp, synthetic construct; identical to SEQ ID NO: 96703
  misc_feature 1..1410: note = Description of Artificial Sequence: Synthetic coding sequence
  source 1..1410: mol_type = other DNA

SEQ ID NO: 96706 - DNA, 1464 bp, synthetic construct
  misc_feature 1..1464: note = Description of Artificial Sequence: Synthetic coding sequence
  source 1..1464: mol_type = other DNA
atggcccagggcaacaactacggccagaccagcaacggcgtggccgacgagagccccaacatgctggtgtacagaaagatggaggacgtgatcgccagaatgcaggacgagaagaacggcatccccatcagaaccgtgaagagcttcctgagcaagatccccagcgtgttcagcggcagcgacatcgtgcagtggctgatcaagaacctgaccatcgaggaccccgtggaggccctgcacctgggcaccctgatggccgcccacggctacttcttccccatcagcgaccacgtgctgaccctgaaggacgacggcaccttctacagattccagaccccctacttctggcccagcaactgctgggagcccgagaacaccgactacgccgtgtacctgtgcaagagaaccatgcagaacaaggccagactggagctggccgactacgaggccgagagcctggccagactgcagagagccttcgccagaaagtgggagttcatcttcatgcaggccgaggcccaggccaaggtggacaagaagagagacaagatcgagagaaagatcctggacagccaggagagagccttctgggacgtgcacagacccgtgcccggctgcgtgaacaccaccgaggtggacatcaagaagagcagcagaatgagaaacccccacaagaccagaaagagcgtgtacggcctgcagaacgacatcagaagccacagccccacccacacccccacccccgagaccaagccccccaccgaggacgagctgcagcagcagatcaagtactggcagatccagctggacagacacagactgaagatgagcaaggtggccgacagcctgctgagctacaccgagcagtacctggagtacgaccccttcctgctgccccccgaccccagcaacccctggctgagcgacgacaccaccttctgggagctggaggccagcaaggagcccagccagcagagagtgaagagatggggcttcggcatggacgaggccctgaaggaccccgtgggcagagagcagttcctgaagttcctggagagcgagttcagcagcgagaacctgagattctggctggccgtggaggacctgaagaagagacccatcaaggaggtgcccagcagagtgcaggagatctggcaggagttcctggcccccggcgcccccagcgccatcaacctggacagcaagagctacgacaagaccacccagaacgtgaaggagcccggcagatacaccttcgaggacgcccaggagcacatctacaagctgatgaagagcgacagctaccccagattcatcagaagcagcgcctaccaggagctgctgcaggccaagaagaagagcggcaacagcatggacagaagaaccagcttcgagaagttcgcccagaacgtgggcaagagcctgaccagcaagagactgaccagcctggcccagagctactag

SEQ ID NO: 96707 - DNA, 1275 bp, synthetic construct; identical to SEQ ID NO: 96702
  misc_feature 1..1275: note = Description of Artificial Sequence: Synthetic coding sequence
  source 1..1275: mol_type = other DNA

SEQ ID NO: 96708 - DNA, 1488 bp, synthetic construct
  misc_feature 1..1488: note = Description of Artificial Sequence: Synthetic coding sequence
  source 1..1488: mol_type = other DNA
atggcccagggcaacaactacggccagaccagcaacggcgtggccgacgagagccccaacatgctggtgtacagaaagatggaggacgtgatcgccagaatgcaggacgagaagaacggcatccccatcagaaccgtgaagagcttcctgagcaagatccccagcgtgttcagcggcagcgacatcgtgcagtggctgatcaagaacctgaccatcgaggaccccgtggaggccctgcacctgggcaccctgatggccgcccacggctacttcttccccatcagcgaccacgtgctgaccctgaaggacgacggcaccttctacagattccagaccccctacttctggcccagcaactgctgggagcccgagaacaccgactacgccgtgtacctgtgcaagagaaccatgcagaacaaggccagactggagctggccgactacgaggccgagagcctggccagactgcagagagccttcgccagaaagtgggagttcatcttcatgcaggccgaggcccaggccaaggtggacaagaagagagacaagatcgagagaaagatcctggacagccaggagagagccttctgggacgtgcacagacccgtgcccggctgcgtgaacaccaccgaggtggacatcaagaagagcagcagaatgagaaacccccacaagaccagaaagagcgtgtacggcctgcagaacgacatcagaagccacagccccacccacacccccacccccgagaccaagccccccaccgaggacgagctgcagcagcagatcaagtactggcagatccagctggacagacacagactgaagatgagcaaggtggccgacagcctgctgagctacaccgagcagtacctggagtacgaccccttcctgctgccccccgaccccagcaacccctggctgagcgacgacaccaccttctgggagctggaggccagcaaggagcccagccagcagagagtgaagagatggggcttcggcatggacgaggccctgaaggaccccgtgggcagagagcagttcctgaagttcctggagagcgagttcagcagcgagaacctgagattctggctggccgtggaggacctgaagaagagacccatcaaggaggtgcccagcagagtgcaggagatctggcaggagttcctggcccccggcgcccccagcgccatcaacctggacagcaagagctacgacaagaccacccagaacgtgaaggagcccggcagatacaccttcgaggacgcccaggagcacatctacaagctgatgaagagcgacagctaccccagattcatcagaagcagcgcctaccaggagctgctgcaggccaagaagaagagcggcaacagcatggacagaagaaccagcttcgagaagttcgcccagaacgtgggcagaaacatccccatcttcccctgccacaagaactgcacccccaccctgagagccagcaccaacctgctgtag

SEQ ID NO: 96709 - DNA, 981 bp, synthetic construct
  misc_feature 1..981: note = Description of Artificial Sequence: Synthetic coding sequence
  source 1..981: mol_type = other DNA
caggccgaggcccaggccaaggtggacaagaagagagacaagatcgagagaaagatcctggacagccaggagagagccttctgggacgtgcacagacccgtgcccggctgcgtgaacaccaccgaggtggacatcaagaagagcagcagaatgagaaacccccacaagaccagaaagagcgtgtacggcctgcagaacgacatcagaagccacagccccacccacacccccacccccgagaccaagccccccaccgaggacgagctgcagcagcagatcaagtactggcagatccagctggacagacacagactgaagatgagcaaggtggccgacagcctgctgagctacaccgagcagtacctggagtacgaccccttcctgctgccccccgaccccagcaacccctggctgagcgacgacaccaccttctgggagctggaggccagcaaggagcccagccagcagagagtgaagagatggggcttcggcatggacgaggccctgaaggaccccgtgggcagagagcagttcctgaagttcctggagagcgagttcagcagcgagaacctgagattctggctggccgtggaggacctgaagaagagacccatcaaggaggtgcccagcagagtgcaggagatctggcaggagttcctggcccccggcgcccccagcgccatcaacctggacagcaagagctacgacaagaccacccagaacgtgaaggagcccggcagatacaccttcgaggacgcccaggagcacatctacaagctgatgaagagcgacagctaccccagattcatcagaagcagcgcctaccaggagctgctgcaggccaagaagaagagcggcaacagcatggacagaagaaccagcttcgagaagttcgcccagaacgtgggcagaaacatccccatcttcccctgccacaagaactgcacccccaccctgagagccagcaccaacctgctgtag

SEQ ID NO: 96710 - DNA, 1182 bp, synthetic construct
  misc_feature 1..1182: note = Description of Artificial Sequence: Synthetic coding sequence
  source 1..1182: mol_type = other DNA
atggccgcccacggctacttcttccccatcagcgaccacgtgctgaccctgaaggacgacggcaccttctacagattccagaccccctacttctggcccagcaactgctgggagcccgagaacaccgactacgccgtgtacctgtgcaagagaaccatgcagaacaaggccagactggagctggccgactacgaggccgagagcctggccagactgcagagagccttcgccagaaagtgggagttcatcttcatgcaggccgaggcccaggccaaggtggacaagaagagagacaagatcgagagaaagatcctggacagccaggagagagccttctgggacgtgcacagacccgtgcccggctgcgtgaacaccaccgaggtggacatcaagaagagcagcagaatgagaaacccccacaagaccagaaagagcgtgtacggcctgcagaacgacatcagaagccacagccccacccacacccccacccccgagaccaagccccccaccgaggacgagctgcagcagcagatcaagtactggcagatccagctggacagacacagactgaagatgagcaaggtggccgacagcctgctgagctacaccgagcagtacctggagtacgaccccttcctgctgccccccgaccccagcaacccctggctgagcgacgacaccaccttctgggagctggaggccagcaaggagcccagccagcagagagtgaagagatggggcttcggcatggacgaggccctgaaggaccccgtgggcagagagcagttcctgaagttcctggagagcgagttcagcagcgagaacctgagattctggctggccgtggaggacctgaagaagagacccatcaaggaggtgcccagcagagtgcaggagatctggcaggagttcctggcccccggcgcccccagcgccatcaacctggacagcaagagctacgacaagaccacccagaacgtgaaggagcccggcagatacaccttcgaggacgcccaggagcacatctacaagctgatgaagagcgacagctaccccagattcatcagaagcagcgcctaccaggagctgctgcaggccaagaagaagggcagaaacatccccatcttcccctgccacaagaactgcacccccaccctgagagccagcaccaacctgctgtag

SEQ ID NO: 96711 - DNA, 774 bp, synthetic construct
  misc_feature 1..774: note = Description of Artificial Sequence: Synthetic coding sequence
  source 1..774: mol_type = other DNA
atgagcagcgcccccaacggcagaaagaagagacccagcagaagcaccagaagcagcatcttccagatcagcaagccccccctgcagagcggcgactgggagagaagaggcagcggcagcgagagcgcccacaagacccagagagccctggacgactgcaagatgctggtgcaggagttcaacacccaggtggccctgtacagagagctggtgatcagcatcggcgacgtgagcgtgagctgccccagcctgagagccgagatgcacaagaccagaaccaagggctgcgagatggccagacaggcccaccagaagctggccgccatcagcggccccgaggacggcgagatccaccccgagatctgcagactgtacatccagctgcagtgctgcctggagatgtacaccaccgagatgctgaagagcatctgcctgctgggcagcctgcagttccacagaaagggcaaggagcccggcggcggcaccaagagcctggactgcaagatcgaggagagcgccgagacccccgccctggaggacagcagcagcagccccgtggacagccagcagcacagctggcaggtgagcaccgacatcgagaacaccgagagagacatgagagagatgaagaacctgctgagcaagctgagagagaccatgcccctgcccctgaagaaccaggacgacagcagcctgctgaacctgaccccctaccccctggtgagaagaagaaagagaagattcttcggcctgtgctgcctgatcagcagctag

SEQ ID NO: 96712 - DNA, 2025 bp, synthetic construct
  misc_feature 1..2025: note = Description of Artificial Sequence: Synthetic coding sequence
  source 1..2025: mol_type = other DNA
atgaccatcagacaccagggccagcagtacagacccagaatggccttcctgcagaagatcgaggccctggtgaaggacatgcagaaccccgagaccggcgtgagaatgcagaaccagagagtgctggtgaccagcgtgccccacgccatgaccggcagcgacgtgctgcagtggatcgtgcagagactgtggatcagcagcctggaggcccagaacctgggcaacttcatcgtgagatacggctacatctaccccctgcaggaccccaagaacctgatcctgaagcccgacggcagcctgtacagattccagaccccctacttctggcccacccagcagtggcccgccgaggacaccgactacgccatctacctggccaagagaaacatcaagaagaagggcatcctggaggagtacgagaaggagaactacaacttcctgaaccagaagatgaactacaagtgggacttcgtgatcatgcaggccaaggagcagtacagagccggcaaggagagaaacaaggccgacagatacgccctggactgccaggagaaggcctactggctggtgcacagatgcccccccggcatggacaacgtgctggactacggcctggacagagtgaccaaccccaacgaggtgaaggtgaaccagaagcagaccgtggtggccgtgaagaaggagatcatgtactaccagcaggccctgatgagaagcaccgtgaagagcagcgtgagcctgggcggcatcgtgaagtacagcgagcagttcagcagcaacgacgccatcatgagcggctgcctgcccagcaacccctggatcaccgacgacacccagttctgggacctgaacgccaagctggtggagatccccaccaagatgagagtggagagatgggccttcaacttcagcgagctgatcagagaccccaagggcagacagagcttccagtacttcctgaagaaggagttcagcggcgagaacctgggcttctgggaggcctgcgaggacctgaagtacggcgaccagagcaaggtgaaggagaaggccgaggagatctacaagctgttcctggcccccggcgccagaagatggatcaacatcgacggcaagaccatggacatcaccgtgaagggcctgaagcacccccacagatacgtgctggacgccgcccagacccacatctacatgctgatgaagaaggacagctacgccagatacctgaagagccccatctacaaggacatgctggccaaggccatcgagccccaggagaccaccaagaagagcagcaccctgcccttcatgagaagacacctgagaagcagccccagccccgtgatcctgagacagctggaggaggaggccaaggccagagaggccgccaacaccgtggacatcacccagcccggccagcacatggcccccagcccccacctgaccgtgtacaccggcacctgcatgccccccagccccagcagccccttcagcagcagctgcagaagccccagaaagcccttcgccagccccagcagattcatcagaagacccagcaccaccatctgccccagccccatcagagtggccctggagagcagcagcggcctggagcagaagggcgagtgcagcggcagcatggcccccagaggccccagcgtgaccgagagcagcgaggccagcctggacaccagctggcccagaagcagacccagagccccccccaaggccagaatggccctgagcttcagcagattcctgagaagaggctgcctggccagccccgtgttcgccagactgagccccaagtgccccgccgtgagccacggcagagtgcagcccctgggcgacgtgggccagcagctgcccagactgaagagcaagagagtggccaacttcttccagatcaagatggacgtgcccaccggcagcggcacctgcctgatggacagcgaggacgccggcaccggcgagagcggcgacagagccaccgagaaggaggtgatctgcccctgggagagcctgtag

SEQ ID NO: 96713 - DNA, 2016 bp, synthetic construct
  misc_feature 1..2016: note = Description of Artificial Sequence: Synthetic coding sequence
  source 1..2016: mol_type = other DNA
atgaccatcagacaccagggccagcagtacagacccagaatggccttcctgcagaagatcgaggccctggtgaaggacatgcagaaccccgagaccggcgtgagaatgcagaaccagagagtgctggtgaccagcgtgccccacgccatgaccggcagcgacgtgctgcagtggatcgtgcagagactgtggatcagcagcctggaggcccagaacctgggcaacttcatcgtgagatacggctacatctaccccctgcaggaccccaagaacctgatcctgaagcccgacggcagcctgtacagattccagaccccctacttctggcccacccagcagtggcccgccgaggacaccgactacgccatctacctggccaagagaaacatcaagaagaagggcatcctggaggagtacgagaaggagaactacaacttcctgaaccagaagatgaactacaagtgggacttcgtgatcatgcaggccaaggagcagtacagagccggcaaggagagaaacaaggccgacagatacgccctggactgccaggagaaggcctactggctggtgcacagatgcccccccggcatggacaacgtgctggactacggcctggacagagtgaccaaccccaacgaggtgaagaagcagaccgtggtggccgtgaagaaggagatcatgtactaccagcaggccctgatgagaagcaccgtgaagagcagcgtgagcctgggcggcatcgtgaagtacagcgagcagttcagcagcaacgacgccatcatgagcggctgcctgcccagcaacccctggatcaccgacgacacccagttctgggacctgaacgccaagctggtggagatccccaccaagatgagagtggagagatgggccttcaacttcagcgagctgatcagagaccccaagggcagacagagcttccagtacttcctgaagaaggagttcagcggcgagaacctgggcttctgggaggcctgcgaggacctgaagtacggcgaccagagcaaggtgaaggagaaggccgaggagatctacaagctgttcctggcccccggcgccagaagatggatcaacatcgacggcaagaccatggacatcaccgtgaagggcctgaagcacccccacagatacgtgctggacgccgcccagacccacatctacatgctgatgaagaaggacagctacgccagatacctgaagagccccatctacaaggacatgctggccaaggccatcgagccccaggagaccaccaagaagagcagcaccctgcccttcatgagaagacacctgagaagcagccccagccccgtgatcctgagacagctggaggaggaggccaaggccagagaggccgccaacaccgtggacatcacccagcccggccagcacatggcccccagcccccacctgaccgtgtacaccggcacctgcatgccccccagccccagcagccccttcagcagcagctgcagaagccccagaaagcccttcgccagccccagcagattcatcagaagacccagcaccaccatctgccccagccccatcagagtggccctggagagcagcagcggcctggagcagaagggcgagtgcagcggcagcatggcccccagaggccccagcgtgaccgagagcagcgaggccagcctggacaccagctggcccagaagcagacccagagccccccccaaggccagaatggccctgagcttcagcagattcctgagaagaggctgcctggccagccccgtgttcgccagactgagccccaagtgccccgccgtgagccacggcagagtgcagcccctgggcgacgtgggccagcagctgcccagactgaagagcaagagagtggccaacttcttccagatcaagatggacgtgcccaccggcagcggcacctgcctgatggacagcgaggacgccggcaccggcgagagcggcgacagagccaccgagaaggaggtgatctgcccctgggagagcctgtag

SEQ ID NO: 96714 - DNA, 4008 bp, synthetic construct
  misc_feature 1..4008: note = Description of Artificial Sequence: Synthetic coding sequence
  source 1..4008: mol_type = other DNA
atggagagcgagatgctgcagagccccctgctgggcctgggcgaggaggacgaggccgacctgaccgactggaacctgcccctggccttcatgaagaagagacactgcgagaagatcgagggcagcaagagcctggcccagagctggagaatgaaggacagaatgaagaccgtgagcgtggccctggtgctgtgcctgaacgtgggcgtggacccccccgacgtggtgaagaccaccccctgcgccagactggagtgctggatcgaccccctgagcatgggcccccagaaggccctggagaccatcggcgccaacctgcagaagcagtacgagaactggcagcccagagccagatacaagcagagcctggaccccaccgtggacgaggtgaagaagctgtgcaccagcctgagaagaaacgccaaggaggagagagtgctgttccactacaacggccacggcgtgcccagacccaccgtgaacggcgaggtgtgggtgttcaacaagaactacacccagtacatccccctgagcatctacgacctgcagacctggatgggcagccccagcatcttcgtgtacgactgcagcaacgccggcctgatcgtgaagagcttcaagcagttcgccctgcagagagagcaggagctggaggtggccgccatcaaccccaaccaccccctggcccagatgcccctgccccccagcatgaagaactgcatccagctggccgcctgcgaggccaccgagctgctgcccatgatccccgacctgcccgccgacctgttcaccagctgcctgaccacccccatcaagatcgccctgagatggttctgcatgcagaagtgcgtgagcctggtgcccggcgtgaccctggacctgatcgagaagatccccggcagactgaacgacagaagaacccccctgggcgagctgaactggatcttcaccgccatcaccgacaccatcgcctggaacgtgctgcccagagacctgttccagaagctgttcagacaggacctgctggtggccagcctgttcagaaacttcctgctggccgagagaatcatgagaagctacaactgcacccccgtgagcagccccagactgccccccacctacatgcacgccatgtggcaggcctgggacctggccgtggacatctgcctgagccagctgcccaccatcatcgaggagggcaccgccttcagacacagccccttcttcgccgagcagctgaccgccttccaggtgtggctgaccatgggcgtggagaacagaaacccccccgagcagctgcccatcgtgctgcaggtgctgctgagccaggtgcacagactgagagccctggacctgctgggcagattcctggacctgggcccctgggccgtgagcctggccctgagcgtgggcatcttcccctacgtgctgaagctgctgcagagcagcgccagagagctgagacccctgctggtgttcatctgggccaagatcctggccgtggacagcagctgccaggccgacctggtgaaggacaacggccacaagtacttcctgagcgtgctggccgacccctacatgcccgccgagcacagaaccatgaccgccttcatcctggccgtgatcgtgaacagctaccacaccggccaggaggcctgcctgcagggcaacctgatcgccatctgcctggagcagctgaacgacccccaccccctgctgagacagtgggtggccatctgcctgggcagaatctggcagaacttcgacagcgccagatggtgcggcgtgagagacagcgcccacgagaagctgtacagcctgctgagcgaccccatccccgaggtgagatgcgccgccgtgttcgccctgggcaccttcgtgggcaacagcgccgagagaaccgaccacagcaccaccatcgaccacaacgtggccatgatgctggcccagctggtgagcgacggcagccccatggtgagaaaggagctggtggtggccctgagccacctggtggtgcagtacgagagcaacttctgcaccgtggccctgcagttcatcgaggaggagaagaactacgccctgcccagccccgccaccaccgagggcggcagcctgacccccgtgagagacagcccctgcacccccagactgagaagcgtgagcagctacggcaacatcagagccgtggccaccgccagaagcctgaacaagagcctgcagaacctgagcctgaccgaggagagcggcggcgccgtggccttcagccccggcaacctgagcaccagcagcagcgccagcagcaccctgggcagccccgagaacgaggagcacatcctgagcttcgagaccatcgacaagatgagaagagccagcagctacagcagcctgaacagcctgatcggcgtgagcttcaacagcgtgtacacccagatctggagagtgctgctgcacctggccgccgacccctaccccgaggtgagcgacgtggccatgaaggtgctgaacagcatcgcctacaaggccaccgtgaacgccagaccccagagagtgctggacaccagcagcctgacccagagcgcccccgccagccccaccaacaagggcgtgcacatccaccaggccggcggcagcccccccgccagcagcaccagcagcagcagcctgaccaacgacgtggccaagcagcccgtgagcagagacctgcccagcggcagacccggcaccaccggccccgccggcgcccagtacaccccccacagccaccagttccccagaaccagaaagatgttcgacaagggccccgagcagaccgccgacgacgccgacgacgccgccggccacaagagcttcatcagcgccaccgtgcagaccggcttctgcgactggagcgccagatacttcgcccagcccgtgatgaagatccccgaggagcacgacctggagagccagatcagaaaggagagagagtggagattcctgagaaacagcagagtgagaagacaggcccagcaggtgatccagaagggcatcaccagactggacgaccagatcttcctgaacagaaaccccggcgtgcccagcgtggtgaagttccaccccttcaccccctgcatcgccgtggccgacaaggacagcatctgcttctgggactgggagaagggcgagaagctggactacttccacaacggcaaccccagatacaccagagtgaccgccatggagtacctgaacggccaggactgcagcctgctgctgaccgccaccgacgacggcgccatcagagtgtggaagaacttcgccgacctggagaagaaccccgagatggtgaccgcctggcagggcctgagcgacatgctgcccaccaccagaggcgccggcatggtggtggactgggagcaggagaccggcctgctgatgagcagcggcgacgtgagaatcgtgagaatctgggacaccgacagagagatgaaggtgcaggacatccccaccggcgccgacagctgcgtgaccagcctgagctgcgacagccacagaagcctgatcgtggccggcctgggcgacggcagcatcagagtgtacgacagaagaatggccctgagcgagtgcagagtgatgacctacagagagcacaccgcctgggtggtgaaggccagcctgcagaagagacccgacggccacatcgtgagcgtgagcgtgaacggcgacgtgagaatcttcgaccccagaatgcccgagagcgtgaacgtgctgcagatcgtgaagggcctgaccgccctggacatccacccccaggccgacctgatcgcctgcggcagcgtgaaccagttcaccgccatctacaacagcagcggcgagctgatcaacaacatcaagtactacgacggcttcatgggccagagagtgggcgccatcagctgcctggccttccacccccactggccccacctggccgtgggcagcaacgactactacatcagcgtgtacagcgtggagaagagagtgagatag

SEQ ID NO: 96715 - DNA, 990 bp, synthetic construct
  misc_feature 1..990: note = Description of Artificial Sequence: Synthetic coding sequence
  source 1..990: mol_type = other DNA
atgggcagccccagcatcttcgtgtacgactgcagcaacgccggcctgatcgtgaagagcttcaagcagttcgccctgcagagagagcaggagctggaggtggccgccatcaaccccaaccaccccctggcccagatgcccctgccccccagcatgaagaactgcatccagctggccgcctgcgaggccaccgagctgctgcccatgatccccgacctgcccgccgacctgttcaccagctgcctgaccacccccatcaagatcgccctgagatggttctgcatgcagaagtgcgtgagcctggtgcccggcgtgaccctggacctgatcgagaagatccccggcagactgaacgacagaagaacccccctgggcgagctgaactggatcttcaccgccatcaccgacaccatcgcctggaacgtgctgcccagagacctgttccagaagctgttcagacaggacctgctggtggccagcctgttcagaaacttcctgctggccgagagaatcatgagaagctacaactgcacccccgtgagcagccccagactgccccccacctacatgcacgccatgtggcaggcctgggacctggccgtggacatctgcctgagccagctgcccaccatcatcgaggagggcaccgccttcagacacagccccttcttcgccgagcagctgaccgccttccaggtgtggctgaccatgggcgtggagaacagaaacccccccgagcagctgcccatcgtgctgcaggtgctgctgagccaggtgcacagactgagagccctggacctgctgggcagattcctggacctgggcccctgggccgtgagcctggccctgagcgtgggcatcttcccctacgtgctgaagctgctgcagagcagcgccagagagctgagacccctgctggtgttcatctgggccaagatcctggccgtggacagcgtgagcatccccgccctgctgcccagagtgatgtag

SEQ ID NO: 96716 - DNA, 3534 bp, synthetic construct
  misc_feature 1..3534: note = Description of Artificial Sequence: Synthetic coding sequence
  source 1..3534: mol_type = other DNA
atggagagcgagatgctgcagagccccctgctgggcctgggcgaggaggacgaggccgacctgaccgactggaacctgcccctggccttcatgaagaagagacactgcgagaagatcgagggcagcaagagcctggcccagagctggagaatgaaggacagaatgaagaccgtgagcgtggccctggtgctgtgcctgaacgtgggcgtggacccccccgacgtggtgaagaccaccccctgcgccagactggagtgctggatcgaccccctgagcatgggcccccagaaggccctggagaccatcggcgccaacctgcagaagcagtacgagaactggcagcccagagccagatacaagcagagcctggaccccaccgtggacgaggtgaagaagctgtgcaccagcctgagaagaaacgccaaggaggagagagtgctgttccactacaacggccacggcgtgcccagacccaccgtgaacggcgaggtgtgggtgttcaacaagaactacacccagtacatccccctgagcatctacgacctgcagacctggatgggcagccccagcatcttcgtgtacgactgcagcaacgccggcctgatcgtgaagagcttcaagcagttcgccctgcagagagagcaggagctggaggtggccgccatcaaccccaaccaccccctggcccagatgcccctgccccccagcatgaagaactgcatccagctggccgcctgcgaggccaccgagctgctgcccatgatccccgacctgcccgccgacctgttcaccagctgcctgaccacccccatcaagatcgccctgagatggttctgcatgcagaagtgcgtgagcctggtgcccggcgtgaccctggacctgatcgagaagatccccggcagactgaacgacagaagaacccccctgggcgagctgaactggatcttcaccgccatcaccgacaccatcgcctggaacgtgctgcccagagacctgttccagaagctgttcagacaggacctgctggtggccagcctgttcagaaacttcctgctggccgagagaatcatgagaagctacaactgcacccccgtgagcagccccagactgccccccacctacatgcacgccatgtggcaggcctgggacctggccgtggacatctgcctgagccagctgcccaccatcatcgaggagggcaccgccttcagacacagccccttcttcgccgagcagctgaccgccttccaggtgtggctgaccatgggcgtggagaacagaaacccccccgagcagctgcccatcgtgctgcaggtgctgctgagccaggtgcacagactgagagccctggacctgctgggcagattcctggacctgggcccctgggccgtgagcctggccctgagcgtgggcatcttcccctacgtgctgaagctgctgcagagcagcgccagagagctgagacccctgctggtgttcatctgggccaagatcctggccgtggacagcgagctggtggtggccctgagccacctggtggtgcagtacgagagcaacttctgcaccgtggccctgcagttcatcgaggaggagaagaactacgccctgcccagccccgccaccaccgagggcggcagcctgacccccgtgagagacagcccctgcacccccagactgagaagcgtgagcagctacggcaacatcagagccgtggccaccgccagaagcctgaacaagagcctgcagaacctgagcctgaccgaggagagcggcggcgccgtggccttcagccccggcaacctgagcaccagcagcagcgccagcagcaccctgggcagccccgagaacgaggagcacatcctgagcttcgagaccatcgacaagatgagaagagccagcagctacagcagcctgaacagcctgatcggcgtgagcttcaacagcgtgtacacccagatctggagagtgctgctgcacctggccgccgacccctaccccgaggtgagcgacgtggccatgaaggtgctgaacagcatcgcctacaaggccaccgtgaacgccagaccccagagagtgctggacaccagcagcctgacccagagcgcccccgccagccccaccaacaagggcgtgcacatccaccaggccggcggcagcccccccgccagcagcaccagcagcagcagcctgaccaacgacgtggccaagcagcccgtgagcagagacctgcccagcggcagacccggcaccaccggccccgccggcgcccagtacaccccccacagccaccagttccccagaaccagaaagatgttcgacaagggccccgagcagaccgccgacgacgccgacgacgccgccggccacaagagcttcatcagcgccaccgtgcagaccggcttctgcgactggagcgccagatacttcgcccagcccgtgatgaagatccccgaggagcacgacctggagagccagatcagaaaggagagagagtggagattcctgagaaacagcagagtgagaagacaggcccagcaggtgatccagaagggcatcaccagactggacgaccagatcttcctgaacagaaaccccggcgtgcccagcgtggtgaagttccaccccttcaccccctgcatcgccgtggccgacaaggacagcatctgcttctgggactgggagaagggcgagaagctggactacttccacaacggcaaccccagatacaccagagtgaccgccatggagtacctgaacggccaggactgcagcctgctgctgaccgccaccgacgacggcgccatcagagtgtggaagaacttcgccgacctggagaagaaccccgagatggtgaccgcctggcagggcctgagcgacatgctgcccaccaccagaggcgccggcatggtggtggactgggagcaggagaccggcctgctgatgagcagcggcgacgtgagaatcgtgagaatctgggacaccgacagagagatgaaggtgcaggacatccccaccggcgccgacagctgcgtgaccagcctgagctgcgacagccacagaagcctgatcgtggccggcctgggcgacggcagcatcagagtgtacgacagaagaatggccctgagcgagtgcagagtgatgacctacagagagcacaccgcctgggtggtgaaggccagcctgcagaagagacccgacggccacatcgtgagcgtgagcgtgaacggcgacgtgagaatcttcgaccccagaatgcccgagagcgtgaacgtgctgcagatcgtgaagggcctgaccgccctggacatccacccccaggccgacctgatcgcctgcggcagcgtgaaccagttcaccgccatctacaacagcagcggcgagctgatcaacaacatcaagtactacgacggcttcatgggccagagagtgggcgccatcagctgcctggccttccacccccactggccccacctggccgtgggcagcaacgactactacatcagcgtgtacagcgtggagaagagagtgagatag

SEQ ID NO: 96717 - DNA, 2097 bp, synthetic construct
  misc_feature 1..2097: note = Description of Artificial Sequence: Synthetic coding sequence
  source 1..2097: mol_type = other DNA
atgcagaacagcgagggcggcgccgacagccccgccagcgtggccctgagacccagcgccgccgccccccccgtgcccgccagcccccagagagtgctggtgcaggccgccagcagcaaccccaagggcgcccagatgcagcccatcagcctgcccagagtgcagcaggtgccccagcaggtgcagcccgtgcagcacgtgtaccccgcccaggtgcagtacgtggagggcggcgacgccgtgtacaccaacggcgccatcagaaccgcctacacctacaaccccgagccccagatgtacgcccccagcagcaccgccagctacttcgaggcccccggcggcgcccaggtgaccgtggccgccagcagcccccccgccgtgcccagccacagcatggtgggcatcaccatggacgtgggcggcagccccatcgtgagcagcgccggcgcctacctgatccacggcggcatggacagcaccagacacagcctggcccacaccagcagaagcagccccgccaccctgcagtggctgctggacaactacgagaccgccgagggcgtgagcctgcccagaagcagcctgtacaaccactacctgagacactgccaggagcacaagctggaccccgtgaacgccgccagcttcggcaagctgatcagaagcgtgttcatgggcctgagaaccagaagactgggcaccagaggcaacagcaagtaccactactacggcatcagactgaagcccgacagccccctgaacagactgcaggaggacacccagtacatggccatgagacagcagcccatgcaccagaagcccagatacagacccgcccagaagaccgacagcctgggcgacagcggcagccacagcggcctgcacagcacccccgagcagaccatggccgtgcagagccagcaccaccagcagtacatcgacgtgagccacgtgttccccgagttccccgcccccgacctgggcagcttcctgctgcaggacggcgtgaccctgcacgacgtgaaggccctgcagctggtgtacagaagacactgcgaggccaccgtggacgtggtgatgaacctgcagttccactacatcgagaagctgtggctgagcttctggaacagcaaggccagcagcagcgacggccccaccagcctgcccgccagcgacgaggaccccgagggcgccgtgctgcccaaggacaagctgatcagcctgtgccagtgcgaccccatcctgagatggatgagaagctgcgaccacatcctgtaccaggccctggtggagatcctgatccccgacgtgctgagacccgtgcccagcaccctgacccaggccatcagaaacttcgccaagagcctggagggctggctgaccaacgccatgagcgacttcccccagcaggtgatccagaccaaggtgggcgtggtgagcgccttcgcccagaccctgagaagatacaccagcctgaaccacctggcccaggccgccagagccgtgctgcagaacaccagccagatcaaccagatgctgagcgacctgaacagagtggacttcgccaacgtgcaggagcaggccagctgggtgtgccagtgcgaggagagcgtggtgcagagactggagcaggacttcaagctgaccctgcagcagcagagcagcctggaccagtgggccagctggctggacagcgtggtgacccaggtgctgaagcagcacgccggcagccccagcttccccaaggccgccagacagttcctgctgaagtggagcttctacagcagcatggtgatcagagacctgaccctgagaagcgccgccagcttcggcagcttccacctgatcagactgctgtacgacgagtacatgttctacctggtggagcacagagtggccgaggccaccggcgagacccccatcgccgtgatgggcgagttcaacgacctggccagcctgagcctgaccctgctggacaaggacgacatgggcgacgagcagagaggcagcgaggccggccccgacgccagaagcctgggcgagcccctggtgaagagagagagaagcgaccccaaccacagcctgcagggcatctag

SEQ ID NO: 96718 - DNA, 2940 bp, synthetic construct
  misc_feature 1..2940: note = Description of Artificial Sequence: Synthetic coding sequence
  source 1..2940: mol_type = other DNA
atggccacccaggcctacaccgagctgcaggccgcccccccccccagccagcccccccaggcccccccccaggcccagccccagcccccccccccccccccccccgccgccccccagcccccccagccccccaccgccgccgccaccccccagccccagtacgtgaccgagctgcagagcccccagccccaggcccagccccccggcggccagaagcagtacgtgaccgagctgcccgccgtgcccgcccccagccagcccaccggcgcccccacccccagccccgccccccagcagtacatcgtggtgaccgtgagcgagggcgccatgagagccagcgagaccgtgagcgaggccagccccggcagcaccgccagccagaccggcgtgcccacccaggtggtgcagcaggtgcagggcacccagcagagactgctggtgcagaccagcgtgcaggccaagcccggccacgtgagccccctgcagctgaccaacatccaggtgccccagcaggccctgcccacccagagactggtggtgcagagcgccgcccccggcagcaagggcggccaggtgagcctgaccgtgcacggcacccagcaggtgcacagcccccccgagcagagccccgtgcaggccaacagcagcagcagcaagaccgccggcgcccccaccggcaccgtgccccagcagctgcaggtgcacggcgtgcagcagagcgtgcccgtgacccaggagagaagcgtggtgcaggccaccccccaggcccccaagcccggccccgtgcagcccctgaccgtgcagggcctgcagcccgtgcacgtggcccaggaggtgcagcagctgcagcaggtgcccgtgccccacgtgtacagcagccaggtgcagtacgtggagggcggcgacgccagctacaccgccagcgccatcagaagcagcacctacagctaccccgagacccccctgtacacccagaccgccagcaccagctactacgaggccgccggcaccgccacccaggtgagcacccccgccaccagccaggccgtggccagcagcggcagcatgcccatgtacgtgagcggcagccaggtggtggccagcagcaccagcaccggcgccggcgccagcaacagcagcggcggcggcggcagcggcggcggcggcggcggcggcggcggcggcggcggcggcggcagcggcagcaccggcggcggcggcagcggcgccggcacctacgtgatccagggcggctacatgctgggcagcgccagccagagctacagccacaccaccagagccagccccgccaccgtgcagtggctgctggacaactacgagaccgccgagggcgtgagcctgcccagaagcaccctgtactgccactacctgctgcactgccaggagcagaagctggagcccgtgaacgccgccagcttcggcaagctgatcagaagcgtgttcatgggcctgagaaccagaagactgggcaccagaggcaacagcaagtaccactactacggcctgagaatcaaggccagcagccccctgctgagactgatggaggaccagcagcacatggccatgagaggccagcccttcagccagaagcagagactgaagcccatccagaagatggagggcatgaccaacggcgtggccgtgggccagcagcccagcaccggcctgagcgacatcagcgcccaggtgcagcagtaccagcagttcctggacgccagcagaagcctgcccgacttcaccgagctggacctgcagggcaaggtgctgcccgagggcgtgggccccggcgacatcaaggccttccaggtgctgtacagagagcactgcgaggccatcgtggacgtgatggtgaacctgcagttcaccctggtggagaccctgtggaagaccttctggagatacaacctgagccagcccagcgaggccccccccctggccgtgcacgacgaggccgagaagagactgcccaaggccatcctggtgctgctgagcaagttcgagcccgtgctgcagtggaccaagcactgcgacaacgtgctgtaccagggcctggtggagatcctgatccccgacgtgctgagacccatccccagcgccctgacccaggccatcagaaacttcgccaagagcctggagagctggctgacccacgccatggtgaacatccccgaggagatgctgagagtgaaggtggccgccgccggcgccttcgcccagaccctgagaagatacaccagcctgaaccacctggcccaggccgccagagccgtgctgcagaacaccgcccagatcaaccagatgctgagcgacctgaacagagtggacttcgccaacgtgcaggagcaggccagctgggtgtgcagatgcgaggacagagtggtgcagagactggagcaggacttcaaggtgaccctgcagcagcagaacagcctggagcagtgggccgcctggctggacggcgtggtgagccaggtgctgaagccctaccagggcagcgccggcttccccaaggccgccaagctgttcctgctgaagtggagcttctacagcagcatggtgatcagagacctgaccctgagaagcgccgccagcttcggcagcttccacctgatcagactgctgtacgacgagtacatgtactacctgatcgagcacagagtggcccaggccaagggcgagacccccatcgccgtgatgggcgagttcgccaacctggccaccagcctgaaccccctggaccccgacaaggacgaggaggaggaggaggaggaggagagcgaggacgagctgccccaggacatcagcctggccgccggcggcgagagccccgccctgggccccgagaccctggagccccccgccaagctggccagaaccgacgccagaggcctgttcgtgcaggccctgcccagcagctag

SEQ ID NO: 96719 - DNA, 2172 bp, synthetic construct
  misc_feature 1..2172: note = Description of Artificial Sequence: Synthetic coding sequence
  source 1..2172: mol_type = other DNA
atgcagaacagcgagggcggcgccgacagccccgccagcgtggccctgagacccagcgccgccgccccccccgtgcccgccagcccccagagagtgctggtgcaggccgccagcagcaaccccaagggcgcccagatgcagcccatcagcctgcccagagtgcagcaggtgccccagcaggtgcagcccgtgcagcacgtgtaccccgcccaggtgcagtacgtggagggcggcgacgccgtgtacaccaacggcgccatcagaaccgcctacacctacaaccccgagccccagatgtacgcccccagcagcaccgccagctacttcgaggcccccggcggcgcccaggtgaccgtggccgccagcagcccccccgccgtgcccagccacagcatggtgggcatcaccatggacgtgggcggcagccccatcgtgagcagcgccggcgcctacctgatccacggcggcatggacagcaccagacacagcctggcccacaccagcagaagcagccccgccaccctggagatggccatcgagaacctgcagaagagcgagggcatcaccagccacaagagcggcctgctgaacagccacctgcagtggctgctggacaactacgagaccgccgagggcgtgagcctgcccagaagcagcctgtacaaccactacctgagacactgccaggagcacaagctggaccccgtgaacgccgccagcttcggcaagctgatcagaagcgtgttcatgggcctgagaaccagaagactgggcaccagaggcaacagcaagtaccactactacggcatcagactgaagcccgacagccccctgaacagactgcaggaggacacccagtacatggccatgagacagcagcccatgcaccagaagcccagatacagacccgcccagaagaccgacagcctgggcgacagcggcagccacagcggcctgcacagcacccccgagcagaccatggccgtgcagagccagcaccaccagcagtacatcgacgtgagccacgtgttccccgagttccccgcccccgacctgggcagcttcctgctgcaggacggcgtgaccctgcacgacgtgaaggccctgcagctggtgtacagaagacactgcgaggccaccgtggacgtggtgatgaacctgcagttccactacatcgagaagctgtggctgagcttctggaacagcaaggccagcagcagcgacggccccaccagcctgcccgccagcgacgaggaccccgagggcgccgtgctgcccaaggacaagctgatcagcctgtgccagtgcgaccccatcctgagatggatgagaagctgcgaccacatcctgtaccaggccctggtggagatcctgatccccgacgtgctgagacccgtgcccagcaccctgacccaggccatcagaaacttcgccaagagcctggagggctggctgaccaacgccatgagcgacttcccccagcaggtgatccagaccaaggtgggcgtggtgagcgccttcgcccagaccctgagaagatacaccagcctgaaccacctggcccaggccgccagagccgtgctgcagaacaccagccagatcaaccagatgctgagcgacctgaacagagtggacttcgccaacgtgcaggagcaggccagctgggtgtgccagtgcgaggagagcgtggtgcagagactggagcaggacttcaagctgaccctgcagcagcagagcagcctggaccagtgggccagctggctggacagcgtggtgacccaggtgctgaagcagcacgccggcagccccagcttccccaaggccgccagacagttcctgctgaagtggagcttctacagcagcatggtgatcagagacctgaccctgagaagcgccgccagcttcggcagcttccacctgatcagactgctgtacgacgagtacatgttctacctggtggagcacagagtggccgaggccaccggcgagacccccatcgccgtgatgggcgagttcaacgacctggccagcctgagcctgaccctgctggacaaggacgacatgggcgacgagcagagaggcagcgaggccggccccgacgccagaagcctgggcgagcccctggtgaagagagagagaagcgaccccaaccacagcctgcagggcatctag

SEQ ID NO: 96720 - DNA, 2097 bp, synthetic construct; identical to SEQ ID NO: 96717
  misc_feature 1..2097: note = Description of Artificial Sequence: Synthetic coding sequence
  source 1..2097: mol_type = other DNA

SEQ ID NO: 96721 - DNA, 1851 bp, synthetic construct
  misc_feature 1..1851: note = Description of Artificial Sequence: Synthetic coding sequence
  source 1..1851: mol_type = other DNA
atggccgaggacgagcccgacgccaagagccccaagaccggcggcagagccccccccggcggcgccgaggccggcgagcccaccaccctgctgcagagactgagaggcaccatcagcaaggccgtgcagaacaaggtggagggcatcctgcaggacgtgcagaagttcagcgacaacgacaagctgtacctgtacctgcagctgcccagcggccccaccaccggcgacaagagcagcgagcccagcaccctgagcaacgaggagtacatgtacgcctacagatggatcagaaaccacctggaggagcacaccgacacctgcctgcccaagcagagcgtgtacgacgcctacagaaagtactgcgagagcctggcctgctgcagacccctgagcaccgccaacttcggcaagatcatcagagagatcttccccgacatcaaggccagaagactgggcggcagaggccagagcaagtactgctacagcggcatcagaagaaagaccctggtgagcatgccccccctgcccggcctggacctgaagggcagcgagagccccgagatgggccccgaggtgacccccgcccccagagacgagctggtggaggccgcctgcgccctgacctgcgactgggccgagagaatcctgaagagaagcttcagcagcatcgtggaggtggccagattcctgctgcagcagcacctgatcagcgccagaagcgcccacgcccacgtgctgaaggccatgggcctggccgaggaggacgagcacgcccccagagagagaagcagcaagcccaagaacggcctggagaaccccgagggcggcgcccacaagaagcccgagagactggcccagccccccaaggacctggaggccagaaccggcgccggccccctggccagaggcgagagaaagaagagcgtggtggagagcagcgcccccggcgccaacaacctgcaggtgaacgccctggtggccagactgcccctgctgctgcccagagcccccagaagcctgatcccccccatccccgtgagcccccccatcctggcccccagactgagcagcggcgccctgaaggtggccaccctgcccctgagcagcagagccggcgccccccccgccgccgtgcccatcatcaacatgatcctgcccaccgtgcccgccctgcccggccccggccccggccccggcagagccccccccggcggcctgacccagcccagaggcaccgagaacagagaggtgggcatcggcggcgaccagggcccccacgacaagggcgtgaagagaaccgccgaggtgcccgtgagcgaggccagcggccaggccccccccgccaaggccgccaagcaggacatcgaggacaccgccagcgacgccaagagaaagagaggcagacccagaaagaagagcggcggcagcggcgagagaaacagcacccccctgaagagcgccgccgccatggagagcgcccagagcagcagactgccctgggagacctggggcagcggcggcgagggcaacagcgccggcggcgccgagagacccggccccatgggcgaggccgagaagggcgccgtgctggcccagggccagggcgacggcaccgtgagcaagggcggcagaggccccggcagccagcacaccaaggaggccgaggacaagatccccctggtgcccagcaaggtgagcgtgatcaagggcagcagaagccagaaggaggccttccccctggccaagggcgaggtggacaccgccccccagggcaacaaggacctgaaggagcacgtgctgcagagcagcctgagccaggagcacaaggaccccaaggccacccccccctag

SEQ ID NO: 96722 - DNA, 1851 bp, synthetic construct; identical to SEQ ID NO: 96721
  misc_feature 1..1851: note = Description of Artificial Sequence: Synthetic coding sequence
  source 1..1851: mol_type = other DNA

SEQ ID NO: 96723 - DNA, 1791 bp, synthetic construct
  misc_feature 1..1791: note = Description of Artificial Sequence: Synthetic coding sequence
  source 1..1791: mol_type = other DNA
atggccgaggacgagcccgacgccaagagccccaagaccggcggcagagccccccccggcggcgccgaggccggcgagcccaccaccctgctgcagagactgagaggcaccatcagcaaggccgtgcagaacaaggtggagggcatcctgcaggacgtgcagaagttcagcgacaacgacaagctgtacctgtacctgcagctgcccagcggccccaccaccggcgacaagagcagcgagcccagcaccctgagcaacgaggagtacatgtacgcctacagatggatcagaaaccacctggaggagcacaccgacacctgcctgcccaagcagagcgtgtacgacgcctacagaaagtactgcgagagcctggcctgctgcagacccctgagcaccgccaacttcggcaagatcatcagagagatcttccccgacatcaaggccagaagactgggcggcagaggccagagcaagtactgctacagcggcatcagaagaaagaccctggtgagcatgccccccctgcccggcctggacctgaagggcagcgagagccccgagatgggccccgaggtgacccccgcccccagagacgagctggtggaggccgcctgcgccctgacctgcgactgggccgagagaatcctgaagagaagcttcagcagcatcgtggaggtggccagattcctgctgcagcagcacctgatcagcgccagaagcgcccacgcccacgtgctgaaggccatgggcctggccgaggaggacgagcacgcccccagagagagaagcagcaagcccaagaacggcctggagaaccccgagggcggcgcccacaagaagcccgagagactggcccagccccccaaggacctggaggccagaaccggcgccggccccctggccagaggcgagagaaagaagagcgtggtggagagcagcgcccccggcgccaacaacctgcaggtgaacgccctggtggccagactgcccctgctgctgcccagagcccccagaagcctgatcccccccatccccgtgagcccccccatcctggcccccagactgagcagcggcgccctgaaggtggccaccctgcccctgagcagcagagccggcgccccccccgccgccgtgcccatcatcaacatgatcctgcccaccgtgcccgccctgcccggccccggccccggccccggcagagccccccccggcggcctgacccagcccagaggcaccgagaacagagaggtgggcatcggcggcgaccagggcccccacgacaagggcgtgaagagaaccgccgaggtgcccgtgagcgaggccagcggccaggccccccccgccaaggccgccaagcaggacatcgaggacaccgccagcgacgccaagagaaagagaggcagacccagaaagaagagcggcggcagcggcgagagaaacagcacccccctgaagagcgccgccgccatggagagcgcccagagcagcagactgccctgggagacctggggcagcggcggcgagggcaacagcgccggcggcgccgagagacccggccccatgggcgaggccgagaagggcgccgtgctggcccagggccagggcgacggcaccgtgagcaagggcggcagaggccccggcagccagcacaccaaggaggccgaggacaagatccccctggtgcccagcaaggtgagcgtgatcaagggcagcagaagccagaaggaggccttccccctggccaagggcgaggtggacaccgccccccagggcaacaaggacctgaagtag

SEQ ID NO: 96724 - DNA, 357 bp, synthetic construct
  misc_feature 1..357: note = Description of Artificial Sequence: Synthetic coding sequence
  source 1..357: mol_type = other DNA
atggccgaggacgagcccgacgccaagagccccaagaccggcggcagagccccccccggcggcgccgaggccggcgagcccaccaccctgctgcagagactgagaggcaccatcagcaaggccgtgcagaacaaggtggagggcatcctgcaggacgtgcagaagttcagcgacaacgacaagctgtacctgtacctgcagctgcccagcggccccaccaccggcgacaagagcagcgagcccagcaccctgagcaacgaggagtacatgtacgcctacagatggatcagaaaccacctggaggagcacaccgacacctgcctgcccaagcagagcgtgtacgacgcctacagatag

SEQ ID NO: 96725 - DNA, 693 bp, synthetic construct
  misc_feature 1..693: note = Description of Artificial Sequence: Synthetic coding sequence
  source 1..693: mol_type = other DNA
atggccgaggacgagcccgacgccaagagccccaagaccggcggcagagccccccccggcggcgccgaggccggcgagcccaccaccctgctgcagagactgagaggcaccatcagcaaggccgtgcagaacaaggtggagggcatcctgcaggacgtgcagaagttcagcgacaacgacaagctgtacctgtacctgcagctgcccagcggccccaccaccggcgacaagagcagcgagcccagcaccctgagcaacgaggagtacatgtacgcctacagatggatcagaaaccacctggaggagcacaccgacacctgcctgcccaagcagagcgtgtacgacgcctacagaaagtactgcgagagcctggcctgctgcagacccctgagcaccgccaacttcggcaagatcatcagagagatcttccccgacatcaaggccagaagactgggcggcagaggccagagcaagtactgctacagcggcatcagaagaaagaccctggtgagcatgccccccctgcccggcctggacctgaagggcagcgagagccccgagatgggccccgaggtgacccccgcccccagagacgagctggtggaggccgcctgcgccctgacctgcgactgggccgagagaatcctgaagagaagcttcagcagcatcgtggaggtggccagattcctgtag

SEQ ID NO: 96726 - DNA, 372 bp, synthetic construct
  misc_feature 1..372: note = Description of Artificial Sequence: Synthetic coding sequence
  source 1..372: mol_type = other DNA
atggccgaggacgagcccgacgccaagagccccaagaccggcggcagagccccccccggcggcgccgaggccggcgagcccaccaccctgctgcagagactgagaggcaccatcagcaaggccgtgcagaacaaggtggagggcatcctgcaggacgtgcagaagttcagcgacaacgacaagctgtacctgtacctgcagctgcccagcggccccaccaccggcgacaagagcagcgagcccagcaccctgagcaacgaggagtacatgtacgcctacagatggatcagaaaccacctggaggagcacaccgacacctgcctgcccaagcagagcgtgtacgacgcctacagaaagtactgcgagagctag

SEQ ID NO: 96727 - DNA, 291 bp, synthetic construct
  misc_feature 1..291: note = Description of Artificial Sequence: Synthetic coding sequence
  source 1..291: mol_type = other DNA
atggccgaggacgagcccgacgccaagagccccaagaccggcggcagagccccccccggcggcgccgaggccggcgagcccaccaccctgctgcagagactgagaggcaccatcagcaaggccgtgcagaacaaggtggagggcatcctgcaggacgtgcagaagttcagcgacaacgacaagctgtacctgtacctgcagctgcccagcggccccaccaccggcgacaagagcagcgagcccagcaccctgagcaacgaggagtacatgtacgcctacagatggatctag

SEQ ID NO: 96728 - DNA, 321 bp, synthetic construct
  misc_feature 1..321: note = Description of Artificial Sequence: Synthetic coding sequence
  source 1..321: mol_type = other DNA
atggccgaggacgagcccgacgccaagagccccaagaccggcggcagagccccccccggcggcgccgaggccggcgagcccaccaccctgctgcagagactgagaggcaccatcagcaaggccgtgcagaacaaggtggagggcatcctgcaggacgtgcagaagttcagcgacaacgacaagctgtacctgtacctgcagctgcccagcggccccaccaccggcgacaagagcagcgagcccagcaccctgagcaacgaggagtacatgtacgcctacagatggatcagaaaccacctggaggagcacaccgacacctag

SEQ ID NO: 96729 - DNA, 555 bp, synthetic construct
  misc_feature 1..555: note = Description of Artificial Sequence: Synthetic coding sequence
  source 1..555: mol_type = other DNA
atggccgaggacgagcccgacgccaagagccccaagaccggcggcagagccccccccggcggcgccgaggccggcgagcccaccaccctgctgcagagactgagaggcaccatcagcaaggccgtgcagaacaaggtggagggcatcctgcaggacgtgcagaagttcagcgacaacgacaagctgtacctgtacctgcagctgcccagcggccccaccaccggcgacaagagcagcgagcccagcaccctgagcaacgaggagtacatgtacgcctacagatggatcagaaaccacctggaggagcacaccgacacctgcctgcccaagcagagcgtgtacgacgcctacagaaagtactgcgagagcctggcctgctgcagacccctgagcaccgccaacttcggcaagatcatcagagagatcttccccgacatcaaggccagaagactgggcggcagaggccagagcaagtactgctacagcggcatcagaagaaagaccctggtgagcatgccccccctgcccggcctggacctgaagggcagcgagtag

SEQ ID NO: 96730 - DNA, 1731 bp, synthetic construct
  misc_feature 1..1731: note = Description of Artificial Sequence: Synthetic coding sequence
  source 1..1731: mol_type = other DNA
atggccgaggacgagcccgacgccaagagccccaagaccggcggcagagccccccccggcggcgccgaggccggcgagcccaccaccctgctgcagagactgagaggcaccatcagcaaggccgtgcagaacaaggtggagggcatcctgcaggacgtgcagaagttcagcgacaacgacaagctgtacctgtacctgcagctgcccagcggccccaccaccggcgacaagagaaagtactgcgagagcctggcctgctgcagacccctgagcaccgccaacttcggcaagatcatcagagagatcttccccgacatcaaggccagaagactgggcggcagaggccagagcaagtactgctacagcggcatcagaagaaagaccctggtgagcatgccccccctgcccggcctggacctgaagggcagcgagagccccgagatgggccccgaggtgacccccgcccccagagacgagctggtggaggccgcctgcgccctgacctgcgactgggccgagagaatcctgaagagaagcttcagcagcatcgtggaggtggccagattcctgctgcagcagcacctgatcagcgccagaagcgcccacgcccacgtgctgaaggccatgggcctggccgaggaggacgagcacgcccccagagagagaagcagcaagcccaagaacggcctggagaaccccgagggcggcgcccacaagaagcccgagagactggcccagccccccaaggacctggaggccagaaccggcgccggccccctggccagaggcgagagaaagaagagcgtggtggagagcagcgcccccggcgccaacaacctgcaggtgaacgccctggtggccagactgcccctgctgctgcccagagcccccagaagcctgatcccccccatccccgtgagcccccccatcctggcccccagactgagcagcggcgccctgaaggtggccaccctgcccctgagcagcagagccggcgccccccccgccgccgtgcccatcatcaacatgatcctgcccaccgtgcccgccctgcccggccccggccccggccccggcagagccccccccggcggcctgacccagcccagaggcaccgagaacagagaggtgggcatcggcggcgaccagggcccccacgacaagggcgtgaagagaaccgccgaggtgcccgtgagcgaggccagcggccaggccccccccgccaaggccgccaagcaggacatcgaggacaccgccagcgacgccaagagaaagagaggcagacccagaaagaagagcggcggcagcggcgagagaaacagcacccccctgaagagcgccgccgccatggagagcgcccagagcagcagactgccctgggagacctggggcagcggcggcgagggcaacagcgccggcggcgccgagagacccggccccatgggcgaggccgagaagggcgccgtgctggcccagggccagggcgacggcaccgtgagcaagggcggcagaggccccggcagccagcacaccaaggaggccgaggacaagatccccctggtgcccagcaaggtgagcgtgatcaagggcagcagaagccagaaggaggccttccccctggccaagggcgaggtggacaccgccccccagggcaacaaggacctgaaggagcacgtgctgcagagcagcctgagccaggagcacaaggaccccaaggccacccccccctag

SEQ ID NO: 96731 - DNA, 1851 bp, synthetic construct; identical to SEQ ID NO: 96721
  misc_feature 1..1851: note = Description of Artificial Sequence: Synthetic coding sequence
  source 1..1851: mol_type = other DNA

SEQ ID NO: 96732 - DNA, 498 bp, synthetic construct
  misc_feature 1..498: note = Description of Artificial Sequence: Synthetic coding sequence
  source 1..498: mol_type = other DNA
atggccgaggacgagcccgacgccaagagccccaagaccggcggcagagccccccccggcggcgccgaggccggcgagcccaccaccctgctgcagagactgagaggcaccatcagcaaggccgtgcagaacaaggtggagggcatcctgcaggacgtgcagaagttcagcgacaacgacaagctgtacctgtacctgcagctgcccagcggccccaccaccggcgacaagagcagcgagcccagcaccctgagcaacgaggagtacatgtacgcctacagatggatcagaaaccacctggaggagcacaccgacacctgcctgcccaagcagagcgtgtacgacgcctacagaaagtactgcgagagcctggcctgctgcagacccctgagcaccgccaacttcggcaagatcatcagagagatcttccccgacatcaaggccagaagactgggcggcagaggccagagcaagtactgctacagcggcatcagatag

SEQ ID NO: 96733 - DNA, 2787 bp, synthetic construct
  misc_feature 1..2787: note = Description of Artificial Sequence: Synthetic coding sequence
  source 1..2787: mol_type = other DNA
atggccaaggtgcccgagctggaggacaccttcctgcaggcccagcccgccccccagctgagccccggcatccaggaggactgctgcgtgcagctgctgggcaagggcctgctggtgtaccccgaggagaccgtgtacctggccgccgagggccagcccggcggcgagcagggcggcggcgagaagggcgaggaccccgagctgcccggcgccgtgaagagcgagatgcacctgaacaacggcaacttcagcagcgaggaggaggacgccgacaaccacgacagcaagaccaaggccgccgaccagtacctgagccagaagaagaccatcacccagatcgtgaaggacaagaagaagcagacccagctgaccctgcagtggctggaggagaactacatcgtgtgcgagggcgtgtgcctgcccagatgcatcctgtacgcccactacctggacttctgcagaaaggagaagctggagcccgcctgcgccgccaccttcggcaagaccatcagacagaagttccccctgctgaccaccagaagactgggcaccagaggccacagcaagtaccactactacggcatcggcatcaaggagagcagcgcctactaccacagcgtgtacagcggcaagggcctgaccagattcagcggcagcaagctgaagaacgagggcggcttcaccagaaagtacagcctgagcagcaagaccggcaccctgctgcccgagttccccagcgcccagcacctggtgtaccagggctgcatcagcaaggacaaggtggacaccctgatcatgatgtacaagacccactgccagtgcatcctggacaacgccatcaacggcaacttcgaggagatccagcacttcctgctgcacttctggcagggcatgcccgaccacctgctgcccctgctggagaaccccgtgatcatcgacatcttctgcgtgtgcgacagcatcctgtacaaggtgctgaccgacgtgctgatccccgccaccatgcaggagatgcccgagagcctgctggccgacatcagaaacttcgccaagaactgggagcagtgggtggtgagcagcctggagaacctgcccgaggccctgaccgacaagaagatccccatcgtgagaagattcgtgagcagcctgaagagacagaccagcttcctgcacctggcccagatcgccagacccgccctgttcgaccagcacgtggtgaacagcatggtgagcgacatcgagagagtggacctgaacagcatcggcagccaggccctgctgaccatcagcggcagcaccgacaccgagagcggcatctacaccgagcacgacagcatcaccgtgttccaggagctgaaggacctgctgaagaagaacgccaccgtggaggccttcatcgagtggctggacaccgtggtggagcagagagtgatcaagaccagcaagcagaacggcagaagcctgaagaagagagcccaggacttcctgctgaagtggagcttcttcggcgccagagtgatgcacaacctgaccctgaacaacgccagcagcttcggcagcttccacctgatcagaatgctgctggacgagtacatcctgctggccatggagacccagttcaacaacgacaaggagcaggagctgcagaacctgctggacaagtacatgaagaacagcgacgccagcaaggccgccttcaccgccagccccagcagctgcttcctggccaacagaaacaagggcagcatggtgagcagcgacgccgtgaagaacgagagccacgtggagaccacctacctgcccctgcccagcagccagcccggcggcctgggccccgccctgcaccagttccccgccggcaacaccgacaacatgcccctgaccggccagatggagctgagccagatcgccggccacctgatgaccccccccatcagccccgccatggccagcagaggcagcgtgatcaaccagggccccatggccggcagaccccccagcgtgggccccgtgctgagcgcccccagccactgcagcacctaccccgagcccatctaccccaccctgccccaggccaaccacgacttctacagcaccagcagcaactaccagaccgtgttcagagcccagccccacagcaccagcggcctgtacccccaccacaccgagcacggcagatgcatggcctggaccgagcagcagctgagcagagacttcttcagcggcagctgcgccggcagcccctacaacagcagaccccccagcagctacggccccagcctgcaggcccaggacagccacaacatgcagttcctgaacaccggcagcttcaacttcctgagcaacaccggcgccgccagctgccagggcgccaccctgccccccaacagccccaacggctactacggcagcaacatcaactaccccgagagccacagactgggcagcatggtgaaccagcacgtgagcgtgatcagcagcatcagaagcctgcccccctacagcgacatccacgaccccctgaacatcctggacgacagcggcagaaagcagaccagcagcttctacaccgacaccagcagccccgtggcctgcagaacccccgtgctggccagcagcctgcagacccccatccccagcagcagcagccagtgcatgtacggcaccagcaaccagtaccccgcccaggagaccctggacagccacggcaccagcagcagagagatggtgagcagcctgccccccatcaacaccgtgttcatgggcaccgccgccggcggcacctag

SEQ ID NO: 96734 - DNA, 4122 bp, synthetic construct
  misc_feature 1..4122: note = Description of Artificial Sequence: Synthetic coding sequence
  source 1..4122: mol_type = other DNA
atggccgaggagcagcagcagccccccccccagcagcccgacgcccaccagcagctgccccccagcgcccccaacagcggcgtggccctgcccgccctggtgcccggcctgcccggcaccgaggccagcgccctgcagcacaagatcaagaacagcatctgcaagaccgtgcagagcaaggtggactgcatcctgcaggaggtggagaagttcaccgacctggagaagctgtacctgtacctgcagctgcccagcggcctgagcaacggcgagaagagcgaccagaacgccatgagcagcagcagagcccagcagatgcacgccttcagctggatcagaaacaccctggaggagcaccccgagaccagcctgcccaagcaggaggtgtacgacgagtacaagagctactgcgacaacctgggctaccaccccctgagcgccgccgacttcggcaagatcatgaagaacgtgttccccaacatgaaggccagaagactgggcaccagaggcaagagcaagtactgctacagcggcctgagaaagaaggccttcgtgcacatgcccaccctgcccaacctggacttccacaagaccggcgacggcctggagggcgccgagcccagcggccagctgcagaacatcgacgaggaggtgatcagcagcgcctgcagactggtgtgcgagtgggcccagaaggtgctgagccagcccttcgacaccgtgctggagctggccagattcctggtgaagagccactacatcggcaccaagagcatggccgccctgaccgtgatggccgccgcccccgccggcatgaagggcatcacccagcccagcgccttcatccccaccgccgagagcaacagcttccagccccaggtgaagaccctgcccagccccatcgacgccaagcagcagctgcagagaaagatccagaagaagcagcaggagcagaagctgcagagccccctgcccggcgagagcgccgccaagaagagcgagagcgccaccagcaacggcgtgaccaacctgcccaacggcaaccccagcatcctgagcccccagcccatcggcatcgtggtggccgccgtgcccagccccatccccgtgcagagaaccagacagctggtgaccagccccagccccatgagcagcagcgacggcaaggtgctgcccctgaacgtgcaggtggtgacccagcacatgcagagcgtgaagcaggcccccaagaccccccagaacgtgcccgccagccccggcggcgacagaagcgccagacacagatacccccagatcctgcccaagcccgccaacaccagcgccctgaccatcagaagccccaccaccgtgctgttcaccagcagccccatcaagaccgccgtggtgcccgccagccacatgagcagcctgaacgtggtgaagatgaccaccatcagcctgacccccagcaacagcaacacccccctgaagcacagcgccagcgtgagcagcgccaccggcaccaccgaggagagcagaagcgtgccccagatcaagaacggcagcgtggtgagcctgcagagccccggcagcagaagcagcagcgccggcggcaccagcgccgtggaggtgaaggtggagcccgagaccagcagcgacgagcaccccgtgcagtgccaggagaacagcgacgaggccaaggccccccagacccccagcgccctgctgggccagaagagcaacaccgacggcgccctgcagaagcccagcaacgagggcgtgatcgagatcaaggccaccaaggtgtgcgaccagagaaccaagtgcaagagcagatgcaacgagatgctgcccggcaccagcaccggcaacaaccagagcaccatcaccctgagcgtggccagccagaacctgaccttcaccagcagcagcagcccccccaacggcgacagcatcaacaaggaccccaagctgtgcaccaagagccccagaaagagactgagcagcaccctgcaggagacccaggtgccccccgtgaagaagcccatcgtggagcagctgagcgccgccaccatcgagggccagaagcagggcagcgtgaagaaggaccagaaggtgccccacagcggcaagaccgagggcagcaccgccggcgcccagatccccagcaaggtgagcgtgaacgtgagcagccacatcggcgccaaccagcccctgaacagcagcgccctggtgatcagcgacagcgccctggagcagcagaccacccccagcagcagccccgacatcaaggtgaagctggagggcagcgtgttcctgctggacagcgacagcaagagcgtgggcagcttcaaccccaacggctggcagcagatcaccaaggacagcgagttcatcagcgccagctgcgagcagcagcaggacatcagcgtgatgaccatccccgagcacagcgacatcaacgacctggagaagagcgtgtgggagctggagggcatgccccaggacacctacagccagcagctgcacagccagatccaggagagcagcctgaaccagatccaggcccacagcagcgaccagctgcccctgcagagcgagctgaaggagttcgagcccagcgtgagccagaccaacgagagctacttccccttcgacgacgagctgacccaggacagcatcgtggaggagctggtgctgatggagcagcagatgagcatgaacaacagccacagctacggcaactgcctgggcatgaccctgcagagccagagcgtgacccccggcgcccccatgagcagccacaccagcagcacccacttctaccaccccatccacagcaacggcacccccatccacacccccacccccacccccacccccacccccacccccacccccacccccacccccaccagcgagatgatcgccggcagccagagcctgagcagagagagcccctgcagcagactggcccagaccacccccgtggacagcgccctgggcagcagcagacacacccccatcggcaccccccacagcaactgcagcagcagcgtgccccccagccccgtggagtgcagaaaccccttcgccttcacccccatcagcagcagcatggcctaccacgacgccagcatcgtgagcagcagccccgtgaagcccatgcagagacccatggccacccaccccgacaagaccaagctggagtggatgaacaacggctacagcggcgtgggcaacagcagcgtgagcggccacggcatcctgcccagctaccaggagctggtggaggacagattcagaaagccccacgccttcgccgtgcccggccagagctaccagagccagagcagacaccacgacaccaacttcggcagactgacccccgtgagccccgtgcagcaccagggcgccaccgtgaacaacaccaacaagcaggagggcttcgccgtgcccgcccccctggacaacaagggcaccaacagcagcgccagcagcaacttcagatgcagaagcgtgagccccgccgtgcacagacagagaaacctgagcggcagcaccctgtaccccgtgagcaacatccccagaagcaacgtgacccccttcggcagccccgtgacccccgaggtgcacgtgttcaccaacgtgcacaccgacgcctgcgccaacaacatcgcccagagaagccagagcgtgcccctgaccgtgatgatgcagaccgccttccccaacgccctgcagaagcaggccaacagcaagaagatcaccaacgtgctgctgagcaagctggacagcgacaacgacgacgccgtgagaggcctgggcatgaacaacctgcccagcaactacaccgccagaatgaacctgacccagatcctggagcccagcaccgtgttccccagcgccaacccccagaacatgatcgacagcagcaccagcgtgtacgagttccagacccccagctacctgaccaagagcaacagcaccggccagatcaacttcagccccggcgacaaccaggcccagagcgagatcggcgagcagcagctggacttcaacagcaccgtgaaggacctgctgagcggcgacagcctgcagaccaaccagcagctgaagtaccccgacgtgctgggcgagtag

SEQ ID NO: 96735 - DNA, 3846 bp, synthetic construct
  misc_feature 1..3846: note = Description of Artificial Sequence: Synthetic coding sequence
  source 1..3846: mol_type = other DNA
atgagcagcagcagagcccagcagatgcacgccttcagctggatcagaaacaccctggaggagcaccccgagaccagcctgcccaagcaggaggtgtacgacgagtacaagagctactgcgacaacctgggctaccaccccctgagcgccgccgacttcggcaagatcatgaagaacgtgttccccaacatgaaggccagaagactgggcaccagaggcaagagcaagtactgctacagcggcctgagaaagaaggccttcgtgcacatgcccaccctgcccaacctggacttccacaagaccggcgacggcctggagggcgccgagcccagcggccagctgcagaacatcgacgaggaggtgatcagcagcgcctgcagactggtgtgcgagtgggcccagaaggtgctgagccagcccttcgacaccgtgctggagctggccagattcctggtgaagagccactacatcggcaccaagagcatggccgccctgaccgtgatggccgccgcccccgccggcatgaagggcatcacccagcccagcgccttcatccccaccgccgagagcaacagcttccagccccaggtgaagaccctgcccagccccatcgacgccaagcagcagctgcagagaaagatccagaagaagcagcaggagcagaagctgcagagccccctgcccggcgagagcgccgccaagaagagcgagagcgccaccagcaacggcgtgaccaacctgcccaacggcaaccccagcatcctgagcccccagcccatcggcatcgtggtggccgccgtgcccagccccatccccgtgcagagaaccagacagctggtgaccagccccagccccatgagcagcagcgacggcaaggtgctgcccctgaacgtgcaggtggtgacccagcacatgcagagcgtgaagcaggcccccaagaccccccagaacgtgcccgccagccccggcggcgacagaagcgccagacacagatacccccagatcctgcccaagcccgccaacaccagcgccctgaccatcagaagccccaccaccgtgctgttcaccagcagccccatcaagaccgccgtggtgcccgccagccacatgagcagcctgaacgtggtgaagatgaccaccatcagcctgacccccagcaacagcaacacccccctgaagcacagcgccagcgtgagcagcgccaccggcaccaccgaggagagcagaagcgtgccccagatcaagaacggcagcgtggtgagcctgcagagccccggcagcagaagcagcagcgccggcggcaccagcgccgtggaggtgaaggtggagcccgagaccagcagcgacgagcaccccgtgcagtgccaggagaacagcgacgaggccaaggccccccagacccccagcgccctgctgggccagaagagcaacaccgacggcgccctgcagaagcccagcaacgagggcgtgatcgagatcaaggccaccaaggtgtgcgaccagagaaccaagtgcaagagcagatgcaacgagatgctgcccggcaccagcaccggcaacaaccagagcaccatcaccctgagcgtggccagccagaacctgaccttcaccagcagcagcagcccccccaacggcgacagcatcaacaaggaccccaagctgtgcaccaagagccccagaaagagactgagcagcaccctgcaggagacccaggtgccccccgtgaagaagcccatcgtggagcagctgagcgccgccaccatcgagggccagaagcagggcagcgtgaagaaggaccagaaggtgccccacagcggcaagaccgagggcagcaccgccggcgcccagatccccagcaaggtgagcgtgaacgtgagcagccacatcggcgccaaccagcccctgaacagcagcgccctggtgatcagcgacagcgccctggagcagcagaccacccccagcagcagccccgacatcaaggtgaagctggagggcagcgtgttcctgctggacagcgacagcaagagcgtgggcagcttcaaccccaacggctggcagcagatcaccaaggacagcgagttcatcagcgccagctgcgagcagcagcaggacatcagcgtgatgaccatccccgagcacagcgacatcaacgacctggagaagagcgtgtgggagctggagggcatgccccaggacacctacagccagcagctgcacagccagatccaggagagcagcctgaaccagatccaggcccacagcagcgaccagctgcccctgcagagcgagctgaaggagttcgagcccagcgtgagccagaccaacgagagctacttccccttcgacgacgagctgacccaggacagcatcgtggaggagctggtgctgatggagcagcagatgagcatgaacaacagccacagctacggcaactgcctgggcatgaccctgcagagccagagcgtgacccccggcgcccccatgagcagccacaccagcagcacccacttctaccaccccatccacagcaacggcacccccatccacacccccacccccacccccacccccacccccacccccacccccacccccacccccaccagcgagatgatcgccggcagccagagcctgagcagagagagcccctgcagcagactggcccagaccacccccgtggacagcgccctgggcagcagcagacacacccccatcggcaccccccacagcaactgcagcagcagcgtgccccccagccccgtggagtgcagaaaccccttcgccttcacccccatcagcagcagcatggcctaccacgacgccagcatcgtgagcagcagccccgtgaagcccatgcagagacccatggccacccaccccgacaagaccaagctggagtggatgaacaacggctacagcggcgtgggcaacagcagcgtgagcggccacggcatcctgcccagctaccaggagctggtggaggacagattcagaaagccccacgccttcgccgtgcccggccagagctaccagagccagagcagacaccacgacaccaacttcggcagactgacccccgtgagccccgtgcagcaccagggcgccaccgtgaacaacaccaacaagcaggagggcttcgccgtgcccgcccccctggacaacaagggcaccaacagcagcgccagcagcaacttcagatgcagaagcgtgagccccgccgtgcacagacagagaaacctgagcggcagcaccctgtaccccgtgagcaacatccccagaagcaacgtgacccccttcggcagccccgtgacccccgaggtgcacgtgttcaccaacgtgcacaccgacgcctgcgccaacaacatcgcccagagaagccagagcgtgcccctgaccgtgatgatgcagaccgccttccccaacgccctgcagaagcaggccaacagcaagaagatcaccaacgtgctgctgagcaagctggacagcgacaacgacgacgccgtgagaggcctgggcatgaacaacctgcccagcaactacaccgccagaatgaacctgacccagatcctggagcccagcaccgtgttccccagcgccaacccccagaacatgatcgacagcagcaccagcgtgtacgagttccagacccccagctacctgaccaagagcaacagcaccggccagatcaacttcagccccggcgacaaccaggcccagagcgagatcggcgagcagcagctggacttcaacagcaccgtgaaggacctgctgagcggcgacagcctgcagaccaaccagcagctgtgcagctgccccagcagcctgctggccggcatgcagatgtag

SEQ ID NO: 96736 - DNA, 4383 bp, synthetic construct
  misc_feature 1..4383: note = Description of Artificial Sequence: Synthetic coding sequence
  source 1..4383: mol_type = other DNA
atggccgaggagcagcagcagccccccccccagcagcccgacgcccaccagcagctgccccccagcgcccccaacagcggcgtggccctgcccgccctggtgcccggcctgcccggcaccgaggccagcgccctgcagcacaagatcaagaacagcatctgcaagaccgtgcagagcaaggtggactgcatcctgcaggaggtggagaagttcaccgacctggagaagctgtacctgtacctgcagctgcccagcggcctgagcaacggcgagaagagcgaccagaacgccatgagcagcagcagagcccagcagatgcacgccttcagctggatcagaaacaccctggaggagcaccccgagaccagcctgcccaagcaggaggtgtacgacgagtacaagagctactgcgacaacctgggctaccaccccctgagcgccgccgacttcggcaagatcatgaagaacgtgttccccaacatgaaggccagaagactgggcaccagaggcaagagcaagtactgctacagcggcctgagaaagaaggccttcgtgcacatgcccaccctgcccaacctggacttccacaagaccggcgacggcctggagggcgccgagcccagcggccagctgcagaacatcgacgaggaggtgatcagcagcgcctgcagactggtgtgcgagtgggcccagaaggtgctgagccagcccttcgacaccgtgctggagctggccagattcctggtgaagagccactacatcggcaccaagagcatggccgccctgaccgtgatggccgccgcccccgccggcatgaagggcatcacccagcccagcgccttcatccccaccgccgagagcaacagcttccagccccaggtgaagaccctgcccagccccatcgacgccaagcagcagctgcagagaaagatccagaagaagcagcaggagcagaagctgcagagccccctgcccggcgagagcgccgccaagaagagcgagagcgccaccagcaacggcgtgaccaacctgcccaacggcaaccccagcatcctgagcccccagcccatcggcatcgtggtggccgccgtgcccagccccatccccgtgcagagaaccagacagctggtgaccagccccagccccatgagcagcagcgacggcaaggtgctgcccctgaacgtgcaggtggtgacccagcacatgcagagcgtgaagcaggcccccaagaccccccagaacgtgcccgccagccccggcggcgacagaagcgccagacacagatacccccagatcctgcccaagcccgccaacaccagcgccctgaccatcagaagccccaccaccgtgctgttcaccagcagccccatcaagaccgccgtggtgcccgccagccacatgagcagcctgaacgtggtgaagatgaccaccatcagcctgacccccagcaacagcaacacccccctgaagcacagcgccagcgtgagcagcgccaccggcaccaccgaggagagcagaagcgtgccccagatcaagaacggcagcgtggtgagcctgcagagccccggcagcagaagcagcagcgccggcggcaccagcgccgtggaggtgaaggtggagcccgagaccagcagcgacgagcaccccgtgcagtgccaggagaacagcgacgaggccaaggccccccagacccccagcgccctgctgggccagaagagcaacaccgacggcgccctgcagaagcccagcaacgagggcgtgatcgagatcaaggccaccaaggtgtgcgaccagagaaccaagtgcaagagcagatgcaacgagatgctgcccggcaccagcaccggcaacaaccagagcaccatcaccctgagcgtggccagccagaacctgaccttcaccagcagcagcagcccccccaacggcgacagcatcaacaaggaccccaagctgtgcaccaagagccccagaaagagactgagcagcaccctgcaggagacccaggtgccccccgtgaagaagcccatcgtggagcagctgagcgccgccaccatcgagggccagaagcagggcagcgtgaagaaggaccagaaggtgccccacagcggcaagaccgagggcagcaccgccggcgcccagatccccagcaaggtgagcgtgaacgtgagcagccacatcggcgccaaccagcccctgaacagcagcgccctggtgatcagcgacagcgccctggagcagcagaccacccccagcagcagccccgacatcaaggtgaagctggagggcagcgtgttcctgctggacagcgacagcaagagcgtgggcagcttcaaccccaacggctggcagcagatcaccaaggacagcgagttcatcagcgccagctgcgagcagcagcaggacatcagcgtgatgaccatccccgagcacagcgacatcaacgacctggagaagagcgtgtgggagctggagggcatgccccaggacacctacagccagcagctgcacagccagatccaggagagcagcctgaaccagatccaggcccacagcagcgaccagctgcccctgcagagcgagctgaaggagttcgagcccagcgtgagccagaccaacgagagctacttccccttcgacgacgagctgacccaggacagcatcgtggaggagctggtgctgatggagcagcagatgagcatgaacaacagccacagctacggcaactgcctgggcatgaccctgcagagccagagcgtgacccccggcgcccccatgagcagccacaccagcagcacccacttctaccaccccatccacagcaacggcacccccatccacacccccacccccacccccacccccacccccacccccacccccacccccacccccaccagcgagatgatcgccggcagccagagcctgagcagagagagcccctgcagcagactggcccagaccacccccgtggacagcgccctgggcagcagcagacacacccccatcggcaccccccacagcaactgcagcagcagcgtgccccccagccccgtggagtgcagaaaccccttcgccttcacccccatcagcagcagcatggcctaccacgacgccagcatcgtgagcagcagccccgtgaagcccatgcagagacccatggccacccaccccgacaagaccaagctggagtggatgaacaacggctacagcggcgtgggcaacagcagcgtgagcggccacggcatcctgcccagctaccaggagctggtggaggacagattcagaaagccccacgccttcgccgtgcccggccagagctaccagagccagagcagacaccacgacaccaacttcggcagactgacccccgtgagccccgtgcagcaccagggcgccaccgtgaacaacaccaacaagcaggagggcttcgccgtgcccgcccccctggacaacaagggcaccaacagcagcgccagcagcaacttcagatgcagaagcgtgagccccgccgtgcacagacagagaaacctgagcggcagcaccctgtaccccgtgagcaacatccccagaagcaacgtgacccccttcggcagccccgtgacccccgaggtgcacgtgttcaccaacgtgcacaccgacgcctgcgccaacaacatcgcccagagaagccagagcgtgcccctgaccgtgatgatgcagaccgccttccccaacgccctgcagaagcaggccaacagcaagaagatcaccaacgtgctgctgagcaagctggacagcgacaacgacgacgccgtgagaggcctgggcatgaacaacctgcccagcaactacaccgccagaatgaacctgacccagatcctggagcccagcaccgtgttccccagcgccaacccccagaacatgatcgacagcagcaccagcgtgtacgagttccagacccccagctacctgaccaagagcaacagcaccggccagatcaacttcagccccggcgacaaccaggcccagagcgagatcggcgagcagcagctggacttcaacagcaccgtgaaggacctgctgagcggcgacagcctgcagaccaaccagcagctggtgggccagggcgccagcgacctgaccaacaccgccagcgacttcagcagcgacatcagactgagcagcgagctgagcggcagcatcaacgacctgaacaccctggaccccaacctgctgttcgaccccggcagacagcagggccaggacgacgaggccaccctggaggagctgaagaacgaccccctgttccagcagatctgcagcgagagcatgaacagcatgaccagcagcggcttcgagtggatcgagagcaaggaccaccccaccgtggagatgctgggctag

SEQ ID NO: 96737 - DNA, 4092 bp, synthetic construct
  misc_feature 1..4092: note = Description of Artificial Sequence: Synthetic coding sequence
  source 1..4092: mol_type = other DNA
atgagcagcagcagagcccagcagatgcacgccttcagctggatcagaaacaccctggaggagcaccccgagaccagcctgcccaagcaggaggtgtacgacgagtacaagagctactgcgacaacctgggctaccaccccctgagcgccgccgacttcggcaagatcatgaagaacgtgttccccaacatgaaggccagaagactgggcaccagaggcaagagcaagtactgctacagcggcctgagaaagaaggccttcgtgcacatgcccaccctgcccaacctggacttccacaagaccggcgacggcctggagggcgccgagcccagcggccagctgcagaacatcgacgaggaggtgatcagcagcgcctgcagactggtgtgcgagtgggcccagaaggtgctgagccagcccttcgacaccgtgctggagctggccagattcctggtgaagagccactacatcggcaccaagagcatggccgccctgaccgtgatggccgccgcccccgccggcatgaagggcatcacccagcccagcgccttcatccccaccgccgagagcaacagcttccagccccaggtgaagaccctgcccagccccatcgacgccaagcagcagctgcagagaaagatccagaagaagcagcaggagcagaagctgcagagccccctgcccggcgagagcgccgccaagaagagcgagagcgccaccagcaacggcgtgaccaacctgcccaacggcaaccccagcatcctgagcccccagcccatcggcatcgtggtggccgccgtgcccagccccatccccgtgcagagaaccagacagctggtgaccagccccagccccatgagcagcagcgacggcaaggtgctgcccctgaacgtgcaggtggtgacccagcacatgcagagcgtgaagcaggcccccaagaccccccagaacgtgcccgccagccccggcggcgacagaagcgccagacacagatacccccagatcctgcccaagcccgccaacaccagcgccctgaccatcagaagccccaccaccgtgctgttcaccagcagccccatcaagaccgccgtggtgcccgccagccacatgagcagcctgaacgtggtgaagatgaccaccatcagcctgacccccagcaacagcaacacccccctgaagcacagcgccagcgtgagcagcgccaccggcaccaccgaggagagcagaagcgtgccccagatcaagaacggcagcgtggtgagcctgcagagccccggcagcagaagcagcagcgccggcggcaccagcgccgtggaggtgaaggtggagcccgagaccagcagcgacgagcaccccgtgcagtgccaggagaacagcgacgaggccaaggccccccagacccccagcgccctgctgggccagaagagcaacaccgacggcgccctgcagaagcccagcaacgagggcgtgatcgagatcaaggccaccaaggtgtgcgaccagagaaccaagtgcaagagcagatgcaacgagatgctgcccggcaccagcaccggcaacaaccagagcaccatcaccctgagcgtggccagccagaacctgaccttcaccagcagcagcagcccccccaacggcgacagcatcaacaaggaccccaagctgtgcaccaagagccccagaaagagactgagcagcaccctgcaggagacccaggtgccccccgtgaagaagcccatcgtggagcagctgagcgccgccaccatcgagggccagaagcagggcagcgtgaagaaggaccagaaggtgccccacagcggcaagaccgagggcagcaccgccggcgcccagatccccagcaaggtgagcgtgaacgtgagcagccacatcggcgccaaccagcccctgaacagcagcgccctggtgatcagcgacagcgccctggagcagcagaccacccccagcagcagccccgacatcaaggtgaagctggagggcagcgtgttcctgctggacagcgacagcaagagcgtgggcagcttcaaccccaacggctggcagcagatcaccaaggacagcgagttcatcagcgccagctgcgagcagcagcaggacatcagcgtgatgaccatccccgagcacagcgacatcaacgacctggagaagagcgtgtgggagctggagggcatgccccaggacacctacagccagcagctgcacagccagatccaggagagcagcctgaaccagatccaggcccacagcagcgaccagctgcccctgcagagcgagctgaaggagttcgagcccagcgtgagccagaccaacgagagctacttccccttcgacgacgagctgacccaggacagcatcgtggaggagctggtgctgatggagcagcagatgagcatgaacaacagccacagctacggcaactgcctgggcatgaccctgcagagccagagcgtgacccccggcgcccccatgagcagccacaccagcagcacccacttctaccaccccatccacagcaacggcacccccatccacacccccacccccacccccacccccacccccacccccacccccacccccacccccaccagcgagatgatcgccggcagccagagcctgagcagagagagcccctgcagcagactggcccagaccacccccgtggacagcgccctgggcagcagcagacacacccccatcggcaccccccacagcaactgcagcagcagcgtgccccccagccccgtggagtgcagaaaccccttcgccttcacccccatcagcagcagcatggcctaccacgacgccagcatcgtgagcagcagccccgtgaagcccatgcagagacccatggccacccaccccgacaagaccaagctggagtggatgaacaacggctacagcggcgtgggcaacagcagcgtgagcggccacggcatcctgcccagctaccaggagctggtggaggacagattcagaaagccccacgccttcgccgtgcccggccagagctaccagagccagagcagacaccacgacaccaacttcggcagactgacccccgtgagccccgtgcagcaccagggcgccaccgtgaacaacaccaacaagcaggagggcttcgccgtgcccgcccccctggacaacaagggcaccaacagcagcgccagcagcaacttcagatgcagaagcgtgagccccgccgtgcacagacagagaaacctgagcggcagcaccctgtaccccgtgagcaacatccccagaagcaacgtgacccccttcggcagccccgtgacccccgaggtgcacgtgttcaccaacgtgcacaccgacgcctgcgccaacaacatcgcccagagaagccagagcgtgcccctgaccgtgatgatgcagaccgccttccccaacgccctgcagaagcaggccaacagcaagaagatcaccaacgtgctgctgagcaagctggacagcgacaacgacgacgccgtgagaggcctgggcatgaacaacctgcccagcaactacaccgccagaatgaacctgacccagatcctggagcccagcaccgtgttccccagcgccaacccccagaacatgatcgacagcagcaccagcgtgtacgagttccagacccccagctacctgaccaagagcaacagcaccggccagatcaacttcagccccggcgacaaccaggcccagagcgagatcggcgagcagcagctggacttcaacagcaccgtgaaggacctgctgagcggcgacagcctgcagaccaaccagcagctggtgggccagggcgccagcgacctgaccaacaccgccagcgacttcagcagcgacatcagactgagcagcgagctgagcggcagcatcaacgacctgaacaccctggaccccaacctgctgttcgaccccggcagacagcagggccaggacgacgaggccaccctggaggagctgaagaacgaccccctgttccagcagatctgcagcgagagcatgaacagcatgaccagcagcggcttcgagtggatcgagagcaaggaccaccccaccgtggagatgctgggctag

SEQ ID NO: 96738 - DNA, 783 bp, synthetic construct
  misc_feature 1..783: note = Description of Artificial Sequence: Synthetic coding sequence
  source 1..783: mol_type = other DNA
atggagctgacccagcccgccgaggacctgatccagacccagcagacccccgccagcgagctgggcgaccccgaggaccccggcgaggaggccgccgacggcagcgacaccgtggtgctgagcctgttcccctgcacccccgagcccgtgaaccccgagcccgacgccagcgtgagcagcccccaggccggcagcagcctgaagcacagcaccaccctgaccaacagacagagaggcaacgaggtgagcgccctgcccgccaccctggacagcctgagcatccaccagctggccgcccagggcgagctggaccagctgaaggagcacctgagaaagggcgacaacctggtgaacaagcccgacgagagaggcttcacccccctgatctgggccagcgccttcggcgagatcgagaccgtgagattcctgctggagtggggcgccgacccccacatcctggccaaggagagagagagcgccctgagcctggccagcaccggcggctacaccgacatcgtgggcctgctgctggagagagacgtggacatcaacatctacgactggaacggcggcacccccctgctgtacgccgtgagaggcaaccacgtgaagtgcgtggaggccctgctggccagaggcgccgacctgaccaccgaggccgacagcggctacacccccatggacctggccgtggccctgggctacagaaaggtgcagcaggtgatcgagaaccacatcctgaagctgttccagagcaacctggtgcccgccgaccccgagtag

SEQ ID NO: 96739 - DNA, 714 bp, synthetic construct
  misc_feature 1..714: note = Description of Artificial Sequence: Synthetic coding sequence
  source 1..714: mol_type = other DNA
atggagctgacccagcccgccgaggacctgatccagacccagcagacccccgccagcgagctgggcgaccccgaggaccccggcgaggaggccgccgacggcagcgacaccgtggtgctgagcctgttcccctgcacccccgagcccgtgaaccccgagcccgacgccagcgtgagcagcccccagggcagcagcctgaagcacagcaccaccctgaccaacagacagagaggcaacgaggtgagcgccctgcccgccaccctggactgcgacaacctggtgaacaagcccgacgagagaggcttcacccccctgatctgggccagcgccttcggcgagatcgagaccgtgagattcctgctggagtggggcgccgacccccacatcctggccaaggagagagagagcgccctgagcctggccagcaccggcggctacaccgacatcgtgggcctgctgctggagagagacgtggacatcaacatctacgactggaacggcggcacccccctgctgtacgccgtgagaggcaaccacgtgaagtgcgtggaggccctgctggccagaggcgccgacctgaccaccgaggccgacagcggctacacccccatggacctggccgtggccctgggctacagaaaggtgcagcaggtgatcgagaaccacatcctgaagctgttccagagcaacctggtgcccgccgaccccgagtag

SEQ ID NO: 96740 - DNA, 192 bp, synthetic construct
  misc_feature 1..192: note = Description of Artificial Sequence: Synthetic coding sequence
  source 1..192: mol_type = other DNA
atggagctgacccagcccgccgaggacctgatccagacccagcagacccccgccagcgagctgggcgaccccgaggaccccggcgaggaggccgccgacggcagcgacaccgtggtgctgagcctgttcccctgcacccccgagcccgtgaaccccgagcccgacgccagcgtgagcagcccccaggcctag

SEQ ID NO: 96741 - DNA, 717 bp, synthetic construct
  misc_feature 1..717: note = Description of Artificial Sequence: Synthetic coding sequence
  source 1..717: mol_type = other DNA
atggagctgacccagcccgccgaggacctgatccagacccagcagacccccgccagcgagctgggcgaccccgaggaccccggcgaggaggccgccgacggcagcgacaccgtggtgctgagcctgttcccctgcacccccgagcccgtgaaccccgagcccgacgccagcgtgagcagcccccaggccggcagcagcctgaagcacagcaccaccctgaccaacagacagagaggcaacgaggtgagcgccctgcccgccaccctggactgcgacaacctggtgaacaagcccgacgagagaggcttcacccccctgatctgggccagcgccttcggcgagatcgagaccgtgagattcctgctggagtggggcgccgacccccacatcctggccaaggagagagagagcgccctgagcctggccagcaccggcggctacaccgacatcgtgggcctgctgctggagagagacgtggacatcaacatctacgactggaacggcggcacccccctgctgtacgccgtgagaggcaaccacgtgaagtgcgtggaggccctgctggccagaggcgccgacctgaccaccgaggccgacagcggctacacccccatggacctggccgtggccctgggctacagaaaggtgcagcaggtgatcgagaaccacatcctgaagctgttccagagcaacctggtgcccgccgaccccgagtag

SEQ ID NO: 96742 - DNA, 819 bp, synthetic construct
  misc_feature 1..819: note = Description of Artificial Sequence: Synthetic coding sequence
  source 1..819: mol_type = other DNA
atggaggcccagggcgtggccgagggcgccggccccggcgccgccagcggcgtgccccaccccgccgccctggcccccgccgccgcccccaccctggcccccgccagcgtggccgccgccgccagccagttcaccctgctggtgatgcagccctgcgccggccaggacgaggccgccgcccccggcggcagcgtgggcgccggcaagcccgtgagatacctgtgcgagggcgccggcgacggcgaggaggaggccggcgaggacgaggccgacctgctggacaccagcgacccccccggcggcggcgagagcgccgccagcctggaggacctggaggacgaggagacccacagcggcggcgagggcagcagcggcggcgccagaagaagaggcagcggcggcggcagcatgagcaagacctgcacctacgagggctgcagcgagaccaccagccaggtggccaagcagagaaagccctggatgtgcaagaagcacagaaacaagatgtacaaggacaagtacaagaagaagaagagcgaccaggccctgaactgcggcggcaccgccagcaccggcagcgccggcaacgtgaagctggaggagagcgccgacaacatcctgagcatcgtgaagcagagaaccggcagcttcggcgacagacccgccagacccaccctgctggagcaggtgctgaaccagaagagactgagcctgctgagaagccccgaggtggtgcagttcctgcagaagcagcagcagctgctgaaccagcaggtgctggagcagagacagcagcagttccccggcaccagcatgtag

SEQ ID NO: 96743 - DNA, 1854 bp, synthetic construct
  misc_feature 1..1854: note = Description of Artificial Sequence: Synthetic coding sequence
  source 1..1854: mol_type = other DNA
atgagcagcctgcccaccagcgacggcttcaaccaccccgccagaagcagcggccagagccccgacgtgggcaaccccatgagcctggccagaagcgtgagcgccagcgtgtgccccatcaagcccagcgacagcgacagaatcgagcccaaggccgtgaaggccctgaaggccagcgccgagttccagctgaacagcgagaagaaggagcacctgagcctgcaggacctgagcgaccacgccagcagcgccgaccacgcccccaccgaccagagccccgccatgcccatgcagaacagcagcgaggagatcaccgtggccggcaacctggagaagagcgccgagagaagcacccagggcctgaagttccacctgcacaccagacaggaggccagcctgagcgtgaccagcaccagaatgcacgagccccagatgttcctgggcgagaaggactggcaccccgagaaccagaacctgagccaggtgagcgacccccagcagcacgaggagcccggcaacgagcagtacgaggtggcccagcagaaggccagccacgaccaggagtacctgtgcaacatcggcgacctggagctgcccgaggagagacagcagaaccagcacaagatcgtggacctggaggccaccatgaagggcaacggcctgccccagaacgtggacccccccagcgccaagaagagcatccccagcagcgagtgcagcggctgcagcaacagcgagaccttcatggagatcgacaccgcccagcagagcctggtgaccctgctgaacagcaccggcagacagaacgccaacgtgaagaacatcggcgccctggacctgaccctggacaaccccctgatggaggtggagaccagcaagtgcaaccccagcagcgagatcctgaacgacagcatcagcacccaggacctgcagccccccgagaccaacgtggagatccccggcaccaacaaggagtacggccactacagcagccccagcctgtgcggcagctgccagcccagcgtggagagcgccgaggagagctgccccagcatcaccgccgccctgaaggagctgcacgagctgctggtggtgagcagcaagcccgccagcgagaacaccagcgaggaggtgatctgccagagcgagaccatcgccgagggccagaccagcatcaaggacctgagcgagagatggacccagaacgagcacctgacccagaacgagcagtgcccccaggtgagcttccaccaggccatcagcgtgagcgtggagaccgagaagctgaccggcaccagcagcgacaccggcagagaggccgtggagaacgtgaacttcagaagcctgggcgacggcctgagcaccgacaaggagggcgtgcccaagagcagagagagcatcaacaagaacagaagcgtgaccgtgaccagcgccaagaccagcaaccagctgcactgcaccctgggcgtggagatcagccccaagctgctggccggcgaggaggacgccctgaaccagaccagcgagcagaccaagagcctgagcagcaacttcatcctggtgaaggacctgggccagggcatccagaacagcgtgaccgacagacccgagaccagagagaacgtgtgccccgacgccagcagacccctgctggagtacgagccccccaccagccaccccagcagcagccccgccatcctgccccccctgatcttccccgccaccgacatcgacagaatcctgagagccggcttcaccctgcaggaggccctgggcgccctgcacagagtgggcggcaacgccgacctggccctgctggtgctgctggccaagaacatcgtggtgcccacctag

SEQ ID NO: 96744 - DNA, 657 bp, synthetic construct
  misc_feature 1..657: note = Description of Artificial Sequence: Synthetic coding sequence
  source 1..657: mol_type = other DNA
atgagcagcggcgccgccagcggcaccggcagaggcagacccagaggcggcggccccggccccggcgaccccccccccagcgagacccacaagctggtggtggtgggcggcggcggcgtgggcaagagcgccctgaccatccagttcatccagagctacttcgtgagcgactacgaccccaccatcgaggacagctacaccaagatctgcagcgtggacggcatccccgccagactggacatcctggacaccgccggccaggaggagttcggcgccatgagagagcagtacatgagagccggccacggcttcctgctggtgttcgccatcaacgacagacagagcttcaacgaggtgggcaagctgttcacccagatcctgagagtgaaggacagagacgacttccccgtggtgctggtgggcaacaaggccgacctggagagccagagacaggtgcccagaagcgaggccagcgccttcggcgccagccaccacgtggcctacttcgaggccagcgccaagctgagactgaacgtggacgaggccttcgagcagctggtgagagccgtgagaaagtaccaggagcaggagctgccccccagcccccccagcgcccccagaaagaagggcggcggctgcccctgcgtgctgctgtag

SEQ ID NO: 96745 - DNA, 615 bp, synthetic construct
  misc_feature 1..615: note = Description of Artificial Sequence: Synthetic coding sequence
  source 1..615: mol_type = other DNA
atggccgccgccggctggagagacggcagcggccaggagaagtacagactggtggtggtgggcggcggcggcgtgggcaagagcgccctgaccatccagttcatccagagctacttcgtgaccgactacgaccccaccatcgaggacagctacaccaagcagtgcgtgatcgacgacagagccgccagactggacatcctggacaccgccggccaggaggagttcggcgccatgagagagcagtacatgagaaccggcgagggcttcctgctggtgttcagcgtgaccgacagaggcagcttcgaggagatctacaagttccagagacagatcctgagagtgaaggacagagacgagttccccatgatcctgatcggcaacaaggccgacctggaccaccagagacaggtgacccaggaggagggccagcagctggccagacagctgaaggtgacctacatggaggccagcgccaagatcagaatgaacgtggaccaggccttccacgagctggtgagagtgatcagaaagttccaggagcaggagtgcccccccagccccgagcccaccagaaaggagaaggacaagaagggctgccactgcgtgatcttctag

SEQ ID NO: 96746 - DNA, 384 bp, synthetic construct
  misc_feature 1..384: note = Description of Artificial Sequence: Synthetic coding sequence
  source 1..384: mol_type = other DNA
atgagagagcagtacatgagaaccggcgagggcttcctgctggtgttcagcgtgaccgacagaggcagcttcgaggagatctacaagttccagagacagatcctgagagtgaaggacagagacgagttccccatgatcctgatcggcaacaaggccgacctggaccaccagagacaggtgacccaggaggagggccagcagctggccagacagctgaaggtgacctacatggaggccagcgccaagatcagaatgaacgtggaccaggccttccacgagctggtgagagtgatcagaaagttccaggagcaggagtgcccccccagccccgagcccaccagaaaggagaaggacaagaagggctgccactgcgtgatcttctag

SEQ ID NO: 96747 - DNA, 384 bp, synthetic construct; identical to SEQ ID NO: 96746
  misc_feature 1..384: note = Description of Artificial Sequence: Synthetic coding sequence
  source 1..384: mol_type = other DNA

SEQ ID NO: 96748 - DNA, 384 bp, synthetic construct; identical to SEQ ID NO: 96746
  misc_feature 1..384: note = Description of Artificial Sequence: Synthetic coding sequence
  source 1..384: mol_type = other DNA

SEQ ID NO: 96749 - DNA, 210 bp, synthetic construct
  misc_feature 1..210: note = Description of Artificial Sequence: Synthetic coding sequence
  source 1..210: mol_type = other DNA
atgagagagcagtacatgagaaccggcgagggcttcctgctggtgttcagcgtgaccgacagaggcagcttcgaggagatctacaagttccagagacagatcctgagagtgaaggacagagacgagttccccatgatcctgatcggcaacaaggccgacctggaccaccagagacaggtgacccaggaggagggccagcagctggcctag

SEQ ID NO: 96750 - DNA, 384 bp, synthetic construct; identical to SEQ ID NO: 96746
  misc_feature 1..384: note = Description of Artificial Sequence: Synthetic coding sequence
  source 1..384: mol_type = other DNA

SEQ ID NO: 96751 - DNA, 384 bp, synthetic construct; identical to SEQ ID NO: 96746
  misc_feature 1..384: note = Description of Artificial Sequence: Synthetic coding sequence
  source 1..384: mol_type = other DNA

SEQ ID NO: 96752 - DNA, 510 bp, synthetic construct
  misc_feature 1..510: note = Description of Artificial Sequence: Synthetic coding sequence
  source 1..510: mol_type = other DNA
atgagctacttcgtgaccgactacgaccccaccatcgaggacagctacaccaagcagtgcgtgatcgacgacagagccgccagactggacatcctggacaccgccggccaggaggagttcggcgccatgagagagcagtacatgagaaccggcgagggcttcctgctggtgttcagcgtgaccgacagaggcagcttcgaggagatctacaagttccagagacagatcctgagagtgaaggacagagacgagttccccatgatcctgatcggcaacaaggccgacctggaccaccagagacaggtgacccaggaggagggccagcagctggccagacagctgaaggtgacctacatggaggccagcgccaagatcagaatgaacgtggaccaggccttccacgagctggtgagagtgatcagaaagttccaggagcaggagtgcccccccagccccgagcccaccagaaaggagaaggacaagaagggctgccactgcgtgatcttctag

SEQ ID NO: 96753 - DNA, 633 bp, synthetic construct
  misc_feature 1..633: note = Description of Artificial Sequence: Synthetic coding sequence
  source 1..633: mol_type = other DNA
atggccgccgccggctggagagacggcagcggccaggagaagtacagactggtggtggtgggcggcggcggcgtgggcaagagcgccctgaccatccagttcatccagttcttcctgttcctgcagagctacttcgtgaccgactacgaccccaccatcgaggacagctacaccaagcagtgcgtgatcgacgacagagccgccagactggacatcctggacaccgccggccaggaggagttcggcgccatgagagagcagtacatgagaaccggcgagggcttcctgctggtgttcagcgtgaccgacagaggcagcttcgaggagatctacaagttccagagacagatcctgagagtgaaggacagagacgagttccccatgatcctgatcggcaacaaggccgacctggaccaccagagacaggtgacccaggaggagggccagcagctggccagacagctgaaggtgacctacatggaggccagcgccaagatcagaatgaacgtggaccaggccttccacgagctggtgagagtgatcagaaagttccaggagcaggagtgcccccccagccccgagcccaccagaaaggagaaggacaagaagggctgccactgcgtgatcttctag

SEQ ID NO: 96754 - DNA, 633 bp, synthetic construct
  misc_feature 1..633: note = Description of Artificial Sequence: Synthetic coding sequence
  source 1..633: mol_type = other DNA
atgggctgctgcagcagcagcgaccccagaagagaggacgacctgagagccagagagaagctgaagaagaccaagatcatcttcgtggtgggcggccccggcagcggcaagggcacccagtgcgagaagatcgtgcagaagtacggctacacccacctgagcaccggcgacctgctgagaagcgaggtgagcagcggcagcgccagaggcaagaagctgagcgagatcatggagaagggccagctggtgcccctggagaccgtgctggacatgctgagagacgccatggtggccaaggtgaacaccagcaagggcttcctgatcgacggctaccccagagaggtgcagcagggcgaggagttcgagagaagaatcggccagcccaccctgctgctgtacgtggacgccggccccgagaccatgacccagagactgctgaagagaggcgagaccagcggcagagtggacgacaacgaggagaccatcaagaagagactggagacctactacaaggccaccgagcccgtgatcgccttctacgagaagagaggcatcgtgagaaaggtgaacgccgagggcagcgtggacagcgtgttcagccaggtgtgcacccacctggacgccctgaagtag

SEQ ID NO: 96755 - DNA, 354 bp, synthetic construct
  misc_feature 1..354: note = Description of Artificial Sequence: Synthetic coding sequence
  source 1..354: mol_type = other DNA
atgcccagactgttcctgttccacctgctggagttctgcctgctgctgaaccagttcagcagagccgtggccgccaagtggaaggacgacgtgatcaagctgtgcggcagagagctggtgagagcccagatcgccatctgcggcatgagcacctggagcaagagaagcctgagccaggaggacgccccccagacccccagacccgtggccggcgacttcatccagaccgtgagcctgggcatcagccccgacggcggcaaggccctgagaaccggcagctgcttcaccagagagttcctgggcgccctgagcaagctgtaccaccccagcagcaccaagatccagaagctgtag

SEQ ID NO: 96756 - DNA, 429 bp, synthetic construct
  misc_feature 1..429: note = Description of Artificial Sequence: Synthetic coding sequence
  source 1..429: mol_type = other DNA
atggccagatacatgctgctgctgctgctggccgtgtgggtgctgaccggcgagctgtggcccggcgccgaggccagagccgccccctacggcgtgagactgtgcggcagagagttcatcagagccgtgatcttcacctgcggcggcagcagatggagaagaagcgacatcctggcccacgaggccatgggcgacaccttccccgacgccgacgccgacgaggacagcctggccggcgagctggacgaggccatgggcagcagcgagtggctggccctgaccaagagcccccaggccttctacagaggcagacccagctggcagggcacccccggcgtgctgagaggcagcagagacgtgctggccggcctgagcagcagctgctgcaagtggggctgcagcaagagcgagatcagcagcctgtgctag

SEQ ID NO: 96757 - DNA, 1293 bp, synthetic construct
  misc_feature 1..1293: note = Description of Artificial Sequence: Synthetic coding sequence
  source 1..1293: mol_type = other DNA
atgaagcccagcctgctgtgcagacccctgagctgcttcctgatgctgctgccctggcccctggccaccctgaccagcaccaccctgtggcagtgcccccccggcgaggagcccgacctggaccccggccagggcaccctgtgcagaccctgcccccccggcaccttcagcgccgcctggggcagcagcccctgccagccccacgccagatgcagcctgtggagaagactggaggcccaggtgggcatggccaccagagacaccctgtgcggcgactgctggcccggctggttcggcccctggggcgtgcccagagtgccctgccagccctgcagctgggcccccctgggcacccacggctgcgacgagtggggcagaagagccagaagaggcgtggaggtggccgccggcgccagcagcggcggcgagaccagacagcccggcaacggcaccagagccggcggccccgaggagaccgccgcccagtacgccgtgatcgccatcgtgcccgtgttctgcctgatgggcctgctgggcatcctggtgtgcaacctgctgaagagaaagggctaccactgcaccgcccacaaggaggtgggccccggccccggcggcggcggcagcggcatcaaccccgcctacagaaccgaggacgccaacgaggacaccatcggcgtgctggtgagactgatcaccgagaagaaggagaacgccgccgccctggaggagctgctgaaggagtaccacagcaagcagctggtgcagaccagccacagacccgtgagcaagctgccccccgccccccccaacgtgccccacatctgcccccacagacaccacctgcacaccgtgcagggcctggccagcctgagcggcccctgctgcagcagatgcagccagaagaagtggcccgaggtgctgctgagccccgaggccgtggccgccaccacccccgtgcccagcctgctgcccaaccccaccagagtgcccaaggccggcgccaaggccggcagacagggcgagatcaccatcctgagcgtgggcagattcagagtggccagaatccccgagcagagaaccagcagcatggtgagcgaggtgaagaccatcaccgaggccggccccagctggggcgacctgcccgacagcccccagcccggcctgccccccgagcagcaggccctgctgggcagcggcggcagcagaaccaagtggctgaagccccccgccgagaacaaggccgaggagaacagatacgtggtgagactgagcgagagcaacctggtgatctag

SEQ ID NO: 96758 - DNA, 1293 bp, synthetic construct; identical to SEQ ID NO: 96757
  misc_feature 1..1293: note = Description of Artificial Sequence: Synthetic coding sequence
  source 1..1293: mol_type = other DNA

SEQ ID NO: 96759 - DNA, 897 bp, synthetic construct
  misc_feature 1..897: note = Description of Artificial Sequence: Synthetic coding sequence
  source 1..897: mol_type = other DNA
atgcaccccggctgctgggtgcaggaggccctggtgctgaaccacgagggcgacatgggcttcagcgagcccggcagccacatctgcagagccctgggcggcctgagccccaagtgcacctgcagcggccccctgagaagacccggcctgcccagcgccggcagaagctggttcagcagcggcgtgagactgccccccagccccggcagcggccccttcagcagccccggcatcaaccccgcctacagaaccgaggacgccaacgaggacaccatcggcgtgctggtgagactgatcaccgagaagaaggagaacgccgccgccctggaggagctgctgaaggagtaccacagcaagcagctggtgcagaccagccacagacccgtgagcaagctgccccccgccccccccaacgtgccccacatctgcccccacagacaccacctgcacaccgtgcagggcctggccagcctgagcggcccctgctgcagcagatgcagccagaagaagtggcccgaggtgctgctgagccccgaggccgtggccgccaccacccccgtgcccagcctgctgcccaaccccaccagagtgcccaaggccggcgccaaggccggcagacagggcgagatcaccatcctgagcgtgggcagattcagagtggccagaatccccgagcagagaaccagcagcatggtgagcgaggtgaagaccatcaccgaggccggccccagctggggcgacctgcccgacagcccccagcccggcctgccccccgagcagcaggccctgctgggcagcggcggcagcagaaccaagtggctgaagccccccgccgagaacaaggccgaggagaacagatacgtggtgagactgagcgagagcaacctggtgatctag

SEQ ID NO: 96760 - DNA, 306 bp, synthetic construct
  misc_feature 1..306: note = Description of Artificial Sequence: Synthetic coding sequence
  source 1..306: mol_type = other DNA
atgaagcccagcctgctgtgcagacccctgagctgcttcctgatgctgctgccctggcccctggccaccctgaccagcaccaccctgtggcagtgcccccccggcgaggagcccgacctggaccccggccagggcaccctgtgcagaccctgcccccccggcaccttcagcgccgcctggggcagcagcccctgccagccccacgccagatgcagcctgtggagaagactggaggcccaggtgggcatggccaccagagacaccctgtgcggcgactgctggcccggctggttcggcccctggtag

SEQ ID NO: 96761 - DNA, 4326 bp, synthetic construct
  misc_feature 1..4326: note = Description of Artificial Sequence: Synthetic coding sequence
  source 1..4326: mol_type = other DNA
atggccaccgccgccgccgccgccgccgtgatggccccccccggctgccccggcagctgccccaacttcgccgtggtgtgcagcttcctggagagatacggccccctgctggacctgcccgagctgcccttccccgagctggagagagtgctgcaggcccccccccccgacgtgggcaacggcgaggtgcccaaggagctggtggagctgcacctgaagctgatgagaaagatcggcaagagcgtgaccgccgacagatgggagaagtacctgatcaagatctgccaggagttcaacagcacctgggcctgggagatggagaagaagggctacctggagatgagcgtggagtgcaagctggccctgctgaagtacctgtgcgagtgccagttcgacgacaacctgaagttcaagaacatcatcaacgaggaggacgccgacaccatgagactgcagcccatcggcagagacaaggacggcctgatgtactggtaccagctggaccaggaccacaacgtgagaatgtacatcgaggagcaggacgaccaggacggcagcagctggaagtgcatcgtgagaaacagaaacgagctggccgagaccctggccctgctgaaggcccagatcgaccccgtgctgctgaagaacagcagccagcaggacaacagcagcagagagagccccagcctggaggacgaggagaccaagaaggaggaggagacccccaagcaggaggagcagaaggagagcgagaagatgaagagcgaggagcagcccatggacctggagaacagaagcaccgccaacgtgctggaggagaccaccgtgaagaaggagaaggaggacgagaaggagctggtgaagctgcccgtgatcgtgaagctggagaagcccctgcccgagaacgaggagaagaagatcatcaaggaggagagcgacagcttcaaggagaacgtgaagcccatcaaggtggaggtgaaggagtgcagagccgaccccaaggacaccaagagcagcatggagaagcccgtggcccaggagcccgagagaatcgagttcggcggcaacatcaagagcagccacgagatcaccgagaagagcaccgaggagaccgagaagctgaagaacgaccagcaggccaagatccccctgaagaagagagagatcaagctgagcgacgacttcgacagccccgtgaagggccccctgtgcaagagcgtgacccccaccaaggagttcctgaaggacgagatcaagcaggaggaggagacctgcaagagaatcagcaccatcaccgccctgggccacgagggcaagcagctggtgaacggcgaggtgagcgacgagagagtggcccccaacttcaagaccgagcccatcgagaccaagttctacgagaccaaggaggagagctacagccccagcaaggacagaaacatcatcaccgagggcaacggcaccgagagcctgaacagcgtgatcaccagcatgaagaccggcgagctggagaaggagaccgcccccctgagaaaggacgccgacagcagcatcagcgtgctggagatccacagccagaaggcccagatcgaggagcccgacccccccgagatggagaccagcctggacagcagcgagatggccaaggacctgagcagcaagaccgccctgagcagcaccgagagctgcaccatgaagggcgaggagaagagccccaagaccaagaaggacaagagaccccccatcctggagtgcctggagaagctggagaagagcaagaagaccttcctggacaaggacgcccagagactgagccccatccccgaggaggtgcccaagagcaccctggagagcgagaagcccggcagccccgaggccgccgagaccagcccccccagcaacatcatcgaccactgcgagaagctggccagcgagaaggaggtggtggagtgccagagcaccagcaccgtgggcggccagagcgtgaagaaggtggacctggagaccctgaaggaggacagcgagttcaccaaggtggagatggacaacctggacaacgcccagaccagcggcatcgaggagcccagcgagaccaagggcagcatgcagaagagcaagttcaagtacaagctggtgcccgaggaggagaccaccgccagcgagaacaccgagatcaccagcgagagacagaaggagggcatcaagctgaccatcagaatcagcagcagaaagaagaagcccgacagcccccccaaggtgctggagcccgagaacaagcaggagaagaccgagaaggaggaggagaagaccaacgtgggcagaaccctgagaagaagccccagaatcagcagacccaccgccaaggtggccgagatcagagaccagaaggccgacaagaagagaggcgagggcgaggacgaggtggaggaggagagcaccgccctgcagaagaccgacaagaaggagatcctgaagaagagcgagaaggacaccaacagcaaggtgagcaaggtgaagcccaagggcaaggtgagatggaccggcagcagaaccagaggcagatggaagtacagcagcaacgacgagagcgagggcagcggcagcgagaagagcagcgccgccagcgaggaggaggaggagaaggagagcgaggaggccatcctggccgacgacgacgagccctgcaagaagtgcggcctgcccaaccaccccgagctgatcctgctgtgcgacagctgcgacagcggctaccacaccgcctgcctgagaccccccctgatgatcatccccgacggcgagtggttctgccccccctgccagcacaagctgctgtgcgagaagctggaggagcagctgcaggacctggacgtggccctgaagaagaaggagagagccgagagaagaaaggagagactggtgtacgtgggcatcagcatcgagaacatcatccccccccaggagcccgacttcagcgaggaccaggaggagaagaagaaggacagcaagaagagcaaggccaacctgctggagagaagaagcaccagaaccagaaagtgcatcagctacagattcgacgagttcgacgaggccatcgacgaggccatcgaggacgacatcaaggaggccgacggcggcggcgtgggcagaggcaaggacatcagcaccatcaccggccacagaggcaaggacatcagcaccatcctggacgaggagagaaaggagaacaagagaccccagagagccgccgccgccagaagaaagaagagaagaagactgaacgacctggacagcgacagcaacctggacgaggaggagagcgaggacgagttcaagatcagcgacggcagccaggacgagttcgtggtgagcgacgagaaccccgacgagagcgaggaggacccccccagcaacgacgacagcgacaccgacttctgcagcagaagactgagaagacaccccagcagacccatgagacagagcagaagactgagaagaaagacccccaagaagaagtacagcgacgacgacgaggaggaggagagcgaggagaacagcagagacagcgagagcgacttcagcgacgacttcagcgacgacttcgtggagaccagaagaagaagaagcagaagaaaccagaagagacagatcaactacaaggaggacagcgagagcgacggcagccagaagagcctgagaagaggcaaggagatcagaagagtgcacaagagaagactgagcagcagcgagagcgaggagagctacctgagcaagaacagcgaggacgacgagctggccaaggagagcaagagaagcgtgagaaagagaggcagaagcaccgacgagtacagcgaggccgacgaggaggaggaggaggaggagggcaagcccagcagaaagagactgcacagaatcgagaccgacgaggaggagagctgcgacaacgcccacggcgacgccaaccagcccgccagagacagccagcccagagtgctgcccagcgagcaggagagcaccaagaagccctacagaatcgagagcgacgaggaggaggacttcgagaacgtgggcaaggtgggcagccccctggactacagcctggtggacctgcccagcaccaacggccagagccccggcaaggccatcgagaacctgatcggcaagcccaccgagaagagccagacccccaaggacaacagcaccgccagcgccagcctggccagcaacggcaccagcggcggccaggaggccggcgcccccgaggaggaggaggacgagctgctgagagtgaccgacctggtggactacgtgtgcaacagcgagcagctgtag

SEQ ID NO: 96762 - DNA, 4233 bp, synthetic construct
  misc_feature 1..4233: note = Description of Artificial Sequence: Synthetic coding sequence
  source 1..4233: mol_type = other DNA
atggccaccgccgccgccgccgccgccgtgatggccccccccggctgccccggcagctgccccaacttcgccgtggtgtgcagcttcctggagagatacggccccctgctggacctgcccgagctgcccttccccgagctggagagagtgctgcaggcccccccccccgacgtgggcaacggcgaggtgcccaaggagctggtggagctgcacctgaagctgatgagaaagatcggcaagagcgtgaccgccgacagatgggagaagtacctgatcaagtacctgtgcgagtgccagttcgacgacaacctgaagttcaagaacatcatcaacgaggaggacgccgacaccatgagactgcagcccatcggcagagacaaggacggcctgatgtactggtaccagctggaccaggaccacaacgtgagaatgtacatcgaggagcaggacgaccaggacggcagcagctggaagtgcatcgtgagaaacagaaacgagctggccgagaccctggccctgctgaaggcccagatcgaccccgtgctgctgaagaacagcagccagcaggacaacagcagcagagagagccccagcctggaggacgaggagaccaagaaggaggaggagacccccaagcaggaggagcagaaggagagcgagaagatgaagagcgaggagcagcccatggacctggagaacagaagcaccgccaacgtgctggaggagaccaccgtgaagaaggagaaggaggacgagaaggagctggtgaagctgcccgtgatcgtgaagctggagaagcccctgcccgagaacgaggagaagaagatcatcaaggaggagagcgacagcttcaaggagaacgtgaagcccatcaaggtggaggtgaaggagtgcagagccgaccccaaggacaccaagagcagcatggagaagcccgtggcccaggagcccgagagaatcgagttcggcggcaacatcaagagcagccacgagatcaccgagaagagcaccgaggagaccgagaagctgaagaacgaccagcaggccaagatccccctgaagaagagagagatcaagctgagcgacgacttcgacagccccgtgaagggccccctgtgcaagagcgtgacccccaccaaggagttcctgaaggacgagatcaagcaggaggaggagacctgcaagagaatcagcaccatcaccgccctgggccacgagggcaagcagctggtgaacggcgaggtgagcgacgagagagtggcccccaacttcaagaccgagcccatcgagaccaagttctacgagaccaaggaggagagctacagccccagcaaggacagaaacatcatcaccgagggcaacggcaccgagagcctgaacagcgtgatcaccagcatgaagaccggcgagctggagaaggagaccgcccccctgagaaaggacgccgacagcagcatcagcgtgctggagatccacagccagaaggcccagatcgaggagcccgacccccccgagatggagaccagcctggacagcagcgagatggccaaggacctgagcagcaagaccgccctgagcagcaccgagagctgcaccatgaagggcgaggagaagagccccaagaccaagaaggacaagagaccccccatcctggagtgcctggagaagctggagaagagcaagaagaccttcctggacaaggacgcccagagactgagccccatccccgaggaggtgcccaagagcaccctggagagcgagaagcccggcagccccgaggccgccgagaccagcccccccagcaacatcatcgaccactgcgagaagctggccagcgagaaggaggtggtggagtgccagagcaccagcaccgtgggcggccagagcgtgaagaaggtggacctggagaccctgaaggaggacagcgagttcaccaaggtggagatggacaacctggacaacgcccagaccagcggcatcgaggagcccagcgagaccaagggcagcatgcagaagagcaagttcaagtacaagctggtgcccgaggaggagaccaccgccagcgagaacaccgagatcaccagcgagagacagaaggagggcatcaagctgaccatcagaatcagcagcagaaagaagaagcccgacagcccccccaaggtgctggagcccgagaacaagcaggagaagaccgagaaggaggaggagaagaccaacgtgggcagaaccctgagaagaagccccagaatcagcagacccaccgccaaggtggccgagatcagagaccagaaggccgacaagaagagaggcgagggcgaggacgaggtggaggaggagagcaccgccctgcagaagaccgacaagaaggagatcctgaagaagagcgagaaggacaccaacagcaaggtgagcaaggtgaagcccaagggcaaggtgagatggaccggcagcagaaccagaggcagatggaagtacagcagcaacgacgagagcgagggcagcggcagcgagaagagcagcgccgccagcgaggaggaggaggagaaggagagcgaggaggccatcctggccgacgacgacgagccctgcaagaagtgcggcctgcccaaccaccccgagctgatcctgctgtgcgacagctgcgacagcggctaccacaccgcctgcctgagaccccccctgatgatcatccccgacggcgagtggttctgccccccctgccagcacaagctgctgtgcgagaagctggaggagcagctgcaggacctggacgtggccctgaagaagaaggagagagccgagagaagaaaggagagactggtgtacgtgggcatcagcatcgagaacatcatccccccccaggagcccgacttcagcgaggaccaggaggagaagaagaaggacagcaagaagagcaaggccaacctgctggagagaagaagcaccagaaccagaaagtgcatcagctacagattcgacgagttcgacgaggccatcgacgaggccatcgaggacgacatcaaggaggccgacggcggcggcgtgggcagaggcaaggacatcagcaccatcaccggccacagaggcaaggacatcagcaccatcctggacgaggagagaaaggagaacaagagaccccagagagccgccgccgccagaagaaagaagagaagaagactgaacgacctggacagcgacagcaacctggacgaggaggagagcgaggacgagttcaagatcagcgacggcagccaggacgagttcgtggtgagcgacgagaaccccgacgagagcgaggaggacccccccagcaacgacgacagcgacaccgacttctgcagcagaagactgagaagacaccccagcagacccatgagacagagcagaagactgagaagaaagacccccaagaagaagtacagcgacgacgacgaggaggaggagagcgaggagaacagcagagacagcgagagcgacttcagcgacgacttcagcgacgacttcgtggagaccagaagaagaagaagcagaagaaaccagaagagacagatcaactacaaggaggacagcgagagcgacggcagccagaagagcctgagaagaggcaaggagatcagaagagtgcacaagagaagactgagcagcagcgagagcgaggagagctacctgagcaagaacagcgaggacgacgagctggccaaggagagcaagagaagcgtgagaaagagaggcagaagcaccgacgagtacagcgaggccgacgaggaggaggaggaggaggagggcaagcccagcagaaagagactgcacagaatcgagaccgacgaggaggagagctgcgacaacgcccacggcgacgccaaccagcccgccagagacagccagcccagagtgctgcccagcgagcaggagagcaccaagaagccctacagaatcgagagcgacgaggaggaggacttcgagaacgtgggcaaggtgggcagccccctggactacagcctggtggacctgcccagcaccaacggccagagccccggcaaggccatcgagaacctgatcggcaagcccaccgagaagagccagacccccaaggacaacagcaccgccagcgccagcctggccagcaacggcaccagcggcggccaggaggccggcgcccccgaggaggaggaggacgagctgctgagagtgaccgacctggtggactacgtgtgcaacagcgagcagctgtag

SEQ ID NO: 96763 - DNA, 3570 bp, synthetic construct
  misc_feature 1..3570: note = Description of Artificial Sequence: Synthetic coding sequence
  source 1..3570: mol_type = other DNA
atgaagagcgaggagcagcccatggacctggagaacagaagcaccgccaacgtgctggaggagaccaccgtgaagaaggagaaggaggacgagaaggagctggtgaagctgcccgtgatcgtgaagctggagaagcccctgcccgagaacgaggagaagaagatcatcaaggaggagagcgacagcttcaaggagaacgtgaagcccatcaaggtggaggtgaaggagtgcagagccgaccccaaggacaccaagagcagcatggagaagcccgtggcccaggagcccgagagaatcgagttcggcggcaacatcaagagcagccacgagatcaccgagaagagcaccgaggagaccgagaagctgaagaacgaccagcaggccaagatccccctgaagaagagagagatcaagctgagcgacgacttcgacagccccgtgaagggccccctgtgcaagagcgtgacccccaccaaggagttcctgaaggacgagatcaagcaggaggaggagacctgcaagagaatcagcaccatcaccgccctgggccacgagggcaagcagctggtgaacggcgaggtgagcgacgagagagtggcccccaacttcaagaccgagcccatcgagaccaagttctacgagaccaaggaggagagctacagccccagcaaggacagaaacatcatcaccgagggcaacggcaccgagagcctgaacagcgtgatcaccagcatgaagaccggcgagctggagaaggagaccgcccccctgagaaaggacgccgacagcagcatcagcgtgctggagatccacagccagaaggcccagatcgaggagcccgacccccccgagatggagaccagcctggacagcagcgagatggccaaggacctgagcagcaagaccgccctgagcagcaccgagagctgcaccatgaagggcgaggagaagagccccaagaccaagaaggacaagagaccccccatcctggagtgcctggagaagctggagaagagcaagaagaccttcctggacaaggacgcccagagactgagccccatccccgaggaggtgcccaagagcaccctggagagcgagaagcccggcagccccgaggccgccgagaccagcccccccagcaacatcatcgaccactgcgagaagctggccagcgagaaggaggtggtggagtgccagagcaccagcaccgtgggcggccagagcgtgaagaaggtggacctggagaccctgaaggaggacagcgagttcaccaaggtggagatggacaacctggacaacgcccagaccagcggcatcgaggagcccagcgagaccaagggcagcatgcagaagagcaagttcaagtacaagctggtgcccgaggaggagaccaccgccagcgagaacaccgagatcaccagcgagagacagaaggagggcatcaagctgaccatcagaatcagcagcagaaagaagaagcccgacagcccccccaaggtgctggagcccgagaacaagcaggagaagaccgagaaggaggaggagaagaccaacgtgggcagaaccctgagaagaagccccagaatcagcagacccaccgccaaggtggccgagatcagagaccagaaggccgacaagaagagaggcgagggcgaggacgaggtggaggaggagagcaccgccctgcagaagaccgacaagaaggagatcctgaagaagagcgagaaggacaccaacagcaaggtgagcaaggtgaagcccaagggcaaggtgagatggaccggcagcagaaccagaggcagatggaagtacagcagcaacgacgagagcgagggcagcggcagcgagaagagcagcgccgccagcgaggaggaggaggagaaggagagcgaggaggccatcctggccgacgacgacgagccctgcaagaagtgcggcctgcccaaccaccccgagctgatcctgctgtgcgacagctgcgacagcggctaccacaccgcctgcctgagaccccccctgatgatcatccccgacggcgagtggttctgccccccctgccagcacaagctgctgtgcgagaagctggaggagcagctgcaggacctggacgtggccctgaagaagaaggagagagccgagagaagaaaggagagactggtgtacgtgggcatcagcatcgagaacatcatccccccccaggagcccgacttcagcgaggaccaggaggagaagaagaaggacagcaagaagagcaaggccaacctgctggagagaagaagcaccagaaccagaaagtgcatcagctacagattcgacgagttcgacgaggccatcgacgaggccatcgaggacgacatcaaggaggccgacggcggcggcgtgggcagaggcaaggacatcagcaccatcaccggccacagaggcaaggacatcagcaccatcctggacgaggagagaaaggagaacaagagaccccagagagccgccgccgccagaagaaagaagagaagaagactgaacgacctggacagcgacagcaacctggacgaggaggagagcgaggacgagttcaagatcagcgacggcagccaggacgagttcgtggtgagcgacgagaaccccgacgagagcgaggaggacccccccagcaacgacgacagcgacaccgacttctgcagcagaagactgagaagacaccccagcagacccatgagacagagcagaagactgagaagaaagacccccaagaagaagtacagcgacgacgacgaggaggaggagagcgaggagaacagcagagacagcgagagcgacttcagcgacgacttcagcgacgacttcgtggagaccagaagaagaagaagcagaagaaaccagaagagacagatcaactacaaggaggacagcgagagcgacggcagccagaagagcctgagaagaggcaaggagatcagaagagtgcacaagagaagactgagcagcagcgagagcgaggagagctacctgagcaagaacagcgaggacgacgagctggccaaggagagcaagagaagcgtgagaaagagaggcagaagcaccgacgagtacagcgaggccgacgaggaggaggaggaggaggagggcaagcccagcagaaagagactgcacagaatcgagaccgacgaggaggagagctgcgacaacgcccacggcgacgccaaccagcccgccagagacagccagcccagagtgctgcccagcgagcaggagagcaccaagaagccctacagaatcgagagcgacgaggaggaggacttcgagaacgtgggcaaggtgggcagccccctggactacagcctggtggacctgcccagcaccaacggccagagccccggcaaggccatcgagaacctgatcggcaagcccaccgagaagagccagacccccaaggacaacagcaccgccagcgccagcctggccagcaacggcaccagcggcggccaggaggccggcgcccccgaggaggaggaggacgagctgctgagagtgaccgacctggtggactacgtgtgcaacagcgagcagctgtag

SEQ ID NO: 96764 - DNA, 2412 bp, synthetic construct
  misc_feature 1..2412: note = Description of Artificial Sequence: Synthetic coding sequence
  source 1..2412: mol_type = other DNA
gagaccctggccctgctgaaggcccagatcgaccccgtgctgctgaagaacagcagccagcaggacaacagcagcagagagagccccagcctggaggacgaggagaccaagaaggaggaggagacccccaagcaggaggagcagaaggagagcgagaagatgaagagcgaggagcagcccatggacctggagaacagaagcaccgccaacgtgctggaggagaccaccgtgaagaaggagaaggaggacgagaaggagctggtgaagctgcccgtgatcgtgaagctggagaagcccctgcccgagaacgaggagaagaagatcatcaaggaggagagcgacagcttcaaggagaacgtgaagcccatcaaggtggaggtgaaggagtgcagagccgaccccaaggacaccaagagcagcatggagaagcccgtggcccaggagcccgagagaatcgagttcggcggcaacatcaagagcagccacgagatcaccgagaagagcaccgaggagaccgagaagctgaagaacgaccagcaggccaagatccccctgaagaagagagagatcaagctgagcgacgacttcgacagccccgtgaagggccccctgtgcaagagcgtgacccccaccaaggagttcctgaaggacgagatcaagcaggaggaggagacctgcaagagaatcagcaccatcaccgccctgggccacgagggcaagcagctggtgaacggcgaggtgagcgacgagagagtggcccccaacttcaagaccgagcccatcgagaccaagttctacgagaccaaggaggagagctacagccccagcaaggacagaaacatcatcaccgagggcaacggcaccgagagcctgaacagcgtgatcaccagcatgaagaccggcgagctggagaaggagaccgcccccctgagaaaggacgccgacagcagcatcagcgtgctggagatccacagccagaaggcccagatcgaggagcccgacccccccgagatggagaccagcctggacagcagcgagatggccaaggacctgagcagcaagaccgccctgagcagcaccgagagctgcaccatgaagggcgaggagaagagccccaagaccaagaaggacaagagaccccccatcctggagtgcctggagaagctggagaagagcaagaagaccttcctggacaaggacgcccagagactgagccccatccccgaggaggtgcccaagagcaccctggagagcgagaagcccggcagccccgaggccgccgagaccagcccccccagcaacatcatcgaccactgcgagaagctggccagcgagaaggaggtggtggagtgccagagcaccagcaccgtgggcggccagagcgtgaagaaggtggacctggagaccctgaaggaggacagcgagttcaccaaggtggagatggacaacctggacaacgcccagaccagcggcatcgaggagcccagcgagaccaagggcagcatgcagaagagcaagttcaagtacaagctggtgcccgaggaggagaccaccgccagcgagaacaccgagatcaccagcgagagacagaaggagggcatcaagctgaccatcagaatcagcagcagaaagaagaagcccgacagcccccccaaggtgctggagcccgagaacaagcaggagaagaccgagaaggaggaggagaagaccaacgtgggcagaaccctgagaagaagccccagaatcagcagacccaccgccaaggtggccgagatcagagaccagaaggccgacaagaagagaggcgagggcgaggacgaggtggaggaggagagcaccgccctgcagaagaccgacaagaaggagatcctgaagaagagcgagaaggacaccaacagcaaggtgagcaaggtgaagcccaagggcaaggtgagatggaccggcagcagaaccagaggcagatggaagtacagcagcaacgacgagagcgagggcagcggcagcgagaagagcagcgccgccagcgaggaggaggaggagaaggagagcgaggaggccatcctggccgacgacgacgagccctgcaagaagtgcggcctgcccaaccaccccgagctgatcctgctgtgcgacagctgcgacagcggctaccacaccgcctgcctgagaccccccctgatgatcatccccgacggcgagtggttctgccccccctgccagcacaagctgctgtgcgagaagctggaggagcagctgcaggacctggacgtggccctgaagaagaaggagagagccgagagaagaaaggagagactggtgtacgtgggcatcagcatcgagaacatcatccccccccaggagcccgacttcagcgaggaccaggaggagaagaagaaggacagcaagaagtag

SEQ ID NO: 96765 - DNA, 2109 bp, synthetic construct
  misc_feature 1..2109: note = Description of Artificial Sequence: Synthetic coding sequence
  source 1..2109: mol_type = other DNA
gccaccgccgccgccgccgccgccgtgatggccccccccggctgccccggcagctgccccaacttcgccgtggtgtgcagcttcctggagagatacggccccctgctggacctgcccgagctgcccttccccgagctggagagagtgctgcaggcccccccccccgacgtgggcaacggcgaggtgcccaaggagctggtggagctgcacctgaagctgatgagaaagatcggcaagagcgtgaccgccgacagatgggagaagtacctgatcaagatctgccaggagttcaacagcacctgggcctgggagatggagaagaagggctacctggagatgagcgtggagtgcaagctggccctgctgaagtacctgtgcgagtgccagttcgacgacaacctgaagttcaagaacatcatcaacgaggaggacgccgacaccatgagactgcagcccatcggcagagacaaggacggcctgatgtactggtaccagctggaccaggaccacaacgtgagaatgtacatcgaggagcaggacgaccaggacggcagcagctggaagtgcatcgtgagaaacagaaacgagctggccgagaccctggccctgctgaaggcccagatcgaccccgtgctgctgaagaacagcagccagcaggacaacagcagcagagagagccccagcctggaggacgaggagaccaagaaggaggaggagacccccaagcaggaggagcagaaggagagcgagaagatgaagagcgaggagcagcccatggacctggagaacagaagcaccgccaacgtgctggaggagaccaccgtgaagaaggagaaggaggacgagaaggagctggtgaagctgcccgtgatcgtgaagctggagaagcccctgcccgagaacgaggagaagaagatcatcaaggaggagagcgacagcttcaaggagaacgtgaagcccatcaaggtggaggtgaaggagtgcagagccgaccccaaggacaccaagagcagcatggagaagcccgtggcccaggagcccgagagaatcgagttcggcggcaacatcaagagcagccacgagatcaccgagaagagcaccgaggagaccgagaagctgaagaacgaccagcaggccaagatccccctgaagaagagagagatcaagctgagcgacgacttcgacagccccgtgaagggccccctgtgcaagagcgtgacccccaccaaggagttcctgaaggacgagatcaagcaggaggaggagacctgcaagagaatcagcaccatcaccgccctgggccacgagggcaagcagctggtgaacggcgaggtgagcgacgagagagtggcccccaacttcaagaccgagcccatcgagaccaagttctacgagaccaaggaggagagctacagccccagcaaggacagaaacatcatcaccgagggcaacggcaccgagagcctgaacagcgtgatcaccagcatgaagaccggcgagctggagaaggagaccgcccccctgagaaaggacgccgacagcagcatcagcgtgctggagatccacagccagaaggcccagatcgaggagcccgacccccccgagatggagaccagcctggacagcagcgagatggccaaggacctgagcagcaagaccgccctgagcagcaccgagagctgcaccatgaagggcgaggagaagagccccaagaccaagaaggacaagagaccccccatcctggagtgcctggagaagctggagaagagcaagaagaccttcctggacaaggacgcccagagactgagccccatccccgaggaggtgcccaagagcaccctggagagcgagaagcccggcagccccgaggccgccgagaccagcccccccagcaacatcatcgaccactgcgagaagctggccagcgagaaggaggtggtggagtgccagagcaccagcaccgtgggcggccagagcgtgaagaaggtggacctggagaccctgaaggaggacagcgagttcaccaaggtggagatggacaacctggacaacgcccagaccagcggcatcgaggagcccagcgagaccaagggcagcatgcagaagtag

SEQ ID NO: 96766 - DNA, 831 bp, synthetic construct
  misc_feature 1..831: note = Description of Artificial Sequence: Synthetic coding sequence
  source 1..831: mol_type = other DNA
gagccctgcaagaagtgcggcctgcccaaccaccccgagctgatcctgctgtgcgacagctgcgacagcggctaccacaccgcctgcctgagaccccccctgatgatcatccccgacggcgagtggttctgccccccctgccagcacaagctgctgtgcgagaagctggaggagcagctgcaggacctggacgtggccctgaagaagaaggagagagccgagagaagaaaggagagactggtgtacgtgggcatcagcatcgagaacatcatccccccccaggagcccgacttcagcgaggaccaggaggagaagaagaaggacagcaagaagagcaaggccaacctgctggagagaagaagcaccagaaccagaaagtgcatcagctacagattcgacgagttcgacgaggccatcgacgaggccatcgaggacgacatcaaggaggccgacggcggcggcgtgggcagaggcaaggacatcagcaccatcaccggccacagaggcaaggacatcagcaccatcctggacgaggagagaaaggagaacaagagaccccagagagccgccgccgccagaagaaagaagagaagaagactgaacgacctggacagcgacagcaacctggacgaggaggagagcgaggacgagttcaagatcagcgacggcagccaggacgagttcgtggtgagcgacgagaaccccgacgagagcgaggaggacccccccagcaacgacgacagcgacaccgacttctgcagcagaagactgagaagacaccccagcagacccatgagacagagcagaagactgagaagaaagaccccctag

SEQ ID NO: 96767 - DNA, 1029 bp, synthetic construct
  misc_feature 1..1029: note = Description of Artificial Sequence: Synthetic coding sequence
  source 1..1029: mol_type = other DNA
atggcccaggtgctgatcgtgggcgccggcatgaccggcagcctgtgcgccgccctgctgagaagacagaccagcggccccctgtacctggccgtgtgggacaaggccgaggacagcggcggcagaatgaccaccgcctgcagcccccacaacccccagtgcaccgccgacctgggcgcccagtacatcacctgcaccccccactacgccaagaagcaccagagattctacgacgagctgctggcctacggcgtgctgagacccctgagcagccccatcgagggcatggtgatgaaggagggcgactgcaacttcgtggccccccagggcatcagcagcatcatcaagcactacctgaaggagagcggcgccgaggtgtacttcagacacagagtgacccagatcaacctgagagacgacaagtgggaggtgagcaagcagaccggcagccccgagcagttcgacctgatcgtgctgaccatgcccgtgcccgagatcctgcagctgcagggcgacatcaccaccctgatcagcgagtgccagagacagcagctggaggccgtgagctacagcagcagatacgccctgggcctgttctacgaggccggcaccaagatcgacgtgccctgggccggccagtacatcaccagcaacccctgcatcagattcgtgagcatcgacaacaagaagagaaacatcgagagcagcgagatcggccccagcctggtgatccacaccaccgtgcccttcggcgtgacctacctggagcacagcatcgaggacgtgcaggagctggtgttccagcagctggagaacatcctgcccggcctgccccagcccatcgccaccaagtgccagaagtggagacacagccaggtgaccaacgccgccgccaactgccccggccagatgaccctgcaccacaagcccttcctggcctgcggcggcgacggcttcacccagagcaacttcgacggctgcatcaccagcgccctgtgcgtgctggaggccctgaagaactacatctag

SEQ ID NO: 96768 - DNA, 948 bp, synthetic construct
  misc_feature 1..948: note = Description of Artificial Sequence: Synthetic coding sequence
  source 1..948: mol_type = other DNA
atggcccaggtgctgatcgtgggcgccggcatgaccggcagcctgtgcgccgccctgctgagaagacagaccagcggccccctgtacctggccgtgtgggacaaggccgaggacagcggcggcagaatgaccaccgcctgcagcccccacaacccccagtgcaccgccgacctgggcgcccagtacatcacctgcaccccccactacgccaagaagcaccagagattctacgacgagctgctggcctacggcgtgctgagacccctgagcagccccatcgagggcatggtgatgaaggagggcgactgcaacttcgtggccccccagggcatcagcagcatcatcaagcactacctgaaggagagcggcgccgaggtgtacttcagacacagagtgacccagatcaacctgagagacgacaagtgggaggtgagcaagcagaccggcagccccgagcagttcgacctgatcgtgctgaccatgcccgtgcccgagatcctgcagctgcagggcgacatcaccaccctgatcagcgagtgccagagacagcagctggaggccgtgagctacagcagcagatacgccctgggcctgttctacgaggccggcaccaagatcgacgtgccctgggccggccagtacatcaccagcaacccctgcatcagattcgtgagcatcgacaacaagaagagaaacatcgagagcagcgagatcggccccagcctggtgatccacaccaccgtgcccttcggcgtgacctacctggagcacagcatcgaggacgtgcaggagctggtgttccagcagctggagaacatcctgcccggcctgccccagcccatcgccaccaagtgccagaagtggagacacagccaggtgcccagcgccggcgtgatcctgggctgcgccaagagcccctggatgatggccatcggcttccccatctag

SEQ ID NO: 96769 - DNA, 699 bp, synthetic construct
  misc_feature 1..699: note = Description of Artificial Sequence: Synthetic coding sequence
  source 1..699: mol_type = other DNA
atggcccaggtgctgatcgtgggcgccggcatgaccggcagcctgtgcgccgccctgctgagaagacagaccagcggccccctgtacctggccgtgtgggacaaggccgaggacagcggcgccgaggtgtacttcagacacagagtgacccagatcaacctgagagacgacaagtgggaggtgagcaagcagaccggcagccccgagcagttcgacctgatcgtgctgaccatgcccgtgcccgagatcctgcagctgcagggcgacatcaccaccctgatcagcgagtgccagagacagcagctggaggccgtgagctacagcagcagatacgccctgggcctgttctacgaggccggcaccaagatcgacgtgccctgggccggccagtacatcaccagcaacccctgcatcagattcgtgagcatcgacaacaagaagagaaacatcgagagcagcgagatcggccccagcctggtgatccacaccaccgtgcccttcggcgtgacctacctggagcacagcatcgaggacgtgcaggagctggtgttccagcagctggagaacatcctgcccggcctgccccagcccatcgccaccaagtgccagaagtggagacacagccaggtgcccagcgccggcgtgatcctgggctgcgccaagagcccctggatgatggccatcggcttccccatctag

SEQ ID NO: 96770 - DNA, 1221 bp, synthetic construct
  misc_feature 1..1221: note = Description of Artificial Sequence: Synthetic coding sequence
  source 1..1221: mol_type = other DNA
atggacggctggagaagaatgcccagatggggcctgctgctgctgctgtggggcagctgcaccttcggcctgcccaccgacaccaccaccttcaagagaatcttcctgaagagaatgcccagcatcagagagagcctgaaggagagaggcgtggacatggccagactgggccccgagtggagccagcccatgaagagactgaccctgggcaacaccaccagcagcgtgatcctgaccaactacatggacacccagtactacggcgagatcggcatcggcacccccccccagaccttcaaggtggtgttcgacaccggcagcagcaacgtgtgggtgcccagcagcaagtgcagcagactgtacaccgcctgcgtgtaccacaagctgttcgacgccagcgacagcagcagctacaagcacaacggcaccgagctgaccctgagatacagcaccggcaccgtgagcggcttcctgagccaggacatcatcaccgtgggcggcatcaccgtgacccagatgttcggcgaggtgaccgagatgcccgccctgcccttcatgctggccgagttcgacggcgtggtgggcatgggcttcatcgagcaggccatcggcagagtgacccccatcttcgacaacatcatcagccagggcgtgctgaaggaggacgtgttcagcttctactacaacagagacagcgagaacagccagagcctgggcggccagatcgtgctgggcggcagcgacccccagcactacgagggcaacttccactacatcaacctgatcaagaccggcgtgtggcagatccagatgaagggcgtgagcgtgggcagcagcaccctgctgtgcgaggacggctgcctggccctggtggacaccggcgccagctacatcagcggcagcaccagcagcatcgagaagctgatggaggccctgggcgccaagaagagactgttcgactacgtggtgaagtgcaacgagggccccaccctgcccgacatcagcttccacctgggcggcaaggagtacaccctgaccagcgccgactacgtgttccaggagagctacagcagcaagaagctgtgcaccctggccatccacgccatggacatccccccccccaccggccccacctgggccctgggcgccaccttcatcagaaagttctacaccgagttcgacagaagaaacaacagaatcggcttcgccctggccagatag

SEQ ID NO: 96771 - DNA, 1212 bp, synthetic construct
  misc_feature 1..1212: note = Description of Artificial Sequence: Synthetic coding sequence
  source 1..1212: mol_type = other DNA
atggacggctggagaagaatgcccagatggggcctgctgctgctgctgtggggcagctgcaccttcggcctgcccaccgacaccaccaccttcaagagaatcttcctgaagagaatgcccagcatcagagagagcctgaaggagagaggcgtggacatggccagactgggccccgagtggagccagcccatgaagagactgaccctgggcaacaccaccagcagcgtgatcctgaccaactacatggacacccagtactacggcgagatcggcatcggcacccccccccagaccttcaaggtggtgttcgacaccggcagcagcaacgtgtgggtgcccagcagcaagtgcagcagactgtacaccgcctgcgtgtaccacaagctgttcgacgccagcgacagcagcagctacaagcacaacggcaccgagctgaccctgagatacagcaccggcaccgtgagcggcttcctgagccaggacatcatcaccgtgggcggcatcaccgtgacccagatgttcggcgaggtgaccgagatgcccgccctgcccttcatgctggccgagttcgacggcgtggtgggcatgggcttcatcgagcaggccatcggcagagtgacccccatcttcgacaacatcatcagccagggcgtgctgaaggaggacgtgttcagcttctactacaacagaaacagccagagcctgggcggccagatcgtgctgggcggcagcgacccccagcactacgagggcaacttccactacatcaacctgatcaagaccggcgtgtggcagatccagatgaagggcgtgagcgtgggcagcagcaccctgctgtgcgaggacggctgcctggccctggtggacaccggcgccagctacatcagcggcagcaccagcagcatcgagaagctgatggaggccctgggcgccaagaagagactgttcgactacgtggtgaagtgcaacgagggccccaccctgcccgacatcagcttccacctgggcggcaaggagtacaccctgaccagcgccgactacgtgttccaggagagctacagcagcaagaagctgtgcaccctggccatccacgccatggacatccccccccccaccggccccacctgggccctgggcgccaccttcatcagaaagttctacaccgagttcgacagaagaaacaacagaatcggcttcgccctggccagatag

SEQ ID NO: 96772 - DNA, 978 bp, synthetic construct
  misc_feature 1..978: note = Description of Artificial Sequence: Synthetic coding sequence
  source 1..978: mol_type = other DNA
atggacacccagtactacggcgagatcggcatcggcacccccccccagaccttcaaggtggtgttcgacaccggcagcagcaacgtgtgggtgcccagcagcaagtgcagcagactgtacaccgcctgcgtgtaccacaagctgttcgacgccagcgacagcagcagctacaagcacaacggcaccgagctgaccctgagatacagcaccggcaccgtgagcggcttcctgagccaggacatcatcaccgtgggcggcatcaccgtgacccagatgttcggcgaggtgaccgagatgcccgccctgcccttcatgctggccgagttcgacggcgtggtgggcatgggcttcatcgagcaggccatcggcagagtgacccccatcttcgacaacatcatcagccagggcgtgctgaaggaggacgtgttcagcttctactacaacagagacggcgagaacagccagagcctgggcggccagatcgtgctgggcggcagcgacccccagcactacgagggcaacttccactacatcaacctgatcaagaccggcgtgtggcagatccagatgaagggcgtgagcgtgggcagcagcaccctgctgtgcgaggacggctgcctggccctggtggacaccggcgccagctacatcagcggcagcaccagcagcatcgagaagctgatggaggccctgggcgccaagaagagactgttcgactacgtggtgaagtgcaacgagggccccaccctgcccgacatcagcttccacctgggcggcaaggagtacaccctgaccagcgccgactacgtgttccaggagagctacagcagcaagaagctgtgcaccctggccatccacgccatggacatccccccccccaccggccccacctgggccctgggcgccaccttcatcagaaagttctacaccgagttcgacagaagaaacaacagaatcggcttcgccctggccagatag

SEQ ID NO: 96773 - DNA, 1284 bp, synthetic construct
  misc_feature 1..1284: note = Description of Artificial Sequence: Synthetic coding sequence
  source 1..1284: mol_type = other DNA
atgagcaagggcctgcccgccagacaggacatggagaaggagagagagaccctgcaggcctggaaggagagagtgggccaggagctggacagagtggtggccttctggatggagcacagccacgaccaggagcacggcggcttcttcacctgcctgggcagagagggcagagtgtacgacgacctgaagtacgtgtggctgcagggcagacaggtgtggatgtactgcagactgtacagaaccttcgagagattcagacacgcccagctgctggacgccgccaaggccggcggcgagttcctgctgagatacgccagagtggccccccccggcaagaagtgcgccttcgtgctgaccagagacggcagacccgtgaaggtgcagagaaccatcttcagcgagtgcttctacaccatggccatgaacgagctgtggagagccaccggcgaggtgagataccagaccgaggccgtggagatgatggaccagatcgtgcactgggtgcaggaggacgccagcggcctgggcagaccccagctgcagggcgcccccgccgccgagcccatggccgtgcccatgatgctgctgaacctggtggagcagctgggcgaggccgacgaggagctggccggcaagtacgccgagctgggcgactggtgcgccagaagaatcctgcagcacgtgcagagagacggccaggccgtgctggagaacgtgagcgagggcggcaaggagctgcccggctgcctgggcagacagcagaaccccggccacaccctggaggccggctggttcctgctgagacactgcatcagaaagggcgaccccgagctgagagcccacgtgatcgacaagttcctgctgctgcccttccacagcggctgggaccccgaccacggcggcctgttctacttccaggacgccgacaacttctgccccacccagctggagtgggccatgaagctgtggtggccccacagcgaggccatgatcgccttcctgatgggctacagcgacagcggcgaccccgtgctgctgagactgttctaccaggtggccgagtacaccttcagacagttcagagaccccgagtacggcgagtggttcggctacctgagcagagagggcaaggtggccctgagcatcaagggcggccccttcaagggctgcttccacgtgcccagatgcctggccatgtgcgaggagatgctgggcgccctgctgagcagacccgcccccgcccccagccccgcccccacccccgcctgcagaggcgccgagtag

SEQ ID NO: 96774 - DNA, 765 bp, synthetic construct
  misc_feature 1..765: note = Description of Artificial Sequence: Synthetic coding sequence
  source 1..765: mol_type = other DNA
atgagcaagggcctgcccgccagacaggacatggagaaggagagagagaccctgcaggcctggaaggagagagtgggccaggagctggacagagtggtggccttctggatggagcacagccacgaccaggagcacggcggcttcttcacctgcctgggcagagagggcagagtgtacgacgacctgaagtacgtgtggctgcagggcagacaggtgtggatgtactgcagactgtacagaaccttcgagagattcagacacgcccagctgctggacgccgccaaggccggcggcgagttcctgctgagatacgccagagtggccccccccggcaagaagtgcgccttcgtgctgaccagagacggcagacccgtgaaggtgcagagaaccatcttcagcgagtgcttctacaccatggccatgaacgagctgtggagagccaccggcgaggtgagataccagaccgaggccgtggagatgatggaccagatcgtgcactgggtgcaggaggacgccagcggcctgggcagaccccagctgcagggcgcccccgccgccgagcccatggccgtgcccatgatgctgctgaacctggtggagcagctgggcgaggccgacgaggagctggccggcaagtacgccgagctgggcgactggtgcgccagaagaatcctgcagcacgtgcaggccaccagatggaagcccgccggcttctgcagcgtgatcgccttcggcaaggccacccccaacttcgagcccacctag

SEQ ID NO: 96775 - DNA, 2355 bp, synthetic construct
  misc_feature 1..2355: note = Description of Artificial Sequence: Synthetic coding sequence
  source 1..2355: mol_type = other DNA
atggcccagctgctgaacagcatcctgagcgtgatcgacgtgttccacaagtacgccaagggcaacggcgactgcgccctgctgtgcaaggaggagctgaagcagctgctgctggccgagttcggcgacatcctgcagagacccaacgaccccgagaccgtggagaccatcctgaacctgctggaccaggacagagacggccacatcgacttccacgagtacctgctgctggtgttccagctggtgcaggcctgctaccacaagctggacaacaagagccacggcggcagaaccagccagcaggagagaggccaggagggcgcccaggactgcaagttccccggcaacaccggcagacagcacagacagagacacgaggaggagagacagaacagccaccacagccagcccgagagacaggacggcgacagccaccacggccagcccgagagacaggacagagacagccaccacggccagagcgagaagcaggacagagacagccaccacagccagcccgagagacaggacagagacagccaccacaaccagagcgagagacaggacaaggacttcagcttcgaccagagcgagagacagagccaggacagcagcagcggcaagaaggtgagccacaagagcaccagcggccaggccaagtggcagggccacatcttcgccctgaacagatgcgagaagcccatccaggacagccactacggccagagcgagagacacacccagcagagcgagaccctgggccaggccagccacttcaaccagaccaaccagcagaagagcggcagctactgcggccagagcgagagactgggccaggagctgggctgcggccagaccgacagacagggccagagcagccactacggccagaccgacagacaggaccagagctaccactacggccagaccgacagacagggccagagcagccactacagccagaccgacagacagggccagagcagccactacagccagcccgacagacagggccagagcagccactacggccagatggacagaaagggccagtgctaccactacgaccagaccaacagacagggccagggcagccactacagccagcccaacagacagggccagagcagccactacggccagcccgacacccaggaccagagcagccactacggccagaccgacagacaggaccagagcagccactacggccagaccgagagacagggccagagcagccactacagccagatggacagacagggccagggcagccactacggccagaccgacagacagggccagagcagccactacggccagcccgacagacagggccagaacagccactacggccagaccgacagacagggccagagcagccactacggccagaccgacagacagggccagagcagccactacagccagcccgacaagcagggccagagcagccactacggcaagatcgacagacaggaccagagctaccactacggccagcccgacggccagggccagagcagccactacggccagaccgacagacagggccagagcttccactacggccagcccgacagacagggccagagcagccactacagccagatggacagacagggccagagcagccactacggccagaccgacagacagggccagagcagccactacggccagaccgacagacagggccagagctaccactacggccagaccgacagacagggccagagcagccactacatccagagccagaccggcgagatccagggccagaacaagtacttccagggcaccgagggcaccagaaaggccagctacgtggagcagagcggcagaagcggcagactgagccagcagacccccggccaggagggctaccagaaccagggccagggcttccagagcagagacagccagcagaacggccaccaggtgtgggagcccgaggaggacagccagcaccaccagcacaagctgctggcccagatccagcaggagagacccctgtgccacaagggcagagactggcagagctgcagcagcgagcagggccacagacaggcccagaccagacagagccacggcgagggcctgagccactgggccgaggaggagcagggccaccagacctgggacagacacagccacgagagccaggagggcccctgcggcacccaggacagaagaacccacaaggacgagcagaaccaccagagaagagacagacagacccacgagcacgagcagagccaccagagaagagacagacagacccacgaggacaagcagaacagacagagaagagacagacagacccacgaggacgagcagaaccaccagagatag

SEQ ID NO: 96776 - DNA, 1320 bp, synthetic construct
  misc_feature 1..1320: note = Description of Artificial Sequence: Synthetic coding sequence
  source 1..1320: mol_type = other DNA
atggacagaaagggccagtgctaccactacgaccagaccaacagacagggccagggcagccactacagccagcccaacagacagggccagagcagccactacggccagcccgacacccaggaccagagcagccactacggccagaccgacagacaggaccagagcagccactacggccagaccgagagacagggccagagcagccactacagccagatggacagacagggccagggcagccactacggccagaccgacagacagggccagagcagccactacggccagcccgacagacagggccagaacagccactacggccagaccgacagacagggccagagcagccactacggccagaccgacagacagggccagagcagccactacagccagcccgacaagcagggccagagcagccactacggcaagatcgacagacaggaccagagctaccactacggccagcccgacggccagggccagagcagccactacggccagaccgacagacagggccagagcttccactacggccagcccgacagacagggccagagcagccactacagccagatggacagacagggccagagcagccactacggccagaccgacagacagggccagagcagccactacggccagaccgacagacagggccagagctaccactacggccagaccgacagacagggccagagcagccactacatccagagccagaccggcgagatccagggccagaacaagtacttccagggcaccgagggcaccagaaaggccagctacgtggagcagagcggcagaagcggcagactgagccagcagacccccggccaggagggctaccagaaccagggccagggcttccagagcagagacagccagcagaacggccaccaggtgtgggagcccgaggaggacagccagcaccaccagcacaagctgctggcccagatccagcaggagagacccctgtgccacaagggcagagactggcagagctgcagcagcgagcagggccacagacaggcccagaccagacagagccacggcgagggcctgagccactgggccgaggaggagcagggccaccagacctgggacagacacagccacgagagccaggagggcccctgcggcacccaggacagaagaacccacaaggacgagcagaaccaccagagaagagacagacagacccacgagcacgagcagagccaccagagaagagacagacagacccacgaggacaagcagaacagacagagaagagacagacagacccacgaggacgagcagaaccaccagagatag

SEQ ID NO: 96777 - DNA, 1065 bp, synthetic construct
  misc_feature 1..1065: note = Description of Artificial Sequence: Synthetic coding sequence
  source 1..1065: mol_type = other DNA
atggaggtggaggccgtgtgcggcggcgccggcgaggtggaggcccaggacagcgaccccgcccccgccttcagcaaggcccccggcagcgccggccactacgagctgccctgggtggagaagtacagacccgtgaagctgaacgagatcgtgggcaacgaggacaccgtgagcagactggaggtgttcgccagagagggcaacgtgcccaacatcatcatcgccggcccccccggcaccggcaagaccaccagcatcctgtgcctggccagagccctgctgggccccgccctgaaggacgccatgctggagctgaacgccagcaacgacagaggcatcgacgtggtgagaaacaagatcaagatgttcgcccagcagaaggtgaccctgcccaagggcagacacaagatcatcatcctggacgaggccgacagcatgaccgacggcgcccagcaggccctgagaagaaccatggagatctacagcaagaccaccagattcgccctggcctgcaacgccagcgacaagatcatcgagcccatccagagcagatgcgccgtgctgagatacaccaagctgaccgacgcccagatcctgaccagactgatgaacgtgatcgagaaggagagagtgccctacaccgacgacggcctggaggccatcatcttcaccgcccagggcgacatgagacaggccctgaacaacctgcagagcaccttcagcggcttcggcttcatcaacagcgagaacgtgttcaaggtgtgcgacgagccccaccccctgctggtgaaggagatgatccagcactgcgtgaacgccaacatcgacgaggcctacaagatcctggcccacctgtggcacctgggctacagccccgaggacatcatcggcaacatcttcagagtgtgcaagaccttccagatggccgagtacctgaagctggagttcatcaaggagatcggctacacccacatgaagatcgccgagggcgtgaacagcctgctgcagatggccggcctgctggccagactgtgccagaagaccatggcccccgtggccagctag

SEQ ID NO: 96778 - DNA, 963 bp, synthetic construct
  misc_feature 1..963: note = Description of Artificial Sequence: Synthetic coding sequence
  source 1..963: mol_type = other DNA
atggaggtggaggccgtgtgcggcggcgccggcgaggtggaggcccaggacagcgaccccgcccccgccttcagcaaggcccccggcagcgccggccactacgagctgccctgggtggagaagtacagacccgtgaagctgaacgagatcgtgggcaacgaggacaccgtgagcagactggaggtgttcgccagagagggcaacgtgcccaacatcatcatcgccggcccccccggcaccggcaagaccaccagcatcctgtgcctggccagagccctgctgggccccgccctgaaggacgccatgctggagctgaacgccagcaacgacagcatgaccgacggcgcccagcaggccctgagaagaaccatggagatctacagcaagaccaccagattcgccctggcctgcaacgccagcgacaagatcatcgagcccatccagagcagatgcgccgtgctgagatacaccaagctgaccgacgcccagatcctgaccagactgatgaacgtgatcgagaaggagagagtgccctacaccgacgacggcctggaggccatcatcttcaccgcccagggcgacatgagacaggccctgaacaacctgcagagcaccttcagcggcttcggcttcatcaacagcgagaacgtgttcaaggtgtgcgacgagccccaccccctgctggtgaaggagatgatccagcactgcgtgaacgccaacatcgacgaggcctacaagatcctggcccacctgtggcacctgggctacagccccgaggacatcatcggcaacatcttcagagtgtgcaagaccttccagatggccgagtacctgaagctggagttcatcaaggagatcggctacacccacatgaagatcgccgagggcgtgaacagcctgctgcagatggccggcctgctggccagactgtgccagaagaccatggcccccgtggccagctag

SEQ ID NO: 96779 - DNA, 1071 bp, synthetic construct
  misc_feature 1..1071: note = Description of Artificial Sequence: Synthetic coding sequence
  source 1..1071: mol_type = other DNA
atgagcctgtgggtggacaagtacagaccctgcagcctgggcagactggactaccacaaggagcaggccgcccagctgagaaacctggtgcagtgcggcgacttcccccacctgctggtgtacggccccagcggcgccggcaagaagaccagaatcatgtgcatcctgagagagctgtacggcgtgggcgtggagaagctgagaatcgagcaccagaccatcaccacccccagcaagaagaagatcgagatcagcaccatcgccagcaactaccacctggaggtgaaccccagcgacgccggcaacagcgacagagtggtgatccaggagatgctgaagaccgtggcccagagccagcagctggagaccaacagccagagagacttcaaggtggtgctgctgaccgaggtggacaagctgaccaaggacgcccagcacgccctgagaagaaccatggagaagtacatgagcacctgcagactgatcctgtgctgcaacagcaccagcaaggtgatcccccccatcagaagcagatgcctggccgtgagagtgcccgcccccagcatcgaggacatctgccacgtgctgagcaccgtgtgcaagaaggagggcctgaacctgcccagccagctggcccacagactggccgagaagagctgcagaaacctgagaaaggccctgctgatgtgcgaggcctgcagagtgcagcagtaccccttcaccgccgaccaggagatccccgagaccgactgggaggtgtacctgagagagaccgccaacgccatcgtgagccagcagaccccccagagactgctggaggtgagaggcagactgtacgagctgctgacccactgcatcccccccgagatcatcatgaagggcctgctgagcgagctgctgcacaactgcgacggccagctgaagggcgaggtggcccagatggccgcctactacgagcacagactgcagctgggcagcaaggccatctaccacctggaggccttcgtggccaagttcatggccctgtacaagaagttcatggaggacggcctggagggcatgatgttctag

SEQ ID NO: 96780 - DNA, 918 bp, synthetic construct
  misc_feature 1..918: note = Description of Artificial Sequence: Synthetic coding sequence
  source 1..918: mol_type = other DNA
atgagcctgtgggtggacaagtacagaccctgcagcctgggcagactggactaccacaaggagcaggccgcccagctgagaaacctggtgcagtgcggcgacttcccccacctgctggtgtacggccccagcggcgccggcaagaagaccagaatcatgtgcatcctgagagagctgtacggcgtgggcgtggagaagctgagaatcgagcaccagaccatcaccacccccagcaagaagaagatcgagatcagcaccatcgccagcaactaccacctggaggtgaaccccagcgacgccggcaacagcgacagagtggtgatccaggagatgctgaagaccgtggcccagagccagcagctggagaccaacagccagagagacttcaaggtggtgctgctgaccgaggtggacaagctgaccaaggacgcccagcacgccctgagaagaaccatggagaagtacatgagcacctgcagactgatcctgtgctgcaacagcaccagcaaggtgatcccccccatcagaagcagatgcctggccgtgagagtgcccgcccccagcatcgaggacatctgccacgtgctgagcaccgtgtgcaagaaggagggcctgaacctgcccagccagctggcccacagactggccgagaagagctgcagaaacctgagaaaggccctgctgatgtgcgaggcctgcagagtgcagcagtaccccttcaccgccgaccaggagatccccgagaccgactgggaggtgtacctgagagagaccgccaacgccatcgtgagccagcagaccccccagagactgctggaggtgagaggcagactgtacgagctgctgacccactgcatcccccccgagatcatcatgaaggcctgcaaggaggagagcagaagctgcgacatcttctag

SEQ ID NO: 96781 - DNA, 1092 bp, synthetic construct
  misc_feature 1..1092: note = Description of Artificial Sequence: Synthetic coding sequence
  source 1..1092: mol_type = other DNA
atgcaggccttcctgaagggcaccagcatcagcaccaagccccccctgaccaaggacagaggcgtggccgccagcgccggcagcagcggcgagaacaagaaggccaagcccgtgccctgggtggagaagtacagacccaagtgcgtggacgaggtggccttccaggaggaggtggtggccgtgctgaagaagagcctggagggcgccgacctgcccaacctgctgttctacggcccccccggcaccggcaagaccagcaccatcctggccgccgccagagagctgttcggccccgagctgttcagactgagagtgctggagctgaacgccagcgacgagagaggcatccaggtggtgagagagaaggtgaagaacttcgcccagctgaccgtgagcggcagcagaagcgacggcaagccctgcccccccttcaagatcgtgatcctggacgaggccgacagcatgaccagcgccgcccaggccgccctgagaagaaccatggagaaggagagcaagaccaccagattctgcctgatctgcaactacgtgagcagaatcatcgagcccctgaccagcagatgcagcaagttcagattcaagcccctgagcgacaagatccagcagcagagactgctggacatcgccaagaaggagaacgtgaagatcagcgacgagggcatcgcctacctggtgaaggtgagcgagggcgacctgagaaaggccatcaccttcctgcagagcgccaccagactgaccggcggcaaggagatcaccgagaaggtgatcaccgacatcgccggcgtgatccccgccgagaagatcgacggcgtgttcgccgcctgccagagcggcagcttcgacaagctggaggccgtggtgaaggacctgatcgacgagggccacgccgccacccagctggtgaaccagctgcacgacgtggtggtggagaacaacctgagcgacaagcagaagagcatcatcaccgagaagctggccgaggtggacaagtgcctggccgacggcgccgacgagcacctgcagctgatcagcctgtgcgccaccgtgatgcagcagctgagccagaactgctag

SEQ ID NO: 96782 - DNA, 1092 bp, synthetic construct; identical to SEQ ID NO: 96781
  misc_feature 1..1092: note = Description of Artificial Sequence: Synthetic coding sequence
  source 1..1092: mol_type = other DNA

SEQ ID NO: 96783 - DNA, 132 bp, synthetic construct
  misc_feature 1..132: note = Description of Artificial Sequence: Synthetic coding sequence
  source 1..132: mol_type = other DNA
atgcaggccttcctgaagggcaccagcatcagcaccaagccccccctgaccaaggacagaggcgtggccgccagcgccggcagcagcggcgagaacaagaaggccaagcccgtgccctgggtggagaagtag

SEQ ID NO: 96784 - DNA, 645 bp, synthetic construct
  misc_feature 1..645: note = Description of Artificial Sequence: Synthetic coding sequence
  source 1..645: mol_type = other DNA
atgcaggccttcctgaagggcaccagcatcagcaccaagccccccctgaccaaggacagaggcgtggccgccagcgccggcagcagcggcgagaacaagaaggccaagcccgtgccctgggtggagaagtacagacccaagtgcgtggacgaggtggccttccaggaggaggtggtggccgtgctgaagaagagcctggagggcgccgacctgcccaacctgctgttctacggcccccccggcaccggcaagaccagcaccatcctggccgccgccagagagctgttcggccccgagctgttcagactgagagtgctggagctgaacgccagcgacgagagaggcatccaggtggtgagagagaaggtgaagaacttcgcccagctgaccgtgagcggcagcagaagcgacggcaagccctgcccccccttcaagatcgtgatcctggacgaggccgacagcatgaccagcgccgcccaggccgccctgagaagaaccatggagaaggagagcaagaccaccagattctgcctgatctgcaactacgtgagcagaatcatcgagcccctgaccagcagatgcagcaagttcagattcaagcccctgagcgacaagatccagcagcagagactgctggacatctag

SEQ ID NO: 96785 - DNA, 372 bp, synthetic construct
  misc_feature 1..372: note = Description of Artificial Sequence: Synthetic coding sequence
  source 1..372: mol_type = other DNA
atgcaggccttcctgaagggcaccagcatcagcaccaagccccccctgaccaaggacagaggcgtggccgccagcgccggcagcagcggcgagaacaagaaggccaagcccgtgccctgggtggagaagtacagacccaagtgcgtggacgaggtggccttccaggaggaggtggtggccgtgctgaagaagagcctggagggcgccgacctgcccaacctgctgttctacggcccccccggcaccggcaagaccagcaccatcctggccgccgccagagagctgttcggccccgagctgttcagactgagagtgctggagctgaacgccagcgacgagagaggcatccaggtggtgagagagaaggtgtag

SEQ ID NO: 96786 - DNA, 504 bp, synthetic construct
  misc_feature 1..504: note = Description of Artificial Sequence: Synthetic coding sequence
  source 1..504: mol_type = other DNA
atgcaggccttcctgaagggcaccagcatcagcaccaagccccccctgaccaaggacagaggcgtggccgccagcgccggcagcagcggcgagaacaagaaggccaagcccgtgccctgggtggagaagtacagacccaagtgcgtggacgaggtggccttccaggaggaggtggtggccgtgctgaagaagagcctggagggcgccgacctgcccaacctgctgttctacggcccccccggcaccggcaagaccagcaccatcctggccgccgccagagagctgttcggccccgagctgttcagactgagagtgctggagctgaacgccagcgacgagagaggcatccaggtggtgagagagaaggtgaagaacttcgcccagctgaccgtgagcggcagcagaagcgacggcaagccctgcccccccttcaagatcgtgatcctggacgaggccgacagcatgaccagcgccgcccaggccgccctgagaagaaccatgtag

SEQ ID NO: 96787 - DNA, 288 bp, synthetic construct
  misc_feature 1..288: note = Description of Artificial Sequence: Synthetic coding sequence
  source 1..288: mol_type = other DNA
atgcaggccttcctgaagggcaccagcatcagcaccaagccccccctgaccaaggacagaggcgtggccgccagcgccggcagcagcggcgagaacaagaaggccaagcccgtgccctgggtggagaagtacagacccaagtgcgtggacgaggtggccttccaggaggaggtggtggccgtgctgaagaagagcctggagggcgccgacctgcccaacctgctgttctacggcccccccggcaccggcaagaccagcaccatcctggccgccgccagagagctgtag

SEQ ID NO: 96788 - DNA, 1746 bp, synthetic construct
  misc_feature 1..1746: note = Description of Artificial Sequence: Synthetic coding sequence
  source 1..1746: mol_type = other DNA
atgcagagacccggccccagactgtggctggtgctgcaggtgatgggcagctgcgccgccatcagcagcatggacatggagagacccggcgacggcaagtgccagcccatcgagatccccatgtgcaaggacatcggctacaacatgaccagaatgcccaacctgatgggccacgagaaccagagagaggccgccatccagctgcacgagttcgcccccctggtggagtacggctgccacggccacctgagattcttcctgtgcagcctgtacgcccccatgtgcaccgagcaggtgagcacccccatccccgcctgcagagtgatgtgcgagcaggccagactgaagtgcagccccatcatggagcagttcaacttcaagtggcccgacagcctggactgcagaaagctgcccaacaagaacgaccccaactacctgtgcatggaggcccccaacaacggcagcgacgagcccaccagaggcagcggcctgttcccccccctgttcagaccccagagaccccacagcgcccaggagcaccccctgaaggacggcggccccggcagaggcggctgcgacaaccccggcaagttccaccacgtggagaagagcgccagctgcgcccccctgtgcacccccggcgtggacgtgtactggagcagagaggacaagagattcgccgtggtgtggctggccatctgggccgtgctgtgcttcttcagcagcgccttcaccgtgctgaccttcctgatcgaccccgccagattcagataccccgagagacccatcatcttcctgagcatgtgctactgcgtgtacagcgtgggctacctgatcagactgttcgccggcgccgagagcatcgcctgcgacagagacagcggccagctgtacgtgatccaggagggcctggagagcaccggctgcaccctggtgttcctggtgctgtactacttcggcatggccagcagcctgtggtgggtggtgctgaccctgacctggttcctggccgccggcaagaagtggggccacgaggccatcgaggccaacagcagctacttccacctggccgcctgggccatccccgccgtgaagaccatcctgatcctggtgatgagaagagtggccggcgacgagctgaccggcgtgtgctacgtgggcagcatggacgtgaacgccctgaccggcttcgtgctgatccccctggcctgctacctggtgatcggcaccagcttcatcctgagcggcttcgtggccctgttccacatcagaagagtgatgaagaccggcggcgagaacaccgacaagctggagaagctgatggtgagaatcggcctgttcagcgtgctgtacaccgtgcccgccacctgcgtgatcgcctgctacttctacgagagactgaacatggactactggaagatcctggccgcccagcacaagtgcaagatgaacaaccagaccaagaccctggactgcctgatggccgccagcatccccgccgtggagatcttcatggtgaagatcttcatgctgctggtggtgggcatcaccagcggcatgtggatctggaccagcaagaccctgcagagctggcagcaggtgtgcagcagaagactgaagaagaagagcagaagaaagcccgccagcgtgatcaccagcggcggcatctacaagaaggcccagcacccccagaagacccaccacggcaagtacgagatccccgcccagagccccacctgcgtgtag

SEQ ID NO: 96789 - DNA, 960 bp, synthetic construct
  misc_feature 1..960: note = Description of Artificial Sequence: Synthetic coding sequence
  source 1..960: mol_type = other DNA
atggtggagaagtacagaccccagaccctgaacgacctgatcagccaccaggacatcctgagcaccatccagaagttcatcaacgaggacagactgccccacctgctgctgtacggcccccccggcaccggcaagaccagcaccatcctggcctgcgccaagcagctgtacaaggacaaggagttcggcagcatggtgctggagctgaacgccagcgacgacagaggcatcgacatcatcagaggccccatcctgagcttcgccagcaccagaaccatcttcaagaagggcttcaagctggtgatcctggacgaggccgacgccatgacccaggacgcccagaacgccctgagaagagtgatcgagaagttcaccgagaacaccagattctgcctgatctgcaactacctgagcaagatcatccccgccctgcagagcagatgcaccagattcagattcggccccctgacccccgagctgatggtgcccagactggagcacgtggtggaggaggagaaggtggacatcagcgaggacggcatgaaggccctggtgaccctgagcagcggcgacatgagaagagccctgaacatcctgcagagcaccaacatggccttcggcaaggtgaccgaggagaccgtgtacacctgcaccggccaccccctgaagagcgacatcgccaacatcctggactggatgctgaaccaggacttcaccaccgcctacagaaacatcaccgagctgaagaccctgaagggcctggccctgcacgacatcctgaccgagatccacctgttcgtgcacagagtggacttccccagcagcgtgagaatccacctgctgaccaagatggccgacatcgagtacagactgagcgtgggcaccaacgagaagatccagctgagcagcctgatcgccgccttccaggtgaccagagacctgatcgtggccgaggcctag

SEQ ID NO: 96790 - DNA, 315 bp, synthetic construct
  misc_feature 1..315: note = Description of Artificial Sequence: Synthetic coding sequence
  source 1..315: mol_type = other DNA
atggtggagaagtacagaccccagaccctgaacgacctgatcagccaccaggacatcctgagcaccatccagaagttcatcaacgaggacagactgccccacctgctgctgtacggcccccccggcaccggcaagaccagcaccatcctggcctgcgccaagcagctgtacaaggacaaggagttcggcagcatggtgctggagctgaacgccagcgacgacagaggcatcgacatcatcagaggccccatcctgagcttcgccagcaccagaaccatcttcaagaagggcttcaagctggtgatcctggactag

SEQ ID NO: 96791 - DNA, 1023 bp, synthetic construct
  misc_feature 1..1023: note = Description of Artificial Sequence: Synthetic coding sequence
  source 1..1023: mol_type = other DNA
atggagaccagcgccctgaagcagcaggagcagcccgccgccaccaagatcagaaacctgccctgggtggagaagtacagaccccagaccctgaacgacctgatcagccaccaggacatcctgagcaccatccagaagttcatcaacgaggacagactgccccacctgctgctgtacggcccccccggcaccggcaagaccagcaccatcctggcctgcgccaagcagctgtacaaggacaaggagttcggcagcatggtgctggagctgaacgccagcgacgacagaggcatcgacatcatcagaggccccatcctgagcttcgccagcaccagaaccatcttcaagaagggcttcaagctggtgatcctggacgaggccgacgccatgacccaggacgcccagaacgccctgagaagagtgatcgagaagttcaccgagaacaccagattctgcctgatctgcaactacctgagcaagatcatccccgccctgcagagcagatgcaccagattcagattcggccccctgacccccgagctgatggtgcccagactggagcacgtggtggaggaggagaaggtggacatcagcgaggacggcatgaaggccctggtgaccctgagcagcggcgacatgagaagagccctgaacatcctgcagagcaccaacatggccttcggcaaggtgaccgaggagaccgtgtacacctgcaccggccaccccctgaagagcgacatcgccaacatcctggactggatgctgaaccaggacttcaccaccgcctacagaaacatcaccgagctgaagaccctgaagggcctggccctgcacgacatcctgaccgagatccacctgttcgtgcacagagtggacttccccagcagcgtgagaatccacctgctgaccaagatggccgacatcgagtacagactgagcgtgggcaccaacgagaagatccagctgagcagcctgatcgccgccttccaggtgaccagagacctgatcgtggccgaggcctag

SEQ ID NO: 96792 - DNA, 192 bp, synthetic construct
  misc_feature 1..192: note = Description of Artificial Sequence: Synthetic coding sequence
  source 1..192: mol_type = other DNA
atggtggagaagtacagaccccagaccctgaacgacctgatcagccaccaggacatcctgagcaccatccagaagttcatcaacgaggacagactgccccacctgctgctgtacggcccccccggcaccggcaagaccagcaccatcctggcctgcgccaagcagctgtacaaggacaaggagttcggctag

SEQ ID NO: 96793 - DNA, 1077 bp, synthetic construct
  misc_feature 1..1077: note = Description of Artificial Sequence: Synthetic coding sequence
  source 1..1077: mol_type = other DNA
atgtggaacagcaacgacggcggcgccggctggagaagaaagagaatcgccggcggcttcagcaagagagccagcctgggcagcgagagaagagtggtggccggcgaggagggcagagagagaagctggggcgtgtggggcagccccgccggcagaagaagaggcagactgggcagactgggccagtgcctgaagggcagaagcctgagagagcccgccggcttcagcgaggcctgggacgtggcccaggccctgatcctgctgttcaagaccggcggcttcgagagctacggcagcagcagctacggcggcgccggcggctacacccagagccccggcggcttcggcagccccgcccccagccaggccgagaagaagagcagagccagagcccagcacatcgtgccctgcaccatcagccagctgctgagcgccaccctggtggacgaggtgttcagaatcggcaacgtggagatcagccaggtgaccatcgtgggcatcatcagacacgccgagaaggcccccaccaacatcgtgtacaagatcgacgacatgaccgccgcccccatggacgtgagacagtgggtggacaccgacgacaccagcagcgagaacaccgtggtgccccccgagacctacgtgaaggtggccggccacctgagaagcttccagaacaagaagagcctggtggccttcaagatcatgcccctggaggacatgaacgagttcaccacccacatcctggaggtgatcaacgcccacatggtgctgagcaaggccaacagccagcccagcgccggcagagcccccatcagcaaccccggcatgagcgaggccggcaacttcggcggcaacagcttcatgcccgccaacggcctgaccgtggcccagaaccaggtgctgaacctgatcaaggcctgccccagacccgagggcctgaacttccaggacctgaagaaccagctgaagcacatgagcgtgagcagcatcaagcaggccgtggacttcctgagcaacgagggccacatctacagcaccgtggacgacgaccacttcaagagcaccgacgccgagtag

SEQ ID NO: 96794 - DNA, 837 bp, synthetic construct
  misc_feature 1..837: note = Description of Artificial Sequence: Synthetic coding sequence
  source 1..837: mol_type = other DNA
atgggcagaggcgacagaaacaagagaagcatcagaggcttcgagagctacggcagcagcagctacggcggcgccggcggctacacccagagccccggcggcttcggcagccccgcccccagccaggccgagaagaagagcagagccagagcccagcacatcgtgccctgcaccatcagccagctgctgagcgccaccctggtggacgaggtgttcagaatcggcaacgtggagatcagccaggtgaccatcgtgggcatcatcagacacgccgagaaggcccccaccaacatcgtgtacaagatcgacgacatgaccgccgcccccatggacgtgagacagtgggtggacaccgacgacaccagcagcgagaacaccgtggtgccccccgagacctacgtgaaggtggccggccacctgagaagcttccagaacaagaagagcctggtggccttcaagatcatgcccctggaggacatgaacgagttcaccacccacatcctggaggtgatcaacgcccacatggtgctgagcaaggccaacagccagcccagcgccggcagagcccccatcagcaaccccggcatgagcgaggccggcaacttcggcggcaacagcttcatgcccgccaacggcctgaccgtggcccagaaccaggtgctgaacctgatcaaggcctgccccagacccgagggcctgaacttccaggacctgaagaaccagctgaagcacatgagcgtgagcagcatcaagcaggccgtggacttcctgagcaacgagggccacatctacagcaccgtggacgacgaccacttcaagagcaccgacgccgagtag

SEQ ID NO: 96795 - DNA, 813 bp, synthetic construct
  misc_feature 1..813: note = Description of Artificial Sequence: Synthetic coding sequence
  source 1..813: mol_type = other DNA
atgtggaacagcggcttcgagagctacggcagcagcagctacggcggcgccggcggctacacccagagccccggcggcttcggcagccccgcccccagccaggccgagaagaagagcagagccagagcccagcacatcgtgccctgcaccatcagccagctgctgagcgccaccctggtggacgaggtgttcagaatcggcaacgtggagatcagccaggtgaccatcgtgggcatcatcagacacgccgagaaggcccccaccaacatcgtgtacaagatcgacgacatgaccgccgcccccatggacgtgagacagtgggtggacaccgacgacaccagcagcgagaacaccgtggtgccccccgagacctacgtgaaggtggccggccacctgagaagcttccagaacaagaagagcctggtggccttcaagatcatgcccctggaggacatgaacgagttcaccacccacatcctggaggtgatcaacgcccacatggtgctgagcaaggccaacagccagcccagcgccggcagagcccccatcagcaaccccggcatgagcgaggccggcaacttcggcggcaacagcttcatgcccgccaacggcctgaccgtggcccagaaccaggtgctgaacctgatcaaggcctgccccagacccgagggcctgaacttccaggacctgaagaaccagctgaagcacatgagcgtgagcagcatcaagcaggccgtggacttcctgagcaacgagggccacatctacagcaccgtggacgacgaccacttcaagagcaccgacgccgagtag

SEQ ID NO: 96796 - DNA, 369 bp, synthetic construct
  misc_feature 1..369: note = Description of Artificial Sequence: Synthetic coding sequence
  source 1..369: mol_type = other DNA
ctggaggacatgaacgagttcaccacccacatcctggaggtgatcaacgcccacatggtgctgagcaaggccaacagccagcccagcgccggcagagcccccatcagcaaccccggcatgagcgaggccggcaacttcggcggcaacagcttcatgcccgccaacggcctgaccgtggcccagaaccaggtgctgaacctgatcaaggcctgccccagacccgagggcctgaacttccaggacctgaagaaccagctgaagcacatgagcgtgagcagcatcaagcaggccgtggacttcctgagcaacgagggccacatctacagcaccgtggacgacgaccacttcaagagcaccgacgccgagtag

SEQ ID NO: 96797 - DNA, 540 bp, synthetic construct
  misc_feature 1..540: note = Description of Artificial Sequence: Synthetic coding sequence
  source 1..540: mol_type = other DNA
atgtggaacagcaacgacggcggcggcttcgagagctacggcagcagcagctacggcggcgccggcggctacacccagagccccggcggcttcggcagccccgcccccagccaggccgagaagaagagcagagccagagcccagcacatcgtgccctgcaccatcagccagctgctgagcgccaccctggtggacgaggtgttcagaatcggcaacgtggagatcagccaggtgaccatcgtgggcatcatcagacacgccgagaaggcccccaccaacatcgtgtacaagatcgacgacatgaccgccgcccccatggacgtgagacagtgggtggacaccgacgacaccagcagcgagaacaccgtggtgccccccgagacctacgtgaaggtggccggccacctgagaagcttccagaacaagaagagcctggtggccttcaagatcatgcccctggaggacatgaacgagttcaccacccacatcctggaggtgatcaacgcccacatggtgctgagcaaggccaacagccagtag

SEQ ID NO: 96798 - DNA, 786 bp, synthetic construct
  misc_feature 1..786: note = Description of Artificial Sequence: Synthetic coding sequence
  source 1..786: mol_type = other DNA
atgagcaagagcggcttcggcagctacggcagcatcagcgccgccgacggcgccagcggcggcagcgaccagctgtgcgagagagacgccacccccgccatcaagacccagagacccaaggtgagaatccaggacgtggtgccctgcaacgtgaaccagctgctgagcagcaccgtgttcgaccccgtgttcaaggtgagaggcatcatcgtgagccaggtgagcatcgtgggcgtgatcagaggcgccgagaaggccagcaaccacatctgctacaagatcgacgacatgaccgccaagcccatcgaggccagacagtggttcggcagagagaaggtgaagcaggtgacccccctgagcgtgggcgtgtacgtgaaggtgttcggcatcctgaagtgccccaccggcaccaagagcctggaggtgctgaagatccacgtgctggaggacatgaacgagttcaccgtgcacatcctggagaccgtgaacgcccacatgatgctggacaaggccagaagagacaccaccgtggagagcgtgcccgtgagccccagcgaggtgaacgacgccggcgacaacgacgagagccacagaaacttcatccaggacgaggtgctgagactgatccacgagtgcccccaccaggagggcaagagcatccacgagctgagagcccagctgtgcgacctgagcgtgaaggccatcaaggaggccatcgactacctgaccgtggagggccacatctaccccaccgtggacagagagcacttcaagagcgccgactag

SEQ ID NO: 96799 - DNA, 330 bp, synthetic construct
  misc_feature 1..330: note = Description of Artificial Sequence: Synthetic coding sequence
  source 1..330: mol_type = other DNA
atgaaccccgccctgggcaaccagaccgacgtggccggcctgttcctggccaacagcagcgaggccctggagagagccgtgagatgctgcacccaggccagcgtggtgaccgacgacggcttcgccgagggcggccccgacgagagaagcctgtacatcatgagagtggtgcagatcgccgtgatgtgcgtgctgagcctgaccgtggtgttcggcatcttcttcctgggctgcaacctgctgatcaagagcgagggcatgatcaacttcctggtgaaggacagaagacccagcaaggaggtggaggccgtggtggtgggcccctactag

SEQ ID NO: 96800 - DNA, 1893 bp, synthetic construct
  misc_feature 1..1893: note = Description of Artificial Sequence: Synthetic coding sequence
  source 1..1893: mol_type = other DNA
atgcagggcagcagcctgtggctgagcctgaccttcagaagcgccagagtgctgagcagagccagattcttcgagtggcagagccccggcctgcccaacaccgccgccatggagaacggcaccggcccctacggcgaggagagacccagagaggtgcaggagaccaccgtgaccgagggcgccgccaagatcgccttccccagcgccaacgaggtgttctacaaccccgtgcaggagttcaacagagacctgacctgcgccgtgatcaccgagttcgccagaatccagctgggcgccaagggcatccagatcaaggtgcccggcgagaaggacacccagaaggtggtggtggacctgagcgagcaggaggaggagaaggtggagctgaaggagagcgagaacctggccagcggcgaccagcccagaaccgccgccgtgggcgagatctgcgaggagggcctgcacgtgctggagggcctggccgccagcggcctgagaagcatcagattcgccctggaggtgcccggcctgagaagcgtggtggccaacgacgccagcaccagagccgtggacctgatcagaagaaacgtgcagctgaacgacgtggcccacctggtgcagcccagccaggccgacgccagaatgctgatgtaccagcaccagagagtgagcgagagattcgacgtgatcgacctggacccctacggcagccccgccaccttcctggacgccgccgtgcaggccgtgagcgagggcggcctgctgtgcgtgacctgcaccgacatggccgtgctggccggcaacagcggcgagacctgctacagcaagtacggcgccatggccctgaagagcagagcctgccacgagatggccctgagaatcgtgctgcacagcctggacctgagagccaactgctaccagagattcgtggtgcccctgctgagcatcagcgccgacttctacgtgagagtgttcgtgagagtgttcaccggccaggccaaggtgaaggccagcgccagagccaagttcagcgccgcctgcggcccccccgtgacccccgagtgcgagcactgcggccagagacaccagctgggcggccccatgtgggccgagcccatccacgacctggacttcgtgggcagagtgctggaggccgtgagcgccaaccccggcagattccacaccagcgagagaatcagaggcgtgctgagcgtgatcaccgaggagctgcccgacgtgcccctgtactacaccctggaccagctgagcagcaccatccactgcaacacccccagcctgctgcagctgagaagcgccctgctgcacgccgacttcagagtgagcctgagccacgcctgcaagaacgccgtgaagaccgacgcccccgccagcgccctgtgggacatcatgagatgctgggagaaggagtgccccgtgaagagagagagactgagcgagaccagccccgccttcagaatcctgagcgtggagcccagactgcaggccaacttcaccatcagagaggacgccaaccccagcagcagacagagaggcctgaagagattccaggccaaccccgaggccaactggggccccagacccagagccagacccggcggcaaggccgccgacgaggccatggaggagagaagaagactgctgcagaacaagagaaaggagccccccgaggacgtggcccagagagccgccagactgaagaccttcccctgcaagagattcaaggagggcacctgccagagaggcgaccagtgctgctacagccacagcccccccacccccagagtgagcgccgacgccgcccccgactgccccgagaccagcaaccagaccccccccggccccggcgccgccgccggccccggcatcgactag

SEQ ID NO: 96801 - DNA, 249 bp, synthetic construct
  misc_feature 1..249: note = Description of Artificial Sequence: Synthetic coding sequence
  source 1..249: mol_type = other DNA
atgaaggccctgtgcctgctgctgctgcccgtgctgggcctgctggtgagcagcaagaccctgtgcagcatggaggaggccatcaacgagagaatccaggaggtggccggcagcctgagcttcgccgtgaccggctgcacctgcggcagcgcctgcggcagctgggacgtgagagccgagaccacctgccactgccagtgcgccggcatggactggaccggcgccagatgctgcagagtgcagccctag

SEQ ID NO: 96802 - DNA, 954 bp, synthetic construct
  misc_feature 1..954: note = Description of Artificial Sequence: Synthetic coding sequence
  source 1..954: mol_type = other DNA
atgaagagactgagcctggtgaccaccaacagactgagcccccacggcaacttcctgcccctgtgcaccttccccctggccgtggacatggccgccctgttccaggaggccagcagctgccccgtgtgcagcgactacctggagaagcccatgagcctggagtgcggctgcgccgtgtgcttcaagtgcatcaacagcctgcagaaggagccccacggcgaggacctgctgtgctgctgctgcagcatggtgagccagaagaacaagatcagacccagctggcagctggagagactggccagccacatcaaggagctggagcccaagctgaagaagatcctgcagatgaaccccagaatgagaaagttccaggtggacatgaccctggacgccgacaccgccaacaacttcctgctgatcagcgacgacctgagaagcgtgagaagcggctgcatcacccagaacagacaggacctggccgagagattcgacgtgagcatctgcatcctgggcagccccagattcacctgcggcagacactactgggaggtggacgtgggcaccagcaccgagtgggacctgggcgtgtgcagagagagcgtgcacagaaagggcagaatccacctgaccaccgagagaggcttctggaccgtgagcctgagagacggcagcagactgagcgccagcaccgtgcccctgaccttcctgttcgtggacagaaagctgcagagagtgggcatcttcctggacatgggcatgcagaacgtgagcttcttcgacgccgagggcggcagccacgtgtacaccttcagaagcgtgagcgccgaggagcccctgcacctgttcttcgccccccccagcccccccaacggcgacaagagcgtgctgagcatctgccccgtgatcaaccccggcaccaccgacgcccccgtgcaccccggcgaggccaagtag

SEQ ID NO: 96803 - DNA, 954 bp, synthetic construct
  misc_feature 1..954: note = Description of Artificial Sequence: Synthetic coding sequence
  source 1..954: mol_type = other DNA
atgaagagactgagcctggtgaccaccaacagactgagcccccacggcaacttcttcaccctgtgcaccttccccctggccgtggacatggccgccctgttccaggaggccagcagctgccccgtgtgcagcgactacctggagaagcccatgagcctggagtgcggctgcgccgtgtgcctgaagtgcatcaacagcctgcagaaggagccccacggcgaggacctgctgtgctgctgcagcagcatggtgagcagaaagaacaagatcagaagaaacagacagctggagagactggccagccacatcaaggagctggagcccaagctgaagaagatcctgcagatgaaccccagaatgagaaagttccaggtggacatgaccctggacgccaacaccgccaacaacttcctgctgatcagcgacgacctgagaagcgtgagaagcggcagaatcagacagaacagacaggacctggccgagagattcgacgtgagcgtgtgcatcctgggcagccccagattcacctgcggcagacactgctgggaggtggacgtgggcaccagcaccgagtgggacctgggcgtgtgcagagagagcgtgcacagaaagggcagaatccagctgaccaccgagctgggcttctggaccgtgagcctgagagacggcggcagactgagcgccaccaccgtgcccctgaccttcctgttcgtggacagaaagctgcagagagtgggcatcttcctggacatgggcatgcagaacgtgagcttcttcgacgccgagagcggcagccacgtgtacaccttcagaagcgtgagcgccgaggagcccctgagacccttcctggcccccagcgtgccccccaacggcgaccagggcgtgctgagcatctgccccctgatgaacagcggcaccaccgacgcccccgtgagacccggcgaggccaagtag

SEQ ID NO: 96804 - DNA, 867 bp, synthetic construct
  misc_feature 1..867: note = Description of Artificial Sequence: Synthetic coding sequence
  source 1..867: mol_type = other DNA
atggccgccctgttccaggaggccagcagctgccccgtgtgcagcgactacctggagaagcccatgagcctggagtgcggctgcgccgtgtgcctgaagtgcatcaacagcctgcagaaggagccccacggcgaggacctgctgtgctgctgcagcagcatggtgagcagaaagaacaagatcagaagaaacagacagctggagagactggccagccacatcaaggagctggagcccaagctgaagaagatcctgcagatgaaccccagaatgagaaagttccaggtggacatgaccctggacgccaacaccgccaacaacttcctgctgatcagcgacgacctgagaagcgtgagaagcggcagaatcagacagaacagacaggacctggccgagagattcgacgtgagcgtgtgcatcctgggcagccccagattcacctgcggcagacactgctgggaggtggacgtgggcaccagcaccgagtgggacctgggcgtgtgcagagagagcgtgcacagaaagggcagaatccagctgaccaccgagctgggcttctggaccgtgagcctgagagacggcggcagactgagcgccaccaccgtgcccctgaccttcctgttcgtggacagaaagctgcagagagtgggcatcttcctggacatgggcatgcagaacgtgagcttcttcgacgccgagagcggcagccacgtgtacaccttcagaagcgtgagcgccgaggagcccctgagacccttcctggcccccagcgtgccccccaacggcgaccagggcgtgctgagcatctgccccctgatgaacagcggcaccaccgacgcccccgtgagacccggcgaggccaagtag

SEQ ID NO: 96805 - DNA, 867 bp, synthetic construct; identical to SEQ ID NO: 96804
  misc_feature 1..867: note = Description of Artificial Sequence: Synthetic coding sequence
  source 1..867: mol_type = other DNA

SEQ ID NO: 96806 - DNA, 1137 bp, synthetic construct
  misc_feature 1..1137: note = Description of Artificial Sequence: Synthetic coding sequence
  source 1..1137: mol_type = other DNA
atggaggtggccgagctgggcttccccgagaccgccgtgagccagagcagaatctgcctgtgcgccgtgctgtgcggccactgggacttcgccgacatgatggtgatcagaagcctgagcctgatcagactggagggcgtggagggcagagaccccgtgggcggcggcaacctgaccaacaagagacccagctgcgcccccagcccccaggacctgagcgcccagtggaagcagctggaggacagaggcgccagcagcagaagagtggacatggccgccctgttccaggaggccagcagctgccccgtgtgcagcgactacctggagaagcccatgagcctggagtgcggctgcgccgtgtgcctgaagtgcatcaacagcctgcagaaggagccccacggcgaggacctgctgtgctgctgcagcagcatggtgagcagaaagaacaagatcagaagaaacagacagctggagagactggccagccacatcaaggagctggagcccaagctgaagaagatcctgcagatgaaccccagaatgagaaagttccaggtggacatgaccctggacgccaacaccgccaacaacttcctgctgatcagcgacgacctgagaagcgtgagaagcggcagaatcagacagaacagacaggacctggccgagagattcgacgtgagcgtgtgcatcctgggcagccccagattcacctgcggcagacactgctgggaggtggacgtgggcaccagcaccgagtgggacctgggcgtgtgcagagagagcgtgcacagaaagggcagaatccagctgaccaccgagctgggcttctggaccgtgagcctgagagacggcggcagactgagcgccaccaccgtgcccctgaccttcctgttcgtggacagaaagctgcagagagtgggcatcttcctggacatgggcatgcagaacgtgagcttcttcgacgccgagagcggcagccacgtgtacaccttcagaagcgtgagcgccgaggagcccctgagacccttcctggcccccagcgtgccccccaacggcgaccagggcgtgctgagcatctgccccctgatgaacagcggcaccaccgacgcccccgtgagacccggcgaggccaagtag

SEQ ID NO: 96807 - DNA, 954 bp, synthetic construct
  misc_feature 1..954: note = Description of Artificial Sequence: Synthetic coding sequence
  source 1..954: mol_type = other DNA
atgaagagactgagcctggtgaccaccaacagactgagcccccagggcaacttcctgcccctgtgcaccttccccctggccgtggacatggccgccctgttccaggaggccagcagctgccccgtgtgcagcgactacctggagaagcccatgagcctggagtgcggctgcaccgtgtgcctgaagtgcatcaacagcctgcagaaggagccccacggcgaggacctgctgtgctgctgctgcagcatggtgagccagagaaacaagatcagacccaacagacagctggagagactggtgagccacatcaaggagctggagcccaagctgaagaagatcctgcagatgaaccccagaatgagaaagttccaggtggacatgaccctggacgccgacaccgccaacaacttcctgctgatcagcgacgacctgagaagcgtgagaagcggcctgatcacccagaacagacaggacctggccgagagattcgacgtgagcgtgtgcatcctgggcagccccagattcacctgcggcagacactactgggaggtggacgtgggcaccagcaccgagtgggacctgggcgtgtgcagagagagcgtgcactgcaagggcaagatccagctgaccaccgagctgggcttctggaccgtgagcctgagagacggcagcagactgagcgccagcaccgtgcccctgaccttcctgctggtggacagaaagctgcagagagtgggcatcttcctggacatgggcatgcagaacgtgagcttcttcgacgccgagagcggcagccacgtgtacaccttcagaagcgtgagcgccgaggagcccctgagacccttcctggcccccagcatcccccccaacggcgaccagggcgtgctgagcatctgccccctgatgaacagcggcaccaccgacgcccccgtgagacccggcgaggccaagtag

SEQ ID NO: 96808 - DNA, 867 bp, synthetic construct
  misc_feature 1..867: note = Description of Artificial Sequence: Synthetic coding sequence
  source 1..867: mol_type = other DNA
atggccgccctgttccaggaggccagcagctgccccgtgtgcagcgactacctggagaagcccatgagcctggagtgcggctgcaccgtgtgcctgaagtgcatcaacagcctgcagaaggagccccacggcgaggacctgctgtgctgctgctgcagcatggtgagccagagaaacaagatcagacccaacagacagctggagagactggtgagccacatcaaggagctggagcccaagctgaagaagatcctgcagatgaaccccagaatgagaaagttccaggtggacatgaccctggacgccgacaccgccaacaacttcctgctgatcagcgacgacctgagaagcgtgagaagcggcctgatcacccagaacagacaggacctggccgagagattcgacgtgagcgtgtgcatcctgggcagccccagattcacctgcggcagacactactgggaggtggacgtgggcaccagcaccgagtgggacctgggcgtgtgcagagagagcgtgcactgcaagggcaagatccagctgaccaccgagctgggcttctggaccgtgagcctgagagacggcagcagactgagcgccagcaccgtgcccctgaccttcctgctggtggacagaaagctgcagagagtgggcatcttcctggacatgggcatgcagaacgtgagcttcttcgacgccgagagcggcagccacgtgtacaccttcagaagcgtgagcgccgaggagcccctgagacccttcctggcccccagcatcccccccaacggcgaccagggcgtgctgagcatctgccccctgatgaacagcggcaccaccgacgcccccgtgagacccggcgaggccaagtag

SEQ ID NO: 96809 - DNA, 867 bp, synthetic construct; identical to SEQ ID NO: 96808
  misc_feature 1..867: note = Description of Artificial Sequence: Synthetic coding sequence
  source 1..867: mol_type = other DNA

SEQ ID NO: 96810 - DNA, 3219 bp, synthetic construct
  misc_feature 1..3219: note = Description of Artificial Sequence: Synthetic coding sequence
  source 1..3219: mol_type = other DNA
atggccaaggccaccagcggcgccgccggcctgagactgctgctgctgctgctgctgcccctgctgggcaaggtggccctgggcctgtacttcagcagagacgcctactgggagaagctgtacgtggaccaggccgccggcacccccctgctgtacgtgcacgccctgagagacgcccccgaggaggtgcccagcttcagactgggccagcacctgtacggcacctacagaaccagactgcacgagaacaactggatctgcatccaggaggacaccggcctgctgtacctgaacagaagcctggaccacagcagctgggagaagctgagcgtgagaaacagaggcttccccctgctgaccgtgtacctgaaggtgttcctgagccccaccagcctgagagagggcgagtgccagtggcccggctgcgccagagtgtacttcagcttcttcaacaccagcttccccgcctgcagcagcctgaagcccagagagctgtgcttccccgagaccagacccagcttcagaatcagagagaacagaccccccggcaccttccaccagttcagactgctgcccgtgcagttcctgtgccccaacatcagcgtggcctacagactgctggagggcgagggcctgcccttcagatgcgcccccgacagcctggaggtgagcaccagatgggccctggacagagagcagagagagaagtacgagctggtggccgtgtgcaccgtgcacgccggcgccagagaggaggtggtgatggtgcccttccccgtgaccgtgtacgacgaggacgacagcgcccccaccttccccgccggcgtggacaccgccagcgccgtggtggagttcaagagaaaggaggacaccgtggtggccaccctgagagtgttcgacgccgacgtggtgcccgccagcggcgagctggtgagaagatacaccagcaccctgctgcccggcgacacctgggcccagcagaccttcagagtggagcactggcccaacgagaccagcgtgcaggccaacggcagcttcgtgagagccaccgtgcacgactacagactggtgctgaacagaaacctgagcatcagcgagaacagaaccatgcagctggccgtgctggtgaacgacagcgacttccagggccccggcgccggcgtgctgctgctgcacttcaacgtgagcgtgctgcccgtgagcctgcacctgcccagcacctacagcctgagcgtgagcagaagagccagaagattcgcccagatcggcaaggtgtgcgtggagaactgccaggccttcagcggcatcaacgtgcagtacaagctgcacagcagcggcgccaactgcagcaccctgggcgtggtgaccagcgccgaggacaccagcggcatcctgttcgtgaacgacaccaaggccctgagaagacccaagtgcgccgagctgcactacatggtggtggccaccgaccagcagaccagcagacaggcccaggcccagctgctggtgaccgtggagggcagctacgtggccgaggaggccggctgccccctgagctgcgccgtgagcaagagaagactggagtgcgaggagtgcggcggcctgggcagccccaccggcagatgcgagtggagacagggcgacggcaagggcatcaccagaaacttcagcacctgcagccccagcaccaagacctgccccgacggccactgcgacgtggtggagacccaggacatcaacatctgcccccaggactgcctgagaggcagcatcgtgggcggccacgagcccggcgagcccagaggcatcaaggccggctacggcacctgcaactgcttccccgaggaggagaagtgcttctgcgagcccgaggacatccaggaccccctgtgcgacgagctgtgcagaaccgtgatcgccgccgccgtgctgttcagcttcatcgtgagcgtgctgctgagcgccttctgcatccactgctaccacaagttcgcccacaagccccccatcagcagcgccgagatgaccttcagaagacccgcccaggccttccccgtgagctacagcagcagcggcgccagaagacccagcctggacagcatggagaaccaggtgagcgtggacgccttcaagatcctggaggaccccaagtgggagttccccagaaagaacctggtgctgggcaagaccctgggcgagggcgagttcggcaaggtggtgaaggccaccgccttccacctgaagggcagagccggctacaccaccgtggccgtgaagatgctgaaggagaacgccagccccagcgagctgagagacctgctgagcgagttcaacgtgctgaagcaggtgaaccacccccacgtgatcaagctgtacggcgcctgcagccaggacggccccctgctgctgatcgtggagtacgccaagtacggcagcctgagaggcttcctgagagagagcagaaaggtgggccccggctacctgggcagcggcggcagcagaaacagcagcagcctggaccaccccgacgagagagccctgaccatgggcgacctgatcagcttcgcctggcagatcagccagggcatgcagtacctggccgagatgaagctggtgcacagagacctggccgccagaaacatcctggtggccgagggcagaaagatgaagatcagcgacttcggcctgagcagagacgtgtacgaggaggacagctacgtgaagagaagccagggcagaatccccgtgaagtggatggccatcgagagcctgttcgaccacatctacaccacccagagcgacgtgtggagcttcggcgtgctgctgtgggagatcgtgaccctgggcggcaacccctaccccggcatcccccccgagagactgttcaacctgctgaagaccggccacagaatggagagacccgacaactgcagcgaggagatgtacagactgatgctgcagtgctggaagcaggagcccgacaagagacccgtgttcgccgacatcagcaaggacctggagaagatgatggtgaagagaagagactacctggacctggccgccagcacccccagcgacagcctgatctacgacgacggcctgagcgaggaggagacccccctggtggactgcaacaacgcccccctgcccagagccctgcccagcacctggatcgagaacaagctgtacggcagaatcagccacgccttcaccagattctag

SEQ ID NO: 96811 - DNA, 3345 bp, synthetic construct
  misc_feature 1..3345: note = Description of Artificial Sequence: Synthetic coding sequence
  source 1..3345: mol_type = other DNA
atggccaaggccaccagcggcgccgccggcctgagactgctgctgctgctgctgctgcccctgctgggcaaggtggccctgggcctgtacttcagcagagacgcctactgggagaagctgtacgtggaccaggccgccggcacccccctgctgtacgtgcacgccctgagagacgcccccgaggaggtgcccagcttcagactgggccagcacctgtacggcacctacagaaccagactgcacgagaacaactggatctgcatccaggaggacaccggcctgctgtacctgaacagaagcctggaccacagcagctgggagaagctgagcgtgagaaacagaggcttccccctgctgaccgtgtacctgaaggtgttcctgagccccaccagcctgagagagggcgagtgccagtggcccggctgcgccagagtgtacttcagcttcttcaacaccagcttccccgcctgcagcagcctgaagcccagagagctgtgcttccccgagaccagacccagcttcagaatcagagagaacagaccccccggcaccttccaccagttcagactgctgcccgtgcagttcctgtgccccaacatcagcgtggcctacagactgctggagggcgagggcctgcccttcagatgcgcccccgacagcctggaggtgagcaccagatgggccctggacagagagcagagagagaagtacgagctggtggccgtgtgcaccgtgcacgccggcgccagagaggaggtggtgatggtgcccttccccgtgaccgtgtacgacgaggacgacagcgcccccaccttccccgccggcgtggacaccgccagcgccgtggtggagttcaagagaaaggaggacaccgtggtggccaccctgagagtgttcgacgccgacgtggtgcccgccagcggcgagctggtgagaagatacaccagcaccctgctgcccggcgacacctgggcccagcagaccttcagagtggagcactggcccaacgagaccagcgtgcaggccaacggcagcttcgtgagagccaccgtgcacgactacagactggtgctgaacagaaacctgagcatcagcgagaacagaaccatgcagctggccgtgctggtgaacgacagcgacttccagggccccggcgccggcgtgctgctgctgcacttcaacgtgagcgtgctgcccgtgagcctgcacctgcccagcacctacagcctgagcgtgagcagaagagccagaagattcgcccagatcggcaaggtgtgcgtggagaactgccaggccttcagcggcatcaacgtgcagtacaagctgcacagcagcggcgccaactgcagcaccctgggcgtggtgaccagcgccgaggacaccagcggcatcctgttcgtgaacgacaccaaggccctgagaagacccaagtgcgccgagctgcactacatggtggtggccaccgaccagcagaccagcagacaggcccaggcccagctgctggtgaccgtggagggcagctacgtggccgaggaggccggctgccccctgagctgcgccgtgagcaagagaagactggagtgcgaggagtgcggcggcctgggcagccccaccggcagatgcgagtggagacagggcgacggcaagggcatcaccagaaacttcagcacctgcagccccagcaccaagacctgccccgacggccactgcgacgtggtggagacccaggacatcaacatctgcccccaggactgcctgagaggcagcatcgtgggcggccacgagcccggcgagcccagaggcatcaaggccggctacggcacctgcaactgcttccccgaggaggagaagtgcttctgcgagcccgaggacatccaggaccccctgtgcgacgagctgtgcagaaccgtgatcgccgccgccgtgctgttcagcttcatcgtgagcgtgctgctgagcgccttctgcatccactgctaccacaagttcgcccacaagccccccatcagcagcgccgagatgaccttcagaagacccgcccaggccttccccgtgagctacagcagcagcggcgccagaagacccagcctggacagcatggagaaccaggtgagcgtggacgccttcaagatcctggaggaccccaagtgggagttccccagaaagaacctggtgctgggcaagaccctgggcgagggcgagttcggcaaggtggtgaaggccaccgccttccacctgaagggcagagccggctacaccaccgtggccgtgaagatgctgaaggagaacgccagccccagcgagctgagagacctgctgagcgagttcaacgtgctgaagcaggtgaaccacccccacgtgatcaagctgtacggcgcctgcagccaggacggccccctgctgctgatcgtggagtacgccaagtacggcagcctgagaggcttcctgagagagagcagaaaggtgggccccggctacctgggcagcggcggcagcagaaacagcagcagcctggaccaccccgacgagagagccctgaccatgggcgacctgatcagcttcgcctggcagatcagccagggcatgcagtacctggccgagatgaagctggtgcacagagacctggccgccagaaacatcctggtggccgagggcagaaagatgaagatcagcgacttcggcctgagcagagacgtgtacgaggaggacagctacgtgaagagaagccagggcagaatccccgtgaagtggatggccatcgagagcctgttcgaccacatctacaccacccagagcgacgtgtggagcttcggcgtgctgctgtgggagatcgtgaccctgggcggcaacccctaccccggcatcccccccgagagactgttcaacctgctgaagaccggccacagaatggagagacccgacaactgcagcgaggagatgtacagactgatgctgcagtgctggaagcaggagcccgacaagagacccgtgttcgccgacatcagcaaggacctggagaagatgatggtgaagagaagagactacctggacctggccgccagcacccccagcgacagcctgatctacgacgacggcctgagcgaggaggagacccccctggtggactgcaacaacgcccccctgcccagagccctgcccagcacctggatcgagaacaagctgtacggcatgagcgaccccaactggcccggcgagagccccgtgcccctgaccagagccgacggcaccaacaccggcttccccagataccccaacgacagcgtgtacgccaactggatgctgagccccagcgccgccaagctgatggacaccttcgacagctag

SEQ ID NO: 96812 - DNA, 1377 bp, synthetic construct
  misc_feature 1..1377: note = Description of Artificial Sequence: Synthetic coding sequence
  source 1..1377: mol_type = other DNA
atggccaaggccaccagcggcgccgccggcctgagactgctgctgctgctgctgctgcccctgctgggcaaggtggccctgggcctgtacttcagcagagacgcctactgggagaagctgtacgtggaccaggccgccggcacccccctgctgtacgtgcacgccctgagagacgcccccgaggaggtgcccagcttcagactgggccagcacctgtacggcacctacagaaccagactgcacgagaacaactggatctgcatccaggaggacaccggcctgctgtacctgaacagaagcctggaccacagcagctgggagaagctgagcgtgagaaacagaggcttccccctgctgaccgtgtacctgaaggtgttcctgagccccaccagcctgagagagggcgagtgccagtggcccggctgcgccagagtgtacttcagcttcttcaacaccagcttccccgcctgcagcagcctgaagcccagagagctgtgcttccccgagaccagacccagcttcagaatcagagagaacagaccccccggcaccttccaccagttcagactgctgcccgtgcagttcctgtgccccaacatcagcgtggcctacagactgctggagggcgagggcctgcccttcagatgcgcccccgacagcctggaggtgagcaccagatgggccctggacagagagcagagagagaagtacgagctggtggccgtgtgcaccgtgcacgccggcgccagagaggaggtggtgatggtgcccttccccgtgaccgtgtacgacgaggacgacagcgcccccaccttccccgccggcgtggacaccgccagcgccgtggtggagttcaagagaaaggaggacaccgtggtggccaccctgagagtgttcgacgccgacgtggtgcccgccagcggcgagctggtgagaagatacaccagcaccctgctgcccggcgacacctgggcccagcagaccttcagagtggagcactggcccaacgagaccagcgtgcaggccaacggcagcttcgtgagagccaccgtgcacgactacagactggtgctgaacagaaacctgagcatcagcgagaacagaaccatgcagctggccgtgctggtgaacgacagcgacttccagggccccggcgccggcgtgctgctgctgcacttcaacgtgagcgtgctgcccgtgagcctgcacctgcccagcacctacagcctgagcgtgagcagaagagccagaagattcgcccagatcggcaaggtgtgcgtggagaactgcctggccgacctgaccggcgacgccgtgagcggcagagacgaggccagaagcagcggcctgggcagccagaagcaccccggcagctag

SEQ ID NO: 96813 - DNA, 786 bp, synthetic construct
  misc_feature 1..786: note = Description of Artificial Sequence: Synthetic coding sequence
  source 1..786: mol_type = other DNA
atggacgaggccctggagacccagctgaagaccagcagaggcagattcagcgccaccgagagcctgcccaccctggagctgctgagccaggtggacatggactgcagagtgcacatgagacccatcggcctgacctgggtgctgcagctgaccctggcctggatcctgctggaggcctgcggcggcagcagacccctgcaggccagaagccagcagcaccacggcctggccgccgacctgggcaagggcaagctgcacctggccggcccctgctgccccagcgagatggacaccaccgagaccagcggccccggcaaccaccccgagagatgcggcgtgcccagccccgagtgcgagagcttcctggagcacctgcagagagccctgagaagcagattcagactgagactgctgggcgtgagacaggcccagcccctgtgcgaggagctgtgccaggcctggttcgccaactgcgaggacgacatcacctgcggccccacctggctgcccctgagcgagaagagaggctgcgagcccagctgcctgacctacggccagaccttcgccgacggcaccgacctgtgcagaagcgccctgggccacgccctgcccgtggccgcccccggcgccagacactgcttcaacatcagcatcagcgccgtgcccagacccagacccggcagaagaggcagagaggcccccagcagaagaagcagaagccccagaaccagcatcctggacgccgccggcagcggcagcggcagcggcagcggcagcggcccctag

SEQ ID NO: 96814 - DNA, 675 bp, synthetic construct
  misc_feature 1..675: note = Description of Artificial Sequence: Synthetic coding sequence
  source 1..675: mol_type = other DNA
atgggctggcagctgatctgggccaaggccagctgcacctggcaggacctggtggtgccccagagatggacccagcagagacacagagccctggagaccatccagaacgccgtggagtgcagagccctgaacgccaaccccagctggaacaccagcaacgtgcccttcgccgtggccagcgcctgcggctactggggctacgccagacacagcagaagcgccagaagcagcgccagacccggcagccccaccgccaagatgatcagccccgccgccagactgggcagccacagccagaagaagggcgccgtgagccccgccgccctgcccatggacagactggagtgcagcggcgccatcagcgccagatgcaacctgagactgagaggcagcagcgacagccccgccgccaccagcagaatcgccggcatcagcggcgcctgccaccacgcccagctgatcttcgtgttcctggtggagagcgccttccaccacgtgggccaggccggcttcgagctgctgaccagcggcgacccccccaccagcgccagccagagcgtgggcatcaccggcgtgagccacagacccagacccccccccagcagcttcctgccctgcctggaccccagagacagaatcggcaccccccaggtgcccgcccccaccctgccctag

SEQ ID NO: 96815 - DNA, 690 bp, synthetic construct
  misc_feature 1..690: note = Description of Artificial Sequence: Synthetic coding sequence
  source 1..690: mol_type = other DNA
atggactgcagagtgcacatgagacccatcggcctgacctgggtgctgcagctgaccctggcctggatcctgctggaggcctgcggcggcagcagacccctgcaggccagaagccagcagcaccacggcctggccgccgacctgggcaagggcaagctgcacctggccggcccctgctgccccagcgagatggacaccaccgagaccagcggccccggcaaccaccccgagagatgcggcgtgcccagccccgagtgcgagagcttcctggagcacctgcagagagccctgagaagcagattcagactgagactgctgggcgtgagacaggcccagcccctgtgcgaggagctgtgccaggcctggttcgccaactgcgaggacgacatcacctgcggccccacctggctgcccctgagcgagaagagaggctgcgagcccagctgcctgacctacggccagaccttcgccgacggcaccgacctgtgcagaagcgccctgggccacgccctgcccgtggccgcccccggcgccagacactgcttcaacatcagcatcagcgccgtgcccagacccagacccggcagaagaggcagagaggcccccagcagaagaagcagaagccccagaaccagcatcctggacgccgccggcagcggcagcggcagcggcagcggcagcggcccctag

SEQ ID NO: 96816 - DNA, 618 bp, synthetic construct
  misc_feature 1..618: note = Description of Artificial Sequence: Synthetic coding sequence
  source 1..618: mol_type = other DNA
atggacgaggccctggagacccagctgaagaccagcagaggcagattcagcgccaccgagagcctgcccaccctggagctgctgagccaggtggacatggactgcagagtgcacatgagacccatcggcctgacctgggtgctgcagctgaccctggcctggatcctgctggaggcctgcggcggcagcagacccctgcaggccagaagccagcagcaccacggcctggccgccgacctgggcaagggcaagctgcacctggccggcccctgctgccccagcgagatggacaccaccgagaccagcggccccggcaaccaccccgagagatgcggcgtgcccagccccgagtgcgagagcttcctggagcacctgcagagagccctgagaagcagattcagactgagactgctgggcgtgagacaggcccagcccctgtgcgaggagctgtgccaggcctggttcgccaactgcgaggacgacatcacctgcggccccacctggctgcccctgagcgagaagagaggctgcgagcccagctgcctgacctacggccaggccggcgtgcagtggagagacctgagcagcatgcagccccccccccccggcttcaagtag

SEQ ID NO: 96817 - DNA, 720 bp, synthetic construct
  misc_feature 1..720: note = Description of Artificial Sequence: Synthetic coding sequence
  source 1..720: mol_type = other DNA
atggccagacagctgctgagccaggtggacatggactgcagagtgcacatgagacccatcggcctgacctgggtgctgcagctgaccctggcctggatcctgctggaggcctgcggcggcagcagacccctgcaggccagaagccagcagcaccacggcctggccgccgacctgggcaagggcaagctgcacctggccggcccctgctgccccagcgagatggacaccaccgagaccagcggccccggcaaccaccccgagagatgcggcgtgcccagccccgagtgcgagagcttcctggagcacctgcagagagccctgagaagcagattcagactgagactgctgggcgtgagacaggcccagcccctgtgcgaggagctgtgccaggcctggttcgccaactgcgaggacgacatcacctgcggccccacctggctgcccctgagcgagaagagaggctgcgagcccagctgcctgacctacggccagaccttcgccgacggcaccgacctgtgcagaagcgccctgggccacgccctgcccgtggccgcccccggcgccagacactgcttcaacatcagcatcagcgccgtgcccagacccagacccggcagaagaggcagagaggcccccagcagaagaagcagaagccccagaaccagcatcctggacgccgccggcagcggcagcggcagcggcagcggcagcggcccctag

SEQ ID NO: 96818 - DNA, 996 bp, synthetic construct
  misc_feature 1..996: note = Description of Artificial Sequence: Synthetic coding sequence
  source 1..996: mol_type = other DNA
atggccagaggcggcagaggcagaagactgggcctggccctgggcctgctgctggccctggtgctggcccccagagtgctgagagccaagcccaccgtgagaaaggagagagtggtgagacccgacagcgagctgggcgagagaccccccgaggacaaccagagcttccagtacgaccacgaggccttcctgggcaaggaggacagcaagaccttcgaccagctgacccccgacgagagcaaggagagactgggcaagatcgtggacagaatcgacaacgacggcgacggcttcgtgaccaccgaggagctgaagacctggatcaagagagtgcagaagagatacatcttcgacaacgtggccaaggtgtggaaggactacgacagagacaaggacgacaagatcagctgggaggagtacaagcaggccacctacggctactacctgggcaaccccgccgagttccacgacagcagcgaccaccacaccttcaagaagatgctgcccagagacgagagaagattcaaggccgccgacctgaacggcgacctgaccgccaccagagaggagttcaccgccttcctgcaccccgaggagttcgagcacatgaaggagatcgtggtgctggagaccctggaggacatcgacaagaacggcgacggcttcgtggaccaggacgagtacatcgccgacatgttcagccacgaggagaacggccccgagcccgactgggtgctgagcgagagagagcagttcaacgagttcagagacctgaacaaggacggcaagctggacaaggacgagatcagacactggatcctgccccaggactacgaccacgcccaggccgaggccagacacctggtgtacgagagcgacaagaacaaggacgagaagctgaccaaggaggagatcctggagaactggaacatgttcgtgggcagccaggccaccaactacggcgaggacctgaccaagaaccacgacgagctgtag

SEQ ID NO: 96819 - DNA, 87 bp, synthetic construct
  misc_feature 1..87: note = Description of Artificial Sequence: Synthetic coding sequence
  source 1..87: mol_type = other DNA
gagatcctggagaactggaacatgttcgtgggcagccaggccaccaactacggcgaggacctgaccaagaaccacgacgagctgtag

SEQ ID NO: 96820 - DNA, 954 bp, synthetic construct
  misc_feature 1..954: note = Description of Artificial Sequence: Synthetic coding sequence
  source 1..954: mol_type = other DNA
atgagactgggccccagaaccgccgccctgggcctgctgctgctgtgcgccgccgccgccggcgccggcaaggccgaggagctgcactaccccctgggcgagagaagaagcgactacgacagagaggccctgctgggcgtgcaggaggacgtggacgagtacgtgaagctgggccacgaggagcagcagaagagactgcaggccatcatcaagaagatcgacctggacagcgacggcttcctgaccgagagcgagctgagcagctggatccagatgagcttcaagcactacgccatgcaggaggccaagcagcagttcgtggagtacgacaagaacagcgacgacaccgtgacctgggacgagtacaacatccagatgtacgacagagtgatcgacttcgacgagaacaccgccctggacgacgccgaggaggagagcttcagaaagctgcacctgaaggacaagaagagattcgagaaggccaaccaggacagcggccccggcctgagcctggaggagttcatcgccttcgagcaccccgaggaggtggactacatgaccgagttcgtgatccaggaggccctggaggagcacgacaagaacggcgacggcttcgtgagcctggaggagttcctgggcgactacagatgggaccccaccgccaacgaggaccccgagtggatcctggtggagaaggacagattcgtgaacgactacgacaaggacaacgacggcagactggacccccaggagctgctgccctgggtggtgcccaacaaccagggcatcgcccaggaggaggccctgcacctgatcgacgagatggacctgaacggcgacaagaagctgagcgaggaggagatcctggagaaccccgacctgttcctgaccagcgaggccaccgactacggcagacagctgcacgacgactacttctaccacgacgagctgtag

SEQ ID NO: 96821 - DNA, 2331 bp, synthetic construct
  misc_feature 1..2331: note = Description of Artificial Sequence: Synthetic coding sequence
  source 1..2331: mol_type = other DNA
atggccgcccccggcgacccccaggacgagctgctgcccctggccggccccggcagccagtggctgagacacagaggcgagggcgagaacgaggccgtgacccccaagggcgccacccccgccccccaggccggcgagcccagccccggcctgggcgccagagccagagaggccgccagcagagaggccggcagcggccccgccagacagagccccgtggccatggagaccgccagcaccggcgtggccggcgtgagcagcgccatggaccacaccttcagcaccaccagcaaggacggcgagggcagctgctacaccagcctgatcagcgacatctgctaccccccccaggaggacagcacctacttcaccggcatcctgcagaaggagaacggccacgtgaccatcagcgagagccccgaggagctgggcacccccggccccagcctgcccgacgtgcccggcatcgagagcagaggcctgttcagcagcgacagcggcatcgagatgacccccgccgagagcaccgaggtgaacaagatcctggccgaccccctggaccagatgaaggccgaggcctacaagtacatcgacatcaccagacccgaggaggtgaagcaccaggagcagcaccaccccgagctggaggacaaggacctggacttcaagaacaaggacaccgacatcagcatcaagcccgagggcgtgagagagcccgacaagcccgcccccgtggagggcaagatcatcaaggaccacctgctggaggagagcaccttcgccccctacatcgacgacctgagcgaggagcagagaagagccccccagatcaccacccccgtgaagatcaccctgaccgagatcgagcccagcgtggagaccaccacccaggagaagacccccgagaagcaggacatctgcctgaagcccagccccgacaccgtgcccaccgtgaccgtgagcgagcccgaggacgacagccccggcagcatcaccccccccagcagcggcaccgagcccagcgccgccgagagccagggcaagggcagcatcagcgaggacgagctgatcaccgccatcaaggaggccaagggcctgagctacgagaccgccgagaaccccagacccgtgggccagctggccgacagacccgaggtgaaggccagaagcggcccccccaccatccccagccccctggaccacgaggccagcagcgccgagagcggcgacagcgagatcgagctggtgagcgaggaccccatggccgccgaggacgccctgcccagcggctacgtgagcttcggccacgtgggcggccccccccccagccccgccagccccagcatccagtacagcatcctgagagaggagagagaggccgagctggacagcgagctgatcatcgagagctgcgacgccagcagcgccagcgaggagagccccaagagagagcaggacagcccccccatgaagcccagcgccctggacgccatcagagaggagaccggcgtgagagccgaggagagagcccccagcagaagaggcctggccgagcccggcagcttcctggactaccccagcaccgagccccagcccggccccgagctgccccccggcgacggcgccctggagcccgagacccccatgctgcccagaaagcccgaggaggacagcagcagcaaccagagccccgccgccaccaagggccccggccccctgggccccggcgcccccccccccctgctgttcctgaacaagcagaaggccatcgacctgctgtactggagagacatcaagcagaccggcatcgtgttcggcagcttcctgctgctgctgttcagcctgacccagttcagcgtggtgagcgtggtggcctacctggccctggccgccctgagcgccaccatcagcttcagaatctacaagagcgtgctgcaggccgtgcagaagaccgacgagggccaccccttcaaggcctacctggagctggagatcaccctgagccaggagcagatccagaagtacaccgactgcctgcagttctacgtgaacagcaccctgaaggagctgagaagactgttcctggtgcaggacctggtggacagcctgaagttcgccgtgctgatgtggctgctgacctacgtgggcgccctgttcaacggcctgaccctgctgctgatggccgtggtgagcatgttcaccctgcccgtggtgtacgtgaagcaccaggcccagatcgaccagtacctgggcctggtgagaacccacatcaacgccgtggtggccaagatccaggccaagatccccggcgccaagagacacgccgagtag

SEQ ID NO: 96822 - DNA, 627 bp, synthetic construct
  misc_feature 1..627: note = Description of Artificial Sequence: Synthetic coding sequence
  source 1..627: mol_type = other DNA
atgcaggccaccgccgacagcaccaagatggactgcgtgtggagcaactggaagagccaggccatcgacctgctgtactggagagacatcaagcagaccggcatcgtgttcggcagcttcctgctgctgctgttcagcctgacccagttcagcgtggtgagcgtggtggcctacctggccctggccgccctgagcgccaccatcagcttcagaatctacaagagcgtgctgcaggccgtgcagaagaccgacgagggccaccccttcaaggcctacctggagctggagatcaccctgagccaggagcagatccagaagtacaccgactgcctgcagttctacgtgaacagcaccctgaaggagctgagaagactgttcctggtgcaggacctggtggacagcctgaagttcgccgtgctgatgtggctgctgacctacgtgggcgccctgttcaacggcctgaccctgctgctgatggccgtggtgagcatgttcaccctgcccgtggtgtacgtgaagcaccaggcccagatcgaccagtacctgggcctggtgagaacccacatcaacgccgtggtggccaagatccaggccaagatccccggcgccaagagacacgccgagtag

SEQ ID NO: 96823 - DNA, 1071 bp, synthetic construct
  misc_feature 1..1071: note = Description of Artificial Sequence: Synthetic coding sequence
  source 1..1071: mol_type = other DNA
atggccgccgaggacgccctgcccagcggctacgtgagcttcggccacgtgggcggccccccccccagccccgccagccccagcatccagtacagcatcctgagagaggagagagaggccgagctggacagcgagctgatcatcgagagctgcgacgccagcagcgccagcgaggagagccccaagagagagcaggacagcccccccatgaagcccagcgccctggacgccatcagagaggagaccggcgtgagagccgaggagagagcccccagcagaagaggcctggccgagcccggcagcttcctggactaccccagcaccgagccccagcccggccccgagctgccccccggcgacggcgccctggagcccgagacccccatgctgcccagaaagcccgaggaggacagcagcagcaaccagagccccgccgccaccaagggccccggccccctgggccccggcgcccccccccccctgctgttcctgaacaagcagaaggccatcgacctgctgtactggagagacatcaagcagaccggcatcgtgttcggcagcttcctgctgctgctgttcagcctgacccagttcagcgtggtgagcgtggtggcctacctggccctggccgccctgagcgccaccatcagcttcagaatctacaagagcgtgctgcaggccgtgcagaagaccgacgagggccaccccttcaaggcctacctggagctggagatcaccctgagccaggagcagatccagaagtacaccgactgcctgcagttctacgtgaacagcaccctgaaggagctgagaagactgttcctggtgcaggacctggtggacagcctgaagttcgccgtgctgatgtggctgctgacctacgtgggcgccctgttcaacggcctgaccctgctgctgatggccgtggtgagcatgttcaccctgcccgtggtgtacgtgaagcaccaggcccagatcgaccagtacctgggcctggtgagaacccacatcaacgccgtggtggccaagatccaggccaagatccccggcgccaagagacacgccgagtag

SEQ ID NO: 96824 - DNA, 2109 bp, synthetic construct
  misc_feature 1..2109: note = Description of Artificial Sequence: Synthetic coding sequence
  source 1..2109: mol_type = other DNA
atggagaccgccagcaccggcgtggccggcgtgagcagcgccatggaccacaccttcagcaccaccagcaaggacggcgagggcagctgctacaccagcctgatcagcgacatctgctaccccccccaggaggacagcacctacttcaccggcatcctgcagaaggagaacggccacgtgaccatcagcgagagccccgaggagctgggcacccccggccccagcctgcccgacgtgcccggcatcgagagcagaggcctgttcagcagcgacagcggcatcgagatgacccccgccgagagcaccgaggtgaacaagatcctggccgaccccctggaccagatgaaggccgaggcctacaagtacatcgacatcaccagacccgaggaggtgaagcaccaggagcagcaccaccccgagctggaggacaaggacctggacttcaagaacaaggacaccgacatcagcatcaagcccgagggcgtgagagagcccgacaagcccgcccccgtggagggcaagatcatcaaggaccacctgctggaggagagcaccttcgccccctacatcgacgacctgagcgaggagcagagaagagccccccagatcaccacccccgtgaagatcaccctgaccgagatcgagcccagcgtggagaccaccacccaggagaagacccccgagaagcaggacatctgcctgaagcccagccccgacaccgtgcccaccgtgaccgtgagcgagcccgaggacgacagccccggcagcatcaccccccccagcagcggcaccgagcccagcgccgccgagagccagggcaagggcagcatcagcgaggacgagctgatcaccgccatcaaggaggccaagggcctgagctacgagaccgccgagaaccccagacccgtgggccagctggccgacagacccgaggtgaaggccagaagcggcccccccaccatccccagccccctggaccacgaggccagcagcgccgagagcggcgacagcgagatcgagctggtgagcgaggaccccatggccgccgaggacgccctgcccagcggctacgtgagcttcggccacgtgggcggccccccccccagccccgccagccccagcatccagtacagcatcctgagagaggagagagaggccgagctggacagcgagctgatcatcgagagctgcgacgccagcagcgccagcgaggagagccccaagagagagcaggacagcccccccatgaagcccagcgccctggacgccatcagagaggagaccggcgtgagagccgaggagagagcccccagcagaagaggcctggccgagcccggcagcttcctggactaccccagcaccgagccccagcccggccccgagctgccccccggcgacggcgccctggagcccgagacccccatgctgcccagaaagcccgaggaggacagcagcagcaaccagagccccgccgccaccaagggccccggccccctgggccccggcgcccccccccccctgctgttcctgaacaagcagaaggccatcgacctgctgtactggagagacatcaagcagaccggcatcgtgttcggcagcttcctgctgctgctgttcagcctgacccagttcagcgtggtgagcgtggtggcctacctggccctggccgccctgagcgccaccatcagcttcagaatctacaagagcgtgctgcaggccgtgcagaagaccgacgagggccaccccttcaaggcctacctggagctggagatcaccctgagccaggagcagatccagaagtacaccgactgcctgcagttctacgtgaacagcaccctgaaggagctgagaagactgttcctggtgcaggacctggtggacagcctgaagttcgccgtgctgatgtggctgctgacctacgtgggcgccctgttcaacggcctgaccctgctgctgatggccgtggtgagcatgttcaccctgcccgtggtgtacgtgaagcaccaggcccagatcgaccagtacctgggcctggtgagaacccacatcaacgccgtggtggccaagatccaggccaagatccccggcgccaagagacacgccgagtag

SEQ ID NO: 96825 - DNA, 1638 bp, synthetic construct
  misc_feature 1..1638: note = Description of Artificial Sequence: Synthetic coding sequence
  source 1..1638: mol_type = other DNA
atgggccaggtgctgcccgtgttcgcccactgcaaggaggcccccagcaccgccagcagcacccccgacagcaccgagggcggcaacgacgacagcgacttcagagagctgcacaccgccagagagttcagcgaggaggacgaggaggagaccaccagccaggactggggcacccccagagagctgaccttcagctacatcgccttcgacggcgtggtgggcagcggcggcagaagagacagcaccgccagaagacccagaccccagggcagaagcgtgagcgagcccagagaccagcacccccagcccagcctgggcgacagcctggagagcatccccagcctgagccagagccccgagcccggcagaagaggcgaccccgacaccgccccccccagcgagagacccctggaggacctgagactgagactggaccacctgggctgggtggccagaggcaccggcagcggcgaggacagcagcaccagcagcagcacccccctggaggacgaggagccccaggagcccaacagactggagaccggcgaggccggcgaggagctggacctgagactgagactggcccagcccagcagccccgaggtgctgaccccccagctgagccccggcagcggcaccccccaggccggcacccccagccccagcagaagcagagacagcaacagcggccccgaggagcccctgctggaggaggaggagaagcagtggggccccctggagagagagcccgtgagaggccagtgcctggacagcaccgaccagctggagttcaccgtggagcccagactgctgggcaccgccatggagtggctgaagaccagcctgctgctggccgtgtacaagaccgtgcccatcctggagctgagcccccccctgtggaccgccatcggctgggtgcagagaggccccaccccccccacccccgtgctgagagtgctgctgaagtgggccaagagccccagaagcagcggcgtgcccagcctgagcctgggcgccgacatgggcagcaaggtggccgacctgctgtactggaaggacaccagaaccagcggcgtggtgttcaccggcctgatggtgagcctgctgtgcctgctgcacttcagcatcgtgagcgtggccgcccacctggccctgctgctgctgtgcggcaccatcagcctgagagtgtacagaaaggtgctgcaggccgtgcacagaggcgacggcgccaaccccttccaggcctacctggacgtggacctgaccctgaccagagagcagaccgagagactgagccaccagatcaccagcagagtggtgagcgccgccacccagctgagacacttcttcctggtggaggacctggtggacagcctgaagctggccctgctgttctacatcctgaccttcgtgggcgccatcttcaacggcctgaccctgctgatcctgggcgtgatcggcctgttcaccatccccctgctgtacagacagcaccaggcccagatcgaccagtacgtgggcctggtgaccaaccagctgagccacatcaaggccaagatcagagccaagatccccggcaccggcgccctggccagcgccgccgccgccgtgagcggcagcaaggccaaggccgagtag

SEQ ID NO: 96826 - DNA, 1419 bp, synthetic construct
  misc_feature 1..1419: note = Description of Artificial Sequence: Synthetic coding sequence
  source 1..1419: mol_type = other DNA
atgggccaggtgctgcccgtgttcgcccactgcaaggaggcccccagcaccgccagcagcacccccgacagcaccgagggcggcaacgacgacagcgacttcagagagctgcacaccgccagagagttcagcgaggaggacgaggaggagaccaccagccaggactggggcacccccagagagctgaccttcagctacatcgccttcgacggcgtggtgggcagcggcggcagaagagacagcaccgccagaagacccagaccccagggcagaagcgtgagcgagcccagagaccagcacccccagcccagcctgggcgacagcctggagagcatccccagcctgagccagagccccgagcccggcagaagaggcgaccccgacaccgccccccccagcgagagacccctggaggacctgagactgagactggaccacctgggctgggtggccagaggcaccggcagcggcgaggacagcagcaccagcagcagcacccccctggaggacgaggagccccaggagcccaacagactggagaccggcgaggccggcgaggagctggacctgagactgagactggcccagcccagcagccccgaggtgctgaccccccagctgagccccggcagcggcaccccccaggccggcacccccagccccagcagaagcagagacagcaacagcggccccgaggagcccctgctggaggaggaggagaagcagtggggccccctggagagagagcccgtgagaggccagtgcctggacagcaccgaccagctggagttcaccgtggagcccagactgctggtggccgacctgctgtactggaaggacaccagaaccagcggcgtggtgttcaccggcctgatggtgagcctgctgtgcctgctgcacttcagcatcgtgagcgtggccgcccacctggccctgctgctgctgtgcggcaccatcagcctgagagtgtacagaaaggtgctgcaggccgtgcacagaggcgacggcgccaaccccttccaggcctacctggacgtggacctgaccctgaccagagagcagaccgagagactgagccaccagatcaccagcagagtggtgagcgccgccacccagctgagacacttcttcctggtggaggacctggtggacagcctgaagctggccctgctgttctacatcctgaccttcgtgggcgccatcttcaacggcctgaccctgctgatcctgggcgtgatcggcctgttcaccatccccctgctgtacagacagcaccaggcccagatcgaccagtacgtgggcctggtgaccaaccagctgagccacatcaaggccaagatcagagccaagatccccggcaccggcgccctggccagcgccgccgccgccgtgagcggcagcaaggccaaggccgagtag

SEQ ID NO: 96827 - DNA, 618 bp, synthetic construct
  misc_feature 1..618: note = Description of Artificial Sequence: Synthetic coding sequence
  source 1..618: mol_type = other DNA
atgggcagcaaggtggccgacctgctgtactggaaggacaccagaaccagcggcgtggtgttcaccggcctgatggtgagcctgctgtgcctgctgcacttcagcatcgtgagcgtggccgcccacctggccctgctgctgctgtgcggcaccatcagcctgagagtgtacagaaaggtgctgcaggccgtgcacagaggcgacggcgccaaccccttccaggcctacctggacgtggacctgaccctgaccagagagcagaccgagagactgagccaccagatcaccagcagagtggtgagcgccgccacccagctgagacacttcttcctggtggaggacctggtggacagcctgaagctggccctgctgttctacatcctgaccttcgtgggcgccatcttcaacggcctgaccctgctgatcctgggcgtgatcggcctgttcaccatccccctgctgtacagacagcaccaggcccagatcgaccagtacgtgggcctggtgaccaaccagctgagccacatcaaggccaagatcagagccaagatccccggcaccggcgccctggccagcgccgccgccgccgtgagcggcagcaaggccaaggccgagtag

SEQ ID NO: 96828 - DNA, 3042 bp, synthetic construct
  misc_feature 1..3042: note = Description of Artificial Sequence: Synthetic coding sequence
  source 1..3042: mol_type = other DNA
atggccgagcccagcgccgccacccagagccacagcatcagcagcagcagcttcggcgccgagcccagcgcccccggcggcggcggcagccccggcgcctgccccgccctgggcaccaagagctgcagcagcagctgcgccgagggcctgagcagcctgtgcagcgacgagcccagcagcgagatcatgaccagcagcttcctgagcagcagcgagatccacaacaccggcctgaccatcctgcacggcgagaagagccacgtgctgggcagccagcccatcctggccaaggagggcaaggaccacctggacctgctggacatgaagaagatggagaagccccagggcaccagcaacaacgtgagcgacagcagcgtgagcctggccgccggcgtgcactgcgacagacccagcatccccgccagcttccccgagcaccccgccttcctgagcaagaagatcggccaggtggaggagcagatcgacaaggagaccaagaaccccaacggcgtgagcagcagagaggccaagaccgccctggacgccgacgacagattcaccctgctgaccgcccagaagccccccaccgagtacagcaaggtggagggcatctacacctacagcctgagccccagcaaggtgagcggcgacgacgtgatcgagaaggacagccccgagagccccttcgaggtgatcatcgacaaggccgccttcgacaaggagttcaaggacagctacaaggagagcaccgacgacttcggcagctggagcgtgcacaccgacaaggagagcagcgaggacatcagcgagaccaacgacaagctgttccccctgagaaacaaggaggccggcagataccccatgagcgccctgctgagcagacagttcagccacaccaacgccgccctggaggaggtgagcagatgcgtgaacgacatgcacaacttcaccaacgagatcctgacctgggacctggtgccccaggtgaagcagcagaccgacaagagcagcgactgcatcaccaagaccaccggcctggacatgagcgagtacaacagcgagatccccgtggtgaacctgaagaccagcacccaccagaagacccccgtgtgcagcatcgacggcagcacccccatcaccaagagcaccggcgactgggccgaggccagcctgcagcaggagaacgccatcaccggcaagcccgtgcccgacagcctgaacagcaccaaggagttcagcatcaagggcgtgcagggcaacatgcagaagcaggacgacaccctggccgagctgcccggcagcccccccgagaagtgcgacagcctgggcagcggcgtggccaccgtgaaggtggtgctgcccgacgaccacctgaaggacgagatggactggcagagcagcgccctgggcgagatcaccgaggccgacagcagcggcgagagcgacgacaccgtgatcgaggacatcaccgccgacaccagcttcgagaacaacaagatccaggccgagaagcccgtgagcatccccagcgccgtggtgaagaccggcgagagagagatcaaggagatccccagctgcgagagagaggagaagaccagcaagaacttcgaggagctggtgagcgacagcgagctgcaccaggaccagcccgacatcctgggcagaagccccgccagcgaggccgcctgcagcaaggtgcccgacaccaacgtgagcctggaggacgtgagcgaggtggcccccgagaagcccatcaccaccgagaaccccaagctgcccagcaccgtgagccccaacgtgttcaacgagaccgagttcagcctgaacgtgaccaccagcgcctacctggagagcctgcacggcaagaacgtgaagcacatcgacgacagcagccccgaggacctgatcgccgccttcaccgagaccagagacaagggcatcgtggacagcgagagaaacgccttcaaggccatcagcgagaagatgaccgacttcaagaccaccccccccgtggaggtgctgcacgagaacgagagcggcggcagcgagatcaaggacatcggcagcaagtacagcgagcagagcaaggagaccaacggcagcgagcccctgggcgtgttccccacccagggcacccccgtggccagcctggacctggagcaggagcagctgaccatcaaggccctgaaggagctgggcgagagacaggtggagaagagcaccagcgcccagagagacgccgagctgcccagcgaggaggtgctgaagcagaccttcaccttcgcccccgagagctggccccagagaagctacgacatcctggagagaaacgtgaagaacggcagcgacctgggcatcagccagaagcccatcaccatcagagagaccaccagagtggacgccgtgagcagcctgagcaagaccgagctggtgaagaagcacgtgctggccagactgctgaccgacttcagcgtgcacgacctgatcttctggagagacgtgaagaagaccggcttcgtgttcggcaccaccctgatcatgctgctgagcctggccgccttcagcgtgatcagcgtggtgagctacctgatcctggccctgctgagcgtgaccatcagcttcagaatctacaagagcgtgatccaggccgtgcagaagagcgaggagggccaccccttcaaggcctacctggacgtggacatcaccctgagcagcgaggccttccacaactacatgaacgccgccatggtgcacatcaacagagccctgaagctgatcatcagactgttcctggtggaggacctggtggacagcctgaagctggccgtgttcatgtggctgatgacctacgtgggcgccgtgttcaacggcatcaccctgctgatcctggccgagctgctgatcttcagcgtgcccatcgtgtacgagaagtacaagacccagatcgaccactacgtgggcatcgccagagaccagaccaagagcatcgtggagaagatccaggccaagctgcccggcatcgccaagaagaaggccgagtag

SEQ ID NO: 96829 - DNA, 726 bp, synthetic construct
  misc_feature 1..726: note = Description of Artificial Sequence: Synthetic coding sequence
  source 1..726: mol_type = other DNA
atggccgagcccagcgccgccacccagagccacagcatcagcagcagcagcttcggcgccgagcccagcgcccccggcggcggcggcagccccggcgcctgccccgccctgggcaccaagagctgcagcagcagctgcgccgtgcacgacctgatcttctggagagacgtgaagaagaccggcttcgtgttcggcaccaccctgatcatgctgctgagcctggccgccttcagcgtgatcagcgtggtgagctacctgatcctggccctgctgagcgtgaccatcagcttcagaatctacaagagcgtgatccaggccgtgcagaagagcgaggagggccaccccttcaaggcctacctggacgtggacatcaccctgagcagcgaggccttccacaactacatgaacgccgccatggtgcacatcaacagagccctgaagctgatcatcagactgttcctggtggaggacctggtggacagcctgaagctggccgtgttcatgtggctgatgacctacgtgggcgccgtgttcaacggcatcaccctgctgatcctggccgagctgctgatcttcagcgtgcccatcgtgtacgagaagtacaaggaccccagcaagaccccctggaacagacagaagaagggcagaatcagcacctggaagcccgagatgcagcagctgctgaagcaccacctgatcgtgatcaccagcctgctggtgctgtag

SEQ ID NO: 96830 - DNA, 645 bp, synthetic construct
  misc_feature 1..645: note = Description of Artificial Sequence: Synthetic coding sequence
  source 1..645: mol_type = other DNA
atggccgagcccagcgccgccacccagagccacagcatcagcagcagcagcttcggcgccgagcccagcgcccccggcggcggcggcagccccggcgcctgccccgccctgggcaccaagagctgcagcagcagctgcgccgtgcacgacctgatcttctggagagacgtgaagaagaccggcttcgtgttcggcaccaccctgatcatgctgctgagcctggccgccttcagcgtgatcagcgtggtgagctacctgatcctggccctgctgagcgtgaccatcagcttcagaatctacaagagcgtgatccaggccgtgcagaagagcgaggagggccaccccttcaagcccagactgatcaccatgctggccagccccgagatcagacccagccagctgctgaagagaagcaagcagaacagcctggagagccccaagaagagacagaacaagtacatggagaccagaaacgccaccgtgaccaagacccccttcaacagctacaacgtggtgacctgcaccatgaaggagaacacccagtgccagctggagcccgccttccaggccttcttcctgatctggtgcttcctgcccagcttccccttcaacccccagtaccaggcccagaagctgatggactag

SEQ ID NO: 96831 - DNA, 768 bp, synthetic construct
  misc_feature 1..768: note = Description of Artificial Sequence: Synthetic coding sequence
  source 1..768: mol_type = other DNA
atggccgagcccagcgccgccacccagagccacagcatcagcagcagcagcttcggcgccgagcccagcgcccccggcggcggcggcagccccggcgcctgccccgccctgggcaccaagagctgcagcagcagctgcgccgacagcttcgtgagcagcagcagcagccagcccgtgagcctgttcagcaccagccaggtgcacgacctgatcttctggagagacgtgaagaagaccggcttcgtgttcggcaccaccctgatcatgctgctgagcctggccgccttcagcgtgatcagcgtggtgagctacctgatcctggccctgctgagcgtgaccatcagcttcagaatctacaagagcgtgatccaggccgtgcagaagagcgaggagggccaccccttcaaggcctacctggacgtggacatcaccctgagcagcgaggccttccacaactacatgaacgccgccatggtgcacatcaacagagccctgaagctgatcatcagactgttcctggtggaggacctggtggacagcctgaagctggccgtgttcatgtggctgatgacctacgtgggcgccgtgttcaacggcatcaccctgctgatcctggccgagctgctgatcttcagcgtgcccatcgtgtacgagaagtacaagacccagatcgaccactacgtgggcatcgccagagaccagaccaagagcatcgtggagaagatccaggccaagctgcccggcatcgccaagaagaaggccgagtag

SEQ ID NO: 96832 - DNA, 3099 bp, synthetic construct
  misc_feature 1..3099: note = Description of Artificial Sequence: Synthetic coding sequence
  source 1..3099: mol_type = other DNA
atggccgagcccagcgccgccacccagagccacagcatcagcagcagcagcttcggcgccgagcccagcgcccccggcggcggcggcagccccggcgcctgccccgccctgggcaccaagagctgcagcagcagctgcgccgacagcttcgtgagcagcagcagcagccagcccgtgagcctgttcagcaccagccaggagggcctgagcagcctgtgcagcgacgagcccagcagcgagatcatgaccagcagcttcctgagcagcagcgagatccacaacaccggcctgaccatcctgcacggcgagaagagccacgtgctgggcagccagcccatcctggccaaggagggcaaggaccacctggacctgctggacatgaagaagatggagaagccccagggcaccagcaacaacgtgagcgacagcagcgtgagcctggccgccggcgtgcactgcgacagacccagcatccccgccagcttccccgagcaccccgccttcctgagcaagaagatcggccaggtggaggagcagatcgacaaggagaccaagaaccccaacggcgtgagcagcagagaggccaagaccgccctggacgccgacgacagattcaccctgctgaccgcccagaagccccccaccgagtacagcaaggtggagggcatctacacctacagcctgagccccagcaaggtgagcggcgacgacgtgatcgagaaggacagccccgagagccccttcgaggtgatcatcgacaaggccgccttcgacaaggagttcaaggacagctacaaggagagcaccgacgacttcggcagctggagcgtgcacaccgacaaggagagcagcgaggacatcagcgagaccaacgacaagctgttccccctgagaaacaaggaggccggcagataccccatgagcgccctgctgagcagacagttcagccacaccaacgccgccctggaggaggtgagcagatgcgtgaacgacatgcacaacttcaccaacgagatcctgacctgggacctggtgccccaggtgaagcagcagaccgacaagagcagcgactgcatcaccaagaccaccggcctggacatgagcgagtacaacagcgagatccccgtggtgaacctgaagaccagcacccaccagaagacccccgtgtgcagcatcgacggcagcacccccatcaccaagagcaccggcgactgggccgaggccagcctgcagcaggagaacgccatcaccggcaagcccgtgcccgacagcctgaacagcaccaaggagttcagcatcaagggcgtgcagggcaacatgcagaagcaggacgacaccctggccgagctgcccggcagcccccccgagaagtgcgacagcctgggcagcggcgtggccaccgtgaaggtggtgctgcccgacgaccacctgaaggacgagatggactggcagagcagcgccctgggcgagatcaccgaggccgacagcagcggcgagagcgacgacaccgtgatcgaggacatcaccgccgacaccagcttcgagaacaacaagatccaggccgagaagcccgtgagcatccccagcgccgtggtgaagaccggcgagagagagatcaaggagatccccagctgcgagagagaggagaagaccagcaagaacttcgaggagctggtgagcgacagcgagctgcaccaggaccagcccgacatcctgggcagaagccccgccagcgaggccgcctgcagcaaggtgcccgacaccaacgtgagcctggaggacgtgagcgaggtggcccccgagaagcccatcaccaccgagaaccccaagctgcccagcaccgtgagccccaacgtgttcaacgagaccgagttcagcctgaacgtgaccaccagcgcctacctggagagcctgcacggcaagaacgtgaagcacatcgacgacagcagccccgaggacctgatcgccgccttcaccgagaccagagacaagggcatcgtggacagcgagagaaacgccttcaaggccatcagcgagaagatgaccgacttcaagaccaccccccccgtggaggtgctgcacgagaacgagagcggcggcagcgagatcaaggacatcggcagcaagtacagcgagcagagcaaggagaccaacggcagcgagcccctgggcgtgttccccacccagggcacccccgtggccagcctggacctggagcaggagcagctgaccatcaaggccctgaaggagctgggcgagagacaggtggagaagagcaccagcgcccagagagacgccgagctgcccagcgaggaggtgctgaagcagaccttcaccttcgcccccgagagctggccccagagaagctacgacatcctggagagaaacgtgaagaacggcagcgacctgggcatcagccagaagcccatcaccatcagagagaccaccagagtggacgccgtgagcagcctgagcaagaccgagctggtgaagaagcacgtgctggccagactgctgaccgacttcagcgtgcacgacctgatcttctggagagacgtgaagaagaccggcttcgtgttcggcaccaccctgatcatgctgctgagcctggccgccttcagcgtgatcagcgtggtgagctacctgatcctggccctgctgagcgtgaccatcagcttcagaatctacaagagcgtgatccaggccgtgcagaagagcgaggagggccaccccttcaaggcctacctggacgtggacatcaccctgagcagcgaggccttccacaactacatgaacgccgccatggtgcacatcaacagagccctgaagctgatcatcagactgttcctggtggaggacctggtggacagcctgaagctggccgtgttcatgtggctgatgacctacgtgggcgccgtgttcaacggcatcaccctgctgatcctggccgagctgctgatcttcagcgtgcccatcgtgtacgagaagtacaagacccagatcgaccactacgtgggcatcgccagagaccagaccaagagcatcgtggagaagatccaggccaagctgcccggcatcgccaagaagaaggccgagtag

SEQ ID NO: 96833 - DNA, 372 bp, synthetic construct
  misc_feature 1..372: note = Description of Artificial Sequence: Synthetic coding sequence
  source 1..372: mol_type = other DNA
atggccgagcccagcgccgccacccagagccacagcatcagcagcagcagcttcggcgccgagcccagcgcccccggcggcggcggcagccccggcgcctgccccgccctgggcaccaagagctgcagcagcagctgcgccgtgcacgacctgatcttctggagagacgtgaagaagaccggcttcgtgttcggcaccaccctgatcatgctgctgagcctggccgccttcagcgtgatcagcgtggtgagctacctgatcctggccctgctgagcgtgaccatcagcttcagaatctacaagagcgtgatccaggccgtgcagaagagcgaggagggccaccccttcaactggctgagcagctgcggctag

SEQ ID NO: 96834 - DNA, 711 bp, synthetic construct
  misc_feature 1..711: note = Description of Artificial Sequence: Synthetic coding sequence
  source 1..711: mol_type = other DNA
atggccgagcccagcgccgccacccagagccacagcatcagcagcagcagcttcggcgccgagcccagcgcccccggcggcggcggcagccccggcgcctgccccgccctgggcaccaagagctgcagcagcagctgcgccgtgcacgacctgatcttctggagagacgtgaagaagaccggcttcgtgttcggcaccaccctgatcatgctgctgagcctggccgccttcagcgtgatcagcgtggtgagctacctgatcctggccctgctgagcgtgaccatcagcttcagaatctacaagagcgtgatccaggccgtgcagaagagcgaggagggccaccccttcaaggcctacctggacgtggacatcaccctgagcagcgaggccttccacaactacatgaacgccgccatggtgcacatcaacagagccctgaagctgatcatcagactgttcctggtggaggacctggtggacagcctgaagctggccgtgttcatgtggctgatgacctacgtgggcgccgtgttcaacggcatcaccctgctgatcctggccgagctgctgatcttcagcgtgcccatcgtgtacgagaagtacaagacccagatcgaccactacgtgggcatcgccagagaccagaccaagagcatcgtggagaagatccaggccaagctgcccggcatcgccaagaagaaggccgagtag

SEQ ID NO: 96835 - DNA, 1122 bp, synthetic construct
  misc_feature 1..1122: note = Description of Artificial Sequence: Synthetic coding sequence
  source 1..1122: mol_type = other DNA
atggaggacctggaccagagccccctggtgagcagcagcgacagcccccccagaccccagcccgccttcaagtaccagttcgtgagagagcccgaggacgaggaggaggaggaggaggaggaggaggaggacgaggacgaggacctggaggagctggaggtgctggagagaaagcccgccgccggcctgagcgccgcccccgtgcccaccgcccccgccgccggcgcccccctgatggacttcggcaacgacttcgtgccccccgcccccagaggccccctgcccgccgccccccccgtggcccccgagagacagcccagctgggaccccagccccgtgagcagcaccgtgcccgcccccagccccctgagcgccgccgccgtgagccccagcaagctgcccgaggacgacgagccccccgccagaccccccccccccccccccgccagcgtgagcccccaggccgagcccgtgtggaccccccccgcccccgcccccgccgccccccccagcacccccgccgcccccaagagaagaggcagcagcggcagcgtggtggtggacctgctgtactggagagacatcaagaagaccggcgtggtgttcggcgccagcctgttcctgctgctgagcctgaccgtgttcagcatcgtgagcgtgaccgcctacatcgccctggccctgctgagcgtgaccatcagcttcagaatctacaagggcgtgatccaggccatccagaagagcgacgagggccaccccttcagagcctacctggagagcgaggtggccatcagcgaggagctggtgcagaagtacagcaacagcgccctgggccacgtgaactgcaccatcaaggagctgagaagactgttcctggtggacgacctggtggacagcctgaagttcgccgtgctgatgtgggtgttcacctacgtgggcgccctgttcaacggcctgaccctgctgatcctggccctgatcagcctgttcagcgtgcccgtgatctacgagagacaccaggcccagatcgaccactacctgggcctggccaacaagaacgtgaaggacgccatggccaagatccaggccaagatccccggcctgaagagaaaggccgagtag

SEQ ID NO: 96836 - DNA, 3579 bp, synthetic construct
  misc_feature 1..3579: note = Description of Artificial Sequence: Synthetic coding sequence
  source 1..3579: mol_type = other DNA
atggaggacctggaccagagccccctggtgagcagcagcgacagcccccccagaccccagcccgccttcaagtaccagttcgtgagagagcccgaggacgaggaggaggaggaggaggaggaggaggaggacgaggacgaggacctggaggagctggaggtgctggagagaaagcccgccgccggcctgagcgccgcccccgtgcccaccgcccccgccgccggcgcccccctgatggacttcggcaacgacttcgtgccccccgcccccagaggccccctgcccgccgccccccccgtggcccccgagagacagcccagctgggaccccagccccgtgagcagcaccgtgcccgcccccagccccctgagcgccgccgccgtgagccccagcaagctgcccgaggacgacgagccccccgccagaccccccccccccccccccgccagcgtgagcccccaggccgagcccgtgtggaccccccccgcccccgcccccgccgccccccccagcacccccgccgcccccaagagaagaggcagcagcggcagcgtggacgagaccctgttcgccctgcccgccgccagcgagcccgtgatcagaagcagcgccgagaacatggacctgaaggagcagcccggcaacaccatcagcgccggccaggaggacttccccagcgtgctgctggagaccgccgccagcctgcccagcctgagccccctgagcgccgccagcttcaaggagcacgagtacctgggcaacctgagcaccgtgctgcccaccgagggcaccctgcaggagaacgtgagcgaggccagcaaggaggtgagcgagaaggccaagaccctgctgatcgacagagacctgaccgagttcagcgagctggagtacagcgagatgggcagcagcttcagcgtgagccccaaggccgagagcgccgtgatcgtggccaaccccagagaggagatcatcgtgaagaacaaggacgaggaggagaagctggtgagcaacaacatcctgcacaaccagcaggagctgcccaccgccctgaccaagctggtgaaggaggacgaggtggtgagcagcgagaaggccaaggacagcttcaacgagaagagagtggccgtggaggcccccatgagagaggagtacgccgacttcaagcccttcgagagagtgtgggaggtgaaggacagcaaggaggacagcgacatgctggccgccggcggcaagatcgagagcaacctggagagcaaggtggacaagaagtgcttcgccgacagcctggagcagaccaaccacgagaaggacagcgagagcagcaacgacgacaccagcttccccagcacccccgagggcatcaaggacagaagcggcgcctacatcacctgcgcccccttcaaccccgccgccaccgagagcatcgccaccaacatcttccccctgctgggcgaccccaccagcgagaacaagaccgacgagaagaagatcgaggagaagaaggcccagatcgtgaccgagaagaacaccagcaccaagaccagcaaccccttcctggtggccgcccaggacagcgagaccgactacgtgaccaccgacaacctgaccaaggtgaccgaggaggtggtggccaacatgcccgagggcctgacccccgacctggtgcaggaggcctgcgagagcgagctgaacgaggtgaccggcaccaagatcgcctacgagaccaagatggacctggtgcagaccagcgaggtgatgcaggagagcctgtaccccgccgcccagctgtgccccagcttcgaggagagcgaggccacccccagccccgtgctgcccgacatcgtgatggaggcccccctgaacagcgccgtgcccagcgccggcgccagcgtgatccagcccagcagcagccccctggaggccagcagcgtgaactacgagagcatcaagcacgagcccgagaacccccccccctacgaggaggccatgagcgtgagcctgaagaaggtgagcggcatcaaggaggagatcaaggagcccgagaacatcaacgccgccctgcaggagaccgaggccccctacatcagcatcgcctgcgacctgatcaaggagaccaagctgagcgccgagcccgcccccgacttcagcgactacagcgagatggccaaggtggagcagcccgtgcccgaccacagcgagctggtggaggacagcagccccgacagcgagcccgtggacctgttcagcgacgacagcatccccgacgtgccccagaagcaggacgagaccgtgatgctggtgaaggagagcctgaccgagaccagcttcgagagcatgatcgagtacgagaacaaggagaagctgagcgccctgccccccgagggcggcaagccctacctggagagcttcaagctgagcctggacaacaccaaggacaccctgctgcccgacgaggtgagcaccctgagcaagaaggagaagatccccctgcagatggaggagctgagcaccgccgtgtacagcaacgacgacctgttcatcagcaaggaggcccagatcagagagaccgagaccttcagcgacagcagccccatcgagatcatcgacgagttccccaccctgatcagcagcaagaccgacagcttcagcaagctggccagagagtacaccgacctggaggtgagccacaagagcgagatcgccaacgcccccgacggcgccggcagcctgccctgcaccgagctgccccacgacctgagcctgaagaacatccagcccaaggtggaggagaagatcagcttcagcgacgacttcagcaagaacggcagcgccaccagcaaggtgctgctgctgccccccgacgtgagcgccctggccacccaggccgagatcgagagcatcgtgaagcccaaggtgctggtgaaggaggccgagaagaagctgcccagcgacaccgagaaggaggacagaagccccagcgccatcttcagcgccgagctgagcaagaccagcgtggtggacctgctgtactggagagacatcaagaagaccggcgtggtgttcggcgccagcctgttcctgctgctgagcctgaccgtgttcagcatcgtgagcgtgaccgcctacatcgccctggccctgctgagcgtgaccatcagcttcagaatctacaagggcgtgatccaggccatccagaagagcgacgagggccaccccttcagagcctacctggagagcgaggtggccatcagcgaggagctggtgcagaagtacagcaacagcgccctgggccacgtgaactgcaccatcaaggagctgagaagactgttcctggtggacgacctggtggacagcctgaagttcgccgtgctgatgtgggtgttcacctacgtgggcgccctgttcaacggcctgaccctgctgatcctggccctgatcagcctgttcagcgtgcccgtgatctacgagagacaccaggcccagatcgaccactacctgggcctggccaacaagaacgtgaaggacgccatggccaagatccaggccaagatccccggcctgaagagaaaggccgagtag

SEQ ID NO: 96837 - DNA, 2883 bp, synthetic construct
  misc_feature 1..2883: note = Description of Artificial Sequence: Synthetic coding sequence
  source 1..2883: mol_type = other DNA
atggaggacctggaccagagccccctggtgagcagcagcgacagcccccccagaccccagcccgccttcaagtaccagttcgtgagagagcccgaggacgaggaggaggaggaggaggaggaggaggaggacgaggacgaggacctggaggagctggaggtgctggagagaaagcagttcagcgagctggagtacagcgagatgggcagcagcttcagcgtgagccccaaggccgagagcgccgtgatcgtggccaaccccagagaggagatcatcgtgaagaacaaggacgaggaggagaagctggtgagcaacaacatcctgcacaaccagcaggagctgcccaccgccctgaccaagctggtgaaggaggacgaggtggtgagcagcgagaaggccaaggacagcttcaacgagaagagagtggccgtggaggcccccatgagagaggagtacgccgacttcaagcccttcgagagagtgtgggaggtgaaggacagcaaggaggacagcgacatgctggccgccggcggcaagatcgagagcaacctggagagcaaggtggacaagaagtgcttcgccgacagcctggagcagaccaaccacgagaaggacagcgagagcagcaacgacgacaccagcttccccagcacccccgagggcatcaaggacagaagcggcgcctacatcacctgcgcccccttcaaccccgccgccaccgagagcatcgccaccaacatcttccccctgctgggcgaccccaccagcgagaacaagaccgacgagaagaagatcgaggagaagaaggcccagatcgtgaccgagaagaacaccagcaccaagaccagcaaccccttcctggtggccgcccaggacagcgagaccgactacgtgaccaccgacaacctgaccaaggtgaccgaggaggtggtggccaacatgcccgagggcctgacccccgacctggtgcaggaggcctgcgagagcgagctgaacgaggtgaccggcaccaagatcgcctacgagaccaagatggacctggtgcagaccagcgaggtgatgcaggagagcctgtaccccgccgcccagctgtgccccagcttcgaggagagcgaggccacccccagccccgtgctgcccgacatcgtgatggaggcccccctgaacagcgccgtgcccagcgccggcgccagcgtgatccagcccagcagcagccccctggaggccagcagcgtgaactacgagagcatcaagcacgagcccgagaacccccccccctacgaggaggccatgagcgtgagcctgaagaaggtgagcggcatcaaggaggagatcaaggagcccgagaacatcaacgccgccctgcaggagaccgaggccccctacatcagcatcgcctgcgacctgatcaaggagaccaagctgagcgccgagcccgcccccgacttcagcgactacagcgagatggccaaggtggagcagcccgtgcccgaccacagcgagctggtggaggacagcagccccgacagcgagcccgtggacctgttcagcgacgacagcatccccgacgtgccccagaagcaggacgagaccgtgatgctggtgaaggagagcctgaccgagaccagcttcgagagcatgatcgagtacgagaacaaggagaagctgagcgccctgccccccgagggcggcaagccctacctggagagcttcaagctgagcctggacaacaccaaggacaccctgctgcccgacgaggtgagcaccctgagcaagaaggagaagatccccctgcagatggaggagctgagcaccgccgtgtacagcaacgacgacctgttcatcagcaaggaggcccagatcagagagaccgagaccttcagcgacagcagccccatcgagatcatcgacgagttccccaccctgatcagcagcaagaccgacagcttcagcaagctggccagagagtacaccgacctggaggtgagccacaagagcgagatcgccaacgcccccgacggcgccggcagcctgccctgcaccgagctgccccacgacctgagcctgaagaacatccagcccaaggtggaggagaagatcagcttcagcgacgacttcagcaagaacggcagcgccaccagcaaggtgctgctgctgccccccgacgtgagcgccctggccacccaggccgagatcgagagcatcgtgaagcccaaggtgctggtgaaggaggccgagaagaagctgcccagcgacaccgagaaggaggacagaagccccagcgccatcttcagcgccgagctgagcaagaccagcgtggtggacctgctgtactggagagacatcaagaagaccggcgtggtgttcggcgccagcctgttcctgctgctgagcctgaccgtgttcagcatcgtgagcgtgaccgcctacatcgccctggccctgctgagcgtgaccatcagcttcagaatctacaagggcgtgatccaggccatccagaagagcgacgagggccaccccttcagagcctacctggagagcgaggtggccatcagcgaggagctggtgcagaagtacagcaacagcgccctgggccacgtgaactgcaccatcaaggagctgagaagactgttcctggtggacgacctggtggacagcctgaagttcgccgtgctgatgtgggtgttcacctacgtgggcgccctgttcaacggcctgaccctgctgatcctggccctgatcagcctgttcagcgtgcccgtgatctacgagagacaccaggcccagatcgaccactacctgggcctggccaacaagaacgtgaaggacgccatggccaagatccaggccaagatccccggcctgaagagaaaggccgagtag

SEQ ID NO: 96838 - DNA, 2961 bp, synthetic construct
  misc_feature 1..2961: note = Description of Artificial Sequence: Synthetic coding sequence
  source 1..2961: mol_type = other DNA
atggacctgaaggagcagcccggcaacaccatcagcgccggccaggaggacttccccagcgtgctgctggagaccgccgccagcctgcccagcctgagccccctgagcgccgccagcttcaaggagcacgagtacctgggcaacctgagcaccgtgctgcccaccgagggcaccctgcaggagaacgtgagcgaggccagcaaggaggtgagcgagaaggccaagaccctgctgatcgacagagacctgaccgagttcagcgagctggagtacagcgagatgggcagcagcttcagcgtgagccccaaggccgagagcgccgtgatcgtggccaaccccagagaggagatcatcgtgaagaacaaggacgaggaggagaagctggtgagcaacaacatcctgcacaaccagcaggagctgcccaccgccctgaccaagctggtgaaggaggacgaggtggtgagcagcgagaaggccaaggacagcttcaacgagaagagagtggccgtggaggcccccatgagagaggagtacgccgacttcaagcccttcgagagagtgtgggaggtgaaggacagcaaggaggacagcgacatgctggccgccggcggcaagatcgagagcaacctggagagcaaggtggacaagaagtgcttcgccgacagcctggagcagaccaaccacgagaaggacagcgagagcagcaacgacgacaccagcttccccagcacccccgagggcatcaaggacagaagcggcgcctacatcacctgcgcccccttcaaccccgccgccaccgagagcatcgccaccaacatcttccccctgctgggcgaccccaccagcgagaacaagaccgacgagaagaagatcgaggagaagaaggcccagatcgtgaccgagaagaacaccagcaccaagaccagcaaccccttcctggtggccgcccaggacagcgagaccgactacgtgaccaccgacaacctgaccaaggtgaccgaggaggtggtggccaacatgcccgagggcctgacccccgacctggtgcaggaggcctgcgagagcgagctgaacgaggtgaccggcaccaagatcgcctacgagaccaagatggacctggtgcagaccagcgaggtgatgcaggagagcctgtaccccgccgcccagctgtgccccagcttcgaggagagcgaggccacccccagccccgtgctgcccgacatcgtgatggaggcccccctgaacagcgccgtgcccagcgccggcgccagcgtgatccagcccagcagcagccccctggaggccagcagcgtgaactacgagagcatcaagcacgagcccgagaacccccccccctacgaggaggccatgagcgtgagcctgaagaaggtgagcggcatcaaggaggagatcaaggagcccgagaacatcaacgccgccctgcaggagaccgaggccccctacatcagcatcgcctgcgacctgatcaaggagaccaagctgagcgccgagcccgcccccgacttcagcgactacagcgagatggccaaggtggagcagcccgtgcccgaccacagcgagctggtggaggacagcagccccgacagcgagcccgtggacctgttcagcgacgacagcatccccgacgtgccccagaagcaggacgagaccgtgatgctggtgaaggagagcctgaccgagaccagcttcgagagcatgatcgagtacgagaacaaggagaagctgagcgccctgccccccgagggcggcaagccctacctggagagcttcaagctgagcctggacaacaccaaggacaccctgctgcccgacgaggtgagcaccctgagcaagaaggagaagatccccctgcagatggaggagctgagcaccgccgtgtacagcaacgacgacctgttcatcagcaaggaggcccagatcagagagaccgagaccttcagcgacagcagccccatcgagatcatcgacgagttccccaccctgatcagcagcaagaccgacagcttcagcaagctggccagagagtacaccgacctggaggtgagccacaagagcgagatcgccaacgcccccgacggcgccggcagcctgccctgcaccgagctgccccacgacctgagcctgaagaacatccagcccaaggtggaggagaagatcagcttcagcgacgacttcagcaagaacggcagcgccaccagcaaggtgctgctgctgccccccgacgtgagcgccctggccacccaggccgagatcgagagcatcgtgaagcccaaggtgctggtgaaggaggccgagaagaagctgcccagcgacaccgagaaggaggacagaagccccagcgccatcttcagcgccgagctgagcaagaccagcgtggtggacctgctgtactggagagacatcaagaagaccggcgtggtgttcggcgccagcctgttcctgctgctgagcctgaccgtgttcagcatcgtgagcgtgaccgcctacatcgccctggccctgctgagcgtgaccatcagcttcagaatctacaagggcgtgatccaggccatccagaagagcgacgagggccaccccttcagagcctacctggagagcgaggtggccatcagcgaggagctggtgcagaagtacagcaacagcgccctgggccacgtgaactgcaccatcaaggagctgagaagactgttcctggtggacgacctggtggacagcctgaagttcgccgtgctgatgtgggtgttcacctacgtgggcgccctgttcaacggcctgaccctgctgatcctggccctgatcagcctgttcagcgtgcccgtgatctacgagagacaccaggcccagatcgaccactacctgggcctggccaacaagaacgtgaaggacgccatggccaagatccaggccaagatccccggcctgaagagaaaggccgagtag

SEQ ID NO: 96839 - DNA, 1179 bp, synthetic construct
  misc_feature 1..1179: note = Description of Artificial Sequence: Synthetic coding sequence
  source 1..1179: mol_type = other DNA
atggaggacctggaccagagccccctggtgagcagcagcgacagcccccccagaccccagcccgccttcaagtaccagttcgtgagagagcccgaggacgaggaggaggaggaggaggaggaggaggaggacgaggacgaggacctggaggagctggaggtgctggagagaaagcccgccgccggcctgagcgccgcccccgtgcccaccgcccccgccgccggcgcccccctgatggacttcggcaacgacttcgtgccccccgcccccagaggccccctgcccgccgccccccccgtggcccccgagagacagcccagctgggaccccagccccgtgagcagcaccgtgcccgcccccagccccctgagcgccgccgccgtgagccccagcaagctgcccgaggacgacgagccccccgccagaccccccccccccccccccgccagcgtgagcccccaggccgagcccgtgtggaccccccccgcccccgcccccgccgccccccccagcacccccgccgcccccaagagaagaggcagcagcggcagcgtggacgagaccctgttcgccctgcccgccgccagcgagcccgtgatcagaagcagcgccgtggtggacctgctgtactggagagacatcaagaagaccggcgtggtgttcggcgccagcctgttcctgctgctgagcctgaccgtgttcagcatcgtgagcgtgaccgcctacatcgccctggccctgctgagcgtgaccatcagcttcagaatctacaagggcgtgatccaggccatccagaagagcgacgagggccaccccttcagagcctacctggagagcgaggtggccatcagcgaggagctggtgcagaagtacagcaacagcgccctgggccacgtgaactgcaccatcaaggagctgagaagactgttcctggtggacgacctggtggacagcctgaagttcgccgtgctgatgtgggtgttcacctacgtgggcgccctgttcaacggcctgaccctgctgatcctggccctgatcagcctgttcagcgtgcccgtgatctacgagagacaccaggcccagatcgaccactacctgggcctggccaacaagaacgtgaaggacgccatggccaagatccaggccaagatccccggcctgaagagaaaggccgagtag

SEQ ID NO: 96840 - DNA, 600 bp, synthetic construct
  misc_feature 1..600: note = Description of Artificial Sequence: Synthetic coding sequence
  source 1..600: mol_type = other DNA
atggacggccagaagaagaactggaaggacaaggtggtggacctgctgtactggagagacatcaagaagaccggcgtggtgttcggcgccagcctgttcctgctgctgagcctgaccgtgttcagcatcgtgagcgtgaccgcctacatcgccctggccctgctgagcgtgaccatcagcttcagaatctacaagggcgtgatccaggccatccagaagagcgacgagggccaccccttcagagcctacctggagagcgaggtggccatcagcgaggagctggtgcagaagtacagcaacagcgccctgggccacgtgaactgcaccatcaaggagctgagaagactgttcctggtggacgacctggtggacagcctgaagttcgccgtgctgatgtgggtgttcacctacgtgggcgccctgttcaacggcctgaccctgctgatcctggccctgatcagcctgttcagcgtgcccgtgatctacgagagacaccaggcccagatcgaccactacctgggcctggccaacaagaacgtgaaggacgccatggccaagatccaggccaagatccccggcctgaagagaaaggccgagtag

SEQ ID NO: 96841 - DNA, 2961 bp, synthetic construct; identical to SEQ ID NO: 96838
  misc_feature 1..2961: note = Description of Artificial Sequence: Synthetic coding sequence
  source 1..2961: mol_type = other DNA

SEQ ID NO: 96842 - DNA, 1038 bp, synthetic construct
  misc_feature 1..1038: note = Description of Artificial Sequence: Synthetic coding sequence
  source 1..1038: mol_type = other DNA
atggagcccgaggacgaggaggaggaggaggaggaggaggaggaggacgaggacgaggacctggaggagctggaggtgctggagagaaagcccgccgccggcctgagcgccgcccccgtgcccaccgcccccgccgccggcgcccccctgatggacttcggcaacgacttcgtgccccccgcccccagaggccccctgcccgccgccccccccgtggcccccgagagacagcccagctgggaccccagccccgtgagcagcaccgtgcccgcccccagccccctgagcgccgccgccgtgagccccagcaagctgcccgaggacgacgagccccccgccagaccccccccccccccccccgccagcgtgagcccccaggccgagcccgtgtggaccccccccgcccccgcccccgccgccccccccagcacccccgccgcccccaagagaagaggcagcagcggcagcgtggtggtggacctgctgtactggagagacatcaagaagaccggcgtggtgttcggcgccagcctgttcctgctgctgagcctgaccgtgttcagcatcgtgagcgtgaccgcctacatcgccctggccctgctgagcgtgaccatcagcttcagaatctacaagggcgtgatccaggccatccagaagagcgacgagggccaccccttcagagcctacctggagagcgaggtggccatcagcgaggagctggtgcagaagtacagcaacagcgccctgggccacgtgaactgcaccatcaaggagctgagaagactgttcctggtggacgacctggtggacagcctgaagttcgccgtgctgatgtgggtgttcacctacgtgggcgccctgttcaacggcctgaccctgctgatcctggccctgatcagcctgttcagcgtgcccgtgatctacgagagacaccaggcccagatcgaccactacctgggcctggccaacaagaacgtgaaggacgccatggccaagatccaggccaagatccccggcctgaagagaaaggccgagtag

SEQ ID NO: 96843 - DNA, 2961 bp, synthetic construct; identical to SEQ ID NO: 96838
  misc_feature 1..2961: note = Description of Artificial Sequence: Synthetic coding sequence
  source 1..2961: mol_type = other DNA

SEQ ID NO: 96844 - DNA, 2961 bp, synthetic construct; identical to SEQ ID NO: 96838
  misc_feature 1..2961: note = Description of Artificial Sequence: Synthetic coding sequence
  source 1..2961: mol_type = other DNA

SEQ ID NO: 96845 - DNA, 276 bp, synthetic construct
  misc_feature 1..276: note = Description of Artificial Sequence: Synthetic coding sequence
  source 1..276: mol_type = other DNA
atggacctgaaggagcagcccggcaacaccatcagcgccggccaggaggacttccccagcgtgctgctggagaccgccgccagcctgcccagcctgagccccctgagcgccgccagcttcaaggagcacgagtacctgggcaacctgagcaccgtgctgcccaccgagggcaccctgcaggagaacgtgagcgaggccagcaaggaggtgagcgagaaggccaagaccctgctgatcgacagagacctgaccgagttcagcgagctggagtactag

SEQ ID NO: 96846 - DNA, 1191 bp, synthetic construct
  misc_feature 1..1191: note = Description of Artificial Sequence: Synthetic coding sequence
  source 1..1191: mol_type = other DNA
atggagttcctgaagacctgcgtgctgagaagaaacgcctgcaccgccgtgtgcttctggagaagcaaggtggtgcagaagcccagcgtgagaagaatcagcaccaccagccccagaagcaccgtgatgcccgcctgggtgatcgacaagtacggcaagaacgaggtgctgagattcacccagaacatgatgatgcccatcatccactaccccaacgaggtgatcgtgaaggtgcacgccgccagcgtgaaccccatcgacgtgaacatgagaagcggctacggcgccaccgccctgaacatgaagagagaccccctgcacgtgaagatcaagggcgaggagttccccctgaccctgggcagagacgtgagcggcgtggtgatggagtgcggcctggacgtgaagtacttcaagcccggcgacgaggtgtgggccgccgtgcccccctggaagcagggcaccctgagcgagttcgtggtggtgagcggcaacgaggtgagccacaagcccaagagcctgacccacacccaggccgccagcctgccctacgtggccctgaccgcctggagcgccatcaacaaggtgggcggcctgaacgacaagaactgcaccggcaagagagtgctgatcctgggcgccagcggcggcgtgggcaccttcgccatccaggtgatgaaggcctgggacgcccacgtgaccgccgtgtgcagccaggacgccagcgagctggtgagaaagctgggcgccgacgacgtgatcgactacaagagcggcagcgtggaggagcagctgaagagcctgaagcccttcgacttcatcctggacaacgtgggcggcagcaccgagacctgggcccccgacttcctgaagaagtggagcggcgccacctacgtgaccctggtgacccccttcctgctgaacatggacagactgggcatcgccgacggcatgctgcagaccggcgtgaccgtgggcagcaaggccctgaagcacttctggaagggcgtgcactacagatgggccttcttcatggccagcggcccctgcctggacgacatcgccgagctggtggacgccggcaagatcagacccgtgatcgagcagaccttccccttcagcaaggtgcccgaggccttcctgaaggtggagagaggccacgccagaggcaagaccgtgatcaacgtggtgtag

SEQ ID NO: 96847 - DNA, 681 bp, synthetic construct
  misc_feature 1..681: note = Description of Artificial Sequence: Synthetic coding sequence
  source 1..681: mol_type = other DNA
atggagttcctgaagacctgcgtgctgagaagaaacgcctgcaccgccgtgtgcttctggagaagcaaggtggtgcagaagcccagcgtgagaagaatcagcaccaccagccccagaagcaccgtgatgcccgcctgggtgatcgacaagtacggcaagaacgaggtgctgagattcacccagaacatgatgatgcccatcatccactaccccaacgaggtgatcgtgaaggtgcacgccgccagcgtgaaccccatcgacgtgaacatgagaagcggctacggcgccaccgccctgaacatgaagagagaccccctgcacgtgaagatcaagggcgaggagttccccctgaccctgggcagagacgtgagcggcgtggtgatggagtgcggcctggacgtgaagtacttcaagcccggcgacgaggtgtgggccgccgtgcccccctggaagcagggcaccctgagcgagttcgtggtggtgagcggcaacgaggtgagccacaagcccaagagcctgacccacacccaggccgccagcctgccctacgtggccctgaccgcctggagcgccatcaacaaggtgggcggcctgaacgacaagaactgcaccggcaagagaatcagcggcaaggagagcatcatcgccggccacttcagctggcccgtggcccacgtgtag

SEQ ID NO: 96848 - DNA, 1422 bp, synthetic construct
  misc_feature 1..1422: note = Description of Artificial Sequence: Synthetic coding sequence
  source 1..1422: mol_type = other DNA
atgaagagagccagcgccggcggcagcagactgctggcctgggtgctgtggctgcaggcctggcaggtggccgccccctgccccggcgcctgcgtgtgctacaacgagcccaaggtgaccaccagctgcccccagcagggcctgcaggccgtgcccgtgggcatccccgccgccagccagagaatcttcctgcacggcaacagaatcagccacgtgcccgccgccagcttcagagcctgcagaaacctgaccatcctgtggctgcacagcaacgtgctggccagaatcgacgccgccgccttcaccggcctggccctgctggagcagctggacctgagcgacaacgcccagctgagaagcgtggaccccgccaccttccacggcctgggcagactgcacaccctgcacctggacagatgcggcctgcaggagctgggccccggcctgttcagaggcctggccgccctgcagtacctgtacctgcaggacaacgccctgcaggccctgcccgacgacaccttcagagacctgggcaacctgacccacctgttcctgcacggcaacagaatcagcagcgtgcccgagagagccttcagaggcctgcacagcctggacagactgctgctgcaccagaacagagtggcccacgtgcacccccacgccttcagagacctgggcagactgatgaccctgtacctgttcgccaacaacctgagcgccctgcccaccgaggccctggcccccctgagagccctgcagtacctgagactgaacgacaacccctgggtgtgcgactgcagagccagacccctgtgggcctggctgcagaagttcagaggcagcagcagcgaggtgccctgcagcctgccccagagactggccggcagagacctgaagagactggccgccaacgacctgcagggctgcgccgtggccaccggcccctaccaccccatctggaccggcagagccaccgacgaggagcccctgggcctgcccaagtgctgccagcccgacgccgccgacaaggccagcgtgctggagcccggcagacccgccagcgccggcaacgccctgaagggcagagtgccccccggcgacagcccccccggcaacggcagcggccccagacacatcaacgacagccccttcggcaccctgcccggcagcgccgagccccccctgaccgccgtgagacccgagggcagcgagccccccggcttccccaccagcggccccagaagaagacccggctgcagcagaaagaacagaaccagaagccactgcagactgggccaggccggcagcggcggcggcggcaccggcgacagcgagggcagcggcgccctgcccagcctgacctgcagcctgacccccctgggcctggccctggtgctgtggaccgtgctgggcccctgctag

SEQ ID NO: 96849 - DNA, 1041 bp, synthetic construct
  misc_feature 1..1041: note = Description of Artificial Sequence: Synthetic coding sequence
  source 1..1041: mol_type = other DNA
atgcacctgcccggctgcgcccccgccatggccgacggcagcttcagcctggccggccacctgctgagaagccccggcggcagcaccagcagactgcacagcatcgaggccatcctgggcttcaccaaggacgacggcatcctgggcaccttccccgccgagagaggcgccagaggcgccaaggagagagacagaagactgggcgccagacccgcctgccccaaggcccccgaggagggcagcgagcccagccccccccccgcccccgcccccgcccccgagtacgaggcccccagaccctactgccccaaggagcccggcgaggccagacccagccccggcctgcccgtgggccccgccaccggcgaggccaagctgagcgaggaggagcagcccaagaagaagcacagaagaaacagaaccaccttcaccacctaccagctgcacgagctggagagagccttcgagaagagccactaccccgacgtgtacagcagagaggagctggccggcaaggtgaacctgcccgaggtgagagtgcaggtgtggttccagaacagaagagccaagtggagaagacaggagaagctggaggtgagcagcatgaagctgcaggacagccccctgctgagcttcagcagaagcccccccagcgccaccctgagccccctgggcgccggccccggcagcggcggcggccccgccggcggcgccctgcccctggagagctggctgggcccccccctgcccggcggcggcgccaccgccctgcagagcctgcccggcttcggcccccccgcccagagcctgcccgccagctacacccccccccccccccccccccccttcctgaacagcccccccctgggccccggcctgcagcccctggccccccccccccccagctacccctgcggccccggcttcggcgacaagttccccctggacgaggccgaccccagaaacagcagcatcgccgccctgagactgaaggccaaggagcacatccaggccatcggcaagccctggcaggccctgtag

SEQ ID NO: 96850 - DNA, 225 bp, synthetic construct
  misc_feature 1..225: note = Description of Artificial Sequence: Synthetic coding sequence
  source 1..225: mol_type = other DNA
atgcacctgcccggctgcgcccccgccatggccgacggcagcttcagcctggccggccacctgctgagaagccccggcggcagcaccagcagactgcacagcatcgaggccatcctgggcttcaccaaggacgacggcatcctgggcaccttccccgccgagagaggcgccagaggcgccaaggagagagacagaagactgggcgccagacccgcctgcccctag

SEQ ID NO: 96851 - DNA, 588 bp, synthetic construct
  misc_feature 1..588: note = Description of Artificial Sequence: Synthetic coding sequence
  source 1..588: mol_type = other DNA
atgagcctgatcagctggctgagatggaacgaggcccccagcagactgagcaccagaagccccgccgagatggtgctggagaccctgatgatggagctgaccggccagatgagagaggccgagagacagcagagagagagaagcaacgccgtgagaaaggtgtgcaccggcgtggactacagctggctggccagcacccccagaagcacctacgacctgagccccatcgagagactgcagctggaggacgtgtgcgtgaagatccaccccagctactgcggccccgccatcctgagattcagacagctgctggccgagcaggagcccgaggtgcaggaggtgagccagctgttcagaagcgtgctgcaggaggtgctggagagaatgaagcaggaggaggaggcccacaagctgaccagacagtggagcctgagacccagaggcagcctggccaccttcaagaccagagccagaatcagccccttcgccagcgacatcagaaccatcagcgaggacgtggagagagacacccccccccccctgagaagctggagcatgcccgagttcagagcccccaaggccgactag

SEQ ID NO: 96852 - DNA, 762 bp, synthetic construct
  misc_feature 1..762: note = Description of Artificial Sequence: Synthetic coding sequence
  source 1..762: mol_type = other DNA
atggccgagaccagcgccctgcccaccggcttcggcgagctggaggtgctggccgtgggcatggtgctgctggtggaggccctgagcggcctgagcctgaacaccctgaccatcttcagcttctgcaagacccccgagctgagaaccccctgccacctgctggtgctgagcctggccctggccgacagcggcatcagcctgaacgccctggtggccgccaccagcagcctgctgagaagatggccctacggcagcgacggctgccaggcccacggcttccagggcttcgtgaccgccctggccagcatctgcagcagcgccgccatcgcctggggcagataccaccactactgcaccagaagccagctggcctggaacagcgccgtgagcctggtgctgttcgtgtggctgagcagcgccttctgggccgccctgcccctgctgggctggggccactacgactacgagcccctgggcacctgctgcaccctggactacagcaagggcgacagaaacttcaccagcttcctgttcaccatgagcttcttcaacttcgccatgcccctgttcatcaccatcaccagctacagcctgatggagcagaagctgggcaagagcggccacctgcaggtgcccgccctgatcgccaagatggtgcccaccatcaacgccatcaactacgccctgggcaacgagatggtgtgcagaggcatctggcagtgcctgagcccccagaagagagagaaggacagaaccaagtag

SEQ ID NO: 96853 - DNA, 888 bp, synthetic construct
  misc_feature 1..888: note = Description of Artificial Sequence: Synthetic coding sequence
  source 1..888: mol_type = other DNA
atggccgagaccagcgccctgcccaccggcttcggcgagctggaggtgctggccgtgggcatggtgctgctggtggaggccctgagcggcctgagcctgaacaccctgaccatcttcagcttctgcaagacccccgagctgagaaccccctgccacctgctggtgctgagcctggccctggccgacagcggcatcagcctgaacgccctggtggccgccaccagcagcctgctgagagtgagccacagaagatggccctacggcagcgacggctgccaggcccacggcttccagggcttcgtgaccgccctggccagcatctgcagcagcgccgccatcgcctggggcagataccaccactactgcaccagaagccagctggcctggaacagcgccgtgagcctggtgctgttcgtgtggctgagcagcgccttctgggccgccctgcccctgctgggctggggccactacgactacgagcccctgggcacctgctgcaccctggactacagcaagggcgacagaaacttcaccagcttcctgttcaccatgagcttcttcaacttcgccatgcccctgttcatcaccatcaccagctacagcctgatggagcagaagctgggcaagagcggccacctgcaggtgaacaccaccctgcccgccagaaccctgctgctgggctggggcccctacgccatcctgtacctgtacgccgtgatcgccgacgtgaccagcatcagccccaagctgcagatggtgcccgccctgatcgccaagatggtgcccaccatcaacgccatcaactacgccctgggcaacgagatggtgtgcagaggcatctggcagtgcctgagcccccagaagagagagaaggacagaaccaagtag

SEQ ID NO: 96854 - DNA, 363 bp, synthetic construct
  misc_feature 1..363: note = Description of Artificial Sequence: Synthetic coding sequence
  source 1..363: mol_type = other DNA
atggccgagaccagcgccctgcccaccggcttcggcgagctggaggtgctggccgtgggcatggtgctgctggtggaggaccccggcgccgccgacagcctgccccccaccggcgccgagctgggcagctgcggccagtgggaccagcccgagtgccccagatgcagccacatccagcccagcccctgcctgccccaggccctggccctgagactgggcagactgcccggcagcagactgcccggcctgtgcgacagcgtgggccagcacctgcagcagtgcagccacagaatgggcgccctgagccccctgctgcacccccccaagtgctgccacagaagccaccacttcgagtggagatag

SEQ ID NO: 96855 - DNA, 1056 bp, synthetic construct
  misc_feature 1..1056: note = Description of Artificial Sequence: Synthetic coding sequence
  source 1..1056: mol_type = other DNA
atggcccccgtgctgcccctggtgctgcccctgcagcccagaatcagactggcccagggcctgtggctgctgagctggctgctggccctggccggcggcgtgatcctgctgtgcagcggccacctgctggtgcagctgagacacctgggcaccttcctggcccccagctgccagttccccgtgctgccccaggccgccctggccgccggcgccgtggccctgggcaccggcctggtgggcgtgggcgccagcagagccagcctgaacgccgccctgtaccccccctggagaggcgtgctgggccccctgctggtggccggcaccgccggcggcggcggcctgctggtggtgggcctgggcctggccctggccctgcccggcagcctggacgaggccctggaggagggcctggtgaccgccctggcccactacaaggacaccgaggtgcccggccactgccaggccaagagactggtggacgagctgcagctgagataccactgctgcggcagacacggctacaaggactggttcggcgtgcagtgggtgagcagcagatacctggaccccggcgacagagacgtggccgacagaatccagagcaacgtggagggcctgtacctgaccgacggcgtgcccttcagctgctgcaacccccacagccccagaccctgcctgcagaacagactgagcgacagctacgcccaccccctgttcgaccccagacagcccaaccagaacctgtgggcccagggctgccacgaggtgctgctggagcacctgcaggacctggccggcaccctgggcagcatgctggccgtgaccttcctgctgcaggccctggtgctgctgggcctgagatacctgcagaccgccctggagggcctgggcggcgtgatcgacgccggcggcgagacccagggctacctgttccccagcggcctgaaggacatgctgaagaccgcctggctgcagggcggcgtggcctgcagacccgcccccgaggaggccccccccggcgaggccccccccaaggaggacctgagcgaggcctag

SEQ ID NO: 96856 - DNA, 1602 bp, synthetic construct
  misc_feature 1..1602: note = Description of Artificial Sequence: Synthetic coding sequence
  source 1..1602: mol_type = other DNA
atgagcatccaggtggagcaccccgccggcggctacaagaagctgttcgagaccgtggaggagctgagcagccccctgaccgcccacgtgaccggcagaatccccctgtggctgaccggcagcctgctgagatgcggccccggcctgttcgaggtgggcagcgagcccttctaccacctgttcgacggccaggccctgctgcacaagttcgacttcaaggagggccacgtgacctaccacagaagattcatcagaaccgacgcctacgtgagagccatgaccgagaagagaatcgtgatcaccgagttcggcacctgcgccttccccgacccctgcaagaacatcttcagcagattcttcagctacttcagaggcgtggaggtgaccgacaacgccctggtgaacgtgtaccccgtgggcgaggactactacgcctgcaccgagaccaacttcatcaccaagatcaaccccgagaccctggagaccatcaagcaggtggacctgtgcaactacgtgagcgtgaacggcgccaccgcccacccccacatcgagaacgacggcaccgtgtacaacatcggcaactgcttcggcaagaacttcagcatcgcctacaacatcgtgaagatcccccccctgcaggccgacaaggaggaccccatcagcaagagcgagatcgtggtgcagttcccctgcagcgacagattcaagcccagctacgtgcacagcttcggcctgacccccaactacatcgtgttcgtggagacccccgtgaagatcaacctgttcaagttcctgagcagctggagcctgtggggcgccaactacatggactgcttcgagagcaacgagaccatgggcgtgtggctgcacatcgccgacaagaagagaaagaagtacctgaacaacaagtacagaaccagccccttcaacctgttccaccacatcaacacctacgaggacaacggcttcctgatcgtggacctgtgctgctggaagggcttcgagttcgtgtacaactacctgtacctggccaacctgagagagaactgggaggaggtgaagaagaacgccagaaaggccccccagcccgaggtgagaagatacgtgctgcccctgaacatcgacaaggccgacaccggcaagaacctggtgaccctgcccaacaccaccgccaccgccatcctgtgcagcgacgagaccatctggctggagcccgaggtgctgttcagcggccccagacaggccttcgagttcccccagatcaactaccagaagtactgcggcaagccctacacctacgcctacggcctgggcctgaaccacttcgtgcccgacagactgtgcaagctgaacgtgaagaccaaggagacctgggtgtggcaggagcccgacagctaccccagcgagcccatcttcgtgagccaccccgacgccctggaggaggacgacggcgtggtgctgagcgtggtggtgagccccggcgccggccagaagcccgcctacctgctgatcctgaacgccaaggacctgagcgaggtggccagagccgaggtggagatcaacatccccgtgaccttccacggcctgttcaagaagagctag

SEQ ID NO: 96857 - DNA, 954 bp, synthetic construct
  misc_feature 1..954: note = Description of Artificial Sequence: Synthetic coding sequence
  source 1..954: mol_type = other DNA
atgagcgagggcgtgggcaccttcagaatggtgcccgaggaggagcaggagctgagagcccagctggagcagctgaccaccaaggaccacggccccgtgttcggcccctgcagccagctgcccagacacaccctgcagaaggccaaggacgagctgaacgagagagaggagaccagagaggaggccgtgagagagctgcaggagatggtgcaggcccaggccgccagcggcgaggagctggccgtggccgtggccgagagagtgcaggagaaggacagcggcttcttcctgagattcatcagagccagaaagttcaacgtgggcagagcctacgagctgctgagaggctacgtgaacttcagactgcagtaccccgagctgttcgacagcctgagccccgaggccgtgagatgcaccatcgaggccggctaccccggcgtgctgagcagcagagacaagtacggcagagtggtgatgctgttcaacatcgagaactggcagagccaggagatcaccttcgacgagatcctgcaggcctactgcttcatcctggagaagctgctggagaacgaggagacccagatcaacggcttctgcatcatcgagaacttcaagggcttcaccatgcagcaggccgccagcctgagaaccagcgacctgagaaagatggtggacatgctgcaggacagcttccccgccagattcaaggccatccacttcatccaccagccctggtacttcaccaccacctacaacgtggtgaagcccttcctgaagagcaagctgctggagagagtgttcgtgcacggcgacgacctgagcggcttctaccaggagatcgacgagaacatcctgcccagcgacttcggcggcaccctgcccaagtacgacggcaaggccgtggccgagcagctgttcggcccccaggcccaggccgagaacaccgccttctag

SEQ ID NO: 96858 - DNA, 807 bp, synthetic construct
  misc_feature 1..807: note = Description of Artificial Sequence: Synthetic coding sequence
  source 1..807: mol_type = other DNA
atggccgagctggacatcggccagcactgccaggtggagcactgcagacagagagacttcctgcccttcgtgtgcgacgactgcagcggcatcttctgcctggagcacagaagcagagagagccacggctgccccgaggtgaccgtgatcaacgagagactgaagaccgaccagcacaccagctacccctgcagcttcaaggactgcgccgagagagagctggtggccgtgatctgcccctactgcgagaagaacttctgcctgagacacagacaccagagcgaccacgagtgcgagaagctggagatccccaagcccagaatggccgccacccagaagctggtgaaggacatcatcgacagcaagaccggcgagaccgccagcaagagatggaagggcgccaagaacagcgagaccgccgccaaggtggccctgatgaagctgaagatgcacgccgacggcgacaagagcctgccccagaccgagagaatctacttccaggtgttcctgcccaagggcagcaaggagaagagcaagcccatgttcttctgccacagatggagcatcggcaaggccatcgacttcgccgccagcctggccagactgaagaacgacaacaacaagttcaccgccaagaagctgagactgtgccacatcaccagcggcgaggccctgcccctggaccacaccctggagacctggatcgccaaggaggactgccccctgtacaacggcggcaacatcatcctggagtacctgaacgacgaggagcagttctgcaagaacgtggagagctacctggagtag

SEQ ID NO: 96859 - DNA, 2751 bp, synthetic construct
  misc_feature 1..2751: note = Description of Artificial Sequence: Synthetic coding sequence
  source 1..2751: mol_type = other DNA
atgcagagacccgtggtgaagctgtacgccaccgacggcagaagagtgcccagcctgcaggccgtgatcctgagcagcggcgccgtggtggccgccggcagagagcccttcaagcccggcaactacgacatccagaagtacctgctgcccgccagactgcccggcatcagccagagagtgtaccccaagggcaacgccaagagcgagagcagaaagagcagcaactggaaggtgttcatcatcaccagcgacctgcccgacgccggcaccagcagccagatctacatcatcctgtacggccagcacagaagcagcgcccccatctacctgtacggcaccgacggcgccagattccaggtgggccacgaggacatcttcaccatcaccgtgggcgacatcggcgccctgttcaagatcagaatcggccacaccaacagcggcagcagccccagctggcactgcaaggagatccagctgcacaacatgaacagcggcaagcagttctacgtgcccgtgcagagatggctggccagagaccaggaggacggcgagatctgcagagagttccccctgctgagcaagggccagcccgtgctgcccgtgaccatctacgaggtgaacgtggccaccggcgagctgtggaacgccggcaccgtggccaacgtgtacatcagcatccacggcgagaagggcgacaccggcagcagacagctgttcagaagcaagagcagcttcaacttcctgagaggccagaccgacaccttcttcctggaggccgtgcacctgggcgacctgtgcaagatcgtgatcggccacgacggcctgggccccggcaacggctggttcctggacgacgtggtgatcaaggaccccaccaccaactacgagtacgccttcttctgccacagatggctggaccagggcgaggacgactgcaagatcgtgagagagctgtacgccagagacaacagcatcttcagcgccagacagaagctggagctgaagagaaaggagacctggaccgccgagagctggaagttcaccaagggcaacaccctgcagttctacaacaagctgaccggcggcttcgtgagactgcaccccgacggcaccgtggacgccatcggcgagaagaccgacaagtacggcgtgttcgacgtgatcttcaacaagagaaacatctgcatcttccagagccacgagatgagacacctgagcctggccctggacaacggcatcgtgaccggcatggtgagcggcgaggccaccaccgagctgagagtgctgtaccagcccaacagatgcgccctgctggagagcgccctggtgcccggccacaccgtggtgttcgacagacacggcaagatcgccgacgccagcagcgccggctacgccaacctgagcaaggagttcgtgatcttcgtgaagggcgtgttcctgaacagcgccgtggtgctgctggccaccagcctgtgccaggccctgtgcctgcagcccgacggcagctgcaccggcgtgggcagccagagcgagaagagctactggaaggtgcacaagatcagcagcggcatctgcatgttcgagagcgtgaagaacgcccagatgtacctgagaatcaaggacggcagatgcgacggcaccggcaccggcgacgtggactgccacttcaagatcaagaagaacctgaagaacgccagcatcagcctggagagcaccaagagccccggcctgttcgtgggcctgcagagcgacggccaggccaagcccatgatctacaccaaggacgagaacgtgtgcttctacccccaggtgatccagttcggcagagagaaccccatgggcatgagcgccacccccagccaggaggaggagaagatccacgagagcaagaagcagaagaagatcccccccgagagcgaggccagaagccccctgcccagcagcaccgccaaggagatcagacacttccagagcagcgagaccctgctgagcgaggacgagtggaaggtgctggtgctgaccggcaacaccggcacccaggccaacgtgaccctgtgggtgtacggcgacaagggcgtgaccggccccatcagcctgagaaaggacagcagcgagcagctgttcctgcccggccacgaggacgagttccaggtggagatcagaaacaccggcaacatctacaagatcagaatcggccacgacggcaccagcgagcagcccgagtggaacctgcagagagtgaccatgcagcacatgaagagcaagaagatcctggacttcgccgccaacgtgtggctgagcagaatccaggccgacggcgacgtggtgtgcgagctgcccgtggtgaagggcggccaggccatcttccccctggtgagataccaggtggacgtgtacaccggccagctgaagcacgccgagaccgagagcgaggtgttcctgtgcctgttcggcgagagaggcgacagcggcctgagacagctgtacaagagcaacatgcaggtgaagttccagagaggccagatcgacaagttccaggtggccgccgtgagcctgggcaagctgcagaaggtgctgctgagatgcgaggccagcgacaagagccagtactggtactgcgagcaggtgatcgtgagagagcccggcaccaccagcgagagcatcttcacctgccagagatggctgcccttcatgagccagggcatcatccacagcgagatcgagctgtacctgcagggcgaggactactag

SEQ ID NO: 96860 - DNA, 7203 bp, synthetic construct
  misc_feature 1..7203: note = Description of Artificial Sequence: Synthetic coding sequence
  source 1..7203: mol_type = other DNA
atgaacagcacccccagaaacgcccaggcccccagccacagagagtgcttcctgcccagcgtggccagaacccccagcgtgaccaaggtgacccccgccaagaagatcaccttcctgaagagaggcgaccccagattcgccggcgtgagactggccgtgcaccagagagccttcaagaccttcagcgccctgatggacgagctgagccagagagtgcccctgagcttcggcgtgagaagcgtgaccacccccagaggcctgcacagcctgagcgccctggagcagctggaggacggcggctgctacctgtgcagcgacaagaagccccccaagacccccagcggccccggcagaccccaggagagaaaccccaccgcccagcagctgagagacgtggagggccagagagaggcccccggcaccagcagcagcagaaagagcctgaagacccccagaagaatcctgctgatcaagaacatggaccccagactgcagcagaccgtggtgctgagccacagaaacaccagaaacctggccgccttcctgggcaaggccagcgacctgctgagattccccgtgaagcagctgtacaccaccagcggcaagaaggtggacagcctgcaggccctgctgcacagccccagcgtgctggtgtgcgccggccacgaggccttcagaacccccgccatgaagaacgccagaagaagcgaggccgagaccctgagcggcctgaccagcagaaacaagaacggcagctggggccccaagaccaagcccagcgtgatccacagcagaagcccccccggcagcacccccagactgcccgagagacccggccccagcaacccccccgtgggccccgcccccggcagacacccccaggacacccccgcccagagcggccccctggtggccggcgacgacatgaagaagaaggtgagaatgaacgaggacggcagcctgagcgtggagatgaaggtgagattccacctggtgggcgaggacaccctgctgtggagcagaagaatgggcagagccagcgccctgaccgccgccagcggcgaggaccccgtgctgggcgaggtggaccccctgtgctgcgtgtgggagggctacccctggggcttcagcgagcccggcgtgtggggccccagaccctgcagagtgggctgcagagaggtgttcggcagaggcggccagcccggccccaagtacgagatctggaccaaccccctgcacgccagccagggcgagagagtggccgccagaaagagatggggcctggcccagcacgtgagatgcagcggcctgtggggccacggcaccgccggcagagagagatgcagccaggacagcgccagccccgccagcagcaccggcctgcccgagggcagcgagcccgagagcagctgctgccccagaacccccgaggacggcgtggacagcgccagccccagcgcccagatcggcgccgagagaaaggccggcggcagcctgggcgaggaccccggcctgtgcatcgacggcgccggcctgggcggccccgagcagggcggcagactgacccccagagccagaagcgaggagggcgccagcagcgacagcagcgccagcaccggcagccacgagggcagcagcgagtggggcggcagaccccagggctgccccggcaaggccagagccgagaccagccagcaggaggccagcgagggcggcgaccccgccagccccgccctgagcctgagcagcctgagaagcgacgacctgcaggccgagacccagggccagggcaccgagcaggccaccggcgccgccgtgaccagagagcccctggtgctgggcctgagctgcagctgggacagcgagggcgccagcagcacccccagcacctgcaccagcagccagcagggccagagaagacacagaagcagagccagcgccatgagcagccccagcagccccggcctgggcagagtggcccccagaggccaccccagacacagccactacagaaaggacacccacagccccctggacagcagcgtgaccaagcaggtgcccagaccccccgagagaagaagagcctgccaggacggcagcgtgcccagatacagcggcagcagcagcagcaccagaacccaggccagcggcaacctgagaccccccagcagcggcagcctgcccagccaggacctgctgggcaccagcagcgccaccgtgacccccgccgtgcacagcgacttcgtgagcggcgtgagcccccacaacgcccccagcgccggctgggccggcgacgccggcagcagaacctgcagccccgcccccatccccccccacaccagcgacagctgcagcaagagcggcgccgccagcctgggcgaggaggccagagacaccccccagcccagcagccccctggtgctgcaggtgggcagacccgagcagggcgccgtgggcccccacagaagccactgctgcagccagcccggcacccagcccgcccaggaggcccagagaggccccagccccgaggccagctggctgtgcggcagatactgccccaccccccccagaggcagaccctgcccccagagaagaagcagcagctgcggcagcaccggcagcagccaccagagcaccgccagaggccccggcggcagcccccaggagggcaccagacagcccggccccacccccagccccggccccaacagcggcgccagcagaagaagcagcgccagccagggcgccggcagcagaggcctgagcgaggagaagaccctgagaagcggcggcggcccccagggccaggaggaggccagcggcgtgagccccagcagcctgcccagaagcagccccgaggccgtggtgagagagtggctggacaacatccccgaggagcccatcctgatgacctacgagctggccgacgagaccaccggcgccgccggcggcggcctgagaggccccgaggtggaccccggcgacgaccacagcctggagggcctgggcgagcccgcccaggccggccagcagagcctggagggcgaccccggccaggaccccgagcccgagggcgccctgctgggcagcagcgacaccggcccccagagcggcgagggcgtgccccagggcgccgcccccgagggcgtgagcgaggcccccgccgaggccggcgccgacagagaggcccccgccggctgcagagtgagcctgagagccctgcccggcagagtgagcgccagcacccagatcatgagagccctgatgggcagcaagcagggcagacccagcagcgtgcccgaggtgagcagacccatggccagaagactgagctgcagcgccggcgccctgatcacctgcctggccagcctgcagctgttcgaggaggacctgggcagccccgccagcaaggtgagattcaaggacagccccagataccaggagctgctgagcatcagcaaggacctgtggcccggctgcgacgtgggcgaggaccagctggacagcggcctgtgggagctgacctggagccaggccctgcccgacctgggcagccacgccatgaccgagaacttcacccccaccagcagcagcggcgtggacatcagcagcggcagcggcggcagcggcgagagcagcgtgccctgcgccatggacggcaccctggtgacccagggcaccgagctgcccctgaagaccagcaaccagagacccgacagcagaacctacgagagccccggcgacctggagaaccagcagcagtgctgcttccccaccttcctgaacgccagagcctgcgcctgcgccaccaacgaggacgaggccgagagagacagcgaggagcagagagccagcagcaacctggagcagctggccgagaacaccgtgcaggaggaggtgcagctggaggagaccaaggagggcaccgagggcgagggcctgcaggaggaggccgtgcagctggaggagaccaagaccgaggagggcctgcaggaggagggcgtgcagctggaggagaccaaggagaccgagggcgagggccagcaggaggaggaggcccagctggaggagatcgaggagaccggcggcgagggcctgcaggaggagggcgtgcagctggaggaggtgaaggagggccccgagggcggcctgcagggcgaggccctggaggagggcctgaaggaggagggcctgcccgaggagggcagcgtgcacggccaggagctgagcgaggccagcagccccgacggcaagggcagccaggaggacgaccccgtgcaggaggaggaggccggcagagccagcgccagcgccgagccctgccccgccgagggcaccgaggagcccaccgagccccccagccacctgagcgagaccgaccccagcgccagcgagagacagagcggcagccagctggagcccggcctggagaagccccccggcgccaccatgatgggccaggagcacacccaggcccagcccacccagggcgccgccgagagaagcagcagcgtggcctgcagcgccgccctggactgcgaccccatctgggtgagcgtgctgctgaagaagaccgagaaggccttcctggcccacctggccagcgccgtggccgagctgagagccagatggggcctgcaggacaacgacctgctggaccagatggccgccgagctgcagcaggacgtggcccagagactgcaggacagcaccaagagagagctgcagaagctgcagggcagagccggcagaatggtgctggagccccccagagaggccctgaccggcgagctgctgctgcagacccagcagagaagacacagactgagaggcctgagaaacctgagcgccttcagcgagagaaccctgggcctgggccccctgagcttcaccctggaggacgagcccgccctgagcaccgccctgggcagccagctgggcgaggaggccgagggcgaggagttctgcccctgcgaggcctgcgtgagaaagaaggtgagccccatgagccccaaggccaccatgggcgccaccagaggccccatcaaggaggccttcgacctgcagcagatcctgcagagaaagagaggcgagcacaccgacggcgaggccgccgaggtggcccccggcaagacccacaccgaccccaccagcaccagaaccgtgcagggcgccgagggcggcctgggccccggcctgagccagggccccggcgtggacgagggcgaggacggcgagggcagccagagactgaacagagacaaggaccccaagctgggcgaggccgagggcgacgccatggcccaggagagagagggcaagacccacaacagcgagaccagcgccggcagcgagctgggcgaggccgagcaggagggcgagggcatcagcgagagaggcgagaccggcggccagggcagcggccacgaggacaacctgcagggcgaggccgccgccggcggcgaccaggaccccggccagagcgacggcgccgagggcatcgaggcccccgaggccgagggcgaggcccagcccgagagcgagggcgtggaggcccccgaggccgagggcgacgcccaggaggccgagggcgaggcccagcccgagagcgaggacgtggaggcccccgaggccgagggcgaggcccagcccgagagcgaggacgtggagacccccgaggccgagtgggaggtgcagcccgagagcgagggcgccgaggcccccgaggccgagaaggaggcccagcccgagaccgagagcgtggaggccctggagaccgagggcgaggacgagcccgagagcgagggcgccgaggcccaggaggccgaggaggccgcccaggaggccgagggccagacccagcccgagagcgaggtgatcgagagccaggaggccgaggaggaggcccagcccgagagcgaggacgtggaggccctggaggtggaggtggagacccaggaggccgagggcgaggcccagcccgagagcgaggacgtggaggcccccgaggccgagggcgagatgcaggaggccgaggaggaggcccagcccgagagcgacggcgtggaggcccagcccaagagcgagggcgaggaggcccaggaggtggagggcgagacccagaagaccgagggcgacgcccagcccgagagcgacggcgtggaggcccccgaggccgaggaggaggcccaggaggccgagggcgaggtgcaggaggccgagggcgaggcccaccccgagagcgaggacgtggacgcccaggaggccgagggcgaggcccagcccgagagcgagggcgtggaggcccccgaggccgagggcgaggcccagaaggccgagggcatcgaggcccccgagaccgagggcgaggcccagcccgagagcgagggcatcgaggcccccgaggccgagggcgaggcccagcccgagagcgagggcgtggaggcccaggacgccgagggcgaggcccagcccgagagcgagggcatcgaggcccaggaggccgaggaggaggcccagcccgagctggagggcgtggaggcccccgaggccgagggcgaggcccagcccgagagcgagggcatcgaggcccccgaggccgagggcgaggcccagcccgagctggagggcgtggaggcccccgaggccgaggaggaggcccagcccgagcccgagggcgtggagacccccgaggccgagggcgaggcccagcccgagagcgagggcgagacccagggcgagaagaagggcagcccccaggtgagcctgggcgacggccagagcgaggaggccagcgagagcagcagccccgtgcccgaggacagacccacccccccccccagccccggcggcgacaccccccaccagagacccggcagccagaccggccccagcagcagcagagccagcagctggggcaactgctggcagaaggacagcgagaacgaccacgtgctgggcgacaccagaagccccgacgccaagagcaccggcaccccccacgccgagagaaaggccaccagaatgtaccccgagagcagcaccagcgagcaggaggaggcccccctgggcagcagaacccccgagcagggcgccagcgagggctacgacctgcaggaggaccaggccctgggcagcctggcccccaccgaggccgtgggcagagccgacggcttcggccaggacgacctggacttctag

SEQ ID NO: 96861 - DNA, 5019 bp, synthetic construct
  misc_feature 1..5019: note = Description of Artificial Sequence: Synthetic coding sequence
  source 1..5019: mol_type = other DNA
atgaaggtggacagaaccaagctgaagaagacccccaccgaggcccccgccgactgcagagccctgatcgacaagctgaaggtgtgcaacgacgagcagctgctgctggagctgcagcagatcaagacctggaacatcggcaagtgcgagctgtaccactgggtggacctgctggacagattcgacggcatcctggccgacgccggccagaccgtggagaacatgagctggatgctggtgtgcgacagacccgagagagagcagctgaagatgctgctgctggccgtgctgaacttcaccgccctgctgatcgagtacagcttcagcagacacctgtacagcagcatcgagcacctgaccaccctgctggccagcagcgacatgcaggtggtgctggccgtgctgaacctgctgtacgtgttcagcaagagaagcaactacatcaccagactgggcagcgacaagagaacccccctgctgaccagactgcagcacctggccgagagctggggcggcaaggagaacggcttcggcctggccgagtgctgcagagacctgcacatgatgaagtacccccccagcgccaccaccctgcacttcgagttctacgccgaccccggcgccgaggtgaagatcgagaagagaaccaccagcaacaccctgcactacatccacatcgagcagctggacaagatcagcgagagccccagcgagatcatggagagcctgaccaagatgtacagcatccccaaggacaagcagatgctgctgttcacccacatcagactggcccacggcttcagcaaccacagaaagagactgcaggccgtgcaggccagactgcacgccatcagcatcctggtgtacagcaacgccctgcaggagagcgccaacagcatcctgtacaacggcctgatcgaggagctggtggacgtgctgcagatcaccgacaagcagctgatggagatcaaggccgccagcctgagaaccctgaccagcatcgtgcacctggagagaacccccaagctgagcagcatcatcgactgcaccggcaccgccagctaccacggcttcctgcccgtgctggtgagaaactgcatccaggccatgatcgaccccagcatggacccctacccccaccagttcgccaccgccctgttcagcttcctgtaccacctggccagctacgacgccggcggcgaggccctggtgagctgcggcatgatggaggccctgctgaaggtgatcaagttcctgggcgacgagcaggaccagatcaccttcgtgaccagagccgtgagagtggtggacctgatcaccaacctggacatggccgccttccagagccacagcggcctgagcatcttcatctacagactggagcacgaggtggacctgtgcagaaaggagtgccccttcgtgatcaagcccaagatccagagacccaacaccacccaggagggcgaggagatggagaccgacatggacggcgtgcagtgcatcccccagagagccgccctgctgaagagcatgctgaacttcctgaagaaggccatccaggaccccgccttcagcgacggcatcagacacgtgatggacggcagcctgcccaccagcctgaagcacatcatcagcaacgccgagtactacggccccagcctgttcctgctggccaccgaggtggtgaccgtgttcgtgttccaggagcccagcctgctgagcagcctgcaggacaacggcctgaccgacgtgatgctgcacgccctgctgatcaaggacgtgcccgccaccagagaggtgctgggcagcctgcccaacgtgttcagcgccctgtgcctgaacgccagaggcctgcagagcttcgtgcagtgccagcccttcgagagactgttcaaggtgctgctgagccccgactacctgcccgccatgagaagaagaagaagcagcgaccccctgggcgacaccgccagcaacctgggcagcgccgtggacgagctgatgagacaccagcccaccctgaagaccgacgccaccaccgccatcatcaagctgctggaggagatctgcaacctgggcagagaccccaagtacatctgccagaagcccagcatccagaaggccgacggcaccgccaccgcccccccccccagaagcaaccacgccgccgaggaggccagcagcgaggacgaggaggaggaggaggtgcaggccatgcagagcttcaacagcacccagcagaacgagaccgagcccaaccagcaggtggtgggcaccgaggagagaatccccatccccctgatggactacatcctgaacgtgatgaagttcgtggagagcatcctgagcaacaacaccaccgacgaccactgccaggagttcgtgaaccagaagggcctgctgcccctggtgaccatcctgggcctgcccaacctgcccatcgacttccccaccagcgccgcctgccaggccgtggccggcgtgtgcaagagcatcctgaccctgagccacgagcccaaggtgctgcaggagggcctgctgcagctggacagcatcctgagcagcctggagcccctgcacagacccatcgagagccccggcggcagcgtgctgctgagagagctggcctgcgccggcaacgtggccgacgccaccctgagcgcccaggccacccccctgctgcacgccctgaccgccgcccacgcctacatcatgatgttcgtgcacacctgcagagtgggccagagcgagatcagaagcatcagcgtgaaccagtggggcagccagctgggcctgagcgtgctgagcaagctgagccagctgtactgcagcctggtgtgggagagcaccgtgctgctgagcctgtgcacccccaacagcctgcccagcggctgcgagttcggccaggccgacatgcagaagctggtgcccaaggacgagaaggccggcaccacccagggcggcaagagaagcgacggcgagcaggacggcgccgccggcagcatggacgccagcacccagggcctgctggagggcatcggcctggacggcgacaccctggcccccatggagaccgacgagcccaccgccagcgacagcaagggcaagagcaagatcacccccgccatggccgccagaatcaagcagatcaagcccctgctgagcgccagcagcagactgggcagagccctggccgagctgttcggcctgctggtgaagctgtgcgtgggcagccccgtgagacagagaagaagccaccacgccgccagcaccaccaccgcccccacccccgccgccagaagcaccgccagcgccctgaccaagctgctgaccaagggcctgagctggcagccccccccctacacccccacccccagattcagactgaccttcttcatctgcagcgtgggcttcaccagccccatgctgttcgacgagagaaagtacccctaccacctgatgctgcagaagttcctgtgcagcggcggccacaacgccctgttcgagaccttcaactgggccctgagcatgggcggcaaggtgcccgtgagcgagggcctggagcacagcgacctgcccgacggcaccggcgagttcctggacgcctggctgatgctggtggagaagatggtgaaccccaccaccgtgctggagagcccccacagcctgcccgccaagctgcccggcggcgtgcagaacttcccccagttcagcgccctgagattcctggtggtgacccagaaggccgccttcacctgcatcaagaacctgtggaacagaaagcccctgaaggtgtacggcggcagaatggccgagagcatgctggccatcctgtgccacatcctgagaggcgagcccgtgatcagagagagactgagcaaggagaaggagggcagcagaggcgaggaggacaccggccaggaggagggcggcagcagaagagagccccaggtgaaccagcagcagctgcagcagctgatggacatgggcttcaccagagagcacgccatggaggccctgctgaacaccagcaccatggagcaggccaccgagtacctgctgacccaccccccccccatcatgggcggcgtggtgagagacctgagcatgagcgaggaggaccagatgatgagagccatcgccatgagcctgggccaggacatccccatggaccagagagccgagagccccgaggaggtggcctgcagaaaggaggaggaggagagaaaggccagagagaagcaggaggaggaggaggccaagtgcctggagaagttccaggacgccgaccccctggagcaggacgagctgcacaccttcaccgacaccatgctgcccggctgcttccacctgctggacgagctgcccgacaccgtgtacagagtgtgcgacctgatcatgaccgccatcaagagaaacggcgccgactacagagacatgatcctgaagcaggtggtgaaccaggtgtgggaggccgccgacgtgctgatcaaggccgccctgcccctgaccaccagcgacaccaagaccgtgagcgagtggatcagccagatggccaccctgccccaggccagcaacctggccaccagaatcctgctgctgaccctgctgttcgaggagctgaagctgccctgcgcctgggtggtggagagcagcggcatcctgaacgtgctgatcaagctgctggaggtggtgcagccctgcctgcaggccgccaaggagcagaaggaggtgcagacccccaagtggatcacccccgtgctgctgctgatcgacttctacgagaagaccgccatcagcagcaagagaagagcccagatgaccaagtacctgcagagcaacagcaacaactggagatggttcgacgacagaagcggcagatggtgcagctacagcgccagcaacaacagcaccatcgacagcgcctggaagagcggcgagaccagcgtgagattcaccgccggcagaagaagatacaccgtgcagttcaccaccatggtgcagggcaccagcgccgagtag

SEQ ID NO: 96862 - DNA, 666 bp, synthetic construct
  misc_feature 1..666: note = Description of Artificial Sequence: Synthetic coding sequence
  source 1..666: mol_type = other DNA
atgagcagcagacccggcagagaggacgtgggcgccgccggcgccagaagacccagagagccccccgagcaggagctgcagagaagaagagagcagaagagaagaagacacgacgcccagcagctgcagcagctgaagcacctggagagcttctacgagaagcccccccccggcctgatcaaggaggacgagaccaagcccgaggactgcatccccgacgtgcccggcaacgagcacgccagagagttcctggcccacgcccccaccaagggcctgtggatgcccctgggcaaggaggtgaaggtgatgcagtgctggagatgcaagagatacggccacagaaccggcgacaaggagtgccccttcttcatcaagggcaaccagaagctggagcagttcagagtggcccacgaggaccccatgtacgacatcatcagagacaacaagagacacgagaaggacgtgagaatccagcagctgaagcagctgctggaggacagcaccagcgacgaggacagaagcagcagcagcagcagcgagggcaaggagaagcacaagaagaagaagaagaaggagaagcacaagaagagaaagaaggagaagaagaagaagaagaagagaaagcacaagagcagcaagagcaacgagggcagcgacagcgagtag

SEQ ID NO: 96863 - DNA, 2262 bp, synthetic construct
  misc_feature 1..2262: note = Description of Artificial Sequence: Synthetic coding sequence
  source 1..2262: mol_type = other DNA
atgagagagcccgaggagctgatgcccgacagcggcgccgtgttcaccttcggcaagagcaagttcgccgagaacaaccccggcaagttctggttcaagaacgacgtgcccgtgcacctgagctgcggcgacgagcacagcgccgtggtgaccggcaacaacaagctgtacatgttcggcagcaacaactggggccagctgggcctgggcagcaagagcgccatcagcaagcccacctgcgtgaaggccctgaagcccgagaaggtgaagctggccgcctgcggcagaaaccacaccctggtgagcaccgagggcggcaacgtgtacgccaccggcggcaacaacgagggccagctgggcctgggcgacaccgaggagagaaacaccttccacgtgatcagcttcttcaccagcgagcacaagatcaagcagctgagcgccggcagcaacaccagcgccgccctgaccgaggacggcagactgttcatgtggggcgacaacagcgagggccagatcggcctgaagaacgtgagcaacgtgtgcgtgccccagcaggtgaccatcggcaagcccgtgagctggatcagctgcggctactaccacagcgccttcgtgaccaccgacggcgagctgtacgtgttcggcgagcccgagaacggcaagctgggcctgcccaaccagctgctgggcaaccacagaaccccccagctggtgagcgagatccccgagaaggtgatccaggtggcctgcggcggcgagcacaccgtggtgctgaccgagaacgccgtgtacaccttcggcctgggccagttcggccagctgggcctgggcaccttcctgttcgagaccagcgagcccaaggtgatcgagaacatcagagaccagaccatcagctacatcagctgcggcgagaaccacaccgccctgatcaccgacatcggcctgatgtacaccttcggcgacggcagacacggcaagctgggcctgggcctggagaacttcaccaaccacttcatccccaccctgtgcagcaacttcctgagattcatcgtgaagctggagagaagccccgacagcttcagcatgagaagaaccctgccccccatcgagggcaccctgggcctgagcgcctgcttcctgcccaacagcgtgttccccagatgcagcgagagaaacctgcaggagagcgtgctgagcgagcaggacctgatgcagcccgaggagcccgactacctgctggacgagatgaccaaggaggccgagatcgacaacagcagcaccgtggagagcctgggcgagaccaccgacatcctgaacatgacccacatcatgagcctgaacagcaacgagaagagcctgaagctgagccccgtgcagaagcagaagaagcagcagaccatcggcgagctgacccaggacaccgccctgaccgagaacgacgacagcgacgagtacgaggagatgagcgagatgaaggagggcaaggcctgcaagcagcacgtgagccagggcatcttcatgacccagcccgccaccaccatcgaggccttcagcgacgaggaggtggagatccccgaggagaaggagggcgccgaggacagcaagggcaacggcatcgaggagcaggaggtggaggccaacgaggagaacgtgaaggtgcacggcggcagaaaggagaagaccgagatcctgagcgacgacctgaccgacaaggccgaggaccacgagttcagcaagaccgaggagctgaagctggaggacgtggacgaggagatcaacgccgagaacgtggagagcaagaagaagaccgtgggcgacgacgagagcgtgcccaccggctaccacagcaagaccgagggcgccgagagaaccaacgacgacagcagcgccgagaccatcgagaagaaggagaaggccaacctggaggagagagccatctgcgagtacaacgagaaccccaagggctacatgctggacgacgccgacagcagcagcctggagatcctggagaacagcgagaccacccccagcaaggacatgaagaagaccaagaagatcttcctgttcaagagagtgcccagcatcaaccagaagatcgtgaagaacaacaacgagcccctgcccgagatcaagagcatcggcgaccagatcatcctgaagagcgacaacaaggacgccgaccagaaccacatgagccagaaccaccagaacatcccccccaccaacaccgagagaagaagcaagagctgcaccatcctgtag

SEQ ID NO: 96864 - DNA, 2448 bp, synthetic construct
  misc_feature 1..2448: note = Description of Artificial Sequence: Synthetic coding sequence
  source 1..2448: mol_type = other DNA
atgagagagcccgaggagctgatgcccgacagcggcgccgtgttcaccttcggcaagagcaagttcgccgagaacaaccccggcaagttctggttcaagaacgacgtgcccgtgcacctgagctgcggcgacgagcacagcgccgtggtgaccggcaacaacaagctgtacatgttcggcagcaacaactggggccagctgggcctgggcagcaagagcgccatcagcaagcccacctgcgtgaaggccctgaagcccgagaaggtgaagctggccgcctgcggcagaaaccacaccctggtgagcaccgagggcggcaacgtgtacgccaccggcggcaacaacgagggccagctgggcctgggcgacaccgaggagagaaacaccttccacgtgatcagcttcttcaccagcgagcacaagatcaagcagctgagcgccggcagcaacaccagcgccgccctgaccgaggacggcagactgttcatgtggggcgacaacagcgagggccagatcggcctgaagaacgtgagcaacgtgtgcgtgccccagcaggtgaccatcggcaagcccgtgagctggatcagctgcggctactaccacagcgccttcgtgaccaccgacggcgagctgtacgtgttcggcgagcccgagaacggcaagctgggcctgcccaaccagctgctgggcaaccacagaaccccccagctggtgagcgagatccccgagaaggtgatccaggtggcctgcggcggcgagcacaccgtggtgctgaccgagaacgccgtgtacaccttcggcctgggccagttcggccagctgggcctgggcaccttcctgttcgagaccagcgagcccaaggtgatcgagaacatcagagaccagaccatcagctacatcagctgcggcgagaaccacaccgccctgatcaccgacatcggcctgatgtacaccttcggcgacggcagacacggcaagctgggcctgggcctggagaacttcaccaaccacttcatccccaccctgtgcagcaacttcctgagattcatcgtgaagctggtggcctgcggcggctgccacatggtggtgttcgccgccccccacagaggcgtggccaaggagatcgagttcgacgagatcaacgacacctgcctgagcgtggccaccttcctgccctacagcagcctgaccagcggcaacgtgctgcagagaaccctgagcgccagaatgagaagaagagagagagagagaagccccgacagcttcagcatgagaagaaccctgccccccatcgagggcaccctgggcctgagcgcctgcttcctgcccaacagcgtgttccccagatgcagcgagagaaacctgcaggagagcgtgctgagcgagcaggacctgatgcagcccgaggagcccgactacctgctggacgagatgaccaaggaggccgagatcgacaacagcagcaccgtggagagcctgggcgagaccaccgacatcctgaacatgacccacatcatgagcctgaacagcaacgagaagagcctgaagctgagccccgtgcagaagcagaagaagcagcagaccatcggcgagctgacccaggacaccgccctgaccgagaacgacgacagcgacgagtacgaggagatgagcgagatgaaggagggcaaggcctgcaagcagcacgtgagccagggcatcttcatgacccagcccgccaccaccatcgaggccttcagcgacgaggaggtggagatccccgaggagaaggagggcgccgaggacagcaagggcaacggcatcgaggagcaggaggtggaggccaacgaggagaacgtgaaggtgcacggcggcagaaaggagaagaccgagatcctgagcgacgacctgaccgacaaggccgaggaccacgagttcagcaagaccgaggagctgaagctggaggacgtggacgaggagatcaacgccgagaacgtggagagcaagaagaagaccgtgggcgacgacgagagcgtgcccaccggctaccacagcaagaccgagggcgccgagagaaccaacgacgacagcagcgccgagaccatcgagaagaaggagaaggccaacctggaggagagagccatctgcgagtacaacgagaaccccaagggctacatgctggacgacgccgacagcagcagcctggagatcctggagaacagcgagaccacccccagcaaggacatgaagaagaccaagaagatcttcctgttcaagagagtgcccagcatcaaccagaagatcgtgaagaacaacaacgagcccctgcccgagatcaagagcatcggcgaccagatcatcctgaagagcgacaacaaggacgccgaccagaaccacatgagccagaaccaccagaacatcccccccaccaacaccgagagaagaagcaagagctgcaccatcctgtag

SEQ ID NO: 96865 - DNA, 1443 bp, synthetic construct
  misc_feature 1..1443: note = Description of Artificial Sequence: Synthetic coding sequence
  source 1..1443: mol_type = other DNA
atgagagagcccgaggagctgatgcccgacagcggcgccgtgttcaccttcggcaagagcaagttcgccgagaacaaccccggcaagttctggttcaagaacgacgtgcccgtgcacctgagctgcggcgacgagcacagcgccgtggtgaccggcaacaacaagctgtacatgttcggcagcaacaactggggccagctgggcctgggcagcaagagcgccatcagcaagcccacctgcgtgaaggccctgaagcccgagaaggtgaagctggccgcctgcggcagaaaccacaccctggtgagcaccgagggcggcaacgtgtacgccaccggcggcaacaacgagggccagctgggcctgggcgacaccgaggagagaaacaccttccacgtgatcagcttcttcaccagcgagcacaagatcaagcagctgagcgccggcagcaacaccagcgccgccctgaccgaggacggcagactgttcatgtggggcgacaacagcgagggccagatcggcctgaagaacgtgagcaacgtgtgcgtgccccagcaggtgaccatcggcaagcccgtgagctggatcagctgcggctactaccacagcgccttcgtgaccaccgacggcgagctgtacgtgttcggcgagcccgagaacggcaagctgggcctgcccaaccagctgctgggcaaccacagaaccccccagctggtgagcgagatccccgagaaggtgatccaggtggcctgcggcggcgagcacaccgtggtgctgaccgagaacgccgtgtacaccttcggcctgggccagttcggccagctgggcctgggcaccttcctgttcgagaccagcgagcccaaggtgatcgagaacatcagagaccagaccatcagctacatcagctgcggcgagaaccacaccgccctgatcaccgacatcggcctgatgtacaccttcggcgacggcagacacggcaagctgggcctgggcctggagaacttcaccaaccacttcatccccaccctgtgcagcaacttcctgagattcatcgtgaagctggtggcctgcggcggctgccacatggtggtgttcgccgccccccacagaggcgtggccaaggagatcgagttcgacgagatcaacgacacctgcctgagcgtggccaccttcctgccctacagcagcctgaccagcggcaacgtgctgcagagaaccctgagcgccagaatgagaagaagagagagagagagaagccccgacagcttcagcatgagaagaaccctgccccccatcgagggcaccctgggcctgagcgcctgcttcctgcccaacagcgtgttccccagatgcagcgagagaaacctgcaggagagcgtgctgagcgagcaggacctgatgcagcccgaggagcccgacacccaccacgagcccgagttccagtag

SEQ ID NO: 96866 - DNA, 3063 bp, synthetic construct
  misc_feature 1..3063: note = Description of Artificial Sequence: Synthetic coding sequence
  source 1..3063: mol_type = other DNA
atgagagagcccgaggagctgatgcccgacagcggcgccgtgttcaccttcggcaagagcaagttcgccgagaacaaccccggcaagttctggttcaagaacgacgtgcccgtgcacctgagctgcggcgacgagcacagcgccgtggtgaccggcaacaacaagctgtacatgttcggcagcaacaactggggccagctgggcctgggcagcaagagcgccatcagcaagcccacctgcgtgaaggccctgaagcccgagaaggtgaagctggccgcctgcggcagaaaccacaccctggtgagcaccgagggcggcaacgtgtacgccaccggcggcaacaacgagggccagctgggcctgggcgacaccgaggagagaaacaccttccacgtgatcagcttcttcaccagcgagcacaagatcaagcagctgagcgccggcagcaacaccagcgccgccctgaccgaggacggcagactgttcatgtggggcgacaacagcgagggccagatcggcctgaagaacgtgagcaacgtgtgcgtgccccagcaggtgaccatcggcaagcccgtgagctggatcagctgcggctactaccacagcgccttcgtgaccaccgacggcgagctgtacgtgttcggcgagcccgagaacggcaagctgggcctgcccaaccagctgctgggcaaccacagaaccccccagctggtgagcgagatccccgagaaggtgatccaggtggcctgcggcggcgagcacaccgtggtgctgaccgagaacgccgtgtacaccttcggcctgggccagttcggccagctgggcctgggcaccttcctgttcgagaccagcgagcccaaggtgatcgagaacatcagagaccagaccatcagctacatcagctgcggcgagaaccacaccgccctgatcaccgacatcggcctgatgtacaccttcggcgacggcagacacggcaagctgggcctgggcctggagaacttcaccaaccacttcatccccaccctgtgcagcaacttcctgagattcatcgtgaagctggtggcctgcggcggctgccacatggtggtgttcgccgccccccacagaggcgtggccaaggagatcgagttcgacgagatcaacgacacctgcctgagcgtggccaccttcctgccctacagcagcctgaccagcggcaacgtgctgcagagaaccctgagcgccagaatgagaagaagagagagagagagaagccccgacagcttcagcatgagaagaaccctgccccccatcgagggcaccctgggcctgagcgcctgcttcctgcccaacagcgtgttccccagatgcagcgagagaaacctgcaggagagcgtgctgagcgagcaggacctgatgcagcccgaggagcccgactacctgctggacgagatgaccaaggaggccgagatcgacaacagcagcaccgtggagagcctgggcgagaccaccgacatcctgaacatgacccacatcatgagcctgaacagcaacgagaagagcctgaagctgagccccgtgcagaagcagaagaagcagcagaccatcggcgagctgacccaggacaccgccctgaccgagaacgacgacagcgacgagtacgaggagatgagcgagatgaaggagggcaaggcctgcaagcagcacgtgagccagggcatcttcatgacccagcccgccaccaccatcgaggccttcagcgacgaggaggtgggcaacgacaccggccaggtgggcccccaggccgacaccgacggcgagggcctgcagaaggaggtgtacagacacgagaacaacaacggcgtggaccagctggacgccaaggagatcgagaaggagagcgacggcggccacagccagaaggagagcgaggccgaggagatcgacagcgagaaggagaccaagctggccgagatcgccggcatgaaggacctgagagagagagagaagagcaccaagaagatgagccccttcttcggcaacctgcccgacagaggcatgaacaccgagagcgaggagaacaaggacttcgtgaagaagagagagagctgcaagcaggacgtgatcttcgacagcgagagagagagcgtggagaagcccgacagctacatggagggcgccagcgagagccagcagggcatcgccgacggcttccagcagcccgaggccatcgagttcagcagcggcgagaaggaggacgacgaggtggagaccgaccagaacatcagatacggcagaaagctgatcgagcagggcaacgagaaggagaccaagcccatcatcagcaagagcatggccaagtacgacttcaagtgcgacagactgagcgagatccccgaggagaaggagggcgccgaggacagcaagggcaacggcatcgaggagcaggaggtggaggccaacgaggagaacgtgaaggtgcacggcggcagaaaggagaagaccgagatcctgagcgacgacctgaccgacaaggccgaggaccacgagttcagcaagaccgaggagctgaagctggaggacgtggacgaggagatcaacgccgagaacgtggagagcaagaagaagaccgtgggcgacgacgagagcgtgcccaccggctaccacagcaagaccgagggcgccgagagaaccaacgacgacagcagcgccgagaccatcgagaagaaggagaaggccaacctggaggagagagccatctgcgagtacaacgagaaccccaagggctacatgctggacgacgccgacagcagcagcctggagatcctggagaacagcgagaccacccccagcaaggacatgaagaagaccaagaagatcttcctgttcaagagagtgcccagcatcaaccagaagatcgtgaagaacaacaacgagcccctgcccgagatcaagagcatcggcgaccagatcatcctgaagagcgacaacaaggacgccgaccagaaccacatgagccagaaccaccagaacatcccccccaccaacaccgagagaagaagcaagagctgcaccatcctgtag

SEQ ID NO: 96867 - DNA, 1941 bp, synthetic construct
  misc_feature 1..1941: note = Description of Artificial Sequence: Synthetic coding sequence
  source 1..1941: mol_type = other DNA
atgagagagcccgaggagctgatgcccgacagcggcgccgtgttcaccttcggcaagagcaagttcgccgagaacaaccccggcaagttctggttcaagaacgacgtgcccgtgcacctgagctgcggcgacgagcacagcgccgtggtgaccggcaacaacaagctgtacatgttcggcagcaacaactggggccagctgggcctgggcagcaagagcgccatcagcaagcccacctgcgtgaaggccctgaagcccgagaaggtgaagctggccgcctgcggcagaaaccacaccctggtgagcaccgagggcggcaacgtgtacgccaccggcggcaacaacgagggccagctgggcctgggcgacaccgaggagagaaacaccttccacgtgatcagcttcttcaccagcgagcacaagatcaagcagctgagcgccggcagcaacaccagcgccgccctgaccgaggacggcagactgttcatgtggggcgacaacagcgagggccagatcggcctgaagaacgtgagcaacgtgtgcgtgccccagcaggtgaccatcggcaagcccgtgagctggatcagctgcggctactaccacagcgccttcgtgaccaccgacggcgagctgtacgtgttcggcgagcccgagaacggcaagctgggcctgcccaaccagctgctgggcaaccacagaaccccccagctggtgagcgagatccccgagaaggtgatccaggtggcctgcggcggcgagcacaccgtggtgctgaccgagaacgccgtgtacaccttcggcctgggccagttcggccagctgggcctgggcaccttcctgttcgagaccagcgagcccaaggtgatcgagaacatcagagaccagaccatcagctacatcagctgcggcgagaaccacaccgccctgatcaccgacatcggcctgatgtacaccttcggcgacggcagacacggcaagctgggcctgggcctggagaacttcaccaaccacttcatccccaccctgtgcagcaacttcctgagattcatcgtgaagctggtggcctgcggcggctgccacatggtggtgttcgccgccccccacagaggcgtggccaaggagatcgagttcgacgagatcaacgacacctgcctgagcgtggccaccttcctgccctacagcagcctgaccagcggcaacgtgctgcagagaaccctgagcgccagaatgagaagaagagagagagagagaagccccgacagcttcagcatgagaagaaccctgccccccatcgagggcaccctgggcctgagcgcctgcttcctgcccaacagcgtgttccccagatgcagcgagagaaacctgcaggagagcgtgctgagcgagcaggacctgatgcagcccgaggagcccgactacctgctggacgagatgaccaaggaggccgagatcgacaacagcagcaccgtggagagcctgggcgagaccaccgacatcctgaacatgacccacatcatgagcctgaacagcaacgagaagagcctgaagctgagccccgtgcagaagcagaagaagcagcagaccatcggcgagctgacccaggacaccgccctgaccgagaacgacgacagcgacgagtacgaggagatgagcgagatgaaggagggcaaggcctgcaagcagcacgtgagccagggcatcttcatgacccagcccgccaccaccatcgaggccttcagcgacgaggaggtggagatccccgaggagaaggagggcgccgaggacagcaagggcaacggcatcgaggagcaggaggtggaggccaacgaggagaacgtgaaggtgcacggcggcagaaaggagaagaccgagatcctgagcgacgacctgaccgacaaggccgagtacagcgccagccacagccagatcgtgagcgtgtag

SEQ ID NO: 96868 - DNA, 3459 bp, synthetic construct
  misc_feature 1..3459: note = Description of Artificial Sequence: Synthetic coding sequence
  source 1..3459: mol_type = other DNA
atgagagagcccgaggagctgatgcccgacagcggcgccgtgttcaccttcggcaagagcaagttcgccgagaacaaccccggcaagttctggttcaagaacgacgtgcccgtgcacctgagctgcggcgacgagcacagcgccgtggtgaccggcaacaacaagctgtacatgttcggcagcaacaactggggccagctgggcctgggcagcaagagcgccatcagcaagcccacctgcgtgaaggccctgaagcccgagaaggtgaagctggccgcctgcggcagaaaccacaccctggtgagcaccgagggcggcaacgtgtacgccaccggcggcaacaacgagggccagctgggcctgggcgacaccgaggagagaaacaccttccacgtgatcagcttcttcaccagcgagcacaagatcaagcagctgagcgccggcagcaacaccagcgccgccctgaccgaggacggcagactgttcatgtggggcgacaacagcgagggccagatcggcctgaagaacgtgagcaacgtgtgcgtgccccagcaggtgaccatcggcaagcccgtgagctggatcagctgcggctactaccacagcgccttcgtgaccaccgacggcgagctgtacgtgttcggcgagcccgagaacggcaagctgggcctgcccaaccagctgctgggcaaccacagaaccccccagctggtgagcgagatccccgagaaggtgatccaggtggcctgcggcggcgagcacaccgtggtgctgaccgagaacgccgtgtacaccttcggcctgggccagttcggccagctgggcctgggcaccttcctgttcgagaccagcgagcccaaggtgatcgagaacatcagagaccagaccatcagctacatcagctgcggcgagaaccacaccgccctgatcaccgacatcggcctgatgtacaccttcggcgacggcagacacggcaagctgggcctgggcctggagaacttcaccaaccacttcatccccaccctgtgcagcaacttcctgagattcatcgtgaagctggtggcctgcggcggctgccacatggtggtgttcgccgccccccacagaggcgtggccaaggagatcgagttcgacgagatcaacgacacctgcctgagcgtggccaccttcctgccctacagcagcctgaccagcggcaacgtgctgcagagaaccctgagcgccagaatgagaagaagagagagagagagaagccccgacagcttcagcatgagaagaaccctgccccccatcgagggcaccctgggcctgagcgcctgcttcctgcccaacagcgtgttccccagatgcagcgagagaaacctgcaggagagcgtgctgagcgagcaggacctgatgcagcccgaggagcccgactacctgctggacgagatgaccaaggaggccgagatcgacaacagcagcaccgtggagagcctgggcgagaccaccgacatcctgaacatgacccacatcatgagcctgaacagcaacgagaagagcctgaagctgagccccgtgcagaagcagaagaagcagcagaccatcggcgagctgacccaggacaccgccctgaccgagaacgacgacagcgacgagtacgaggagatgagcgagatgaaggagggcaaggcctgcaagcagcacgtgagccagggcatcttcatgacccagcccgccaccaccatcgaggccttcagcgacgaggaggtggagatccccgaggagaaggagggcgccgaggacagcaagggcaacggcatcgaggagcaggaggtggaggccaacgaggagaacgtgaaggtgcacggcggcagaaaggagaagaccgagatcctgagcgacgacctgaccgacaaggccgaggtgagcgagggcaaggccaagagcgtgggcgaggccgaggacggccccgagggcagaggcgacggcacctgcgaggagggcagcagcggcgccgagcactggcaggacgaggagagagagaagggcgagaaggacaagggcagaggcgagatggagagacccggcgagggcgagaaggagctggccgagaaggaggagtggaagaagagagacggcgaggagcaggagcagaaggagagagagcagggccaccagaaggagagaaaccaggagatggaggagggcggcgaggaggagcacggcgagggcgaggaggaggagggcgacagagaggaggaggaggagaaggagggcgagggcaaggaggagggcgagggcgaggaggtggagggcgagagagagaaggaggagggcgagagaaagaaggaggagagagccggcaaggaggagaagggcgaggaggagggcgaccagggcgagggcgaggaggaggagaccgagggcagaggcgaggagaaggaggagggcggcgaggtggagggcggcgaggtggaggagggcaagggcgagagagaggaggaggaggaggagggcgagggcgaggaggaggagggcgagggcgaggaggaggagggcgagggcgaggaggaggagggcgagggcaagggcgaggaggagggcgaggagggcgagggcgaggaggagggcgaggagggcgagggcgagggcgaggaggaggagggcgagggcgagggcgaggaggagggcgagggcgagggcgaggaggaggagggcgagggcgagggcgaggaggagggcgagggcgagggcgaggaggaggagggcgagggcaagggcgaggaggagggcgaggagggcgagggcgagggcgaggaggaggagggcgagggcgagggcgaggacggcgagggcgagggcgaggaggaggagggcgagtgggagggcgaggaggaggagggcgagggcgagggcgaggaggagggcgagggcgagggcgaggagggcgagggcgagggcgaggaggaggagggcgagggcgagggcgaggaggaggagggcgaggaggagggcgaggaggagggcgagggcgaggaggagggcgagggcgagggcgaggaggaggaggagggcgaggtggagggcgaggtggagggcgaggagggcgagggcgagggcgaggaggaggagggcgaggaggagggcgaggagagagagaaggagggcgagggcgaggagaacagaagaaacagagaggaggaggaggaggaggagggcaagtaccaggagaccggcgaggaggagaacgagagacaggacggcgaggagtacaagaaggtgagcaagatcaagggcagcgtgaagtacggcaagcacaagacctaccagaagaagagcgtgaccaacacccagggcaacggcaaggagcagagaagcaagatgcccgtgcagagcaagagactgctgaagaacggccccagcggcagcaagaagttctggaacaacgtgctgccccactacctggagctgaagtag

SEQ ID NO: 96869 - DNA, 2121 bp, synthetic construct
  misc_feature 1..2121: note = Description of Artificial Sequence: Synthetic coding sequence
  source 1..2121: mol_type = other DNA
atgaacgagagcaagcccggcgacagccagaacctggcctgcgtgttctgcagaaagcacgacgactgccccaacaagtacggcgagaagaagaccaaggagaagtggaacctgaccgtgcactactactgcctgctgatgagcagcggcatctggcagagaggcaaggaggaggagggcgtgtacggcttcctgatcgaggacatcagaaaggaggtgaacagagccagcaagctgaagtgctgcgtgtgcaagaagaacggcgccagcatcggctgcgtggcccccagatgcaagagaagctaccacttcccctgcggcctgcagagagagtgcatcttccagttcaccggcaacttcgccagcttctgctgggaccacagacccgtgcagatcatcaccagcaacaactacagagagagcctgccctgcaccatctgcctggagttcatcgagcccatccccagctacaacatcctgagaagcccctgctgcaagaacgcctggttccacagagactgcctgcaggtgcaggccatcaacgccggcgtgttcttcttcagatgcaccatctgcaacaacagcgacatcttccagaaggagatgctgagaatgggcatccacatccccgagaaggacgccagctgggagctggaggagaacgcctaccaggagctgctgcagcactacgagagatgcgacgtgagaagatgcagatgcaaggagggcagagactacaacgcccccgacagcaagtgggagatcaagagatgccagtgctgcggcagcagcggcacccacctggcctgcagcagcctgagaagctgggagcagaactgggagtgcctggagtgcagaggcatcatctacaacagcggcgagttccagaaggccaagaagcacgtgctgcccaacagcaacaacgtgggcatcaccgactgcctgctggaggagagcagccccaagctgcccagacagagccccggcagccagagcaaggacctgctgagacagggcagcaagttcagaagaaacgtgagcaccctgctgatcgagctgggcttccagatcaagaagaagaccaagagactgtacatcaacaaggccaacatctggaacagcgccctggacgccttcagaaacagaaacttcaaccccagctacgccatcgaggtggcctacgtgatcgagaacgacaacttcggcagcgagcaccccggcagcaagcaggagttcctgagcctgctgatgcagcacctggagaacagcagcctgttcgagggcagcctgagcaagaacctgagcctgaacagccaggccctgaaggagaacctgtactacgaggccggcaagatgctggccatcagcctggtgcacggcggccccagccccggcttcttcagcaagaccctgttcaactgcctggtgtacggccccgagaacacccagcccatcctggacgacgtgagcgacttcgacgtggcccagatcatcatcagaatcaacaccgccaccaccgtggccgacctgaagagcatcatcaacgagtgctacaactacctggagctgatcggctgcctgagactgatcaccaccctgagcgacaagtacatgctggtgaaggacatcctgggctaccacgtgatccagagagtgcacacccccttcgagagcttcaagcagggcctgaagaccctgggcgtgctggagaagatccaggcctaccccgaggccttctgcagcatcctgtgccacaagcccgagagcctgagcgccaagatcctgagcgagctgttcaccgtgcacaccctgcccgacgtgaaggccctgggcttctggaacagctacctgcaggccgtggaggacggcaagagcaccaccaccatggaggacatcctgatcttcgccaccggctgcagcagcatcccccccgccggcttcaagcccacccccagcatcgagtgcctgcacgtggacttccccgtgggcaacaagtgcaacaactgcctggccatccccatcaccaacacctacaaggagttccaggagaacatggacttcaccatcagaaacaccctgagactggagaaggaggagagcagccactacatcggccactag

SEQ ID NO: 96870 - DNA, 1938 bp, synthetic construct
  misc_feature 1..1938: note = Description of Artificial Sequence: Synthetic coding sequence
  source 1..1938: mol_type = other DNA
atgctgctgatggcccccgacagatgcagatacgtgtggaagcactgccagcccatggagatgagaatcaagtggatcttcctgtgctgcatcagacccctgtacgacttcaccagccagtacgtgatggagaccgacagcctgttcctgcactacctgcaggaggccagcgccagactggacatccaccaggccatggccagcgagcacagcaccctggccgccggctggatctgcttcgacagagtgctggagaccgtggagaaggtgcacggcctggccaccctgatcggcgccggcggcgaggagttcggcgtgctggagtactggatgagactgagattccccatcaagcccagcctgcaggcctgcaacaagagaaagaaggcccaggtgtacctgagcaccgacgtgctgggcggcagaaaggcccaggaggaggagttcagaagcgagagctgggagccccagaacgagctgtggatcgagatcaccaagtgctgcggcctgagaagcagatggctgggcacccagcccagcccctacgccgtgtacagattcttcaccttcagcgaccacgacaccgccatcatccccgccagcaacaacccctacttcagagaccaggccagattccccgtgctggtgaccagcgacctggaccactacctgagaagagaggccctgagcatccacgtgttcgacgacgaggacctggagcccggcagctacctgggcagagccagagtgcccctgctgcccctggccaagaacgagagcatcaagggcgacttcaacctgaccgaccccgccgagaagcccaacggcagcatccaggtgcagctggactggaagttcccctacatcccccccgagagcttcctgaagcccgaggcccagaccaagggcaaggacaccaaggacagcagcaagatcagcagcgaggaggagaaggccagcttccccagccaggaccagatggccagccccgaggtgcccatcgaggccggccagtacagaagcaagagaaagcccccccacggcggcgagagaaaggagaaggagcaccaggtggtgagctacagcagaagaaagcacggcaagagaatcggcgtgcagggcaagaacagaatggagtacctgagcctgaacatcctgaacggcaacacccccgagcaggtgaactacaccgagtggaagttcagcgagaccaacagcttcatcggcgacggcttcaagaaccagcacgaggaggaggagatgaccctgagccacagcgccctgaagcagaaggagcccctgcaccccgtgaacgacaaggagagcagcgagcagggcagcgaggtgagcgaggcccagaccaccgacagcgacgacgtgatcgtgccccccatgagccagaagtaccccaaggccgacagcgagaagatgtgcatcgagatcgtgagcctggccttctaccccgaggccgaggtgatgagcgacgagaacatcaagcaggtgtacgtggagtacaagttctacgacctgcccctgagcgagaccgagacccccgtgagcctgagaaagcccagagccggcgaggagatccacttccacttcagcaaggtgatcgacctggacccccaggagcagcagggcagaagaagattcctgttcgacatgctgaacggccaggaccccgaccagggccacctgaagttcaccgtggtgagcgaccccctggacgaggagaagaaggagtgcgaggaggtgggctacgcctacctgcagctgtggcagatcctggagagcggcagagacatcctggagcaggagctggacatcgtgagccccgaggacctggccacccccatcggcagactgaaggtgagcctgcaggccgccgccgtgctgcacgccatctacaaggagatgaccgaggacctgttcagctag

SEQ ID NO: 96871 - DNA, 1839 bp, synthetic construct
  misc_feature 1..1839: note = Description of Artificial Sequence: Synthetic coding sequence
  source 1..1839: mol_type = other DNA
atgctgaagctggacaacaaggacgtgatcagccaccccctgggctaccccagcgagagcctgctgagcatcgccagcatgctggacagcagcgacagcagcagccagccccactggagcaacgagctgatcgccgagcagctgcagcagcaggtgagccagctgcaggaccagctggacgccgagctggaggacaagagaaaggtgctgctggagctgagcagagagaaggcccagaacgaggacctgaagctggaggtgaccaacatcctgcagaagcacaagcaggaggtggagctgctgcagaacgccgccaccatcagccagccccccgacagacagagcgagcccgccacccaccccgccgtgctgcaggagaacacccagatcgagcccagcgagcccaagaaccaggaggagaagaagctgagccaggtgctgaacgagctgcaggtgagccacgccgagaccaccctggagctggagaagaccagagacatgctgatcctgcagagaaagatcaacgtgtgctaccaggaggagctggaggccatgatgaccaaggccgacaacgacaacagagaccacaaggagaagctggagagactgaccagactgctggacctgaagaacaacagaatcaagcagctggagggcatcctgagaagccacgacctgcccaccagcggcgacttcaacctgaccgaccccgccgagaagcccaacggcagcatccaggtgcagctggactggaagttcccctacatcccccccgagagcttcctgaagcccgaggcccagaccaagggcaaggacaccaaggacagcagcaagatcagcagcgaggaggagaaggccagcttccccagccaggaccagatggccagccccgaggtgcccatcgaggccggccagtacagaagcaagagaaagcccccccacggcggcgagagaaaggagaaggagcaccaggtggtgagctacagcagaagaaagcacggcaagagaatcggcgtgcagggcaagaacagaatggagtacctgagcctgaacatcctgaacggcaacacccccgagcaggtgaactacaccgagtggaagttcagcgagaccaacagcttcatcggcgacggcttcaagaaccagcacgaggaggaggagatgaccctgagccacagcgccctgaagcagaaggagcccctgcaccccgtgaacgacaaggagagcagcgagcagggcagcgaggtgagcgaggcccagaccaccgacagcgacgacgtgatcgtgccccccatgagccagaagtaccccaaggccgacagcgagaagatgtgcatcgagatcgtgagcctggccttctaccccgaggccgaggtgatgagcgacgagaacatcaagcaggtgtacgtggagtacaagttctacgacctgcccctgagcgagaccgagacccccgtgagcctgagaaagcccagagccggcgaggagatccacttccacttcagcaaggtgatcgacctggacccccaggagcagcagggcagaagaagattcctgttcgacatgctgaacggccaggaccccgaccagggccacctgaagttcaccgtggtgagcgaccccctggacgaggagaagaaggagtgcgaggaggtgggctacgcctacctgcagctgtggcagatcctggagagcggcagagacatcctggagcaggagctggacatcgtgagccccgaggacctggccacccccatcggcagactgaaggtgagcctgcaggccgccgccgtgctgcacgccatctacaaggagatgaccgaggacctgttcagctag

SEQ ID NO: 96872 - DNA, 3861 bp, synthetic construct
  misc_feature 1..3861: note = Description of Artificial Sequence: Synthetic coding sequence
  source 1..3861: mol_type = other DNA
atgagccacctggtggaccccaccagcggcgacctgcccgtgagagacatcgacgccatccccctggtgctgcccgccagcaagggcaagaacatgaagacccagccccccctgagcagaatgaacagagaggagctggaggacagcttcttcagactgagagaggaccacatgctggtgaaggagctgagctggaagcagcaggacgagatcaagagactgagaaccaccctgctgagactgaccgccgccggcagagacctgagagtggccgaggaggccgcccccctgagcgagaccgccagaagaggccagaaggccggctggagacagagactgagcatgcaccagagaccccagatgcacagactgcagggccacttccactgcgtgggccccgccagccccagaagagcccagcccagagtgcaggtgggccacagacagctgcacaccgccggcgcccccgtgcccgagaagcccaagagaggccccagagacagactgagctacaccgccccccccagcttcaaggagcacgccaccaacgagaacagaggcgaggtggccagcaagcccagcgagctggtgagcggcagcaacagcatcatcagcttcagcagcgtgatcagcatggccaagcccatcggcctgtgcatgcccaacagcgcccacatcatggccagcaacaccatgcaggtggaggagccccccaagagccccgagaagatgtggcccaaggacgagaacttcgagcagagaagcagcctggagtgcgcccagaaggccgccgagctgagagccagcatcaaggagaaggtggagctgatcagactgaagaagctgctgcacgagagaaacgccagcctggtgatgaccaaggcccagctgaccgaggtgcaggaggcctacgagaccctgctgcagaagaaccagggcatcctgagcgccgcccacgaggccctgctgaagcaggtgaacgagctgagagccgagctgaaggaggagagcaagaaggccgtgagcctgaagagccagctggaggacgtgagcatcctgcagatgaccctgaaggagttccaggagagagtggaggacctggagaaggagagaaagctgctgaacgacaactacgacaagctgctggagagcatgctggacagcagcgacagcagcagccagccccactggagcaacgagctgatcgccgagcagctgcagcagcaggtgagccagctgcaggaccagctggacgccgagctggaggacaagagaaaggtgctgctggagctgagcagagagaaggcccagaacgaggacctgaagctggaggtgaccaacatcctgcagaagcacaagcaggaggtggagctgctgcagaacgccgccaccatcagccagccccccgacagacagagcgagcccgccacccaccccgccgtgctgcaggagaacacccagatcgagcccagcgagcccaagaaccaggaggagaagaagctgagccaggtgctgaacgagctgcaggtgagccacgccgagaccaccctggagctggagaagaccagagacatgctgatcctgcagagaaagatcaacgtgtgctaccaggaggagctggaggccatgatgaccaaggccgacaacgacaacagagaccacaaggagaagctggagagactgaccagactgctggacctgaagaacaacagaatcaagcagctggagggcatcctgagaagccacgacctgcccaccagcgagcagctgaaggacgtggcctacggcaccagacccctgagcctgtgcctggagaccctgcccgcccacggcgacgaggacaaggtggacatcagcctgctgcaccagggcgagaacctgttcgagctgcacatccaccaggccttcctgaccagcgccgccctggcccaggccggcgacacccagcccaccaccttctgcacctacagcttctacgacttcgagacccactgcacccccctgagcgtgggcccccagcccctgtacgacttcaccagccagtacgtgatggagaccgacagcctgttcctgcactacctgcaggaggccagcgccagactggacatccaccaggccatggccagcgagcacagcaccctggccgccggctggatctgcttcgacagagtgctggagaccgtggagaaggtgcacggcctggccaccctgatcggcgccggcggcgaggagttcggcgtgctggagtactggatgagactgagattccccatcaagcccagcctgcaggcctgcaacaagagaaagaaggcccaggtgtacctgagcaccgacgtgctgggcggcagaaaggcccaggaggaggagttcagaagcgagagctgggagccccagaacgagctgtggatcgagatcaccaagtgctgcggcctgagaagcagatggctgggcacccagcccagcccctacgccgtgtacagattcttcaccttcagcgaccacgacaccgccatcatccccgccagcaacaacccctacttcagagaccaggccagattccccgtgctggtgaccagcgacctggaccactacctgagaagagaggccctgagcatccacgtgttcgacgacgaggacctggagcccggcagctacctgggcagagccagagtgcccctgctgcccctggccaagaacgagagcatcaagggcgacttcaacctgaccgaccccgccgagaagcccaacggcagcatccaggtgcagctggactggaagttcccctacatcccccccgagagcttcctgaagcccgaggcccagaccaagggcaaggacaccaaggacagcagcaagatcagcagcgaggaggagaaggccagcttccccagccaggaccagatggccagccccgaggtgcccatcgaggccggccagtacagaagcaagagaaagcccccccacggcggcgagagaaaggagaaggagcaccaggtggtgagctacagcagaagaaagcacggcaagagaatcggcgtgcagggcaagaacagaatggagtacctgagcctgaacatcctgaacggcaacacccccgagcaggtgaactacaccgagtggaagttcagcgagaccaacagcttcatcggcgacggcttcaagaaccagcacgaggaggaggagatgaccctgagccacagcgccctgaagcagaaggagcccctgcaccccgtgaacgacaaggagagcagcgagcagggcagcgaggtgagcgaggcccagaccaccgacagcgacgacgtgatcgtgccccccatgagccagaagtaccccaaggccgacagcgagaagatgtgcatcgagatcgtgagcctggccttctaccccgaggccgaggtgatgagcgacgagaacatcaagcaggtgtacgtggagtacaagttctacgacctgcccctgagcgagaccgagacccccgtgagcctgagaaagcccagagccggcgaggagatccacttccacttcagcaaggtgatcgacctggacccccaggagcagcagggcagaagaagattcctgttcgacatgctgaacggccaggaccccgaccagggccacctgaagttcaccgtggtgagcgaccccctggacgaggagaagaaggagtgcgaggaggtgggctacgcctacctgcagctgtggcagatcctggagagcggcagagacatcctggagcaggagctggacatcgtgagccccgaggacctggccacccccatcggcagactgaaggtgagcctgcaggccgccgccgtgctgcacgccatctacaaggagatgaccgaggacctgttcagctag

SEQ ID NO: 96873 - DNA, 1617 bp, synthetic construct
  misc_feature 1..1617: note = Description of Artificial Sequence: Synthetic coding sequence
  source 1..1617: mol_type = other DNA
atgaacctggagctgctggagagcttcggccagaactaccccgaggaggccgacggcaccctggactgcatcagcatggccctgacctgcaccttcaacagatggggcaccctgctggccgtgggctgcaacgacggcagaatcgtgatctgggacttcctgaccagaggcatcgccaagatcatcagcgcccacatccaccccgtgtgcagcctgtgctggagcagagacggccacaagctggtgagcgccagcaccgacaacatcgtgagccagtgggacgtgctgagcggcgactgcgaccagagattcagattccccagccccatcctgaaggtgcagtaccaccccagagaccagaacaaggtgctggtgtgccccatgaagagcgcccccgtgatgctgaccctgagcgacagcaagcacgtggtgctgcccgtggacgacgacagcgacctgaacgtggtggccagcttcgacagaagaggcgagtacatctacaccggcaacgccaagggcaagatcctggtgctgaagaccgacagccaggacctggtggccagcttcagagtgaccaccggcaccagcaacaccaccgccatcaagagcatcgagttcgccagaaagggcagctgcttcctgatcaacaccgccgacagaatcatcagagtgtacgacggcagagagatcctgacctgcggcagagacggcgagcccgagcccatgcagaagctgcaggacctggtgaacagaaccccctggaagaagtgctgcttcagcggcgacggcgagtacatcgtggccggcagcgccagacagcacgccctgtacatctgggagaagagcatcggcaacctggtgaagatcctgcacggcaccagaggcgagctgctgctggacgtggcctggcaccccgtgagacccatcatcgccagcatcagcagcggcgtggtgagcatctgggcccagaaccaggtggagaactggagcgccttcgcccccgacttcaaggagctggacgagaacgtggagtacgaggagagagagagcgagttcgacatcgaggacgaggacaagagcgagcccgagcagaccggcgccgacgccgccgaggacgaggaggtggacgtgaccagcgtggaccccatcgccgccttctgcagcagcgacgaggagctggaggacagcaaggccctgctgtacctgcccatcgcccccgaggtggaggaccccgaggagaacccctacggccccccccccgacgccgtgcagaccagcctgatggacgagggcgccagcagcgagaagaagagacagagcagcgccgacggcagccagccccccaagaagaagcccaagaccaccaacatcgagctgcagggcgtgcccaacgacgaggtgcaccccctgctgggcgtgaagggcgacggcaagagcaagaagaagcaggccggcagacccaagggcagcaagggcaaggagaaggacagccccttcaagcccaagctgtacaagggcgacagaggcctgcccctggagggcagcgccaagggcaaggtgcaggccgagctgagccagcccctgaccgccggcggcgccatcagcgagctgctgtag

SEQ ID NO: 96874 - DNA, 1503 bp, synthetic construct
  misc_feature 1..1503: note = Description of Artificial Sequence: Synthetic coding sequence
  source 1..1503: mol_type = other DNA
atgaacctggagctgctggagagcttcggccagaactaccccgaggaggccgacggcaccctggactgcatcagcatggccctgacctgcaccttcaacagatggggcaccctgctggccgtgggctgcaacgacggcagaatcgtgatctgggacttcctgaccagaggcatcgccaagatcatcagcgcccacatccaccccgtgtgcagcctgtgctggagcagagacggccacaagctggtgagcgccagcaccgacaacatcgtgagccagtgggacgtgctgagcggcgactgcgaccagagattcagattccccagccccatcctgaaggtgcagtaccaccccagagaccagaacaaggtgctggtgtgccccatgaagagcgcccccgtgatgctgaccctgagcgacagcaagcacgtggtgctgcccgtggacgacgacagcgacctgaacgtggtggccagcttcgacagaagaggcgagtacatctacaccggcaacgccaagggcaagatcctggtgctgaagaccgacagccaggacctggtggccagcttcagagtgaccaccggcaccagcaacaccaccgccatcaagagcatcgagttcgccagaaagggcagctgcttcctgatcaacaccgccgacagaatcatcagagtgtacgacggcagagagatcctgacctgcggcagagacggcgagcccgagcccatgcagaagctgcaggacctggtgaacagaaccccctggaagaagtgctgcttcagcggcgacggcgagtacatcgtggccggcagcgccagacagcacgccctgtacatctgggagaagagcatcggcaacctggtgaagatcctgcacggcaccagaggcgagctgctgctggacgtggcctggcaccccgtgagacccatcatcgccagcatcagcagcggcgtggtgagcatctgggcccagaaccaggtggagaactggagcgccttcgcccccgacttcaaggagctggacgagaacgtggagtacgaggagagagagagcgagttcgacatcgaggacgaggacaagagcgagcccgagcagaccggcgccgacgccgccgaggacgaggaggtggacgtgaccagcgtggaccccatcgccgccttctgcagcagcgacgaggagctggaggacagcaaggccctgctgtacctgcccatcgcccccgaggtggaggaccccgaggagaacccctacggccccccccccgacgccgtgcagaccagcctgatggacgagggcgccagcagcgagaagaagagacagagcagcgccgacggcagccagccccccaagaagaagcccaagaccaccaacatcgagctgcagggcgtgcccaacgacgaggtgcaccccctgctgggcgtgaagggcgacggcaagagcaagaagaagcaggccggcagacccaagggcagcaaggccggcggcgccatcagcgagctgctgtag

SEQ ID NO: 96875 - DNA, 5379 bp, synthetic construct
  misc_feature 1..5379: note = Description of Artificial Sequence: Synthetic coding sequence
  source 1..5379: mol_type = other DNA
atgagctgcgtgcactacaagttcagcagcaagctgaactacgacaccgtgaccttcgacggcctgcacatcagcctgtgcgacctgaagaagcagatcatgggcagagagaagctgaaggccgccgactgcgacctgcagatcaccaacgcccagaccaaggaggagtacaccgacgacaacgccctgatccccaagaacagcagcgtgatcgtgagaagaatccccatcggcggcgtgaagagcaccagcaagacctacgtgatcagcagaaccgagcccgccatggccaccaccaaggccatcgacgacagcagcgccagcatcagcctggcccagctgaccaagaccgccaacctggccgaggccaacgccagcgaggaggacaagatcaaggccatgatgagccagagcggccacgagtacgaccccatcaactacatgaagaagcccctgggcccccccccccccagctacacctgcttcagatgcggcaagcccggccactacatcaagaactgccccaccaacggcgacaagaacttcgagagcggccccagaatcaagaagagcaccggcatccccagaagcttcatgatggaggtgaaggaccccaacatgaagggcgccatgctgaccaacaccggcaagtacgccatccccaccatcgacgccgaggcctacgccatcggcaagaaggagaagccccccttcctgcccgaggagcccagcagcagcagcgaggaggacgaccccatccccgacgagctgctgtgcctgatctgcaaggacatcatgaccgacgccgtggtgatcccctgctgcggcaacagctactgcgacgagtgcatcagaaccgccctgctggagagcgacgagcacacctgccccacctgccaccagaacgacgtgagccccgacgccctgatcgccaacaagttcctgagacaggccgtgaacaacttcaagaacgagaccggctacaccaagagactgagaaagcagctgccccccccccccccccccatccccccccccagacccctgatccagagaaacctgcagcccctgatgagaagccccatcagcagacagcaggaccccctgatgatccccgtgaccagcagcagcacccaccccgcccccagcatcagcagcctgaccagcaaccagagcagcctggccccccccgtgagcggcaaccccagcagcgcccccgcccccgtgcccgacatcaccgccaccgtgagcatcagcgtgcacagcgagaagagcgacggccccttcagagacagcgacaacaagatcctgcccgccgccgccctggccagcgagcacagcaagggcaccagcagcatcgccatcaccgccctgatggaggagaagggctaccaggtgcccgtgctgggcacccccagcctgctgggccagagcctgctgcacggccagctgatccccaccaccggccccgtgagaatcaacaccgccagacccggcggcggcagacccggctgggagcacagcaacaagctgggctacctggtgagccccccccagcagatcagaagaggcgagagaagctgctacagaagcatcaacagaggcagacaccacagcgagagaagccagagaacccagggccccagcctgcccgccacccccgtgttcgtgcccgtgccccccccccccctgtaccccccccccccccacaccctgcccctgccccccggcgtgccccccccccagttcagcccccagttcccccccggccagcccccccccgccggctacagcgtgcccccccccggcttcccccccgcccccgccaacctgagcaccccctgggtgagcagcggcgtgcagaccgcccacagcaacaccatccccaccacccaggccccccccctgagcagagaggagttctacagagagcagagaagactgaaggaggaggagaagaagaagagcaagctggacgagttcaccaacgacttcgccaaggagctgatggagtacaagaagatccagaaggagagaagaagaagcttcagcagaagcaagagcccctacagcggcagcagctacagcagaagcagctacacctacagcaagagcagaagcggcagcaccagaagcagaagctacagcagaagcttcagcagaagccacagcagaagctacagcagaagccccccctaccccagaagaggcagaggcaagagcagaaactacagaagcagaagcagaagccacggctaccacagaagcagaagcagaagccccccctacagaagataccacagcagaagcagaagcccccaggccttcagaggccagagccccaacaagagaaacgtgccccagggcgagaccgagagagagtacttcaacagatacagagaggtgccccccccctacgacatgaaggcctactacggcagaagcgtggacttcagagaccccttcgagaaggagagatacagagagtgggagagaaagtacagagagtggtacgagaagtactacaagggctacgccgccggcgcccagcccagacccagcgccaacagagagaacttcagccccgagagattcctgcccctgaacatcagaaacagccccttcaccagaggcagaagagaggactacgtgggcggccagagccacagaagcagaaacatcggcagcaactaccccgagaagctgagcgccagagacggccacaaccagaaggacaacaccaagagcaaggagaaggagagcgagaacgcccccggcgacggcaagggcaacaagcacaagaagcacagaaagagaagaaagggcgaggagagcgagggcttcctgaaccccgagctgctggagaccagcagaaagagcagagagcccaccggcgtggaggagaacaagaccgacagcctgttcgtgctgcccagcagagacgacgccacccccgtgagagacgagcccatggacgccgagagcatcaccttcaagagcgtgagcgagaaggacaagagagagagagacaagcccaaggccaagggcgacaagaccaagagaaagaacgacggcagcgccgtgagcaagaaggagaacatcgtgaagcccgccaagggcccccaggagaaggtggacggcgagagagagagaagccccagaagcgagccccccatcaagaaggccaaggaggagacccccaagaccgacaacaccaagagcagcagcagcagccagaaggacgagaagatcaccggcacccccagaaaggcccacagcaagagcgccaaggagcaccaggagaccaagcccgtgaaggaggagaaggtgaagaaggactacagcaaggacgtgaagagcgagaagctgaccaccaaggaggagaaggccaagaagcccaacgagaagaacaagcccctggacaacaagggcgagaagagaaagagaaagaccgaggagaagggcgtggacaaggacttcgagagcagcagcatgaagatcagcaagctggaggtgaccgagatcgtgaagcccagccccaagagaaagatggagcccgacaccgagaagatggacagaacccccgagaaggacaagatcagcctgagcgcccccgccaagaagatcaagctgaacagagagaccggcaagaagatcggcagcaccgagaacatcagcaacaccaaggagcccagcgagaagctggagagcaccagcagcaaggtgaagcaggagaaggtgaagggcaaggtgagaagaaaggtgaccggcaccgagggcagcagcagcaccctggtggactacaccagcaccagcagcaccggcggcagccccgtgagaaagagcgaggagaagaccgacaccaagagaaccgtgatcaagaccatggaggagtacaacaacgacaacaccgcccccgccgaggacgtgatcatcatgatccaggtgccccagagcaagtgggacaaggacgacttcgagagcgaggaggaggacgtgaagagcacccagcccatcagcagcgtgggcaagcccgccagcgtgatcaagaacgtgagcaccaagcccagcaacatcgtgaagtaccccgagaaggagagcgagcccagcgagaagatccagaagttcaccaaggacgtgagccacgagatcatccagcacgaggtgaagagcagcaagaacagcgccagcagcgagaagggcaagaccaaggacagagactacagcgtgctggagaaggagaaccccgagaagagaaagaacagcacccagcccgagaaggagagcaacctggacagactgaacgagcagggcaacttcaagagcctgagccagagcagcaaggaggccagaaccagcgacaagcacgacagcaccagagccagcagcaacaaggacttcacccccaacagagacaagaagaccgactacgacaccagagagtacagcagcagcaagagaagagacgagaagaacgagctgaccagaagaaaggacagccccagcagaaacaaggacagcgccagcggccagaagaacaagcccagagaggagagagacctgcccaagaagggcaccggcgacagcaagaagagcaacagcagccccagcagagacagaaagccccacgaccacaaggccacctacgacaccaagagacccaacgaggagaccaagagcgtggacaagaacccctgcaaggacagagagaagcacgtgctggaggccagaaacaacaaggagagcagcggcaacaagctgctgtacatcctgaacccccccgagacccaggtggagaaggagcagatcaccggccagatcgacaagagcaccgtgaagcccaagccccagctgagccacagcagcagactgagcagcgacctgaccagagagaccgacgaggccgccttcgagcccgactacaacgagagcgacagcgagagcaacgtgagcgtgaaggaggaggagagcagcggcaacatcagcaaggacctgaaggacaagatcgtggagaaggccaaggagagcctggacaccgccgccgtggtgcaggtgggcatcagcagaaaccagagccacagcagccccagcgtgagccccagcagaagccacagccccagcggcagccagaccagaagccacagcagcagcgccagcagcgccgagagccaggacagcaagaagaagaagaagaagaaggagaagaagaagcacaagaagcacaagaagcacaagaagcacaagaagcacgccggcaccgaggtggagctggagaagagccagaagcacaagcacaagaagaagaagagcaagaagaacaaggacaaggagaaggagaaggagaaggacgaccagaaggtgaagagcgtgaccgtgtag

SEQ ID NO: 96876 - DNA, 5277 bp, synthetic construct
  misc_feature 1..5277: note = Description of Artificial Sequence: Synthetic coding sequence
  source 1..5277: mol_type = other DNA
atgagctgcgtgcactacaagttcagcagcaagctgaactacgacaccgtgaccttcgacggcctgcacatcagcctgtgcgacctgaagaagcagatcatgggcagagagaagctgaaggccgccgactgcgacctgcagatcaccaacgcccagaccaaggaggagtacaccgacgacaacgccctgatccccaagaacagcagcgtgatcgtgagaagaatccccatcggcggcgtgaagagcaccagcaagacctacgtgatcagcagaaccgagcccgccatggccaccaccaaggccatcgacgacagcagcgccagcatcagcctggcccagctgaccaagaccgccaacctggccgaggccaacgccagcgaggaggacaagatcaaggccatgatgagccagagcggccacgagtacgaccccatcaactacatgaagaagcccctgggcccccccccccccagctacacctgcttcagatgcggcaagcccggccactacatcaagaactgccccaccaacggcgacaagaacttcgagagcggccccagaatcaagaagagcaccggcatccccagaagcttcatgatggaggtgaaggaccccaacatgaagggcgccatgctgaccaacaccggcaagtacgccatccccaccatcgacgccgaggcctacgccatcggcaagaaggagaagccccccttcctgcccgaggagcccagcagcagcagcgaggaggacgaccccatccccgacgagctgctgtgcctgatctgcaaggacatcatgaccgacgccgtggtgatcccctgctgcggcaacagctactgcgacgagtgcatcagaaccgccctgctggagagcgacgagcacacctgccccacctgccaccagaacgacgtgagccccgacgccctgatcgccaacaagttcctgagacaggccgtgaacaacttcaagaacgagaccggctacaccaagagactgagaaagcagctgccccccccccccccccccatccccccccccagacccctgatccagagaaacctgcagcccctgatgagaagccccatcagcagacagcaggaccccctgatgatccccgtgaccagcagcagcacccaccccgcccccagcatcagcagcctgaccagcaaccagagcagcctggccccccccgtgagcggcaaccccagcagcgcccccgcccccgtgcccgacatcaccgccaccgtgagcatcagcgtgcacagcgagaagagcgacggccccttcagagacagcgacaacaagatcctgcccgccgccgccctggccagcgagcacagcaagggcaccagcagcatcgccatcaccgccctgatggaggagaagggctaccaggtgcccgtgctgggcacccccagcctgctgggccagagcctgctgcacggccagctgatccccaccaccggccccgtgagaatcaacaccgccagacccggcggcggcagacccggctgggagcacagcaacaagctgggctacctggtgagccccccccagcagatcagaagaggcgagagaagctgctacagaagcatcaacagaggcagacaccacagcgagagaagccagagaacccagggccccagcctgcccgccacccccgtgttcgtgcccgtgccccccccccccctgtaccccccccccccccacaccctgcccctgccccccggcgtgccccccccccagttcagcccccagttcccccccggccagcccccccccgccggctacagcgtgcccccccccggcttcccccccgcccccgccaacctgagcaccccctgggtgagcagcggcgtgcagaccgcccacagcaacaccatccccaccacccaggccccccccctgagcagagaggagttctacagagagcagagaagactgaaggaggagagcaagagcccctacagcggcagcagctacagcagaagcagctacacctacagcaagagcagaagcggcagcaccagaagcagaagctacagcagaagcttcagcagaagccacagcagaagctacagcagaagccccccctaccccagaagaggcagaggcaagagcagaaactacagaagcagaagcagaagccacggctaccacagaagcagaagcagaagccccccctacagaagataccacagcagaagcagaagcccccaggccttcagaggccagagccccaacaagagaaacgtgccccagggcgagaccgagagagagtacttcaacagatacagagaggtgccccccccctacgacatgaaggcctactacggcagaagcgtggacttcagagaccccttcgagaaggagagatacagagagtgggagagaaagtacagagagtggtacgagaagtactacaagggctacgccgccggcgcccagcccagacccagcgccaacagagagaacttcagccccgagagattcctgcccctgaacatcagaaacagccccttcaccagaggcagaagagaggactacgtgggcggccagagccacagaagcagaaacatcggcagcaactaccccgagaagctgagcgccagagacggccacaaccagaaggacaacaccaagagcaaggagaaggagagcgagaacgcccccggcgacggcaagggcaacaagcacaagaagcacagaaagagaagaaagggcgaggagagcgagggcttcctgaaccccgagctgctggagaccagcagaaagagcagagagcccaccggcgtggaggagaacaagaccgacagcctgttcgtgctgcccagcagagacgacgccacccccgtgagagacgagcccatggacgccgagagcatcaccttcaagagcgtgagcgagaaggacaagagagagagagacaagcccaaggccaagggcgacaagaccaagagaaagaacgacggcagcgccgtgagcaagaaggagaacatcgtgaagcccgccaagggcccccaggagaaggtggacggcgagagagagagaagccccagaagcgagccccccatcaagaaggccaaggaggagacccccaagaccgacaacaccaagagcagcagcagcagccagaaggacgagaagatcaccggcacccccagaaaggcccacagcaagagcgccaaggagcaccaggagaccaagcccgtgaaggaggagaaggtgaagaaggactacagcaaggacgtgaagagcgagaagctgaccaccaaggaggagaaggccaagaagcccaacgagaagaacaagcccctggacaacaagggcgagaagagaaagagaaagaccgaggagaagggcgtggacaaggacttcgagagcagcagcatgaagatcagcaagctggaggtgaccgagatcgtgaagcccagccccaagagaaagatggagcccgacaccgagaagatggacagaacccccgagaaggacaagatcagcctgagcgcccccgccaagaagatcaagctgaacagagagaccggcaagaagatcggcagcaccgagaacatcagcaacaccaaggagcccagcgagaagctggagagcaccagcagcaaggtgaagcaggagaaggtgaagggcaaggtgagaagaaaggtgaccggcaccgagggcagcagcagcaccctggtggactacaccagcaccagcagcaccggcggcagccccgtgagaaagagcgaggagaagaccgacaccaagagaaccgtgatcaagaccatggaggagtacaacaacgacaacaccgcccccgccgaggacgtgatcatcatgatccaggtgccccagagcaagtgggacaaggacgacttcgagagcgaggaggaggacgtgaagagcacccagcccatcagcagcgtgggcaagcccgccagcgtgatcaagaacgtgagcaccaagcccagcaacatcgtgaagtaccccgagaaggagagcgagcccagcgagaagatccagaagttcaccaaggacgtgagccacgagatcatccagcacgaggtgaagagcagcaagaacagcgccagcagcgagaagggcaagaccaaggacagagactacagcgtgctggagaaggagaaccccgagaagagaaagaacagcacccagcccgagaaggagagcaacctggacagactgaacgagcagggcaacttcaagagcctgagccagagcagcaaggaggccagaaccagcgacaagcacgacagcaccagagccagcagcaacaaggacttcacccccaacagagacaagaagaccgactacgacaccagagagtacagcagcagcaagagaagagacgagaagaacgagctgaccagaagaaaggacagccccagcagaaacaaggacagcgccagcggccagaagaacaagcccagagaggagagagacctgcccaagaagggcaccggcgacagcaagaagagcaacagcagccccagcagagacagaaagccccacgaccacaaggccacctacgacaccaagagacccaacgaggagaccaagagcgtggacaagaacccctgcaaggacagagagaagcacgtgctggaggccagaaacaacaaggagagcagcggcaacaagctgctgtacatcctgaacccccccgagacccaggtggagaaggagcagatcaccggccagatcgacaagagcaccgtgaagcccaagccccagctgagccacagcagcagactgagcagcgacctgaccagagagaccgacgaggccgccttcgagcccgactacaacgagagcgacagcgagagcaacgtgagcgtgaaggaggaggagagcagcggcaacatcagcaaggacctgaaggacaagatcgtggagaaggccaaggagagcctggacaccgccgccgtggtgcaggtgggcatcagcagaaaccagagccacagcagccccagcgtgagccccagcagaagccacagccccagcggcagccagaccagaagccacagcagcagcgccagcagcgccgagagccaggacagcaagaagaagaagaagaagaaggagaagaagaagcacaagaagcacaagaagcacaagaagcacaagaagcacgccggcaccgaggtggagctggagaagagccagaagcacaagcacaagaagaagaagagcaagaagaacaaggacaaggagaaggagaaggagaaggacgaccagaaggtgaagagcgtgaccgtgtag

SEQ ID NO: 96877 - DNA, 2859 bp, synthetic construct
  misc_feature 1..2859: note = Description of Artificial Sequence: Synthetic coding sequence
  source 1..2859: mol_type = other DNA
atgagctgcgtgcactacaagttcagcagcaagctgaactacgacaccgtgaccttcgacggcctgcacatcagcctgtgcgacctgaagaagcagatcatgggcagagagaagctgaaggccgccgactgcgacctgcagatcaccaacgcccagaccaaggaggagtacaccgacgacaacgccctgatccccaagaacagcagcgtgatcgtgagaagaatccccatcggcggcgtgaagagcaccagcaagacctacgtgatcagcagaaccgagcccgccatggccaccaccaaggccatcgacgacagcagcgccagcatcagcctggcccagctgaccaagaccgccaacctggccgaggccaacgccagcgaggaggacaagatcaaggccatgatgagccagagcggccacgagtacgaccccatcaactacatgaagaagcccctgggcccccccccccccagctacacctgcttcagatgcggcaagcccggccactacatcaagaactgccccaccaacggcgacaagaacttcgagagcggccccagaatcaagaagagcaccggcatccccagaagcttcatgatggaggtgaaggaccccaacatgaagggcgccatgctgaccaacaccggcaagtacgccatccccaccatcgacgccgaggcctacgccatcggcaagaaggagaagccccccttcctgcccgaggagcccagcagcagcagcgaggaggacgaccccatccccgacgagctgctgtgcctgatctgcaaggacatcatgaccgacgccgtggtgatcccctgctgcggcaacagctactgcgacgagtgcatcagaaccgccctgctggagagcgacgagcacacctgccccacctgccaccagaacgacgtgagccccgacgccctgatcgccaacaagttcctgagacaggccgtgaacaacttcaagaacgagaccggctacaccaagagactgagaaagcagctgccccccccccccccccccatccccccccccagacccctgatccagagaaacctgcagcccctgatgagaagccccatcagcagacagcaggaccccctgatgatccccgtgaccagcagcagcacccaccccgcccccagcatcagcagcctgaccagcaaccagagcagcctggccccccccgtgagcggcaaccccagcagcgcccccgcccccgtgcccgacatcaccgccaccgtgagcatcagcgtgcacagcgagaagagcgacggccccttcagaaccagcagcaccggcggcagccccgtgagaaagagcgaggagaagaccgacaccaagagaaccgtgatcaagaccatggaggagtacaacaacgacaacaccgcccccgccgaggacgtgatcatcatgatccaggtgccccagagcaagtgggacaaggacgacttcgagagcgaggaggaggacgtgaagagcacccagcccatcagcagcgtgggcaagcccgccagcgtgatcaagaacgtgagcaccaagcccagcaacatcgtgaagtaccccgagaaggagagcgagcccagcgagaagatccagaagttcaccaaggacgtgagccacgagatcatccagcacgaggtgaagagcagcaagaacagcgccagcagcgagaagggcaagaccaaggacagagactacagcgtgctggagaaggagaaccccgagaagagaaagaacagcacccagcccgagaaggagagcaacctggacagactgaacgagcagggcaacttcaagagcctgagccagagcagcaaggaggccagaaccagcgacaagcacgacagcaccagagccagcagcaacaaggacttcacccccaacagagacaagaagaccgactacgacaccagagagtacagcagcagcaagagaagagacgagaagaacgagctgaccagaagaaaggacagccccagcagaaacaaggacagcgccagcggccagaagaacaagcccagagaggagagagacctgcccaagaagggcaccggcgacagcaagaagagcaacagcagccccagcagagacagaaagccccacgaccacaaggccacctacgacaccaagagacccaacgaggagaccaagagcgtggacaagaacccctgcaaggacagagagaagcacgtgctggaggccagaaacaacaaggagagcagcggcaacaagctgctgtacatcctgaacccccccgagacccaggtggagaaggagcagatcaccggccagatcgacaagagcaccgtgaagcccaagccccagctgagccacagcagcagactgagcagcgacctgaccagagagaccgacgaggccgccttcgagcccgactacaacgagagcgacagcgagagcaacgtgagcgtgaaggaggaggagagcagcggcaacatcagcaaggacctgaaggacaagatcgtggagaaggccaaggagagcctggacaccgccgccgtggtgcaggtgggcatcagcagaaaccagagccacagcagccccagcgtgagccccagcagaagccacagccccagcggcagccagaccagaagccacagcagcagcgccagcagcgccgagagccaggacagcaagaagaagaagaagaagaaggagaagaagaagcacaagaagcacaagaagcacaagaagcacaagaagcacgccggcaccgaggtggagctggagaagagccagaagcacaagcacaagaagaagaagagcaagaagaacaaggacaaggagaaggagaaggagaaggacgaccagaaggtgaagagcgtgaccgtgtag

SEQ ID NO: 96878 - DNA, 357 bp, synthetic construct
  misc_feature 1..357: note = Description of Artificial Sequence: Synthetic coding sequence
  source 1..357: mol_type = other DNA
atgagctgcgtgcactacaagttcagcagcaagctgaactacgacaccgtgaccttcgacggcctgcacatcagcctgtgcgacctgaagaagcagatcatgggcagagagaagctgaaggccgccgactgcgacctgcagatcaccaacgcccagaccaaggaggagtacaccgacgacaacgccctgatccccaagaacagcagcgtgatcgtgagaagaatccccatcggcggcgtgaagagcaccagcaagacctacgtgatcagcagaaccgagcccgccatggccaccaccaaggccgtgtgcaagaacaccatcagccacttcttctacaccctgctgctgcccctgtag

SEQ ID NO: 96879 - DNA, 1410 bp, synthetic construct
  misc_feature 1..1410: note = Description of Artificial Sequence: Synthetic coding sequence
  source 1..1410: mol_type = other DNA
atggccgccgaggccggcgtggtgggcgccggcgccagccccgacggcgactggagagaccaggcctgcggcctgctgctgcacgtgcacctgagcagcagactgggcagagccgcccccgtgagaaccggcagacacctgagaaccgtgttcgaggacaccgtggaggagagagtgatcaacgaggagtacaagatctggaagaagaacacccccttcctgtacgacctggtgatgacccacgccctgcagtggcccagcctgaccgtgcagtggctgcccgaggtgaccaagcccgagggcaaggactacgccctgcactggctggtgctgggcacccacaccagcgacgagcagaaccacctggtggtggccagagtgcacatccccaacgacgacgcccagttcgacgccagccactgcgacagcgacaagggcgagttcggcggcttcggcagcgtgaccggcaagatcgagtgcgagatcaagatcaaccacgagggcgaggtgaacagagccagatacatgccccagaacccccacatcatcgccaccaagacccccagcagcgacgtgctggtgttcgactacaccaagcaccccgccaagcccgaccccagcggcgagtgcaaccccgacctgagactgagaggccaccagaaggagggctacggcctgagctggaacagcaacctgagcggccacctgctgagcgccagcgacgaccacaccgtgtgcctgtgggacatcaacgccggccccaaggagggcaagatcgtggacgccaaggccatcttcaccggccacagcgccgtggtggaggacgtggcctggcacctgctgcacgagagcctgttcggcagcgtggccgacgaccagaagctgatgatctgggacaccagaagcaacaccaccagcaagcccagccacctggtggacgcccacaccgccgaggtgaactgcctgagcttcaacccctacagcgagttcatcctggccaccggcagcgccgacaagaccgtggccctgtgggacctgagaaacctgaagctgaagctgcacaccttcgagagccacaaggacgagatcttccaggtgcactggagcccccacaacgagaccatcctggccagcagcggcaccgacagaagactgaacgtgtgggacctgagcaagatcggcgaggagcagagcgccgaggacgccgaggacggcccccccgagctgctgttcatccacggcggccacaccgccaagatcagcgacttcagctggaaccccaacgagccctgggtgatctgcagcgtgagcgaggacaacatcatgcagatctggcagatggccgagaacatctacaacgacgaggagagcgacgtgaccaccagcgagctggagggccagggcagctag

SEQ ID NO: 96880 - DNA, 1278 bp, synthetic construct
  misc_feature 1..1278: note = Description of Artificial Sequence: Synthetic coding sequence
  source 1..1278: mol_type = other DNA
atggccagcaaggagatgttcgaggacaccgtggaggagagagtgatcaacgaggagtacaagatctggaagaagaacacccccttcctgtacgacctggtgatgacccacgccctgcagtggcccagcctgaccgtgcagtggctgcccgaggtgaccaagcccgagggcaaggactacgccctgcactggctggtgctgggcacccacaccagcgacgagcagaaccacctggtggtggccagagtgcacatccccaacgacgacgcccagttcgacgccagccactgcgacagcgacaagggcgagttcggcggcttcggcagcgtgaccggcaagatcgagtgcgagatcaagatcaaccacgagggcgaggtgaacagagccagatacatgccccagaacccccacatcatcgccaccaagacccccagcagcgacgtgctggtgttcgactacaccaagcaccccgccaagcccgaccccagcggcgagtgcaaccccgacctgagactgagaggccaccagaaggagggctacggcctgagctggaacagcaacctgagcggccacctgctgagcgccagcgacgaccacaccgtgtgcctgtgggacatcaacgccggccccaaggagggcaagatcgtggacgccaaggccatcttcaccggccacagcgccgtggtggaggacgtggcctggcacctgctgcacgagagcctgttcggcagcgtggccgacgaccagaagctgatgatctgggacaccagaagcaacaccaccagcaagcccagccacctggtggacgcccacaccgccgaggtgaactgcctgagcttcaacccctacagcgagttcatcctggccaccggcagcgccgacaagaccgtggccctgtgggacctgagaaacctgaagctgaagctgcacaccttcgagagccacaaggacgagatcttccaggtgcactggagcccccacaacgagaccatcctggccagcagcggcaccgacagaagactgaacgtgtgggacctgagcaagatcggcgaggagcagagcgccgaggacgccgaggacggcccccccgagctgctgttcatccacggcggccacaccgccaagatcagcgacttcagctggaaccccaacgagccctgggtgatctgcagcgtgagcgaggacaacatcatgcagatctggcagatggccgagaacatctacaacgacgaggagagcgacgtgaccaccagcgagctggagggccagggcagctag

SEQ ID NO: 96881 - DNA, 1251 bp, synthetic construct
  misc_feature 1..1251: note = Description of Artificial Sequence: Synthetic coding sequence
  source 1..1251: mol_type = other DNA
atggccagcaaggagatgttcgaggacaccgtggaggagagagtgatcaacgaggagtacaagatctggaagaagaacacccccttcctgtacgacctggtgatgacccacgccctgcagtggcccagcctgaccgtgcagtggctgcccgaggtgaccaagcccgagggcaaggactacgccctgcactggctggtgctgggcacccacaccagcgacgagcagaaccacctggtggtggccagagtgcacatccccaacgacgacgcccagttcgacgccagccactgcgacagcgacaagggcggcaagatcgagtgcgagatcaagatcaaccacgagggcgaggtgaacagagccagatacatgccccagaacccccacatcatcgccaccaagacccccagcagcgacgtgctggtgttcgactacaccaagcaccccgccaagcccgaccccagcggcgagtgcaaccccgacctgagactgagaggccaccagaaggagggctacggcctgagctggaacagcaacctgagcggccacctgctgagcgccagcgacgaccacaccgtgtgcctgtgggacatcaacgccggccccaaggagggcaagatcgtggacgccaaggccatcttcaccggccacagcgccgtggtggaggacgtggcctggcacctgctgcacgagagcctgttcggcagcgtggccgacgaccagaagctgatgatctgggacaccagaagcaacaccaccagcaagcccagccacctggtggacgcccacaccgccgaggtgaactgcctgagcttcaacccctacagcgagttcatcctggccaccggcagcgccgacaagaccgtggccctgtgggacctgagaaacctgaagctgaagctgcacaccttcgagagccacaaggacgagatcttccaggtgcactggagcccccacaacgagaccatcctggccagcagcggcaccgacagaagactgaacgtgtgggacctgagcaagatcggcgaggagcagagcgccgaggacgccgaggacggcccccccgagctgctgttcatccacggcggccacaccgccaagatcagcgacttcagctggaaccccaacgagccctgggtgatctgcagcgtgagcgaggacaacatcatgcagatctggcagatggccgagaacatctacaacgacgaggagagcgacgtgaccaccagcgagctggagggccagggcagctag

SEQ ID NO: 96882 - DNA, 561 bp, synthetic construct
  misc_feature 1..561: note = Description of Artificial Sequence: Synthetic coding sequence
  source 1..561: mol_type = other DNA
atggccagccccagcaaggccgtgatcgtgcccggcaacggcggcggcgacgtgaccacccacggctggtacggctgggtgaagaaggagctggagaagatccccggcttccagtgcctggccaagaacatgcccgaccccatcaccgccagagagagcatctggctgcccttcatggagaccgagctgcactgcgacgagaagaccatcatcatcggccacagcagcggcgccatcgccgccatgagatacgccgagacccacagagtgtacgccatcgtgctggtgagcgcctacaccagcgacctgggcgacgagaacgagagagccagcggctacttcaccagaccctggcagtgggagaagatcaaggccaactgcccctacatcgtgcagttcggcagcaccgacgaccccttcctgccctggaaggagcagcaggaggtggccgacagactggagaccaagctgcacaagttcaccgactgcggccacttccagaacaccgagttccacgagctgatcaccgtggtgaagagcctgctgaaggtgcccgcctag

SEQ ID NO: 96883 - DNA, 519 bp, synthetic construct
  misc_feature 1..519: note = Description of Artificial Sequence: Synthetic coding sequence
  source 1..519: mol_type = other DNA
atggccagccccagcaaggccgtgatcgtgcccggcaacggcggcggcgacgtgaccacccacggctggtacggctgggtgaagaaggagctggagaagatccccggcttccagtgcctggccaagaacatgcccgaccccatcaccgccagagagagcatctggctgcccttcatggagaccgagctgcactgcgacgagaagaccatcatcatcggccacagcagcggcgccatcgccgccatgagatacgccgagacccacagagtgtacgccatcgtgctggtgagcgcctacaccagcgacctgggcgacgagaacgagagagccagcggctacttcaccagaccctggcagtgggagaagatcaaggccaactgcccctacatcgtgcagttcggcagcaccgacgaccccttcctgccctggaaggagcagcaggaggtggccgactggaagcccaactgcaccaacagcctgaccgtggccaccttcagaacccagagcttcatgaactag

SEQ ID NO: 96884 - DNA, 741 bp, synthetic construct
  misc_feature 1..741: note = Description of Artificial Sequence: Synthetic coding sequence
  source 1..741: mol_type = other DNA
atggccgccgccgccatccccgccctgctgctgtgcctgcccctgctgttcctgctgttcggctggagcagagccagaagagacgacccccacagcctgtgctacgacatcaccgtgatccccaagttcagacccggccccagatggtgcgccgtgcagggccaggtggacgagaagaccttcctgcactacgactgcggcaacaagaccgtgacccccgtgagccccctgggcaagaagctgaacgtgaccatggcctggaaggcccagaaccccgtgctgagagaggtggtggacatcctgaccgagcagctgctggacatccagctggagaactacacccccaaggagcccctgaccctgcaggccagaatgagctgcgagcagaaggccgagggccacagcagcggcagctggcagttcagcatcgacggccagaccttcctgctgttcgacagcgagaagagaatgtggaccaccgtgcaccccggcgccagaaagatgaaggagaagtgggagaacgacaaggacgtggccatgagcttccactacatcagcatgggcgactgcatcggctggctggaggacttcctgatgggcatggacagcaccctggagcccagcgccggcgcccccctggccatgagcagcggcaccacccagctgagagccaccgccaccaccctgatcctgtgctgcctgctgatcatcctgccctgcttcatcctgcccggcatctag

SEQ ID NO: 96885 - DNA, 741 bp, synthetic construct; identical to SEQ ID NO: 96884
  misc_feature 1..741: note = Description of Artificial Sequence: Synthetic coding sequence
  source 1..741: mol_type = other DNA

SEQ ID NO: 96886 - DNA, 4923 bp, synthetic construct
  misc_feature 1..4923: note = Description of Artificial Sequence: Synthetic coding sequence
  source 1..4923: mol_type = other DNA
atgcagagcttcagagagagatgcggcttccacggcaagcagcagaactaccagcagaccagccaggagaccagcagactggagaactacagacagcccagccaggccggcctgagctgcgacagacagagactgctggccaaggactactacaacccccagccctaccccagctacgagggcggcgccggcacccccagcggcaccgccgccgccgtggccgccgacaagtaccacagaggcagcaaggccctgcccacccagcagggcctgcagggcagacccgccttccccggctacggcgtgcaggacagcagcccctaccccggcagatacgccggcgaggagagcctgcaggcctggggcgccccccagcccccccccccccagccccagcccctgcccgccggcgtggccaagtacgacgagaacctgatgaagaagaccgccgtgccccccagcagacagtacgccgagcagggcgcccaggtgcccttcagaacccacagcctgcacgtgcagcagcccccccccccccagcagcccctggcctaccccaagctgcagagacagaagctgcagaacgacatcgccagccccctgcccttcccccagggcacccacttcccccagcacagccagagcttccccaccagcagcacctacagcagcagcgtgcagggcggcggccagggcgcccacagctacaagagctgcaccgcccccaccgcccagccccacgacagacccctgaccgccagcagcagcctggcccccggccagagagtgcagaacctgcacgcctaccagagcggcagactgagctacgaccagcagcagcagcagcagcagcagcagcagcagcagcagcaggccctgcagagcagacaccacgcccaggagaccctgcactaccagaacctggccaagtaccagcactacggccagcagggccagggctactgccagcccgacgccgccgtgagaacccccgagcagtactaccagaccttcagccccagcagcagccacagccccgccagaagcgtgggcagaagccccagctacagcagcacccccagccccctgatgcccaacctggagaacttcccctacagccagcagcccctgagcaccggcgccttccccgccggcatcaccgaccacagccacttcatgcccctgctgaaccccagccccaccgacgccaccagcagcgtggacacccaggccggcaactgcaagcccctgcagaaggacaagctgcccgagaacctgctgagcgacctgagcctgcagagcctgaccgccctgaccagccaggtggagaacatcagcaacaccgtgcagcagctgctgctgagcaaggccgccgtgccccagaagaagggcgtgaagaacctggtgagcagaacccccgagcagcacaagagccagcactgcagccccgagggcagcggctacagcgccgagcccgccggcacccccctgagcgagccccccagcagcaccccccagagcacccacgccgagccccaggaggccgactacctgagcggcagcgaggaccccctggagagaagcttcctgtactgcaaccaggccagaggcagccccgccagagtgaacagcaacagcaaggccaagcccgagagcgtgagcacctgcagcgtgaccagccccgacgacatgagcaccaagagcgacgacagcttccagagcctgcacggcagcctgcccctggacagcttcagcaagttcgtggccggcgagagagactgccccagactgctgctgagcgccctggcccaggaggacctggccagcgagatcctgggcctgcaggaggccatcggcgagaaggccgacaaggcctgggccgaggcccccagcctggtgaaggacagcagcaagccccccttcagcctggagaaccacagcgcctgcctggacagcgtggccaagagcgcctggcccagacccggcgagcccgaggccctgcccgacagcctgcagctggacaagggcggcaacgccaaggacttcagccccggcctgttcgaggaccccagcgtggccttcgccacccccgaccccaagaagaccaccggccccctgagcttcggcaccaagcccaccctgggcgtgcccgcccccgaccccaccaccgccgccttcgactgcttccccgacaccaccgccgccagcagcgccgacagcgccaaccccttcgcctggcccgaggagaacctgggcgacgcctgccccagatggggcctgcaccccggcgagctgaccaagggcctggagcagggcggcaaggccagcgacggcatcagcaagggcgacacccacgaggccagcgcctgcctgggcttccaggaggaggacccccccggcgagaaggtggccagcctgcccggcgacttcaagcaggaggaggtgggcggcgtgaaggaggaggccggcggcctgctgcagtgccccgaggtggccaaggccgacagatggctggaggacagcagacactgctgcagcaccgccgacttcggcgacctgcccctgctgccccccaccagcagaaaggaggacctggaggccgaggaggagtacagcagcctgtgcgagctgctgggcagccccgagcagagacccggcatgcaggaccccctgagccccaaggcccccctgatctgcaccaaggaggaggtggaggaggtgctggacagcaaggccggctggggcagcccctgccacctgagcggcgagagcgtgatcctgctgggccccaccgtgggcaccgagagcaaggtgcagagctggttcgagagcagcctgagccacatgaagcccggcgaggagggccccgacggcgagagagcccccggcgacagcaccaccagcgacgccagcctggcccagaagcccaacaagcccgccgtgcccgaggcccccatcgccaagaaggagcccgtgcccagaggcaagagcctgagaagcagaagagtgcacagaggcctgcccgaggccgaggacagcccctgcagagcccccgtgctgcccaaggacctgctgctgcccgagagctgcaccggccccccccagggccagatggagggcgccggcgcccccggcagaggcgccagcgagggcctgcccagaatgtgcaccagaagcctgaccgccctgagcgagcccagaacccccggcccccccggcctgaccaccacccccgccccccccgacaagctgggcggcaagcagagagccgccttcaagagcggcaagagagtgggcaagcccagccccaaggccgccagcagccccagcaaccccgccgccctgcccgtggccagcgacagcagccccatgggcagcaagaccaaggagaccgacagccccagcacccccggcaaggaccagagaagcatgatcctgagaagcagaaccaagacccaggagatcttccacagcaagagaagaagacccagcgagggcagactgcccaactgcagagccaccaagaagctgctggacaacagccacctgcccgccaccttcaaggtgagcagcagcccccagaaggagggcagagtgagccagagagccagagtgcccaagcccggcgccggcagcaagctgagcgacagacccctgcacgccctgaagagaaagagcgccttcatggcccccgtgcccaccaagaagagaaacctggtgctgagaagcagaagcagcagcagcagcaacgccagcggcaacggcggcgacggcaaggaggagagacccgagggcagccccaccctgttcaagagaatgagcagccccaagaaggccaagcccaccaagggcaacggcgagcccgccaccaagctgcccccccccgagacccccgacgcctgcctgaagctggccagcagagccgccttccagggcgccatgaagaccaaggtgctgccccccagaaagggcagaggcctgaagctggaggccatcgtgcagaagatcaccagccccagcctgaagaagttcgcctgcaaggcccccggcgccagccccggcaaccccctgagccccagcctgagcgacaaggacagaggcctgaagggcgccggcggcagccccgtgggcgtggaggagggcctggtgaacgtgggcaccggccagaagctgcccaccagcggcgccgaccccctgtgcagaaaccccaccaacagaagcctgaagggcaagctgatgaacagcaagaagctgagcagcaccgactgcttcaagaccgaggccttcaccagccccgaggccctgcagcccggcggcaccgccctggcccccaagaagagaagcagaaagggcagagccggcgcccacggcctgagcaagggccccctggagaagagaccctacctgggccccgccctgctgctgacccccagagacagagccagcggcacccagggcgccagcgaggacaacagcggcggcggcggcaagaagcccaagatggaggagctgggcctggccagccagccccccgagggcagaccctgccagccccagaccagagcccagaagcagcccggccacaccaactacagcagctacagcaagagaaagagactgaccagaggcagagccaagaacaccaccagcagcccctgcaagggcagagccaagagaagaagacagcagcaggtgctgcccctggaccccgccgagcccgagatcagactgaagtacatcagcagctgcaagagactgagaagcgacagcagaacccccgccttcagccccttcgagcccagcctgggcgcccagaaccccagaagcggccagaacgccccccccgcccccgccgacgccagacccctgtgcaccaccagagacagaagagcctacagcgccagagagcagggccagagatag

SEQ ID NO: 96887 - DNA, 5589 bp, synthetic construct
  misc_feature 1..5589: note = Description of Artificial Sequence: Synthetic coding sequence
  source 1..5589: mol_type = other DNA
atgcagagcttcagagagagatgcggcttccacggcaagcagcagaactaccagcagaccagccaggagaccagcagactggagaactacagacagcccagccaggccggcctgagctgcgacagacagagactgctggccaaggactactacaacccccagccctaccccagctacgagggcggcgccggcacccccagcggcaccgccgccgccgtggccgccgacaagtaccacagaggcagcaaggccctgcccacccagcagggcctgcagggcagacccgccttccccggctacggcgtgcaggacagcagcccctaccccggcagatacgccggcgaggagagcctgcaggcctggggcgccccccagcccccccccccccagccccagcccctgcccgccggcgtggccaagtacgacgagaacctgatgaagaagaccgccgtgccccccagcagacagtacgccgagcagggcgcccaggtgcccttcagaacccacagcctgcacgtgcagcagcccccccccccccagcagcccctggcctaccccaagctgcagagacagaagctgcagaacgacatcgccagccccctgcccttcccccagggctggtgggccggccacagctacaagagctgcaccgcccccaccgcccagccccacgacagacccctgaccgccagcagcagcctggcccccggccagagagtgcagaacctgcacgcctaccagagcggcagactgagctacgaccagcagcagcagcagcagcagcagcagcagcagcagcagcaggccctgcagagcagacaccacgcccaggagaccctgcactaccagaacctggccaagtaccagcactacggccagcagggccagggctactgccagcccgacgccgccgtgagaacccccgagcagtactaccagaccttcagccccagcagcagccacagccccgccagaagcgtgggcagaagccccagctacagcagcacccccagccccctgatgcccaacctggagaacttcccctacagccagcagcccctgagcaccggcgccttccccgccggcatcaccgaccacagccacttcatgcccctgctgaaccccagccccaccgacgccaccagcagcgtggacagcctgaccgccctgaccagccaggtggagaacatcagcaacaccgtgcagcagctgctgctgagcaaggccgccgtgccccagaagaagggcgtgaagaacctggtgagcagaacccccgagcagcacaagagccagcactgcagccccgagggcagcggctacagcgccgagcccgccggcacccccctgagcgagccccccagcagcaccccccagagcacccacgccgagccccaggaggccgactacctgagcggcagcgaggaccccctggagagaagcttcctgtactgcaaccaggccagaggcagccccgccagagtgaacagcaacagcaaggccaagcccgagagcgtgagcacctgcagcgtgaccagccccgacgacatgagcaccaagagcgacgacagcttccagagcctgcacggcagcctgcccctggacagcttcagcaagttcgtggccggcgagagagactgccccagactgctgctgagcgccctggcccaggaggacctggccagcgagatcctgggcctgcaggaggccatcggcgagaaggccgacaaggcctgggccgaggcccccagcctggtgaaggacagcagcaagccccccttcagcctggagaaccacagcgcctgcctggacagcgtggccaagagcgcctggcccagacccggcgagcccgaggccctgcccgacagcctgcagctggacaagggcggcaacgccaaggacttcagccccggcctgttcgaggaccccagcgtggccttcgccacccccgaccccaagaagaccaccggccccctgagcttcggcaccaagcccaccctgggcgtgcccgcccccgaccccaccaccgccgccttcgactgcttccccgacaccaccgccgccagcagcgccgacagcgccaaccccttcgcctggcccgaggagaacctgggcgacgcctgccccagatggggcctgcaccccggcgagctgaccaagggcctggagcagggcggcaaggccagcgacggcatcagcaagggcgacacccacgaggccagcgcctgcctgggcttccaggaggaggacccccccggcgagaaggtggccagcctgcccggcgacttcaagcaggaggaggtgggcggcgtgaaggaggaggccggcggcctgctgcagtgccccgaggtggccaaggccgacagatggctggaggacagcagacactgctgcagcaccgccgacttcggcgacctgcccctgctgccccccaccagcagaaaggaggacctggaggccgaggaggagtacagcagcctgtgcgagctgctgggcagccccgagcagagacccggcatgcaggaccccctgagccccaaggcccccctgatctgcaccaaggaggaggtggaggaggtgctggacagcaaggccggctggggcagcccctgccacctgagcggcgagagcgtgatcctgctgggccccaccgtgggcaccgagagcaaggtgcagagctggttcgagagcagcctgagccacatgaagcccggcgaggagggccccgacggcgagagagcccccggcgacagcaccaccagcgacgccagcctggcccagaagcccaacaagcccgccgtgcccgaggcccccatcgccaagaaggagcccgtgcccagaggcaagagcctgagaagcagaagagtgcacagaggcctgcccgaggccgaggacagcccctgcagagcccccgtgctgcccaaggacctgctgctgcccgagagctgcaccggccccccccagggccagatggagggcgccggcgcccccggcagaggcgccagcgagggcctgcccagaatgtgcaccagaagcctgaccgccctgagcgagcccagaacccccggcccccccggcctgaccaccacccccgccccccccgacaagctgggcggcaagcagagagccgccttcaagagcggcaagagagtgggcaagcccagccccaaggccgccagcagccccagcaaccccgccgccctgcccgtggccagcgacagcagccccatgggcagcaagaccaaggagaccgacagccccagcacccccggcaaggaccagagaagcatgatcctgagaagcagaaccaagacccaggagatcttccacagcaagagaagaagacccagcgagggcagactgcccaactgcagagccaccaagaagctgctggacaacagccacctgcccgccaccttcaaggtgagcagcagcccccagaaggagggcagagtgagccagagagccagagtgcccaagcccggcgccggcagcaagctgagcgacagacccctgcacgccctgaagagaaagagcgccttcatggcccccgtgcccaccaagaagagaaacctggtgctgagaagcagaagcagcagcagcagcaacgccagcggcaacggcggcgacggcaaggaggagagacccgagggcagccccaccctgttcaagagaatgagcagccccaagaaggccaagcccaccaagggcaacggcgagcccgccaccaagctgcccccccccgagacccccgacgcctgcctgaagctggccagcagagccgccttccagggcgccatgaagaccaaggtgctgccccccagaaagggcagaggcctgaagctggaggccatcgtgcagaagatcaccagccccagcctgaagaagttcgcctgcaaggcccccggcgccagccccggcaaccccctgagccccagcctgagcgacaaggacagaggcctgaagggcgccggcggcagccccgtgggcgtggaggagggcctggtgaacgtgggcaccggccagaagctgcccaccagcggcgccgaccccctgtgcagaaaccccaccaacagaagcctgaagggcaagctgatgaacaacagagccagcggcacccagggcgccagcgaggacaacagcggcggcggcggcaagaagcccaagatggaggagctgggcctggccagccagccccccgagggcagaccctgccagccccagaccagagcccagaagcagcccggccacaccaactacagcagctacagcaagagaaagagactgaccagaggcagagccaagaacaccaccagcagcccctgcaagggcagagccaagagaagaagacagcagcaggtgctgcccctggaccccgccgagcccgagatcagactgaagtacatcagcagctgcaagagactgagaagcgacagcagaacccccgccttcagccccttcgtgagagtggagaagagagacgccttcaccaccatctgcaccgtggtgaacagccccggcgacgcccccaagccccacagaaagcccagcagcagcgccagcagcagcagcagcagcagcagcttcagcctggacgccgccggcgccagcctggccaccctgcccggcggcagcatcctgcagcccagacccagcctgcccctgagcagcaccatgcacctgggccccgtggtgagcaaggccctgagcaccagctgcctggtgtgctgcctgtgccagaaccccgccaacttcaaggacctgggcgacctgtgcggcccctactaccccgagcactgcctgcccaagaagaagcccaagctgaaggagaaggtgagacccgagggcacctgcgaggaggccagcctgcccctggagagaaccctgaagggccccgagtgcgccgccgccgccaccgccggcaagccccccagacccgacggccccgccgaccccgccaagcagggccccctgagaaccagcgccagaggcctgagcagaagactgcagagctgctactgctgcgacggcagagaggacggcggcgaggaggccgcccccgccgacaagggccactgggtgcacgaggcctgcgccgtgtggaccggcggcgtgtacctggtggccggcaagctgttcggcctgcaggaggccatgaaggtggccgtggacatgcacggcggcaccgtggccctggcccccggcgacttcagcctgcccggcctgagattcgccagcctgttccagggccccagctggtgcgactgccccgtgctggccaccagcacccccagcagctggagcagatgcgtgcccgccgccaagaagcccggcccccccctgggcgccgccaccaaggacgccagcacccccaccaccaccagagtgcccgccatgcaggtgagagccagacccggcaccggcggccactggagccccagcaagcagagcagaggcaccctgcccggccacagcagccccaaccccggccccatcagcctgttcagcttcccccccctgctgccccagcagttcttctaccccagcgtgtgcctggacctgtgctgggccatgcccggcacctggaagtag

SEQ ID NO: 96888 - DNA, 5721 bp, synthetic construct
  misc_feature 1..5721: note = Description of Artificial Sequence: Synthetic coding sequence
  source 1..5721: mol_type = other DNA
atgcagagcttcagagagagatgcggcttccacggcaagcagcagaactaccagcagaccagccaggagaccagcagactggagaactacagacagcccagccaggccggcctgagctgcgacagacagagactgctggccaaggactactacaacccccagccctaccccagctacgagggcggcgccggcacccccagcggcaccgccgccgccgtggccgccgacaagtaccacagaggcagcaaggccctgcccacccagcagggcctgcagggcagacccgccttccccggctacggcgtgcaggacagcagcccctaccccggcagatacgccggcgaggagagcctgcaggcctggggcgccccccagcccccccccccccagccccagcccctgcccgccggcgtggccaagtacgacgagaacctgatgaagaagaccgccgtgccccccagcagacagtacgccgagcagggcgcccaggtgcccttcagaacccacagcctgcacgtgcagcagcccccccccccccagcagcccctggcctaccccaagctgcagagacagaagctgcagaacgacatcgccagccccctgcccttcccccagggcacccacttcccccagcacagccagagcttccccaccagcagcacctacagcagcagcgtgcagggcggcggccagggcgcccacagctacaagagctgcaccgcccccaccgcccagccccacgacagacccctgaccgccagcagcagcctggcccccggccagagagtgcagaacctgcacgcctaccagagcggcagactgagctacgaccagcagcagcagcagcagcagcagcagcagcagcagcagcaggccctgcagagcagacaccacgcccaggagaccctgcactaccagaacctggccaagtaccagcactacggccagcagggccagggctactgccagcccgacgccgccgtgagaacccccgagcagtactaccagaccttcagccccagcagcagccacagccccgccagaagcgtgggcagaagccccagctacagcagcacccccagccccctgatgcccaacctggagaacttcccctacagccagcagcccctgagcaccggcgccttccccgccggcatcaccgaccacagccacttcatgcccctgctgaaccccagccccaccgacgccaccagcagcgtggacacccaggccggcaactgcaagcccctgcagaaggacaagctgcccgagaacctgctgagcgacctgagcctgcagagcctgaccgccctgaccagccaggtggagaacatcagcaacaccgtgcagcagctgctgctgagcaaggccgccgtgccccagaagaagggcgtgaagaacctggtgagcagaacccccgagcagcacaagagccagcactgcagccccgagggcagcggctacagcgccgagcccgccggcacccccctgagcgagccccccagcagcaccccccagagcacccacgccgagccccaggaggccgactacctgagcggcagcgaggaccccctggagagaagcttcctgtactgcaaccaggccagaggcagccccgccagagtgaacagcaacagcaaggccaagcccgagagcgtgagcacctgcagcgtgaccagccccgacgacatgagcaccaagagcgacgacagcttccagagcctgcacggcagcctgcccctggacagcttcagcaagttcgtggccggcgagagagactgccccagactgctgctgagcgccctggcccaggaggacctggccagcgagatcctgggcctgcaggaggccatcggcgagaaggccgacaaggcctgggccgaggcccccagcctggtgaaggacagcagcaagccccccttcagcctggagaaccacagcgcctgcctggacagcgtggccaagagcgcctggcccagacccggcgagcccgaggccctgcccgacagcctgcagctggacaagggcggcaacgccaaggacttcagccccggcctgttcgaggaccccagcgtggccttcgccacccccgaccccaagaagaccaccggccccctgagcttcggcaccaagcccaccctgggcgtgcccgcccccgaccccaccaccgccgccttcgactgcttccccgacaccaccgccgccagcagcgccgacagcgccaaccccttcgcctggcccgaggagaacctgggcgacgcctgccccagatggggcctgcaccccggcgagctgaccaagggcctggagcagggcggcaaggccagcgacggcatcagcaagggcgacacccacgaggccagcgcctgcctgggcttccaggaggaggacccccccggcgagaaggtggccagcctgcccggcgacttcaagcaggaggaggtgggcggcgtgaaggaggaggccggcggcctgctgcagtgccccgaggtggccaaggccgacagatggctggaggacagcagacactgctgcagcaccgccgacttcggcgacctgcccctgctgccccccaccagcagaaaggaggacctggaggccgaggaggagtacagcagcctgtgcgagctgctgggcagccccgagcagagacccggcatgcaggaccccctgagccccaaggcccccctgatctgcaccaaggaggaggtggaggaggtgctggacagcaaggccggctggggcagcccctgccacctgagcggcgagagcgtgatcctgctgggccccaccgtgggcaccgagagcaaggtgcagagctggttcgagagcagcctgagccacatgaagcccggcgaggagggccccgacggcgagagagcccccggcgacagcaccaccagcgacgccagcctggcccagaagcccaacaagcccgccgtgcccgaggcccccatcgccaagaaggagcccgtgcccagaggcaagagcctgagaagcagaagagtgcacagaggcctgcccgaggccgaggacagcccctgcagagcccccgtgctgcccaaggacctgctgctgcccgagagctgcaccggccccccccagggccagatggagggcgccggcgcccccggcagaggcgccagcgagggcctgcccagaatgtgcaccagaagcctgaccgccctgagcgagcccagaacccccggcccccccggcctgaccaccacccccgccccccccgacaagctgggcggcaagcagagagccgccttcaagagcggcaagagagtgggcaagcccagccccaaggccgccagcagccccagcaaccccgccgccctgcccgtggccagcgacagcagccccatgggcagcaagaccaaggagaccgacagccccagcacccccggcaaggaccagagaagcatgatcctgagaagcagaaccaagacccaggagatcttccacagcaagagaagaagacccagcgagggcagactgcccaactgcagagccaccaagaagctgctggacaacagccacctgcccgccaccttcaaggtgagcagcagcccccagaaggagggcagagtgagccagagagccagagtgcccaagcccggcgccggcagcaagctgagcgacagacccctgcacgccctgaagagaaagagcgccttcatggcccccgtgcccaccaagaagagaaacctggtgctgagaagcagaagcagcagcagcagcaacgccagcggcaacggcggcgacggcaaggaggagagacccgagggcagccccaccctgttcaagagaatgagcagccccaagaaggccaagcccaccaagggcaacggcgagcccgccaccaagctgcccccccccgagacccccgacgcctgcctgaagctggccagcagagccgccttccagggcgccatgaagaccaaggtgctgccccccagaaagggcagaggcctgaagctggaggccatcgtgcagaagatcaccagccccagcctgaagaagttcgcctgcaaggcccccggcgccagccccggcaaccccctgagccccagcctgagcgacaaggacagaggcctgaagggcgccggcggcagccccgtgggcgtggaggagggcctggtgaacgtgggcaccggccagaagctgcccaccagcggcgccgaccccctgtgcagaaaccccaccaacagaagcctgaagggcaagctgatgaacagcaagaagctgagcagcaccgactgcttcaagaccgaggccttcaccagccccgaggccctgcagcccggcggcaccgccctggcccccaagaagagaagcagaaagggcagagccggcgcccacggcctgagcaagggccccctggagaagagaccctacctgggccccgccctgctgctgacccccagagacagagccagcggcacccagggcgccagcgaggacaacagcggcggcggcggcaagaagcccaagatggaggagctgggcctggccagccagccccccgagggcagaccctgccagccccagaccagagcccagaagcagcccggccacaccaactacagcagctacagcaagagaaagagactgaccagaggcagagccaagaacaccaccagcagcccctgcaagggcagagccaagagaagaagacagcagcaggtgctgcccctggaccccgccgagcccgagatcagactgaagtacatcagcagctgcaagagactgagaagcgacagcagaacccccgccttcagccccttcgtgagagtggagaagagagacgccttcaccaccatctgcaccgtggtgaacagccccggcgacgcccccaagccccacagaaagcccagcagcagcgccagcagcagcagcagcagcagcagcttcagcctggacgccgccggcgccagcctggccaccctgcccggcggcagcatcctgcagcccagacccagcctgcccctgagcagcaccatgcacctgggccccgtggtgagcaaggccctgagcaccagctgcctggtgtgctgcctgtgccagaaccccgccaacttcaaggacctgggcgacctgtgcggcccctactaccccgagcactgcctgcccaagaagaagcccaagctgaaggagaaggtgagacccgagggcacctgcgaggaggccagcctgcccctggagagaaccctgaagggccccgagtgcgccgccgccgccaccgccggcaagccccccagacccgacggccccgccgaccccgccaagcagggccccctgagaaccagcgccagaggcctgagcagaagactgcagagctgctactgctgcgacggcagagaggacggcggcgaggaggccgcccccgccgacaagggcagaaagcacgagtgcagcaaggaggcccccgccgagcccggcggcgaggcccaggagcactgggtgcacgaggcctgcgccgtgtggaccggcggcgtgtacctggtggccggcaagctgttcggcctgcaggaggccatgaaggtggccgtggacatgatgtgcagcagctgccaggaggccggcgccaccatcggctgctgccacaagggctgcctgcacacctaccactacccctgcgccagcgacgccggctgcatcttcatcgaggagaacttcagcctgaagtgccccaagcacaagagactgccctag

SEQ ID NO: 96889 - DNA, 2901 bp, synthetic construct
  misc_feature 1..2901: note = Description of Artificial Sequence: Synthetic coding sequence
  source 1..2901: mol_type = other DNA
atgcagagcttcagagagagatgcggcttccacggcaagcagcagaactaccagcagaccagccaggagaccagcagactggagaactacagacagcccagccaggccggcctgagctgcgacagacagagactgctggccaaggactactacaacccccagccctaccccagctacgagggcggcgccggcacccccagcggcaccgccgccgccgtggccgccgacaagtaccacagaggcagcaaggccctgcccacccagcagggcctgcagggcagacccgccttccccggctacggcgtgcaggacagcagcccctaccccggcagatacgccggcgaggagagcctgcaggcctggggcgccccccagcccccccccccccagccccagcccctgcccgccggcgtggccaagtacgacgagaacctgatgaagaagaccgccgtgccccccagcagacagtacgccgagcagggcgcccaggtgcccttcagaacccacagcctgcacgtgcagcagcccccccccccccagcagcccctggcctaccccaagctgcagagacagaagctgcagaacgacatcgccagccccctgcccttcccccagggcacccacttcccccagcacagccagagcttccccaccagcagcacctacagcagcagcgtgcagggcggcggccagggcgcccacagctacaagagctgcaccgcccccaccgcccagccccacgacagacccctgaccgccagcagcagcctggcccccggccagagagtgcagaacctgcacgcctaccagagcggcagactgagctacgaccagcagcagcagcagcagcagcagcagcagcagcagcagcaggccctgcagagcagacaccacgcccaggagaccctgcactaccagaacctggccaagtaccagcactacggccagcagggccagggctactgccagcccgacgccgccgtgagaacccccgagcagtactaccagaccttcagccccagcagcagccacagccccgccagaagcgtgggcagaagccccagctacagcagcacccccagccccctgatgcccaacctggagaacttcccctacagccagcagcccctgagcaccggcgccttccccgccggcatcaccgaccacagccacttcatgcccctgctgaaccccagccccaccgacgccaccagcagcgtggacacccaggccggcaactgcaagcccctgcagaaggacaagctgcccgagaacctgctgagcgacctgagcctgcagagcctgaccgccctgaccagccaggtggagaacatcagcaacaccgtgcagcagctgctgctgagcaaggccgccgtgccccagaagaagggcgtgaagaacctggtgagcagaacccccgagcagcacaagagccagcactgcagccccgagggcagcggctacagcgccgagcccgccggcacccccctgagcgagccccccagcagcaccccccagagcacccacgccgagccccaggaggccgactacctgagcggcagcgaggaccccctggagagaagcttcctgtactgcaaccaggccagaggcagccccgccagagtgaacagcaacagcaaggccaagcccgagagcgtgagcacctgcagcgtgaccagccccgacgacatgagcaccaagagcgacgacagcttccagagcctgcacggcagcctgcccctggacagcttcagcaagttcgtggccggcgagagagactgccccagactgctgctgagcgccctggcccaggaggacctggccagcgagatcctgggcctgcaggaggccatcggcgagaaggccgacaaggcctgggccgaggcccccagcctggtgaaggacagcagcaagccccccttcagcctggagaaccacagcgcctgcctggacagcgtggccaagagcgcctggcccagacccggcgagcccgaggccctgcccgacagcctgcagctggacaagggcggcaacgccaaggacttcagccccggcctgttcgaggaccccagcgtggccttcgccacccccgaccccaagaagaccaccggccccctgagcttcggcaccaagcccaccctgggcgtgcccgcccccgaccccaccaccgccgccttcgactgcttccccgacaccaccgccgccagcagcgccgacagcgccaaccccttcgcctggcccgaggagaacctgggcgacgcctgccccagatggggcctgcaccccggcgagctgaccaagggcctggagcagggcggcaaggccagcgacggcatcagcaagggcgacacccacgaggccagcgcctgcctgggcttccaggaggaggacccccccggcgagaaggtggccagcctgcccggcgacttcaagcaggaggaggtgggcggcgtgaaggaggaggccggcggcctgctgcagtgccccgaggtggccaaggccgacagatggctggaggacagcagacactgctgcagcaccgccgacttcggcgacctgcccctgctgccccccaccagcagaaaggaggacctggaggccgaggaggagtacagcagcctgtgcgagctgctgggcagccccgagcagagacccggcatgcaggaccccctgagccccaaggcccccctgatctgcaccaaggaggaggtggaggaggtgctggacagcaaggccggctggggcagcccctgccacctgagcggcgagagcgtgatcctgctgggccccaccgtgggcaccgagagcaaggtgcagagctggttcgaggccagcctgtacagcgtgtacatctgcatccacatccacatctacaacatctacgaggactgcaagtgctag

SEQ ID NO: 96890 - DNA, 2829 bp, synthetic construct
  misc_feature 1..2829: note = Description of Artificial Sequence: Synthetic coding sequence
  source 1..2829: mol_type = other DNA
atgcagagcttcagagagagatgcggcttccacggcaagcagcagaactaccagcagaccagccaggagaccagcagactggagaactacagacagcccagccaggccggcctgagctgcgacagacagagactgctggccaaggactactacaacccccagccctaccccagctacgagggcggcgccggcacccccagcggcaccgccgccgccgtggccgccgacaagtaccacagaggcagcaaggccctgcccacccagcagggcctgcagggcagacccgccttccccggctacggcgtgcaggacagcagcccctaccccggcagatacgccggcgaggagagcctgcaggcctggggcgccccccagcccccccccccccagccccagcccctgcccgccggcgtggccaagtacgacgagaacctgatgaagaagaccgccgtgccccccagcagacagtacgccgagcagggcgcccaggtgcccttcagaacccacagcctgcacgtgcagcagcccccccccccccagcagcccctggcctaccccaagctgcagagacagaagctgcagaacgacatcgccagccccctgcccttcccccagggcacccacttcccccagcacagccagagcttccccaccagcagcacctacagcagcagcgtgcagggcggcggccagggcgcccacagctacaagagctgcaccgcccccaccgcccagccccacgacagacccctgaccgccagcagcagcctggcccccggccagagagtgcagaacctgcacgcctaccagagcggcagactgagctacgaccagcagcagcagcagcagcagcagcagcagcagcagcagcaggccctgcagagcagacaccacgcccaggagaccctgcactaccagaacctggccaagtaccagcactacggccagcagggccagggctactgccagcccgacgccgccgtgagaacccccgagcagtactaccagaccttcagccccagcagcagccacagccccgccagaagcgtgggcagaagccccagctacagcagcacccccagccccctgatgcccaacctggagaacttcccctacagccagcagcccctgagcaccggcgccttccccgccggcatcaccgaccacagccacttcatgcccctgctgaaccccagccccaccgacgccaccagcagcgtggacacccaggccggcaactgcaagcccctgcagaaggacaagctgcccgagaacctgctgagcgacctgagcctgcagagcctgaccgccctgaccagccaggtggagaacatcagcaacaccgtgcagcagctgctgctgagcaaggccgccgtgccccagaagaagggcgtgaagaacctggtgagcagaacccccgagcagcacaagagccagcactgcagccccgagggcagcggctacagcgccgagcccgccggcacccccctgagcgagccccccagcagcaccccccagagcacccacgccgagccccaggaggccgactacctgagcggcagcgaggaccccctggagagaagcttcctgtactgcaaccaggccagaggcagccccgccagagtgaacagcaacagcaaggccaagcccgagagcgtgagcacctgcagcgtgaccagccccgacgacatgagcaccaagagcgacgacagcttccagagcctgcacggcagcctgcccctggacagcttcagcaagttcgtggccggcgagagagactgccccagactgctgctgagcgccctggcccaggaggacctggccagcgagatcctgggcctgcaggaggccatcggcgagaaggccgacaaggcctgggccgaggcccccagcctggtgaaggacagcagcaagccccccttcagcctggagaaccacagcgcctgcctggacagcgtggccaagagcgcctggcccagacccggcgagcccgaggccctgcccgacagcctgcagctggacaagggcggcaacgccaaggacttcagccccggcctgttcgaggaccccagcgtggccttcgccacccccgaccccaagaagaccaccggccccctgagcttcggcaccaagcccaccctgggcgtgcccgcccccgaccccaccaccgccgccttcgactgcttccccgacaccaccgccgccagcagcgccgacagcgccaaccccttcgcctggcccgaggagaacctgggcgacgcctgccccagatggggcctgcaccccggcgagctgaccaagggcctggagcagggcggcaaggccagcgacggcatcagcaagggcgacacccacgaggccagcgcctgcctgggcttccaggaggaggacccccccggcgagaaggtggccagcctgcccggcgacttcaagcaggaggaggtgggcggcgtgaaggaggaggccggcggcctgctgcagtgccccgaggtggccaaggccgacagatggctggaggacagcagacactgctgcagcaccgccgacttcggcgacctgcccctgctgccccccaccagcagaaaggaggacctggaggccgaggaggagtacagcagcctgtgcgagctgctgggcagccccgagcagagacccggcatgcaggaccccctgagccccaaggcccccctgatctgcaccaaggaggaggtggaggaggtgctggacagcaaggccggctggggcagcccctgccacctgagcggcgagagcgtgatcctgctgggccccaccgtgggcaccgagagcaaggtgcagagctggttctag

SEQ ID NO: 96891 - DNA, 5982 bp, synthetic construct
  misc_feature 1..5982: note = Description of Artificial Sequence: Synthetic coding sequence
  source 1..5982: mol_type = other DNA
atgcagagcttcagagagagatgcggcttccacggcaagcagcagaactaccagcagaccagccaggagaccagcagactggagaactacagacagcccagccaggccggcctgagctgcgacagacagagactgctggccaaggactactacaacccccagccctaccccagctacgagggcggcgccggcacccccagcggcaccgccgccgccgtggccgccgacaagtaccacagaggcagcaaggccctgcccacccagcagggcctgcagggcagacccgccttccccggctacggcgtgcaggacagcagcccctaccccggcagatacgccggcgaggagagcctgcaggcctggggcgccccccagcccccccccccccagccccagcccctgcccgccggcgtggccaagtacgacgagaacctgatgaagaagaccgccgtgccccccagcagacagtacgccgagcagggcgcccaggtgcccttcagaacccacagcctgcacgtgcagcagcccccccccccccagcagcccctggcctaccccaagctgcagagacagaagctgcagaacgacatcgccagccccctgcccttcccccagggcacccacttcccccagcacagccagagcttccccaccagcagcacctacagcagcagcgtgcagggcggcggccagggcgcccacagctacaagagctgcaccgcccccaccgcccagccccacgacagacccctgaccgccagcagcagcctggcccccggccagagagtgcagaacctgcacgcctaccagagcggcagactgagctacgaccagcagcagcagcagcagcagcagcagcagcagcagcagcaggccctgcagagcagacaccacgcccaggagaccctgcactaccagaacctggccaagtaccagcactacggccagcagggccagggctactgccagcccgacgccgccgtgagaacccccgagcagtactaccagaccttcagccccagcagcagccacagccccgccagaagcgtgggcagaagccccagctacagcagcacccccagccccctgatgcccaacctggagaacttcccctacagccagcagcccctgagcaccggcgccttccccgccggcatcaccgaccacagccacttcatgcccctgctgaaccccagccccaccgacgccaccagcagcgtggacacccaggccggcaactgcaagcccctgcagaaggacaagctgcccgagaacctgctgagcgacctgagcctgcagagcctgaccgccctgaccagccaggtggagaacatcagcaacaccgtgcagcagctgctgctgagcaaggccgccgtgccccagaagaagggcgtgaagaacctggtgagcagaacccccgagcagcacaagagccagcactgcagccccgagggcagcggctacagcgccgagcccgccggcacccccctgagcgagccccccagcagcaccccccagagcacccacgccgagccccaggaggccgactacctgagcggcagcgaggaccccctggagagaagcttcctgtactgcaaccaggccagaggcagccccgccagagtgaacagcaacagcaaggccaagcccgagagcgtgagcacctgcagcgtgaccagccccgacgacatgagcaccaagagcgacgacagcttccagagcctgcacggcagcctgcccctggacagcttcagcaagttcgtggccggcgagagagactgccccagactgctgctgagcgccctggcccaggaggacctggccagcgagatcctgggcctgcaggaggccatcggcgagaaggccgacaaggcctgggccgaggcccccagcctggtgaaggacagcagcaagccccccttcagcctggagaaccacagcgcctgcctggacagcgtggccaagagcgcctggcccagacccggcgagcccgaggccctgcccgacagcctgcagctggacaagggcggcaacgccaaggacttcagccccggcctgttcgaggaccccagcgtggccttcgccacccccgaccccaagaagaccaccggccccctgagcttcggcaccaagcccaccctgggcgtgcccgcccccgaccccaccaccgccgccttcgactgcttccccgacaccaccgccgccagcagcgccgacagcgccaaccccttcgcctggcccgaggagaacctgggcgacgcctgccccagatggggcctgcaccccggcgagctgaccaagggcctggagcagggcggcaaggccagcgacggcatcagcaagggcgacacccacgaggccagcgcctgcctgggcttccaggaggaggacccccccggcgagaaggtggccagcctgcccggcgacttcaagcaggaggaggtgggcggcgtgaaggaggaggccggcggcctgctgcagtgccccgaggtggccaaggccgacagatggctggaggacagcagacactgctgcagcaccgccgacttcggcgacctgcccctgctgccccccaccagcagaaaggaggacctggaggccgaggaggagtacagcagcctgtgcgagctgctgggcagccccgagcagagacccggcatgcaggaccccctgagccccaaggcccccctgatctgcaccaaggaggaggtggaggaggtgctggacagcaaggccggctggggcagcccctgccacctgagcggcgagagcgtgatcctgctgggccccaccgtgggcaccgagagcaaggtgcagagctggttcgagagcagcctgagccacatgaagcccggcgaggagggccccgacggcgagagagcccccggcgacagcaccaccagcgacgccagcctggcccagaagcccaacaagcccgccgtgcccgaggcccccatcgccaagaaggagcccgtgcccagaggcaagagcctgagaagcagaagagtgcacagaggcctgcccgaggccgaggacagcccctgcagagcccccgtgctgcccaaggacctgctgctgcccgagagctgcaccggccccccccagggccagatggagggcgccggcgcccccggcagaggcgccagcgagggcctgcccagaatgtgcaccagaagcctgaccgccctgagcgagcccagaacccccggcccccccggcctgaccaccacccccgccccccccgacaagctgggcggcaagcagagagccgccttcaagagcggcaagagagtgggcaagcccagccccaaggccgccagcagccccagcaaccccgccgccctgcccgtggccagcgacagcagccccatgggcagcaagaccaaggagaccgacagccccagcacccccggcaaggaccagagaagcatgatcctgagaagcagaaccaagacccaggagatcttccacagcaagagaagaagacccagcgagggcagactgcccaactgcagagccaccaagaagctgctggacaacagccacctgcccgccaccttcaaggtgagcagcagcccccagaaggagggcagagtgagccagagagccagagtgcccaagcccggcgccggcagcaagctgagcgacagacccctgcacgccctgaagagaaagagcgccttcatggcccccgtgcccaccaagaagagaaacctggtgctgagaagcagaagcagcagcagcagcaacgccagcggcaacggcggcgacggcaaggaggagagacccgagggcagccccaccctgttcaagagaatgagcagccccaagaaggccaagcccaccaagggcaacggcgagcccgccaccaagctgcccccccccgagacccccgacgcctgcctgaagctggccagcagagccgccttccagggcgccatgaagaccaaggtgctgccccccagaaagggcagaggcctgaagctggaggccatcgtgcagaagatcaccagccccagcctgaagaagttcgcctgcaaggcccccggcgccagccccggcaaccccctgagccccagcctgagcgacaaggacagaggcctgaagggcgccggcggcagccccgtgggcgtggaggagggcctggtgaacgtgggcaccggccagaagctgcccaccagcggcgccgaccccctgtgcagaaaccccaccaacagaagcctgaagggcaagctgatgaacagcaagaagctgagcagcaccgactgcttcaagaccgaggccttcaccagccccgaggccctgcagcccggcggcaccgccctggcccccaagaagagaagcagaaagggcagagccggcgcccacggcctgagcaagggccccctggagaagagaccctacctgggccccgccctgctgctgacccccagagacagagccagcggcacccagggcgccagcgaggacaacagcggcggcggcggcaagaagcccaagatggaggagctgggcctggccagccagccccccgagggcagaccctgccagccccagaccagagcccagaagcagcccggccacaccaactacagcagctacagcaagagaaagagactgaccagaggcagagccaagaacaccaccagcagcccctgcaagggcagagccaagagaagaagacagcagcaggtgctgcccctggaccccgccgagcccgagatcagactgaagtacatcagcagctgcaagagactgagaagcgacagcagaacccccgccttcagccccttcgtgagagtggagaagagagacgccttcaccaccatctgcaccgtggtgaacagccccggcgacgcccccaagccccacagaaagcccagcagcagcgccagcagcagcagcagcagcagcagcttcagcctggacgccgccggcgccagcctggccaccctgcccggcggcagcatcctgcagcccagacccagcctgcccctgagcagcaccatgcacctgggccccgtggtgagcaaggccctgagcaccagctgcctggtgtgctgcctgtgccagaaccccgccaacttcaaggacctgggcgacctgtgcggcccctactaccccgagcactgcctgcccaagaagaagcccaagctgaaggagaaggtgagacccgagggcacctgcgaggaggccagcctgcccctggagagaaccctgaagggccccgagtgcgccgccgccgccaccgccggcaagccccccagacccgacggccccgccgaccccgccaagcagggccccctgagaaccagcgccagaggcctgagcagaagactgcagagctgctactgctgcgacggcagagaggacggcggcgaggaggccgcccccgccgacaagggcagaaagcacgagtgcagcaaggaggcccccgccgagcccggcggcgaggcccaggagcactgggtgcacgaggcctgcgccgtgtggaccggcggcgtgtacctggtggccggcaagctgttcggcctgcaggaggccatgaaggtggccgtggacatgcacggcggcaccgtggccctggcccccggcgacttcagcctgcccggcctgagattcgccagcctgttccagggccccagctggtgcgactgccccgtgctggccaccagcacccccagcagctggagcagatgcgtgcccgccgccaagaagcccggcccccccctgggcgccgccaccaaggacgccagcacccccaccaccaccagagtgcccgccatgcaggtgagagccagacccggcaccggcggccactggagccccagcaagcagagcagaggcaccctgcccggccacagcagccccaaccccggccccatcagcctgttcagcttcccccccctgctgccccagcagttcttctaccccagcgtgtgcctggacctgtgctgggccatgcccggcacctggaagtag

SEQ ID NO: 96892 - DNA, 2943 bp, synthetic construct
  misc_feature 1..2943: note = Description of Artificial Sequence: Synthetic coding sequence
  source 1..2943: mol_type = other DNA
atgaagagcctgaaggccaagttcagaaagagcgacaccaacgagtggaacaagaacgacgacagactgctgcaggccgtggagaacggcgacgccgagaaggtggccagcctgctgggcaagaagggcgccagcgccaccaagcacgacagcgagggcaagaccgccttccacctggccgccgccaagggccacgtggagtgcctgagagtgatgatcacccacggcgtggacgtgaccgcccaggacaccaccggccacagcgccctgcacctggccgccaagaacagccaccacgagtgcatcagaaagctgctgcagagcaagtgccccgccgagagcgtggacagcagcggcaagaccgccctgcactacgccgccgcccagggctgcctgcaggccgtgcagatcctgtgcgagcacaagagccccatcaacctgaaggacctggacggcaacatccccctgctgctggccgtgcagaacggccacagcgagatctgccacttcctgctggaccacggcgccgacgtgaacagcagaaacaagagcggcagaaccgccctgatgctggcctgcgagatcggcagcagcaacgccgtggaggccctgatcaagaagggcgccgacctgaacctggtggacagcctgggctacaacgccctgcactacagcaagctgagcgagaacgccggcatccagagcctgctgctgagcaagatcagccaggacgccgacctgaagacccccaccaagcccaagcagcacgaccaggtgagcaagatcagcagcgagagaagcggcacccccaagaagagaaaggccccccccccccccatcagccccacccagctgagcgacgtgagcagccccagaagcatcaccagcacccccctgagcggcaaggagagcgtgttcttcgccgagccccccttcaaggccgagatcagcagcatcagagagaacaaggacagactgagcgacagcaccaccggcgccgacagcctgctggacatcagcagcgaggccgaccagcaggacctgctgagcctgctgcaggccaaggtggccagcctgaccctgcacaacaaggagctgcaggacaagctgcaggccaagagccccaaggaggccgaggccgacctgagcttcgacagctaccacagcacccagaccgacctgggccccagcctgggcaagcccggcgagaccagcccccccgacagcaagagcagccccagcgtgctgatccacagcctgggcaagagcaccaccgacaacgacgtgagaatccagcagctgcaggagatcctgcaggacctgcagaagagactggagagcagcgaggccgagagaaagcagctgcaggtggagctgcagagcagaagagccgagctggtgtgcctgaacaacaccgagatcagcgagaacagcagcgacctgagccagaagctgaaggagacccagagcaagtacgaggaggccatgaaggaggtgctgagcgtgcagaagcagatgaagctgggcctggtgagccccgagagcatggacaactacagccacttccacgagctgagagtgaccgaggaggagatcaacgtgctgaagcaggacctgcagaacgccctggaggagagcgagagaaacaaggagaaggtgagagagctggaggagaagctggtggagagagagaagggcaccgtgatcaagccccccgtggaggagtacgaggagatgaagagcagctactgcagcgtgatcgagaacatgaacaaggagaaggccttcctgttcgagaagtaccaggaggcccaggaggagatcatgaagctgaaggacaccctgaagagccagatgacccaggaggccagcgacgaggccgaggacatgaaggaggccatgaacagaatgatcgacgagctgaacaagcaggtgagcgagctgagccagctgtacaaggaggcccaggccgagctggaggactacagaaagagaaagagcctggaggacgtgaccgccgagtacatccacaaggccgagcacgagaagctgatgcagctgaccaacgtgagcagagccaaggccgaggacgccctgagcgagatgaagagccagtacagcaaggtgctgaacgagctgacccagctgaagcagctggtggacgcccagaaggagaacagcgtgagcatcaccgagcacctgcaggtgatcaccaccctgagaaccgccgccaaggagatggaggagaagatcagcaacctgaaggagcacctggccagcaaggaggtggaggtggccaagctggagaagcagctgctggaggagaaggccgccatgaccgacgccatggtgcccagaagcagctacgagaagctgcagagcagcctggagagcgaggtgagcgtgctggccagcaagctgaaggagagcgtgaaggagaaggagaaggtgcacagcgaggtggtgcagatcagaagcgaggtgagccaggtgaagagagagaaggagaacatccagaccctgctgaagagcaaggagcaggaggtgaacgagctgctgcagaagttccagcaggcccaggaggagctggccgagatgaagagatacgccgagagcagcagcaagctggaggaggacaaggacaagaagatcaacgagatgagcaaggaggtgaccaagctgaaggaggccctgaacagcctgagccagctgagctacagcaccagcagcagcaagagacagagccagcagctggaggccctgcagcagcaggtgaagcagctgcagaaccagctggccgagtgcaagaagcagcaccaggaggtgatcagcgtgtacagaatgcacctgctgtacgccgtgcagggccagatggacgaggacgtgcagaaggtgctgaagcagatcctgaccatgtgcaagaaccagagccagaagaagtag

SEQ ID NO: 96893 - DNA, 2922 bp, synthetic construct
  misc_feature 1..2922: note = Description of Artificial Sequence: Synthetic coding sequence
  source 1..2922: mol_type = other DNA
atggtgaagggcaagaccaacgagtggaacaagaacgacgacagactgctgcaggccgtggagaacggcgacgccgagaaggtggccagcctgctgggcaagaagggcgccagcgccaccaagcacgacagcgagggcaagaccgccttccacctggccgccgccaagggccacgtggagtgcctgagagtgatgatcacccacggcgtggacgtgaccgcccaggacaccaccggccacagcgccctgcacctggccgccaagaacagccaccacgagtgcatcagaaagctgctgcagagcaagtgccccgccgagagcgtggacagcagcggcaagaccgccctgcactacgccgccgcccagggctgcctgcaggccgtgcagatcctgtgcgagcacaagagccccatcaacctgaaggacctggacggcaacatccccctgctgctggccgtgcagaacggccacagcgagatctgccacttcctgctggaccacggcgccgacgtgaacagcagaaacaagagcggcagaaccgccctgatgctggcctgcgagatcggcagcagcaacgccgtggaggccctgatcaagaagggcgccgacctgaacctggtggacagcctgggctacaacgccctgcactacagcaagctgagcgagaacgccggcatccagagcctgctgctgagcaagatcagccaggacgccgacctgaagacccccaccaagcccaagcagcacgaccaggtgagcaagatcagcagcgagagaagcggcacccccaagaagagaaaggccccccccccccccatcagccccacccagctgagcgacgtgagcagccccagaagcatcaccagcacccccctgagcggcaaggagagcgtgttcttcgccgagccccccttcaaggccgagatcagcagcatcagagagaacaaggacagactgagcgacagcaccaccggcgccgacagcctgctggacatcagcagcgaggccgaccagcaggacctgctgagcctgctgcaggccaaggtggccagcctgaccctgcacaacaaggagctgcaggacaagctgcaggccaagagccccaaggaggccgaggccgacctgagcttcgacagctaccacagcacccagaccgacctgggccccagcctgggcaagcccggcgagaccagcccccccgacagcaagagcagccccagcgtgctgatccacagcctgggcaagagcaccaccgacaacgacgtgagaatccagcagctgcaggagatcctgcaggacctgcagaagagactggagagcagcgaggccgagagaaagcagctgcaggtggagctgcagagcagaagagccgagctggtgtgcctgaacaacaccgagatcagcgagaacagcagcgacctgagccagaagctgaaggagacccagagcaagtacgaggaggccatgaaggaggtgctgagcgtgcagaagcagatgaagctgggcctggtgagccccgagagcatggacaactacagccacttccacgagctgagagtgaccgaggaggagatcaacgtgctgaagcaggacctgcagaacgccctggaggagagcgagagaaacaaggagaaggtgagagagctggaggagaagctggtggagagagagaagggcaccgtgatcaagccccccgtggaggagtacgaggagatgaagagcagctactgcagcgtgatcgagaacatgaacaaggagaaggccttcctgttcgagaagtaccaggaggcccaggaggagatcatgaagctgaaggacaccctgaagagccagatgacccaggaggccagcgacgaggccgaggacatgaaggaggccatgaacagaatgatcgacgagctgaacaagcaggtgagcgagctgagccagctgtacaaggaggcccaggccgagctggaggactacagaaagagaaagagcctggaggacgtgaccgccgagtacatccacaaggccgagcacgagaagctgatgcagctgaccaacgtgagcagagccaaggccgaggacgccctgagcgagatgaagagccagtacagcaaggtgctgaacgagctgacccagctgaagcagctggtggacgcccagaaggagaacagcgtgagcatcaccgagcacctgcaggtgatcaccaccctgagaaccgccgccaaggagatggaggagaagatcagcaacctgaaggagcacctggccagcaaggaggtggaggtggccaagctggagaagcagctgctggaggagaaggccgccatgaccgacgccatggtgcccagaagcagctacgagaagctgcagagcagcctggagagcgaggtgagcgtgctggccagcaagctgaaggagagcgtgaaggagaaggagaaggtgcacagcgaggtggtgcagatcagaagcgaggtgagccaggtgaagagagagaaggagaacatccagaccctgctgaagagcaaggagcaggaggtgaacgagctgctgcagaagttccagcaggcccaggaggagctggccgagatgaagagatacgccgagagcagcagcaagctggaggaggacaaggacaagaagatcaacgagatgagcaaggaggtgaccaagctgaaggaggccctgaacagcctgagccagctgagctacagcaccagcagcagcaagagacagagccagcagctggaggccctgcagcagcaggtgaagcagctgcagaaccagctggccgagtgcaagaagcagcaccaggaggtgatcagcgtgtacagaatgcacctgctgtacgccgtgcagggccagatggacgaggacgtgcagaaggtgctgaagcagatcctgaccatgtgcaagaaccagagccagaagaagtag

SEQ ID NO: 96894 - DNA, 2943 bp, synthetic construct; identical to SEQ ID NO: 96892
  misc_feature 1..2943: note = Description of Artificial Sequence: Synthetic coding sequence
  source 1..2943: mol_type = other DNA

SEQ ID NO: 96895 - DNA, 2943 bp, synthetic construct; identical to SEQ ID NO: 96892
  misc_feature 1..2943: note = Description of Artificial Sequence: Synthetic coding sequence
  source 1..2943: mol_type = other DNA

SEQ ID NO: 96896 - DNA, 345 bp, synthetic construct
  misc_feature 1..345: note = Description of Artificial Sequence: Synthetic coding sequence
  source 1..345: mol_type = other DNA
atgaagagcctgaaggccaagttcagaaagagcgacaccaacgagtggaacaagaacgacgacagactgctgcaggccgtggagaacggcgacgccgagaaggtggccagcctgctgggcaagaagggcgccagcgccaccaagcacgacagcgagggcaagaccgccttccacctggccgccgccaagggccacgtggagtgcctgagagtgatgatcacccacggcgtggacgtgaccgcccaggacaccaccggccacagcgccctgcacctggccgccaagaacagccaccacgagtgcatcagaaagctgctgcagagcaagtgccccgccgagagctag

SEQ ID NO: 96897 - DNA, 2919 bp, synthetic construct
  misc_feature 1..2919: note = Description of Artificial Sequence: Synthetic coding sequence
  source 1..2919: mol_type = other DNA
atggaggccaagaccaacgagtggaacaagaacgacgacagactgctgcaggccgtggagaacggcgacgccgagaaggtggccagcctgctgggcaagaagggcgccagcgccaccaagcacgacagcgagggcaagaccgccttccacctggccgccgccaagggccacgtggagtgcctgagagtgatgatcacccacggcgtggacgtgaccgcccaggacaccaccggccacagcgccctgcacctggccgccaagaacagccaccacgagtgcatcagaaagctgctgcagagcaagtgccccgccgagagcgtggacagcagcggcaagaccgccctgcactacgccgccgcccagggctgcctgcaggccgtgcagatcctgtgcgagcacaagagccccatcaacctgaaggacctggacggcaacatccccctgctgctggccgtgcagaacggccacagcgagatctgccacttcctgctggaccacggcgccgacgtgaacagcagaaacaagagcggcagaaccgccctgatgctggcctgcgagatcggcagcagcaacgccgtggaggccctgatcaagaagggcgccgacctgaacctggtggacagcctgggctacaacgccctgcactacagcaagctgagcgagaacgccggcatccagagcctgctgctgagcaagatcagccaggacgccgacctgaagacccccaccaagcccaagcagcacgaccaggtgagcaagatcagcagcgagagaagcggcacccccaagaagagaaaggccccccccccccccatcagccccacccagctgagcgacgtgagcagccccagaagcatcaccagcacccccctgagcggcaaggagagcgtgttcttcgccgagccccccttcaaggccgagatcagcagcatcagagagaacaaggacagactgagcgacagcaccaccggcgccgacagcctgctggacatcagcagcgaggccgaccagcaggacctgctgagcctgctgcaggccaaggtggccagcctgaccctgcacaacaaggagctgcaggacaagctgcaggccaagagccccaaggaggccgaggccgacctgagcttcgacagctaccacagcacccagaccgacctgggccccagcctgggcaagcccggcgagaccagcccccccgacagcaagagcagccccagcgtgctgatccacagcctgggcaagagcaccaccgacaacgacgtgagaatccagcagctgcaggagatcctgcaggacctgcagaagagactggagagcagcgaggccgagagaaagcagctgcaggtggagctgcagagcagaagagccgagctggtgtgcctgaacaacaccgagatcagcgagaacagcagcgacctgagccagaagctgaaggagacccagagcaagtacgaggaggccatgaaggaggtgctgagcgtgcagaagcagatgaagctgggcctggtgagccccgagagcatggacaactacagccacttccacgagctgagagtgaccgaggaggagatcaacgtgctgaagcaggacctgcagaacgccctggaggagagcgagagaaacaaggagaaggtgagagagctggaggagaagctggtggagagagagaagggcaccgtgatcaagccccccgtggaggagtacgaggagatgaagagcagctactgcagcgtgatcgagaacatgaacaaggagaaggccttcctgttcgagaagtaccaggaggcccaggaggagatcatgaagctgaaggacaccctgaagagccagatgacccaggaggccagcgacgaggccgaggacatgaaggaggccatgaacagaatgatcgacgagctgaacaagcaggtgagcgagctgagccagctgtacaaggaggcccaggccgagctggaggactacagaaagagaaagagcctggaggacgtgaccgccgagtacatccacaaggccgagcacgagaagctgatgcagctgaccaacgtgagcagagccaaggccgaggacgccctgagcgagatgaagagccagtacagcaaggtgctgaacgagctgacccagctgaagcagctggtggacgcccagaaggagaacagcgtgagcatcaccgagcacctgcaggtgatcaccaccctgagaaccgccgccaaggagatggaggagaagatcagcaacctgaaggagcacctggccagcaaggaggtggaggtggccaagctggagaagcagctgctggaggagaaggccgccatgaccgacgccatggtgcccagaagcagctacgagaagctgcagagcagcctggagagcgaggtgagcgtgctggccagcaagctgaaggagagcgtgaaggagaaggagaaggtgcacagcgaggtggtgcagatcagaagcgaggtgagccaggtgaagagagagaaggagaacatccagaccctgctgaagagcaaggagcaggaggtgaacgagctgctgcagaagttccagcaggcccaggaggagctggccgagatgaagagatacgccgagagcagcagcaagctggaggaggacaaggacaagaagatcaacgagatgagcaaggaggtgaccaagctgaaggaggccctgaacagcctgagccagctgagctacagcaccagcagcagcaagagacagagccagcagctggaggccctgcagcagcaggtgaagcagctgcagaaccagctggccgagtgcaagaagcagcaccaggaggtgatcagcgtgtacagaatgcacctgctgtacgccgtgcagggccagatggacgaggacgtgcagaaggtgctgaagcagatcctgaccatgtgcaagaaccagagccagaagaagtag

SEQ ID NO: 96898 - DNA, 378 bp, synthetic construct
  misc_feature 1..378: note = Description of Artificial Sequence: Synthetic coding sequence
  source 1..378: mol_type = other DNA
atgaagagcctgaaggccaagttcagaaagagcgacaccaacgagtggaacaagaacgacgacagactgctgcaggccgtggagaacggcgacgccgagaaggtggccagcctgctgggcaagaagggcgccagcgccaccaagcacgacagcgagggcaagaccgccttccacctggccgccgccaagggccacgtggagtgcctgagagtgatgatcacccacggcgtggacgtgaccgcccaggacaccaccggccacagcgccctgcacctggccgccaagaacagccaccacgagtgcatcagaaagctgctgcagagcaagtgccccgccgagagcgtggacagcagcggcaagaccgccctgcactactag

SEQ ID NO: 96899 - DNA, 324 bp, synthetic construct
  misc_feature 1..324: note = Description of Artificial Sequence: Synthetic coding sequence
  source 1..324: mol_type = other DNA
atgaagagcctgaaggccaagttcagaaagagcgacaccaacgagtggaacaagaacgacgacagactgctgcaggccgtggagaacggcgacgccgagaaggtggccagcctgctgggcaagaagggcgccagcgccaccaagcacgacagcgagggcaagaccgccttccacctggccgccgccaagggccacgtggagtgcctgagagtgatgatcacccacggcgtggacgtgaccgcccaggacaccaccggccacagcgccctgcacctggccgccaagaacagccaccacgagtgcatcagaaagctgctgcagtag

SEQ ID NO: 96900 - DNA, 453 bp, synthetic construct
  misc_feature 1..453: note = Description of Artificial Sequence: Synthetic coding sequence
  source 1..453: mol_type = other DNA
atgaagagcctgaaggccaagttcagaaagagcgacaccaacgagtggaacaagaacgacgacagactgctgcaggccgtggagaacggcgacgccgagaaggtggccagcctgctgggcaagaagggcgccagcgccaccaagcacgacagcgagggcaagaccgccttccacctggccgccgccaagggccacgtggagtgcctgagagtgatgatcacccacggcgtggacgtgaccgcccaggacaccaccggccacagcgccctgcacctggccgccaagaacagccaccacgagtgcatcagaaagctgctgcagagcaagtgccccgccgagagcgtggacagcagcggcaagaccgccctgcactacgccgccgcccagggctgcctgcaggccgtgcagatcctgtgcgagcacaagagccccatcaacctgaaggacctgtag

SEQ ID NO: 96901 - DNA, 381 bp, synthetic construct
  misc_feature 1..381: note = Description of Artificial Sequence: Synthetic coding sequence
  source 1..381: mol_type = other DNA
atgaagagcctgaaggccaagttcagaaagagcgacaccaacgagtggaacaagaacgacgacagactgctgcaggccgtggagaacggcgacgccgagaaggtggccagcctgctgggcaagaagggcgccagcgccaccaagcacgacagcgagggcaagaccgccttccacctggccgccgccaagggccacgtggagtgcctgagagtgatgatcacccacggcgtggacgtgaccgcccaggacaccaccggccacagcgccctgcacctggccgccaagaacagccaccacgagtgcatcagaaagctgctgcagagcaagtgccccgccgagagcgtggacagcagcggcaagaccgccctgcactacgcctag

SEQ ID NO: 96902 - DNA, 315 bp, synthetic construct
  misc_feature 1..315: note = Description of Artificial Sequence: Synthetic coding sequence
  source 1..315: mol_type = other DNA
atgaagagcctgaaggccaagttcagaaagagcgacaccaacgagtggaacaagaacgacgacagactgctgcaggccgtggagaacggcgacgccgagaaggtggccagcctgctgggcaagaagggcgccagcgccaccaagcacgacagcgagggcaagaccgccttccacctggccgccgccaagggccacgtggagtgcctgagagtgatgatcacccacggcgtggacgtgaccgcccaggacaccaccggccacagcgccctgcacctggccgccaagaacagccaccacgagtgcatcagaaagtag

SEQ ID NO: 96903 - DNA, 420 bp, synthetic construct
  misc_feature 1..420: note = Description of Artificial Sequence: Synthetic coding sequence
  source 1..420: mol_type = other DNA
atgaagagcctgaaggccaagttcagaaagagcgacaccaacgagtggaacaagaacgacgacagactgctgcaggccgtggagaacggcgacgccgagaaggtggccagcctgctgggcaagaagggcgccagcgccaccaagcacgacagcgagggcaagaccgccttccacctggccgccgccaagggccacgtggagtgcctgagagtgatgatcacccacggcgtggacgtgaccgcccaggacaccaccggccacagcgccctgcacctggccgccaagaacagccaccacgagtgcatcagaaagctgctgcagagcaagtgccccgccgagagcgtggacagcagcggcaagaccgccctgcactacgccgccgcccagggctgcctgcaggccgtgcagatcctgtgctag

SEQ ID NO: 96904 - DNA, 381 bp, synthetic construct; identical to SEQ ID NO: 96901
  misc_feature 1..381: note = Description of Artificial Sequence: Synthetic coding sequence
  source 1..381: mol_type = other DNA

SEQ ID NO: 96905 - DNA, 2952 bp, synthetic construct
  misc_feature 1..2952: note = Description of Artificial Sequence: Synthetic coding sequence
  source 1..2952: mol_type = other DNA
atgcagcccacctacctgccctggctgagcgccaaggagaagaagaccaacgagtggaacaagaacgacgacagactgctgcaggccgtggagaacggcgacgccgagaaggtggccagcctgctgggcaagaagggcgccagcgccaccaagcacgacagcgagggcaagaccgccttccacctggccgccgccaagggccacgtggagtgcctgagagtgatgatcacccacggcgtggacgtgaccgcccaggacaccaccggccacagcgccctgcacctggccgccaagaacagccaccacgagtgcatcagaaagctgctgcagagcaagtgccccgccgagagcgtggacagcagcggcaagaccgccctgcactacgccgccgcccagggctgcctgcaggccgtgcagatcctgtgcgagcacaagagccccatcaacctgaaggacctggacggcaacatccccctgctgctggccgtgcagaacggccacagcgagatctgccacttcctgctggaccacggcgccgacgtgaacagcagaaacaagagcggcagaaccgccctgatgctggcctgcgagatcggcagcagcaacgccgtggaggccctgatcaagaagggcgccgacctgaacctggtggacagcctgggctacaacgccctgcactacagcaagctgagcgagaacgccggcatccagagcctgctgctgagcaagatcagccaggacgccgacctgaagacccccaccaagcccaagcagcacgaccaggtgagcaagatcagcagcgagagaagcggcacccccaagaagagaaaggccccccccccccccatcagccccacccagctgagcgacgtgagcagccccagaagcatcaccagcacccccctgagcggcaaggagagcgtgttcttcgccgagccccccttcaaggccgagatcagcagcatcagagagaacaaggacagactgagcgacagcaccaccggcgccgacagcctgctggacatcagcagcgaggccgaccagcaggacctgctgagcctgctgcaggccaaggtggccagcctgaccctgcacaacaaggagctgcaggacaagctgcaggccaagagccccaaggaggccgaggccgacctgagcttcgacagctaccacagcacccagaccgacctgggccccagcctgggcaagcccggcgagaccagcccccccgacagcaagagcagccccagcgtgctgatccacagcctgggcaagagcaccaccgacaacgacgtgagaatccagcagctgcaggagatcctgcaggacctgcagaagagactggagagcagcgaggccgagagaaagcagctgcaggtggagctgcagagcagaagagccgagctggtgtgcctgaacaacaccgagatcagcgagaacagcagcgacctgagccagaagctgaaggagacccagagcaagtacgaggaggccatgaaggaggtgctgagcgtgcagaagcagatgaagctgggcctggtgagccccgagagcatggacaactacagccacttccacgagctgagagtgaccgaggaggagatcaacgtgctgaagcaggacctgcagaacgccctggaggagagcgagagaaacaaggagaaggtgagagagctggaggagaagctggtggagagagagaagggcaccgtgatcaagccccccgtggaggagtacgaggagatgaagagcagctactgcagcgtgatcgagaacatgaacaaggagaaggccttcctgttcgagaagtaccaggaggcccaggaggagatcatgaagctgaaggacaccctgaagagccagatgacccaggaggccagcgacgaggccgaggacatgaaggaggccatgaacagaatgatcgacgagctgaacaagcaggtgagcgagctgagccagctgtacaaggaggcccaggccgagctggaggactacagaaagagaaagagcctggaggacgtgaccgccgagtacatccacaaggccgagcacgagaagctgatgcagctgaccaacgtgagcagagccaaggccgaggacgccctgagcgagatgaagagccagtacagcaaggtgctgaacgagctgacccagctgaagcagctggtggacgcccagaaggagaacagcgtgagcatcaccgagcacctgcaggtgatcaccaccctgagaaccgccgccaaggagatggaggagaagatcagcaacctgaaggagcacctggccagcaaggaggtggaggtggccaagctggagaagcagctgctggaggagaaggccgccatgaccgacgccatggtgcccagaagcagctacgagaagctgcagagcagcctggagagcgaggtgagcgtgctggccagcaagctgaaggagagcgtgaaggagaaggagaaggtgcacagcgaggtggtgcagatcagaagcgaggtgagccaggtgaagagagagaaggagaacatccagaccctgctgaagagcaaggagcaggaggtgaacgagctgctgcagaagttccagcaggcccaggaggagctggccgagatgaagagatacgccgagagcagcagcaagctggaggaggacaaggacaagaagatcaacgagatgagcaaggaggtgaccaagctgaaggaggccctgaacagcctgagccagctgagctacagcaccagcagcagcaagagacagagccagcagctggaggccctgcagcagcaggtgaagcagctgcagaaccagctggccgagtgcaagaagcagcaccaggaggtgatcagcgtgtacagaatgcacctgctgtacgccgtgcagggccagatggacgaggacgtgcagaaggtgctgaagcagatcctgaccatgtgcaagaaccagagccagaagaagtag

SEQ ID NO: 96906 - DNA, 2856 bp, synthetic construct
  misc_feature 1..2856: note = Description of Artificial Sequence: Synthetic coding sequence
  source 1..2856: mol_type = other DNA
atgaagagcctgaaggccaagttcagaaagagcgacaccaacgagtggaacaagaacgacgacagactgctgcaggccgtggagaacggcgacgccgagaaggtggccagcctgctgggcaagaagggcgccagcgccaccaagcacgacagcgagggcaagaccgccttccacctggccgccgccaagggccacgtggagtgcctgagagtgatgatcacccacggcgtggacgtgaccgcccaggacaccaccggccacagcgccctgcacctggccgccaagaacagccaccacgagtgcatcagaaagctgctgcagagcaagtgccccgccgagagcgtggacagcagcggcaagaccgccctgcactacgccgccgcccagggctgcctgcaggccgtgcagatcctgtgcgagcacaagagccccatcaacctgaaggacctggacggcaacatccccctgctgctggccgtgcagaacggccacagcgagatctgccacttcctgctggaccacggcgccgacgtgaacagcagaaacaagagcggcagaaccgccctgatgctggcctgcgagatcggcagcagcaacgccgtggaggccctgatcaagaagggcgccgacctgaacctggtggacagcctgggctacaacgccctgcactacagcaagctgagcgagaacgccggcatccagagcctgctgctgagcaagatcagccaggacgccgacctgaagacccccaccaagcccaagcagctgagcgacgtgagcagccccagaagcatcaccagcacccccctgagcggcaaggagagcgtgttcttcgccgagccccccttcaaggccgagatcagcagcatcagagagaacaaggacagactgagcgacagcaccaccggcgccgacagcctgctggacatcagcagcgaggccgaccagcaggacctgctgagcctgctgcaggccaaggtggccagcctgaccctgcacaacaaggagctgcaggacaagctgcaggccaagagccccaaggaggccgaggccgacctgagcttcgacagctaccacagcacccagaccgacctgggccccagcctgggcaagcccggcgagaccagcccccccgacagcaagagcagccccagcgtgctgatccacagcctgggcaagagcaccaccgacaacgacgtgagaatccagcagctgcaggagatcctgcaggacctgcagaagagactggagagcagcgaggccgagagaaagcagctgcaggtggagctgcagagcagaagagccgagctggtgtgcctgaacaacaccgagatcagcgagaacagcagcgacctgagccagaagctgaaggagacccagagcaagtacgaggaggccatgaaggaggtgctgagcgtgcagaagcagatgaagctgggcctggtgagccccgagagcatggacaactacagccacttccacgagctgagagtgaccgaggaggagatcaacgtgctgaagcaggacctgcagaacgccctggaggagagcgagagaaacaaggagaaggtgagagagctggaggagaagctggtggagagagagaagggcaccgtgatcaagccccccgtggaggagtacgaggagatgaagagcagctactgcagcgtgatcgagaacatgaacaaggagaaggccttcctgttcgagaagtaccaggaggcccaggaggagatcatgaagctgaaggacaccctgaagagccagatgacccaggaggccagcgacgaggccgaggacatgaaggaggccatgaacagaatgatcgacgagctgaacaagcaggtgagcgagctgagccagctgtacaaggaggcccaggccgagctggaggactacagaaagagaaagagcctggaggacgtgaccgccgagtacatccacaaggccgagcacgagaagctgatgcagctgaccaacgtgagcagagccaaggccgaggacgccctgagcgagatgaagagccagtacagcaaggtgctgaacgagctgacccagctgaagcagctggtggacgcccagaaggagaacagcgtgagcatcaccgagcacctgcaggtgatcaccaccctgagaaccgccgccaaggagatggaggagaagatcagcaacctgaaggagcacctggccagcaaggaggtggaggtggccaagctggagaagcagctgctggaggagaaggccgccatgaccgacgccatggtgcccagaagcagctacgagaagctgcagagcagcctggagagcgaggtgagcgtgctggccagcaagctgaaggagagcgtgaaggagaaggagaaggtgcacagcgaggtggtgcagatcagaagcgaggtgagccaggtgaagagagagaaggagaacatccagaccctgctgaagagcaaggagcaggaggtgaacgagctgctgcagaagttccagcaggcccaggaggagctggccgagatgaagagatacgccgagagcagcagcaagctggaggaggacaaggacaagaagatcaacgagatgagcaaggaggtgaccaagctgaaggaggccctgaacagcctgagccagctgagctacagcaccagcagcagcaagagacagagccagcagctggaggccctgcagcagcaggtgaagcagctgcagaaccagctggccgagtgcaagaagcagcaccaggaggtgatcagcgtgtacagaatgcacctgctgtacgccgtgcagggccagatggacgaggacgtgcagaaggtgctgaagcagatcctgaccatgtgcaagaaccagagccagaagaagtag

SEQ ID NO: 96907 - DNA, 1593 bp, synthetic construct
  misc_feature 1..1593: note = Description of Artificial Sequence: Synthetic coding sequence
  source 1..1593: mol_type = other DNA
atggacgacctgcagagccagaacctgagcatggacatgaccgacagcccccccgccctggccaacaacagactggagaacggcatggcccagctgatcaccaccgaggcctggaacatcaacagcaccgacctggtgaagaaggccctggtgaccgtgcccgcccccagcatcctgaacccccccgccgagagccagagcggcatggccctgaaggtggccgccaccgtgctgcagcccctgtgcctgggcgagagccccgtggtgatgcccatccacatgcaggtggagggcagcagcgcccccgagctgaaccccaacggcaacgccacctacgtgatgaccacccagggccccgtgcagctgcccgtggtgctggagcagcacgtgttccagcacctgaacagccccctggtgctgccccaggaggccccctgcagcagcagcaccatccacaacaacctgttccagggcgccgaggaccccgaggcccagccccagctgctggacctgagaatccccagccagccccaggagcccaccctgcccttcgaggccgtgctgcagaacctgttccccagccagggcaccctgggcccccccccctgccagcccccccccggctacgcccccgtgcccccccagcccttcagcagccccctgagccccctggtgccccccgccaccctgctggtgccctaccccgtgatcgtgcccctgcccgtgcccgtgcccatccccatccccatccccatgccccagagcagcgagagcaagttcagcagcagcttccccaagccccccagcagcttcggcctgcaccccttcaagggcacccagacccccctggagaaggacgagctgaagcccttcgacatcctgcagcccaaggagtacttccagctgagcagacacaccgtgatcaagatgggcagcgagaacgaggccctggacctgagcatgaagagcgtgccctggctgaaggccggcgaggtgagcccccccatcttccaggaggacgccgccctggacctgagcgtggccgcccacagaaagagcgagcccccccccgagaccctgtacgacagcggcgccagcgtggacagcagcggccacaccgtgatggagaagctgcccagcggcatggagatcagcttcgcccccgccaccagccacgaggcccccgccatgatggacagccacatcagcagcagcgacgccgccaccgagatgctgagccagcccaaccaccccagcggcgaggtgaaggccgagaacaacatcgagatggtgggcgagagccaggccgccaaggtgatcgtgagcgtggaggacgccgtgcccaccatcttctgcggcaagatcaagggcctgagcggcgtgagcaccaagaacttcagcttcaagagagaggacagcgtgctgcagggctacgacatcaacagccagggcgaggagagcatgggcaacgccgagcccctgagaaagcccatcaagaacagaagcatcaagctgaagaaggtgaacagccaggagatccacatgctgcccatcaagaagcagagactggccaccttcttccccagaaagtag

SEQ ID NO: 96908 - DNA, 1593 bp, synthetic construct; identical to SEQ ID NO: 96907
  misc_feature 1..1593: note = Description of Artificial Sequence: Synthetic coding sequence
  source 1..1593: mol_type = other DNA

SEQ ID NO: 96909 - DNA, 1443 bp, synthetic construct
  misc_feature 1..1443: note = Description of Artificial Sequence: Synthetic coding sequence
  source 1..1443: mol_type = other DNA
atggacgacctgcagagccagaacctgagcatggacatgaccgacagcccccccgccctggccaacaacagactggagaacggcatggcccagctgatcaccaccgaggcctggaacatcaacagcaccgacctggtggagggcagcagcgcccccgagctgaaccccaacggcaacgccacctacgtgatgaccacccagggccccgtgcagctgcccgtggtgctggagcagcacgtgttccagcacctgaacagccccctggtgctgccccaggaggccccctgcagcagcagcaccatccacaacaacctgttccagggcgccgaggaccccgaggcccagccccagctgctggacctgagaatccccagccagccccaggagcccaccctgcccttcgaggccgtgctgcagaacctgttccccagccagggcaccctgggcccccccccctgccagcccccccccggctacgcccccgtgcccccccagcccttcagcagccccctgagccccctggtgccccccgccaccctgctggtgccctaccccgtgatcgtgcccctgcccgtgcccgtgcccatccccatccccatccccatgccccagagcagcgagagcaagttcagcagcagcttccccaagccccccagcagcttcggcctgcaccccttcaagggcacccagacccccctggagaaggacgagctgaagcccttcgacatcctgcagcccaaggagtacttccagctgagcagacacaccgtgatcaagatgggcagcgagaacgaggccctggacctgagcatgaagagcgtgccctggctgaaggccggcgaggtgagcccccccatcttccaggaggacgccgccctggacctgagcgtggccgcccacagaaagagcgagcccccccccgagaccctgtacgacagcggcgccagcgtggacagcagcggccacaccgtgatggagaagctgcccagcggcatggagatcagcttcgcccccgccaccagccacgaggcccccgccatgatggacagccacatcagcagcagcgacgccgccaccgagatgctgagccagcccaaccaccccagcggcgaggtgaaggccgagaacaacatcgagatggtgggcgagagccaggccgccaaggtgatcgtgagcgtggaggacgccgtgcccaccatcttctgcggcaagatcaagggcctgagcggcgtgagcaccaagaacttcagcttcaagagagaggacagcgtgctgcagggctacgacatcaacagccagggcgaggagagcatgggcaacgccgagcccctgagaaagcccatcaagaacagaagcatcaagctgaagaaggtgaacagccaggagatccacatgctgcccatcaagaagcagagactggccaccttcttccccagaaagtag

SEQ ID NO: 96910 - DNA, 1593 bp, synthetic construct; identical to SEQ ID NO: 96907
  misc_feature 1..1593: note = Description of Artificial Sequence: Synthetic coding sequence
  source 1..1593: mol_type = other DNA

SEQ ID NO: 96911 - DNA, 1593 bp, synthetic construct; identical to SEQ ID NO: 96907
  misc_feature 1..1593: note = Description of Artificial Sequence: Synthetic coding sequence
  source 1..1593: mol_type = other DNA

SEQ ID NO: 96912 - DNA, 885 bp, synthetic construct
  misc_feature 1..885: note = Description of Artificial Sequence: Synthetic coding sequence
  source 1..885: mol_type = other DNA
atgcagcccagaagacagagactgcccgccccctggagcggccccagaggccccagacccaccgcccccctgctggccctgctgctgctgctggcccccgtggccgcccccgccggcagcggcgaccccgacgaccccggccagccccaggacgccggcgtgcccagaagactgctgcagcaggccgccagagccgccctgcacttcttcaacttcagaagcggcagccccagcgccctgagagtgctggccgaggtgcaggagggcagagcctggatcaaccccaaggagggctgcaaggtgcacgtggtgttcagcaccgagagatacaaccccgagagcctgctgcaggagggcgagggcagactgggcaagtgcagcgccagagtgttcttcaagaaccagaagcccagacccaccatcaacgtgacctgcaccagactgatcgagaagaagaagagacagcaggaggactacctgctgtacaagcagatgaagcagctgaagaaccccctggagatcgtgagcatccccgacaaccacggccacatcgaccccagcctgagactgatctgggacctggccttcctgggcagcagctacgtgatgtgggagatgaccacccaggtgagccactactacctggcccagctgaccagcgtgagacagtggaagaccaacgacgacaccatcgacttcgactacaccgtgctgctgcacgagctgagcacccaggagatcatcccctgcagaatccacctggtgtggtaccccggcaagcccctgaaggtgaagtaccactgccaggagctgcagacccccgaggaggccagcggcaccgaggagggcagcgccgtggtgcccaccgagctgagcaacttctag

SEQ ID NO: 96913 - DNA, 687 bp, synthetic construct
  misc_feature 1..687: note = Description of Artificial Sequence: Synthetic coding sequence
  source 1..687: mol_type = other DNA
atgcagcccagaagacagagactgcccgccccctggagcggccccagaggccccagacccaccgcccccctgctggccctgctgctgctgctggcccccgtggccgcccccgccggcagcggcgaccccgacgaccccggccagccccaggacgccggcgtgcccagaagactgctgcagcaggccgccagagccgccctgcacttcttcaacttcagaagcggcagccccagcgccctgagagtgctggccgaggtgcaggagggcagagcctggatcaaccccaaggagggctgcaaggtgcacgtggtgttcagcaccgagagatacaaccccgagagcctgctgcaggagggcgagggcagactgggcaagtgcagcgccagagtgttcttcaagaaccagaagcccagacccaccatcaacgtgacctgcaccagactgatcgagaagaagaagagacagcaggaggactacctgctgtacaagcagatgaagcagctgaagaaccccctggagatcgtgagcatccccgacaaccacggccacatcgaccccagcctgagactgatctgggacctggccttcctgggcagcagctacgtgatgtgggagatgaccacccaggtgagccactactacctggcccagctgaccagcgtgagacagtgggtgagaaagacctag

SEQ ID NO: 96914 - DNA, 1008 bp, synthetic construct
  misc_feature 1..1008: note = Description of Artificial Sequence: Synthetic coding sequence
  source 1..1008: mol_type = other DNA
atggtgagaagagacagactgagaagaatgagagagtggtgggtgcaggtgggcctgctggccgtgcccctgctggccgcctacctgcacatcccccccccccagctgagccccgccctgcacagctggaagagcagcggcaagttcttcacctacaagggcctgagaatcttctaccaggacagcgtgggcgtggtgggcagccccgagatcgtggtgctgctgcacggcttccccaccagcagctacgactggtacaagatctgggagggcctgaccctgagattccacagagtgatcgccctggacttcctgggcttcggcttcagcgacaagcccagaccccaccactacagcatcttcgagcaggccagcatcgtggaggccctgctgagacacctgggcctgcagaacagaagaatcaacctgctgagccacgactacggcgacatcgtggcccaggagctgctgtacagatacaagcagaacagaagcggcagactgaccatcaagagcctgtgcctgagcaacggcggcatcttccccgagacccacagacccctgctgctgcagaagctgctgaaggacggcggcgtgctgagccccatcctgaccagactgatgaacttcttcgtgttcagcagaggcctgacccccgtgttcggcccctacaccagacccagcgagagcgagctgtgggacatgtgggccggcatcagaaacaacgacggcaacctggtgatcgacagcctgctgcagtacatcaaccagagaaagaagttcagaagaagatgggtgggcgccctggccagcgtgaccatccccatccacttcatctacggccccctggaccccgtgaacccctaccccgagttcctggagctgtacagaaagaccctgcccagaagcaccgtgagcatcctggacgaccacatcagccactacccccagctggaggaccccatgggcttcctgaacgcctacatgggcttcatcaacagcttctag

SEQ ID NO: 96915 - DNA, 492 bp, synthetic construct
  misc_feature 1..492: note = Description of Artificial Sequence: Synthetic coding sequence
  source 1..492: mol_type = other DNA
atgagaagactgctgatccccctggccctgtggctgggcgccgtgggcgtgggcgtggccgagctgaccgaggcccagagaagaggcctgcaggtggccctggaggagttccacaagcacccccccgtgcagtgggccttccaggagaccagcgtggagagcgccgtggacacccccttccccgccggcatcttcgtgagactggagttcaagctgcagcagaccagctgcagaaagagagactggaagaagcccgagtgcaaggtgagacccaacggcagaaagagaaagtgcctggcctgcatcaagctgggcagcgaggacaaggtgctgggcagactggtgcactgccccatcgagacccaggtgctgagagaggccgaggagcaccaggagacccagtgcctgagagtgcagagagccggcgaggacccccacagcttctacttccccggccagttcgccttcagcaaggccctgcccagaagctag

SEQ ID NO: 96916 - DNA, 492 bp, synthetic construct; identical to SEQ ID NO: 96915
  misc_feature 1..492: note = Description of Artificial Sequence: Synthetic coding sequence
  source 1..492: mol_type = other DNA

SEQ ID NO: 96917 - DNA, 495 bp, synthetic construct
  misc_feature 1..495: note = Description of Artificial Sequence: Synthetic coding sequence
  source 1..495: mol_type = other DNA
atggccagcccccaccaggagcccaagcccggcgacctgatcgagatcttcagactgggctacgagcactgggccctgtacatcggcgacggctacgtgatccacctggccccccccagcgagtaccccggcgccggcagcagcagcgtgttcagcgtgctgagcaacagcgccgaggtgaagagagagagactggaggacgtggtgggcggctgctgctacagagtgaacaacagcctggaccacgagtaccagcccagacccgtggaggtgatcatcagcagcgccaaggagatggtgggccagaagatgaagtacagcatcgtgagcagaaactgcgagcacttcgtgacccagctgagatacggcaagagcagatgcaagcaggtggagaaggccaaggtggaggtgggcgtggccaccgccctgggcatcctggtggtggccggctgcagcttcgccatcagaagataccagaagaaggccaccgcctag

SEQ ID NO: 96918 - DNA, 495 bp, synthetic construct
  misc_feature 1..495: note = Description of Artificial Sequence: Synthetic coding sequence
  source 1..495: mol_type = other DNA
atgggcctgcccgagcccaagcccaagcccggcgacctgatcgagatcttcagactgggctacgagcactgggccctgtacatcggcgacggctacgtgatccacctggccccccccagcgagtaccccggcgccggcagcagcagcgtgttcagcgtgctgagcaacagcgccgaggtgaagagagagagactggaggacgtggtgggcggctgctgctacagagtgaacaacagcctggaccacgagtaccagcccagacccgtggaggtgatcatcagcagcgccaaggagatggtgggccagaagatgaagtacagcatcgtgagcagaaactgcgagcacttcgtgacccagctgagatacggcaagagcagatgcaagcaggtggagaaggccaaggtggaggtgggcgtggccaccgccctgggcatcctggtggtggccggctgcagcttcgccatcagaagataccagaagaaggccaccgcctag

SEQ ID NO: 96919 - DNA, 1389 bp, synthetic construct
  misc_feature 1..1389: note = Description of Artificial Sequence: Synthetic coding sequence
  source 1..1389: mol_type = other DNA
atggccagcaacagcagcagctgccccacccccggcggcggccacctgaacggctaccccgtgcccccctacgccttcttcttcccccccatgctgggcggcctgagcccccccggcgccctgaccaccctgcagcaccagctgcccgtgagcggctacagcacccccagccccgccaccatcgagacccagagcagcagcagcgaggagatcgtgcccagcccccccagccccccccccctgcccagaatctacaagccctgcttcgtgtgccaggacaagagcagcggctaccactacggcgtgagcgcctgcgagggctgcaagggcttcttcagaagaagcatccagaagaacatggtgtacacctgccacagagacaagaactgcatcatcaacaaggtgaccagaaacagatgccagtactgcagactgcagaagtgcttcgaggtgggcatgagcaaggagagcgtgagaaacgacagaaacaagaagaagaaggaggtgcccaagcccgagtgcagcgagagctacaccctgacccccgaggtgggcgagctgatcgagaaggtgagaaaggcccaccaggagaccttccccgccctgtgccagctgggcaagtacaccaccaacaacagcagcgagcagagagtgagcctggacatcgacctgtgggacaagttcagcgagctgagcaccaagtgcatcatcaagaccgtggagttcgccaagcagctgcccggcttcaccaccctgaccatcgccgaccagatcaccctgctgaaggccgcctgcctggacatcctgatcctgagaatctgcaccagatacacccccgagcaggacaccatgaccttcagcgacggcctgaccctgaacagaacccagatgcacaacgccggcttcggccccctgaccgacctggtgttcgccttcgccaaccagctgctgcccctggagatggacgacgccgagaccggcctgctgagcgccatctgcctgatctgcggcgacagacaggacctggagcagcccgacagagtggacatgctgcaggagcccctgctggaggccctgaaggtgtacgtgagaaagagaagacccagcagaccccacatgttccccaagatgctgatgaagatcaccgacctgagaagcatcagcgccaagggcgccgagagagtgatcaccctgaagatggagatccccggcagcatgccccccctgatccaggagatgctggagaacagcgagggcctggacaccctgagcggccagcccggcggcggcggcagagacggcggcggcctggcccccccccccggcagctgcagccccagcctgagccccagcagcaacagaagcagccccgccacccacagcccctag

SEQ ID NO: 96920 - DNA, 1902 bp, synthetic construct
  misc_feature 1..1902: note = Description of Artificial Sequence: Synthetic coding sequence
  source 1..1902: mol_type = other DNA
atgtacgagagcgtggaggtgggcggccccacccccaaccccttcctggtggtggacttctacaaccagaacagagcctgcctgctgcccgagaagggcctgcccgcccccggcccctacagcacccccctgagaacccccctgtggaacggcagcaaccacagcatcgagacccagagcagcagcagcgaggagatcgtgcccagcccccccagccccccccccctgcccagaatctacaagccctgcttcgtgtgccaggacaagagcagcggctaccactacggcgtgagcgcctgcgagggctgcaagggcttcttcagaagaagcatccagaagaacatggtgtacacctgccacagagacaagaactgcatcatcaacaaggtgaccagaaacagatgccagtactgcagactgcagaagtgcttcgaggtgggcatgagcaaggagagcgtgagaaacgacagaaacaagaagaagaaggaggtgcccaagcccgagtgcagcgagagctacaccctgacccccgaggtgggcgagctgatcgagtgcgccaagagaaccagaaagcccagcctgcccagcgccagctgggccaacaccctgagaaccaccgcccagaacaacgtgagcctgtggaccctgaccagcggcaccagcagcgtgaacagccccaagtgcatcatcaagaccgtggagttcgccaagcagctgcccggcttcaccaccctgaccatcgccgaccagatcaccctgctgaaggccgcctgcctggacatcctgatcctgagaatctgcaccagatacacccccgagcaggacaccatgaccttcagcgacggcctgaccctgaacagaacccagatgcacaacgccggcttcggccccctgaccgacctggtgttcgccttcgccaaccagctgctgcccctggagatggacgacgccgagaccggcctgctgagcgccatctgcctgatctgcggcgacagacaggacctggagcagcccgacagagtggacatgctgcaggagcccctgctggaggccctgaaggtgtacgtgagaaagagaagacccagcagaccccacatgttccccaagatgctgatgaagatcaccgacctgagaagcatcagcgccaagggcgccgagagagtgatcaccctgaagatggagatccccggcagcatgccccccctgatccaggagatgctggagaacagcgagggcctggacaccctgagcggccagcccggcggcggcggcagagacggcggcggcctgcccagacaggccgccgtggcccccgccagcgcccccgcccccaccgaggccgccagaccccccacccccagagacagacccagacacatggacaccgccctggccctgagacccggcttcagcctgcccttctacagaccctgcgaccccgcccccgccctgcccccccccgccctgcccggcagcaccggcgacctgccctggggcaccggcagagaggaggccgccaccccctggaccgaggcctgggccctgagcggcctgcccgcccccaccgcctgggccgacgtgagaggcagaggccaggagctgagcgaggcccccggccccggcagccaggacggcagctggggccccagagtgcaccaggacacccccctgcccagcagcccccacctgcaccaccagcagacccccggcctgggcagccccatcctgagaacccacaagcccctgctgcccagctggggcaccagcaccagccccctgcccagactggtgaccgagggcgtgggccagggcagaggcgtgccccccgtgcacaccctgccctaccagccccaggtgctgatcctggccggcttcgtgttcatcctgatcttcctgttctag

SEQ ID NO: 96921 - DNA, 1374 bp, synthetic construct
  misc_feature 1..1374: note = Description of Artificial Sequence: Synthetic coding sequence
  source 1..1374: mol_type = other DNA
atgtacgagagcgtggaggtgggcggccccacccccaaccccttcctggtggtggacttctacaaccagaacagagcctgcctgctgcccgagaagggcctgcccgcccccggcccctacagcacccccctgagaacccccctgtggaacggcagcaaccacagcatcgagacccagagcagcagcagcgaggagatcgtgcccagcccccccagccccccccccctgcccagaatctacaagccctgcttcgtgtgccaggacaagagcagcggctaccactacggcgtgagcgcctgcgagggctgcaagggcttcttcagaagaagcatccagaagaacatggtgtacacctgccacagagacaagaactgcatcatcaacaaggtgaccagaaacagatgccagtactgcagactgcagaagtgcttcgaggtgggcatgagcaaggagagcgtgagaaacgacagaaacaagaagaagaaggaggtgcccaagcccgagtgcagcgagagctacaccctgacccccgaggtgggcgagctgatcgagaaggtgagaaaggcccaccaggagaccttccccgccctgtgccagctgggcaagtacaccaccaacaacagcagcgagcagagagtgagcctggacatcgacctgtgggacaagttcagcgagctgagcaccaagtgcatcatcaagaccgtggagttcgccaagcagctgcccggcttcaccaccctgaccatcgccgaccagatcaccctgctgaaggccgcctgcctggacatcctgatcctgagaatctgcaccagatacacccccgagcaggacaccatgaccttcagcgacggcctgaccctgaacagaacccagatgcacaacgccggcttcggccccctgaccgacctggtgttcgccttcgccaaccagctgctgcccctggagatggacgacgccgagaccggcctgctgagcgccatctgcctgatctgcggcgacagacaggacctggagcagcccgacagagtggacatgctgcaggagcccctgctggaggccctgaaggtgtacgtgagaaagagaagacccagcagaccccacatgttccccaagatgctgatgaagatcaccgacctgagaagcatcagcgccaagggcgccgagagagtgatcaccctgaagatggagatccccggcagcatgccccccctgatccaggagatgctggagaacagcgagggcctggacaccctgagcggccagcccggcggcggcggcagagacggcggcggcctggcccccccccccggcagctgcagccccagcctgagccccagcagcaacagaagcagccccgccacccacagcccctag

SEQ ID NO: 96922 - DNA, 1437 bp, synthetic construct
  misc_feature 1..1437: note = Description of Artificial Sequence: Synthetic coding sequence
  source 1..1437: mol_type = other DNA
atgatgagccagaccatgacccaggccggcgtgagcttcagacacagcgtgagagccgcccagtgccacaccagagtgcccaacacctggcccagagccaccagaccctacgccagctgcagaagaagccccagactgagaggcagatggcccggcagcgccggccagggcgccggcggcagagcccccagagccggctggagagccggcgacgtgaccggcagcgccatcgagacccagagcagcagcagcgaggagatcgtgcccagcccccccagccccccccccctgcccagaatctacaagccctgcttcgtgtgccaggacaagagcagcggctaccactacggcgtgagcgcctgcgagggctgcaagggcttcttcagaagaagcatccagaagaacatggtgtacacctgccacagagacaagaactgcatcatcaacaaggtgaccagaaacagatgccagtactgcagactgcagaagtgcttcgaggtgggcatgagcaaggagagcgtgagaaacgacagaaacaagaagaagaaggaggtgcccaagcccgagtgcagcgagagctacaccctgacccccgaggtgggcgagctgatcgagaaggtgagaaaggcccaccaggagaccttccccgccctgtgccagctgggcaagtacaccaccaacaacagcagcgagcagagagtgagcctggacatcgacctgtgggacaagttcagcgagctgagcaccaagtgcatcatcaagaccgtggagttcgccaagcagctgcccggcttcaccaccctgaccatcgccgaccagatcaccctgctgaaggccgcctgcctggacatcctgatcctgagaatctgcaccagatacacccccgagcaggacaccatgaccttcagcgacggcctgaccctgaacagaacccagatgcacaacgccggcttcggccccctgaccgacctggtgttcgccttcgccaaccagctgctgcccctggagatggacgacgccgagaccggcctgctgagcgccatctgcctgatctgcggcgacagacaggacctggagcagcccgacagagtggacatgctgcaggagcccctgctggaggccctgaaggtgtacgtgagaaagagaagacccagcagaccccacatgttccccaagatgctgatgaagatcaccgacctgagaagcatcagcgccaagggcgccgagagagtgatcaccctgaagatggagatccccggcagcatgccccccctgatccaggagatgctggagaacagcgagggcctggacaccctgagcggccagcccggcggcggcggcagagacggcggcggcctggcccccccccccggcagctgcagccccagcctgagccccagcagcaacagaagcagccccgccacccacagcccctag

SEQ ID NO: 96923 - DNA, 1389 bp, synthetic construct; identical to SEQ ID NO: 96919
  misc_feature 1..1389: note = Description of Artificial Sequence: Synthetic coding sequence
  source 1..1389: mol_type = other DNA

SEQ ID NO: 96924 - DNA, 1041 bp, synthetic construct
  misc_feature 1..1041: note = Description of Artificial Sequence: Synthetic coding sequence
  source 1..1041: mol_type = other DNA
atgggccaggagatcctgcccgccagaagccccaccctgagactgggcagccccaccccccacctgccccaggagctgctgagagccagccccaagggcccccccggcagactgcagctgggcggcctggccgtgagaaacgacagaaacaagaagaagaaggaggtgcccaagcccgagtgcagcgagagctacaccctgacccccgaggtgggcgagctgatcgagaaggtgagaaaggcccaccaggagaccttccccgccctgtgccagctgggcaagtacaccaccaacaacagcagcgagcagagagtgagcctggacatcgacctgtgggacaagttcagcgagctgagcaccaagtgcatcatcaagaccgtggagttcgccaagcagctgcccggcttcaccaccctgaccatcgccgaccagatcaccctgctgaaggccgcctgcctggacatcctgatcctgagaatctgcaccagatacacccccgagcaggacaccatgaccttcagcgacggcctgaccctgaacagaacccagatgcacaacgccggcttcggccccctgaccgacctggtgttcgccttcgccaaccagctgctgcccctggagatggacgacgccgagaccggcctgctgagcgccatctgcctgatctgcggcgacagacaggacctggagcagcccgacagagtggacatgctgcaggagcccctgctggaggccctgaaggtgtacgtgagaaagagaagacccagcagaccccacatgttccccaagatgctgatgaagatcaccgacctgagaagcatcagcgccaagggcgccgagagagtgatcaccctgaagatggagatccccggcagcatgccccccctgatccaggagatgctggagaacagcgagggcctggacaccctgagcggccagcccggcggcggcggcagagacggcggcggcctggcccccccccccggcagctgcagccccagcctgagccccagcagcaacagaagcagccccgccacctag

SEQ ID NO: 96925 - DNA, 1098 bp, synthetic construct
  misc_feature 1..1098: note = Description of Artificial Sequence: Synthetic coding sequence
  source 1..1098: mol_type = other DNA
atggccagcaacagcagcagctgccccacccccggcggcggccacctgaacggctaccccgtgcccccctacgccttcttcttcccccccatgctgggcggcctgagcccccccggcgccctgaccaccctgcagcaccagctgcccgtgagcggctacagcacccccagccccgccaccgtgagaaacgacagaaacaagaagaagaaggaggtgcccaagcccgagtgcagcgagagctacaccctgacccccgaggtgggcgagctgatcgagaaggtgagaaaggcccaccaggagaccttccccgccctgtgccagctgggcaagtacaccaccaacaacagcagcgagcagagagtgagcctggacatcgacctgtgggacaagttcagcgagctgagcaccaagtgcatcatcaagaccgtggagttcgccaagcagctgcccggcttcaccaccctgaccatcgccgaccagatcaccctgctgaaggccgcctgcctggacatcctgatcctgagaatctgcaccagatacacccccgagcaggacaccatgaccttcagcgacggcctgaccctgaacagaacccagatgcacaacgccggcttcggccccctgaccgacctggtgttcgccttcgccaaccagctgctgcccctggagatggacgacgccgagaccggcctgctgagcgccatctgcctgatctgcggcgacagacaggacctggagcagcccgacagagtggacatgctgcaggagcccctgctggaggccctgaaggtgtacgtgagaaagagaagacccagcagaccccacatgttccccaagatgctgatgaagatcaccgacctgagaagcatcagcgccaagggcgccgagagagtgatcaccctgaagatggagatccccggcagcatgccccccctgatccaggagatgctggagaacagcgagggcctggacaccctgagcggccagcccggcggcggcggcagagacggcggcggcctggcccccccccccggcagctgcagccccagcctgagccccagcagcaacagaagcagccccgccacccacagcccctag

SEQ ID NO: 96926 - DNA, 1149 bp, synthetic construct
  misc_feature 1..1149: note = Description of Artificial Sequence: Synthetic coding sequence
  source 1..1149: mol_type = other DNA
atggtgcccagcagccccagccccccccccccccccagagtgtacaagccctgcttcgtgtgcaacgacaagagcagcggctaccactacggcgtgagcagctgcgagggctgcaagggcttcttcagaagaagcatccagaagaacatggtgtacacctgccacagagacaagaactgcatcatcaacaaggtgaccagaaacagatgccagtactgcagactgcagaagtgcttcgaggtgggcatgagcaaggaggccgtgagaaacgacagaaacaagaagaagaaggaggtgaaggaggagggcagccccgacagctacgagctgagcccccagctggaggagctgatcaccaaggtgagcaaggcccaccaggagaccttccccagcctgtgccagctgggcaagtacaccaccaacagcagcgccgaccacagagtgcagctggacctgggcctgtgggacaagttcagcgagctggccaccaagtgcatcatcaagatcgtggagttcgccaagagactgcccggcttcaccggcctgagcatcgccgaccagatcaccctgctgaaggccgcctgcctggacatcctgatgctgagaatctgcaccagatacacccccgagcaggacaccatgaccttcagcgacggcctgaccctgaacagaacccagatgcacaacgccggcttcggccccctgaccgacctggtgttcgccttcgccggccagctgctgcccctggagatggacgacaccgagaccggcctgctgagcgccatctgcctgatctgcggcgacagaatggacctggaggagcccgagaaggtggacaagctgcaggagcccctgctggaggccctgagactgtacgccagaagaagaagacccagccagccctacatgttccccagaatgctgatgaagatcaccgacctgagaggcatcagcaccaagggcgccgagagagccatcaccctgaagatggagatccccggccccatgccccccctgatcagagagatgctggagaaccccgagatgttcgaggacgacagcagccagcccggcccccaccccaacgccagcagcgaggacgaggtgcccggcggccagggcaagggcggcctgaagagccccgcctag

SEQ ID NO: 96927 - DNA, 1332 bp, synthetic construct
  misc_feature 1..1332: note = Description of Artificial Sequence: Synthetic coding sequence
  source 1..1332: mol_type = other DNA
atgtacgactgcatggagaccttcgcccccggccccagaagactgtacggcgccgccggccccggcgccggcctgctgagaagagccaccggcggcagctgcttcgccggcctggagagcttcgcctggccccagcccgccagcctgcagagcgtggagacccagagcaccagcagcgaggagatggtgcccagcagccccagccccccccccccccccagagtgtacaagccctgcttcgtgtgcaacgacaagagcagcggctaccactacggcgtgagcagctgcgagggctgcaagggcttcttcagaagaagcatccagaagaacatggtgtacacctgccacagagacaagaactgcatcatcaacaaggtgaccagaaacagatgccagtactgcagactgcagaagtgcttcgaggtgggcatgagcaaggaggccgtgagaaacgacagaaacaagaagaagaaggaggtgaaggaggagggcagccccgacagctacgagctgagcccccagctggaggagctgatcaccaaggtgagcaaggcccaccaggagaccttccccagcctgtgccagctgggcaagtacaccaccaacagcagcgccgaccacagagtgcagctggacctgggcctgtgggacaagttcagcgagctggccaccaagtgcatcatcaagatcgtggagttcgccaagagactgcccggcttcaccggcctgagcatcgccgaccagatcaccctgctgaaggccgcctgcctggacatcctgatgctgagaatctgcaccagatacacccccgagcaggacaccatgaccttcagcgacggcctgaccctgaacagaacccagatgcacaacgccggcttcggccccctgaccgacctggtgttcgccttcgccggccagctgctgcccctggagatggacgacaccgagaccggcctgctgagcgccatctgcctgatctgcggcgacagaatggacctggaggagcccgagaaggtggacaagctgcaggagcccctgctggaggccctgagactgtacgccagaagaagaagacccagccagccctacatgttccccagaatgctgatgaagatcaccgacctgagaggcatcagcaccaagggcgccgagagagccatcaccctgaagatggagatccccggccccatgccccccctgatcagagagatgctggagaaccccgagatgttcgaggacgacagcagccagcccggcccccaccccaacgccagcagcgaggacgaggtgcccggcggccagggcaagggcggcctgaagagccccgcctag

SEQ ID NO: 96928 - DNA, 1365 bp, synthetic construct
  misc_feature 1..1365: note = Description of Artificial Sequence: Synthetic coding sequence
  source 1..1365: mol_type = other DNA
atggccaccaacaaggagagactgttcgccgccggcgccctgggccccggcagcggctaccccggcgccggcttccccttcgccttccccggcgccctgagaggcagcccccccttcgagatgctgagccccagcttcagaggcctgggccagcccgacctgcccaaggagatggccagcctgagcgtggagacccagagcaccagcagcgaggagatggtgcccagcagccccagccccccccccccccccagagtgtacaagccctgcttcgtgtgcaacgacaagagcagcggctaccactacggcgtgagcagctgcgagggctgcaagggcttcttcagaagaagcatccagaagaacatggtgtacacctgccacagagacaagaactgcatcatcaacaaggtgaccagaaacagatgccagtactgcagactgcagaagtgcttcgaggtgggcatgagcaaggaggccgtgagaaacgacagaaacaagaagaagaaggaggtgaaggaggagggcagccccgacagctacgagctgagcccccagctggaggagctgatcaccaaggtgagcaaggcccaccaggagaccttccccagcctgtgccagctgggcaagtacaccaccaacagcagcgccgaccacagagtgcagctggacctgggcctgtgggacaagttcagcgagctggccaccaagtgcatcatcaagatcgtggagttcgccaagagactgcccggcttcaccggcctgagcatcgccgaccagatcaccctgctgaaggccgcctgcctggacatcctgatgctgagaatctgcaccagatacacccccgagcaggacaccatgaccttcagcgacggcctgaccctgaacagaacccagatgcacaacgccggcttcggccccctgaccgacctggtgttcgccttcgccggccagctgctgcccctggagatggacgacaccgagaccggcctgctgagcgccatctgcctgatctgcggcgacagaatggacctggaggagcccgagaaggtggacaagctgcaggagcccctgctggaggccctgagactgtacgccagaagaagaagacccagccagccctacatgttccccagaatgctgatgaagatcaccgacctgagaggcatcagcaccaagggcgccgagagagccatcaccctgaagatggagatccccggccccatgccccccctgatcagagagatgctggagaaccccgagatgttcgaggacgacagcagccagcccggcccccaccccaacgccagcagcgaggacgaggtgcccggcggccagggcaagggcggcctgaagagccccgcctag

SEQ ID NO: 96929 - DNA, 1365 bp, synthetic construct; identical to SEQ ID NO: 96928
  misc_feature 1..1365: note = Description of Artificial Sequence: Synthetic coding sequence
  source 1..1365: mol_type = other DNA

SEQ ID NO: 96930 - DNA, 306 bp, synthetic construct
  misc_feature 1..306: note = Description of Artificial Sequence: Synthetic coding sequence
  source 1..306: mol_type = other DNA
caccaccaggacgagttcgccaagagactgcccggcttcaccggcctgagcatcgccgaccagatcaccctgctgaaggccgcctgcctggacatcctgatgctgagaatctgcaccagatacacccccgagcaggacaccatgaccttcagcgacggcctgaccctgaacagaacccagatgcacaacgccggcttcggccccctgaccgacctggtgttcgccttcgccggccagctgctgcccctggagatggacgacaccgagaccggcctgctgagcgccatctgcctgatctgcggctag

SEQ ID NO: 96931 - DNA, 1299 bp, synthetic construct
  misc_feature 1..1299: note = Description of Artificial Sequence: Synthetic coding sequence
  source 1..1299: mol_type = other DNA
atgctggccctgcccctgcccccctgctggagcggcgccccccccggcgaggagggcgagagcgccgccggcccctggtgcttccagcaccccgtgagcctgcaggccggcagcagatgcaccaccgtgtggaagagactgcccagagtgagagacggctgcaccggcagacccggccccggccccgcctgctgcgccgagccccccgccgcccccgtgagccccgacctgaacctgctgcccggcagaaacccccccgcctgcaacggcttcttcagaagaagcatccagaagaacatggtgtacacctgccacagagacaagaactgcatcatcaacaaggtgaccagaaacagatgccagtactgcagactgcagaagtgcttcgaggtgggcatgagcaaggaggccgtgagaaacgacagaaacaagaagaagaaggaggtgaaggaggagggcagccccgacagctacgagctgagcccccagctggaggagctgatcaccaaggtgagcaaggcccaccaggagaccttccccagcctgtgccagctgggcaagtacaccaccaacagcagcgccgaccacagagtgcagctggacctgggcctgtgggacaagttcagcgagctggccaccaagtgcatcatcaagatcgtggagttcgccaagagactgcccggcttcaccggcctgagcatcgccgaccagatcaccctgctgaaggccgcctgcctggacatcctgatgctgagaatctgcaccagatacacccccgagcaggacaccatgaccttcagcgacggcctgaccctgaacagaacccagatgcacaacgccggcttcggccccctgaccgacctggtgttcgccttcgccggccagctgctgcccctggagatggacgacaccgagaccggcctgctgagcgccatctgcctgatctgcggcgacagaatggacctggaggagcccgagaaggtggacaagctgcaggagcccctgctggaggccctgagactgtacgccagaagaagaagacccagccagccctacatgttccccagaatgctgatgaagatcaccgacctgagaggcatcagcaccaagggcgccgagagagccatcaccctgaagatggagatccccggccccatgccccccctgatcagagagatgctggagaaccccgagatgttcgaggacgacagcagccagcccggcccccaccccaacgccagcagcgaggacgaggtgcccggcggccagggcaagggcggcctgaagagccccgcctag

SEQ ID NO: 96932 - DNA, 1389 bp, synthetic construct
  misc_feature 1..1389: note = Description of Artificial Sequence: Synthetic coding sequence
  source 1..1389: mol_type = other DNA
atggacaccaagcacttcctgcccctggacttcagcacccaggtgaacagcagcctgaccagccccaccggcagaggcagcatggccgcccccagcctgcaccccagcctgggccccggcatcggcagccccggccagctgcacagccccatcagcaccctgagcagccccatcaacggcatgggcccccccttcagcgtgatcagcagccccatgggcccccacagcatgagcgtgcccaccacccccaccctgggcttcagcaccggcagcccccagctgagcagccccatgaaccccgtgagcagcagcgaggacatcaagccccccctgggcctgaacggcgtgctgaaggtgcccgcccaccccagcggcaacatggccagcttcaccaagcacatctgcgccatctgcggcgacagaagcagcggcaagcactacggcgtgtacagctgcgagggctgcaagggcttcttcaagagaaccgtgagaaaggacctgacctacacctgcagagacaacaaggactgcctgatcgacaagagacagagaaacagatgccagtactgcagataccagaagtgcctggccatgggcatgaagagagaggccgtgcaggaggagagacagagaggcaaggacagaaacgagaacgaggtggagagcaccagcagcgccaacgaggacatgcccgtggagagaatcctggaggccgagctggccgtggagcccaagaccgagacctacgtggaggccaacatgggcctgaaccccagcagccccaacgaccccgtgaccaacatctgccaggccgccgacaagcagctgttcaccctggtggagtgggccaagagaatcccccacttcagcgagctgcccctggacgaccaggtgatcctgctgagagccggctggaacgagctgctgatcgccagcttcagccacagaagcatcgccgtgaaggacggcatcctgctggccaccggcctgcacgtgcacagaaacagcgcccacagcgccggcgtgggcgccatcttcgacagagtgctgaccgagctggtgagcaagatgagagacatgcagatggacaagaccgagctgggctgcctgagagccatcgtgctgttcaaccccgacagcaagggcctgagcaaccccgccgaggtggaggccctgagagagaaggtgtacgccagcctggaggcctactgcaagcacaagtaccccgagcagcccggcagattcgccaagctgctgctgagactgcccgccctgagaagcatcggcctgaagtgcctggagcacctgttcttcttcaagctgatcggcgacacccccatcgacaccttcctgatggagatgctggaggccccccaccagatgacctag

SEQ ID NO: 96933 - DNA, 1098 bp, synthetic construct
  misc_feature 1..1098: note = Description of Artificial Sequence: Synthetic coding sequence
  source 1..1098: mol_type = other DNA
atgaaccccgtgagcagcagcgaggacatcaagccccccctgggcctgaacggcgtgctgaaggtgcccgcccaccccagcggcaacatggccagcttcaccaagcacatctgcgccatctgcggcgacagaagcagcggcaagcactacggcgtgtacagctgcgagggctgcaagggcttcttcaagagaaccgtgagaaaggacctgacctacacctgcagagacaacaaggactgcctgatcgacaagagacagagaaacagatgccagtactgcagataccagaagtgcctggccatgggcatgaagagagaggccgtgcaggaggagagacagagaggcaaggacagaaacgagaacgaggtggagagcaccagcagcgccaacgaggacatgcccgtggagagaatcctggaggccgagctggccgtggagcccaagaccgagacctacgtggaggccaacatgggcctgaaccccagcagccccaacgaccccgtgaccaacatctgccaggccgccgacaagcagctgttcaccctggtggagtgggccaagagaatcccccacttcagcgagctgcccctggacgaccaggtgatcctgctgagagccggctggaacgagctgctgatcgccagcttcagccacagaagcatcgccgtgaaggacggcatcctgctggccaccggcctgcacgtgcacagaaacagcgcccacagcgccggcgtgggcgccatcttcgacagagtgctgaccgagctggtgagcaagatgagagacatgcagatggacaagaccgagctgggctgcctgagagccatcgtgctgttcaaccccgacagcaagggcctgagcaaccccgccgaggtggaggccctgagagagaaggtgtacgccagcctggaggcctactgcaagcacaagtaccccgagcagcccggcagattcgccaagctgctgctgagactgcccgccctgagaagcatcggcctgaagtgcctggagcacctgttcttcttcaagctgatcggcgacacccccatcgacaccttcctgatggagatgctggaggccccccaccagatgacctag

SEQ ID NO: 96934 - DNA, 1602 bp, synthetic construct
  misc_feature 1..1602: note = Description of Artificial Sequence: Synthetic coding sequence
  source 1..1602: mol_type = other DNA
atgagctgggccgccagaccccccttcctgccccagagacacgccgccggccagtgcggccccgtgggcgtgagaaaggagatgcactgcggcgtggccagcagatggagaagaagaagaccctggctggaccccgccgccgccgccgccgccgccgtggccggcggcgagcagcagacccccgagcccgagcccggcgaggccggcagagacggcatgggcgacagcggcagagacagcagaagccccgacagcagcagccccaaccccctgccccagggcgtgcccccccccagcccccccggcccccccctgccccccagcaccgcccccagcctgggcggcagcggcgcccccccccccccccccatgccccccccccccctgggcagccccttccccgtgatcagcagcagcatgggcagccccggcctgcccccccccgccccccccggcttcagcggccccgtgagcagcccccagatcaacagcaccgtgagcctgcccggcggcggcagcggcccccccgaggacgtgaagccccccgtgctgggcgtgagaggcctgcactgcccccccccccccggcggccccggcgccggcaagagactgtgcgccatctgcggcgacagaagcagcggcaagcactacggcgtgtacagctgcgagggctgcaagggcttcttcaagagaaccatcagaaaggacctgacctacagctgcagagacaacaaggactgcaccgtggacaagagacagagaaacagatgccagtactgcagataccagaagtgcctggccaccggcatgaagagagaggccgtgcaggaggagagacagagaggcaaggacaaggacggcgacggcgagggcgccggcggcgcccccgaggagatgcccgtggacagaatcctggaggccgagctggccgtggagcagaagagcgaccagggcgtggagggccccggcggcaccggcggcagcggcagcagccccaacgaccccgtgaccaacatctgccaggccgccgacaagcagctgttcaccctggtggagtgggccaagagaatcccccacttcagcagcctgcccctggacgaccaggtgatcctgctgagagccggctggaacgagctgctgatcgccagcttcagccacagaagcatcgacgtgagagacggcatcctgctggccaccggcctgcacgtgcacagaaacagcgcccacagcgccggcgtgggcgccatcttcgacagagtgctgaccgagctggtgagcaagatgagagacatgagaatggacaagaccgagctgggctgcctgagagccatcatcctgttcaaccccgacgccaagggcctgagcaaccccagcgaggtggaggtgctgagagagaaggtgtacgccagcctggagacctactgcaagcagaagtaccccgagcagcagggcagattcgccaagctgctgctgagactgcccgccctgagaagcatcggcctgaagtgcctggagcacctgttcttcttcaagctgatcggcgacacccccatcgacaccttcctgatggagatgctggaggccccccaccagctggcctag

SEQ ID NO: 96935 - DNA, 1614 bp, synthetic construct
  misc_feature 1..1614: note = Description of Artificial Sequence: Synthetic coding sequence
  source 1..1614: mol_type = other DNA
atgagctgggccgccagaccccccttcctgccccagagacacgccgccggccagtgcggccccgtgggcgtgagaaaggagatgcactgcggcgtggccagcagatggagaagaagaagaccctggctggaccccgccgccgccgccgccgccgccgtggccggcggcgagcagcagacccccgagcccgagcccggcgaggccggcagagacggcatgggcgacagcggcagagacagcagaagccccgacagcagcagccccaaccccctgccccagggcgtgcccccccccagcccccccggcccccccctgccccccagcaccgcccccagcctgggcggcagcggcgcccccccccccccccccatgccccccccccccctgggcagccccttccccgtgatcagcagcagcatgggcagccccggcctgcccccccccgccccccccggcttcagcggccccgtgagcagcccccagatcaacagcaccgtgagcctgcccggcggcggcagcggcccccccgaggacgtgaagccccccgtgctgggcgtgagaggcctgcactgcccccccccccccggcggccccggcgccggcaagagactgtgcgccatctgcggcgacagaagcagcggcaagcactacggcgtgtacagctgcgagggctgcaagggcttcttcaagagaaccatcagaaaggacctgacctacagctgcagagacaacaaggactgcaccgtggacaagagacagagaaacagatgccagtactgcagataccagaagtgcctggccaccggcatgaagagagaggccgtgcaggaggagagacagagaggcaaggacaaggacggcgacggcgagggcgccggcggcgcccccgaggagatgcccgtggacagaatcctggaggccgagctggccgtggagcagaagagcgaccagggcgtggagggccccggcggcaccggcggcagcggcagcagccccaacgaccccgtgaccaacatctgccaggccgccgacaagcagctgttcaccctggtggagtgggccaagagaatcccccacttcagcagcctgcccctggacgaccaggtgatcctgctgagagccggctggaacgagctgctgatcgccagcttcagccacagaagcatcgacgtgagagacggcatcctgctggccaccggcctgcacgtgcacagaaacagcgcccacagcgccggcgtgggcgccatcttcgacagaagcctgagcagagtgctgaccgagctggtgagcaagatgagagacatgagaatggacaagaccgagctgggctgcctgagagccatcatcctgttcaaccccgacgccaagggcctgagcaaccccagcgaggtggaggtgctgagagagaaggtgtacgccagcctggagacctactgcaagcagaagtaccccgagcagcagggcagattcgccaagctgctgctgagactgcccgccctgagaagcatcggcctgaagtgcctggagcacctgttcttcttcaagctgatcggcgacacccccatcgacaccttcctgatggagatgctggaggccccccaccagctggcctag

SEQ ID NO: 96936 - DNA, 1614 bp, synthetic construct; identical to SEQ ID NO: 96935
  misc_feature 1..1614: note = Description of Artificial Sequence: Synthetic coding sequence
  source 1..1614: mol_type = other DNA

SEQ ID NO: 96937 - DNA, 1602 bp, synthetic construct; identical to SEQ ID NO: 96934
  misc_feature 1..1602: note = Description of Artificial Sequence: Synthetic coding sequence
  source 1..1602: mol_type = other DNA

SEQ ID NO: 96938 - DNA, 861 bp, synthetic construct
  misc_feature 1..861: note = Description of Artificial Sequence: Synthetic coding sequence
  source 1..861: mol_type = other DNA
atgccccagggcagcgtgggcagatggggctgcgagaagaagtgcatcgtgggcagcagacccggcggcggcggcgacggccccggctggatcccccagagaagaagaagaagaagatggcaggccgagaacaacaagcccagaagcagaagccagggcagactggacggcaccggctgggccaccgccggcggcatcaacagcaccgtgagcctgcccggcggcggcagcggcccccccgaggacgtgaagccccccgtgctgggcgtgagaggcctgcactgcccccccccccccggcggccccggcgccggcaagagactgtgcgccatctgcggcgacagaagcagcggcaagcactacggcgtgtacagctgcgagggctgcaagggcttcttcaagagaaccatcagaaaggacctgacctacagctgcagagacaacaaggactgcaccgtggacaagagacagagaaacagatgccagtactgcagataccagaagtgcctggccaccggcatgaagagagaggccgtgcaggaggagagacagagaggcaaggacaaggacggcgacggcgagggcgccggcggcgcccccgaggagatgcccgtggacagaatcctggaggccgagctggccgtggagcagaagagcgaccagggcgtggagggccccggcggcaccggcggcagcggcagcagcgtgagcgtgggcgtgaaccccctgagcttcgtgatgggcgtgggcggcggcagcctgggcctgttctacatccccagccccagcttccccctgatcaccttcctgaccctgctgggcaccggcggcgccgccaagcagggcctgagcaacatctag

SEQ ID NO: 96939 - DNA, 1602 bp, synthetic construct; identical to SEQ ID NO: 96934
  misc_feature 1..1602: note = Description of Artificial Sequence: Synthetic coding sequence
  source 1..1602: mol_type = other DNA

SEQ ID NO: 96940 - DNA, 291 bp, synthetic construct
  misc_feature 1..291: note = Description of Artificial Sequence: Synthetic coding sequence
  source 1..291: mol_type = other DNA
tgaagccccaacgaccccgtgaccaacatctgccaggccgccgacaagcagctgttcaccctggtggagtgggccaagagaatcccccacttcagcagcctgcccctggacgaccaggtgatcctgctgagagccggcctgcacgtgcacagaaacagcgcccacagcgccggcgtgggcgccatcttcgacagagtgctgaccgagctggtgagcaagatgagagacatgagaatggacaagaccgagctgggctgcctgagagccatcatcctgttcaaccccgactag

SEQ ID NO: 96941 - DNA, 1602 bp, synthetic construct; identical to SEQ ID NO: 96934
  misc_feature 1..1602: note = Description of Artificial Sequence: Synthetic coding sequence
  source 1..1602: mol_type = other DNA

SEQ ID NO: 96942 - DNA, 291 bp, synthetic construct; identical to SEQ ID NO: 96940
  misc_feature 1..291: note = Description of Artificial Sequence: Synthetic coding sequence
  source 1..291: mol_type = other DNA

SEQ ID NO: 96943 - DNA, 1614 bp, synthetic construct; identical to SEQ ID NO: 96935
  misc_feature 1..1614: note = Description of Artificial Sequence: Synthetic coding sequence
  source 1..1614: mol_type = other DNA

SEQ ID NO: 96944 - DNA, 1602 bp, synthetic construct; identical to SEQ ID NO: 96934
  misc_feature 1..1602: note = Description of Artificial Sequence: Synthetic coding sequence
  source 1..1602: mol_type = other DNA

SEQ ID NO: 96945 - DNA, 1602 bp, synthetic construct; identical to SEQ ID NO: 96934
  misc_feature 1..1602: note = Description of Artificial Sequence: Synthetic coding sequence
  source 1..1602: mol_type = other DNA

SEQ ID NO: 96946 - DNA, 291 bp, synthetic construct; identical to SEQ ID NO: 96940
  misc_feature 1..291: note = Description of Artificial Sequence: Synthetic coding sequence
  source 1..291: mol_type = other DNA

SEQ ID NO: 96947 - DNA, 291 bp, synthetic construct; identical to SEQ ID NO: 96940
  misc_feature 1..291: note = Description of Artificial Sequence: Synthetic coding sequence
  source 1..291: mol_type = other DNA

SEQ ID NO: 96948 - DNA, 1614 bp, synthetic construct; identical to SEQ ID NO: 96935
  misc_feature 1..1614: note = Description of Artificial Sequence: Synthetic coding sequence
  source 1..1614: mol_type = other DNA

SEQ ID NO: 96949 - DNA, 291 bp, synthetic construct; identical to SEQ ID NO: 96940
  misc_feature 1..291: note = Description of Artificial Sequence: Synthetic coding sequence
  source 1..291: mol_type = other DNA

SEQ ID NO: 96950 - DNA, 1614 bp, synthetic construct; identical to SEQ ID NO: 96935
  misc_feature 1..1614: note = Description of Artificial Sequence: Synthetic coding sequence
  source 1..1614: mol_type = other DNA

SEQ ID NO: 96951 - DNA, 1614 bp, synthetic construct; identical to SEQ ID NO: 96935
  misc_feature 1..1614: note = Description of Artificial Sequence: Synthetic coding sequence
  source 1..1614: mol_type = other DNA

SEQ ID NO: 96952 - DNA, 1044 bp, synthetic construct
  misc_feature 1..1044: note = Description of Artificial Sequence: Synthetic coding sequence
  source 1..1044: mol_type = other DNA
atgagagagtgcggcggcggccccggcgccggcaagagactgtgcgccatctgcggcgacagaagcagcggcaagcactacggcgtgtacagctgcgagggctgcaagggcttcttcaagagaaccatcagaaaggacctgacctacagctgcagagacaacaaggactgcaccgtggacaagagacagagaaacagatgccagtactgcagataccagaagtgcctggccaccggcatgaagagagaggccgtgcaggaggagagacagagaggcaaggacaaggacggcgacggcgagggcgccggcggcgcccccgaggagatgcccgtggacagaatcctggaggccgagctggccgtggagcagaagagcgaccagggcgtggagggccccggcggcaccggcggcagcggcagcagccccaacgaccccgtgaccaacatctgccaggccgccgacaagcagctgttcaccctggtggagtgggccaagagaatcccccacttcagcagcctgcccctggacgaccaggtgatcctgctgagagccggctggaacgagctgctgatcgccagcttcagccacagaagcatcgacgtgagagacggcatcctgctggccaccggcctgcacgtgcacagaaacagcgcccacagcgccggcgtgggcgccatcttcgacagaagcctgagcagagtgctgaccgagctggtgagcaagatgagagacatgagaatggacaagaccgagctgggctgcctgagagccatcatcctgttcaaccccgacgccaagggcctgagcaaccccagcgaggtggaggtgctgagagagaaggtgtacgccagcctggagacctactgcaagcagaagtaccccgagcagcagggcagattcgccaagctgctgctgagactgcccgccctgagaagcatcggcctgaagtgcctggagcacctgttcttcttcaagctgatcggcgacacccccatcgacaccttcctgatggagatgctggaggccccccaccagctggcctag

SEQ ID NO: 96953 - DNA, 1179 bp, synthetic construct
  misc_feature 1..1179: note = Description of Artificial Sequence: Synthetic coding sequence
  source 1..1179: mol_type = other DNA
atgggcagccccggcctgcccccccccgccccccccggcttcagcggccccgtgagcagcccccagatcaacagcaccgtgagcctgcccggcggcggcagcggcccccccgaggacgtgaagccccccgtgctgggcgtgagaggcctgcactgcccccccccccccggcggccccggcgccggcaagagactgtgcgccatctgcggcgacagaagcagcggcaagcactacggcgtgtacagctgcgagggctgcaagggcttcttcaagagaaccatcagaaaggacctgacctacagctgcagagacaacaaggactgcaccgtggacaagagacagagaaacagatgccagtactgcagataccagaagtgcctggccaccggcatgaagagagaggccgtgcaggaggagagacagagaggcaaggacaaggacggcgacggcgagggcgccggcggcgcccccgaggagatgcccgtggacagaatcctggaggccgagctggccgtggagcagaagagcgaccagggcgtggagggccccggcggcaccggcgcccccagccccaacgaccccgtgaccaacatctgccaggccgccgacaagcagctgttcaccctggtggagtgggccaagagaatcccccacttcagcagcctgcccctggacgaccaggtgatcctgctgagagccggctggaacgagctgctgatcgccagcttcagccacagaagcatcgacgtgagagacggcatcctgctggccaccggcctgcacgtgcacagaaacagcgcccacagcgccggcgtgggcgccatcttcgacagagtgctgaccgagctggtgagcaagatgagagacatgagaatggacaagaccgagctgggctgcctgagagccatcatcctgttcaaccccgacgccaagggcctgagcaaccccagcgaggtggaggtgctgagagagaaggtgtacgccagcctggagacctactgcaagcagaagtaccccgagcagcagggcagattcgccaagctgctgctgagactgcccgccctgagaagcatcggcctgaagtgcctggagcacctgttcttcttcaagctgatcggcgacacccccatcgacaccttcctgatggagatgctggaggccccccaccagctggcctag

SEQ ID NO: 96954 - DNA, 1170 bp, synthetic construct
  misc_feature 1..1170: note = Description of Artificial Sequence: Synthetic coding sequence
  source 1..1170: mol_type = other DNA
atgggcagccccggcctgcccccccccgccccccccggcttcagcggccccgtgagcagcccccagatcaacagcaccgtgagcctgcccggcggcggcagcggcccccccgaggacgtgaagccccccgtgctgggcgtgagaggcctgcactgcccccccccccccggcggccccggcgccggcaagagactgtgcgccatctgcggcgacagaagcagcggcaagcactacggcgtgtacagctgcgagggctgcaagggcttcttcaagagaaccatcagaaaggacctgacctacagctgcagagacaacaaggactgcaccgtggacaagagacagagaaacagatgccagtactgcagataccagaagtgcctggccaccggcatgaagagagaggccgtgcaggaggagagacagagaggcaaggacaaggacggcgacggcgagggcgccggcggcgcccccgaggagatgcccgtggacagaatcctggaggccgagctggccgtggagcagaagagcgaccagggcggcagccagcacatcagcaagagccccaacgaccccgtgaccaacatctgccaggccgccgacaagcagctgttcaccctggtggagtgggccaagagaatcccccacttcagcagcctgcccctggacgaccaggtgatcctgctgagagccggctggaacgagctgctgatcgccagcttcagccacagaagcatcgacgtgagagacggcatcctgctggccaccggcctgcacgtgcacagaaacagcgcccacagcgccggcgtgggcgccatcttcgacagagtgctgaccgagctggtgagcaagatgagagacatgagaatggacaagaccgagctgggctgcctgagagccatcatcctgttcaaccccgacgccaagggcctgagcaaccccagcgaggtggaggtgctgagagagaaggtgtacgccagcctggagacctactgcaagcagaagtaccccgagcagcagggcagattcgccaagctgctgctgagactgcccgccctgagaagcatcggcctgaagtgcctggagcacctgttcttcttcaagctgatcggcgacacccccatcgacaccttcctgatggagatgctggaggccccccaccagctggcctag

SEQ ID NO: 96955 - DNA, 1044 bp, synthetic construct; identical to SEQ ID NO: 96952
  misc_feature 1..1044: note = Description of Artificial Sequence: Synthetic coding sequence
  source 1..1044: mol_type = other DNA

SEQ ID NO: 96956 - DNA, 1179 bp, synthetic construct; identical to SEQ ID NO: 96953
  misc_feature 1..1179: note = Description of Artificial Sequence: Synthetic coding sequence
  source 1..1179: mol_type = other DNA

SEQ ID NO: 96957 - DNA, 1170 bp, synthetic construct; identical to SEQ ID NO: 96954
  misc_feature 1..1170: note = Description of Artificial Sequence: Synthetic coding sequence
  source 1..1170: mol_type = other DNA

SEQ ID NO: 96958 - DNA, 861 bp, synthetic construct; identical to SEQ ID NO: 96938
  misc_feature 1..861: note = Description of Artificial Sequence: Synthetic coding sequence
  source 1..861: mol_type = other DNA

SEQ ID NO: 96959 - DNA, 1170 bp, synthetic construct; identical to SEQ ID NO: 96954
  misc_feature 1..1170: note = Description of Artificial Sequence: Synthetic coding sequence
  source 1..1170: mol_type = other DNA

SEQ ID NO: 96960 - DNA, 861 bp, synthetic construct; identical to SEQ ID NO: 96938
  misc_feature 1..861: note = Description of Artificial Sequence: Synthetic coding sequence
  source 1..861: mol_type = other DNA

SEQ ID NO: 96961 - DNA, 1179 bp, synthetic construct; identical to SEQ ID NO: 96953
  misc_feature 1..1179: note = Description of Artificial Sequence: Synthetic coding sequence
  source 1..1179: mol_type = other DNA

SEQ ID NO: 96962 - DNA, 1044 bp, synthetic construct; identical to SEQ ID NO: 96952
  misc_feature 1..1044: note = Description of Artificial Sequence: Synthetic coding sequence
  source 1..1044: mol_type = other DNA

SEQ ID NO: 96963 - DNA, 1179 bp, synthetic construct; identical to SEQ ID NO: 96953
  misc_feature 1..1179: note = Description of Artificial Sequence: Synthetic coding sequence
  source 1..1179: mol_type = other DNA

SEQ ID NO: 96964 - DNA, 1179 bp, synthetic construct; identical to SEQ ID NO: 96953
  misc_feature 1..1179: note = Description of Artificial Sequence: Synthetic coding sequence
  source 1..1179: mol_type = other DNA

SEQ ID NO: 96965 - DNA, 861 bp, synthetic construct; identical to SEQ ID NO: 96938
  misc_feature 1..861: note = Description of Artificial Sequence: Synthetic coding sequence
  source 1..861: mol_type = other DNA

SEQ ID NO: 96966 - DNA, 1170 bp, synthetic construct; identical to SEQ ID NO: 96954
  misc_feature 1..1170: note = Description of Artificial Sequence: Synthetic coding sequence
  source 1..1170: mol_type = other DNA

SEQ ID NO: 96967 - DNA, 1044 bp, synthetic construct; identical to SEQ ID NO: 96952
  misc_feature 1..1044: note = Description of Artificial Sequence: Synthetic coding sequence
  source 1..1044: mol_type = other DNA

SEQ ID NO: 96968 - DNA, 1170 bp, synthetic construct; identical to SEQ ID NO: 96954
  misc_feature 1..1170: note = Description of Artificial Sequence: Synthetic coding sequence
  source 1..1170: mol_type = other DNA

SEQ ID NO: 96969 - DNA, 1044 bp, synthetic construct; identical to SEQ ID NO: 96952
  misc_feature 1..1044: note = Description of Artificial Sequence: Synthetic coding sequence
  source 1..1044: mol_type = other DNA

SEQ ID NO: 96970 - DNA, 861 bp, synthetic construct; identical to SEQ ID NO: 96938
  misc_feature 1..861: note = Description of Artificial Sequence: Synthetic coding sequence
  source 1..861: mol_type = other DNA

SEQ ID NO: 96971 - DNA, 1392 bp, synthetic construct
  misc_feature 1..1392: note = Description of Artificial Sequence: Synthetic coding sequence
  source 1..1392: mol_type = other DNA
atgtacggcaactacagccacttcatgaagttccccgccggctacggcggcagccccggccacaccggcagcaccagcatgagccccagcgccgccctgagcaccggcaagcccatggacagccaccccagctacaccgacacccccgtgagcgcccccagaaccctgagcgccgtgggcacccccctgaacgccctgggcagcccctacagagtgatcaccagcgccatgggcccccccagcggcgccctggccgccccccccggcatcaacctggtggccccccccagcagccagctgaacgtggtgaacagcgtgagcagcagcgaggacatcaagcccctgcccggcctgcccggcatcggcaacatgaactaccccagcaccagccccggcagcctggtgaagcacatctgcgccatctgcggcgacagaagcagcggcaagcactacggcgtgtacagctgcgagggctgcaagggcttcttcaagagaaccatcagaaaggacctgatctacacctgcagagacaacaaggactgcctgatcgacaagagacagagaaacagatgccagtactgcagataccagaagtgcctggtgatgggcatgaagagagaggccgtgcaggaggagagacagagaagcagagagagagccgagagcgaggccgagtgcgccaccagcggccacgaggacatgcccgtggagagaatcctggaggccgagctggccgtggagcccaagaccgagagctacggcgacatgaacatggagaacagcaccaacgaccccgtgaccaacatctgccacgccgccgacaagcagctgttcaccctggtggagtgggccaagagaatcccccacttcagcgacctgaccctggaggaccaggtgatcctgctgagagccggctggaacgagctgctgatcgccagcttcagccacagaagcgtgagcgtgcaggacggcatcctgctggccaccggcctgcacgtgcacagaagcagcgcccacagcgccggcgtgggcagcatcttcgacagagtgctgaccgagctggtgagcaagatgaaggacatgcagatggacaagagcgagctgggctgcctgagagccatcgtgctgttcaaccccgacgccaagggcctgagcaaccccagcgaggtggagaccctgagagagaaggtgtacgccaccctggaggcctacaccaagcagaagtaccccgagcagcccggcagattcgccaagctgctgctgagactgcccgccctgagaagcatcggcctgaagtgcctggagcacctgttcttcttcaagctgatcggcgacacccccatcgacaccttcctgatggagatgctggagacccccctgcagatcacctag

SEQ ID NO: 96972 - DNA, 2619 bp, synthetic construct
  misc_feature 1..2619: note = Description of Artificial Sequence: Synthetic coding sequence
  source 1..2619: mol_type = other DNA
atggccaccgcctgcaagagaagcggcgagccccagagcgacgacatcgaggccagcagaatgaagagagccgccgccaagcacctgatcgagagatactaccaccagctgaccgagggctgcggcaacgaggcctgcaccaacgagttctgcgccagctgccccaccttcctgagaatggacaacaacgccgccgccatcaaggccctggagctgtacaagatcaacgccaagctgtgcgacccccaccccagcaagaagggcgccagcagcgcctacctggagaacagcaagggcgcccccaacaacagctgcagcgagatcaagatgaacaagaagggcgccagaatcgacttcaaggacgtgacctacctgaccgaggagaaggtgtacgagatcctggagctgtgcagagagagagaggactacagccccctgatcagagtgatcggcagagtgttcagcagcgccgaggccctggtgcagagcttcagaaaggtgaagcagcacaccaaggaggagctgaagagcctgcaggccaaggacgaggacaaggacgaggacgagaaggagaaggccgcctgcagcgccgccgccatggaggaggacagcgaggccagcagcagcagaatcggcgacagcagccagggcgacaacaacctgcagaagctgggccccgacgacgtgagcgtggacatcgacgccatcagaagagtgtacaccagactgctgagcaacgagaagatcgagaccgccttcctgaacgccctggtgtacctgagccccaacgtggagtgcgacctgacctaccacaacgtgtacagcagagaccccaactacctgaacctgttcatcatcgtgatggagaacagaaacctgcacagccccgagtacctggagatggccctgcccctgttctgcaaggccatgagcaagctgcccctggccgcccagggcaagctgatcagactgtggagcaagtacaacgccgaccagatcagaagaatgatggagaccttccagcagctgatcacctacaaggtgatcagcaacgagttcaacagcagaaacctggtgaacgacgacgacgccatcgtggccgccagcaagtgcctgaagatggtgtactacgccaacgtggtgggcggcgaggtggacaccaaccacaacgaggaggacgacgaggagcccatccccgagagcagcgagctgaccctgcaggagctgctgggcgaggagagaagaaacaagaagggccccagagtggaccccctggagaccgagctgggcgtgaagaccctggactgcagaaagcccctgatccccttcgaggagttcatcaacgagcccctgaacgaggtgctggagatggacaaggactacaccttcttcaaggtggagaccgagaacaagttcagcttcatgacctgccccttcatcctgaacgccgtgaccaagaacctgggcctgtactacgacaacagaatcagaatgtacagcgagagaagaatcaccgtgctgtacagcctggtgcagggccagcagctgaacccctacctgagactgaaggtgagaagagaccacatcatcgacgacgccctggtgagactggagatgatcgccatggagaaccccgccgacctgaagaagcagctgtacgtggagttcgagggcgagcagggcgtggacgagggcggcgtgagcaaggagttcttccagctggtggtggaggagatcttcaaccccgacatcggcatgttcacctacgacgagagcaccaagctgttctggttcaaccccagcagcttcgagaccgagggccagttcaccctgatcggcatcgtgctgggcctggccatctacaacaactgcatcctggacgtgcacttccccatggtggtgtacagaaagctgatgggcaagaagggcaccttcagagacctgggcgacagccaccccgtgctgtaccagagcctgaaggacctgctggagtacgagggcaacgtggaggacgacatgatgatcaccttccagatcagccagaccgacctgttcggcaaccccatgatgtacgacctgaaggagaacggcgacaagatccccatcaccaacgagaacagaaaggagttcgtgaacctgtacagcgactacatcctgaacaagagcgtggagaagcagttcaaggccttcagaagaggcttccacatggtgaccaacgagagccccctgaagtacctgttcagacccgaggagatcgagctgctgatctgcggcagcagaaacctggacttccaggccctggaggagaccaccgagtacgacggcggctacaccagagacagcgtgctgatcagagagttctgggagatcgtgcacagcttcaccgacgagcagaagagactgttcctgcagttcaccaccggcaccgacagagcccccgtgggcggcctgggcaagctgaagatgatcatcgccaagaacggccccgacaccgagagactgcccaccagccacacctgcttcaacgtgctgctgctgcccgagtacagcagcaaggagaagctgaaggagagactgctgaaggccatcacctacgccaagggcttcggcatgctgtag

SEQ ID NO: 96973 - DNA, 75 bp, synthetic construct
  misc_feature 1..75: note = Description of Artificial Sequence: Synthetic coding sequence
  source 1..75: mol_type = other DNA
atgaccagagaccagaacggcacctgggagatggagagcaacgagaacttcgagggctacatgaaggccctgtag

SEQ ID NO: 96974 - DNA, 312 bp, synthetic construct
  misc_feature 1..312: note = Description of Artificial Sequence: Synthetic coding sequence
  source 1..312: mol_type = other DNA
atgaccagagaccagaacggcacctgggagatggagagcaacgagaacttcgagggctacatgaaggccctggacatcgacttcgccaccagaaagatcgccgtgagactgacccagaccaaggtgatcgaccaggacggcgacaacttcaagaccaagaccaccagcaccttcagaaactacgacgtggacttcaccgtgggcgtggagttcgacgagtacaccaagagcctggacaacagacacgtgaaggccctggtgacctgggagggcgacgtgctggtgtgcgtgcagaagggcgagaaggagtag

SEQ ID NO: 96975 - DNA, 1494 bp, synthetic construct
  misc_feature 1..1494: note = Description of Artificial Sequence: Synthetic coding sequence
  source 1..1494: mol_type = other DNA
atgggcctgcccgccctgctggccagcgccctgtgcaccttcgtgctgcccctgctgctgttcctggccgccatcaagctgtgggacctgtactgcgtgagcggcagagacagaagctgcgccctgcccctgccccccggcaccatgggcttccccttcttcggcgagaccctgcagatggtgctgcagagaagaaagttcctgcagatgaagagaagaaagtacggcttcatctacaagacccacctgttcggcagacccaccgtgagagtgatgggcgccgacaacgtgagaagaatcctgctgggcgagcacagactggtgagcgtgcactggcccgccagcgtgagaaccatcctgggcagcggctgcctgagcaacctgcacgacagcagccacaagcagagaaagaaggtgatcatgagagccttcagcagagaggccctggagtgctacgtgcccgtgatcaccgaggaggtgggcagcagcctggagcagtggctgagctgcggcgagagaggcctgctggtgtaccccgaggtgaagagactgatgttcagaatcgccatgagaatcctgctgggctgcgagccccagctggccggcgacggcgacagcgagcagcagctggtggaggccttcgaggagatgaccagaaacctgttcagcctgcccatcgacgtgcccttcagcggcctgtacagaggcatgaaggccagaaacctgatccacgccagaatcgagcagaacatcagagccaagatctgcggcctgagagccagcgaggccggccagggctgcaaggacgccctgcagctgctgatcgagcacagctgggagagaggcgagagactggacatgcaggccctgaagcagagcagcaccgagctgctgttcggcggccacgagaccaccgccagcgccgccaccagcctgatcacctacctgggcctgtacccccacgtgctgcagaaggtgagagaggagctgaagagcaagggcctgctgtgcaagagcaaccaggacaacaagctggacatggagatcctggagcagctgaagtacatcggctgcgtgatcaaggagaccctgagactgaacccccccgtgcccggcggcttcagagtggccctgaagaccttcgagctgaacggctaccagatccccaagggctggaacgtgatctacagcatctgcgacacccacgacgtggccgagatcttcaccaacaaggaggagttcaaccccgacagattcatgctgccccaccccgaggacgccagcagattcagcttcatccccttcggcggcggcctgagaagctgcgtgggcaaggagttcgccaagatcctgctgaagatcttcaccgtggagctggccagacactgcgactggcagctgctgaacggcccccccaccatgaagaccagccccaccgtgtaccccgtggacaacctgcccgccagattcacccacttccacggcgagatctag

SEQ ID NO: 96976 - DNA, 600 bp, synthetic construct
  misc_feature 1..600: note = Description of Artificial Sequence: Synthetic coding sequence
  source 1..600: mol_type = other DNA
atgaactacagcaagatccccgcccaggtggacctgagaagacagaccgagagagactgcagagtgagcagcttcagagtgaaggagaacttcgacaaggccagattcagcggcacctggtacgccatggccaagaaggaccccgagggcctgttcctgcaggacaacatcgtggccgagttcagcgtggacgagaccggccagatgagcgccaccgccaagggcagagtgagactgctgaacaactgggacgtgtgcgccgacatggtgggcaccttcaccgacaccgaggaccccgccaagttcaagatgaagtactggggcgtggccagcttcctgcagaagggcaacgacgaccactggatcgtggacaccgactacgacacctacgccgtgcagtacagctgcagactgctgaacctggacggcacctgcgccgacagctacagcttcgtgttcagcagagaccccaacggcctgccccccgaggcccagaagatcgtgagacagagacaggaggagctgtgcctggccagacagtacagactgatcgtgcacaacggctactgcgacggcagaagcgagagaaacctgctgtag

SEQ ID NO: 96977 - DNA, 606 bp, synthetic construct
  misc_feature 1..606: note = Description of Artificial Sequence: Synthetic coding sequence
  source 1..606: mol_type = other DNA
atgaagtgggtgtgggccctgctgctgctggccgccctgggcagcggcagagccgagagagactgcagagtgagcagcttcagagtgaaggagaacttcgacaaggccagattcagcggcacctggtacgccatggccaagaaggaccccgagggcctgttcctgcaggacaacatcgtggccgagttcagcgtggacgagaccggccagatgagcgccaccgccaagggcagagtgagactgctgaacaactgggacgtgtgcgccgacatggtgggcaccttcaccgacaccgaggaccccgccaagttcaagatgaagtactggggcgtggccagcttcctgcagaagggcaacgacgaccactggatcgtggacaccgactacgacacctacgccgtgcagtacagctgcagactgctgaacctggacggcacctgcgccgacagctacagcttcgtgttcagcagagaccccaacggcctgccccccgaggcccagaagatcgtgagacagagacaggaggagctgtgcctggccagacagtacagactgatcgtgcacaacggctactgcgacggcagaagcgagagaaacctgctgtag

SEQ ID NO: 96978 - DNA, 606 bp, synthetic construct; identical to SEQ ID NO: 96977
  misc_feature 1..606: note = Description of Artificial Sequence: Synthetic coding sequence
  source 1..606: mol_type = other DNA

SEQ ID NO: 96979 - DNA, 600 bp, synthetic construct
  misc_feature 1..600: note = Description of Artificial Sequence: Synthetic coding sequence
  source 1..600: mol_type = other DNA
atgaactacagcaagatccccgcccaggtggacctgagaagacaggccgagagagactgcagagtgagcagcttcagagtgaaggagaacttcgacaaggccagattcagcggcacctggtacgccatggccaagaaggaccccgagggcctgttcctgcaggacaacatcgtggccgagttcagcgtggacgagaccggccagatgagcgccaccgccaagggcagagtgagactgctgaacaactgggacgtgtgcgccgacatggtgggcaccttcaccgacaccgaggaccccgccaagttcaagatgaagtactggggcgtggccagcttcctgcagaagggcaacgacgaccactggatcgtggacaccgactacgacacctacgccgtgcagtacagctgcagactgctgaacctggacggcacctgcgccgacagctacagcttcgtgttcagcagagaccccaacggcctgccccccgaggcccagaagatcgtgagacagagacaggaggagctgtgcctggccagacagtacagactgatcgtgcacaacggctactgcgacggcagaagcgagagaaacctgctgtag

SEQ ID NO: 96980 - DNA, 408 bp, synthetic construct
  misc_feature 1..408: note = Description of Artificial Sequence: Synthetic coding sequence
  source 1..408: mol_type = other DNA
atgccccccaacctgaccggctactacagattcgtgagccagaagaacatggaggactacctgcaggccctgaacatcagcctggccgtgagaaagatcgccctgctgctgaagcccgacaaggagatcgagcaccagggcaaccacatgaccgtgagaaccctgagcaccttcagaaactacaccgtgcagttcgacgtgggcgtggagttcgaggaggacctgagaagcgtggacggcagaaagtgccagaccatcgtgacctgggaggaggagcacctggtgtgcgtgcagaagggcgaggtgcccaacagaggctggagacactggctggagggcgagatgctgtacctggagctgaccgccagagacgccgtgtgcgagcaggtgttcagaaaggtgagatag

SEQ ID NO: 96981 - DNA, 1026 bp, synthetic construct
  misc_feature 1..1026: note = Description of Artificial Sequence: Synthetic coding sequence
  source 1..1026: mol_type = other DNA
atgaacatcgtggtggagttcttcgtggtgaccttcaaggtgctgtgggccttcgtgctggccgccgccagatggctggtgagacccaaggagaagagcgtggccggccaggtgtgcctgatcaccggcgccggcagcggcctgggcagactgttcgccctggagttcgccagaagaagagccctgctggtgctgtgggacatcaacacccagagcaacgaggagaccgccggcatggtgagacacatctacagagacctggaggccgccgacgccgccgccctgcaggccggcaacggcgaggaggagatcctgccccactgcaacctgcaggtgttcacctacacctgcgacgtgggcaagagagagaacgtgtacctgaccgccgagagagtgagaaaggaggtgggcgaggtgagcgtgctggtgaacaacgccggcgtggtgagcggccaccacctgctggagtgccccgacgagctgatcgagagaaccatgatggtgaactgccacgcccacttctggaccaccaaggccttcctgcccaccatgctggagatcaaccacggccacatcgtgaccgtggccagcagcctgggcctgttcagcaccgccggcgtggaggactactgcgccagcaagttcggcgtggtgggcttccacgagagcctgagccacgagctgaaggccgccgagaaggacggcatcaagaccaccctggtgtgcccctacctggtggacaccggcatgttcagaggctgcagaatcagaaaggagatcgagcccttcctgccccccctgaagcccgactactgcgtgaagcaggccatgaaggccatcctgaccgaccagcccatgatctgcacccccagactgatgtacatcgtgaccttcatgaagagcatcctgcccttcgaggccgtggtgtgcatgtacagattcctgggcgccgacaagtgcatgtaccccttcatcgcccagagaaagcaggccaccaacaacaacgaggccaagaacggcatctag

SEQ ID NO: 96982 - DNA, 957 bp, synthetic construct
  misc_feature 1..957: note = Description of Artificial Sequence: Synthetic coding sequence
  source 1..957: mol_type = other DNA
atggtggagctgatgttccccctgctgctgctgctgctgcccttcctgctgtacatggccgccccccagatcagaaagatgctgagcagcggcgtgtgcaccagcaccgtgcagctgcccggcaaggtggtggtggtgaccggcgccaacaccggcatcggcaaggagaccgccaaggagctggcccagagaggcgccagagtgtacctggcctgcagagacgtggagaagggcgagctggtggccaaggagatccagaccaccaccggcaaccagcaggtgctggtgagaaagctggacctgagcgacaccaagagcatcagagccttcgccaagggcttcctggccgaggagaagcacctgcacgtgctgatcaacaacgccggcgtgatgatgtgcccctacagcaagaccgccgacggcttcgagatgcacatcggcgtgaaccacctgggccacttcctgctgacccacctgctgctggagaagctgaaggagagcgcccccagcagaatcgtgaacgtgagcagcctggcccaccacctgggcagaatccacttccacaacctgcagggcgagaagttctacaacgccggcctggcctactgccacagcaagctggccaacatcctgttcacccaggagctggccagaagactgaagggcagcggcgtgaccacctacagcgtgcaccccggcaccgtgcagagcgagctggtgagacacagcagcttcatgagatggatgtggtggctgttcagcttcttcatcaagaccccccagcagggcgcccagaccagcctgcactgcgccctgaccgagggcctggagatcctgagcggcaaccacttcagcgactgccacgtggcctgggtgagcgcccaggccagaaacgagaccatcgccagaagactgtgggacgtgagctgcgacctgctgggcctgcccatcgactag

SEQ ID NO: 96983 - DNA, 918 bp, synthetic construct
  misc_feature 1..918: note = Description of Artificial Sequence: Synthetic coding sequence
  source 1..918: mol_type = other DNA
atggtggagctgatgttccccctgctgctgctgctgctgcccttcctgctgtacatggccgccccccagatcagaaagatgctgagcagcggcgtgtgcaccagcaccgtgcagctgcccggcaaggtggtggtggtgaccggcgccaacaccggcgccagagtgtacctggcctgcagagacgtggagaagggcgagctggtggccaaggagatccagaccaccaccggcaaccagcaggtgctggtgagaaagctggacctgagcgacaccaagagcatcagagccttcgccaagggcttcctggccgaggagaagcacctgcacgtgctgatcaacaacgccggcgtgatgatgtgcccctacagcaagaccgccgacggcttcgagatgcacatcggcgtgaaccacctgggccacttcctgctgacccacctgctgctggagaagctgaaggagagcgcccccagcagaatcgtgaacgtgagcagcctggcccaccacctgggcagaatccacttccacaacctgcagggcgagaagttctacaacgccggcctggcctactgccacagcaagctggccaacatcctgttcacccaggagctggccagaagactgaagggcagcggcgtgaccacctacagcgtgcaccccggcaccgtgcagagcgagctggtgagacacagcagcttcatgagatggatgtggtggctgttcagcttcttcatcaagaccccccagcagggcgcccagaccagcctgcactgcgccctgaccgagggcctggagatcctgagcggcaaccacttcagcgactgccacgtggcctgggtgagcgcccaggccagaaacgagaccatcgccagaagactgtgggacgtgagctgcgacctgctgggcctgcccatcgactag

SEQ ID NO: 96984 - DNA, 951 bp, synthetic construct
  misc_feature 1..951: note = Description of Artificial Sequence: Synthetic coding sequence
  source 1..951: mol_type = other DNA
atgctggtgaccctgggcctgctgaccagcttcttcagcttcctgtacatggtggcccccagcatcagaaagttcttcgccggcggcgtgtgcagaaccaacgtgcagctgcccggcaaggtggtggtgatcaccggcgccaacaccggcatcggcaaggagaccgccagagagctggccagcagaggcgccagagtgtacatcgcctgcagagacgtgctgaagggcgagagcgccgccagcgagatcagagtggacaccaagaacagccaggtgctggtgagaaagctggacctgagcgacaccaagagcatcagagccttcgccgagggcttcctggccgaggagaagcagctgcacatcctgatcaacaacgccggcgtgatgatgtgcccctacagcaagaccgccgacggcttcgagacccacctgggcgtgaaccacctgggccacttcctgctgacctacctgctgctggagagactgaaggtgagcgcccccgccagagtggtgaacgtgagcagcgtggcccaccacatcggcaagatccccttccacgacctgcagagcgagaagagatacagcagaggcttcgcctactgccacagcaagctggccaacgtgctgttcaccagagagctggccaagagactgcagggcaccggcgtgaccacctacgccgtgcaccccggcgtggtgagaagcgagctggtgagacacagcagcctgctgtgcctgctgtggagactgttcagccccttcgtgaagaccgccagagagggcgcccagaccagcctgcactgcgccctggccgagggcctggagcccctgagcggcaagtacttcagcgactgcaagagaacctgggtgagccccagagccagaaacaacaagaccgccgagagactgtggaacgtgagctgcgagctgctgggcatcagatgggagtag

SEQ ID NO: 96985 - DNA, 951 bp, synthetic construct; identical to SEQ ID NO: 96984
  misc_feature 1..951: note = Description of Artificial Sequence: Synthetic coding sequence
  source 1..951: mol_type = other DNA

SEQ ID NO: 96986 - DNA, 951 bp, synthetic construct; identical to SEQ ID NO: 96984
  misc_feature 1..951: note = Description of Artificial Sequence: Synthetic coding sequence
  source 1..951: mol_type = other DNA

SEQ ID NO: 96987 - DNA, 957 bp, synthetic construct
  misc_feature 1..957: note = Description of Artificial Sequence: Synthetic coding sequence
  source 1..957: mol_type = other DNA
atgtggctgcccctgctgctgggcgccctgctgtgggccgtgctgtggctgctgagagacagacagagcctgcccgccagcaacgccttcgtgttcatcaccggctgcgacagcggcttcggcagactgctggccctgcagctggaccagagaggcttcagagtgctggccagctgcctgacccccagcggcgccgaggacctgcagagagtggccagcagcagactgcacaccaccctgctggacatcaccgacccccagagcgtgcagcaggccgccaagtgggtggagatgcacgtgaaggaggccggcctgttcggcctggtgaacaacgccggcgtggccggcatcatcggccccaccccctggctgaccagagacgacttccagagagtgctgaacgtgaacaccatgggccccatcggcgtgaccctggccctgctgcccctgctgcagcaggccagaggcagagtgatcaacatcaccagcgtgctgggcagactggccgccaacggcggcggctactgcgtgagcaagttcggcctggaggccttcagcgacagcctgagaagagacgtggcccacttcggcatcagagtgagcatcgtggagcccggcttcttcagaacccccgtgaccaacctggagagcctggagaagaccctgcaggcctgctgggccagactgccccccgccacccaggcccactacggcggcgccttcctgaccaagtacctgaagatgcagcagagaatcatgaacctgatctgcgaccccgacctgaccaaggtgagcagatgcctggagcacgccctgaccgccagacaccccagaaccagatacagccccggctgggacgccaagctgctgtggctgcccgccagctacctgcccgccagcctggtggacgccgtgctgacctgggtgctgcccaagcccgcccaggccgtgtactag

SEQ ID NO: 96988 - DNA, 957 bp, synthetic construct; identical to SEQ ID NO: 96987
  misc_feature 1..957: note = Description of Artificial Sequence: Synthetic coding sequence
  source 1..957: mol_type = other DNA

SEQ ID NO: 96989 - DNA, 936 bp, synthetic construct
  misc_feature 1..936: note = Description of Artificial Sequence: Synthetic coding sequence
  source 1..936: mol_type = other DNA
atggccgccgcccccagaaccgtgctgatcagcggctgcagcagcggcatcggcctggagctggccgtgcagctggcccacgaccccaagaagagataccaggtggtggccaccatgagagacctgggcaagaaggagaccctggaggccgccgccggcgaggccctgggccagaccctgaccgtggcccagctggacgtgtgcagcgacgagagcgtggcccagtgcctgagctgcatccagggcgaggtggacgtgctggtgaacaacgccggcatgggcctggtgggccccctggagggcctgagcctggccgccatgcagaacgtgttcgacaccaacttcttcggcgccgtgagactggtgaaggccgtgctgcccggcatgaagagaagaagacagggccacatcgtggtgatcagcagcgtgatgggcctgcagggcgtgatcttcaacgacgtgtacgccgccagcaagttcgccctggagggcttcttcgagagcctggccatccagctgctgcagttcaacatcttcatcagcctggtggagcccggccccgtggtgaccgagttcgagggcaagctgctggcccaggtgagcatggccgagttccccggcaccgaccccgagaccctgcactacttcagagacctgtacctgcccgccagcagaaagctgttctgcagcgtgggccagaacccccaggacgtggtgcaggccatcgtgaacgtgatcagcagcaccagaccccccctgagaagacagaccaacatcagatacagccccctgaccaccctgaagaccgtggacagcagcggcagcctgtacgtgagaaccacccacagactgctgttcagatgccccagactgctgaacctgggcctgcagtgcctgagctgcggctgcctgcccaccagagtgagacccagatag

SEQ ID NO: 96990 - DNA, 675 bp, synthetic construct
  misc_feature 1..675: note = Description of Artificial Sequence: Synthetic coding sequence
  source 1..675: mol_type = other DNA
atgagcagaaagatcgagggcttcctgctgctgctgctgttcggctacgaggccaccctgggcctgagcagcaccgaggacgagggcgaggacccctggtaccagaaggcctgcaagtgcgactgccagggcggccccaacgccctgtggagcgccggcgccaccagcctggactgcatccccgagtgcccctaccacaagcccctgggcttcgagagcggcgaggtgacccccgaccagatcacctgcagcaaccccgagcagtacgtgggctggtacagcagctggaccgccaacaaggccagactgaacagccagggcttcggctgcgcctggctgagcaagttccaggacagcagccagtggctgcagatcgacctgaaggagatcaaggtgatcagcggcatcctgacccagggcagatgcgacatcgacgagtggatgaccaagtacagcgtgcagtacagaaccgacgagagactgaactggatctactacaaggaccagaccggcaacaacagagtgttctacggcaacagcgacagaaccagcaccgtgcagaacctgctgagaccccccatcatcagcagattcatcagactgatccccctgggctggcacgtgagaatcgccatcagaatggagctgctggagtgcgtgagcaagtgcgcctag

SEQ ID NO: 96991 - DNA, 4077 bp, synthetic construct
  misc_feature 1..4077: note = Description of Artificial Sequence: Synthetic coding sequence
  source 1..4077: mol_type = other DNA
atgatcgagcccagcgaggacagcttcgagaccatgatggagcacaagaaccccagcagcaagcagatggagagcagcgagggcagcagcaacaccaccgaggccaccagcggcagcggcgtgagaggcgaggccggccccgccagcggccccgcccaggagaagaaggagccccccagcggccccctgcaggagatggaggagctgcccaccgacctgctgcaggacatggaggagcccagcagcggccccagaaaggagatcgaggacccccccaacgacctgctgcaggacctggaggagagctgcaacggcagccaccaggccagaggcgaccccctgagcggcgccagcgacagaatgaaggaggccagcgtgaaccccagcggcgccagagaggagcaggaggcccacaccgacctgaaggagagcggcagagaggagaccccccaggagcagaaccagaccgagcacagcaccgccgagctgatggccatggtgagaagcatcatcagcctgtacttcagaatgcaggacctgaaggagcagcagagagtggccgaggagatcctgatcaagggcatcaacgccggccagctgcccgcccccaagcacttcagcggcgacagaagagagttccacgagttcatcgtgctgtgccagctgaccctgcagagctaccccagaatgttctacaacgacagactgagagtgggctacgtgatcaaccacctgagcggcctggccctggagtgggccaaggccctgctgcaggagaacagccccctgatcggcgacttccccgccttcctggaggccatgagcgaggtgttcgagtacagacaggccctgagagtggccgaggaggccatgttcaccatcagacagggcggcagaagcgccaccgagtacatcgacgagttccagagcctggtgcccatcctgggctggcccgacgaggtgctgcaggcccacctgtgccagggcctgaacgaggagatcagacactacctgttcagagtgccccagcccgacagcctggacagcctgatcgtgctgatcctgcagatcgaggagaagctggccgagagaagagccatgctgagactgccccccgaggccagacccagaaacctgacctggatcgacagccccgcccccgagagatggatggtgagcagctggctgcccagcgaggtgcaccccgacatcaacagagcccacctgttcctgctgctgatggtgagagtgaacccctaccacagcgtggccgtgcaggccctggtggacagcggcgccgacggcaacttcatggacgagaagttcgcccaggagcactacgtggagctgtacgagaagccctacccccagcccgtgcagagcgtggacggcagcctgatcggcaacgagcccgtgtggctgtacaccgagcccctggtgtgcatccaccagaaccaccaggagagcatcgagttcgacatcgtgcccagccccaacttcagcgtggtgctgggcatcagatggctgagagtgcacgcccccgaggtggactggatcaagggcagatgcaccttccacagcccctactgcctgaagaactgcttcagacccccccccccctgcatcgccctggagagacacggcatgagcctgctgcccggcctgccccacccctacagcgacctggccgacgtgttcaaccccaaggaggccgacgacgagaccagcgaccagcccagcagcgacggcagcgacgacctgagcgagagcgagcccagcgagctgcagcaggccggcgacagcgaccacagcgagaccttctacgagtgccccagcaccgccccctgggagcccgtgggcgccagaatgcaggagagagccagactgcaggaggagtactgggacctgcaggacatgctgaccaacagacaggactacatccagatgatccccgagctgttcgaccagctgcacggcgccgagtggttcaccaagctggagctgagaggcaccatcgtggaggagagcgtgaacggccacagaaccgaggacgtgtggaaggccgccttcggcctggagctggaggagatgaagagctaccagcccttcgccctgagccccgaccccatcatcccccagaacgtgatccacttcatcctgaaggacatgctgggcttcttcgtgctgagctacggccaggaggtgctgatctacagcatgagccaggaggagcacctgcaccacgtgagacaggtgctggtgagattcagacaccacaacgtgtactgcagcctggacaagagccagttccacagacagaccgtggagttcctgggcttcgtggtgacccccaagggcgtgaagctgaacaagaacgtgatgaccatcatcaccggctaccccacccccggcagcaagctgagcctgagaaacttcatcgagttcgtgttcccctacagacacttcgtggagagattcagcatcatcgccgagcccctggtgagacagctgctgagcagctaccagttctactggggcgtggaggagcaggaggccttcgagtgcctgaagagagccttcagaaaggcccccctgctgcaccaccccaagccccagaaccccttctacctggagaccggcgtgaccggcaccgccctgcacgccagcctgatccagatcgacgaccagaccggcaagagagcctgctgcgccttctacagcagaaacatcagccccatcgaggtggagtacagccaggccgagatgaagatcctgcccatcagagccgccttcatggtgtggtgcagatacctggagaacaccgaggagcccatcatgatcctgctgaacaccgaggacctggccagcctgaacaacgacagactgaccgtgctgctgcccggccactgggtgttcttcttcagccacttcaacttcgacgtgatggagctgcccgagcaggacggcggcagagccctgccccccgtgagaaacctgagatggagaagagccttccagagaaacaccgccgccagacagaccctgctgctggccagcagaggcttccccagagaccccagcaccgagagcggcgaggaggagaacgaggagcaggacgagctgaacgagcagatcctgagacaggagctgctggccatgatccccatcgaccagatcctgaacagcttcctggcccacttcagcatggcccagatcagagccgtgatcctgcacttcttcagaggcctgctgtactggaagaacaccctggccctggccgccatcctggtgctgctgagagtgagacagtgcctgagcctgagacccgcccccgccatgagagtggccagaccccagccccagagaagcctgagactgatcctggacagcagcctgatcgccggcagcagcatcaccaccgccatcacccagctgctgacccagatgcccgccctggtgggcgccaacaccatccccgcccaggagctggccgagctgttcctgggccccggcagatggcagagaaacgccctgcacagccaggcccacagaggcctgcagttcacccccggcttctggctgaccctgtgcgagttcttcggcgtgagagtgaccccccaggagggccacctgcccgccctgagacagaacagatacctggagctgcacgtggtgggcgacgaggacgtggtgctgagagaggccctgcaggacgacctgcagagatacagacagtgcggcctgcacgacggcctgcaggacaccagccaggacaagcaggacaacgacgtgcaggaggccccccccagccacaccgccgccacccacccccccagacccagacacctgatggacccccaggtgctggagttcctgggcagcagactgctgcacatccacagcgccgacggccagctgcacctgctgagcagagagcaggccgccagagccctgagccagttcctgaccctgatctacagaagagccctgcccatccccgcctgggagagccagcccagagagcaggccagactggaggagctgcccgacgaggacgaggacgccaacctggactag

SEQ ID NO: 96992 - DNA, 9393 bp, synthetic construct
  misc_feature 1..9393: note = Description of Artificial Sequence: Synthetic coding sequence
  source 1..9393: mol_type = other DNA
atgttcagcgtgagaatcgtgaccgccgactactacatggccagccccctgcagggcctggacacctgccagagccccctgacccaggcccccgtgaagaaggtgcccgtggtgagagtgttcggcgccacccccgccggccagaagacctgcctgcacctgcacggcatcttcccctacctgtacgtgccctacgacggctacggccagcagcccgagagctacctgagccagatggccttcagcatcgacagagccctgaacgtggccctgggcaaccccagcagcaccgcccagcacgtgttcaaggtgagcctggtgagcggcatgcccttctacggctaccacgagaaggagagacacttcatgaagatctacctgtacaaccccaccatggtgaagagaatctgcgagctgctgcagagcggcgccatcatgaacaagttctaccagccccacgaggcccacatcccctacctgctgcagctgttcatcgactacaacctgtacggcatgaacctgatcaacctggccgccgtgaagttcagaaaggccagaagaaagagcaacaccctgcacgccaccggcagctgcaagaaccacctgagcggcaacagcctggccgacaccctgttcagatgggagcaggacgagatccccagcagcctgatcctggagggcgtggagccccagagcacctgcgagctggaggtggacgccgtggccgccgacatcctgaacagactggacatcgaggcccagatcggcggcaaccccggcctgcaggccatctgggaggacgagaagcagagaagaagaaacagaaacgagaccagccagatgagccagcccgagagccaggaccacagattcgtgcccgccaccgagagcgagaagaagttccagaagagactgcaggagatcctgaagcagaacgacttcagcgtgaccctgagcggcagcgtggactacagcgacggcagccaggagttcagcgccgagctgaccctgcacagcgaggtgctgagccccgagatgctgcagtgcacccccgccaacatggtggaggtgcacaaggacaaggagagcagcaagggccacaccagacacaaggtggaggaggccctgatcaacgaggaggccatcctgaacctgatggagaacagccagaccttccagcccctgacccagagactgagcgagagccccgtgttcatggacagcagccccgacgaggccctggtgcacctgctggccggcctggagagcgacggctacagaggcgagagaaacagaatgcccagcccctgcagaagcttcggcaacaacaagtacccccagaacagcgacgacgaggagaacgagccccagatcgagaaggaggagatggagctgagcctggtgatgagccagagatgggacagcaacatcgaggagcactgcgccaagaagagaagcctgtgcagaaacacccacagaagcagcaccgaggacgacgacagcagcagcggcgaggagatggagtggagcgacaacagcctgctgctggccagcctgagcatcccccagctggacggcaccgccgacgagaacagcgacaaccccctgaacaacgagaacagcagaacccacagcagcgtgatcgccaccagcaagctgagcgtgaagcccagcatcttccacaaggacgccgccaccctggagcccagcagcagcgccaagatcaccttccagtgcaagcacaccagcgccctgagcagccacgtgctgaacaaggaggacctgatcgaggacctgagccagaccaacaagaacaccgagaagggcctggacaacagcgtgaccagcttcaccaacgagagcacctacagcatgaagtaccccggcagcctgagcagcaccgtgcacagcgagaacagccacaaggagaacagcaagaaggagatcctgcccgtgagcagctgcgagagcagcatcttcgactacgaggaggacatccccagcgtgaccagacaggtgcccagcagaaagtacaccaacatcagaaagatcgagaaggacagccccttcatccacatgcacagacaccccaacgagaacaccctgggcaagaacagcttcaacttcagcgacctgaaccacagcaagaacaaggtgagcagcgagggcaacgagaagggcaacagcaccgccctgagcagcctgttccccagcagcttcaccgagaactgcgagctgctgagctgcagcggcgagaacagaaccatggtgcacagcctgaacagcaccgccgacgagagcggcctgaacaagctgaagatcagatacgaggagttccaggagcacaagaccgagaagcccagcctgagccagcaggccgcccactacatgttcttccccagcgtggtgctgagcaactgcctgaccagaccccagaagctgagccccgtgacctacaagctgcagcccggcaacaagcccagcagactgaagctgaacaagagaaagctggccggccaccaggagaccagcaccaagagcagcgagaccggcagcaccaaggacaacttcatccagaacaacccctgcaacagcaaccccgagaaggacaacgccctggccagcgacctgaccaagaccaccagaggcgccttcgagaacaagacccccaccgacggcttcatcgactgccacttcggcgacggcaccctggagaccgagcagagcttcggcctgtacggcaacaagtacaccctgagagccaagagaaaggtgaactacgagaccgaggacagcgagagcagcttcgtgacccacaacagcaagatcagcctgccccaccccatggagatcggcgagagcctggacggcaccctgaagagcagaaagagaagaaagatgagcaagaagctgccccccgtgatcatcaagtacatcatcatcaacagattcagaggcagaaagaacatgctggtgaagctgggcaagatcgacagcaaggagaagcaggtgatcctgaccgaggagaagatggagctgtacaagaagctggcccccctgaaggacttctggcccaaggtgcccgacagccccgccaccaagtaccccatctaccccctgacccccaagaagagccacagaagaaagagcaagcacaagagcgccaagaagaagaccggcaagcagcagagaaccaacaacgagaacatcaagagaaccctgagcttcagaaagaagagaagccacgccatcctgagcccccccagccccagctacaacgccgagaccgaggactgcgacctgaactacagcgacgtgatgagcaagctgggcttcctgagcgagagaagcaccagccccatcaacagcagcccccccagatgctggagccccaccgaccccagagccgaggagatcatggccgccgccgagaaggaggccatgctgttcaagggccccaacgtgtacaagaagaccgtgaacagcagaatcggcaagaccagcagagccagagcccagatcaagaagagcaaggccaagctggccaaccccagcatcgtgaccaagaagagaaacaagagaaaccagaccaacaagctggtggacgacggcaagaagaagcccagagccaagcagaagaccaacgagaagggcaccagcagaaagcacaccaccctgaaggacgagaagatcaagagccagagcggcgccgaggtgaagttcgtgctgaagcaccagaacgtgagcgagttcgccagcagcagcggcggcagccagctgctgttcaagcagaaggacatgcccctgatgggcagcgccgtggaccaccccctgagcgccagcctgcccaccggcatcaacgcccagcagaagctgagcggctgcttcagcagcttcctggagagcaagaagagcgtggacctgcagaccttccccagcagcagagacgacctgcaccccagcgtggtgtgcaacagcatcggccccggcgtgagcaagatcaacgtgcagagaccccacaaccagagcgccatgttcaccctgaaggagagcaccctgatccagaagaacatcttcgacctgagcaaccacctgagccaggtggcccagaacacccagatcagcagcggcatgagcagcaagatcgaggacaacgccaacaacatccagagaaactacctgagcagcatcggcaagctgagcgagtacagaaacagcctggagagcaagctggaccaggcctacacccccaacttcctgcactgcaaggacagccagcagcagatcgtgtgcatcgccgagcagagcaagcacagcgagacctgcagccccggcaacaccgccagcgaggagagccagatgcccaacaactgcttcgtgaccagcctgagaagccccatcaagcagatcgcctgggagcagaagcagagaggcttcatcctggacatgagcaacttcaagcccgagagagtgaagcccagaagcctgagcgaggccatcagccagaccaaggccctgagccagtgcaagaacagaaacgtgagcacccccagcgccttcggcgagggccagagcggcctggccgtgctgaaggagctgctgcagaagagacagcagaaggcccagaacgccaacaccacccaggaccccctgagcaacaagcaccagcccaacaagaacatcagcggcagcctggagcacaacaaggccaacaagagaaccagaagcgtgaccagccccagaaagcccagaacccccagaagcaccaagcagaaggagaagatccccaagctgctgaaggtggacagcctgaacctgcagaacagcagccagctggacaacagcgtgagcgacgacagccccatcttcttcagcgaccccggcttcgagagctgctacagcctggaggacagcctgagccccgagcacaactacaacttcgacatcaacaccatcggccagaccggcttctgcagcttctacagcggcagccagttcgtgcccgccgaccagaacctgccccagaagttcctgagcgacgccgtgcaggacctgttccccggccaggccatcgagaagaacgagttcctgagccacgacaaccagaagtgcgacgaggacaagcaccacaccaccgacagcgccagctggatcagaagcggcaccctgagccccgagatcttcgagaagagcaccatcgacagcaacgagaacagaagacacaaccagtggaagaacagcttccaccccctgaccaccagaagcaacagcatcatggacagcttctgcgtgcagcaggccgaggactgcctgagcgagaagagcagactgaacagaagcagcgtgagcaaggaggtgttcctgagcctgccccagcccaacaacagcgactggatccagggccacaccagaaaggagatgggccagagcctggacagcgccaacaccagcttcaccgccatcctgagcagccccgacggcgagctggtggacgtggcctgcgaggacctggagctgtacgtgagcagaaacaacgacatgctgacccccacccccgacagcagccccagaagcaccagcagccccagccagagcaagaacggcagcttcacccccagaaccgccaacatcctgaagcccctgatgagcccccccagcagagaggagatcatggccaccctgctggaccacgacctgagcgagaccatctaccaggagcccttctgcagcaaccccagcgacgtgcccgagaagcccagagagatcggcggcagactgctgatggtggagaccagactggccaacgacctggccgagttcgagggcgacttcagcctggagggcctgagactgtggaagaccgccttcagcgccatgacccagaaccccagacccggcagccccctgagaagcggccagggcgtggtgaacaagggcagcagcaacagccccaagatggtggaggacaagaagatcgtgatcatgccctgcaagtgcgcccccagcagacagctggtgcaggtgtggctgcaggccaaggaggagtacgagagaagcaagaagctgcccaagaccaagcccaccggcgtggtgaagagcgccgagaacttcagcagcagcgtgaaccccgacgacaagcccgtggtgccccccaagatggacgtgagcccctgcatcctgcccaccaccgcccacaccaaggaggacgtggacaacagccagatcgccctgcaggcccccaccaccggctgcagccagaccgccagcgagagccagatgctgccccccgtggccagcgccagcgaccccgagaaggacgaggacgacgacgacaactactacatcagctacagcagccccgacagccccgtgatccccccctggcagcagcccatcagccccgacagcaaggccctgaacggcgacgacagacccagcagccccgtggaggagctgcccagcctggccttcgagaacttcctgaagcccatcaaggacggcatccagaagagcccctgcagcgagccccaggagcccctggtgatcagccccatcaacaccagagccagaaccggcaagtgcgagagcctgtgcttccacagcacccccatcatccagagaaagctgctggagagactgcccgaggcccccggcctgagccccctgagcaccgagcccaagacccagaagctgagcaacaagaagggcagcaacaccgacaccctgagaagagtgctgctgacccaggccaagaaccagttcgccgccgtgaacaccccccagaaggagaccagccagatcgacggccccagcctgaacaacacctacggcttcaaggtgagcatccagaacctgcaggaggccaaggccctgcacgagatccagaacctgaccctgatcagcgtggagctgcacgccagaaccagaagagacctggagcccgaccccgagttcgaccccatctgcgccctgttctactgcatcagcagcgacacccccctgcccgacaccgagaagaccgagctgaccggcgtgatcgtgatcgacaaggacaagaccgtgttcagccaggacatcagataccagacccccctgctgatcagaagcggcatcaccggcctggaggtgacctacgccgccgacgagaaggccctgttccacgagatcgccaacatcatcaagagatacgaccccgacatcctgctgggctacgagatccagatgcacagctggggctacctgctgcagagagccgccgccctgagcatcgacctgtgcagaatgatcagcagagtgcccgacgacaagatcgagaacagattcgccgccgagagagacgagtacggcagctacaccatgagcgagatcaacatcgtgggcagaatcaccctgaacctgtggagaatcatgagaaacgaggtggccctgaccaactacaccttcgagaacgtgagcttccacgtgctgcaccagagattccccctgttcaccttcagagtgctgagcgactggttcgacaacaagaccgacctgtacagatggaagatggtggaccactacgtgagcagagtgagaggcaacctgcagatgctggagcagctggacctgatcggcaagaccagcgagatggccagactgttcggcatccagttcctgcacgtgctgaccagaggcagccagtacagagtggagagcatgatgctgagaatcgccaagcccatgaactacatccccgtgacccccagcgtgcagcagagaagccagatgagagccccccagtgcgtgcccctgatcatggagcccgagagcagattctacagcaacagcgtgctggtgctggacttccagagcctgtaccccagcatcgtgatcgcctacaactactgcttcagcacctgcctgggccacgtggagaacctgggcaagtacgacgagttcaagttcggctgcaccagcctgagagtgccccccgacctgctgtaccaggtgagacacgacatcaccgtgagccccaacggcgtggccttcgtgaagcccagcgtgagaaagggcgtgctgcccagaatgctggaggagatcctgaagaccagattcatggtgaagcagagcatgaaggcctacaagcaggacagagccctgagcagaatgctggacgccagacagctgggcctgaagctgatcgccaacgtgaccttcggctacaccagcgccaacttcagcggcagaatgccctgcatcgaggtgggcgacagcatcgtgcacaaggccagagagaccctggagagagccatcaagctggtgaacgacaccaagaagtggggcgccagagtggtgtacggcgacaccgacagcatgttcgtgctgctgaagggcgccaccaaggagcagagcttcaagatcggccaggagatcgccgaggccgtgaccgccaccaaccccaagcccgtgaagctgaagttcgagaaggtgtacctgccctgcgtgctgcagaccaagaagagatacgtgggctacatgtacgagaccctggaccagaaggaccccgtgttcgacgccaagggcatcgagaccgtgagaagagacagctgccccgccgtgagcaagatcctggagagaagcctgaagctgctgttcgagaccagagacatcagcctgatcaagcagtacgtgcagagacagtgcatgaagctgctggagggcaaggccagcatccaggacttcatcttcgccaaggagtacagaggcagcttcagctacaagcccggcgcctgcgtgcccgccctggagctgaccagaaagatgctgacctacgacagaagaagcgagccccaggtgggcgagagagtgccctacgtgatcatctacggcacccccggcgtgcccctgatccagctggtgagaagacccgtggaggtgctgcaggaccccaccctgagactgaacgccacctactacatcaccaagcagatcctgccccccctggccagaatcttcagcctgatcggcatcgacgtgttcagctggtaccacgagctgcccagaatccacaaggccaccagcagcagcagaagcgagcccgagggcagaaagggcaccatcagccagtacttcaccaccctgcactgccccgtgtgcgacgacctgacccagcacggcatctgcagcaagtgcagaagccagccccagcacgtggccgtgatcctgaaccaggagatcagagagctggagagacagcaggagcagctggtgaagatctgcaagaactgcaccggctgcttcgacagacacatcccctgcgtgagcctgaactgccccgtgctgttcaagctgagcagagtgaacagagagctgagcaaggccccctacctgagacagctgctggaccagttctag

SEQ ID NO: 96993 - DNA, 9393 bp, synthetic construct; identical to SEQ ID NO: 96992
  misc_feature 1..9393: note = Description of Artificial Sequence: Synthetic coding sequence
  source 1..9393: mol_type = other DNA

SEQ ID NO: 96994 - DNA, 9393 bp, synthetic construct; identical to SEQ ID NO: 96992
  misc_feature 1..9393: note = Description of Artificial Sequence: Synthetic coding sequence
  source 1..9393: mol_type = other DNA

SEQ ID NO: 96995 - DNA, 9159 bp, synthetic construct
  misc_feature 1..9159: note = Description of Artificial Sequence: Synthetic coding sequence
  source 1..9159: mol_type = other DNA
atggccttcagcatcgacagagccctgaacgtggccctgggcaaccccagcagcaccgcccagcacgtgttcaaggtgagcctggtgagcggcatgcccttctacggctaccacgagaaggagagacacttcatgaagatctacctgtacaaccccaccatggtgaagagaatctgcgagctgctgcagagcggcgccatcatgaacaagttctaccagccccacgaggcccacatcccctacctgctgcagctgttcatcgactacaacctgtacggcatgaacctgatcaacctggccgccgtgaagttcagaaaggccagaagaaagagcaacaccctgcacgccaccggcagctgcaagaaccacctgagcggcaacagcctggccgacaccctgttcagatgggagcaggacgagatccccagcagcctgatcctggagggcgtggagccccagagcacctgcgagctggaggtggacgccgtggccgccgacatcctgaacagactggacatcgaggcccagatcggcggcaaccccggcctgcaggccatctgggaggacgagaagcagagaagaagaaacagaaacgagaccagccagatgagccagcccgagagccaggaccacagattcgtgcccgccaccgagagcgagaagaagttccagaagagactgcaggagatcctgaagcagaacgacttcagcgtgaccctgagcggcagcgtggactacagcgacggcagccaggagttcagcgccgagctgaccctgcacagcgaggtgctgagccccgagatgctgcagtgcacccccgccaacatggtggaggtgcacaaggacaaggagagcagcaagggccacaccagacacaaggtggaggaggccctgatcaacgaggaggccatcctgaacctgatggagaacagccagaccttccagcccctgacccagagactgagcgagagccccgtgttcatggacagcagccccgacgaggccctggtgcacctgctggccggcctggagagcgacggctacagaggcgagagaaacagaatgcccagcccctgcagaagcttcggcaacaacaagtacccccagaacagcgacgacgaggagaacgagccccagatcgagaaggaggagatggagctgagcctggtgatgagccagagatgggacagcaacatcgaggagcactgcgccaagaagagaagcctgtgcagaaacacccacagaagcagcaccgaggacgacgacagcagcagcggcgaggagatggagtggagcgacaacagcctgctgctggccagcctgagcatcccccagctggacggcaccgccgacgagaacagcgacaaccccctgaacaacgagaacagcagaacccacagcagcgtgatcgccaccagcaagctgagcgtgaagcccagcatcttccacaaggacgccgccaccctggagcccagcagcagcgccaagatcaccttccagtgcaagcacaccagcgccctgagcagccacgtgctgaacaaggaggacctgatcgaggacctgagccagaccaacaagaacaccgagaagggcctggacaacagcgtgaccagcttcaccaacgagagcacctacagcatgaagtaccccggcagcctgagcagcaccgtgcacagcgagaacagccacaaggagaacagcaagaaggagatcctgcccgtgagcagctgcgagagcagcatcttcgactacgaggaggacatccccagcgtgaccagacaggtgcccagcagaaagtacaccaacatcagaaagatcgagaaggacagccccttcatccacatgcacagacaccccaacgagaacaccctgggcaagaacagcttcaacttcagcgacctgaaccacagcaagaacaaggtgagcagcgagggcaacgagaagggcaacagcaccgccctgagcagcctgttccccagcagcttcaccgagaactgcgagctgctgagctgcagcggcgagaacagaaccatggtgcacagcctgaacagcaccgccgacgagagcggcctgaacaagctgaagatcagatacgaggagttccaggagcacaagaccgagaagcccagcctgagccagcaggccgcccactacatgttcttccccagcgtggtgctgagcaactgcctgaccagaccccagaagctgagccccgtgacctacaagctgcagcccggcaacaagcccagcagactgaagctgaacaagagaaagctggccggccaccaggagaccagcaccaagagcagcgagaccggcagcaccaaggacaacttcatccagaacaacccctgcaacagcaaccccgagaaggacaacgccctggccagcgacctgaccaagaccaccagaggcgccttcgagaacaagacccccaccgacggcttcatcgactgccacttcggcgacggcaccctggagaccgagcagagcttcggcctgtacggcaacaagtacaccctgagagccaagagaaaggtgaactacgagaccgaggacagcgagagcagcttcgtgacccacaacagcaagatcagcctgccccaccccatggagatcggcgagagcctggacggcaccctgaagagcagaaagagaagaaagatgagcaagaagctgccccccgtgatcatcaagtacatcatcatcaacagattcagaggcagaaagaacatgctggtgaagctgggcaagatcgacagcaaggagaagcaggtgatcctgaccgaggagaagatggagctgtacaagaagctggcccccctgaaggacttctggcccaaggtgcccgacagccccgccaccaagtaccccatctaccccctgacccccaagaagagccacagaagaaagagcaagcacaagagcgccaagaagaagaccggcaagcagcagagaaccaacaacgagaacatcaagagaaccctgagcttcagaaagaagagaagccacgccatcctgagcccccccagccccagctacaacgccgagaccgaggactgcgacctgaactacagcgacgtgatgagcaagctgggcttcctgagcgagagaagcaccagccccatcaacagcagcccccccagatgctggagccccaccgaccccagagccgaggagatcatggccgccgccgagaaggaggccatgctgttcaagggccccaacgtgtacaagaagaccgtgaacagcagaatcggcaagaccagcagagccagagcccagatcaagaagagcaaggccaagctggccaaccccagcatcgtgaccaagaagagaaacaagagaaaccagaccaacaagctggtggacgacggcaagaagaagcccagagccaagcagaagaccaacgagaagggcaccagcagaaagcacaccaccctgaaggacgagaagatcaagagccagagcggcgccgaggtgaagttcgtgctgaagcaccagaacgtgagcgagttcgccagcagcagcggcggcagccagctgctgttcaagcagaaggacatgcccctgatgggcagcgccgtggaccaccccctgagcgccagcctgcccaccggcatcaacgcccagcagaagctgagcggctgcttcagcagcttcctggagagcaagaagagcgtggacctgcagaccttccccagcagcagagacgacctgcaccccagcgtggtgtgcaacagcatcggccccggcgtgagcaagatcaacgtgcagagaccccacaaccagagcgccatgttcaccctgaaggagagcaccctgatccagaagaacatcttcgacctgagcaaccacctgagccaggtggcccagaacacccagatcagcagcggcatgagcagcaagatcgaggacaacgccaacaacatccagagaaactacctgagcagcatcggcaagctgagcgagtacagaaacagcctggagagcaagctggaccaggcctacacccccaacttcctgcactgcaaggacagccagcagcagatcgtgtgcatcgccgagcagagcaagcacagcgagacctgcagccccggcaacaccgccagcgaggagagccagatgcccaacaactgcttcgtgaccagcctgagaagccccatcaagcagatcgcctgggagcagaagcagagaggcttcatcctggacatgagcaacttcaagcccgagagagtgaagcccagaagcctgagcgaggccatcagccagaccaaggccctgagccagtgcaagaacagaaacgtgagcacccccagcgccttcggcgagggccagagcggcctggccgtgctgaaggagctgctgcagaagagacagcagaaggcccagaacgccaacaccacccaggaccccctgagcaacaagcaccagcccaacaagaacatcagcggcagcctggagcacaacaaggccaacaagagaaccagaagcgtgaccagccccagaaagcccagaacccccagaagcaccaagcagaaggagaagatccccaagctgctgaaggtggacagcctgaacctgcagaacagcagccagctggacaacagcgtgagcgacgacagccccatcttcttcagcgaccccggcttcgagagctgctacagcctggaggacagcctgagccccgagcacaactacaacttcgacatcaacaccatcggccagaccggcttctgcagcttctacagcggcagccagttcgtgcccgccgaccagaacctgccccagaagttcctgagcgacgccgtgcaggacctgttccccggccaggccatcgagaagaacgagttcctgagccacgacaaccagaagtgcgacgaggacaagcaccacaccaccgacagcgccagctggatcagaagcggcaccctgagccccgagatcttcgagaagagcaccatcgacagcaacgagaacagaagacacaaccagtggaagaacagcttccaccccctgaccaccagaagcaacagcatcatggacagcttctgcgtgcagcaggccgaggactgcctgagcgagaagagcagactgaacagaagcagcgtgagcaaggaggtgttcctgagcctgccccagcccaacaacagcgactggatccagggccacaccagaaaggagatgggccagagcctggacagcgccaacaccagcttcaccgccatcctgagcagccccgacggcgagctggtggacgtggcctgcgaggacctggagctgtacgtgagcagaaacaacgacatgctgacccccacccccgacagcagccccagaagcaccagcagccccagccagagcaagaacggcagcttcacccccagaaccgccaacatcctgaagcccctgatgagcccccccagcagagaggagatcatggccaccctgctggaccacgacctgagcgagaccatctaccaggagcccttctgcagcaaccccagcgacgtgcccgagaagcccagagagatcggcggcagactgctgatggtggagaccagactggccaacgacctggccgagttcgagggcgacttcagcctggagggcctgagactgtggaagaccgccttcagcgccatgacccagaaccccagacccggcagccccctgagaagcggccagggcgtggtgaacaagggcagcagcaacagccccaagatggtggaggacaagaagatcgtgatcatgccctgcaagtgcgcccccagcagacagctggtgcaggtgtggctgcaggccaaggaggagtacgagagaagcaagaagctgcccaagaccaagcccaccggcgtggtgaagagcgccgagaacttcagcagcagcgtgaaccccgacgacaagcccgtggtgccccccaagatggacgtgagcccctgcatcctgcccaccaccgcccacaccaaggaggacgtggacaacagccagatcgccctgcaggcccccaccaccggctgcagccagaccgccagcgagagccagatgctgccccccgtggccagcgccagcgaccccgagaaggacgaggacgacgacgacaactactacatcagctacagcagccccgacagccccgtgatccccccctggcagcagcccatcagccccgacagcaaggccctgaacggcgacgacagacccagcagccccgtggaggagctgcccagcctggccttcgagaacttcctgaagcccatcaaggacggcatccagaagagcccctgcagcgagccccaggagcccctggtgatcagccccatcaacaccagagccagaaccggcaagtgcgagagcctgtgcttccacagcacccccatcatccagagaaagctgctggagagactgcccgaggcccccggcctgagccccctgagcaccgagcccaagacccagaagctgagcaacaagaagggcagcaacaccgacaccctgagaagagtgctgctgacccaggccaagaaccagttcgccgccgtgaacaccccccagaaggagaccagccagatcgacggccccagcctgaacaacacctacggcttcaaggtgagcatccagaacctgcaggaggccaaggccctgcacgagatccagaacctgaccctgatcagcgtggagctgcacgccagaaccagaagagacctggagcccgaccccgagttcgaccccatctgcgccctgttctactgcatcagcagcgacacccccctgcccgacaccgagaagaccgagctgaccggcgtgatcgtgatcgacaaggacaagaccgtgttcagccaggacatcagataccagacccccctgctgatcagaagcggcatcaccggcctggaggtgacctacgccgccgacgagaaggccctgttccacgagatcgccaacatcatcaagagatacgaccccgacatcctgctgggctacgagatccagatgcacagctggggctacctgctgcagagagccgccgccctgagcatcgacctgtgcagaatgatcagcagagtgcccgacgacaagatcgagaacagattcgccgccgagagagacgagtacggcagctacaccatgagcgagatcaacatcgtgggcagaatcaccctgaacctgtggagaatcatgagaaacgaggtggccctgaccaactacaccttcgagaacgtgagcttccacgtgctgcaccagagattccccctgttcaccttcagagtgctgagcgactggttcgacaacaagaccgacctgtacagatggaagatggtggaccactacgtgagcagagtgagaggcaacctgcagatgctggagcagctggacctgatcggcaagaccagcgagatggccagactgttcggcatccagttcctgcacgtgctgaccagaggcagccagtacagagtggagagcatgatgctgagaatcgccaagcccatgaactacatccccgtgacccccagcgtgcagcagagaagccagatgagagccccccagtgcgtgcccctgatcatggagcccgagagcagattctacagcaacagcgtgctggtgctggacttccagagcctgtaccccagcatcgtgatcgcctacaactactgcttcagcacctgcctgggccacgtggagaacctgggcaagtacgacgagttcaagttcggctgcaccagcctgagagtgccccccgacctgctgtaccaggtgagacacgacatcaccgtgagccccaacggcgtggccttcgtgaagcccagcgtgagaaagggcgtgctgcccagaatgctggaggagatcctgaagaccagattcatggtgaagcagagcatgaaggcctacaagcaggacagagccctgagcagaatgctggacgccagacagctgggcctgaagctgatcgccaacgtgaccttcggctacaccagcgccaacttcagcggcagaatgccctgcatcgaggtgggcgacagcatcgtgcacaaggccagagagaccctggagagagccatcaagctggtgaacgacaccaagaagtggggcgccagagtggtgtacggcgacaccgacagcatgttcgtgctgctgaagggcgccaccaaggagcagagcttcaagatcggccaggagatcgccgaggccgtgaccgccaccaaccccaagcccgtgaagctgaagttcgagaaggtgtacctgccctgcgtgctgcagaccaagaagagatacgtgggctacatgtacgagaccctggaccagaaggaccccgtgttcgacgccaagggcatcgagaccgtgagaagagacagctgccccgccgtgagcaagatcctggagagaagcctgaagctgctgttcgagaccagagacatcagcctgatcaagcagtacgtgcagagacagtgcatgaagctgctggagggcaaggccagcatccaggacttcatcttcgccaaggagtacagaggcagcttcagctacaagcccggcgcctgcgtgcccgccctggagctgaccagaaagatgctgacctacgacagaagaagcgagccccaggtgggcgagagagtgccctacgtgatcatctacggcacccccggcgtgcccctgatccagctggtgagaagacccgtggaggtgctgcaggaccccaccctgagactgaacgccacctactacatcaccaagcagatcctgccccccctggccagaatcttcagcctgatcggcatcgacgtgttcagctggtaccacgagctgcccagaatccacaaggccaccagcagcagcagaagcgagcccgagggcagaaagggcaccatcagccagtacttcaccaccctgcactgccccgtgtgcgacgacctgacccagcacggcatctgcagcaagtgcagaagccagccccagcacgtggccgtgatcctgaaccaggagatcagagagctggagagacagcaggagcagctggtgaagatctgcaagaactgcaccggctgcttcgacagacacatcccctgcgtgagcctgaactgccccgtgctgttcaagctgagcagagtgaacagagagctgagcaaggccccctacctgagacagctgctggaccagttctag

SEQ ID NO: 96996 - DNA, 2289 bp, synthetic construct
  misc_feature 1..2289: note = Description of Artificial Sequence: Synthetic coding sequence
  source 1..2289: mol_type = other DNA
atggtggagaccagactggccaacgacctggccgagttcgagggcgacttcagcctggagggcctgagactgtggaagaccgccttcagcgccatgacccagaaccccagacccggcagccccctgagaagcggccagggcgtggtgaacaagggcagcagcaacagccccaagatggtggaggacaagaagatcgtgatcatgccctgcaagtgcgcccccagcagacagctggtgcaggtgtggctgcaggccaaggaggagtacgagagaagcaagaagctgcccaagaccaagcccaccggcgtggtgaagagcgccgagaacttcagcagcagcgtgaaccccgacgacaagcccgtggtgccccccaagatggacgtgagcccctgcatcctgcccaccaccgcccacaccaaggaggacgtggacaacagccagatcgccctgcaggcccccaccaccggctgcagccagaccgccagcgagagccagatgctgccccccgtggccagcgccagcgaccccgagaaggacgaggacgacgacgacaactactacatcagctacagcagccccgacagccccgtgatccccccctggcagcagcccatcagccccgacagcaaggccctgaacggcgacgacagacccagcagccccgtggaggagctgcccagcctggccttcgagaacttcctgaagcccatcaaggacggcatccagaagagcccctgcagcgagccccaggagcccctggtgatcagccccatcaacaccagagccagaaccggcaagtgcgagagcctgtgcttccacagcacccccatcatccagagaaagctgctggagagactgcccgaggcccccggcctgagccccctgagcaccgagcccaagacccagaagctgagcaacaagaagggcagcaacaccgacaccctgagaagagtgctgctgacccaggccaagaaccagttcgccgccgtgaacaccccccagaaggagaccagccagatcgacggccccagcctgaacaacacctacggcttcaaggtgagcatccagaacctgcaggaggccaaggccctgcacgagatccagaacctgaccctgatcagcgtggagctgcacgccagaaccagaagagacctggagcccgaccccgagttcgaccccatctgcgccctgttctactgcatcagcagcgacacccccctgcccgacaccgagaagaccgagctgaccggcgtgatcgtgatcgacaaggacaagaccgtgttcagccaggacatcagataccagacccccctgctgatcagaagcggcatcaccggcctggaggtgacctacgccgccgacgagaaggccctgttccacgagatcgccaacatcatcaagagatacgaccccgacatcctgctgggctacgagatccagatgcacagctggggctacctgctgcagagagccgccgccctgagcatcgacctgtgcagaatgatcagcagagtgcccgacgacaagatcgagaacagattcgccgccgagagagacgagtacggcagctacaccatgagcgagatcaacatcgtgggcagaatcaccctgaacctgtggagaatcatgagaaacgaggtggccctgaccaactacaccttcgagaacgtgagcttccacgtgctgcaccagagattccccctgttcaccttcagagtgctgagcgactggttcgacaacaagaccgacctgtacagatggaagatggtggaccactacgtgagcagagtgagaggcaacctgcagatgctggagcagctggacctgatcggcaagaccagcgagatggccagactgttcggcatccagttcctgcacgtgctgaccagaggcagccagtacagagtggagagcatgatgctgagaatcgccaagcccatgaactacatccccgtgacccccagcgtgcagcagagaagccagatgagagccccccagtgcgtgcccctgatcatggagcccgagagcagattctacagcaacagcgtgctggtgctggacttccagagcctgtaccccagcatcgtgatcgcctacaactactgcttcagcacctgcctgggccacgtggagaacctgggcaagtacgacgagttcaagttcggctgcaccagcctgagagtgccccccgacctgctgtaccaggtgagacacgacatcaccgtgagccccaacggcgtggccttcgtgaagatcgccaacaagtgcagacccgagggcatggcctag

SEQ ID NO: 96997 - DNA, 3666 bp, synthetic construct
  misc_feature 1..3666: note = Description of Artificial Sequence: Synthetic coding sequence
  source 1..3666: mol_type = other DNA
atgctgagaagcaccggcttcttcagagccatcgactgcccctactggagcggcgcccccggcggcccctgcagaagaccctactgccacttcagacacagaggcgccagaggcagcggcgcccccggcgacggcggcgaggccccccccgccgccggcctgggctacgacccctacaaccccgagctgcccaagccccccgcccagagagagaacggcaccctgggcctgggcgaggagcccagacccgacgtgctggagctggagctggtgaaccaggccatcgaggccgtgagaagcgaggtggagctggagcagagaagatacagagagctgctggagaccaccagagagcacagaagcgccgaggcccccgccctggcccccagaggccccaacgccagccccaccgtgggccccgacgaggacgccttccccctggccttcgactacagccccggcagccacggcctgctgagccccgacgccggctaccagcccacccccctggccgcccccgccgagcccggcagcaagtacagcctggccagcctggacagaggccagggcagaggcggcggcggcggcggcgccctggagtacgtgcccaaggccgtgagccagcccagaagacacagcagacccgtgcccagcggcaagtacgtggtggacaacagcagaccccccaccgacctggagtacgaccccctgagcaactacagcgccagacacctgagcagagccagcagcagagacgagagagccgccaagagacccagaggcagcagaggcagcgagccctacacccccgcccccaagaagctgtgcgaccccttcggcagctgcgacgccagattcagcgacagcgaggacgaggccgccaccgtgcccggcaacgagcccaccaccgccagcacccccaaggccagagccgaccccgagatcaaggccaccggccagccccccagcaaggagggcctggaggccgagggcggcggcctgagagagaccaaggagaccgccgtgcagtgcgacgtgggcgacctgcagcccccccccgccaagcccgccagccccgcccaggtgcagagcagccaggacggcggctgccccaaggagggcaagcccaagaagaagaagaccggcgccccccccgcccccagctgcaaggacggcgcccagggcaaggacaagaccaaggacaagggcagaggcagacccgtggagaagcccagagccgacaagaagggcccccaggccagcagccccagaagaaaggccgagagacccgagggcaccaagaagaagcccagcagcgccacccccgtggccaccagcggcaagggcagacccgacagacccgccagaagacccagccccaccagcggcgacagcagacccgccgccggcagaggcccccccagacccctgcagctgcccgacagaaagagcaccaaggcccccagcggcaagctggtggagagaaaggccagaagcctggacgagggcgccagccaggacgcccccaagctgaagaagagagccctgagccacgccgacctgttcggcgacgagagcgaggacgaggccgccggccccggcgtgcccagcgtgtggcccagcgccctgcccagcctgagcagcgacagcgacagcgacagcgacagcagcctgggcttccccgaggcccagggcccccccaagagactgaaggccagccccccccccagccccgcccccagcagcagcagcagcagcagcagcagcaccagcagcgccggcgccgacgtggactacagcgccctggagaaggaggtggacttcgacagcgaccccatggaggagtgcctgagaatcttcaacgagagcaccagcgtgaagaccgaggacagaggcagactggccagacagccccccaaggaggagaagagcgaggagaagggcctgagcggcctgaccaccctgttccccggccagaagagaagaatcagccacctgagcaagcagggccaggaggtggagccccccagaagaggccccgccgtgccccccgccagaccccccaccgcccaggaggtgtgctacctgagagcccagcaggcccagagagccagcgccagcctgctgcaggcccccgccagactggccgagaagagccccagcgtgcacatcagcgcccccggcgagaagagaagaatcgcccacatccccaaccccagactggccgccgcccccaccggcgccaagagaaccctggccgccagcggcagccagagcagcaacggccccgagcccggcggccagcagctgaagaccagaaccctgagcggcatggccagcaagaccaccaccaccatcatccccaagagaatcgcccacagccccagcctgcagagcctgaagaagcccatcatccccaaggagttcggcggcaaggtgcccaccgtgatcagacagagatacctgaacctgttcatcgaggagtgcctgaagttctgcaccagcaaccaggaggccatcgagaaggccctgaacgaggagaaggtggcctacgacagaagccccagcaagaacatctacctgaacgtggccgtgaacaccctgaagaagctgagaggcctggcccccagcgccgtgcccggcctgagcaagaccagcggcagaagagtggtgagccacgaggtggtgctgggcggcagactggccgccaagaccagcttcagcctgagcagacccagcagccccagagtggaggacctgaagggcgccgccctgtacagcagactgagagagtacctgctgacccaggaccagctgaaggagaacggctaccccttcccccaccccgagagacccggcggcgccatcatcttcaccgccgaggagaagagacccaaggacagcagctgcagaacctgctgcagatgcggcaccgagtacctggtgagcagcagcggcagatgcatcagagacgaggagtgctactaccactggggcagactgagaagaaacagagtggccggcggctgggagacccagtacatgtgctgcagcgccgccgccggcagcgtgggctgccaggtggccaagcagcacgtgcaggacggcagaaaggagagactggagggcttcgtgaagaccttcgagaaggagctgagcggcgacacccaccccggcatctacgccctggactgcgagatgagctacaccacctacggcctggagctgaccagagtgaccgtggtggacaccgacgtgcacgtggtgtacgacaccttcgtgaagcccgacaacgagatcgtggactacaacaccagattcagcggcgtgaccgaggccgacctggccgacaccagcgtgaccctgagagacgtgcaggccgtgctgctgagcatgttcagcgccgacaccatcctgatcggccacagcctggagagcgacctgctggccctgaaggtgatccacagcaccgtggtggacaccagcgtgctgttcccccacagactgggcctgccctacaagagaagcctgagaaacctgatggccgactacctgagacagatcatccaggacaacgtggacggccacagcagcagcgaggacgccggcgcctgcatgcacctggtgatctggaaggtgagagaggacgccaagaccaagagatag

SEQ ID NO: 96998 - DNA, 1014 bp, synthetic construct
  misc_feature 1..1014: note = Description of Artificial Sequence: Synthetic coding sequence
  source 1..1014: mol_type = other DNA
atgctgcccagcagcaccagactgggctacgacccctacaaccccgagctgcccaagccccccgcccagagagagaacggcaccctgggcctgggcgaggagcccagacccgacgtgctggagctggagctggtgaaccaggccatcgaggccgtgagaagcgaggtggagctggagcagagaagatacagagagctgctggagaccaccagagagcacagaagcgccgaggcccccgccctggcccccagaggccccaacgccagccccaccgtgggccccgacgaggacgccttccccctggccttcgactacagccccggcagccacggcctgctgagccccgacgccggctaccagcccacccccctggccgcccccgccgagcccggcagcaagtacagcctggccagcctggacagaggccagggcagaggcggcggcggcggcggcgccctggagtacgtgcccaaggccgtgagccagcccagaagacacagcagacccgtgcccagcggcaagtacgtggtggacaacagcagaccccccaccgacctggagtacgaccccctgagcaactacagcgccagacacctgagcagagccagcagcagagacgagagagccgccaagagacccagaggcagcagaggcagcgagccctacacccccgcccccaagaagctgtgcgaccccttcggcagctgcgacgccagattcagcgacagcgaggacgaggccgccaccgtgcccggcaacgagcccaccaccgccagcacccccaaggccagagccgaccccgagatcaaggccaccggccagccccccagcaaggagggcctggaggccgagggcggcggcctgagagagaccaaggagaccgccgtgcagtgcgacgtgggcgacctgcagcccccccccgccaagcccgccagccccgcccaggtgcagagcagccaggacggcggctgccccaaggagggcaagcccaagaagaagaagaccggcgcctag

SEQ ID NO: 96999 - DNA, 1482 bp, synthetic construct
  misc_feature 1..1482: note = Description of Artificial Sequence: Synthetic coding sequence
  source 1..1482: mol_type = other DNA
atgggcagccacagcccctgcgcccacaccccctgcgccccccccgcccccaccggcgccaagagaaccctggccgccagcggcagccagagcagcaacggccccgagcccggcggccagcagctgaagaccagaaccctgagcggcatggccagcaagaccaccaccaccatcatccccaagagaatcgcccacagccccagcctgcagagcctgaagaagcccatcatccccaaggagttcggcggcaaggtgcccaccgtgatcagacagagatacctgaacctgttcatcgaggagtgcctgaagttctgcaccagcaaccaggaggccatcgagaaggccctgaacgaggagaaggtggcctacgacagaagccccagcaagaacatctacctgaacgtggccgtgaacaccctgaagaagctgagaggcctggcccccagcgccgtgcccggcctgagcaagaccagcggcagaagagtggtgagccacgaggtggtgctgggcggcagactggccgccaagaccagcttcagcctgagcagacccagcagccccagagtggaggacctgaagggcgccgccctgtacagcagactgagagagtacctgctgacccaggaccagctgaaggagaacggctaccccttcccccaccccgagagacccggcggcgccatcatcttcaccgccgaggagaagagacccaaggacagcagctgcagaacctgctgcagatgcggcaccgagtacctggtgagcagcagcggcagatgcatcagagacgaggagtgctactaccactggggcagactgagaagaaacagagtggccggcggctgggagacccagtacatgtgctgcagcgccgccgccggcagcgtgggctgccaggtggccaagcagcacgtgcaggacggcagaaaggagagactggagggcttcgtgaagaccttcgagaaggagctgagcggcgacacccaccccggcatctacgccctggactgcgagatgagctacaccacctacggcctggagctgaccagagtgaccgtggtggacaccgacgtgcacgtggtgtacgacaccttcgtgaagcccgacaacgagatcgtggactacaacaccagattcagcggcgtgaccgaggccgacctggccgacaccagcgtgaccctgagagacgtgcaggccgtgctgctgagcatgttcagcgccgacaccatcctgatcggccacagcctggagagcgacctgctggccctgaaggtgatccacagcaccgtggtggacaccagcgtgctgttcccccacagactgggcctgccctacaagagaagcctgagaaacctgatggccgactacctgagacagatcatccaggacaacgtggacggccacagcagcagcgaggacgccggcgcctgcatgcacctggtgatctggaaggtgagagaggacgccaagaccaagagatag

SEQ ID NO: 97000 - DNA, 714 bp, synthetic construct
  misc_feature 1..714: note = Description of Artificial Sequence: Synthetic coding sequence
  source 1..714: mol_type = other DNA
atgctgggcggcagcctgggcagcagactgctgagaggcgtgggcggcagccacggcagattcggcgccagaggcgtgagagagggcggcgccgccatggccgccggcgagagcatggcccagagaatggtgtgggtggacctggagatgaccggcctggacatcgagaaggaccagatcatcgagatggcctgcctgatcaccgacagcgacctgaacatcctggccgagggccccaacctgatcatcaagcagcccgacgagctgctggacagcatgagcgactggtgcaaggagcaccacggcaagagcggcctgaccaaggccgtgaaggagagcaccatcaccctgcagcaggccgagtacgagttcctgagcttcgtgagacagcagaccccccccggcctgtgccccctggccggcaacagcgtgcacgaggacaagaagttcctggacaagtacatgccccagttcatgaagcacctgcactacagaatcatcgacgtgagcaccgtgaaggagctgtgcagaagatggtaccccgaggagtacgagttcgcccccaagaaggccgccagccacagagccctggacgacatcagcgagagcatcaaggagctgcagttctacagaaacaacatcttcaagaagaagatcgacgagaagaagagaaagatcatcgagaacggcgagaacgagaagaccgtgagctag

SEQ ID NO: 97001 - DNA, 753 bp, synthetic construct
  misc_feature 1..753: note = Description of Artificial Sequence: Synthetic coding sequence
  source 1..753: mol_type = other DNA
atgggcaaggccaaggtgcccgccagcaagagagcccccagcagccccgtggccaagcccggccccgtgaagaccctgaccagaaagaagaacaagaagaagaagagattctggaagagcaaggccagagaggtgagcaagaagcccgccagcggccccggcgccgtggtgagaccccccaaggcccccgaggacttcagccagaactggaaggccctgcaggaggtgcccagatggaccggcggcagacagtacctggcccccagacccgtggagcagagcaccatcagaaaggagcccagaaagggccagatggtgatcctgttccagaacgagggcaccagcagcatcagaagcggcaagctgagaagacagccccagccccacccccccagagaggagctggaggtggtgcagaaggaggtggccgagatgctgaagggcagaatcctggtgggccacgccctgcacaacgacctgaaggtgctgttcctggaccaccccaagaagaagatcagagacacccagaagtacaagcccttcaagagccaggtgaagagcggcagacccagcctgagactgctgagcgagaagatcctgggcctgcaggtgcagcaggccgagcactgcagcatccaggacgcccaggccgccatgagactgtacgtgatggtgaagaaggagtgggagagcatggccagagacagaagacccctgctgaccgcccccgaccactgcagcgacgacgcctag

SEQ ID NO: 97002 - DNA, 1269 bp, synthetic construct
  misc_feature 1..1269: note = Description of Artificial Sequence: Synthetic coding sequence
  source 1..1269: mol_type = other DNA
atgggcaaggccaaggtgcccgccagcaagagagcccccagcagccccgtggccaagcccggccccgtgaagaccctgaccagaaagaagaacaagaagaagaagagattctggaagagcaaggccagagaggtgagcaagaagcccgccagcggccccggcgccgtggtgagaccccccaaggcccccgaggacttcagccagaactggaaggccctgcaggagtggctgctgaagcagaagagccaggcccccgagaagcccctggtgatcagccagatgggcagcaagaagaagcccaagatcatccagcagaacaagaaggagaccagcccccaggtgaagggcgaggagatgcccgccggcaaggaccaggaggccagcagaggcagcgtgcccagcggcagcaagatggacagaagagcccccgtgcccagaaccaaggccagcggcaccgagcacaacaagaagggcaccaaggagagaaccaacggcgacatcgtgcccgagagaggcgacatcgagcacaagaagagaaaggccaaggaggccgcccccgccccccccaccgaggaggacatctggttcgacgacgtggaccccgccgacatcgaggccgccatcggccccgaggccgccaagatcgccagaaagcagctgggccagagcgagggcagcgtgagcctgagcctggtgaaggagcaggccttcggcggcctgaccagagccctggccctggactgcgagatggtgggcgtgggccccaagggcgaggagagcatggccgccagagtgagcatcgtgaaccagtacggcaagtgcgtgtacgacaagtacgtgaagcccaccgagcccgtgaccgactacagaaccgccgtgagcggcatcagacccgagaacctgaagcagggcgaggagctggaggtggtgcagaaggaggtggccgagatgctgaagggcagaatcctggtgggccacgccctgcacaacgacctgaaggtgctgttcctggaccaccccaagaagaagatcagagacacccagaagtacaagcccttcaagagccaggtgaagagcggcagacccagcctgagactgctgagcgagaagatcctgggcctgcaggtgcagcaggccgagcactgcagcatccaggacgcccaggccgccatgagactgtacgtgatggtgaagaaggagtgggagagcatggccagagacagaagacccctgctgaccgcccccgaccactgcagcgacgacgcctag

SEQ ID NO: 97003 - DNA, 570 bp, synthetic construct
  misc_feature 1..570: note = Description of Artificial Sequence: Synthetic coding sequence
  source 1..570: mol_type = other DNA
atgggcagcaagaagaagcccaagatcatccagcagaacaagaaggagaccagcccccaggtgaagggcgaggagatgcccgccggcaaggaccaggaggccagcagaggcagcgtgcccagcggcagcaagatggacagaagagcccccgtgcccagaaccaaggccagcggcaccgagcacaacaagaagggcaccaaggagagaaccaacggcgacatcgtgcccgagagaggcgacatcgagcacaagaagagaaaggccaaggaggccgcccccgccccccccaccgaggaggacatctggttcgacgacgtggaccccgccgacatcgaggccgccatcggccccgaggccgccaagatcgccagaaagcagctgggccagagcgagggcagcgtgagcctgagcctggtgaaggagcaggccttcggcggcctgaccagagccctggccctggactgcgagatggtgggcgtgggccccaagggcgaggagagcatggccgccagagtgagcatcgtgaaccagtacggcaagtgcgtgtacgacaagtacgtgaagccctag

SEQ ID NO: 97004 - DNA, 1125 bp, synthetic construct
  misc_feature 1..1125: note = Description of Artificial Sequence: Synthetic coding sequence
  source 1..1125: mol_type = other DNA
cccgtggccaagcccggccccgtgaagaccctgaccagaaagaagaacaagaagaagaagagattctggaagagcaaggccagagaggtgagcaagaagcccgccagcggccccggcgccgtggtgagaccccccaaggcccccgaggacttcagccagaactggaaggccctgcaggagtggctgctgaagcagaagagccaggcccccgagaagcccctggtgatcagccagatgggcagcaagaagaagcccaagatcatccagcagaacaagaaggagaccagcccccaggtgaagggcgaggagatgcccgccggcaaggaccaggaggccagcagaggcagcgtgcccagcggcagcaagatggacagaagagcccccgtgcccagaaccaaggccagcggcaccgagcacaacaagaagggcaccaaggagagaaccaacggcgacatcgtgcccgagagaggcgacatcgagcacaagaagagaaaggccaaggaggccgcccccgccccccccaccgaggaggacatctggttcgacgacgtggaccccgccgacatcgaggccgccatcggccccgaggccgccaagatcgccagaaagcagctgggccagagcgagggcagcgtgagcctgagcctggtgaaggagcaggccttcggcggcctgaccagagccctggccctggactgcgagatggtgggcgtgggccccaagggcgaggagagcatggccgccagagtgagcatcgtgaaccagtacggcaagtgcgtgtacgacaagtacgtgaagcccaccgagcccgtgaccgactacagaaccgccgtgagcggcatcagacccgagaacctgaagcagggcgaggagctggaggtggtgcagaaggaggtggccgagatgctgaagggcagaatcctggtgggccacgccctgcacaacgacctgaagagcggcagacccagcctgagactgctgagcgagaagatcctgggcctgcaggtgcagcaggacagcggctgccccggcagcaacgaggccgtgagacacggcgaggagggcgtgggcgagcacggccccagacaggccccccccgccgactgcagcagacccctgcagtag

SEQ ID NO: 97005 - DNA, 702 bp, synthetic construct
  misc_feature 1..702: note = Description of Artificial Sequence: Synthetic coding sequence
  source 1..702: mol_type = other DNA
atgggcaaggccaaggtgcccgccagcaagagagcccccagcagccccgtggccaagcccggccccgtgaagaccctgaccagaaagaagaacaagaagaagaagagattctggaagagcaaggccagagaggtgagcaagaagcccgccagcggccccggcgccgtggtgagaccccccaaggcccccgaggacttcagccagaactggaaggccctgcaggaggtgcccagatggaccggcggcagacagtacctggcccccagacccgtggagcagagcaccatcagaaaggagcccagaaagggccagatggtgatcctgttccagaacgagggcaccagcagcatcagaagcggcaagctgagaagacagccccagccccacccccccagagaggagctggaggtggtgcagaaggaggtggccgagatgctgaagggcagaatcctggtgggccacgccctgcacaacgacctgaaggtgctgttcctggaccaccccaagaagaagatcagagacacccagaagtacaagcccttcaagagccaggtgaagagcggcagacccagcctgagactgctgagcgagaagatcctgggcctgcaggtgcagcaggccgagcactgcagcatccaggacgcccaggccgccatgagactgtacgtgatggtgaagaaggagtgggagagcatggcctag

SEQ ID NO: 97006 - DNA, 996 bp, synthetic construct
  misc_feature 1..996: note = Description of Artificial Sequence: Synthetic coding sequence
  source 1..996: mol_type = other DNA
atgagcagagccagaggcgccctgtgcagagcctgcctggccctggccgccgccctggccgccctgctgctgctgcccctgcccctgcccagagcccccgcccccgccagaacccccgcccccgcccccagagccccccccagcagacccgccgcccccagcctgagacccgacgacgtgttcatcgccgtgaagaccaccagaaagaaccacggccccagactgagactgctgctgagaacctggatcagcagagccagacagcagaccttcatcttcaccgacggcgacgaccccgagctggagctgcagggcggcgacagagtgatcaacaccaactgcagcgccgtgagaaccagacaggccctgtgctgcaagatgagcgtggagtacgacaagttcatcgagagcggcagaaagtggttctgccacgtggacgacgacaactacgtgaacgccagaagcctgctgcacctgctgagcagcttcagccccagccaggacgtgtacctgggcagacccagcctggaccaccccatcgaggccaccgagagagtgcagggcggcagaaccgtgaccaccgtgaagttctggttcgccaccggcggcgccggcttctgcctgagcagaggcctggccctgaagatgagcccctgggccagcctgggcagcttcatgagcaccgccgagcaggtgagactgcccgacgactgcaccgtgggctacatcgtggagggcctgctgggcgccagactgctgcacagccccctgttccacagccacctggagaacctgcagagactgccccccgacaccctgctgcagcaggtgaccctgagccacggcggccccgagaacccccacaacgtggtgaacgtggccggcggcttcagcctgcaccaggaccccaccagattcaagagcatccactgcctgctgtaccccgacaccgactggtgccccagacagaagcagggcgcccccaccagcagatag

SEQ ID NO: 97007 - DNA, 873 bp, synthetic construct
  misc_feature 1..873: note = Description of Artificial Sequence: Synthetic coding sequence
  source 1..873: mol_type = other DNA
atgagcagagccccccccagcagacccgccgcccccagcctgagacccgacgacgtgttcatcgccgtgaagaccaccagaaagaaccacggccccagactgagactgctgctgagaacctggatcagcagagccagacagcagaccttcatcttcaccgacggcgacgaccccgagctggagctgcagggcggcgacagagtgatcaacaccaactgcagcgccgtgagaaccagacaggccctgtgctgcaagatgagcgtggagtacgacaagttcatcgagagcggcagaaagtggttctgccacgtggacgacgacaactacgtgaacgccagaagcctgctgcacctgctgagcagcttcagccccagccaggacgtgtacctgggcagacccagcctggaccaccccatcgaggccaccgagagagtgcagggcggcagaaccgtgaccaccgtgaagttctggttcgccaccggcggcgccggcttctgcctgagcagaggcctggccctgaagatgagcccctgggccagcctgggcagcttcatgagcaccgccgagcaggtgagactgcccgacgactgcaccgtgggctacatcgtggagggcctgctgggcgccagactgctgcacagccccctgttccacagccacctggagaacctgcagagactgccccccgacaccctgctgcagcaggtgaccctgagccacggcggccccgagaacccccacaacgtggtgaacgtggccggcggcttcagcctgcaccaggaccccaccagattcaagagcatccactgcctgctgtaccccgacaccgactggtgccccagacagaagcagggcgcccccaccagcagatag

SEQ ID NO: 97008 - DNA, 1626 bp, synthetic construct
  misc_feature 1..1626: note = Description of Artificial Sequence: Synthetic coding sequence
  source 1..1626: mol_type = other DNA
atgggcagccaggaggtgctgggccacgccgccagactggccagcagcggcctgctgctgcaggtgctgttcagactgatcaccttcgtgctgaacgccttcatcctgagattcctgagcaaggagatcgtgggcgtggtgaacgtgagactgaccctgctgtacagcaccaccctgttcctggccagagaggccttcagaagagcctgcctgagcggcggcacccagagagactggagccagaccctgaacctgctgtggctgaccgtgcccctgggcgtgttctggagcctgttcctgggctggatctggctgcagctgctggaggtgcccgaccccaacgtggtgccccactacgccaccggcgtggtgctgttcggcctgagcgccgtggtggagctgctgggcgagcccttctgggtgctggcccaggcccacatgttcgtgaagctgaaggtgatcgccgagagcctgagcgtgatcctgaagagcgtgctgaccgccttcctggtgctgtggctgccccactggggcctgtacatcttcagcctggcccagctgttctacaccaccgtgctggtgctgtgctacgtgatctacttcaccaagctgctgggcagccccgagagcaccaagctgcagaccctgcccgtgagcagaatcaccgacctgctgcccaacatcaccagaaacggcgccttcatcaactggaaggaggccaagctgacctggagcttcttcaagcagagcttcctgaagcagatcctgaccgagggcgagagatacgtgatgaccttcctgaacgtgctgaacttcggcgaccagggcgtgtacgacatcgtgaacaacctgggcagcctggtggccagactgatcttccagcccatcgaggagagcttctacatcttcttcgccaaggtgctggagagaggcaaggacgccaccctgcagaagcaggaggacgtggccgtggccgccgccgtgctggagagcctgctgaagctggccctgctggccggcctgaccatcaccgtgttcggcttcgcctacagccagctggccctggacatctacggcggcaccatgctgagcagcggcagcggccccgtgctgctgagaagctactgcctgtacgtgctgctgctggccatcaacggcgtgaccgagtgcttcaccttcgccgccatgagcaaggaggaggtggacagatacaacttcgtgatgctggccctgagcagcagcttcctggtgctgagctacctgctgaccagatggtgcggcagcgtgggcttcatcctggccaactgcttcaacatgggcatcagaatcacccagagcctgtgcttcatccacagatactacagaagaagcccccacagacccctggccggcctgcacctgagccccgtgctgctgggcaccttcgccctgagcggcggcgtgaccgccgtgagcgaggtgttcctgtgctgcgagcagggctggcccgccagactggcccacatcgccgtgggcgccttctgcctgggcgccaccctgggcaccgccttcctgaccgagaccaagctgatccacttcctgagaacccagctgggcgtgcccagaagaaccgacaagatgacctag

SEQ ID NO: 97009 - DNA, 1509 bp, synthetic construct
  misc_feature 1..1509: note = Description of Artificial Sequence: Synthetic coding sequence
  source 1..1509: mol_type = other DNA
atgggcagccaggaggtgctgggccacgccgccagactggccagcagcggcctgctgctgcaggtgctgttcagactgatcaccttcgtgctgaacgccttcatcctgagattcctgagcaaggagatcgtgggcgtggtgaacgtgagagtgcccctgggcgtgttctggagcctgttcctgggctggatctggctgcagctgctggaggtgcccgaccccaacgtggtgccccactacgccaccggcgtggtgctgttcggcctgagcgccgtggtggagctgctgggcgagcccttctgggtgctggcccaggcccacatgttcgtgaagctgaaggtgatcgccgagagcctgagcgtgatcctgaagagcgtgctgaccgccttcctggtgctgtggctgccccactggggcctgtacatcttcagcctggcccagctgttctacaccaccgtgctggtgctgtgctacgtgatctacttcaccaagctgctgggcagccccgagagcaccaagctgcagaccctgcccgtgagcagaatcaccgacctgctgcccaacatcaccagaaacggcgccttcatcaactggaaggaggccaagctgacctggagcttcttcaagcagagcttcctgaagcagatcctgaccgagggcgagagatacgtgatgaccttcctgaacgtgctgaacttcggcgaccagggcgtgtacgacatcgtgaacaacctgggcagcctggtggccagactgatcttccagcccatcgaggagagcttctacatcttcttcgccaaggtgctggagagaggcaaggacgccaccctgcagaagcaggaggacgtggccgtggccgccgccgtgctggagagcctgctgaagctggccctgctggccggcctgaccatcaccgtgttcggcttcgcctacagccagctggccctggacatctacggcggcaccatgctgagcagcggcagcggccccgtgctgctgagaagctactgcctgtacgtgctgctgctggccatcaacggcgtgaccgagtgcttcaccttcgccgccatgagcaaggaggaggtggacagatacaacttcgtgatgctggccctgagcagcagcttcctggtgctgagctacctgctgaccagatggtgcggcagcgtgggcttcatcctggccaactgcttcaacatgggcatcagaatcacccagagcctgtgcttcatccacagatactacagaagaagcccccacagacccctggccggcctgcacctgagccccgtgctgctgggcaccttcgccctgagcggcggcgtgaccgccgtgagcgaggtgttcctgtgctgcgagcagggctggcccgccagactggcccacatcgccgtgggcgccttctgcctgggcgccaccctgggcaccgccttcctgaccgagaccaagctgatccacttcctgagaacccagctgggcgtgcccagaagaaccgacaagatgacctag

SEQ ID NO: 97010 - DNA, 4308 bp, synthetic construct
  misc_feature 1..4308: note = Description of Artificial Sequence: Synthetic coding sequence
  source 1..4308: mol_type = other DNA
atggcccagacccccgacggcatcagctgcgagctgagaggcgagatcaccagattcctgtggcccaaggaggtggagctgctgctgaagacctggctgcccggcgagggcgccgtgcagaaccacgtgctggccctgctgagatggagagcctacctgctgcacaccacctgcctgcccctgagagtggactgcaccttcagctacctggaggtgcaggccatggccctgcaggagacccccccccaggtgaccttcgagctggagagcctgagagagctggtgctggagttccccggcgtggccgccctggagcagctggcccagcacgtggccgccgccatcaagaaggtgttccccagaagcaccctgggcaagctgttcagaagacccacccccgccagcatgctggccagactggagagaagcagccccagcgagagcaccgacccctgcagcccctgcggcggcttcctggagacctacgaggccctgtgcgactacaacggcttccccttcagagaggagatccagtgggacgtggacaccatctaccacagacagggctgcagacacttcagcctgggcgacttcagccacctgggcagcagagacctggccctgagcgtggccgccctgagctacaacctgtggttcagatgcctgagctgcgtggacatgaagctgagcctggaggtgagcgagcagatcctgcacatgatgagccagagcagccacctggaggagctggtgctggagacctgcagcctgagaggcgacttcgtgagaagactggcccaggccctggccggccacagcagcagcggcctgagagagctgagcctggccggcaacctgctggacgacagaggcatgaccgccctgagcagacacctggagagatgccccggcgccctgagaagactgagcctggcccagaccggcctgacccccagaggcatgagagccctgggcagagccctggccaccaacgccgccttcgacagcaccctgacccacctggacctgagcggcaaccccggcgccctgggcgccagcgaggacagcggcggcctgtacagcttcctgagcagacccaacgtgctgagcttcctgaacctggccggcaccgacaccgccctggacaccgtgagaggctgcagcgtgggcggctggatgaccggcagagccgactggagagccggcagaggcggcctgggcccccccgccggcgtggccaacagcctgcccccccagctgttcgccgccgtgagcagaggctgctgcaccagcctgacccacctggacgccagcagaaacgtgttcagcagaaccaagagcagagccgcccccgccgccctgcagctgttcctgagcagagccagaaccctgagacacctgggcctggccggctgcaagctgccccccgacgccctgagagccctgctggacggcctggccctgaacacccacctgagagacctgcacctggacctgagcgcctgcgagctgagaagcgccggcgcccaggtgatccaggacctggtgtgcgacgccggcgccgtgagcagcctggacctggccgacaacggcttcggcagcgacatggtgaccctggtgctggccatcggcagaagcagaagcctgagacacgtggccctgggcagaaacttcaacgtgagatgcaaggagaccctggacgacgtgctgcacagaatcgtgcagctgatgcaggacgacgactgccccctgcagagcctgagcgtggccgagagcagactgaagctgggcgccagcgtgctgctgagagccctggccaccaaccccaacctgaccgccctggacatcagcggcaacgccatgggcgacgccggcgccaagctgctggccaaggccctgagagtgaacagcagactgagaagcgtggtgtgggacagaaaccacaccagcgccctgggcctgctggacgtggcccaggccctggagcagaaccacagcctgaaggccatgcccctgcccctgaacgacgtggcccaggcccagagaagcagacccgagctgaccgccagagccgtgcaccagatccaggcctgcctgctgagaaacaacagagccgaccccgccagcagcgaccacaccaccagactgcagcccctgggcctggtgagcgaccccagcgagcaggaggtgaacgagctgtgccagagcgtgcaggagcacgtggagctgctgggctgcggcgccggcccccagggcgaggccgccgtgagacaggccgaggacgccatccagaacgccaacttcagcctgagcatcctgcccatcctgtacgaggccggcagcagccccagccaccactggcagctgggccagaagctggagggcctgctgagacaggtgggcgaggtgtgcagacaggacatccaggacttcacccaggccaccctggacaccgccagaagcctgtgcccccagatgctgcagggcagcagctggagagagcagctggagggcgtgctggccggcagcagaggcctgcccgagctgctgcccgagcagctgctgcaggacgccttcaccagactgagagacatgagactgagcatcaccggcaccctggccgagagcatcgtggcccaggccctggccggcctgagcgccgccagagaccagctggtggagagcctggcccagcaggccaccgtgaccatgccccccgccctgcccgcccccgacggcggcgagcccagcctgctggagcccggcgagctggagggcctgttcttccccgaggagaaggaggaggagaaggagaaggacgacagccccccccagaagtggcccgagctgagccacggcctgcacctggtgcccttcatccacagcgccgccgaggaggccgagcccgagcccgagctggccgcccccggcgaggacgccgagccccaggccggccccagcgccagaggcagccccagccccgccgcccccggcccccccgccggccccctgcccagaatggacctgcccctggccggccagcccctgagacaccccaccagagccagacccagacccagaagacagcaccaccacagacccccccccggcggcccccaggtgccccccgccctgccccaggagggcaacggcctgagcgccagagtggacgagggcgtggaggagttcttcagcaagagactgatccagcaggacagactgtgggcccccgaggaggaccccgccaccgagggcggcgccacccccgtgcccagaaccctgagaaagaagctgggcaccctgttcgccttcaagaagcccagaagcaccagaggccccagaaccgacctggagaccagccccggcgccgcccccagaaccagaaagaccaccttcggcgacctgctgagaccccccaccagacccagcagaggcgaggagctgggcggcgccgagggcgacaccagcagccccgaccccgccggcagaagcagacccagatacaccagagacagcaaggcctacagcatgatcctgctgcccgccgaggaggaggccaccctgggcgccagacccgacaagagaagacccctggagagaggcgagaccgagctggcccccagcttcgagcagagagtgcaggtgatgctgcagagaatcggcgtgagcagaggcagcggcggcgccgagggcaagagaaagcagagcaaggacggcgagatcaagaaggccggcagcgacggcgacatcatggacagcagcaccgaggccccccccatcagcatcaagagcagaacccacagcgtgagcgccgaccccagctgcagacccggccccggcagccagggccccgagagcgccacctggaagaccctgggccagcagctgaacgccgagctgagaagcagaggctggggccagcaggacggccccggcccccccagccccggccagagccccagcccctgcagaaccagccccagccccgacagcctgggcctgcccgaggacccctgcctgggccccagaaacgaggacggccagctgagacccagacccctgagcgccggcagaagagccgtgagcgtgcacgaggaccagctgcaggcccccgccgagagacccctgagactgcagagaagccccgtgctgaagagaagacccaagctggaggccccccccagccccagcctgggcagcggcctgggcaccgagcccctgcccccccagcccaccgagcccagcagccccgagagaagcccccccagccccgccaccgaccagagaggcggcggccccaacccctag

SEQ ID NO: 97011 - DNA, 1335 bp, synthetic construct
  misc_feature 1..1335: note = Description of Artificial Sequence: Synthetic coding sequence
  source 1..1335: mol_type = other DNA
atgccccccgccctgcccgcccccgacggcggcgagcccagcctgctggagcccggcgagctggagggcctgttcttccccgaggagaaggaggaggagaaggagaaggacgacagccccccccagaagtggcccgagctgagccacggcctgcacctggtgcccttcatccacagcgccgccgaggaggccgagcccgagcccgagctggccgcccccggcgaggacgccgagccccaggccggccccagcgccagaggcagccccagccccgccgcccccggcccccccgccggccccctgcccagaatggacctgcccctggccggccagcccctgagacaccccaccagagccagacccagacccagaagacagcaccaccacagacccccccccggcggcccccaggtgccccccgccctgccccaggagggcaacggcctgagcgccagagtggacgagggcgtggaggagttcttcagcaagagactgatccagcaggacagactgtgggcccccgaggaggaccccgccaccgagggcggcgccacccccgtgcccagaaccctgagaaagaagctgggcaccctgttcgccttcaagaagcccagaagcaccagaggccccagaaccgacctggagaccagccccggcgccgcccccagaaccagaaagaccaccttcggcgacctgctgagaccccccaccagacccagcagaggcgaggagctgggcggcgccgagggcgacaccagcagccccgaccccgccggcagaagcagacccagatacaccagagacagcaaggcctacagcatgatcctgctgcccgccgaggaggaggccaccctgggcgccagacccgacaagagaagacccctggagagaggcgagaccgagctggcccccagcttcgagcagagagtgcaggtgatgctgcagagaatcggcgtgagcagaggcagcggcggcgccgagggcaagagaaagcagagcaaggacggcgagatcaagaaggccggcagcgacggcgacatcatggacagcagcaccgaggccccccccatcagcatcaagagcagaacccacagcgtgagcgccgaccccagctgcagacccggccccggcagccagggccccgagagcgccacctggaagaccctgggccagcagctgaacgccgagctgagaagcagaggctggggccagcaggacggccccggcccccccagccccggccagagccccagcccctgcagaacccccccccagaccgcctgggccagccagagaaccctggcctgggcccccgagatgaagaacggcccctag

SEQ ID NO: 97012 - DNA, 4119 bp, synthetic construct
  misc_feature 1..4119: note = Description of Artificial Sequence: Synthetic coding sequence
  source 1..4119: mol_type = other DNA
atggcccagacccccgacggcatcagctgcgagctgagaggcgagatcaccagattcctgtggcccaaggaggtggagctgctgctgaagacctggctgcccggcgagggcgccgtgcagaaccacgtgctggccctgctgagatggagagcctacctgctgcacaccacctgcctgcccctgagagtggactgcaccttcagctacctggaggtgcaggccatggccctgcaggagacccccccccaggtgaccttcgagctggagagcctgagagagctggtgctggagttccccggcgtggccgccctggagcagctggcccagcacgtggccgccgccatcaagaaggtgttccccagaagcaccctgggcaagctgttcagaagacccacccccgccagcatgctggccagactggagagaagcagccccagcgagagcaccgacccctgcagcccctgcggcggcttcctggagacctacgaggccctgtgcgactacaacggcttccccttcagagaggagatccagtgggacgtggacaccatctaccacagacagggctgcagacacttcagcctgggcgacttcagccacctgggcagcagagacctggccctgagcgtggccgccctgagctacaacctgtggttcagatgcctgagctgcgtggacatgaagctgagcctggaggtgagcgagcagatcctgcacatgatgagccagagcagccacctggaggagctggtgctggagacctgcagcctgagaggcgacttcgtgagaagactggcccaggccctggccggccacagcagcagcggcctgagagagctgagcctggccggcaacctgctggacgacagaggcatgaccgccctgagcagacacctggagagatgccccggcgccctgagaagactgagcctggcccagaccggcctgacccccagaggcatgagagccctgggcagagccctggccaccaacgccgccttcgacagcaccctgacccacctggacctgagcggcaaccccggcgccctgggcgccagcgaggacagcggcggcctgtacagcttcctgagcagacccaacgtgctgagcttcctgaacctggccggcaccgacaccgccctggacaccctgttcgccgccgtgagcagaggctgctgcaccagcctgacccacctggacgccagcagaaacgtgttcagcagaaccaagagcagagccgcccccgccgccctgcagctgttcctgagcagagccagaaccctgagacacctgggcctggccggctgcaagctgccccccgacgccctgagagccctgctggacggcctggccctgaacacccacctgagagacctgcacctggacctgagcgcctgcgagctgagaagcgccggcgcccaggtgatccaggacctggtgtgcgacgccggcgccgtgagcagcctggacctggccgacaacggcttcggcagcgacatggtgaccctggtgctggccatcggcagaagcagaagcctgagacacgtggccctgggcagaaacttcaacgtgagatgcaaggagaccctggacgacgtgctgcacagaatcgtgcagctgatgcaggacgacgactgccccctgcagagcctgagcgtggccgagagcagactgaagctgggcgccagcgtgctgctgagagccctggccaccaaccccaacctgaccgccctggacatcagcggcaacgccatgggcgacgccggcgccaagctgctggccaaggccctgagagtgaacagcagactgagaagcgtggtgtgggacagaaaccacaccagcgccctgggcctgctggacgtggcccaggccctggagcagaaccacagcctgaaggccatgcccctgcccctgaacgacgtggcccaggcccagagaagcagacccgagctgaccgccagagccgtgcaccagatccaggcctgcctgctgagaaacaacagagccgaccccgccagcagcgaccacaccaccagactgcagcccctgggcctggtgagcgaccccagcgagcaggaggtgaacgagctgtgccagagcgtgcaggagcacgtggagctgctgggctgcggcgccggcccccagggcgaggccgccgtgagacaggccgaggacgccatccagaacgccaacttcagcctgagcatcctgcccatcctgtacgaggccggcagcagccccagccaccactggcagctgggccagaagctggagggcctgctgagacaggtgggcgaggtgtgcagacaggacatccaggacttcacccaggccaccctggacaccgccagaagcctgtgcccccagatgctgcagggcagcagctggagagagcagctggagggcgtgctggccggcagcagaggcctgcccgagctgctgcccgagcagctgctgcaggacgccttcaccagactgagagacatgagactgagcatcaccggcaccctggccgagagcatcgtggcccaggccctggccggcctgagcgccgccagagaccagctggtggagagcctggcccagcaggccaccgtgaccatgccccccgccctgcccgcccccgacggcggcgagcccagcctgctggagcccggcgagctggagggcctgttcttccccgaggagaaggaggaggagaaggagaaggacgacagccccccccagaagtggcccgagctgagccacggcctgcacctggtgcccttcatccacagcgccgccgaggaggccgagcccgagcccgagctggccgcccccggcgaggacgccgagccccaggccggccccagcgccagaggcagccccagccccgccgcccccggcccccccgccggccccctgcccagaatggacctgcccctggccggccagcccctgagacaccccaccagagccagacccagacccagaagacagcaccaccacagacccccccccggcggcccccaggtgccccccgccctgccccaggagggcaacggcctgagcgccagagtggacgagggcgtggaggagttcttcagcaagagactgatccagcaggacagactgtgggcccccgaggaggaccccgccaccgagggcggcgccacccccgtgcccagaaccctgagaaagaagctgggcaccctgttcgccttcaagaagcccagaagcaccagaggccccagaaccgacctggagaccagccccggcgccgcccccagaaccagaaagaccaccttcggcgacctgctgagaccccccaccagacccagcagaggcgaggagctgggcggcgccgagggcgacaccagcagccccgaccccgccggcagaagcagacccagatacaccagagacagcaaggcctacagcatgatcctgctgcccgccgaggaggaggccaccctgggcgccagacccgacaagagaagacccctggagagaggcgagaccgagctggcccccagcttcgagcagagagtgcaggtgatgctgcagagaatcggcgtgagcagaggcagcggcggcgccgagggcaagagaaagcagagcaaggacggcgagatcaagaaggccggcagcgacggcgacatcatggacagcagcaccgaggccccccccatcagcatcaagagcagaacccacagcgtgagcgccgaccccagctgcagacccggccccggcagccagggccccgagagcgccacctggaagaccctgggccagcagctgaacgccgagctgagaagcagaggctggggccagcaggacggccccggcccccccagccccggccagagccccagcccctgcagaaccagccccagccccgacagcctgggcctgcccgaggacccctgcctgggccccagaaacgaggagagacccctgagactgcagagaagccccgtgctgaagagaagacccaagctggaggccccccccagccccagcctgggcagcggcctgggcaccgagcccctgcccccccagcccaccgagcccagcagccccgagagaagcccccccagccccgccaccgaccagagaggcggcggccccaacccctag

SEQ ID NO: 97013 - DNA, 1305 bp, synthetic construct
  misc_feature 1..1305: note = Description of Artificial Sequence: Synthetic coding sequence
  source 1..1305: mol_type = other DNA
atgggcatgggcagaggcgccggcagaagcgccctgggcttctggcccaccctggccttcctgctgtgcagcttccccgccgccaccagcccctgcaagatcctgaagtgcaacagcgagttctggagcgccaccagcggcagccacgcccccgccagcgacgacacccccgagttctgcgccgccctgagaagctacgccctgtgcaccagaagaaccgccagaacctgcagaggcgacctggcctaccacagcgccgtgcacggcatcgaggacctgatgagccagcacaactgcagcaaggacggccccaccagccagcccagactgagaaccctgccccccgccggcgacagccaggagagaagcgacagccccgagatctgccactacgagaagagcttccacaagcacagcgccacccccaactacacccactgcggcctgttcggcgacccccacctgagaaccttcaccgacagattccagacctgcaaggtgcagggcgcctggcccctgatcgacaacaactacctgaacgtgcaggtgaccaacacccccgtgctgcccggcagcgccgccaccgccaccagcaagctgaccatcatcttcaagaacttccaggagtgcgtggaccagaaggtgtaccaggccgagatggacgagctgcccgccgccttcgtggacggcagcaagaacggcggcgacaagcacggcgccaacagcctgaagatcaccgagaaggtgagcggccagcacgtggagatccaggccaagtacatcggcaccaccatcgtggtgagacaggtgggcagatacctgaccttcgccgtgagaatgcccgaggaggtggtgaacgccgtggaggactgggacagccagggcctgtacctgtgcctgagaggctgccccctgaaccagcagatcgacttccaggccttccacaccaacgccgagggcaccggcgccagaagactggccgccgccagccccgcccccaccgcccccgagaccttcccctacgagaccgccgtggccaagtgcaaggagaagctgcccgtggaggacctgtactaccaggcctgcgtgttcgacctgctgaccaccggcgacgtgaacttcaccctggccgcctactacgccctggaggacgtgaagatgctgcacagcaacaaggacaagctgcacctgtacgacagaaccagagacctgcccggcagagccgccgccggcctgcccctggcccccagacccctgctgggcgccctggtgcccctgctggccctgctgcccgtgttctgctag

SEQ ID NO: 97014 - DNA, 1353 bp, synthetic construct
  misc_feature 1..1353: note = Description of Artificial Sequence: Synthetic coding sequence
  source 1..1353: mol_type = other DNA
atgcagccccccagagagagactggtggtgaccggcagagccggctggatgggcatgggcagaggcgccggcagaagcgccctgggcttctggcccaccctggccttcctgctgtgcagcttccccgccgccaccagcccctgcaagatcctgaagtgcaacagcgagttctggagcgccaccagcggcagccacgcccccgccagcgacgacacccccgagttctgcgccgccctgagaagctacgccctgtgcaccagaagaaccgccagaacctgcagaggcgacctggcctaccacagcgccgtgcacggcatcgaggacctgatgagccagcacaactgcagcaaggacggccccaccagccagcccagactgagaaccctgccccccgccggcgacagccaggagagaagcgacagccccgagatctgccactacgagaagagcttccacaagcacagcgccacccccaactacacccactgcggcctgttcggcgacccccacctgagaaccttcaccgacagattccagacctgcaaggtgcagggcgcctggcccctgatcgacaacaactacctgaacgtgcaggtgaccaacacccccgtgctgcccggcagcgccgccaccgccaccagcaagctgaccatcatcttcaagaacttccaggagtgcgtggaccagaaggtgtaccaggccgagatggacgagctgcccgccgccttcgtggacggcagcaagaacggcggcgacaagcacggcgccaacagcctgaagatcaccgagaaggtgagcggccagcacgtggagatccaggccaagtacatcggcaccaccatcgtggtgagacaggtgggcagatacctgaccttcgccgtgagaatgcccgaggaggtggtgaacgccgtggaggactgggacagccagggcctgtacctgtgcctgagaggctgccccctgaaccagcagatcgacttccaggccttccacaccaacgccgagggcaccggcgccagaagactggccgccgccagccccgcccccaccgcccccgagaccttcccctacgagaccgccgtggccaagtgcaaggagaagctgcccgtggaggacctgtactaccaggcctgcgtgttcgacctgctgaccaccggcgacgtgaacttcaccctggccgcctactacgccctggaggacgtgaagatgctgcacagcaacaaggacaagctgcacctgtacgacagaaccagagacctgcccggcagagccgccgccggcctgcccctggcccccagacccctgctgggcgccctggtgcccctgctggccctgctgcccgtgttctgctag

SEQ ID NO: 97015 - DNA, 1305 bp, synthetic construct; identical to SEQ ID NO: 97013
  misc_feature 1..1305: note = Description of Artificial Sequence: Synthetic coding sequence
  source 1..1305: mol_type = other DNA

SEQ ID NO: 97016 - DNA, 1026 bp, synthetic construct
  misc_feature 1..1026: note = Description of Artificial Sequence: Synthetic coding sequence
  source 1..1026: mol_type = other DNA
atgagccagcacaactgcagcaaggacggccccaccagccagcccagactgagaaccctgccccccgccggcgacagccaggagagaagcgacagccccgagatctgccactacgagaagagcttccacaagcacagcgccacccccaactacacccactgcggcctgttcggcgacccccacctgagaaccttcaccgacagattccagacctgcaaggtgcagggcgcctggcccctgatcgacaacaactacctgaacgtgcaggtgaccaacacccccgtgctgcccggcagcgccgccaccgccaccagcaagctgaccatcatcttcaagaacttccaggagtgcgtggaccagaaggtgtaccaggccgagatggacgagctgcccgccgccttcgtggacggcagcaagaacggcggcgacaagcacggcgccaacagcctgaagatcaccgagaaggtgagcggccagcacgtggagatccaggccaagtacatcggcaccaccatcgtggtgagacaggtgggcagatacctgaccttcgccgtgagaatgcccgaggaggtggtgaacgccgtggaggactgggacagccagggcctgtacctgtgcctgagaggctgccccctgaaccagcagatcgacttccaggccttccacaccaacgccgagggcaccggcgccagaagactggccgccgccagccccgcccccaccgcccccgagaccttcccctacgagaccgccgtggccaagtgcaaggagaagctgcccgtggaggacctgtactaccaggcctgcgtgttcgacctgctgaccaccggcgacgtgaacttcaccctggccgcctactacgccctggaggacgtgaagatgctgcacagcaacaaggacaagctgcacctgtacgacagaaccagagacctgcccggcagagccgccgccggcctgcccctggcccccagacccctgctgggcgccctggtgcccctgctggccctgctgcccgtgttctgctag

SEQ ID NO: 97017 - DNA, 1305 bp, synthetic construct; identical to SEQ ID NO: 97013
  misc_feature 1..1305: note = Description of Artificial Sequence: Synthetic coding sequence
  source 1..1305: mol_type = other DNA

SEQ ID NO: 97018 - DNA, 1377 bp, synthetic construct
  misc_feature 1..1377: note = Description of Artificial Sequence: Synthetic coding sequence
  source 1..1377: mol_type = other DNA
atgggcggcctgggccccagaagagccggcaccagcagagagagactggtggtgaccggcagagccggctggatgggcatgggcagaggcgccggcagaagcgccctgggcttctggcccaccctggccttcctgctgtgcagcttccccgccgccaccagcccctgcaagatcctgaagtgcaacagcgagttctggagcgccaccagcggcagccacgcccccgccagcgacgacacccccgagttctgcgccgccctgagaagctacgccctgtgcaccagaagaaccgccagaacctgcagaggcgacctggcctaccacagcgccgtgcacggcatcgaggacctgatgagccagcacaactgcagcaaggacggccccaccagccagcccagactgagaaccctgccccccgccggcgacagccaggagagaagcgacagccccgagatctgccactacgagaagagcttccacaagcacagcgccacccccaactacacccactgcggcctgttcggcgacccccacctgagaaccttcaccgacagattccagacctgcaaggtgcagggcgcctggcccctgatcgacaacaactacctgaacgtgcaggtgaccaacacccccgtgctgcccggcagcgccgccaccgccaccagcaagctgaccatcatcttcaagaacttccaggagtgcgtggaccagaaggtgtaccaggccgagatggacgagctgcccgccgccttcgtggacggcagcaagaacggcggcgacaagcacggcgccaacagcctgaagatcaccgagaaggtgagcggccagcacgtggagatccaggccaagtacatcggcaccaccatcgtggtgagacaggtgggcagatacctgaccttcgccgtgagaatgcccgaggaggtggtgaacgccgtggaggactgggacagccagggcctgtacctgtgcctgagaggctgccccctgaaccagcagatcgacttccaggccttccacaccaacgccgagggcaccggcgccagaagactggccgccgccagccccgcccccaccgcccccgagaccttcccctacgagaccgccgtggccaagtgcaaggagaagctgcccgtggaggacctgtactaccaggcctgcgtgttcgacctgctgaccaccggcgacgtgaacttcaccctggccgcctactacgccctggaggacgtgaagatgctgcacagcaacaaggacaagctgcacctgtacgacagaaccagagacctgcccggcagagccgccgccggcctgcccctggcccccagacccctgctgggcgccctggtgcccctgctggccctgctgcccgtgttctgctag

SEQ ID NO: 97019 - DNA, 1437 bp, synthetic construct
  misc_feature 1..1437: note = Description of Artificial Sequence: Synthetic coding sequence
  source 1..1437: mol_type = other DNA
atgatcagaaagaagagaaagagaagcgccccccccggcccctgcagaagccacggccccagacccgccaccgcccccgcccccccccccagccccgagcccaccagacccgcctggaccggcatgggcctgagagccgcccccagcagcgccgccgccgccgccgccgaggtggagcagagaagaagccccggcctgtgccccccccccctggagctgctgctgctgctgctgttcagcctgggcctgctgcacgccggcgactgccagcagcccgcccagtgcagaatccagaagtgcaccaccgacttcgtgagcctgaccagccacctgaacagcgccgtggacggcttcgacagcgagttctgcaaggccctgagagcctacgccggctgcacccagagaaccagcaaggcctgcagaggcaacctggtgtaccacagcgccgtgctgggcatcagcgacctgatgagccagagaaactgcagcaaggacggccccaccagcagcaccaaccccgaggtgacccacgacccctgcaactaccacagccacgccggcgccagagagcacagaagaggcgaccagaacccccccagctacctgttctgcggcctgttcggcgacccccacctgagaaccttcaaggacaacttccagacctgcaaggtggagggcgcctggcccctgatcgacaacaactacctgagcgtgcaggtgaccaacgtgcccgtggtgcccggcagcagcgccaccgccaccaacaagatcaccatcatcttcaaggcccaccacgagtgcaccgaccagaaggtgtaccaggccgtgaccgacgacctgcccgccgccttcgtggacggcaccaccagcggcggcgacagcgacgccaagagcctgagaatcgtggagagagagagcggccactacgtggagatgcacgccagatacatcggcaccaccgtgttcgtgagacaggtgggcagatacctgaccctggccatcagaatgcccgaggacctggccatgagctacgaggagagccaggacctgcagctgtgcgtgaacggctgccccctgagcgagagaatcgacgacggccagggccaggtgagcgccatcctgggccacagcctgcccagaaccagcctggtgcaggcctggcccggctacaccctggagaccgccaacacccagtgccacgagaagatgcccgtgaaggacatctacttccagagctgcgtgttcgacctgctgaccaccggcgacgccaacttcaccgccgccgcccacagcgccctggaggacgtggaggccctgcaccccagaaaggagagatggcacatcttccccagcagcggcaacggcacccccagaggcggcagcgacctgagcgtgagcctgggcctgacctgcctgatcctgatcgtgttcctgtag

SEQ ID NO: 97020 - DNA, 1314 bp, synthetic construct
  misc_feature 1..1314: note = Description of Artificial Sequence: Synthetic coding sequence
  source 1..1314: mol_type = other DNA
atgggcctgagagccgcccccagcagcgccgccgccgccgccgccgaggtggagcagagaagaagccccggcctgtgccccccccccctggagctgctgctgctgctgctgttcagcctgggcctgctgcacgccggcgactgccagcagcccgcccagtgcagaatccagaagtgcaccaccgacttcgtgagcctgaccagccacctgaacagcgccgtggacggcttcgacagcgagttctgcaaggccctgagagcctacgccggctgcacccagagaaccagcaaggcctgcagaggcaacctggtgtaccacagcgccgtgctgggcatcagcgacctgatgagccagagaaactgcagcaaggacggccccaccagcagcaccaaccccgaggtgacccacgacccctgcaactaccacagccacgccggcgccagagagcacagaagaggcgaccagaacccccccagctacctgttctgcggcctgttcggcgacccccacctgagaaccttcaaggacaacttccagacctgcaaggtggagggcgcctggcccctgatcgacaacaactacctgagcgtgcaggtgaccaacgtgcccgtggtgcccggcagcagcgccaccgccaccaacaagatcaccatcatcttcaaggcccaccacgagtgcaccgaccagaaggtgtaccaggccgtgaccgacgacctgcccgccgccttcgtggacggcaccaccagcggcggcgacagcgacgccaagagcctgagaatcgtggagagagagagcggccactacgtggagatgcacgccagatacatcggcaccaccgtgttcgtgagacaggtgggcagatacctgaccctggccatcagaatgcccgaggacctggccatgagctacgaggagagccaggacctgcagctgtgcgtgaacggctgccccctgagcgagagaatcgacgacggccagggccaggtgagcgccatcctgggccacagcctgcccagaaccagcctggtgcaggcctggcccggctacaccctggagaccgccaacacccagtgccacgagaagatgcccgtgaaggacatctacttccagagctgcgtgttcgacctgctgaccaccggcgacgccaacttcaccgccgccgcccacagcgccctggaggacgtggaggccctgcaccccagaaaggagagatggcacatcttccccagcagcggcaacggcacccccagaggcggcagcgacctgagcgtgagcctgggcctgacctgcctgatcctgatcgtgttcctgtag

SEQ ID NO: 97021 - DNA, 1176 bp, synthetic construct
  misc_feature 1..1176: note = Description of Artificial Sequence: Synthetic coding sequence
  source 1..1176: mol_type = other DNA
atgatcgaggtggtggccgagctgagcagaggccccgtgttcctggccggcgaggccctggagtgcgtggtgaccgtgaccaaccccctgccccccaccgccaccagcgccagcagcgaggccctggcctgggccagcgcccagatccactgccagttccacgccagcgagagcagagtggccctgcccccccccgacagcagccagcccgacgtgcagcccgacagccagaccgtgttcctgccccacagaggcgagagaggccagtgcatcctgagcaccccccccaagatcctgttctgcgacctgagactggaccccggcgagagcaagagctacagctacagcgaggtgctgcccatcgagggcccccccagcttcagaggccagagcgtgaagtacgtgtacaagctgaccatcggctgccagagagtgaacagccccatcaccctgctgagagtgcccctgagagtgctggtgctgaccggcctgcaggacgtgagattcccccaggacgaggccgtggcccccagcagccccttcctggaggaggacgagggcggcaagaaggacagctggctggccgagctggccggcgagagactgatggccgccaccagctgcagaagcctgcacctgtacaacatcagcgacggcagaggcaaggtgggcaccttcggcatcttcaagagcgtgtacagactgggcgaggacgtggtgggcaccctgaacctgggcgagggcaccgtggcctgcctgcagttcagcgtgagcctgcagaccgaggagagagtgcagcccgagtaccagagaagaagaggcgccggcggcgtgcccagcgtgagccacgtgacccacgccagacaccaggagagctgcctgcacaccaccagaaccagcttcagcctgcccatccccctgagcagcacccccggcttctgcaccgccatcgtgagcctgaagtggagactgcacttcgagttcgtgaccagcagagagcccggcctggtgctgctgccccccgtggagcagcccgagcccaccacctggaccggccccgagcaggtgcccgtggacaccttcagctgggacctgcccatcaaggtgctgcccaccagccccaccctggccagctacgccgcccccggccccagcaccagcaccatcaccatctag

SEQ ID NO: 97022 - DNA, 1296 bp, synthetic construct
  misc_feature 1..1296: note = Description of Artificial Sequence: Synthetic coding sequence
  source 1..1296: mol_type = other DNA
atgaccagagccctgagcggcctggcctgcagagccctgcccgccggcagagacagcgccgagggcctgggcgtgcccatccccagcgtggactacgccagaagcgacagcggcgccgccatgatcgaggtggtggccgagctgagcagaggccccgtgttcctggccggcgaggccctggagtgcgtggtgaccgtgaccaaccccctgccccccaccgccaccagcgccagcagcgaggccctggcctgggccagcgcccagatccactgccagttccacgccagcgagagcagagtggccctgcccccccccgacagcagccagcccgacgtgcagcccgacagccagaccgtgttcctgccccacagaggcgagagaggccagtgcatcctgagcaccccccccaagatcctgttctgcgacctgagactggaccccggcgagagcaagagctacagctacagcgaggtgctgcccatcgagggcccccccagcttcagaggccagagcgtgaagtacgtgtacaagctgaccatcggctgccagagagtgaacagccccatcaccctgctgagagtgcccctgagagtgctggtgctgaccggcctgcaggacgtgagattcccccaggacgaggccgtggcccccagcagccccttcctggaggaggacgagggcggcaagaaggacagctggctggccgagctggccggcgagagactgatggccgccaccagctgcagaagcctgcacctgtacaacatcagcgacggcagaggcaaggtgggcaccttcggcatcttcaagagcgtgtacagactgggcgaggacgtggtgggcaccctgaacctgggcgagggcaccgtggcctgcctgcagttcagcgtgagcctgcagaccgaggagagagtgcagcccgagtaccagagaagaagaggcgccggcggcgtgcccagcgtgagccacgtgacccacgccagacaccaggagagctgcctgcacaccaccagaaccagcttcagcctgcccatccccctgagcagcacccccggcttctgcaccgccatcgtgagcctgaagtggagactgcacttcgagttcgtgaccagcagagagcccggcctggtgctgctgccccccgtggagcagcccgagcccaccacctggaccggccccgagcaggtgcccgtggacaccttcagctgggacctgcccatcaaggtgctgcccaccagccccaccctggccagctacgccgcccccggccccagcaccagcaccatcaccatctag

SEQ ID NO: 97023 - DNA, 1119 bp, synthetic construct
  misc_feature 1..1119: note = Description of Artificial Sequence: Synthetic coding sequence
  source 1..1119: mol_type = other DNA
atgagcagcaagtaccccagaagcgtgagaagatgcctgcccctgtgcgccctgaccctggaggccgccctgatcctgctgttctacttcttcacccactacgacgccagcctggaggaccagaagggcctggtggccagctaccaggtgggccaggacctgaccgtgatggccgccctgggcctgggcttcctgaccagcaacttcagaagacacagctggagcagcgtggccttcaacctgttcatgctggccctgggcgtgcagtgggccatcctgctggacggcttcctgagccagttcccccccggcaaggtggtgatcaccctgttcagcatcagactggccaccatgagcgccatgagcgtgctgatcagcgccggcgccgtgctgggcaaggtgaacctggcccagctggtggtgatggtgctggtggaggtgaccgccctgggcaccctgagaatggtgatcagcaacatcttcaacaccgactaccacatgaacctgagacacttctacgtgttcgccgcctacttcggcctgaccgtggcctggtgcctgcccaagcccctgcccaagggcaccgaggacaacgaccagagagccaccatccccagcctgagcgccatgctgggcgccctgttcctgtggatgttctggcccagcgtgaacagcgccctgctgagaagccccatccagagaaagaacgccatgttcaacacctactacgccctggccgtgagcgtggtgaccgccatcagcggcagcagcctggcccacccccagagaaagatcagcatgacctacgtgcacagcgccgtgctggccggcggcgtggccgtgggcaccagctgccacctgatccccagcccctggctggccatggtgctgggcctggtggccggcctgatcagcatcggcggcgccaagtgcctgcccgtgtgctgcaacagagtgctgggcatccaccacatcagcgtgatgcacagcatcttcagcctgctgggcctgctgggcgagatcacctacatcgtgctgctggtgctgcacaccgtgtggaacggcaacggcatgttcgcccccaagagccagaacatggagagcaccagctgcggctag

SEQ ID NO: 97024 - DNA, 1254 bp, synthetic construct
  misc_feature 1..1254: note = Description of Artificial Sequence: Synthetic coding sequence
  source 1..1254: mol_type = other DNA
atgagcagcaagtaccccagaagcgtgagaagatgcctgcccctgtgcgccctgaccctggaggccgccctgatcctgctgttctacttcttcacccactacgacgccagcctggaggaccagaagggcctggtggccagctaccaggtgggccaggacctgaccgtgatggccgccctgggcctgggcttcctgaccagcaacttcagaagacacagctggagcagcgtggccttcaacctgttcatgctggccctgggcgtgcagtgggccatcctgctggacggcttcctgagccagttcccccccggcaaggtggtgatcaccctgttcagcatcagactggccaccatgagcgccatgagcgtgctgatcagcgccggcgccgtgctgggcaaggtgaacctggcccagctggtggtgatggtgctggtggaggtgaccgccctgggcaccctgagaatggtgatcagcaacatcttcaacaccgactaccacatgaacctgagacacttctacgtgttcgccgcctacttcggcctgaccgtggcctggtgcctgcccaagcccctgcccaagggcaccgaggacaacgaccagagagccaccatccccagcctgagcgccatgctgggcgccctgttcctgtggatgttctggcccagcgtgaacagcgccctgctgagaagccccatccagagaaagaacgccatgttcaacacctactacgccctggccgtgagcgtggtgaccgccatcagcggcagcagcctggcccacccccagagaaagatcagcatgacctacgtgcacagcgccgtgctggccggcggcgtggccgtgggcaccagctgccacctgatccccagcccctggctggccatggtgctgggcctggtggccggcctgatcagcatcggcggcgccaagtgcctgcccgtgtgctgcaacagagtgctgggcatccaccacatcagcgtgatgcacagcatcttcagcctgctgggcctgctgggcgagatcacctacatcgtgctgctggtgctgcacaccgtgtggaacggcaacggcatgatcggcttccaggtgctgctgagcatcggcgagctgagcctggccatcgtgatcgccctgaccagcggcctgctgaccggcctgctgctgaacctgaagatctggaaggccccccacgtggccaagtacttcgacgaccaggtgttctggaagttcccccacctggccgtgggcttctag

SEQ ID NO: 97025 - DNA, 804 bp, synthetic construct
  misc_feature 1..804: note = Description of Artificial Sequence: Synthetic coding sequence
  source 1..804: mol_type = other DNA
atgagcagcaagtaccccagaagcgtgagaagatgcctgcccctgtgcgccctgaccctggaggccgccctgatcctgctgttctacttcttcacccactacgacgccagcctggaggaccagaagggcctggtggccagctaccaggtgggccaggacctgaccgtgatggccgccctgggcctgggcttcctgaccagcaacttcagaagacacagctggagcagcgtggccttcaacctgttcatgctggccctgggcgtgcagtgggccatcctgctggacggcttcctgagccagttcccccccggcaaggtggtgatcaccctgttcagcatcagactggccaccatgagcgccatgagcgtgctgatcagcgccggcgccgtgctgggcaaggtgaacctggcccagctggtggtgatggtgctggtggaggtgaccgccctgggcaccctgagaatggtgatcagcaacatcttcaacacctacgtgcacagcgccgtgctggccggcggcgtggccgtgggcaccagctgccacctgatccccagcccctggctggccatggtgctgggcctggtggccggcctgatcagcatcggcggcgccaagtgcctgcccgtgtgctgcaacagagtgctgggcatccaccacatcagcgtgatgcacagcatcttcagcctgctgggcctgctgggcgagatcacctacatcgtgctgctggtgctgcacaccgtgtggaacggcaacggcatgttcgcccccaagagccagaacatggagagcaccagctgcggctag

SEQ ID NO: 97026 - DNA, 801 bp, synthetic construct
  misc_feature 1..801: note = Description of Artificial Sequence: Synthetic coding sequence
  source 1..801: mol_type = other DNA
atgagcagcaagtaccccagaagcgtgagaagatgcctgcccctgtgcgccctgaccctggaggccgccctgatcctgctgttctacttcttcacccactacgacgccagcctggaggaccagaagggcctggtggccagctaccaggtgggccaggacctgaccgtgatggccgccctgggcctgggcttcctgaccagcaacttcagaagacacagctggagcagcgtggccttcaacctgttcatgctggccctgggcgtgcagtgggccatcctgctggacggcttcctgagccagttcccccccggcaaggtggtgatcaccctgttcagcatcagactggccaccatgagcgccatgagcgtgctgatcagcgccggcgccgtgctgggcaaggtgaacctggcccagctggtggtgatggtgctggtggaggtgaccgccctgggcaccctgagaatggtgatcagcaacatcttcaacgtgtgctgcaacagagtgctgggcatccaccacatcagcgtgatgcacagcatcttcagcctgctgggcctgctgggcgagatcacctacatcgtgctgctggtgctgcacaccgtgtggaacggcaacggcatgatcggcttccaggtgctgctgagcatcggcgagctgagcctggccatcgtgatcgccctgaccagcggcctgctgaccggcctgctgctgaacctgaagatctggaaggccccccacgtggccaagtacttcgacgaccaggtgttctggaagttcccccacctggccgtgggcttctag

SEQ ID NO: 97027 - DNA, 1206 bp, synthetic construct
  misc_feature 1..1206: note = Description of Artificial Sequence: Synthetic coding sequence
  source 1..1206: mol_type = other DNA
atgtacttcatcaaccagagactgttcctgagactgtggagagtgcccgtgatgagagccagccactgctaccagagccagggctggagacccgtggccgtgggccaggacctgaccgtgatggccgccctgggcctgggcttcctgaccagcaacttcagaagacacagctggagcagcgtggccttcaacctgttcatgctggccctgggcgtgcagtgggccatcctgctggacggcttcctgagccagttcccccccggcaaggtggtgatcaccctgttcagcatcagactggccaccatgagcgccatgagcgtgctgatcagcgccggcgccgtgctgggcaaggtgaacctggcccagctggtggtgatggtgctggtggaggtgaccgccctgggcaccctgagaatggtgatcagcaacatcttcaacaccgactaccacatgaacctgagacacttctacgtgttcgccgcctacttcggcctgaccgtggcctggtgcctgcccaagcccctgcccaagggcaccgaggacaacgaccagagagccaccatccccagcctgagcgccatgctgggcgccctgttcctgtggatgttctggcccagcgtgaacagcgccctgctgagaagccccatccagagaaagaacgccatgttcaacacctactacgccctggccgtgagcgtggtgaccgccatcagcggcagcagcctggcccacccccagagaaagatcagcatgacctacgtgcacagcgccgtgctggccggcggcgtggccgtgggcaccagctgccacctgatccccagcccctggctggccatggtgctgggcctggtggccggcctgatcagcatcggcggcgccaagtgcctgcccgtgtgctgcaacagagtgctgggcatccaccacatcagcgtgatgcacagcatcttcagcctgctgggcctgctgggcgagatcacctacatcgtgctgctggtgctgcacaccgtgtggaacggcaacggcatgatcggcttccaggtgctgctgagcatcggcgagctgagcctggccatcgtgatcgccctgaccagcggcctgctgaccggcctgctgctgaacctgaagatctggaaggccccccacgtggccaagtacttcgacgaccaggtgttctggaagttcccccacctggccgtgggcttctag

SEQ ID NO: 97028 - DNA, 1065 bp, synthetic construct
  misc_feature 1..1065: note = Description of Artificial Sequence: Synthetic coding sequence
  source 1..1065: mol_type = other DNA
atgagcagcaagtaccccagaagcgtgagaagatgcctgcccctgtgcgccctgaccctggaggccgccctgatcctgctgttctacttcttcacccactacgacgccagcctggaggaccagaagggcctggtggccagctaccaggtgggccaggacctgaccgtgatggccgccctgggcctgggcttcctgaccagcaacttcagaagacacagctggagcagcgtggccttcaacctgttcatgctggccctgggcgtgcagtgggccatcctgctggacggcttcctgagccagttcccccccggcaaggtggtgatcaccctgttcagcatcagactggccaccatgagcgccatgagcgtgctgatcagcgccggcgccgtgctgggcaaggtgaacctggcccagctggtggtgatggtgctggtggaggtgaccgccctgggcaccctgagaatggtgatcagcaacatcttcaacaccgactaccacatgaacctgagacacttctacgtgttcgccgcctacttcggcctgaccgtggcctggtgcctgcccaagcccctgcccaagggcaccgaggacaacgaccagagagccaccatccccagcctgagcgccatgctgggcgccctgttcctgtggatgttctggcccagcgtgaacagcgccctgctgagaagccccatccagagaaagaacgccatgttcaacacctactacgccctggccgtgagcgtggtgaccgccatcagcggcagcagcctggcccacccccagagaaagatcagcatgacctacgtgcacagcgccgtgctggccggcggcgtggccgtgggcaccagctgccacctgatccccagcccctggctggccatggtgctgggcctggtggccggcctgatcagcatcggcggcgccaagtgcctgcccgactggctgcccggccccccccagcactggggcacccagctgggccacagagacagcagccacgtgtggagccccgacagattcgcccccaagagccagaacatggagagcaccagctgcggctag

SEQ ID NO: 97029 - DNA, 1206 bp, synthetic construct; identical to SEQ ID NO: 97027
  misc_feature 1..1206: note = Description of Artificial Sequence: Synthetic coding sequence
  source 1..1206: mol_type = other DNA

SEQ ID NO: 97030 - DNA, 1191 bp, synthetic construct
  misc_feature 1..1191: note = Description of Artificial Sequence: Synthetic coding sequence
  source 1..1191: mol_type = other DNA
atgagcagcaagtaccccagaagcgtgagaagatgcctgcccctgtgcgccctgaccctggaggccgccctgatcctgctgttctacttcttcacccactacgacgccagcctggaggaccagaagggcctggtggccagctaccaggtgggccaggacctgaccgtgatggccgccctgggcctgggcttcctgaccagcaacttcagaagacacagctggagcagcgtggccttcaacctgttcatgctggccctgggcgtgcagtgggccatcctgctggacggcttcctgagccagttcccccccggcaaggtggtgatcaccctgttcagcatcagactggccaccatgagcgccatgagcgtgctgatcagcgccggcgccgtgctgggcaaggtgaacctggcccagctggtggtgatggtgctggtggaggtgaccgccctgggcaccctgagaatggtgatcagcaacatcttcaacaccgactaccacatgaacctgagacacttctacgtgttcgccgcctacttcggcctgaccgtggcctggtgcctgcccaagcccctgcccaagggcaccgaggacaacgaccagagagccaccatccccagcctgagcgccatgctgggcgccctgttcctgtggatgttctggcccagcgtgaacagcgccctgctgagaagccccatccagagaaagaacgccatgttcaacacctactacgccctggccgtgagcgtggtgaccgccatcagcggcagcagcctggcccacccccagagaaagatcagcatgacctacgtgcacagcgccgtgctggccggcggcgtggccgtgggcaccagctgccacctgatccccagcccctggctggccatggtgctgggcctggtggccggcctgatcagcatcggcggcgccaagtgcctgcccgtgtgctgcaacagagtgctgggcatccaccacatcagcgtgatgcacagcatcttcagcctgctgggcctgctgggcgagatcacctacatcgtgctgctggtgctgcacaccgtgtggaacggcaacggcatcttcctgatctggctgctggacttcaagcagaagcaccccagaaagaccagacccgtgcagaagcaggacaacttcctgagcctgctgcccgccttcgtgagagagaagagaagctag

SEQ ID NO: 97031 - DNA, 927 bp, synthetic construct
  misc_feature 1..927: note = Description of Artificial Sequence: Synthetic coding sequence
  source 1..927: mol_type = other DNA
atgagcagcaagtaccccagaagcgtgagaagatgcctgcccctgtgcgccctgaccctggaggccgccctgatcctgctgttctacttcttcacccactacgacgccagcctggaggaccagaagggcctggtggccagctaccaggtgggccaggacctgaccgtgatggccgccctgggcctgggcttcctgaccagcaacttcagaagacacagctggagcagcgtggccttcaacctgttcatgctggccctgggcgtgcagtgggccatcctgctggacggcttcctgagccagttcccccccggcaaggtggtgatcaccctgttcagcatcagactggccaccatgagcgccatgagcgtgctgatcagcgccggcgccgtgctgggcaaggtgaacctggcccagctggtggtgatggtgctggtggaggtgaccgccctgggcaccctgagaatggtgatcagcaacatcttcaacaccgactaccacatgaacctgagacacttctacgtgttcgccgcctacttcggcctgaccgtggcctggtgcctgcccaagcccctgcccaagggcaccgaggacaacgaccagagagccaccatccccagcctgagcgccatgctgggcgccctgttcctgtggatgttctggcccagcgtgaacagcgccctgctgagaagccccatccagagaaagaacgccatgttcaacacctactacgccctggccgtgagcgtggtgaccgccatcagcggcagcagcctggcccacccccagagaaagatcagcatggactggctgcccggccccccccagcactggggcacccagctgggccacagagacagcagccacgtgtggagccccgacagattcgcccccaagagccagaacatggagagcaccagctgcggctag

SEQ ID NO: 97032 - DNA, 1197 bp, synthetic construct
  misc_feature 1..1197: note = Description of Artificial Sequence: Synthetic coding sequence
  source 1..1197: mol_type = other DNA
atgagcagcaagtaccccagaagcgtgagaagatgcctgcccctgtgcgccctgaccctggaggccgccctgatcctgctgttctacttcttcacccactacgacgccagcctggaggaccagaagggcctggtggccagctaccaggtgggccaggacctgaccgtgatggccgccctgggcctgggcttcctgaccagcaacttcagaagacacagctggagcagcgtggccttcaacctgttcatgctggccctgggcgtgcagtgggccatcctgctggacggcttcctgagccagttcccccccggcaaggtggtgatcaccctgttcagcatcagactggccaccatgagcgccatgagcgtgctgatcagcgccggcgccgtgctgggcaaggtgaacctggcccagctggtggtgatggtgctggtggaggtgaccgccctgggcaccctgagaatggtgatcagcaacatcttcaacaccgactaccacatgaacctgagacacttctacgtgttcgccgcctacttcggcctgaccgtggcctggtgcctgcccaagcccctgcccaagggcaccgaggacaacgaccagagagccaccatccccagcctgagcgccatgctgggcgccctgttcctgtggatgttctggcccagcgtgaacagcgccctgctgagaagccccatccagagaaagaacgccatgttcaacacctactacgccctggccgtgagcgtggtgaccgccatcagcggcagcagcctggcccacccccagagaaagatcagcatgacctacgtgcacagcgccgtgctggccggcggcgtggccgtgggcaccagctgccacctgatccccagcccctggctggccatggtgctgggcctggtggccggcctgatcagcatcggcggcgccaagtgcctgcccgtgtgctgcaacagagtgctgggcatcccccacctgagacacgccctgcacctgcagctggccggcagcgcctggagagaccacctgcactgcgccgccggcgccagctactgcctggagagacagtggcacgactggctgcccggccccccccagcactggggcacccagctgggccacagagacagcagccacgtgtggagccccgacagattcgcccccaagagccagaacatggagagcaccagctgcggctag

SEQ ID NO: 97033 - DNA, 939 bp, synthetic construct
  misc_feature 1..939: note = Description of Artificial Sequence: Synthetic coding sequence
  source 1..939: mol_type = other DNA
atgagcagcaagtaccccagaagcgtgagaagatgcctgcccctgtgcgccctgaccctggaggccgccctgatcctgctgttctacttcttcacccactacgacgccagcctggaggaccagaagggcctggtggccagctaccaggtgggccaggacctgaccgtgatggccgccctgggcctgggcttcctgaccagcaacttcagaagacacagctggagcagcgtggccttcaacctgttcatgctggccctgggcgtgcagtgggccatcctgctggacggcttcctgagccagttcccccccggcaaggtggtgatcaccctgttcagcatcagactggccaccatgagcgccatgagcgtgctgatcagcgccggcgccgtgctgggcaaggtgaacctggcccagctggtggtgatggtgctggtggaggtgaccgccctgggcaccctgagaatggtgatcagcaacatcttcaacacctacgtgcacagcgccgtgctggccggcggcgtggccgtgggcaccagctgccacctgatccccagcccctggctggccatggtgctgggcctggtggccggcctgatcagcatcggcggcgccaagtgcctgcccgtgtgctgcaacagagtgctgggcatccaccacatcagcgtgatgcacagcatcttcagcctgctgggcctgctgggcgagatcacctacatcgtgctgctggtgctgcacaccgtgtggaacggcaacggcatgatcggcttccaggtgctgctgagcatcggcgagctgagcctggccatcgtgatcgccctgaccagcggcctgctgaccggcctgctgctgaacctgaagatctggaaggccccccacgtggccaagtacttcgacgaccaggtgttctggaagttcccccacctggccgtgggcttctag

SEQ ID NO: 97034 - DNA, 1041 bp, synthetic construct
  misc_feature 1..1041: note = Description of Artificial Sequence: Synthetic coding sequence
  source 1..1041: mol_type = other DNA
atgagcagcaagtaccccagaagcgtgagaagatgcctgcccctgtgcgccctgaccctggaggccgccctgatcctgctgttctacttcttcacccactacgacgccagcctggaggaccagaagggcctggtggccagctaccaggtgggccaggacctgaccgtgatggccgccctgggcctgggcttcctgaccagcaacttcagaagacacagctggagcagcgtggccttcaacctgttcatgctggccctgggcgtgcagtgggccatcctgctggacggcttcctgagccagttcccccccggcaaggtggtgatcaccctgttcagcatcagactggccaccatgagcgccatgagcgtgctgatcagcgccggcgccgtgctgggcaaggtgaacctggcccagctggtggtgatggtgctggtggaggtgaccgccctgggcaccctgagaatggtgatcagcaacatcttcaaccccagcgtgaacagcgccctgctgagaagccccatccagagaaagaacgccatgttcaacacctactacgccctggccgtgagcgtggtgaccgccatcagcggcagcagcctggcccacccccagagaaagatcagcatgacctacgtgcacagcgccgtgctggccggcggcgtggccgtgggcaccagctgccacctgatccccagcccctggctggccatggtgctgggcctggtggtgtgctgcaacagagtgctgggcatccaccacatcagcgtgatgcacagcatcttcagcctgctgggcctgctgggcgagatcacctacatcgtgctgctggtgctgcacaccgtgtggaacggcaacggcatgatcggcttccaggtgctgctgagcatcggcgagctgagcctggccatcgtgatcgccctgaccagcggcctgctgaccggcctgctgctgaacctgaagatctggaaggccccccacgtggccaagtacttcgacgaccaggtgttctggaagttcccccacctggccgtgggcttctag

SEQ ID NO: 97035 - DNA, 1254 bp, synthetic construct
  misc_feature 1..1254: note = Description of Artificial Sequence: Synthetic coding sequence
  source 1..1254: mol_type = other DNA
atgagcagcaagtaccccagaagcgtgagaagatgcctgcccctgtgggccctgaccctggaggccgccctgatcctgctgttctacttcttcacccactacgacgccagcctggaggaccagaagggcctggtggccagctaccaggtgggccaggacctgaccgtgatggccgccatcggcctgggcttcctgaccagcagcttcagaagacacagctggagcagcgtggccttcaacctgttcatgctggccctgggcgtgcagtgggccatcctgctggacggcttcctgagccagttccccagcggcaaggtggtgatcaccctgttcagcatcagactggccaccatgagcgccctgagcgtgctgatcagcgtggacgccgtgctgggcaaggtgaacctggcccagctggtggtgatggtgctggtggaggtgaccgccctgggcaacctgagaatggtgatcagcaacatcttcaacaccgactaccacatgaacatgatgcacatctacgtgttcgccgcctacttcggcctgagcgtggcctggtgcctgcccaagcccctgcccgagggcaccgaggacaaggaccagaccgccaccatccccagcctgagcgccatgctgggcgccctgttcctgtggatgttctggcccagcttcaacagcgccctgctgagaagccccatcgagagaaagaacgccgtgttcaacacctactacgccgtggccgtgagcgtggtgaccgccatcagcggcagcagcctggcccacccccagggcaagatcagcaagacctacgtgcacagcgccgtgctggccggcggcgtggccgtgggcaccagctgccacctgatccccagcccctggctggccatggtgctgggcctggtggccggcctgatcagcgtgggcggcgccaagtacctgcccggctgctgcaacagagtgctgggcatcccccacagcagcatcatgggctacaacttcagcctgctgggcctgctgggcgagatcatctacatcgtgctgctggtgctggacaccgtgggcgccggcaacggcatgatcggcttccaggtgctgctgagcatcggcgagctgagcctggccatcgtgatcgccctgatgagcggcctgctgaccggcctgctgctgaacctgaagatctggaaggccccccacgaggccaagtacttcgacgaccaggtgttctggaagttcccccacctggccgtgggcttctag

SEQ ID NO: 97036 - DNA, 1482 bp, synthetic construct
  misc_feature 1..1482: note = Description of Artificial Sequence: Synthetic coding sequence
  source 1..1482: mol_type = other DNA
atgagcagcaagtaccccagaagcgtgagaagatgcctgcccctgtgggccctgaccctggaggccgccctgatcctgctgttctacttcttcacccactacgacgccagcctggaggaccagaagggcctggtggccagctaccaggtgggccaggacctgaccgtgatggccgccatcggcctgggcttcctgaccagcagcttcagaagacacagctggagcagcgtggccttcaacctgttcatgctggccctgggcgtgcagtgggccatcctgctggacggcttcctgagccagttccccagcggcaaggtggtgatcaccctgttcagcatcagactggccaccatgagcgccctgagcgtgctgatcagcgtggacgccgtgctgggcaaggtgaacctggcccagctggtggtgatggtgctggtggaggtgaccgccctgggcaacctgagaatggtgatcagcaacatcttcaacaccgactaccacatgaacatgatgcacatctacgtgttcgccgcctacttcggcctgagcgtggcctggtgcctgcccaagcccctgcccgagggcaccgaggacaaggaccagaccgccaccatccccagcctgagcgccatgctgggcgccctgttcctgtggatgttctggcccagcttcaacagcgccctgctgagaagccccatcgagagaaagaacgccgtgttcaacacctactacgccgtggccgtgagcgtggtgaccgccatcagcggcagcagcctggcccacccccagggcaagatcagcaagacctacgtgcacagcgccgtgctggccggcggcgtggccgtgggcaccagctgccacctgatccccagcccctggctggccatggtgctgggcctggtggccggcctgatcagcgtgggcggcgccaagtacctgcccggctgctgcaacagagtgctgggcatcccccacagcagcatcatgggctacaacttcagcctgctgggcctgctgggcgagatcatctacatcgtgctgctggtgctggacaccgtgggcgccggcaacggcatgagcctgggctggaacctggccgtgaagatggccgaggccggcgacgaggagctgatgagactggacgtgagccagagaaaccacggcggcgccgccgtgcccaccggcagctggatgcccagcaccgagaccaccatcgcccccaactacagagaccacatcagcgtggtgagcagcttcggctgctggatcctgagcaagagcatccaggagaagcagggcctgttcaagaacaagaccaccagcagccactgctgcctgcacctgtacgtgagaaacgcccacgacagcaaggtgagcaacgtgagagccggcaccggcgtgagagagaacggcgtggagagcttcctgtgccacagcctgagaagaatcagccccttcatcatgcactgcagaatccagcagtag

SEQ ID NO: 97037 - DNA, 1191 bp, synthetic construct
  misc_feature 1..1191: note = Description of Artificial Sequence: Synthetic coding sequence
  source 1..1191: mol_type = other DNA
atgagcagcaagtaccccagaagcgtgagaagatgcctgcccctgtgggccctgaccctggaggccgccctgatcctgctgttctacttcttcacccactacgacgccagcctggaggaccagaagggcctggtggccagctaccaggtgggccaggacctgaccgtgatggccgccatcggcctgggcttcctgaccagcagcttcagaagacacagctggagcagcgtggccttcaacctgttcatgctggccctgggcgtgcagtgggccatcctgctggacggcttcctgagccagttccccagcggcaaggtggtgatcaccctgttcagcatcagactggccaccatgagcgccctgagcgtgctgatcagcgtggacgccgtgctgggcaaggtgaacctggcccagctggtggtgatggtgctggtggaggtgaccgccctgggcaacctgagaatggtgatcagcaacatcttcaacaccgactaccacatgaacatgatgcacatctacgtgttcgccgcctacttcggcctgagcgtggcctggtgcctgcccaagcccctgcccgagggcaccgaggacaaggaccagaccgccaccatccccagcctgagcgccatgctgggcgccctgttcctgtggatgttctggcccagcttcaacagcgccctgctgagaagccccatcgagagaaagaacgccgtgttcaacacctactacgccgtggccgtgagcgtggtgaccgccatcagcggcagcagcctggcccacccccagggcaagatcagcaagacctacgtgcacagcgccgtgctggccggcggcgtggccgtgggcaccagctgccacctgatccccagcccctggctggccatggtgctgggcctggtggccggcctgatcagcgtgggcggcgccaagtacctgcccggctgctgcaacagagtgctgggcatcccccacagcagcatcatgggctacaacttcagcctgctgggcctgctgggcgagatcatctacatcgtgctgctggtgctggacaccgtgggcgccggcaacggcatcttcctgatctggctgctggacttcaagcagaagcaccccagaaagaccagacccgtgcagaagcaggacaacttcctgagcctgctgcccgccttcgtgagagagaagagaagctag

SEQ ID NO: 97038 - DNA, 1137 bp, synthetic construct
  misc_feature 1..1137: note = Description of Artificial Sequence: Synthetic coding sequence
  source 1..1137: mol_type = other DNA
atgagcagcaagtaccccagaagcgtgagaagatgcctgcccctgtgggccctgaccctggaggccgccctgatcctgctgttctacttcttcacccactacgacgccagcctggaggaccagaagggcctggtggccagctaccaggtgggccaggacctgaccgtgatggccgccatcggcctgggcttcctgaccagcagcttcagaagacacagctggagcagcgtggccttcaacctgttcatgctggccctgggcgtgcagtgggccatcctgctggacggcttcctgagccagttccccagcggcaaggtggtgatcaccctgttcagcatcagactggccaccatgagcgccctgagcgtgctgatcagcgtggacgccgtgctgggcaaggtgaacctggcccagctggtggtgatggtgctggtggaggtgaccgccctgggcaacctgagaatggtgatcagcaacatcttcaacaccgactaccacatgaacatgatgcacatctacgtgttcgccgcctacttcggcctgagcgtggcctggtgcctgcccaagcccctgcccgagggcaccgaggacaaggaccagaccgccaccatccccagcctgagcgccatgctgggcgccctgttcctgtggatgttctggcccagcttcaacagcgccctgctgagaagccccatcgagagaaagaacgccgtgttcaacacctactacgccgtggccgtgagcgtggtgaccgccatcagcggcagcagcctggcccacccccagggcaagatcagcaagacctacgtgcacagcgccgtgctggccggcggcgtggccgtgggcaccagctgccacctgatccccagcccctggctggccatggtgctgggcctggtggccggcctgatcagcgtgggcggcgccaagtacctgcccgactggctgcccggccccccccagcactggggcacccagctgggccacagagacagcagccacgtgtggagccccgacagcttcctgatctggctgctggacttcaagcagaagcaccccagaaagaccagacccgtgcagaagcaggacaacttcctgagcctgctgcccgccttcgtgagagagaagagaagctag

SEQ ID NO: 97039 - DNA, 1464 bp, synthetic construct
  misc_feature 1..1464: note = Description of Artificial Sequence: Synthetic coding sequence
  source 1..1464: mol_type = other DNA
atgagcagcaagtaccccagaagcgtgagaagatgcctgcccctgtgggccctgaccctggaggccgccctgatcctgctgttctacttcttcacccactacgacgccagcctggaggaccagaagggcctggtggccagctaccaggtgggccaggacctgaccgtgatggccgccatcggcctgggcttcctgaccagcagcttcagaagacacagctggagcagcgtggccttcaacctgttcatgctggccctgggcgtgcagtgggccatcctgctggacggcttcctgagccagttccccagcggcaaggtggtgatcaccctgttcagcatcagactggccaccatgagcgccctgagcgtgctgatcagcgtggacgccgtgctgggcaaggtgaacctggcccagctggtggtgatggtgctggtggaggtgaccgccctgggcaacctgagaatggtgatcagcaacatcttcaacaccgactaccacatgaacatgatgcacatctacgtgttcgccgcctacttcggcctgagcgtggcctggtgcctgcccaagcccctgcccgagggcaccgaggacaaggaccagaccgccaccatccccagcctgagcgccatgctgggcgccctgttcctgtggatgttctggcccagcttcaacagcgccctgctgagaagccccatcgagagaaagaacgccgtgttcaacacctactacgccgtggccgtgagcgtggtgaccgccatcagcggcagcagcctggcccacccccagggcaagatcagcaagacctacgtgcacagcgccgtgctggccggcggcgtggccgtgggcaccagctgccacctgatccccagcccctggctggccatggtgctgggcctggtggccggcctgatcagcgtgggcggcgccaagtacctgcccggctgctgcaacagagtgctgggcatcccccacagcagcatcatgggctacaacttcagcctgctgggcctgctgggcgagatcatctacatcgtgctgctggtgctggacaccgtgggcgccggcaacggcatgatcggcttccaggtgctgctgagcatcggcgagctgagcctggccatcgtgatcgccctgatgagcggcctgctgaccggcctgctgctgaacctgaagatctggaaggccccccacgaggccaagtacttcgacgaccaggtgttctggaagttcccccacctggccgtgggcttcagcaagagcatccaggagaagcagggcctgttcaagaacaagaccaccagcagccactgctgcctgcacctgtacgtgagaaacgcccacgacagcaaggtgagcaacgtgagagccggcaccggcgtgagagagaacggcgtggagagcttcctgtgccacagcctgagaagaatcagccccttcatcatgcactgcagaatccagcagtag

SEQ ID NO: 97040 - DNA, 1296 bp, synthetic construct
  misc_feature 1..1296: note = Description of Artificial Sequence: Synthetic coding sequence
  source 1..1296: mol_type = other DNA
atgagcagcaagtaccccagaagcgtgagaagatgcctgcccctgtgggccctgaccctggaggccgccctgatcctgctgttctacttcttcacccactacgacgccagcctggaggaccagaagggcctggtggccagctaccaggtgggccaggacctgaccgtgatggccgccatcggcctgggcttcctgaccagcagcttcagaagacacagctggagcagcgtggccttcaacctgttcatgctggccctgggcgtgcagtgggccatcctgctggacggcttcctgagccagttccccagcggcaaggtggtgatcaccctgttcagcatcagactggccaccatgagcgccctgagcgtgctgatcagcgtggacgccgtgctgggcaaggtgaacctggcccagctggtggtgatggtgctggtggaggtgaccgccctgggcaacctgagaatggtgatcagcaacatcttcaacaccgactaccacatgaacatgatgcacatctacgtgttcgccgcctacttcggcctgagcgtggcctggtgcctgcccaagcccctgcccgagggcaccgaggacaaggaccagaccgccaccatccccagcctgagcgccatgctgggcgccctgttcctgtggatgttctggcccagcttcaacagcgccctgctgagaagccccatcgagagaaagaacgccgtgttcaacacctactacgccgtggccgtgagcgtggtgaccgccatcagcggcagcagcctggcccacccccagggcaagatcagcaagacctacgtgcacagcgccgtgctggccggcggcgtggccgtgggcaccagctgccacctgatccccagcccctggctggccatggtgctgggcctggtggccggcctgatcagcgtgggcggcgccaagtacctgcccggctgctgcaacagagtgctgggcatcccccacagcagcatcatgggctacaacttcagcctgctgggcctgctgggcgagatcatctacatcgtgctgctggtgctggacaccgtgggcgccggcaacggcatgagcctgggctggaacctggccgtgaagatggccgaggccggcgacgaggagctgatgagactggacgtgagccagagaaaccacggcggcgccgccgtgcccaccggcagctggatgcccagcaccgagaccaccatcgcccccaactacagagaccacatcagcgtgggcctggccagcagaagcagcagcgccctgggcaacagcgcctggcccagctag

SEQ ID NO: 97041 - DNA, 966 bp, synthetic construct
  misc_feature 1..966: note = Description of Artificial Sequence: Synthetic coding sequence
  source 1..966: mol_type = other DNA
atgagcagcaagtaccccagaagcgtgagaagatgcctgcccctgtgggccctgaccctggaggccgccctgatcctgctgttctacttcttcacccactacgacgccagcctggaggaccagaagggcctggtggccagctaccaggtgggccaggacctgaccgtgatggccgccatcggcctgggcttcctgaccagcagcttcagaagacacagctggagcagcgtggccttcaacctgttcatgctggccctgggcgtgcagtgggccatcctgctggacggcttcctgagccagttccccagcggcaaggtggtgatcaccctgttcagcatcagactggccaccatgagcgccctgagcgtgctgatcagcgtggacgccgtgctgggcaaggtgaacctggcccagctggtggtgatggtgctggtggaggtgaccgccctgggcaacctgagaatggtgatcagcaacatcttcaacaccgactaccacatgaacatgatgcacatctacgtgttcgccgcctacttcggcctgagcgtggcctggtgcctgcccaagcccctgcccgagggcaccgaggacaaggaccagaccgccaccatccccagcctgagcgccatgctgggcgccctgttcctgtggatgttctggcccagcttcaacagcgccctgctgagaagccccatcgagagaaagaacgccgtgttcaacacctactacgccgtggccgtgagcgtggtgaccgccatcagcggcagcagcctggcccacccccagggcaagatcagcaagacctacgtgcacagcgccgtgctggccggcggcgtggccgtgggcaccagctgccacctgatccccagcccctggctggccatggtgctgggcctggtggccggcctgatcagcgtgggcggcgccaagtacctgcccttcccccacctggccgtgggcttctag

SEQ ID NO: 97042 - DNA, 294 bp, synthetic construct
  misc_feature 1..294: note = Description of Artificial Sequence: Synthetic coding sequence
  source 1..294: mol_type = other DNA
atggccggcagccccagcagagccgccggcagaagactgcagctgcccctgctgtgcctgttcctgcagggcgccaccgccgtgctgttcgccgtgttcgtgagatacaaccacaagaccgacgccgccctgtggcacagaagcaaccacagcaacgccgacaacgagttctacttcagataccccaacggcgtgagcctgctgctgcccagactggagtgcaacggcaccatcagcgcccaccacaacctgtgcctgcccggcagcagcgacagccccgccagcgtgagctag

SEQ ID NO: 97043 - DNA, 462 bp, synthetic construct
  misc_feature 1..462: note = Description of Artificial Sequence: Synthetic coding sequence
  source 1..462: mol_type = other DNA
atggccggcagccccagcagagccgccggcagaagactgcagctgcccctgctgtgcctgttcctgcagggcgccaccgccgtgctgttcgccgtgttcgtgagatacaaccacaagaccgacgccgccctgtggcacagaagcaaccacagcaacgccgacaacgagttctacttcagataccccaaggagagccacagcgtggcccaggccggcgtgcagagaagaaacctgggcagcctgcagcccagcccccccagactgcccggcagagcctgccacggcctgagaggcctgtggctgccccacggcctgcccgccgccctgagactgcagcagagaggcctgcacctgccccccggcagactgtgccccgccgtggtgcacaccggccccggcctgagccccctgctgcccagatggccccacccctgctggagaggcgagcacgaccagtgctag

SEQ ID NO: 97044 - DNA, 1119 bp, synthetic construct
  misc_feature 1..1119: note = Description of Artificial Sequence: Synthetic coding sequence
  source 1..1119: mol_type = other DNA
atggtgttcgtgggcttcggcttcctgatggtgttcctgcagagatacggcttcagcagcgtgggcttcaccttcctgctggccgccttcgccctgcagtggagcaccctggtgcagggcttcctgcacagcttccacggcggccacatccacgtgggcgtggagagcatgatcaacgccgacttctgcgccggcgccgtgctgatcagcttcggcgccgtgctgggcaagaccggccccacccagctgctgctgatggccctgctggaggtggtgctgttcggcatcaacgagttcgtgctgctgcacctgctgggcgtgagagacgccggcggcagcatgaccatccacaccttcggcgcctacttcggcctggtgctgagcagagtgctgtacagaccccagctggagaagagcaagcacagacagggcagcgtgtaccacagcgacctgttcgccatgatcggcaccatcttcctgtggatcttctggcccagcttcaacgccgccctgaccgccctgggcgccggccagcacagaaccgccctgaacacctactacagcctggccgccagcaccctgggcaccttcgccctgagcgccctggtgggcgaggacggcagactggacatggtgcacatccagaacgccgccctggccggcggcgtggtggtgggcaccagcagcgagatgatgctgacccccttcggcgccctggccgccggcttcctggccggcaccgtgagcaccctgggctacaagttcttcacccccatcctggagagcaagttcaaggtgcaggacacctgcggcgtgcacaacctgcacggcatgcccggcgtgctgggcgccctgctgggcgtgctggtggccggcctggccacccacgaggcctacggcgacggcctggagagcgtgttccccctgatcgccgagggccagagaagcgccaccagccaggccatgcaccagctgttcggcctgttcgtgaccctgatgttcgccagcgtgggcggcggcctgggcggcctgctgctgaagctgcccttcctggacagcccccccagactgcccgccctgagaggccccagcagcctggccggcgcctggagagcctag

SEQ ID NO: 97045 - DNA, 1374 bp, synthetic construct
  misc_feature 1..1374: note = Description of Artificial Sequence: Synthetic coding sequence
  source 1..1374: mol_type = other DNA
atggccggcagccccagcagagccgccggcagaagactgcagctgcccctgctgtgcctgttcctgcagggcgccaccgccgtgctgttcgccgtgttcgtgagatacaaccacaagaccgacgccgccctgtggcacagaagcaaccacagcaacgccgacaacgagttctacttcagataccccagcttccaggacgtgcacgccatggtgttcgtgggcttcggcttcctgatggtgttcctgcagagatacggcttcagcagcgtgggcttcaccttcctgctggccgccttcgccctgcagtggagcaccctggtgcagggcttcctgcacagcttccacggcggccacatccacgtgggcgtggagagcatgatcaacgccgacttctgcgccggcgccgtgctgatcagcttcggcgccgtgctgggcaagaccggccccacccagctgctgctgatggccctgctggaggtggtgctgttcggcatcaacgagttcgtgctgctgcacctgctgggcgtgagagacgccggcggcagcatgaccatccacaccttcggcgcctacttcggcctggtgctgagcagagtgctgtacagaccccagctggagaagagcaagcacagacagggcagcgtgtaccacagcgacctgttcgccatgatcggcaccatcttcctgtggatcttctggcccagcttcaacgccgccctgaccgccctgggcgccggccagcacagaaccgccctgaacacctactacagcctggccgccagcaccctgggcaccttcgccctgagcgccctggtgggcgaggacggcagactggacatggtgcacatccagaacgccgccctggccggcggcgtggtggtgggcaccagcagcgagatgatgctgacccccttcggcgccctggccgccggcttcctggccggcaccgtgagcaccctgggctacaagttcttcacccccatcctggagagcaagttcaaggtgcaggacacctgcggcgtgcacaacctgcacggcatgcccggcgtgctgggcgccctgctgggcgtgctggtggccggcctggccacccacgaggcctacggcgacggcctggagagcgtgttccccctgatcgccgagggccagagaagcgccaccagccaggccatgcaccagctgttcggcctgttcgtgaccctgatgttcgccagcgtgggcggcggcctgggcggcctgctgctgaagctgcccttcctggacccccccgacagccagcactacgaggaccaggtgcactggcaggtgcccggcgagcacgaggacaaggcccagagacccctgagagtggaggaggccgacacccaggcctag

SEQ ID NO: 97046 - DNA, 1326 bp, synthetic construct
  misc_feature 1..1326: note = Description of Artificial Sequence: Synthetic coding sequence
  source 1..1326: mol_type = other DNA
atggccggcagccccagcagagccgccggcagaagactgcagctgcccctgctgtgcctgttcctgcagggcgccaccgccgtgctgttcgccgtgttcgtgagatacaaccacaagaccgacgccgccctgtggcacagaagcaaccacagcaacgccgacaacgagttctacttcagataccccagcttccaggacgtgcacgccatggtgttcgtgggcttcggcttcctgatggtgttcctgcagagatacggcttcagcagcgtgggcttcaccttcctgctggccgccttcgccctgcagtggagcaccctggtgcagggcttcctgcacagcttccacggcggccacatccacgtgggcgtggagagcatgatcaacgccgacttctgcgccggcgccgtgctgatcagcttcggcgccgtgctgggcaagaccggccccacccagctgctgctgatggccctgctggaggtggtgctgttcggcatcaacgagttcgtgctgctgcacctgctgggcgtgagagacgccggcggcagcatgaccatccacaccttcggcgcctacttcggcctggtgctgagcagagtgctgtacagaccccagctggagaagagcaagcacagacagggcagcgtgtaccacagcgacctgttcgccatgatcggcaccatcttcctgtggatcttctggcccagcttcaacgccgccctgaccgccctgggcgccggccagcacagaaccgccctgaacacctactacagcctggccgccagcaccctgggcaccttcgccctgagcgccctggtgggcgaggacggcagactggacatggtgcacatccagaacgccgccctggccggcggcgtggtggtgggcaccagcagcgagatgatgctgacccccttcggcgccctggccgccggcttcctggccggcaccgtgagcaccctgggctacaagttcttcacccccatcctggagagcaagttcaaggtgcaggacacctgcggcgtgcacaacctgcacggcatgcccggcgtgctgggcgccctgctgggcgtgctggtggccggcctggccacccacgaggcctacggcgacggcctggagagcgtgttccccctgatcgccgagggccagagaagcgccaccagccaggccatgcaccagctgttcggcctgttcgtgaccctgatgttcgccagcgtgggcggcggcctgggcggcctgctgctgaagctgcccttcctggacagcccccccagactgcccgccctgagaggccccagcagcctggccggcgcctggagagcctag

SEQ ID NO: 97047 - DNA, 1230 bp, synthetic construct
  misc_feature 1..1230: note = Description of Artificial Sequence: Synthetic coding sequence
  source 1..1230: mol_type = other DNA
atggtgttcgtgggcttcggcttcctgatggtgttcctgcagagatacggcttcagcagcgtgggcttcaccttcctgctggccgccttcgccctgcagtggagcaccctggtgcagggcttcctgcacagcttccacggcggccacatccacgtgggcgtggagagcatgatcaacgccgacttctgcgccggcgccgtgctgatcagcttcggcgccgtgctgggcaagaccggccccacccagctgctgctgatggccctgctggaggtggtgctgttcggcatcaacgagttcgtgctgctgcacctgctgggcgtgagagtgtggggcggcatggagagcggcgtgggcggcggccagggccagcccctgagccaggagagaggcggcggcggcggcgtgctgcccctgaccccccccccccaggtgagagacgccggcggcagcatgaccatccacaccttcggcgcctacttcggcctggtgctgagcagagtgctgtacagaccccagctggagaagagcaagcacagacagggcagcgtgtaccacagcgacctgttcgccatgatcggcaccatcttcctgtggatcttctggcccagcttcaacgccgccctgaccgccctgggcgccggccagcacagaaccgccctgaacacctactacagcctggccgccagcaccctgggcaccttcgccctgagcgccctggtgggcgaggacggcagactggacatggtgcacatccagaacgccgccctggccggcggcgtggtggtgggcaccagcagcgagatgatgctgacccccttcggcgccctggccgccggcttcctggccggcaccgtgagcaccctgggctacaagttcttcacccccatcctggagagcaagttcaaggtgcaggacacctgcggcgtgcacaacctgcacggcatgcccggcgtgctgggcgccctgctgggcgtgctggtggccggcctggccacccacgaggcctacggcgacggcctggagagcgtgttccccctgatcgccgagggccagagaagcgccaccagccaggccatgcaccagctgttcggcctgttcgtgaccctgatgttcgccagcgtgggcggcggcctgggcggcctgctgctgaagctgcccttcctggacagcccccccagactgcccgccctgagaggccccagcagcctggccggcgcctggagagcctag

SEQ ID NO: 97048 - DNA, 1125 bp, synthetic construct
  misc_feature 1..1125: note = Description of Artificial Sequence: Synthetic coding sequence
  source 1..1125: mol_type = other DNA
atggtgttcgtgggcttcggcttcctgatggtgttcctgcagagatacggcttcagcagcgtgggcttcaccttcctgctggccgccttcgccctgcagtggagcaccctggtgcagggcttcctgcacagcttccacggcggccacatccacgtgggcgtggagagcatgatcaacgccgacttctgcgccggcgccgtgctgatcagcttcggcgccgtgctgggcaagaccggccccacccagctgctgctgatggccctgctggaggtggtgctgttcggcatcaacgagttcgtgctgctgcacctgctgggcgtgagagtgtggggcggcatggagagcggcgtgggcggcggccagggccagcccctgagccaggagagaggcggcggcggcggcgtgctgcccctgaccccccccccccaggtgagagacgccggcggcagcatgaccatccacaccttcggcgcctacttcggcctggtgctgagcagagtgctgtacagaccccagctggagaagagcaagcacagacagggcagcgtgtaccacagcgacctgttcgccatgatcggcaccatcttcctgtggatcttctggcccagcttcaacgccgccctgaccgccctgggcgccggccagcacagaaccgccctgaacacctactacagcctggccgccagcaccctgggcaccttcgccctgagcgccctggtgggcgaggacggcagactggacatgcccatcctggagagcaagttcaaggtgcaggacacctgcggcgtgcacaacctgcacggcatgcccggcgtgctgggcgccctgctgggcgtgctggtggccggcctggccacccacgaggcctacggcgacggcctggagagcgtgttccccctgatcgccgagggccagagaagcgccaccagccaggccatgcaccagctgttcggcctgttcgtgaccctgatgttcgccagcgtgggcggcggcctgggcggcatcatcctggtgctgtgcctgctggacccctgcgccctgtggcactgggtggcccccagcagcatggtgggcggcagagaggccagccagatcctgccctaccaccaccagggcagctgctag

SEQ ID NO: 97049 - DNA, 687 bp, synthetic construct
  misc_feature 1..687: note = Description of Artificial Sequence: Synthetic coding sequence
  source 1..687: mol_type = other DNA
atggccggcagccccagcagagccgccggcagaagactgcagctgcccctgctgtgcctgttcctgcagggcgccaccgccgtgctgttcgccgtgttcgtgagatacaaccacaagaccgacgccgccctgtggcacagaagcaaccacagcaacgccgacaacgagttctacttcagataccccagaaccatcttcctgtggatcttctggcccagcttcaacgccgccctgaccgccctgggcgccggccagcacagaaccgccctgaacacctactacagcctggccgccagcaccctgggcaccttcgccctgagcgccctggtgggcgaggacggcagactggacatggtgcacatccagaacgccgccctggccggcggcgtggtggtgggcaccagcagcgagatgatgctgacccccttcggcgccctggccgccggcttcctggccggcaccgtgagcaccctgggccccagcctgaaccagaacagcaagagcaagacccacgtggagagcaccaccagcatgggctgcagaggcagctggggccccagctggggcagcctgtggctggacctgccccccatgaagctgaccgagatgggcgagttcccccccaacccctactgcagcagacaccccagcggcatgaccagcgtgatcctgttccactgcgtgtag

SEQ ID NO: 97050 - DNA, 1440 bp, synthetic construct
  misc_feature 1..1440: note = Description of Artificial Sequence: Synthetic coding sequence
  source 1..1440: mol_type = other DNA
atggcctggaacaccaacctgagatggagactgcccctgacctgcctgctgctgcaggtgatcatggtgatcctgttcggcgtgttcgtgagatacgacttcgaggccgacgcccactggtggagcgagagaacccacaagaacctgagcgacatggagaacgagttctactacagataccccagcttccaggacgtgcacgtgatggtgttcgtgggcttcggcttcctgatgaccttcctgcagagatacggcttcagcgccgtgggcttcaacttcctgctggccgccttcggcatccagtgggccctgctgatgcagggctggttccacttcctgcaggacagatacatcgtggtgggcgtggagaacctgatcaacgccgacttctgcgtggccagcgtgtgcgtggccttcggcgccgtgctgggcaaggtgagccccatccagctgctgatcatgaccttcttccaggtgaccctgttcgccgtgaacgagttcatcctgctgaacctgctgaaggtgaaggacgccggcggcagcatgaccatccacaccttcggcgcctacttcggcctgaccgtgaccagaatcctgtacagaagaaacctggagcagagcaaggagagacagaacagcgtgtaccagagcgacctgttcgccatgatcggcaccctgttcctgtggatgtactggcccagcttcaacagcgccatcagctaccacggcgacagccagcacagagccgccatcaacacctactgcagcctggccgcctgcgtgctgaccagcgtggccatcagcagcgccctgcacaagaagggcaagctggacatggtgcacatccagaacgccaccctggccggcggcgtggccgtgggcaccgccgccgagatgatgctgatgccctacggcgccctgatcatcggcttcgtgtgcggcatcatcagcaccctgggcttcgtgtacctgacccccttcctggagagcagactgcacatccaggacacctgcggcatcaacaacctgcacggcatccccggcatcatcggcggcatcgtgggcgccgtgaccgccgccagcgccagcctggaggtgtacggcaaggagggcctggtgcacagcttcgacttccagggcttcaacggcgactggaccgccagaacccagggcaagttccagatctacggcctgctggtgaccctggccatggccctgatgggcggcatcatcgtgggcctgatcctgagactgcccttctggggccagcccagcgacgagaactgcttcgaggacgccgtgtactgggagatgcccgagggcaacagcaccgtgtacatccccgaggaccccaccttcaagcccagcggccccagcgtgcccagcgtgcccatggtgagccccctgcccatggccagcagcgtgcccctggtgccctag

SEQ ID NO: 97051 - DNA, 1413 bp, synthetic construct
  misc_feature 1..1413: note = Description of Artificial Sequence: Synthetic coding sequence
  source 1..1413: mol_type = other DNA
atggcctggaacacctgcctgctgctgcaggtgatcatggtgatcctgttcggcgtgttcgtgagatacgacttcgaggccgacgcccactggtggagcgagagaacccacaagaacctgagcgacatggagaacgagttctactacagataccccagcttccaggacgtgcacgtgatggtgttcgtgggcttcggcttcctgatgaccttcctgcagagatacggcttcagcgccgtgggcttcaacttcctgctggccgccttcggcatccagtgggccctgctgatgcagggctggttccacttcctgcaggacagatacatcgtggtgggcgtggagaacctgatcaacgccgacttctgcgtggccagcgtgtgcgtggccttcggcgccgtgctgggcaaggtgagccccatccagctgctgatcatgaccttcttccaggtgaccctgttcgccgtgaacgagttcatcctgctgaacctgctgaaggtgaaggacgccggcggcagcatgaccatccacaccttcggcgcctacttcggcctgaccgtgaccagaatcctgtacagaagaaacctggagcagagcaaggagagacagaacagcgtgtaccagagcgacctgttcgccatgatcggcaccctgttcctgtggatgtactggcccagcttcaacagcgccatcagctaccacggcgacagccagcacagagccgccatcaacacctactgcagcctggccgcctgcgtgctgaccagcgtggccatcagcagcgccctgcacaagaagggcaagctggacatggtgcacatccagaacgccaccctggccggcggcgtggccgtgggcaccgccgccgagatgatgctgatgccctacggcgccctgatcatcggcttcgtgtgcggcatcatcagcaccctgggcttcgtgtacctgacccccttcctggagagcagactgcacatccaggacacctgcggcatcaacaacctgcacggcatccccggcatcatcggcggcatcgtgggcgccgtgaccgccgccagcgccagcctggaggtgtacggcaaggagggcctggtgcacagcttcgacttccagggcttcaacggcgactggaccgccagaacccagggcaagttccagatctacggcctgctggtgaccctggccatggccctgatgggcggcatcatcgtgggcctgatcctgagactgcccttctggggccagcccagcgacgagaactgcttcgaggacgccgtgtactgggagatgcccgagggcaacagcaccgtgtacatccccgaggaccccaccttcaagcccagcggccccagcgtgcccagcgtgcccatggtgagccccctgcccatggccagcagcgtgcccctggtgccctag

SEQ ID NO: 97052 - DNA, 1338 bp, synthetic construct
  misc_feature 1..1338: note = Description of Artificial Sequence: Synthetic coding sequence
  source 1..1338: mol_type = other DNA
atggcctggaacaccaacctgagatggagactgcccctgacctgcctgctgctgcaggtgatcatggtgatcctgttcggcgtgttcgtgagatacgacttcgaggccgacgcccactggtggagcgagagaacccacaagaacctgagcgacatggagaacgagttctactacagataccccagcttccaggacgtgcacgtgatggtgttcgtgggcttcggcttcctgatgaccttcctgcagagatacggcttcagcgccgtgggcttcaacttcctgctggccgccttcggcatccagtgggccctgctgatgcagggctggttccacttcctgcaggacagatacatcgtggtgggcgtggagaacctgatcaacgccgacttctgcgtggccagcgtgtgcgtggccttcggcgccgtgctgggcaaggtgagccccatccagctgctgatcatgaccttcttccaggtgaccctgttcgccgtgaacgagttcatcctgctgaacctgctgaaggtgaaggacgccggcggcagcatgaccatccacaccttcggcgcctacttcggcctgaccgtgaccagaatcctgtacagaagaaacctggagcagagcaaggagagacagaacagcgtgtaccagagcgacctgttcgccatgatcggcaccctgttcctgtggatgtactggcccagcttcaacagcgccatcagctaccacggcgacagccagcacagagccgccatcaacacctactgcagcctggccgcctgcgtgctgaccagcgtggccatcagcagcgccctgcacaagaagggcaagctggacatggtgcacatccagaacgccaccctggccggcggcgtggccgtgggcaccgccgccgagatgatgctgatgccctacggcgccctgatcatcggcttcgtgtgcggcatcatcagcaccctgggcttcgtgtacctgacccccttcctggagagcagactgcacatccaggacacctgcggcatcaacaacctgcacggcatccccggcatcatcggcggcatcgtgggcgccgtgaccgccgccagcgccagcctggaggtgtacggcaaggagggcctggtgcacagcttcgacttccagggcttcaacggcgactggaccgccagaacccagggcaagttccagatctacggcctgctggtgaccctggccatggccctgatgggcggcatcatcgtgggcctgatcctgagactgcccttctggggccagcccagcgacgagaactgcttcgaggacgccgtgtactgggaggacctggagctggcccccaaccagtag

SEQ ID NO: 97053 - DNA, 714 bp, synthetic construct
  misc_feature 1..714: note = Description of Artificial Sequence: Synthetic coding sequence
  source 1..714: mol_type = other DNA
tgagacagccagcacagagccgccatcaacacctactgcagcctggccgcctgcgtgctgaccagcgtggccatcagcagcgccctgcacaagaagggcaagctggacatggtgcacatccagaacgccaccctggccggcggcgtggccgtgggcaccgccgccgagatgatgctgatgccctacggcgccctgatcatcggcttcgtgtgcggcatcatcagcaccctgggcttcgtgtacctgacccccttcctggagagcagactgcacatccaggacacctgcggcatcaacaacctgcacggcatccccggcatcatcggcggcatcgtgggcgccgtgaccgccgccagcgccagcctggaggtgtacggcaaggagggcctggtgcacagcttcgacttccagggcttcaacggcgactggaccgccagaacccagggcaagttccagatctacggcctgctggtgaccctggccatggccctgatgggcggcatcatcgtgggcctgatcctgagactgcccttctggggccagcccagcgacgagaactgcttcgaggacgccgtgtactgggagatgcccgagggcaacagcaccgtgtacatccccgaggaccccaccttcaagcccagcggccccagcgtgcccagcgtgcccatggtgagccccctgcccatggccagcagcgtgcccctggtgccctag

SEQ ID NO: 97054 - DNA, 429 bp, synthetic construct
  misc_feature 1..429: note = Description of Artificial Sequence: Synthetic coding sequence
  source 1..429: mol_type = other DNA
atggccgccgccgtggccgccgccggcgccggcgagccccagagccccgacgagctgctgcccaagggcgacgccgagaagcccgaggaggagctggaggaggacgacgacgaggagctggacgagaccctgagcgagagactgtggggcctgaccgagatgttccccgagagagtgagaagcgccgccggcgccaccttcgacctgagcctgttcgtggcccagaagatgtacagattcagcagagccgccctgtggatcggcaccaccagcttcatgatcctggtgctgcccgtggtgttcgagaccgagaagctgcagatggagcagcagcagcagctgcagcagagacagatcctgctgggccccaacaccggcctgagcggcggcatgcccggcgccctgcccagcctgcccggcaagatctag

SEQ ID NO: 97055 - DNA, 1083 bp, synthetic construct
  misc_feature 1..1083: note = Description of Artificial Sequence: Synthetic coding sequence
  source 1..1083: mol_type = other DNA
atgagccaggagagacccaccttctacagacaggagctgaacaagaccatctgggaggtgcccgagagataccagaacctgagccccgtgggcagcggcgcctacggcagcgtgtgcgccgccttcgacaccaagaccggcctgagagtggccgtgaagaagctgagcagacccttccagagcatcatccacgccaagagaacctacagagagctgagactgctgaagcacatgaagcacgagaacgtgatcggcctgctggacgtgttcacccccgccagaagcctggaggagttcaacgacgtgtacctggtgacccacctgatgggcgccgacctgaacaacatcgtgaagtgccagaagctgaccgacgaccacgtgcagttcctgatctaccagatcctgagaggcctgaagtacatccacagcgccgacatcatccacagagacctgaagcccagcaacctggccgtgaacgaggactgcgagctgaagatcctggacttcggcctggccagacacaccgacgacgagatgaccggctacgtggccaccagatggtacagagcccccgagatcatgctgaactggatgcactacaaccagaccgtggacatctggagcgtgggctgcatcatggccgagctgctgaccggcagaaccctgttccccggcaccgaccacatcaaccagctgcagcagatcatgagactgaccggcaccccccccgcctacctgatcaacagaatgcccagccacgaggccagaaactacatccagagcctgacccagatgcccaagatgaacttcgccaacgtgttcatcggcgccaaccccctggccgtggacctgctggagaagatgctggtgctggacagcgacaagagaatcaccgccgcccaggccctggcccacgcctacttcgcccagtaccacgaccccgacgacgagcccgtggccgacccctacgaccagagcttcgagagcagagacctgctgatcgacgagtggaagagcctgacctacgacgaggtgatcagcttcgtgcccccccccctggaccaggaggagatggagagctag

SEQ ID NO: 97056 - DNA, 1230 bp, synthetic construct
  misc_feature 1..1230: note = Description of Artificial Sequence: Synthetic coding sequence
  source 1..1230: mol_type = other DNA
atgagattcaccttccccctgatggccatcgtgctggagatcgccatgatcgtgctgttcggcctgttcgtggagtacgagaccgaccagaccgtgctggagcagctgaacatcaccaagcccaccgacatgggcatcttcttcgagctgtaccccctgttccaggacgtgcacgtgatgatcttcgtgggcttcggcttcctgatgaccttcctgaagaagtacggcttcagcagcgtgggcatcaacctgctggtggccgccctgggcctgcagtggggcaccatcgtgcagggcatcctgcagagccagggccagaagttcaacatcggcatcaagaacatgatcaacgccgacttcagcgccgccaccgtgctgatcagcttcggcgccgtgctgggcaagaccagccccacccagatgctgatcatgaccatcctggagatcgtgttcttcgcccacaacgagtacctggtgagcgagatcttcaaggccagcgacatcggcgccagcatgaccatccacgccttcggcgcctacttcggcctggccgtggccggcatcctgtacagaagcggcctgagaaagggccacgagaacgaggagagcgcctactacagcgacctgttcgccatgatcggcaccctgttcctgtggatgttctggcccagcttcaacagcgccatcgccgagcccggcgacaagcagtgcagagccatcgtgaacacctacttcagcctggccgcctgcgtgctgaccgccttcgccttcagcagcctggtggagcacagaggcaagctgaacatggtgcacatccagaacgccaccctggccggcggcgtggccgtgggcacctgcgccgacatggccatccaccccttcggcagcatgatcatcggcagcatcgccggcatggtgagcgtgctgggctacaagttcctgacccccctgttcaccaccaagctgagaatccacgacacctgcggcgtgcacaacctgcacggcctgcccggcgtggtgggcggcctggccggcatcgtggccgtggccatgggcgccagcaacaccagcatggccatgcaggccgccgccctgggcagcagcatcggcaccgccgtggtgggcggcctgatgaccggcctgatcctgaagctgcccctgtggggccagcccagcgaccagaactgctacgacgacagcgtgtactggaaggtgcccaagaccagatag

SEQ ID NO: 97057 - DNA, 1233 bp, synthetic construct
  misc_feature 1..1233: note = Description of Artificial Sequence: Synthetic coding sequence
  source 1..1233: mol_type = other DNA
atgagattcaccttccccctgatggccatcgtgctggagatcgccatgatcgtgctgttcggcctgttcgtggagtacgagaccgaccagaccgtgctggagcagctgaacatcaccaagcccaccgacatgggcatcttcttcgagctgtaccccctgttccaggacgtgcacgtgatgatcttcgtgggcttcggcttcctgatgaccttcctgaagaagtacggcttcagcagcgtgggcatcaacctgctggtggccgccctgggcctgcagtggggcaccatcgtgcagggcatcctgcagagccagggccagaagttcaacatcggcatcaagaacatgatcaacgccgacttcagcgccgccaccgtgctgatcagcttcggcgccgtgctgggcaagaccagccccacccagatgctgatcatgaccatcctggagatcgtgttcttcgcccacaacgagtacctggtgagcgagatcttcaaggccagcgacatcggcgccagcatgaccatccacgccttcggcgcctacttcggcctggccgtggccggcatcctgtacagaagcggcctgagaaagggccacgagaacgaggagagcgcctactacagcgacctgttcgccatgatcggcaccctgttcctgtggatgttctggcccagcttcaacagcgccatcgccgagcccggcgacaagcagtgcagagccatcgtgaacacctacttcagcctggccgcctgcgtgctgaccgccttcgccttcagcagcctggtggagcacagaggcaagctgaacatggtgcacatccagaacgccaccctggccggcggcgtggccgtgggcacctgcgccgacatggccatccaccccttcggcagcatgatcatcggcagcatcgccggcatggtgagcgtgctgggctacaagttcctgacccccctgttcaccaccaagctgagaatccacgacacctgcggcgtgcacaacctgcacggcctgcccggcgtggtgggcggcctggccggcatcgtggccgtggccatgggcgccagcaacaccagcatggccatgcaggccgccgccctgggcagcagcatcggcaccgccgtggtgggcggcctgatgaccggcctgatcctgaagctgcccctgtggggccagcccagcgaccagaactgctacgacgacagcgtgtactggaaggtgcccaagaccagagtgtag

SEQ ID NO: 97058 - DNA, 1146 bp, synthetic construct
  misc_feature 1..1146: note = Description of Artificial Sequence: Synthetic coding sequence
  source 1..1146: mol_type = other DNA
atgagattcaccttccccctgatggccatcgtgctggagatcgccatgatcgtgctgttcggcctgttcgtggagtacgagaccgaccagaccgtgctggagcagctgaacatcaccaagcccaccgacatgggcatcttcttcgagctgtaccccctgttccaggacgtgcacgtgatgatcttcgtgggcttcggcttcctgatgaccttcctgaagaagtacggcttcagcagcgtgggcatcaacctgctggtggccgccctgggcctgcagtggggcaccatcgtgcagggcatcctgcagagccagggccagaagttcaacatcggcatcaagaacatgatcaacgccgacttcagcgccgccaccgtgctgatcagcttcggcgccgtgctgggcaagaccagccccacccagatgctgatcatgaccatcctggagatcgtgttcttcgcccacaacgagtacctggtgagcgagatcttcaaggccagcgacatcggcgccagcatgaccatccacgccttcggcgcctacttcggcctggccgtggccggcatcctgtacagaagcggcctgagaaagggccacgagaacgaggagagcgcctactacagcgacctgttcgccatgatcggcaccctgttcctgtggatgttctggcccagcttcaacagcgccatcgccgagcccggcgacaagcagtgcagagccatcgtgaacacctacttcagcctggccgcctgcgtgctgaccgccttcgccttcagcagcctggtggagcacagaggcaagctgaacatggtgcacatccagaacgccaccctggccggcggcgtggccgtgggcacctgcgccgacatggccatccaccccttcggcagcatgatcatcggcagcatcgccggcatggtgagcgtgctgggctacaagttcctgacccccctgttcaccaccaagctgagaatccacgacacctgcggcgtgcacaacctgcacggcctgcccggcgtggtgggcggcctggccggcatcgtggccgtggccatgggcgccagcaacaccagcatggccatgcaggccgccgccctgggcagcagcatcggcaccgccgtggtgggcggcctgatgaccggcacctag

SEQ ID NO: 97059 - DNA, 387 bp, synthetic construct
  misc_feature 1..387: note = Description of Artificial Sequence: Synthetic coding sequence
  source 1..387: mol_type = other DNA
atgaagagcctgatcctgctggccatcctggccgccctggccgtggtgaccctgtgctacggcgagtggcagaaggaggagaacttcggcttcgacatcgtgagcgtgctgagcctgaactggcacagagcccaggagagccacgagagcatggagagctacgagctgaaccccttcatcaacagaagaaacgccaacaccttcatcagcccccagcagagatggagagccaaggtgcaggagagaatcagagagagaagcaagcccgtgcacgagctgaacagagaggcctgcgacgactacagactgtgcgagagatacgccatggtgtacggctacaacgccgcctacaacagatacttcagaaagagaagaggcaccaagtag

SEQ ID NO: 97060 - DNA, 339 bp, synthetic construct
  misc_feature 1..339: note = Description of Artificial Sequence: Synthetic coding sequence
  source 1..339: mol_type = other DNA
atgaccgagaaggcccccgagccccacgtggaggaggacgacgacgacgagctggacagcaagctgaactacaagccccccccccagaagagcctgaaggagctgcaggagatggacaaggacgacgagagcctgatcaagtacaagaagaccctgctgggcgacggccccgtggtgaccgaccccaaggcccccaacgtggtggtgaccagactgaccctggtgtgcgagagcgcccccggccccatcaccatggacctgaccggcgacctggaggccctgaagaaggagaccatcgtgctgaaggagggcagcgagtacagagtgaagatccactag

SEQ ID NO: 97061 - DNA, 606 bp, synthetic construct
  misc_feature 1..606: note = Description of Artificial Sequence: Synthetic coding sequence
  source 1..606: mol_type = other DNA
atgaccgagaaggcccccgagccccacgtggaggaggacgacgacgacgagctggacagcaagctgaactacaagccccccccccagaagagcctgaaggagctgcaggagatggacaaggacgacgagagcctgatcaagtacaagaagaccctgctgggcgacggccccgtggtgaccgaccccaaggcccccaacgtggtggtgaccagactgaccctggtgtgcgagagcgcccccggccccatcaccatggacctgaccggcgacctggaggccctgaagaaggagaccatcgtgctgaaggagggcagcgagtacagagtgaagatccacttcaaggtgaacagagacatcgtgagcggcctgaagtacgtgcagcacacctacagaaccggcgtgaaggtggacaaggccaccttcatggtgggcagctacggccccagacccgaggagtacgagttcctgacccccgtggaggaggcccccaagggcatgctggccagaggcacctaccacaacaagagcttcttcaccgacgacgacaagcaggaccacctgagctgggagtggaacctgagcatcaagaaggagtggaccgagtag

SEQ ID NO: 97062 - DNA, 606 bp, synthetic construct; identical to SEQ ID NO: 97061
  misc_feature 1..606: note = Description of Artificial Sequence: Synthetic coding sequence
  source 1..606: mol_type = other DNA

SEQ ID NO: 97063 - DNA, 267 bp, synthetic construct
  misc_feature 1..267: note = Description of Artificial Sequence: Synthetic coding sequence
  source 1..267: mol_type = other DNA
atgaccgagaaggcccccgagccccacgtggaggaggacgacgacgacgagctggacagcaagctgaactacaagccccccccccagaagagcctgaaggagctgcaggagatggacaaggacgacgagagcctgatcaagtacaagaagaccctgctgggcgacggccccgtggtgaccgaccccaaggcccccaacgtggtggtgaccagactgaccctggtgtgcgagagcgcccccggccccatcaccatggacctgacctag

SEQ ID NO: 97064 - DNA, 480 bp, synthetic construct
  misc_feature 1..480: note = Description of Artificial Sequence: Synthetic coding sequence
  source 1..480: mol_type = other DNA
atgaccgagaaggcccccgagccccacgtggaggaggacgacgacgacgagctggacagcaagctgaactacaagccccccccccagaagagcctgaaggagctgcaggagatggacaaggacgacgagagcctgatcaagtacaagaagaccctgctgggcgacggccccgtggtgaccgaccccaaggcccccaacgtggtggtgaccagactgaccctggtgtgcgagagcgcccccggccccatcaccatggacctgaccggcgacctggaggccctgaagaaggagaccatcgtgctgaaggagggcagcgagtacagagtgaagatccacttcaaggtgaacagagacatcgtgagcggcctgaagtacgtgcagcacacctacagaaccggcgtgaaggtggacaaggccaccttcatggtgggcagctacggccccagacccgaggagtacgagttcctgacccccgtgtag

SEQ ID NO: 97065 - DNA, 1320 bp, synthetic construct
  misc_feature 1..1320: note = Description of Artificial Sequence: Synthetic coding sequence
  source 1..1320: mol_type = other DNA
atggaccccctgagcgagctgcaggacgacctgaccctggacgacaccagcgaggccctgaaccagctgaagctggccagcatcgacgagaagaactggcccagcgacgagatgcccgacttccccaagagcgacgacagcaagagcagcagccccgagctggtgacccacctgaagtgggacgacccctactacgacatcgccagacaccagatcgtggaggtggccggcgacgacaagtacggcagaaagatcatcgtgttcagcgcctgcagaatgccccccagccaccagctggaccacagcaagctgctgggctacctgaagcacaccctggaccagtacgtggagagcgactacaccctgctgtacctgcaccacggcctgaccagcgacaacaagcccagcctgagctggctgagagacgcctacagagagttcgacagaaagtacaagaagaacatcaaggccctgtacatcgtgcaccccaccatgttcatcaagaccctgctgatcctgttcaagcccctgatcagcttcaagttcggccagaagatcttctacgtgaactacctgagcgagctgagcgagcacgtgaagctggagcagctgggcatccccagacaggtgctgaagtacgacgacttcctgaagagcacccagaagagccccgccaccgcccccaagcccatgccccccagaccccccctgcccaaccagcagttcggcgtgagcctgcagcacctgcaggagaagaaccccgagcaggagcccatccccatcgtgctgagagagaccgtggcctacctgcaggcccacgccctgaccaccgagggcatcttcagaagaagcgccaacacccaggtggtgagagaggtgcagcagaagtacaacatgggcctgcccgtggacttcgaccagtacaacgagctgcacctgcccgccgtgatcctgaagaccttcctgagagagctgcccgagcccctgctgaccttcgacctgtacccccacgtggtgggcttcctgaacatcgacgagagccagagagtgcccgccaccctgcaggtgctgcagaccctgcccgaggagaactaccaggtgctgagattcctgaccgccttcctggtgcagatcagcgcccacagcgaccagaacaagatgaccaacaccaacctggccgtggtgttcggccccaacctgctgtgggccaaggacgccgccatcaccctgaaggccatcaaccccatcaacaccttcaccaagttcctgctggaccaccagggcgagctgttccccagccccgaccccagcggcctgtag

SEQ ID NO: 97066 - DNA, 1377 bp, synthetic construct
  misc_feature 1..1377: note = Description of Artificial Sequence: Synthetic coding sequence
  source 1..1377: mol_type = other DNA
atggaccccctgagcgagctgcaggacgacctgaccctggacgacaccagcgaggccctgaaccagctgaagctggccagcatcgacgagaagaactggcccagcgacgagatgcccgacttccccaagagcgacgacagcaagagcagcagccccgagctggtgacccacctgaagtgggacgacccctactacgacatcgccagacaccagatcgtggaggtggccggcgacgacaagtacggcagaaagatcatcgtgttcagcgcctgcagaatgccccccagccaccagctggaccacagcaagctgctgggctacctgaagcacaccctggaccagtacgtggagagcgactacaccctgctgtacctgcaccacggcctgaccagcgacaacaagcccagcctgagctggctgagagacgcctacagagagttcgacagaaagtacaagaagaacatcaaggccctgtacatcgtgcaccccaccatgttcatcaagaccctgctgatcctgttcaagcccctgatcagcttcaagttcggccagaagatcttctacgtgaactacctgagcgagctgagcgagcacgtgaagctggagcagctgggcatccccagacaggtgctgaagtacgacgacttcctgaagagcacccagaagagccccgccaccgcccccaagcccatgccccccagaccccccctgcccaaccagcagttcggcgtgagcctgcagcacctgcaggagaagaaccccgagcaggagcccatccccatcgtgctgagagagaccgtggcctacctgcaggcccacgccctgaccaccgagggcatcttcagaagaagcgccaacacccaggtggtgagagaggtgcagcagaagtacaacatgggcctgcccgtggacttcgaccagtacaacgagctgcacctgcccgccgtgatcctgaagaccttcctgagagagctgcccgagcccctgctgaccttcgacctgtacccccacgtggtgggcttcctgaacatcgacgagagccagagagtgcccgccaccctgcaggtgctgcagaccctgcccgaggagaactaccaggtgctgagattcctgaccgccttcctggtgcagatcagcgcccacagcgaccagaacaagatgaccaacaccaacctggccgtggtgttcggccccaacctgctgtgggccaaggacgccgccatcaccctgaaggccatcaaccccatggccaccttcttcttcttcttcctgagatggagcctggccctgagccccggctggagcgccgtggccagaagcagacacaccagcgccttctgggtgcaggccatcctgctgccccagccccccgagtag

SEQ ID NO: 97067 - DNA, 579 bp, synthetic construct
  misc_feature 1..579: note = Description of Artificial Sequence: Synthetic coding sequence
  source 1..579: mol_type = other DNA
atggaccccctgagcgagctgcaggacgacctgaccctggacgacaccagcgaggccctgaaccagctgaagctggccagcatcgacgagaagaactggcccagcgacgagatgcccgacttccccaagagcgacgacagcaagagcagcagccccgagctggtgacccacctgaagtgggacgacccctactacgacatcgccagacaccagatcgtggaggtggccggcgacgacaagtacggcagaaagatcatcgtgttcagcgcctgcagaatgccccccagccaccagctggaccacagcaagctgctgggctacctgaagcacaccctggaccagtacgtggagagcgactacaccctgctgtacctgcaccacggcctgaccagcgacaacaagcccagcctgagctggctgagagacgcctacagagagttcgacagaaagtacaagaagaacatcaaggccctgtacatcgtgcaccccaccatgttcatcaagaccctgctgatcctgttcaagcccctgatcagcttcaagttcggccagaagatcttctacgtgaactacctgtag

SEQ ID NO: 97068 - DNA, 2361 bp, synthetic construct
  misc_feature 1..2361: note = Description of Artificial Sequence: Synthetic coding sequence
  source 1..2361: mol_type = other DNA
atgggcctgcagcccctggagttcagcgactgctacctggacagcccctggttcagagagagaatcagagcccacgaggccgagctggagagaaccaacaagttcatcaaggagctgatcaaggacggcaagaacctgatcgccgccaccaagagcctgagcgtggcccagagaaagttcgcccacagcctgagagacttcaagttcgagttcatcggcgacgccgtgaccgacgacgagagatgcatcgacgccagcctgagagagttcagcaacttcctgaagaacctggaggagcagagagagatcatggccctgagcgtgaccgagaccctgatcaagcccctggagaagttcagaaaggagcagctgggcgccgtgaaggaggagaagaagaagttcgacaaggagaccgagaagaactacagcctgatcgacaagcacctgaacctgagcgccaagaagaaggacagccacctgcaggaggccgacatccaggtggagcagaacagacagcacttctacgagctgagcctggagtacgtgtgcaagctgcaggagatccaggagagaaagaagttcgagttcgtggagcccatgctgagcttcttccagggcatgttcaccttctaccaccagggccacgagctggccaaggacttcaaccactacaagatggagctgcagatcaacatccagaacaccagaaacagattcgagggcaccagaagcgaggtggaggagctgatgaacaagatcagacagaaccccaaggaccacaagagagccagccagttcaccgccgagggctacctgtacgtgcaggagaagagacccgcccccttcggcagcagctgggtgaagcactactgcatgtacagaaaggccgccaagaagttcaacatgatccccttcgagcacagaagcggcggcaagctgggcgacggcgaggtgttcttcctgaaggagtgcaccaagagacacaccgacagcatcgacagaagattctgcttcgacatcgaggccgccgacagacccggcgtgagcctgaccatgcaggccttcagcgaggaggagagaaagcagtggctggaggccctgggcggcaaggaggccctgagccacagcttcaacaccgccatcatccccagacccgagggcaacgcccagctggacaagatgggcttcaccatcatcagaaagtgcatcagcgccgtggagaccagaggcatcaacgaccagggcctgtacagagtggtgggcgtgagcagcaaggtgcagagactgctgagcatgctgatggacgtgaagacctgcaacgaggtggacctggagaacagcgccgactgggaggtgaagaccatcaccagcgccctgaagcagtacctgagaagcctgcccgagcccctgatgacctacgagctgcacggcgacttcatcgtgcccgccaagagcggcagccccgagagcagagtgaacgccatccacttcctggtgcacaagctgcccgagaagaacaaggagatgctggacatcctggtgaagcacctgaccaacgtgagcaaccacagcaagcagaacctgatgaccgtggccaacctgggcgtggtgttcggccccaccctgatgagaccccaggaggagaccgtggccgccctgatggacctgaagttccagaacatcgtggtggagatcctgatcgagaaccacgagaagatcttcagaaccccccccgacaccaccttccccgagcccacctgcctgagcgccagcccccccaacgccccccccagacagagcaagagacagggccagagaaccaagagacccgtggccgtgtacaacctgtgcctggagctggaggacggcgacaacccctaccccagcaaggaggacacccccaccagcagcctggacagcctgagcagccccagccccgtgaccaccgccgtgcccggcccccccggccccgacaagaaccacctgctggccgacggcggcagcttcggcgactgggccagcaccatccccggccagaccagaagcagcatggtgcagtggctgaacccccagagccccaccaccaccagcagcaacagcgccgtgacccccctgagccccggcagcagccccttccccttcagcccccccgccaccgtggccgacaagccccccgagagcatcagaagcagaaaggccagagccgtgtacccctgcgaggccgagcacagcagcgagctgagcttcgagatcggcgccatcttcgaggacgtgcagaccagcagagagcccggctggctggagggcaccctgaacggcaagagaggcctgatcccccagaactacgtgaagctgctgtag

SEQ ID NO: 97069 - DNA, 1155 bp, synthetic construct
  misc_feature 1..1155: note = Description of Artificial Sequence: Synthetic coding sequence
  source 1..1155: mol_type = other DNA
atgcaggccttcagcgaggaggagagaaagcagtggctggaggccctgggcggcaaggaggccctgagccacagcttcaacaccgccatcatccccagacccgagggcaacgcccagctggacaagatgggcttcaccatcatcagaaagtgcatcagcgccgtggagaccagaggcatcaacgaccagggcctgtacagagtggtgggcgtgagcagcaaggtgcagagactgctgagcatgctgatggacgtgaagacctgcaacgaggtggacctggagaacagcgccgactgggaggtgaagaccatcaccagcgccctgaagcagtacctgagaagcctgcccgagcccctgatgacctacgagctgcacggcgacttcatcgtgcccgccaagagcggcagccccgagagcagagtgaacgccatccacttcctggtgcacaagctgcccgagaagaacaaggagatgctggacatcctggtgaagcacctgaccaacgtgagcaaccacagcaagcagaacctgatgaccgtggccaacctgggcgtggtgttcggccccaccctgatgagaccccaggaggagaccgtggccgccctgatggacctgaagttccagaacatcgtggtggagatcctgatcgagaaccacgagaagatcttcagaaccccccccgacaccaccttccccgagcccacctgcctgagcgccagcccccccaacgccccccccagacagagcaagagacagggccagagaaccaagagacccgtggccgtgtacaacctgtgcctggagctggaggacggcgacaacccctaccccagcaaggaggacacccccaccagcagcctggacagcctgagcagccccagccccgtgaccaccgccgtgcccggcccccccggccccgacaagaaccacctgctggccgacggcggcagcttcggcgactgggccagcaccatcatcagaagcagaaaggccagagccgtgtacccctgcgaggccgagcacagcagcgagctgagcttcgagatcggcgccatcttcgaggacgtgcagaccagcagagagcccggctggctggagggcaccctgaacggcaagagaggcctgatcccccagaactacgtgaagctgctgtag

SEQ ID NO: 97070 - DNA, 3072 bp, synthetic construct
  misc_feature 1..3072: note = Description of Artificial Sequence: Synthetic coding sequence
  source 1..3072: mol_type = other DNA
atgtgggaccagagactggtgagactggccctgctgcagcacctgagagccttctacggcatcaaggtgaagggcgtgagaggccagtgcgacagaagaagacacgagaccgccgccaccgagatcggcggcaagatcttcggcgtgcccttcaacgccctgccccacagcgccgtgcccgagtacggccacatccccagcttcctggtggacgcctgcaccagcctggaggaccacatccacaccgagggcctgttcagaaagagcggcagcgtgatcagactgaaggccctgaagaacaaggtggaccacggcgagggctgcctgagcagcgcccccccctgcgacatcgccggcctgctgaagcagttcttcagagagctgcccgagcccatcctgcccgccgacctgcacgaggccctgctgaaggcccagcagctgggcaccgaggagaagaacaaggccaccctgctgctgagctgcctgctggccgaccacaccgtgcacgtgctgagatacttcttcaacttcctgagaaacgtgagcctgagaagcagcgagaacaagatggacagcagcaacctggccgtgatcttcgcccccaacctgctgcagaccagcgagggccacgagaagatgagcagcaacaccgagaagaagctgagactgcaggccgccgtggtgcagaccctgatcgactacgccagcgacatcggcagagtgcccgacttcatcctggagaagatccccgccatgctgggcatcgacggcctgtgcgccacccccagcctggagggcttcgaggagggcgagtacgagacccccggcgagtacaagagaaagagaagacagagcgtgggcgacttcgtgagcggcgccctgaacaagttcaagcccaacagaacccccagcatcaccccccaggaggagagaatcgcccagctgagcgagagccccgtgatcctgacccccaacgccaagagaaccctgcccgtggacagcagccacggcttcagcagcaagaagagaaagagcatcaagcacaacttcaacttcgagctgctgcccagcaacctgttcaacagcagcagcacccccgtgagcgtgcacatcgacaccagcagcgagggcagcagccagagcagcctgagccccgtgctgatcggcggcaaccacctgatcaccgccggcgtgcccagaagaagcaagagaatcgccggcaagaaggtgtgcagagtggagagcggcaaggccggctgcttcagccccaagatcagccacaaggagaaggtgagaagaagcctgagactgaagttcaacctgggcaagaacggcagagaggtgaacggctgcagcggcgtgaacagatacgagagcgtgggctggagactggccaaccagcagagcctgaagaacagaatcgagagcgtgaagaccggcctgctgttcagccccgacgtggacgagaagctgcccaagaagggcagcgagaagatcagcaagagcgaggagaccctgctgacccccgagagactggtgggcaccaactacagaatgagctggaccggccccaacaacagcagcttccaggaggtggacgccaacgaggccagcagcatggtggagaacctggaggtggagaacagcctggagcccgacatcatggtggagaagagccccgccaccagctgcgagctgacccccagcaacctgaacaacaagcacaacagcaacatcaccagcagccccctgagcggcgacgagaacaacatgaccaaggagaccctggtgaaggtgcagaaggccttcagcgagagcggcagcaacctgcacgccctgatgaaccagagacagagcagcgtgaccaacgtgggcaaggtgaagctgaccgagcccagctacctggaggacagccccgaggagaacctgttcgagaccaacgacctgaccatcgtggagagcaaggagaagtacgagcaccacaccggcaagggcgagaagtgcttcagcgagagagacttcagccccctgcagacccagaccttcaacagagagaccaccatcaagtgctacagcacccagatgaagatggagcacgagaaggacatccacagcaacatgcccaaggactacctgagcaagcaggagttcagcagcgacgaggagatcaagaagcagcagagccccaaggacaagctgaacaacaagctgaaggagaacgagaacatgatggagggcaacctgcccaagtgcgccgcccacagcaaggacgaggccagaagcagcttcagccagcagagcacctgcgtggtgaccaacctgagcaagcccagacccatgagaatcgccaagcagcagagcctggagacctgcgagaagaccgtgagcgagagcagccagatgaccgagcacagaaaggtgagcgaccacatccagtggttcaacaagctgagcctgaacgagcccaacagaatcaaggtgaagagccccctgaagttccagagaacccccgtgagacagagcgtgagaagaatcaacagcctgctggagtacagcagacagcccaccggccacaagctggccagcctgggcgacaccgccagccccctggtgaagagcgtgagctgcgacggcgccctgagcagctgcatcgagagcgccagcaaggacagcagcgtgagctgcatcaagagcggccccaaggagcagaagagcatgagctgcgaggagagcaacatcggcgccatcagcaagagcagcatggagctgcccagcaagagcttcctgaagatgagaaagcaccccgacagcgtgaacgccagcctgagaagcaccaccgtgtacaagcagaagatcctgagcgacggccaggtgaaggtgcccctggacgacctgaccaaccacgacatcgtgaagcccgtggtgaacaacaacatgggcatcagcagcggcatcaacaacagagtgctgagaagacccagcgagagaggcagagcctggtacaagggcagccccaagcaccccatcggcaagacccagctgctgcccaccagcaagcccgtggacctgtag

SEQ ID NO: 97071 - DNA, 2505 bp, synthetic construct
  misc_feature 1..2505: note = Description of Artificial Sequence: Synthetic coding sequence
  source 1..2505: mol_type = other DNA
atggacagcagcaacctggccgtgatcttcgcccccaacctgctgcagaccagcgagggccacgagaagatgagcagcaacaccgagaagaagctgagactgcaggccgccgtggtgcagaccctgatcgactacgccagcgacatcggcagagtgcccgacttcatcctggagaagatccccgccatgctgggcatcgacggcctgtgcgccacccccagcctggagggcttcgaggagggcgagtacgagacccccggcgagtacaagagaaagagaagacagagcgtgggcgacttcgtgagcggcgccctgaacaagttcaagcccaacagaacccccagcatcaccccccaggaggagagaatcgcccagctgagcgagagccccgtgatcctgacccccaacgccaagagaaccctgcccgtggacagcagccacggcttcagcagcaagaagagaaagagcatcaagcacaacttcaacttcgagctgctgcccagcaacctgttcaacagcagcagcacccccgtgagcgtgcacatcgacaccagcagcgagggcagcagccagagcagcctgagccccgtgctgatcggcggcaaccacctgatcaccgccggcgtgcccagaagaagcaagagaatcgccggcaagaaggtgtgcagagtggagagcggcaaggccggctgcttcagccccaagatcagccacaaggagaaggtgagaagaagcctgagactgaagttcaacctgggcaagaacggcagagaggtgaacggctgcagcggcgtgaacagatacgagagcgtgggctggagactggccaaccagcagagcctgaagaacagaatcgagagcgtgaagaccggcctgctgttcagccccgacgtggacgagaagctgcccaagaagggcagcgagaagatcagcaagagcgaggagaccctgctgacccccgagagactggtgggcaccaactacagaatgagctggaccggccccaacaacagcagcttccaggaggtggacgccaacgaggccagcagcatggtggagaacctggaggtggagaacagcctggagcccgacatcatggtggagaagagccccgccaccagctgcgagctgacccccagcaacctgaacaacaagcacaacagcaacatcaccagcagccccctgagcggcgacgagaacaacatgaccaaggagaccctggtgaaggtgcagaaggccttcagcgagagcggcagcaacctgcacgccctgatgaaccagagacagagcagcgtgaccaacgtgggcaaggtgaagctgaccgagcccagctacctggaggacagccccgaggagaacctgttcgagaccaacgacctgaccatcgtggagagcaaggagaagtacgagcaccacaccggcaagggcgagaagtgcttcagcgagagagacttcagccccctgcagacccagaccttcaacagagagaccaccatcaagtgctacagcacccagatgaagatggagcacgagaaggacatccacagcaacatgcccaaggactacctgagcaagcaggagttcagcagcgacgaggagatcaagaagcagcagagccccaaggacaagctgaacaacaagctgaaggagaacgagaacatgatggagggcaacctgcccaagtgcgccgcccacagcaaggacgaggccagaagcagcttcagccagcagagcacctgcgtggtgaccaacctgagcaagcccagacccatgagaatcgccaagcagcagagcctggagacctgcgagaagaccgtgagcgagagcagccagatgaccgagcacagaaaggtgagcgaccacatccagtggttcaacaagctgagcctgaacgagcccaacagaatcaaggtgaagagccccctgaagttccagagaacccccgtgagacagagcgtgagaagaatcaacagcctgctggagtacagcagacagcccaccggccacaagctggccagcctgggcgacaccgccagccccctggtgaagagcgtgagctgcgacggcgccctgagcagctgcatcgagagcgccagcaaggacagcagcgtgagctgcatcaagagcggccccaaggagcagaagagcatgagctgcgaggagagcaacatcggcgccatcagcaagagcagcatggagctgcccagcaagagcttcctgaagatgagaaagcaccccgacagcgtgaacgccagcctgagaagcaccaccgtgtacaagcagaagatcctgagcgacggccaggtgaaggtgcccctggacgacctgaccaaccacgacatcgtgaagcccgtggtgaacaacaacatgggcatcagcagcggcatcaacaacagagtgctgagaagacccagcgagagaggcagagcctggtacaagggcagccccaagcaccccatcggcaagacccagctgctgcccaccagcaagcccgtggacctgtag

SEQ ID NO: 97072 - DNA, 1506 bp, synthetic construct
  misc_feature 1..1506: note = Description of Artificial Sequence: Synthetic coding sequence
  source 1..1506: mol_type = other DNA
atgtgggaccagagactggtgagactggccctgctgcagcacctgagagccttctacggcatcaaggtgaagggcgtgagaggccagtgcgacagaagaagacacgagaccgccgccaccgagatcggcggcaagatcttcggcgtgcccttcaacgccctgccccacagcgccgtgcccgagtacggccacatccccagcttcctggtggacgcctgcaccagcctggaggaccacatccacaccgagggcctgttcagaaagagcggcagcgtgatcagactgaaggccctgaagaacaaggtggaccacggcgagggctgcctgagcagcgcccccccctgcgacatcgccggcctgctgaagcagttcttcagagagctgcccgagcccatcctgcccgccgacctgcacgaggccctgctgaaggcccagcagctgggcaccgaggagaagaacaaggccaccctgctgctgagctgcctgctggccgaccacaccgtgcacgtgctgagatacttcttcaacttcctgagaaacgtgagcctgagaagcagcgagaacaagatggacagcagcaacctggccgtgatcttcgcccccaacctgctgcagaccagcgagggccacgagaagatgagcagcaacaccgagaagaagctgagactgcaggccgccgtggtgcagaccctgatcgactacgccagcgacatcggcagagtgcccgacttcatcctggagaagatccccgccatgctgggcatcgacggcctgtgcgccacccccagcctggagggcttcgaggagggcgagtacgagacccccggcgagtacaagagaaagagaagacagagcgtgggcgacttcgtgagcggcgccctgaacaagttcaagcccaacagaacccccagcatcaccccccaggaggagagaatcgcccagctgagcgagagccccgtgatcctgacccccaacgccaagagaaccctgcccgtggacagcagccacggcttcagcagcaagaagagaaagagcatcaagcacaacttcaacttcgagctgctgcccagcaacctgttcaacagcagcagcacccccgtgagcgtgcacatcgacaccagcagcgagggcagcagccagagcagcctgagccccgtgctgatcggcggcaaccacctgatcaccgccggcgtgcccagaagaagcaagagaatcgccggcaagaaggtgtgcagagtggagagcggcaaggccggctgcttcagccccaagatcagccacaaggagaaggtgagaagaagcctgagactgaagttcaacctgggcaagaacggcagagaggtgaacggctgcagcggcgtgaacagatacgagagcgtgggctggagactggccaaccagcagagcctgaagaacagaatcgagagcgtgaagaccggcctgctgttcagccccgacgtggacgagaagctgcccaagaagggcaccttcacctactactgctag

SEQ ID NO: 97073 - DNA, 2385 bp, synthetic construct
  misc_feature 1..2385: note = Description of Artificial Sequence: Synthetic coding sequence
  source 1..2385: mol_type = other DNA
atgaagatggccgacagaagcggcaagatcatccccggccaggtgtacatcgaggtggagtacgactacgagtacgaggccaaggacagaaagatcgtgatcaagcagggcgagagatacatcctggtgaagaagaccaacgacgactggtggcaggtgaagcccgacgagaacagcaaggccttctacgtgcccgcccagtacgtgaaggaggtgaccagaaaggccctgatgccccccgtgaagcaggtggccggcctgcccaacaacagcaccaagatcatgcagagcctgcacctgcagagaagcaccgagaacgtgaacaagctgcccgagctgagcagcttcggcaagcccagcagcagcgtgcagggcaccggcctgatcagagacgccaaccagaacttcggccccagctacaaccagggccagaccgtgaacctgagcctggacctgacccacaacaacggcaagttcaacaacgacagccacagccccaaggtgagcagccagaacagaaccagaagcttcggccacttccccggccccgagttcctggacgtggagaagaccagcttcagccaggagcagagctgcgacagcgccggcgagggcagcgagagaatccaccaggacagcgagagcggcgacgagctgagcagcagcagcaccgagcagatcagagccaccaccccccccaaccagggcagacccgacagccccgtgtacgccaacctgcaggagctgaagatcagccagagcgccctgccccccctgcccggcagccccgccatccagatcaacggcgagtgggagacccacaaggacagcagcggcagatgctactactacaacagaggcacccaggagagaacctggaagccccccagatggaccagagacgccagcatcagcaagggcgacttccagaaccccggcgaccaggagtggctgaagcacgtggacgaccagggcagacagtactactacagcgccgacggcagcagaagcgagtgggagctgcccaagtacaacgccagcagccagcagcagagagagatcatcaagagcagaagcctggacagaagactgcaggagcccatcgtgctgaccaagtggagacacagcaccatcgtgctggacaccaacgacaaggagagccccaccgccagcaagccctgcttccccgagaacgagagcagccccagcagccccaagcaccaggacaccgaccaggagaagtacggcctgctgaacgtgaccaagatcgccgagaacggcaagaaggtgagaaagaactggctgagcagctgggccgtgctgcagggcagcagcctgctgttcaccaagacccagggcagcagcaccagctggttcggcagcaaccagagcaagcccgagttcaccgtggacctgaagggcgccaccatcgagatggccagcaaggacaagagcagcaagaagaacgtgttcgagctgaagaccagacagggcaccgagctgctgatccagagcgacaacgacaccgtgatcaacgactggttcaaggtgctgagcagcaccatcaacaaccaggccgtggagaccgacgagggcatcgaggaggagatccccgacagccccggcatcgagaagcacgacaaggagaaggagcagaaggaccccaagaagctgagaagcttcaaggtgagcagcatcgacagcagcgagcagaagaagaccaagaagaacctgaagaagttcctgaccagaagacccaccctgcaggccgtgagagagaagggctacatcaaggaccaggtgttcggcagcaacctggccaacctgtgccagagagagaacggcaccgtgcccaagttcgtgaagctgtgcatcgagcacgtggaggagcacggcctggacatcgacggcatctacagagtgagcggcaacctggccgtgatccagaagctgagattcgccgtgaaccacgacgagaagctggacctgaacgacagcaagtgggaggacatccacgtgatcaccggcgccctgaagatgttcttcagagagctgcccgagcccctgttcaccttcaaccacttcaacgacttcgtgaacgccatcaagcaggagcccagacagagagtggccgccgtgaaggacctgatcagacagctgcccaagcccaaccaggacaccatgcagatcctgttcagacacctgagaagagtgatcgagaacggcgagaagaacagaatgacctaccagagcatcgccatcgtgttcggccccaccctgctgaagcccgagaaggagaccggcaacatcgccgtgcacaccgtgtaccagaaccagatcgtggagctgatcctgctggagctgagcagcatcttcggcagatag

SEQ ID NO: 97074 - DNA, 2541 bp, synthetic construct
  misc_feature 1..2541: note = Description of Artificial Sequence: Synthetic coding sequence
  source 1..2541: mol_type = other DNA
atgaagatggccgacagaagcggcaagatcatccccggccaggtgtacatcgaggtggagtacgactacgagtacgaggccaaggacagaaagatcgtgatcaagcagggcgagagatacatcctggtgaagaagaccaacgacgactggtggcaggtgaagcccgacgagaacagcaaggccttctacgtgcccgcccagtacgtgaaggaggtgaccagaaaggccctgatgccccccgtgaagcaggtggccggcctgcccaacaacagcaccaagatcatgcagagcctgcacctgcagagaagcaccgagaacgtgaacaagctgcccgagctgagcagcttcggcaagcccagcagcagcgtgcagggcaccggcctgatcagagacgccaaccagaacttcggccccagctacaaccagggccagaccgtgaacctgagcctggacctgacccacaacaacggcaagttcaacaacgacagccacagccccaaggtgagcagccagaacagaaccagaagcttcggccacttccccggccccgagttcctggacgtggagaagaccagcttcagccaggagcagagctgcgacagcgccggcgagggcagcgagagaatccaccaggacagcgagagcggcgacgagctgagcagcagcagcaccgagcagatcagagccaccaccccccccaaccagggcagacccgacagccccgtgtacgccaacctgcaggagctgaagatcagccagagcgccctgccccccctgcccggcagccccgccatccagatcaacggcgagtgggagacccacaaggacagcagcggcagatgctactactacaacagaggcacccaggagagaacctggaagccccccagatggaccagagacgccagcatcagcaagggcgacttccagaaccccggcgaccaggagctgctgagcagcgaggagaactactacagcaccagctacagccagagcgacagccagtgcggcagcccccccagaggctggagcgaggagctggacgagagaggccacaccctgtacaccagcgactacaccaacgagaagtggctgaagcacgtggacgaccagggcagacagtactactacagcgccgacggcagcagaagcgagtgggagctgcccaagtacaacgccagcagccagcagcagagagagatcatcaagagcagaagcctggacagaagactgcaggagcccatcgtgctgaccaagtggagacacagcaccatcgtgctggacaccaacgacaaggagagccccaccgccagcaagccctgcttccccgagaacgagagcagccccagcagccccaagcaccaggacaccgccagcagccccaaggaccaggagaagtacggcctgctgaacgtgaccaagatcgccgagaacggcaagaaggtgagaaagaactggctgagcagctgggccgtgctgcagggcagcagcctgctgttcaccaagacccagggcagcagcaccagctggttcggcagcaaccagagcaagcccgagttcaccgtggacctgaagggcgccaccatcgagatggccagcaaggacaagagcagcaagaagaacgtgttcgagctgaagaccagacagggcaccgagctgctgatccagagcgacaacgacaccgtgatcaacgactggttcaaggtgctgagcagcaccatcaacaaccaggccgtggagaccgacgagggcatcgaggaggagatccccgacagccccggcatcgagaagcacgacaaggagaaggagcagaaggaccccaagaagctgagaagcttcaaggtgagcagcatcgacagcagcgagcagaagaagaccaagaagaacctgaagaagttcctgaccagaagacccaccctgcaggccgtgagagagaagggctacatcaaggaccaggtgttcggcagcaacctggccaacctgtgccagagagagaacggcaccgtgcccaagttcgtgaagctgtgcatcgagcacgtggaggagcacggcctggacatcgacggcatctacagagtgagcggcaacctggccgtgatccagaagctgagattcgccgtgaaccacgacgagaagctggacctgaacgacagcaagtgggaggacatccacgtgatcaccggcgccctgaagatgttcttcagagagctgcccgagcccctgttcaccttcaaccacttcaacgacttcgtgaacgccatcaagcaggagcccagacagagagtggccgccgtgaaggacctgatcagacagctgcccaagcccaaccaggacaccatgcagatcctgttcagacacctgagaagagtgatcgagaacggcgagaagaacagaatgacctaccagagcatcgccatcgtgttcggccccaccctgctgaagcccgagaaggagaccggcaacatcgccgtgcacaccgtgtaccagaaccagatcgtggagctgatcctgctggagctgagcagcatcttcggcagatag

SEQ ID NO: 97075 - DNA, 2385 bp, synthetic construct; identical to SEQ ID NO: 97073
  misc_feature 1..2385: note = Description of Artificial Sequence: Synthetic coding sequence
  source 1..2385: mol_type = other DNA

SEQ ID NO: 97076 - DNA, 2451 bp, synthetic construct
  misc_feature 1..2451: note = Description of Artificial Sequence: Synthetic coding sequence
  source 1..2451: mol_type = other DNA
atgaagatggccgacagaagcggcaagatcatccccggccaggtgtacatcgaggtggagtacgactacgagtacgaggccaaggacagaaagatcgtgatcaagcagggcgagagatacatcctggtgaagaagaccaacgacgactggtggcaggtgaagcccgacgagaacagcaaggccttctacgtgcccgcccagtacgtgaaggaggtgaccagaaaggccctgatgccccccgtgaagcaggtggccggcctgcccaacaacagcaccaagatcatgcagagcctgcacctgcagagaagcaccgagaacgtgaacaagctgcccgagctgagcagcttcggcaagcccagcagcagcgtgcagggcaccggcctgatcagagacgccaaccagaacttcggccccagctacaaccagggccagaccgtgaacctgagcctggacctgacccacaacaacggcaagttcaacaacgacagccacagccccaaggtgagcagccagaacagaaccagaagcttcggccacttccccggccccgagttcctggacgtggagaagaccagcttcagccaggagcagagctgcgacagcgccggcgagggcagcgagagaatccaccaggacagcgagagcggcgacgagctgagcagcagcagcaccgagcagatcagagccaccaccccccccaaccagggcagacccgacagccccgtgtacgccaacctgcaggagctgaagatcagccagagcgccctgccccccctgcccggcagccccgccatccagatcaacggcgagtgggagacccacaaggacagcagcggcagatgctactactacaacagaggcacccaggagagaacctggaagccccccagatggaccagagacgccagcatcagcaagggcgacttccagaaccccggcgaccaggagctgctgagcagcgaggagaactactacagcaccagctacagccagagcgacagccagtgcggcagcccccccagaggctggagcgaggagctggacgagagaggccacaccctgtacaccagcgactacaccaacgagaagtggctgaagcacgtggacgaccagggcagacagtactactacagcgccgacggcagcagaagcgagtgggagctgcccaagtacaacgccagcagccagcagcagagagagatcatcaagagcagaagcctggacagaagactgcaggagcccatcgtgctgaccaagtggagacacagcaccatcgtgctggacaccaacgacaaggaccaggagaagtacggcctgctgaacgtgaccaagatcgccgagaacggcaagaaggtgagaaagaactggctgagcagctgggccgtgctgcagggcagcagcctgctgttcaccaagacccagggcagcagcaccagctggttcggcagcaaccagagcaagcccgagttcaccgtggacctgaagggcgccaccatcgagatggccagcaaggacaagagcagcaagaagaacgtgttcgagctgaagaccagacagggcaccgagctgctgatccagagcgacaacgacaccgtgatcaacgactggttcaaggtgctgagcagcaccatcaacaaccaggccgtggagaccgacgagggcatcgaggaggagatccccgacagccccggcatcgagaagcacgacaaggagaaggagcagaaggaccccaagaagctgagaagcttcaaggtgagcagcatcgacagcagcgagcagaagaagaccaagaagaacctgaagaagttcctgaccagaagacccaccctgcaggccgtgagagagaagggctacatcaaggaccaggtgttcggcagcaacctggccaacctgtgccagagagagaacggcaccgtgcccaagttcgtgaagctgtgcatcgagcacgtggaggagcacggcctggacatcgacggcatctacagagtgagcggcaacctggccgtgatccagaagctgagattcgccgtgaaccacgacgagaagctggacctgaacgacagcaagtgggaggacatccacgtgatcaccggcgccctgaagatgttcttcagagagctgcccgagcccctgttcaccttcaaccacttcaacgacttcgtgaacgccatcaagcaggagcccagacagagagtggccgccgtgaaggacctgatcagacagctgcccaagcccaaccaggacaccatgcagatcctgttcagacacctgagaagagtgatcgagaacggcgagaagaacagaatgacctaccagagcatcgccatcgtgttcggccccaccctgctgaagcccgagaaggagaccggcaacatcgccgtgcacaccgtgtaccagaaccagatcgtggagctgatcctgctggagctgagcagcatcttcggcagatag

SEQ ID NO: 97077 - DNA, 2526 bp, synthetic construct
  misc_feature 1..2526: note = Description of Artificial Sequence: Synthetic coding sequence
  source 1..2526: mol_type = other DNA
atgaagatggccgacagaagcggcaagatcatccccggccaggtgtacatcgaggtggagtacgactacgagtacgaggccaaggacagaaagatcgtgatcaagcagggcgagagatacatcctggtgaagaagaccaacgacgactggtggcaggtgaagcccgacgagaacagcaaggccttctacgtgcccgcccagtacgtgaaggaggtgaccagaaaggccctgatgccccccgtgaagcaggtggccggcctgcccaacaacagcaccaagatcatgcagagcctgcacctgcagagaagcaccgagaacgtgaacaagctgcccgagctgagcagcttcggcaagcccagcagcagcgtgcagggcaccggcctgatcagagacgccaaccagaacttcggccccagctacaaccagggccagaccgtgaacctgagcctggacctgacccacaacaacggcaagttcaacaacgacagccacagccccaaggtgagcagccagaacagaaccagaagcttcggccacttccccggccccgagttcctggacgtggagaagaccagcttcagccaggagcagagctgcgacagcgccggcgagggcagcgagagaatccaccaggacagcgagagcggcgacgagctgagcagcagcagcaccgagcagatcagagccaccaccccccccaaccagggcagacccgacagccccgtgtacgccaacctgcaggagctgaagatcagccagagcgccctgccccccctgcccggcagccccgccatccagatcaacggcgagtgggagacccacaaggacagcagcggcagatgctactactacaacagaggcacccaggagagaacctggaagccccccagatggaccagagacgccagcatcagcaagggcgacttccagaaccccggcgaccaggagctgctgagcagcgaggagaactactacagcaccagctacagccagagcgacagccagtgcggcagcccccccagaggctggagcgaggagctggacgagagaggccacaccctgtacaccagcgactacaccaacgagaagtggctgaagcacgtggacgaccagggcagacagtactactacagcgccgacggcagcagaagcgagtgggagctgcccaagtacaacgccagcagccagcagcagagagagatcatcaagagcagaagcctggacagaagactgcaggagcccatcgtgctgaccaagtggagacacagcaccatcgtgctggacaccaacgacaaggagagccccaccgccagcaagccctgcttccccgagaacgagagcagccccagcagccccaagcaccaggacaccgaccaggagaagtacggcctgctgaacgtgaccaagatcgccgagaacggcaagaaggtgagaaagaactggctgagcagctgggccgtgctgcagggcagcagcctgctgttcaccaagacccagggcagcagcaccagctggttcggcagcaaccagagcaagcccgagttcaccgtggacctgaagggcgccaccatcgagatggccagcaaggacaagagcagcaagaagaacgtgttcgagctgaagaccagacagggcaccgagctgctgatccagagcgacaacgacaccgtgatcaacgactggttcaaggtgctgagcagcaccatcaacaaccaggccgtggagaccgacgagggcatcgaggaggagatccccgacagccccggcatcgagaagcacgacaaggagaaggagcagaaggaccccaagaagctgagaagcttcaaggtgagcagcatcgacagcagcgagcagaagaagaccaagaagaacctgaagaagttcctgaccagaagacccaccctgcaggccgtgagagagaagggctacatcaaggaccaggtgttcggcagcaacctggccaacctgtgccagagagagaacggcaccgtgcccaagttcgtgaagctgtgcatcgagcacgtggaggagcacggcctggacatcgacggcatctacagagtgagcggcaacctggccgtgatccagaagctgagattcgccgtgaaccacgacgagaagctggacctgaacgacagcaagtgggaggacatccacgtgatcaccggcgccctgaagatgttcttcagagagctgcccgagcccctgttcaccttcaaccacttcaacgacttcgtgaacgccatcaagcaggagcccagacagagagtggccgccgtgaaggacctgatcagacagctgcccaagcccaaccaggacaccatgcagatcctgttcagacacctgagaagagtgatcgagaacggcgagaagaacagaatgacctaccagagcatcgccatcgtgttcggccccaccctgctgaagcccgagaaggagaccggcaacatcgccgtgcacaccgtgtaccagaaccagatcgtggagctgatcctgctggagctgagcagcatcttcggcagatag

SEQ ID NO: 97078 - DNA, 591 bp, synthetic construct
  misc_feature 1..591: note = Description of Artificial Sequence: Synthetic coding sequence
  source 1..591: mol_type = other DNA
tgaagcaccagctacagccagagcgacagccagtgcggcagcccccccagaggctggagcgaggagctggacgagagaggccacaccctgtacaccagcgactacaccaacgagaagtggctgaagcacgtggacgaccagggcagacagtactactacagcgccgacggcagcagaagcgagtgggagctgcccaagtacaacgccagcagccagcagcagagagagatcatcaagagcagaagcctggacagaagactgcaggagcccatcgtgctgaccaagtggagacacagcaccatcgtgctggacaccaacgacaaggagagccccaccgccagcaagccctgcttccccgagaacgagagcagccccagcagccccaagcaccaggacaccgaccaggagaagtacggcctgctgaacgtgaccaagatcgccgagaacggcaagaaggtgagaaagaactggctgagcagctgggccgtgctgcagggcagcagcctgctgttcaccaagacccagggcagcagcaccagctggttcggcagcaaccagagcaagcccgagttcaccgtggacctgaagtag

SEQ ID NO: 97079 - DNA, 2646 bp, synthetic construct
  misc_feature 1..2646: note = Description of Artificial Sequence: Synthetic coding sequence
  source 1..2646: mol_type = other DNA
atgaagaagcagttcaacagaatgaagcagctggccaaccagaccgtgggcagagccgagaagaccgaggtgctgagcgaggacctgctgcagatcgagagaagactggacaccgtgagaagcatctgccaccacagccacaagagactggtggcctgcttccagggccagcacggcaccgacgccgagagaagacacaagaagctgcccctgaccgccctggcccagaacatgcaggaggccagcacccagctggaggacagcctgctgggcaagatgctggagacctgcggcgacgccgagaaccagctggccctggagctgagccagcacgaggtgttcgtggagaaggagatcgtggaccccctgtacggcatcgccgaggtggagatccccaacatccagaagcagagaaagcagctggccagactggtgctggactgggacagcgtgagagccagatggaaccaggcccacaagagcagcggcaccaacttccagggcctgcccagcaagatcgacaccctgaaggaggagatggacgaggccggcaacaaggtggagcagtgcaaggaccagctggccgccgacatgtacaacttcatggccaaggagggcgagtacggcaagttcttcgtgaccctgctggaggcccaggccgactaccacagaaaggccctggccgtgctggagaagaccctgcccgagatgagagcccaccaggacaagtgggccgagaagcccgccttcggcacccccctggaggagcacctgaagagaagcggcagagagatcgccctgcccatcgaggcctgcgtgatgctgctgctggagaccggcatgaaggaggagggcctgttcagaatcggcgccggcgccagcaagctgaagaagctgaaggccgccctggactgcagcaccagccacctggacgagttctacagcgacccccacgccgtggccggcgccctgaagagctacctgagagagctgcccgagcccctgatgaccttcaacctgtacgaggagtggacccaggtggccagcgtgcaggaccaggacaagaagctgcaggacctgtggagaacctgccagaagctgcccccccagaacttcgtgaacttcagatacctgatcaagttcctggccaagctggcccagaccagcgacgtgaacaagatgacccccagcaacatcgccatcgtgctgggccccaacctgctgtgggccagaaacgagggcaccctggccgagatggccgccgccaccagcgtgcacgtggtggccgtgatcgagcccatcatccagcacgccgactggttcttccccgaggaggtggagttcaacgtgagcgaggccttcgtgcccctgaccacccccagcagcaaccacagcttccacaccggcaacgacagcgacagcggcaccctggagagaaagagacccgccagcatggccgtgatggagggcgacctggtgaagaaggagagcttcggcgtgaagctgatggacttccaggcccacagaagaggcggcaccctgaacagaaagcacatcagccccgccttccagccccccctgccccccaccgacggcagcaccgtggtgcccgccggccccgagccccccccccagagcagcagagccgagagcagcagcggcggcggcaccgtgcccagcagcgccggcatcctggagcagggccccagccccggcgacggcagcccccccaagcccaaggaccccgtgagcgccgccgtgcccgcccccggcagaaacaacagccagatcgccagcggccagaaccagccccaggccgccgccggcagccaccagctgagcatgggccagccccacaacgccgccggccccagcccccacaccctgagaagagccgtgaagaagcccgcccccgccccccccaagcccggcaaccccccccccggccaccccggcggccagagcagcagcggcaccagccagcacccccccagcctgagccccaagccccccaccagaagccccagcccccccacccagcacaccggccagccccccggccagcccagcgcccccagccagctgagcgcccccagaagatacagcagcagcctgagccccatccaggcccccaaccacccccccccccagccccccacccaggccacccccctgatgcacaccaagcccaacagccagggcccccccaaccccatggccctgcccagcgagcacggcctggagcagcccagccacacccccccccagacccccaccccccccagcaccccccccctgggcaagcagaaccccagcctgcccgccccccagaccctggccggcggcaaccccgagaccgcccagccccacgccggcaccctgcccagacccagacccgtgcccaagcccagaaacagacccagcgtgcccccccccccccagccccccggcgtgcacagcgccggcgacagcagcctgaccaacaccgcccccaccgccagcaagatcgtgaccgacagcaacagcagagtgagcgagccccacagaagcatcttccccgagatgcacagcgacagcgccagcaaggacgtgcccggcagaatcctgctggacatcgacaacgacaccgagagcaccgccctgtag

SEQ ID NO: 97080 - DNA, 2412 bp, synthetic construct
  misc_feature 1..2412: note = Description of Artificial Sequence: Synthetic coding sequence
  source 1..2412: mol_type = other DNA
atgaagaagcagttcaacagaatgaagcagctggccaaccagaccgtgggcagagccgagaagaccgaggtgctgagcgaggacctgctgcagatcgagagaagactggacaccgtgagaagcatctgccaccacagccacaagagactggtggcctgcttccagggccagcacggcaccgacgccgagagaagacacaagaagctgcccctgaccgccctggcccagaacatgcaggaggccagcacccagctggaggacagcctgctgggcaagatgctggagacctgcggcgacgccgagaaccagctggccctggagctgagccagcacgaggtgttcgtggagaaggagatcgtggaccccctgtacggcatcgccgaggtggagatccccaacatccagaagcagagaaagcagctggccagactggtgctggactgggacagcgtgagagccagatggaaccaggcccacaagagcagcggcaccaacttccagggcctgcccagcaagatcgacaccctgaaggaggagatggacgaggccggcaacaaggtggagcagtgcaaggaccagctggccgccgacatgtacaacttcatggccaaggagggcgagtacggcaagttcttcgtgaccctgctggaggcccaggccgactaccacagaaaggccctggccgtgctggagaagaccctgcccgagatgagagcccaccaggacaagtgggccgagaagcccgccttcggcacccccctggaggagcacctgaagagaagcggcagagagatcgccctgcccatcgaggcctgcgtgatgctgctgctggagaccggcatgaaggaggagggcctgttcagaatcggcgccggcgccagcaagctgaagaagctgaaggccgccctggactgcagcaccagccacctggacgagttctacagcgacccccacgccgtggccggcgccctgaagagctacctgagagagctgcccgagcccctgatgaccttcaacctgtacgaggagtggacccaggtggccagcgtgcaggaccaggacaagaagctgcaggacctgtggagaacctgccagaagctgcccccccagaacttcgtgaacttcagatacctgatcaagttcctggccaagctggcccagaccagcgacgtgaacaagatgacccccagcaacatcgccatcgtgctgggccccaacctgctgtgggccagaaacgagggcaccctggccgagatggccgccgccaccagcgtgcacgtggtggccgtgatcgagcccatcatccagcacgccgactggttcttccccgaggaggtggagttcaacgtgagcgaggccttcgtgcccctgaccacccccagcagcaaccacagcttccacaccggcaacgacagcgacagcggcaccctggagagaaagagacccgccagcatggccgtgatggagggcgacctggtgaagaaggagagcccccccaagcccaaggaccccgtgagcgccgccgtgcccgcccccggcagaaacaacagccagatcgccagcggccagaaccagccccaggccgccgccggcagccaccagctgagcatgggccagccccacaacgccgccggccccagcccccacaccctgagaagagccgtgaagaagcccgcccccgccccccccaagcccggcaaccccccccccggccaccccggcggccagagcagcagcggcaccagccagcacccccccagcctgagccccaagccccccaccagaagccccagcccccccacccagcacaccggccagccccccggccagcccagcgcccccagccagctgagcgcccccagaagatacagcagcagcctgagccccatccaggcccccaaccacccccccccccagccccccacccaggccacccccctgatgcacaccaagcccaacagccagggcccccccaaccccatggccctgcccagcgagcacggcctggagcagcccagccacacccccccccagacccccaccccccccagcaccccccccctgggcaagcagaaccccagcctgcccgccccccagaccctggccggcggcaaccccgagaccgcccagccccacgccggcaccctgcccagacccagacccgtgcccaagcccagaaacagacccagcgtgcccccccccccccagccccccggcgtgcacagcgccggcgacagcagcctgaccaacaccgcccccaccgccagcaagatcgtgaccgacagcaacagcagagtgagcgagccccacagaagcatcttccccgagatgcacagcgacagcgccagcaaggacgtgcccggcagaatcctgctggacatcgacaacgacaccgagagcaccgccctgtag

SEQ ID NO: 97081 - DNA, 681 bp, synthetic construct
  misc_feature 1..681: note = Description of Artificial Sequence: Synthetic coding sequence
  source 1..681: mol_type = other DNA
atgaagaagcagttcaacagaatgaagcagctggccaaccagaccgtgggcagagccgagaagaccgaggtgctgagcgaggacctgctgcagatcgagagaagactggacaccgtgagaagcatctgccaccacagccacaagagactggtggcctgcttccagggccagcacggcaccgacgccgagagaagacacaagaagctgcccctgaccgccctggcccagaacatgcaggaggccagcacccagctggaggacagcctgctgggcaagatgctggagacctgcggcgacgccgagaaccagctggccctggagctgagccagcacgaggtgttcgtggagaaggagatcgtggaccccctgtacggcatcgccgaggtggagatccccaacatccagaagcagagaaagcagctggccagactggtgctggactgggacagcgtgagagccagatggaaccaggcccacaagagcagcggcaccaacttccagggcctgcccagcaagatcgacaccctgaaggaggagatggacgaggccggcaacaaggtggagcagtgcaaggaccagctggccgccgacatgtacaacttcatggccaaggagggcgagtacggcaagttcttcgtgaccatcagcggcagaaagaaccagcccctgggcctgccctag

SEQ ID NO: 97082 - DNA, 2523 bp, synthetic construct
  misc_feature 1..2523: note = Description of Artificial Sequence: Synthetic coding sequence
  source 1..2523: mol_type = other DNA
atgaagaagcagttcaacagaatgaagcagctggccaaccagaccgtgggcagagccgagaagaccgaggtgctgagcgaggacctgctgcagatcgagagaagactggacaccgtgagaagcatctgccaccacagccacaagagactggtggcctgcttccagggccagcacggcaccgacgccgagagaagacacaagaagctgcccctgaccgccctggcccagaacatgcaggaggccagcacccagctggaggacagcctgctgggcaagatgctggagacctgcggcgacgccgagaaccagctggccctggagctgagccagcacgaggtgttcgtggagaaggagatcgtggaccccctgtacggcatcgccgaggtggagatccccaacatccagaagcagagaaagcagctggccagactggtgctggactgggacagcgtgagagccagatggaaccaggcccacaagagcagcggcaccaacttccagggcctgcccagcaagatcgacaccctgaaggaggagatggacgaggccggcaacaaggtggagcagtgcaaggaccagctggccgccgacatgtacaacttcatggccaaggagggcgagtacggcaagttcttcgtgaccctgctggaggcccaggccgactaccacagaaaggccctggccgtgctggagaagaccctgcccgagatgagagcccaccaggacaagtgggccgagaagcccgccttcggcacccccctggaggagcacctgaagagaagcggcagagagatcgccctgcccatcgaggcctgcgtgatgctgctgctggagaccggcatgaaggaggagggcctgttcagaatcggcgccggcgccagcaagctgaagaagctgaaggccgccctggactgcagcaccagccacctggacgagttctacagcgacccccacgccgtggccggcgccctgaagagctacctgagagagctgcccgagcccctgatgaccttcaacctgtacgaggagtggacccaggtggccagcgtgcaggaccaggacaagaagctgcaggacctgtggagaacctgccagaagctgcccccccagaacttcgtgaacttcagatacctgatcaagttcctggccaagctggcccagaccagcgacgtgaacaagatgacccccagcaacatcgccatcgtgctgggccccaacctgctgtgggccagaaacgagggcaccctggccgagatggccgccgccaccagcgtgcacgtggtggccgtgatcgagcccatcatccagcacgccgactggttcttccccgaggaggtggagttcaacgtgagcgaggccttcgtgcccctgaccacccccagcagcaaccacagcttccacaccggcaacgacagcgacagcggcaccctggagagaaagagacccgccagcatggccgtgatggagggcgacctggtgaagaaggagagcttcggcgtgaagctgatggacttccaggcccacagaagaggcggcaccctgaacagaaagcacatcagccccgccttccagccccccctgccccccaccgacggcagcaccgtggtgcccgccggccccgagccccccccccagagcagcagagccgagagcagcagcggcggcggcaccgtgcccagcagcgccggcatcctggagcagggccccagccccggcgacggcagcccccccaagcccaaggaccccgtgagcgccgccgtgcccgcccccggcagaaacaacagccagatcgccagcggccagaaccagccccaggccgccgccggcagccaccagctgagcatgggccagccccacaacgccgccggccccagcccccacaccctgagaagagccgtgaagaagcccgcccccgccccccccaagcccggcaaccccccccccggccaccccggcggccagagcagcagcggcaccagccagcacccccccagcctgagccccaagccccccaccagaagccccagcccccccacccagcacaccggccagccccccggccagcccagcgcccccagccagctgagcgcccccagaagatacagcagcagcctgagccccatccaggcccccaaccacccccccccccagccccccacccaggccacccccctgatgcacaccaagcccaacagccagggcccccccaaccccatggccctgcccagcgagcacggcctggagcagcccagccacacccccccccagacccccaccccccccagcaccccccccctgggcaagcagaaccccagcctgcccgccccccagaccctggccggcggcaaccccgagaccgcccagccccacgccggcaccctgcccagacccagacccgtgcccaagcccagaaacagacccagcgtgcccccccccccccagccccccggcgtgcacagcgccggcgacagcagcctgaccaacaccgcccccaccgccagcaagatcgtgaccggcgtgtag

SEQ ID NO: 97083 - DNA, 1992 bp, synthetic construct
  misc_feature 1..1992: note = Description of Artificial Sequence: Synthetic coding sequence
  source 1..1992: mol_type = other DNA
atgagctggctgagcagcagccagggcgtggtgctgaccgcctaccaccccagcggcaaggaccagaccgtgggcaacagccacgccaaggccggcgaggaggccaccagcagcagaagatacggccagtacaccatgaaccaggagagcaccaccatcaaggtgatggagaagccccccttcgacagaagcatcagccaggacagcctggacgagctgagcatggaggactactggatcgagctggagaacatcaagaagagcagcgagaacagccaggaggaccaggaggtggtggtggtgaaggagcccgacgagggcgagctggaggaggagtggctgaaggaggccggcctgagcaacctgttcggcgagagcgccggcgacccccaggagagcatcgtgttcctgagcaccctgaccagaacccaggccgccgccgtgcagaagagagtggagaccgtgagccagaccctgagaaagaagaacaagcagtaccagatccccgacgtgagagacatcttcgcccagcagagagagagcaaggagaccgcccccggcggcaccgagagccagagcctgagaaccaacgagaacaagtaccagggcagagacgacgaggccagcaacctggtgggcgaggagaagctgatcccccccgaggagacccccgcccccgagaccgacatcaacctggaggtgagcttcgccgagcaggccctgaaccagaaggagagcagcaaggagaagatccagaagagcaagggcgacgacgccaccctgcccagcttcagactgcccaaggacaagaccggcaccaccagaatcggcgacctggccccccaggacatgaagaaggtgtgccacctggccctgatcgagctgaccgccctgtacgacgtgctgggcatcgagctgaagcagcagaaggccgtgaagatcaagaccaaggacagcggcctgttctgcgtgcccctgaccgccctgctggagcaggaccagagaaaggtgcccggcatgagaatccccctgatcttccagaagctgatcagcagaatcgaggagagaggcctggagaccgagggcctgctgagaatccccggcgccgccatcagaatcaagaacctgtgccaggagctggaggccaagttctacgagggcaccttcaactgggagagcgtgaagcagcacgacgccgccagcctgctgaagctgttcatcagagagctgccccagcccctgctgagcgtggagtacctgaaggccttccaggccgtgcagaacctgcccaccaagaagcagcagctgcaggccctgaacctgctggtgatcctgctgcccgacgccaacagagacaccctgaaggccctgctggagttcctgcagagagtgatcgacaacaaggagaagaacaagatgaccgtgatgaacgtggccatggtgatggcccccaacctgttcatgtgccacgccctgggcctgaagagcagcgagcagagagagttcgtgatggccgccggcaccgccaacaccatgcacctgctgatcaagtaccagaagctgctgtggaccatccccaagttcatcgtgaaccaggtgagaaagcagaacaccgagaaccacaagaaggacaagagagccatgaagaagctgctgaagaagatggcctacgacagagagaagtacgagaagcaggacaagagcaccaacgacgccgacgtgccccagggcgtgatcagagtgcaggccccccacctgagcaaggtgagcatggccatccagctgaccgaggagctgaaggccagcgacgtgctggccagattcctgagccaggagagcggcgtggcccagaccctgaagaagggcgaggtgttcctgtacgagatcggcggcaacatcggcgagagatgcctggacgacgacacctacatgaaggacctgtaccagctgaaccccaacgccgagtgggtgatcaagagcaagcccctgtag

SEQ ID NO: 97084 - DNA, 1857 bp, synthetic construct
  misc_feature 1..1857: note = Description of Artificial Sequence: Synthetic coding sequence
  source 1..1857: mol_type = other DNA
atgaaccaggagagcaccaccatcaaggtgatggagaagccccccttcgacagaagcatcagccaggacagcctggacgagctgagcatggaggactactggatcgagctggagaacatcaagaagagcagcgagaacagccaggaggaccaggaggtggtggtggtgaaggagcccgacgagggcgagctggaggaggagtggctgaaggaggccggcctgagcaacctgttcggcgagagcgccggcgacccccaggagagcatcgtgttcctgagcaccctgaccagaacccaggccgccgccgtgcagaagagagtggagaccgtgagccagaccctgagaaagaagaacaagcagtaccagatccccgacgtgagagacatcttcgcccagcagagagagagcaaggagaccgcccccggcggcaccgagagccagagcctgagaaccaacgagaacaagtaccagggcagagacgacgaggccagcaacctggtgggcgaggagaagctgatcccccccgaggagacccccgcccccgagaccgacatcaacctggaggtgagcttcgccgagcaggccctgaaccagaaggagagcagcaaggagaagatccagaagagcaagggcgacgacgccaccctgcccagcttcagactgcccaaggacaagaccggcaccaccagaatcggcgacctggccccccaggacatgaagaaggtgtgccacctggccctgatcgagctgaccgccctgtacgacgtgctgggcatcgagctgaagcagcagaaggccgtgaagatcaagaccaaggacagcggcctgttctgcgtgcccctgaccgccctgctggagcaggaccagagaaaggtgcccggcatgagaatccccctgatcttccagaagctgatcagcagaatcgaggagagaggcctggagaccgagggcctgctgagaatccccggcgccgccatcagaatcaagaacctgtgccaggagctggaggccaagttctacgagggcaccttcaactgggagagcgtgaagcagcacgacgccgccagcctgctgaagctgttcatcagagagctgccccagcccctgctgagcgtggagtacctgaaggccttccaggccgtgcagaacctgcccaccaagaagcagcagctgcaggccctgaacctgctggtgatcctgctgcccgacgccaacagagacaccctgaaggccctgctggagttcctgcagagagtgatcgacaacaaggagaagaacaagatgaccgtgatgaacgtggccatggtgatggcccccaacctgttcatgtgccacgccctgggcctgaagagcagcgagcagagagagttcgtgatggccgccggcaccgccaacaccatgcacctgctgatcaagtaccagaagctgctgtggaccatccccaagttcatcgtgaaccaggtgagaaagcagaacaccgagaaccacaagaaggacaagagagccatgaagaagctgctgaagaagatggcctacgacagagagaagtacgagaagcaggacaagagcaccaacgacgccgacgtgccccagggcgtgatcagagtgcaggccccccacctgagcaaggtgagcatggccatccagctgaccgaggagctgaaggccagcgacgtgctggccagattcctgagccaggagagcggcgtggcccagaccctgaagaagggcgaggtgttcctgtacgagatcggcggcaacatcggcgagagatgcctggacgacgacacctacatgaaggacctgtaccagctgaaccccaacgccgagtgggtgatcaagagcaagcccctgtag

SEQ ID NO: 97085 - DNA, 1485 bp, synthetic construct
  misc_feature 1..1485: note = Description of Artificial Sequence: Synthetic coding sequence
  source 1..1485: mol_type = other DNA
atggccaccgaggcccagagcgagggcgaggtgcccgccagagagagcggcagaagcgacgccatctgcagcttcgtgatctgcaacgacagcagcctgagaggccagcccatcatcttcaaccccgacttcttcgtggagaagctgagacacgagaagcccgagatcttcaccgagctggtggtgagcaacatcaccagactgatcgacctgcccggcaccgagctggcccagctgatgggcgaggtggacctgaagctgcccggcggcgccggccccgccagcggcttcttcagaagcctgatgagcctgaagagaaaggagaagggcgtgatcttcggcagccccctgaccgaggagggcatcgcccagatctaccagctgatcgagtacctgcacaagaacctgagagtggagggcctgttcagagtgcccggcaacagcgtgagacagcagatcctgagagacgccctgaacaacggcaccgacatcgacctggagagcggcgagttccacagcaacgacgtggccaccctgctgaagatgttcctgggcgagctgcccgagcccctgctgacccacaagcacttcaacgcccacctgaagatcgccgacctgatgcagttcgacgacaagggcaacaagaccaacatccccgacaaggacagacagatcgaggccctgcagctgctgttcctgatcctgcccccccccaacagaaacctgctgaagctgctgctggacctgctgtaccagaccgccaagaagcaggacaagaacaagatgagcgcctacaacctggccctgatgttcgccccccacgtgctgtggcccaagaacgtgaccgccaacgacctgcaggagaacatcaccaagctgaacagcggcatggccttcatgatcaagcacagccagaagctgttcaaggcccccgcctacatcagagagtgcgccagactgcactacctgggcagcagaacccaggccagcaaggacgacctggacctgatcgccagctgccacaccaagagcttccagctggccaagagccagaagagaaacagagtggacagctgcccccaccaggaggagacccagcaccacaccgaggaggccctgagagagctgttccagcacgtgcacgacatgcccgagagcgccaagaagaagcagctgatcagacagttcaacaagcagagcctgacccagacccccggcagagagcccagcaccagccaggtgcagaagagagccagaagcagaagcttcagcggcctgatcaagagaaaggtgctgggcaaccagatgatgagcgagaagaagaagaagaaccccacccccgagagcgtggccatcggcgagctgaagggcaccagcaaggagaacagaaacctgctgttcagcggcagccccgccgtgaccatgacccccaccagactgaagtggagcgagggcaagaaggagggcaagaaggtgttcctgtag

SEQ ID NO: 97086 - DNA, 1458 bp, synthetic construct
  misc_feature 1..1458: note = Description of Artificial Sequence: Synthetic coding sequence
  source 1..1458: mol_type = other DNA
atgccccaccagaagctgagcgccctgatcgacgccatctgcagcttcgtgatctgcaacgacagcagcctgagaggccagcccatcatcttcaaccccgacttcttcgtggagaagctgagacacgagaagcccgagatcttcaccgagctggtggtgagcaacatcaccagactgatcgacctgcccggcaccgagctggcccagctgatgggcgaggtggacctgaagctgcccggcggcgccggccccgccagcggcttcttcagaagcctgatgagcctgaagagaaaggagaagggcgtgatcttcggcagccccctgaccgaggagggcatcgcccagatctaccagctgatcgagtacctgcacaagaacctgagagtggagggcctgttcagagtgcccggcaacagcgtgagacagcagatcctgagagacgccctgaacaacggcaccgacatcgacctggagagcggcgagttccacagcaacgacgtggccaccctgctgaagatgttcctgggcgagctgcccgagcccctgctgacccacaagcacttcaacgcccacctgaagatcgccgacctgatgcagttcgacgacaagggcaacaagaccaacatccccgacaaggacagacagatcgaggccctgcagctgctgttcctgatcctgcccccccccaacagaaacctgctgaagctgctgctggacctgctgtaccagaccgccaagaagcaggacaagaacaagatgagcgcctacaacctggccctgatgttcgccccccacgtgctgtggcccaagaacgtgaccgccaacgacctgcaggagaacatcaccaagctgaacagcggcatggccttcatgatcaagcacagccagaagctgttcaaggcccccgcctacatcagagagtgcgccagactgcactacctgggcagcagaacccaggccagcaaggacgacctggacctgatcgccagctgccacaccaagagcttccagctggccaagagccagaagagaaacagagtggacagctgcccccaccaggaggagacccagcaccacaccgaggaggccctgagagagctgttccagcacgtgcacgacatgcccgagagcgccaagaagaagcagctgatcagacagttcaacaagcagagcctgacccagacccccggcagagagcccagcaccagccaggtgcagaagagagccagaagcagaagcttcagcggcctgatcaagagaaaggtgctgggcaaccagatgatgagcgagaagaagaagaagaaccccacccccgagagcgtggccatcggcgagctgaagggcaccagcaaggagaacagaaacctgctgttcagcggcagccccgccgtgaccatgacccccaccagactgaagtggagcgagggcaagaaggagggcaagaaggtgttcctgtag

SEQ ID NO: 97087 - DNA, 1398 bp, synthetic construct
  misc_feature 1..1398: note = Description of Artificial Sequence: Synthetic coding sequence
  source 1..1398: mol_type = other DNA
atggccaccgaggcccagagcgagggcgaggtgcccgccagagagagcggcagaagcgacgccatctgcagcttcgtgatctgcaacgacagcagcctgagaggccagcccatcatcttcaaccccgacttcttcgtggagaagctgagacacgagaagcccgagatcttcaccgagctggtggtgagcaacatcaccagactgatcgacctgcccggcaccgagctggcccagctgatgggcgaggtggacctgaagctgcccggcggcgccggccccgccagcggcttcttcagaagcctgatgagcctgaagagaaaggagaagggcgtgatcttcggcagccccctgaccgaggagggcatcgcccagatctaccagctgatcgagtacctgcacaagaacctgagagtggagggcctgttcagagtgcccggcaacagcgtgagacagcagatcctgagagacgccctgaacaacggcaccgacatcgacctggagagcggcgagttccacagcaacgacgtggccaccctgctgaagatgttcctgggcgagctgcccgagcccctgctgacccacaagcacttcaacgcccacctgaagatcgccgacctgatgcagttcgacgacaagggcaacaagaccaacatccccgacaaggacagacagatcgaggccctgcagctgctgttcctgatcctgcccccccccaacagaaacctgctgaagctgctgctggacctgctgtaccagaccgccaagaagcaggacaagaacaagatgagcgcctacaacctggccctgatgttcgccccccacgtgctgtggcccaagaacgcccccgcctacatcagagagtgcgccagactgcactacctgggcagcagaacccaggccagcaaggacgacctggacctgatcgccagctgccacaccaagagcttccagctggccaagagccagaagagaaacagagtggacagctgcccccaccaggaggagacccagcaccacaccgaggaggccctgagagagctgttccagcacgtgcacgacatgcccgagagcgccaagaagaagcagctgatcagacagttcaacaagcagagcctgacccagacccccggcagagagcccagcaccagccaggtgcagaagagagccagaagcagaagcttcagcggcctgatcaagagaaaggtgctgggcaaccagatgatgagcgagaagaagaagaagaaccccacccccgagagcgtggccatcggcgagctgaagggcaccagcaaggagaacagaaacctgctgttcagcggcagccccgccgtgaccatgacccccaccagactgaagtggagcgagggcaagaaggagggcaagaaggccttcgtgtag

SEQ ID NO: 97088 - DNA, 1485 bp, synthetic construct
  misc_feature 1..1485: note = Description of Artificial Sequence: Synthetic coding sequence
  source 1..1485: mol_type = other DNA
atggccaccgaggcccagagcgagggcgaggtgcccgccagagagagcggcagaagcgacgccatctgcagcttcgtgatctgcaacgacagcagcctgagaggccagcccatcatcttcaaccccgacttcttcgtggagaagctgagacacgagaagcccgagatcttcaccgagctggtggtgagcaacatcaccagactgatcgacctgcccggcaccgagctggcccagctgatgggcgaggtggacctgaagctgcccggcggcgccggccccgccagcggcttcttcagaagcctgatgagcctgaagagaaaggagaagggcgtgatcttcggcagccccctgaccgaggagggcatcgcccagatctaccagctgatcgagtacctgcacaagaacctgagagtggagggcctgttcagagtgcccggcaacagcgtgagacagcagatcctgagagacgccctgaacaacggcaccgacatcgacctggagagcggcgagttccacagcaacgacgtggccaccctgctgaagatgttcctgggcgagctgcccgagcccctgctgacccacaagcacttcaacgcccacctgaagatcgccgacctgatgcagttcgacgacaagggcaacaagaccaacatccccgacaaggacagacagatcgaggccctgcagctgctgttcctgatcctgcccccccccaacagaaacctgctgaagctgctgctggacctgctgtaccagaccgccaagaagcaggacaagaacaagatgagcgcctacaacctggccctgatgttcgccccccacgtgctgtggcccaagaacgtgaccgccaacgacctgcaggagaacatcaccaagctgaacagcggcatggccttcatgatcaagcacagccagaagctgttcaaggcccccgcctacatcagagagtgcgccagactgcactacctgggcagcagaacccaggccagcaaggacgacctggacctgatcgccagctgccacaccaagagcttccagctggccaagagccagaagagaaacagagtggacagctgcccccaccaggaggagacccagcaccacaccgaggaggccctgagagagctgttccagcacgtgcacgacatgcccgagagcgccaagaagaagcagctgatcagacagttcaacaagcagagcctgacccagacccccggcagagagcccagcaccagccaggtgcagaagagagccagaagcagaagcttcagcggcctgatcaagagaaaggtgctgggcaaccagatgatgagcgagaagaagaagaagaaccccacccccgagagcgtggccatcggcgagctgaagggcaccagcaaggagaacagaaacctgctgttcagcggcagccccgccgtgaccatgacccccaccagactgaagtggagcgagggcaagaaggagggcaagaagggcttcctgtag

SEQ ID NO: 97089 - DNA, 1458 bp, synthetic construct
  misc_feature 1..1458: note = Description of Artificial Sequence: Synthetic coding sequence
  source 1..1458: mol_type = other DNA
atgccccaccagaagctgagcgccctgatcgacgccatctgcagcttcgtgatctgcaacgacagcagcctgagaggccagcccatcatcttcaaccccgacttcttcgtggagaagctgagacacgagaagcccgagatcttcaccgagctggtggtgagcaacatcaccagactgatcgacctgcccggcaccgagctggcccagctgatgggcgaggtggacctgaagctgcccggcggcgccggccccgccagcggcttcttcagaagcctgatgagcctgaagagaaaggagaagggcgtgatcttcggcagccccctgaccgaggagggcatcgcccagatctaccagctgatcgagtacctgcacaagaacctgagagtggagggcctgttcagagtgcccggcaacagcgtgagacagcagatcctgagagacgccctgaacaacggcaccgacatcgacctggagagcggcgagttccacagcaacgacgtggccaccctgctgaagatgttcctgggcgagctgcccgagcccctgctgacccacaagcacttcaacgcccacctgaagatcgccgacctgatgcagttcgacgacaagggcaacaagaccaacatccccgacaaggacagacagatcgaggccctgcagctgctgttcctgatcctgcccccccccaacagaaacctgctgaagctgctgctggacctgctgtaccagaccgccaagaagcaggacaagaacaagatgagcgcctacaacctggccctgatgttcgccccccacgtgctgtggcccaagaacgtgaccgccaacgacctgcaggagaacatcaccaagctgaacagcggcatggccttcatgatcaagcacagccagaagctgttcaaggcccccgcctacatcagagagtgcgccagactgcactacctgggcagcagaacccaggccagcaaggacgacctggacctgatcgccagctgccacaccaagagcttccagctggccaagagccagaagagaaacagagtggacagctgcccccaccaggaggagacccagcaccacaccgaggaggccctgagagagctgttccagcacgtgcacgacatgcccgagagcgccaagaagaagcagctgatcagacagttcaacaagcagagcctgacccagacccccggcagagagcccagcaccagccaggtgcagaagagagccagaagcagaagcttcagcggcctgatcaagagaaaggtgctgggcaaccagatgatgagcgagaagaagaagaagaaccccacccccgagagcgtggccatcggcgagctgaagggcaccagcaaggagaacagaaacctgctgttcagcggcagccccgccgtgaccatgacccccaccagactgaagtggagcgagggcaagaaggagggcaagaagggcttcctgtag

SEQ ID NO: 97090 - DNA, 942 bp, synthetic construct
  misc_feature 1..942: note = Description of Artificial Sequence: Synthetic coding sequence
  source 1..942: mol_type = other DNA
atgttcctgggcgagctgcccgagcccctgctgacccacaagcacttcaacgcccacctgaagatcgccgacctgatgcagttcgacgacaagggcaacaagaccaacatccccgacaaggacagacagatcgaggccctgcagctgctgttcctgatcctgcccccccccaacagaaacctgctgaagctgctgctggacctgctgtaccagaccgccaagaagcaggacaagaacaagatgagcgcctacaacctggccctgatgttcgccccccacgtgctgtggcccaagaacgtgaccgccaacgacctgcaggagaacatcaccaagctgaacagcggcatggccttcatgatcaagcacagccagaagctgttcaaggcccccgcctacatcagagagtgcgccagactgcactacctgggcagcagaacccaggccagcaaggacgacctggacctgatcgccagctgccacaccaagagcttccagctggccaagagccagaagagaaacagagtggacagctgcccccaccaggaggagacccagcaccacaccgaggaggccctgagagagctgttccagcacgtgcacgacatgcccgagagcgccaagaagaagcagctgatcagacagttcaacaagcagagcctgacccagacccccggcagagagcccagcaccagccaggtgcagaagagagccagaagcagaagcttcagcggcctgatcaagagaaaggtgctgggcaaccagatgatgagcgagaagaagaagaagaaccccacccccgagagcgtggccatcggcgagctgaagggcaccagcaaggagaacagaaacctgctgttcagcggcagccccgccgtgaccatgacccccaccagactgaagtggagcgagggcaagaaggagggcaagaagggcttcctgtag

SEQ ID NO: 97091 - DNA, 1554 bp, synthetic construct
  misc_feature 1..1554: note = Description of Artificial Sequence: Synthetic coding sequence
  source 1..1554: mol_type = other DNA
atggccaccgaggcccagagcgagggcgaggtgcccgccagagagagcggcagaagcgacgccatctgcagcttcgtgatctgcaacgacagcagcctgagaggccagcccatcatcttcaaccccgacttcttcgtggagaagctgagacacgagaagcccgagatcttcaccgagctggtggtgagcaacatcaccagactgatcgacctgcccggcaccgagctggcccagctgatgggcgaggtggacctgaagctgcccggcggcgccggccccgccagcggcttcttcagaagcctgatgagcctgaagagaaaggagaagggcgtgatcttcggcagccccctgaccgaggagggcatcgcccagatctaccagctgatcgagtacctgcacaagaacctgagagtggagggcctgttcagagtgcccggcaacagcgtgagacagcagatcctgagagacgccctgaacaacggcaccgacatcgacctggagagcggcgagttccacagcaacgacgtggccaccctgctgaagatgttcctgggcgagctgcccgagcccctgctgacccacaagcacttcaacgcccacctgaagatcgccgacctgatgcagttcgacgacaagggcaacaagaccaacatccccgacaaggacagacagatcgaggccctgcagctgctgttcctgatcctgcccccccccaacagaaacctgctgaagctgctgctggacctgctgtaccagaccgccaagaagcaggacaagaacaagatgagcgcctacaacctggccctgatgttcgccccccacgtgctgtggcccaagaacgtgaccgccaacgacctgcaggagaacatcaccaagctgaacagcggcatggccttcatgatcaagcacagccagaagctgttcaaggcccccgcctacatcagagagtgcgccagactgcactacctgggcagcagaacccaggccagcaaggacgacctggacctgatcgccagctgccacaccaagagcttccagctggccaagagccagaagagaaacagagtggacagctgcccccaccaggaggagacccagcaccacaccgaggaggccctgagagagctgttccagcacgtgcacgacatgcccgagagcgccaagaagaagcagctgatcagacagttcaacaagcagagcctgacccagacccccggcagagagcccagcaccagccaggtgcagaagagagccagaagcagaagcttcagcggcctgatcaagagaaaggtgctgggcaaccagatgatgagcgagaagaagaagaagaaccccacccccgagagcgtggccatcggcgagctgaagggcaccagcaaggagaacagaaacctgctgttcagcggcagccccgccgtgaccatgacccccaccagactgaagtggagcgagggcaagaaggagggcaagaagggcaacagcatggccaccaccagcctgggcagcatcagaatgaccctgagaggcagcagcagctgcggctgctgcagctag

SEQ ID NO: 97092 - DNA, 3654 bp, synthetic construct
  misc_feature 1..3654: note = Description of Artificial Sequence: Synthetic coding sequence
  source 1..3654: mol_type = other DNA
atggcccagcccgtggagatcagcccccccgacagcagcctgagcaagcagcagaccagcacccccgtgctgacccagcccggcagagcctacagaatggagatccaggtgccccccagccccaccgacgtggccaagagcaacaccgccgtgtgcgtgtgcaacgagagcgtgagaaccgtgatcgtgcccagcgagaaggtggtggacctgctgagcaacagaaacaaccacaccggccccagccacagaaccgaggaggtgagatacggcgtgagcgagcagaccagcctgaagaccgtgagcagaaccaccagcccccccctgagcatccccaccacccacctgatccaccagcccgccggcagcagaagcctggagcccagcggcatcctgctgaagagcggcaactacagcggccacagcgacggcatcagcagcagcagaagccaggccgtggaggcccccagcgtgagcgtgaaccactacagccccaacagccaccagcacatcgactggaagaactacaagacctacaaggagtacatcgacaacagaagactgcacatcggctgcagaaccatccaggagagactggacagcctgagagccgccagccagagcaccaccgactacaaccaggtggtgcccaacagaaccaccctgcagggcagaagaagaagcaccagccacgacagagtgccccagagcgtgcagatcagacagagaagcgtgagccaggagagactggaggacagcgtgctgatgaagtactgccccagaagcgccagccagggcgccctgaccagccccagcgtgagcttcagcaaccacagaaccagaagctgggactacatcgagggccaggacgagaccctggagaacgtgaacagcggcacccccatccccgacagcaacggcgagaagaagcagacctacaagtggagcggcttcaccgagcaggacgacagaagaggcatctgcgagagacccagacagcaggagatccacaagagcttcagaggcagcaacttcaccgtggcccccagcgtggtgaacagcgacaacagaagaatgagcggcagaggcgtgggcagcgtgagccagttcaagaagatcccccccgacctgaagaccctgcagagcaacagaaacttccagaccacctgcggcatgagcctgcccagaggcatcagccaggacagaagccccctggtgaaggtgagaagcaacagcctgaaggcccccagcacccacgtgaccaagcccagcttcagccagaagagcttcgtgagcatcaaggaccagagacccgtgaaccacctgcaccagaacagcctgctgaaccagcagacctgggtgagaaccgacagcgcccccgaccagcaggtggagaccggcaagagccccagcctgagcggcgccagcgccaagcccgccccccagagcagcgagaacgccggcaccagcgacctggagctgcccgtgagccagagaaaccaggacctgagcctgcaggaggccgagaccgagcagagcgacaccctggacaacaaggaggccgtgatcctgagagagaagccccccagcggcagacagaccccccagcccctgagacaccagagctacatcctggccgtgaacgaccaggagaccggcagcgacaccacctgctggctgcccaacgacgccagaagagaggtgcacatcaagagaatggaggagagaaaggccagcagcaccagcccccccggcgacagcctggccagcatccccttcatcgacgagcccaccagccccagcatcgaccacgacatcgcccacatccccgccagcgccgtgatcagcgccagcaccagccaggtgcccagcatcgccaccgtgcccccctgcctgaccaccagcgcccccctgatcagaagacagctgagccacgaccacgagagcgtgggcccccccagcctggacgcccagcccaacagcaagaccgagagaagcaagagctacgacgagggcctggacgactacagagaggacgccaagctgagcttcaagcacgtgagcagcctgaagggcatcaagatcgccgacagccagaagagcagcgaggacagcggcagcagaaaggacagcagcagcgaggtgttcagcgacgccgccaaggagggctggctgcacttcagacccctggtgaccgacaagggcaagagagtgggcggcagcatcagaccctggaagcagatgtacgtggtgctgagaggccacagcctgtacctgtacaaggacaagagagagcagaccacccccagcgaggaggagcagcccatcagcgtgaacgcctgcctgatcgacatcagctacagcgagaccaagagaaagaacgtgttcagactgaccaccagcgactgcgagtgcctgttccaggccgaggacagagacgacatgctggcctggatcaagaccatccaggagagcagcaacctgaacgaggaggacaccggcgtgaccaacagagacctgatcagcagaagaatcaaggagtacaacaacctgatgagcaaggccgagcagctgcccaagacccccagacagagcctgagcatcagacagaccctgctgggcgccaagagcgagcccaagacccagagcccccacagccccaaggaggagagcgagagaaagctgctgagcaaggacgacaccagcccccccaaggacaagggcacctggagaaagggcatccccagcatcatgagaaagaccttcgagaagaagcccaccgccaccggcaccttcggcgtgagactggacgactgcccccccgcccacaccaacagatacatccccctgatcgtggacatctgctgcaagctggtggaggagagaggcctggagtacaccggcatctacagagtgcccggcaacaacgccgccatcagcagcatgcaggaggagctgaacaagggcatggccgacatcgacatccaggacgacaagtggagagacctgaacgtgatcagcagcctgctgaagagcttcttcagaaagctgcccgagcccctgttcaccaacgacaagtacgccgacttcatcgaggccaacagaaaggaggaccccctggacagactgaagaccctgaagagactgatccacgacctgcccgagcaccactacgagaccctgaagttcctgagcgcccacctgaagaccgtggccgagaacagcgagaagaacaagatggagcccagaaacctggccatcgtgttcggccccaccctggtgagaaccagcgaggacaacatgacccacatggtgacccacatgcccgaccagtacaagatcgtggagaccctgatccagcaccacgactggttcttcaccgaggagggcgccgaggagcccctgaccaccgtgcaggaggagagcaccgtggacagccagcccgtgcccaacatcgaccacctgctgaccaacatcggcagaaccggcgtgagccccggcgacgtgagcggcgaggtgggcggcgtgtaccacaccgtgatgagcctggtggacagcgtgatgagcctgatggacagctggaactgcagaaagaaggaggactgctgcccccactgcagctgcctggtgtgcagaaaccccagattcctgtag

SEQ ID NO: 97093 - DNA, 3498 bp, synthetic construct
  misc_feature 1..3498: note = Description of Artificial Sequence: Synthetic coding sequence
  source 1..3498: mol_type = other DNA
atgatggccaccagaagaaccggcctgagcgagggcgacggcgacaagctgaaggcctgcgaggtgagcaagaacaaggacggcaaggagcagagcgagaccgtgagcctgagcgaggacgagaccttcagctggcccggccccaagaccgtgaccctgaagagaaccagccagggcttcggcttcaccctgagacacttcatcgtgtacccccccgagagcgccatccagttcagctacaaggacgaggagaacggcaacagaggcggcaagcagagaaacagactggagcccatggacaccatcttcgtgaagcaggtgaaggagggcggccccgccttcgaggccggcctgtgcaccggcgacagaatcatcaaggtgaacggcgagagcgtgatcggcaagacctacagccaggtgatcgccctgatccagaacagcgacaccaccctggagctgagcgtgatgcccaaggacgaggacatcctgcaggtggcctacagccaggacgcctacctgaagggcaacgaggcctacagcggcaacgccagaaacatccccgagcccccccccatctgctacccctggctgcccagcgcccccagcgccatggcccagcccgtggagatcagcccccccgacagcagcctgagcaagcagcagaccagcacccccgtgctgacccagcccggcagagcctacagaatggagatccaggtgccccccagccccaccgacgtggccaagagcaacaccgccgtgtgcgtgtgcaacgagagcgtgagaaccgtgatcgtgcccagcgagaaggtggtggacctgctgagcaacagaaacaaccacaccggccccagccacagaaccgaggaggtgagatacggcgtgagcgagcagaccagcctgaagaccgtgagcagaaccaccagcccccccctgagcatccccaccacccacctgatccaccagcccgccggcagcagaagcctggagcccagcggcatcctgctgaagagcggcaactacagcggccacagcgacggcatcagcagcagcagaagccaggccgtggaggcccccagcgtgagcgtgaaccactacagccccaacagccaccagcacatcgactggaagaactacaagacctacaaggagtacatcgacaacagaagactgcacatcggctgcagaaccatccaggagagactggacagcctgagagccgccagccagagcaccaccgactacaaccaggtggtgcccaacagaaccaccctgcagggcagaagaagaagcaccagccacgacagagtgccccagagcgtgcagatcagacagagaagcgtgagccaggagagactggaggacagcgtgctgatgaagtactgccccagaagcgccagccagggcgccctgaccagccccagcgtgagcttcagcaaccacagaaccagaagctgggactacatcgagggccaggacgagaccctggagaacgtgaacagcggcacccccatccccgacagcaacggcgagaagaagcagacctacaagtggagcggcttcaccgagcaggacgacagaagaggcatctgcgagagacccagacagcaggagatccacaagagcttcagaggcagcaacttcaccgtggcccccagcgtggtgaacagcgacaacagaagaatgagcggcagaggcgtgggcagcgtgagccagttcaagaagatcccccccgacctgaagaccctgcagagcaacagaaacttccagaccacctgcggcatgagcctgcccagaggcatcagccaggacagaagccccctggtgaaggtgagaagcaacagcctgaaggcccccagcacccacgtgaccaagcccagcttcagccagaagagcttcgtgagcatcaaggaccagagacccgtgaaccacctgcaccagaacagcctgctgaaccagcagacctgggtgagaaccgacagcgcccccgaccagcaggtggagaccggcaagagccccagcctgagcggcgccagcgccaagcccgccccccagagcagcgagaacgccggcaccagcgacctggagctgcccgtgagccagagaaaccaggacctgagcctgcaggaggccgagaccgagcagagcgacaccctggacaacaaggaggccgtgatcctgagagagaagccccccagcggcagacagaccccccagcccctgagacaccagagctacatcctggccgtgaacgaccaggagaccggcagcgacaccacctgctggctgcccaacgacgccagaagagaggtgcacatcaagagaatggaggagagaaaggccagcagcaccagcccccccggcgacagcctggccagcatccccttcatcgacgagcccaccagccccagcatcgaccacgacatcgcccacatccccgccagcgccgtgatcagcgccagcaccagccaggtgcccagcatcgccaccgtgcccccctgcctgaccaccagcgcccccctgatcagaagacagctgagccacgaccacgagagcgtgggcccccccagcctggacgcccagcccaacagcaagaccgagagaagcaagagctacgacgagggcctggacgactacagagaggacgccaagctgagcttcaagcacgtgagcagcctgaagggcatcaagatcgccgacagccagaagagcagcgaggacagcggcagcagaaaggacagcagcagcgaggtgttcagcgacgccgccaaggagggctggctgcacttcagacccctggtgaccgacaagggcaagagagtgggcggcagcatcagaccctggaagcagatgtacgtggtgctgagaggccacagcctgtacctgtacaaggacaagagagagcagaccacccccagcgaggaggagcagcccatcagcgtgaacgcctgcctgatcgacatcagctacagcgagaccaagagaaagaacgtgttcagactgaccaccagcgactgcgagtgcctgttccaggccgaggacagagacgacatgctggcctggatcaagaccatccaggagagcagcaacctgaacgaggaggacaccggcgtgaccaacagagacctgatcagcagaagaatcaaggagtacaacaacctgatgagcaaggccgagcagctgcccaagacccccagacagagcctgagcatcagacagaccctgctgggcgccaagagcgagcccaagacccagagcccccacagccccaaggaggagagcgagagaaagctgctgagcaaggacgacaccagcccccccaaggacaagggcacctggagaaagggcatccccagcatcatgagaaagaccttcgagaagaagcccaccgccaccggcaccttcggcgtgagactggacgactgcccccccgcccacaccaacagagtgggcgacaccagcccccccgacttcctgaagagcctgatccagttctag

SEQ ID NO: 97094 - DNA, 5877 bp, synthetic construct
  misc_feature 1..5877: note = Description of Artificial Sequence: Synthetic coding sequence
  source 1..5877: mol_type = other DNA
atgatggccaccagaagaaccggcctgagcgagggcgacggcgacaagctgaaggcctgcgaggtgagcaagaacaaggacggcaaggagcagagcgagaccgtgagcctgagcgaggacgagaccttcagctggcccggccccaagaccgtgaccctgaagagaaccagccagggcttcggcttcaccctgagacacttcatcgtgtacccccccgagagcgccatccagttcagctacaaggacgaggagaacggcaacagaggcggcaagcagagaaacagactggagcccatggacaccatcttcgtgaagcaggtgaaggagggcggccccgccttcgaggccggcctgtgcaccggcgacagaatcatcaaggtgaacggcgagagcgtgatcggcaagacctacagccaggtgatcgccctgatccagaacagcgacaccaccctggagctgagcgtgatgcccaaggacgaggacatcctgcaggtgctgcagttcaccaaggacgtgaccgccctggcctacagccaggacgcctacctgaagggcaacgaggcctacagcggcaacgccagaaacatccccgagcccccccccatctgctacccctggctgcccagcgcccccagcgccatggcccagcccgtggagatcagcccccccgacagcagcctgagcaagcagcagaccagcacccccgtgctgacccagcccggcagagcctacagaatggagatccaggtgccccccagccccaccgacgtggccaagagcaacaccgccgtgtgcgtgtgcaacgagagcgtgagaaccgtgatcgtgcccagcgagaaggtggtggacctgctgagcaacagaaacaaccacaccggccccagccacagaaccgaggaggtgagatacggcgtgagcgagcagaccagcctgaagaccgtgagcagaaccaccagcccccccctgagcatccccaccacccacctgatccaccagcccgccggcagcagaagcctggagcccagcggcatcctgctgaagagcggcaactacagcggccacagcgacggcatcagcagcagcagaagccaggccgtggaggcccccagcgtgagcgtgaaccactacagccccaacagccaccagcacatcgactggaagaactacaagacctacaaggagtacatcgacaacagaagactgcacatcggctgcagaaccatccaggagagactggacagcctgagagccgccagccagagcaccaccgactacaaccaggtggtgcccaacagaaccaccctgcagggcagaagaagaagcaccagccacgacagagtgccccagagcgtgcagatcagacagagaagcgtgagccaggagagactggaggacagcgtgctgatgaagtactgccccagaagcgccagccagggcgccctgaccagccccagcgtgagcttcagcaaccacagaaccagaagctgggactacatcgagggccaggacgagaccctggagaacgtgaacagcggcacccccatccccgacagcaacggcgagaagaagcagacctacaagtggagcggcttcaccgagcaggacgacagaagaggcatctgcgagagacccagacagcaggagatccacaagagcttcagaggcagcaacttcaccgtggcccccagcgtggtgaacagcgacaacagaagaatgagcggcagaggcgtgggcagcgtgagccagttcaagaagatcccccccgacctgaagaccctgcagagcaacagaaacttccagaccacctgcggcatgagcctgcccagaggcatcagccaggacagaagccccctggtgaaggtgagaagcaacagcctgaaggcccccagcacccacgtgaccaagcccagcttcagccagaagagcttcgtgagcatcaaggaccagagacccgtgaaccacctgcaccagaacagcctgctgaaccagcagacctgggtgagaaccgacagcgcccccgaccagcaggtggagaccggcaagagccccagcctgagcggcgccagcgccaagcccgccccccagagcagcgagaacgccggcaccagcgacctggagctgcccgtgagccagagaaaccaggacctgagcctgcaggaggccgagaccgagcagagcgacaccctggacaacaaggaggccgtgatcctgagagagaagccccccagcggcagacagaccccccagcccctgagacaccagagctacatcctggccgtgaacgaccaggagaccggcagcgacaccacctgctggctgcccaacgacgccagaagagaggtgcacatcaagagaatggaggagagaaaggccagcagcaccagcccccccggcgacagcctggccagcatccccttcatcgacgagcccaccagccccagcatcgaccacgacatcgcccacatccccgccagcgccgtgatcagcgccagcaccagccaggtgcccagcatcgccaccgtgcccccctgcctgaccaccagcgcccccctgatcagaagacagctgagccacgaccacgagagcgtgggcccccccagcctggacgcccagcccaacagcaagaccgagagaagcaagagctacgacgagggcctggacgactacagagaggacgccaagctgagcttcaagcacgtgagcagcctgaagggcatcaagatcgccgacagccagaagagcagcgaggacagcggcagcagaaaggacagcagcagcgaggtgttcagcgacgccgccaaggagggctggctgcacttcagacccctggtgaccgacaagggcaagagagtgggcggcagcatcagaccctggaagcagatgtacgtggtgctgagaggccacagcctgtacctgtacaaggacaagagagagcagaccacccccagcgaggaggagcagcccatcagcgtgaacgcctgcctgatcgacatcagctacagcgagaccaagagaaagaacgtgttcagactgaccaccagcgactgcgagtgcctgttccaggccgaggacagagacgacatgctggcctggatcaagaccatccaggagagcagcaacctgaacgaggaggacaccggcgtgaccaacagagacctgatcagcagaagaatcaaggagtacaacaacctgatgagcaaggccgagcagctgcccaagacccccagacagagcctgagcatcagacagaccctgctgggcgccaagagcgagcccaagacccagagcccccacagccccaaggaggagagcgagagaaagctgctgagcaaggacgacaccagcccccccaaggacaagggcacctggagaaagggcatccccagcatcatgagaaagaccttcgagaagaagcccaccgccaccggcaccttcggcgtgagactggacgactgcccccccgcccacaccaacagatacatccccctgatcgtggacatctgctgcaagctggtggaggagagaggcctggagtacaccggcatctacagagtgcccggcaacaacgccgccatcagcagcatgcaggaggagctgaacaagggcatggccgacatcgacatccaggacgacaagtggagagacctgaacgtgatcagcagcctgctgaagagcttcttcagaaagctgcccgagcccctgttcaccaacgacaagtacgccgacttcatcgaggccaacagaaaggaggaccccctggacagactgaagaccctgaagagactgatccacgacctgcccgagcaccactacgagaccctgaagttcctgagcgcccacctgaagaccgtggccgagaacagcgagaagaacaagatggagcccagaaacctggccatcgtgttcggccccaccctggtgagaaccagcgaggacaacatgacccacatggtgacccacatgcccgaccagtacaagatcgtggagaccctgatccagcaccacgactggttcttcaccgaggagggcgccgaggagcccctgaccaccgtgcaggaggagagcaccgtggacagccagcccgtgcccaacatcgaccacctgctgaccaacatcggcagaaccggcgtgagccccggcgacgtgagcgacagcgccaccagcgacagcaccaagagcaagggcagctggggcagcggcaaggaccagtacagcagagagctgctggtgagcagcatcttcgccgccgccagcagaaagagaaagaagcccaaggagaaggcccagcccagcagcagcgaggacgagctggacaacgtgttcttcaagaaggagaacgtggagcagtgccacaacgacaccaaggaggagagcaagaaggagagcgagaccctgggcagaaagcagaagatcatcatcgccaaggagaacagcaccagaaaggaccccagcaccaccaaggacgagaagatcagcctgggcaaggagagcacccccagcgaggagcccagccccccccacaacagcaagcacaacaagagccccaccctgagctgcagattcgccatcctgaaggagagccccagaagcctgctggcccagaagagcagccacctggaggagaccggcagcgacagcggcaccctgctgagcaccagcagccaggccagcctggccagattcagcatgaagaagagcaccagccccgagaccaagcacagcgagttcctggccaacgtgagcaccatcaccagcgactacagcaccaccagcagcgccacctacctgaccagcctggacagcagcagactgagccccgaggtgcagagcgtggccgagagcaagggcgacgaggccgacgacgagagaagcgagctgatcagcgagggcagacccgtggagaccgacagcgagagcgagttccccgtgttccccaccgccctgaccagcgagagactgttcagaggcaagctgcaggaggtgaccaagagcagcagaagaaacagcgagggcagcgagctgagctgcaccgagggcagcctgaccagcagcctggacagcagaagacagctgttcagcagccacaagctgatcgagtgcgacaccctgagcagaaagaagagcgccagattcaagagcgacagcggcagcctgggcgacgccaagaacgagaaggaggcccccagcctgaccaaggtgttcgacgtgatgaagaagggcaagagcaccggcagcctgctgacccccaccagaggcgagagcgagaagcaggagcccacctggaagaccaagatcgccgacagactgaagctgagacccagagcccccgccgacgacatgttcggcgtgggcaaccacaaggtgaacgccgagaccgccaagagaaagagcatcagaagaagacacaccctgggcggccacagagacgccaccgagatcagcgtgctgaacttctggaaggtgcacgagcagagcggcgagagagagagcgagctgagcgccgtgaacagactgaagcccaagtgcagcgcccaggacctgagcatcagcgactggctggccagagagagactgagaaccagcaccagcgacctgagcagaggcgagatcggcgacccccagaccgagaaccccagcaccagagagatcgccaccaccgacacccccctgagcctgcactgcaacaccggcagcagcagcagcaccctggccagcaccaacagacccctgctgagcatccccccccagagccccgaccagatcaacggcgagagcttccagaacgtgagcaagaacgccagcagcgccgccaacgcccagccccacaagctgagcgagacccccggcagcaaggccgagttccacccctgcctgtag

SEQ ID NO: 97095 - DNA, 594 bp, synthetic construct
  misc_feature 1..594: note = Description of Artificial Sequence: Synthetic coding sequence
  source 1..594: mol_type = other DNA
tgaaacaacgccgccatcagcagcatgcaggaggagctgaacaagggcatggccgacatcgacatccaggacgacaagtggagagacctgaacgtgatcagcagcctgctgaagagcttcttcagaaagctgcccgagcccctgttcaccaacgacaagtacgccgacttcatcgaggccaacagaaaggaggaccccctggacagactgaagaccctgaagagactgatccacgacctgcccgagcaccactacgagaccctgaagttcctgagcgcccacctgaagaccgtggccgagaacagcgagaagaacaagatggagcccagaaacctggccatcgtgttcggccccaccctggtgagaaccagcgaggacaacatgacccacatggtgacccacatgcccgaccagtacaagatcgtggagaccctgatccagcaccacgactggttcttcaccgaggagggcgccgaggagcccctgatccagctgctggtgacccagcagaacctgagagtgctgggcgacctggagagaatcagcatcgccggcaactgcctgtgcccccccagcctgcagctgctggtgtag

SEQ ID NO: 97096 - DNA, 342 bp, synthetic construct
  misc_feature 1..342: note = Description of Artificial Sequence: Synthetic coding sequence
  source 1..342: mol_type = other DNA
tacatccccctgatcgtggacatctgctgcaagctggtggaggagagaggcctggagtacaccggcatctacagagtgcccggcaacaacgccgccatcagcagcatgcaggaggagctgaacaagggcatggccgacatcgacatccaggacgacaagtggagagacctgaacgtgatcagcagcctgctgaagagcttcttcagaaagctgcccgagcccctgttcaccaacgacaagtacgccgacttcatcgaggccaacagaaaggaggaccccctggacagactgaagaccctgaagagactgttcctgagcgcccacctgaagaccgtggcctag

SEQ ID NO: 97097 - DNA, 2724 bp, synthetic construct
  misc_feature 1..2724: note = Description of Artificial Sequence: Synthetic coding sequence
  source 1..2724: mol_type = other DNA
atgcccaaggacgaggacatcctgcaggtggcctacagccaggacgcctacctgaagggcaacgaggcctacagcggcaacgccagaaacatccccgagcccccccccatctgctacccctggctgcccagcgcccccagcgccatggcccagcccgtggagatcagcccccccgacagcagcctgagcaagcagcagaccagcacccccgtgctgacccagcccggcagagcctacagaatggagatccaggtgccccccagccccaccgacgtggccaagagcaacaccgccgtgtgcgtgtgcaacgagagcgtgagaaccgtgatcgtgcccagcgagaaggtggtggacctgctgagcaacagaaacaaccacaccggccccagccacagaaccgaggaggtgagatacggcgtgagcgagcagaccagcctgaagaccgtgagcagaaccaccagcccccccctgagcatccccaccacccacctgatccaccagcccgccggcagcagaagcctggagcccagcggcatcctgctgaagagcggcaactacagcggccacagcgacggcatcagcagcagcagaagccaggccgtggaggcccccagcgtgagcgtgaaccactacagccccaacagccaccagcacatcgactggaagaactacaagacctacaaggagtacatcgacaacagaagactgcacatcggctgcagaaccatccaggagagactggacagcctgagagccgccagccagagcaccaccgactacaaccaggtggtgcccaacagaaccaccctgcagggcagaagaagaagcaccagccacgacagagtgccccagagcgtgcagatcagacagagaagcgtgagccaggagagactggaggacagcgtgctgatgaagtactgccccagaagcgccagccagggcgccctgaccagccccagcgtgagcttcagcaaccacagaaccagaagctgggactacatcgagggccaggacgagaccctggagaacgtgaacagcggcacccccatccccgacagcaacggcgagaagaagcagacctacaagtggagcggcttcaccgagcaggacgacagaagaggcatctgcgagagacccagacagcaggagatccacaagagcttcagaggcagcaacttcaccgtggcccccagcgtggtgaacagcgacaacagaagaatgagcggcagaggcgtgggcagcgtgagccagttcaagaagatcccccccgacctgaagaccctgcagagcaacagaaacttccagaccacctgcggcatgagcctgcccagaggcatcagccaggacagaagccccctggtgaaggtgagaagcaacagcctgaaggcccccagcacccacgtgaccaagcccagcttcagccagaagagcttcgtgagcatcaaggaccagagacccgtgaaccacctgcaccagaacagcctgctgaaccagcagacctgggtgagaaccgacagcgcccccgaccagcaggtggagaccggcaagagccccagcctgagcggcgccagcgccaagcccgccccccagagcagcgagaacgccggcaccagcgacctggagctgcccgtgagccagagaaaccaggacctgagcctgcaggaggccgagaccgagcagagcgacaccctggacaacaaggaggccgtgatcctgagagagaagccccccagcggcagacagaccccccagcccctgagacaccagagctacatcctggccgtgaacgaccaggagaccggcagcgacaccacctgctggctgcccaacgacgccagaagagaggtgcacatcaagagaatggaggagagaaaggccagcagcaccagcccccccggcgacagcctggccagcatccccttcatcgacgagcccaccagccccagcatcgaccacgacatcgcccacatccccgccagcgccgtgatcagcgccagcaccagccaggtgcccagcatcgccaccgtgcccccctgcctgaccaccagcgcccccctgatcagaagacagctgagccacgaccacgagagcgtgggcccccccagcctggacgcccagcccaacagcaagaccgagagaagcaagagctacgacgagggcctggacgactacagagaggacgccaagctgagcttcaagcacgtgagcagcctgaagggcatcaagatcgccgacagccagaagagcagcgaggacagcggcagcagaaaggacagcagcagcgaggtgttcagcgacgccgccaaggagggctggctgcacttcagacccctggtgaccgacaagggcaagagagtgggcggcagcatcagaccctggaagcagatgtacgtggtgctgagaggccacagcctgtacctgtacaaggacaagagagagcagaccacccccagcgaggaggagcagcccatcagcgtgaacgcctgcctgatcgacatcagctacagcgagaccaagagaaagaacgtgttcagactgaccaccagcgactgcgagtgcctgttccaggccgaggacagagacgacatgctggcctggatcaagaccatccaggagagcagcaacctgaacgaggaggacaccggcgtgaccaacagagacctgatcagcagaagaatcaaggagtacaacaacctgatgagcaaggccgagcagctgccctag

SEQ ID NO: 97098 - DNA, 3396 bp, synthetic construct
  misc_feature 1..3396: note = Description of Artificial Sequence: Synthetic coding sequence
  source 1..3396: mol_type = other DNA
atgatggccaccagaagaaccggcctgagcgagggcgacggcgacaagctgaaggcctgcgaggtgagcaagaacaaggacggcaaggagcagagcgagaccgtgagcctgagcgaggacgagaccttcagctggcccggccccaagaccgtgaccctgaagagaaccagccagggcttcggcttcaccctgagacacttcatcgtgtacccccccgagagcgccatccagttcagctacaaggacgaggagaacggcaacagaggcggcaagcagagaaacagactggagcccatggacaccatcttcgtgaagcaggtgaaggagggcggccccgccttcgaggccggcctgtgcaccggcgacagaatcatcaaggtgaacggcgagagcgtgatcggcaagacctacagccaggtgatcgccctgatccagaacagcgacaccaccctggagctgagcgtgatgcccaaggacgaggacatcctgcaggtgctgcagttcaccaaggacgtgaccgccctggcctacagccaggacgcctacctgaagggcaacgaggcctacagcggcaacgccagaaacatccccgagcccccccccatctgctacccctggctgcccagcgcccccagcgccatggcccagcccgtggagatcagcccccccgacagcagcctgagcaagcagcagaccagcacccccgtgctgacccagcccggcagagcctacagaatggagatccaggtgccccccagccccaccgacgtggccaagagcaacaccgccgtgtgcgtgtgcaacgagagcgtgagaaccgtgatcgtgcccagcgagaaggtggtggacctgctgagcaacagaaacaaccacaccggccccagccacagaaccgaggaggtgagatacggcgtgagcgagcagaccagcctgaagaccgtgagcagaaccaccagcccccccctgagcatccccaccacccacctgatccaccagcccgccggcagcagaagcctggagcccagcggcatcctgctgaagagcggcaactacagcggccacagcgacggcatcagcagcagcagaagccaggccgtggaggcccccagcgtgagcgtgaaccactacagccccaacagccaccagcacatcgactggaagaactacaagacctacaaggagtacatcgacaacagaagactgcacatcggctgcagaaccatccaggagagactggacagcctgagagccgccagccagagcaccaccgactacaaccaggtggtgcccaacagaaccaccctgcagggcagaagaagaagcaccagccacgacagagtgccccagagcgtgcagatcagacagagaagcgtgagccaggagagactggaggacagcgtgctgatgaagtactgccccagaagcgccagccagggcgccctgaccagccccagcgtgagcttcagcaaccacagaaccagaagctgggactacatcgagggccaggacgagaccctggagaacgtgaacagcggcacccccatccccgacagcaacggcgagaagaagcagacctacaagtggagcggcttcaccgagcaggacgacagaagaggcatctgcgagagacccagacagcaggagatccacaagagcttcagaggcagcaacttcaccgtggcccccagcgtggtgaacagcgacaacagaagaatgagcggcagaggcgtgggcagcgtgagccagttcaagaagatcccccccgacctgaagaccctgcagagcaacagaaacttccagaccacctgcggcatgagcctgcccagaggcatcagccaggacagaagccccctggtgaaggtgagaagcaacagcctgaaggcccccagcacccacgtgaccaagcccagcttcagccagaagagcttcgtgagcatcaaggaccagagacccgtgaaccacctgcaccagaacagcctgctgaaccagcagacctgggtgagaaccgacagcgcccccgaccagcaggtggagaccggcaagagccccagcctgagcggcgccagcgccaagcccgccccccagagcagcgagaacgccggcaccagcgacctggagctgcccgtgagccagagaaaccaggacctgagcctgcaggaggccgagaccgagcagagcgacaccctggacaacaaggaggccgtgatcctgagagagaagccccccagcggcagacagaccccccagcccctgagacaccagagctacatcctggccgtgaacgaccaggagaccggcagcgacaccacctgctggctgcccaacgacgccagaagagaggtgcacatcaagagaatggaggagagaaaggccagcagcaccagcccccccggcgacagcctggccagcatccccttcatcgacgagcccaccagccccagcatcgaccacgacatcgcccacatccccgccagcgccgtgatcagcgccagcaccagccaggtgcccagcatcgccaccgtgcccccctgcctgaccaccagcgcccccctgatcagaagacagctgagccacgaccacgagagcgtgggcccccccagcctggacgcccagcccaacagcaagaccgagagaagcaagagctacgacgagggcctggacgactacagagaggacgccaagctgagcttcaagcacgtgagcagcctgaagggcatcaagatcgccgacagccagaagagcagcgaggacagcggcagcagaaaggacagcagcagcgaggtgttcagcgacgccgccaaggagggctggctgcacttcagacccctggtgaccgacaagggcaagagagtgggcggcagcatcagaccctggaagcagatgtacgtggtgctgagaggccacagcctgtacctgtacaaggacaagagagagcagaccacccccagcgaggaggagcagcccatcagcgtgaacgcctgcctgatcgacatcagctacagcgagaccaagagaaagaacgtgttcagactgaccaccagcgactgcgagtgcctgttccaggccgaggacagagacgacatgctggcctggatcaagaccatccaggagagcagcaacctgaacgaggaggacaccggcgtgaccaacagagacctgatcagcagaagaatcaaggagtacaacaacctgatgagcaaggccgagcagctgcccaagacccccagacagagcctgagcatcagacagaccctgctgggcgccaagagcgagcccaagacccagagcccccacagccccaaggaggagagcgagagaaagctgctgagcaaggacgacaccagcccccccaaggacaagggcacctggagaaagggcatccccagcatcatgtag

SEQ ID NO: 97099 - DNA, 4224 bp, synthetic construct
  misc_feature 1..4224: note = Description of Artificial Sequence: Synthetic coding sequence
  source 1..4224: mol_type = other DNA
atggccaccagaagaaccggcctgagcgagggcgacggcgacaagctgaaggcctgcgaggtgagcaagaacaaggacggcaaggagcagagcgagaccgtgagcctgagcgaggacgagaccttcagctggcccggccccaagaccgtgaccctgaagagaaccagccagggcttcggcttcaccctgagacacttcatcgtgtacccccccgagagcgccatccagttcagctacaaggacgaggagaacggcaacagaggcggcaagcagagaaacagactggagcccatggacaccatcttcgtgaagcaggtgaaggagggcggccccgccttcgaggccggcctgtgcaccggcgacagaatcatcaaggtgaacggcgagagcgtgatcggcaagacctacagccaggtgatcgccctgatccagaacagcgacaccaccctggagctgagcgtgatgcccaaggacgaggacatcctgcaggtggcctacagccaggacgcctacctgaagggcaacgaggcctacagcggcaacgccagaaacatccccgagcccccccccatctgctacccctggctgcccagcgcccccagcgccatggcccagcccgtggagatcagcccccccgacagcagcctgagcaagcagcagaccagcacccccgtgctgacccagcccggcagagcctacagaatggagatccaggtgccccccagccccaccgacgtggccaagagcaacaccgccgtgtgcgtgtgcaacgagagcgtgagaaccgtgatcgtgcccagcgagaaggtggtggacctgctgagcaacagaaacaaccacaccggccccagccacagaaccgaggaggtgagatacggcgtgagcgagcagaccagcctgaagaccgtgagcagaaccaccagcccccccctgagcatccccaccacccacctgatccaccagcccgccggcagcagaagcctggagcccagcggcatcctgctgaagagcggcaactacagcggccacagcgacggcatcagcagcagcagaagccaggccgtggaggcccccagcgtgagcgtgaaccactacagccccaacagccaccagcacatcgactggaagaactacaagacctacaaggagtacatcgacaacagaagactgcacatcggctgcagaaccatccaggagagactggacagcctgagagccgccagccagagcaccaccgactacaaccaggtggtgcccaacagaaccaccctgcagggcagaagaagaagcaccagccacgacagagtgccccagagcgtgcagatcagacagagaagcgtgagccaggagagactggaggacagcgtgctgatgaagtactgccccagaagcgccagccagggcgccctgaccagccccagcgtgagcttcagcaaccacagaaccagaagctgggactacatcgagggccaggacgagaccctggagaacgtgaacagcggcacccccatccccgacagcaacggcgagaagaagcagacctacaagtggagcggcttcaccgagcaggacgacagaagaggcatctgcgagagacccagacagcaggagatccacaagagcttcagaggcagcaacttcaccgtggcccccagcgtggtgaacagcgacaacagaagaatgagcggcagaggcgtgggcagcgtgagccactggagaaagggcatccccagcatcatgagaaagaccttcgagaagaagcccaccgccaccggcaccttcggcgtgagactggacgactgcccccccgcccacaccaacagatacatccccctgatcgtggacatctgctgcaagctggtggaggagagaggcctggagtacaccggcatctacagagtgcccggcaacaacgccgccatcagcagcatgcaggaggagctgaacaagggcatggccgacatcgacatccaggacgacaagtggagagacctgaacgtgatcagcagcctgctgaagagcttcttcagaaagctgcccgagcccctgttcaccaacgacaagtacgccgacttcatcgaggccaacagaaaggaggaccccctggacagactgaagaccctgaagagactgatccacgacctgcccgagcaccactacgagaccctgaagttcctgagcgcccacctgaagaccgtggccgagaacagcgagaagaacaagatggagcccagaaacctggccatcgtgttcggccccaccctggtgagaaccagcgaggacaacatgacccacatggtgacccacatgcccgaccagtacaagatcgtggagaccctgatccagcaccacgactggttcttcaccgaggagggcgccgaggagcccctgaccaccgtgcaggaggagagcaccgtggacagccagcccgtgcccaacatcgaccacctgctgaccaacatcggcagaaccggcgtgagccccggcgacgtgagcgacagcgccaccagcgacagcaccaagagcaagggcagctggggcagcggcaaggaccagtacagcagagagctgctggtgagcagcatcttcgccgccgccagcagaaagagaaagaagcccaaggagaaggcccagcccagcagcagcgaggacgagctggacaacgtgttcttcaagaaggagaacgtggagcagtgccacaacgacaccaaggaggagagcaagaaggagagcgagaccctgggcagaaagcagaagatcatcatcgccaaggagaacagcaccagaaaggaccccagcaccaccaaggacgagaagatcagcctgggcaaggagagcacccccagcgaggagcccagccccccccacaacagcaagcacaacaagagccccaccctgagctgcagattcgccatcctgaaggagagccccagaagcctgctggcccagaagagcagccacctggaggagaccggcagcgacagcggcaccctgctgagcaccagcagccaggccagcctggccagattcagcatgaagaagagcaccagccccgagaccaagcacagcgagttcctggccaacgtgagcaccatcaccagcgactacagcaccaccagcagcgccacctacctgaccagcctggacagcagcagactgagccccgaggtgcagagcgtggccgagagcaagggcgacgaggccgacgacgagagaagcgagctgatcagcgagggcagacccgtggagaccgacagcgagagcgagttccccgtgttccccaccgccctgaccagcgagagactgttcagaggcaagctgcaggaggtgaccaagagcagcagaagaaacagcgagggcagcgagctgagctgcaccgagggcagcctgaccagcagcctggacagcagaagacagctgttcagcagccacaagctgatcgagtgcgacaccctgagcagaaagaagagcgccagattcaagagcgacagcggcagcctgggcgacgccaagaacgagaaggaggcccccagcctgaccaaggtgttcgacgtgatgaagaagggcaagagcaccggcagcctgctgacccccaccagaggcgagagcgagaagcaggagcccacctggaagaccaagatcgccgacagactgaagctgagacccagagcccccgccgacgacatgttcggcgtgggcaaccacaaggtgaacgccgagaccgccaagagaaagagcatcagaagaagacacaccctgggcggccacagagacgccaccgagatcagcgtgctgaacttctggaaggtgcacgagcagagcggcgagagagagagcgagctgagcgccgtgaacagactgaagcccaagtgcagcgcccaggacctgagcatcagcgactggctggccagagagagactgagaaccagcaccagcgacctgagcagaggcgagatcggcgacccccagaccgagaaccccagcaccagagagatcgccaccaccgacacccccctgagcctgcactgcaacaccggcagcagcagcagcaccctggccagcaccaacagacccctgctgagcatccccccccagagccccgaccagatcaacggcgagagcttccagaacgtgagcaagaacgccagcagcgccgccaacgcccagccccacaagctgagcgagacccccggcagcaaggccgagttccacccctgcctgtag

SEQ ID NO: 97100 - DNA, 279 bp, synthetic construct
  misc_feature 1..279: note = Description of Artificial Sequence: Synthetic coding sequence
  source 1..279: mol_type = other DNA
atggacaccatcttcgtgaagcaggtgaaggagggcggccccgccttcgaggccggcctgtgcaccggcgacagaatcatcaaggtgaacggcgagagcgtgatcggcaagacctacagccaggtgatcgccctgatccagaacagcgacaccaccctggagctgagcgtgatgcccaaggacgaggacatcctgcaggtgaacctggagttcagcaccttctacaagaacaccatcgccaagttcctgcagctgagcgacatggagatgctgtgctag

SEQ ID NO: 97101 - DNA, 4476 bp, synthetic construct
  misc_feature 1..4476: note = Description of Artificial Sequence: Synthetic coding sequence
  source 1..4476: mol_type = other DNA
atgaacggcgtggccttctgcctggtgggcatcccccccagacccgagcccagacccccccagctgcccctgggccccagagacggctgcagccccagaagacccttcccctggcagggccccagaaccctgctgctgtacaagagcccccaggacggcttcggcttcaccctgagacacttcatcgtgtacccccccgagagcgccgtgcactgcagcctgaaggaggaggagaacggcggcagaggcggcggccccagccccagatacagactggagcccatggacaccatcttcgtgaagaacgtgaaggaggacggccccgcccacagagccggcctgagaaccggcgacagactggtgaaggtgaacggcgagagcgtgatcggcaagacctacagccaggtgatcgccctgatccagaacagcgacgacaccctggagctgagcatcatgcccaaggacgaggacatcctgcagctggcctacagccaggacgcctacctgaagggcaacgagccctacagcggcgaggccagaagcatccccgagcccccccccatctgctaccccagaaagacctacgccccccccgccagagccagcaccagagccaccatggtgcccgagcccaccagcgccctgcccagcgaccccagaagccccgccgcctggagcgaccccggcctgagagtgccccccgccgccagagcccacctggacaacagcagcctgggcatgagccagcccagacccagccccggcgccttcccccacctgagcagcgagcccagaacccccagagccttccccgagcccggcagcagagtgccccccagcagactggagtgccagcaggccctgagccactggctgagcaaccaggtgcccagaagagccggcgagagaagatgccccgccatggcccccagagccagaagcgccagccaggacagactggaggaggtggccgcccccagaccctggccctgcagcaccagccaggacgccctgagccagctgggccaggagggctggcacagagccagaagcgacgactacctgagcagagccaccagaagcgccgaggccctgggccccggcgccctggtgagccccagattcgagagatgcggctgggccagccagagaagcagcgccagaacccccgcctgccccaccagagacctgcccggcccccaggcccccccccccagcggcctgcagggcctggacgacctgggctacatcggctacagaagctacagccccagcttccagagaagaaccggcctgctgcacgccctgagcttcagagacagccccttcggcggcctgcccaccttcaacctggcccagagccccgccagcttcccccccgaggccagcgagccccccagagtggtgagacccgagcccagcaccagagccctggagccccccgccgaggacagaggcgacgaggtggtgctgagacagaagccccccaccggcagaaaggtgcagctgacccccgccagacagatgaacctgggcttcggcgacgagagccccgagcccgaggccagcggcagaggcgagagactgggcagaaaggtggcccccctggccaccaccgaggacagcctggccagcatccccttcatcgacgagcccaccagccccagcatcgacctgcaggccaagcacgtgcccgccagcgccgtggtgagcagcgccatgaacagcgcccccgtgctgggcaccagccccagcagccccaccttcaccttcaccctgggcagacactacagccaggactgcagcagcatcaaggccggcagaagaagcagctacctgctggccatcaccaccgagagaagcaagagctgcgacgacggcctgaacaccttcagagacgagggcagagtgctgagaagactgcccaacagaatccccagcctgagaatgctgagaagcttcttcaccgacggcagcctggacagctggggcaccagcgaggacgccgacgcccccagcaagagacacagcaccagcgacctgagcgacgccaccttcagcgacatcagaagagagggctggctgtactacaagcagatcctgaccaagaagggcaagaaggccggcagcggcctgagacagtggaagagagtgtacgccgccctgagagccagaagcctgagcctgagcaaggagagaagagagcccggccccgccgccgccggcgccgccgccgccggcgccggcgaggacgaggccgcccccgtgtgcatcggcagctgcctggtggacatcagctacagcgagaccaagagaagacacgtgttcagactgaccaccgccgacttctgcgagtacctgttccaggccgaggacagagacgacatgctgggctggatcagagccatcagagagaacagcagagccgagggcgaggaccccggctgcgccaaccaggccctgatcagcaagaagctgaacgactacagaaaggtgagccacagcagcggccccaaggccgacagcagccccaagggcagcagaggcctgggcggcctgaagagcgagttcctgaagcagagcgccgccagaggcctgagaacccaggacctgcccgccggcagcaaggacgacagcgccgccgcccccaagaccccctggggcatcaacatcatcaagaagaacaagaaggccgcccccagagccttcggcgtgagactggaggagtgccagcccgccaccgagaaccagagagtgcccctgatcgtggccgcctgctgcagaatcgtggaggccagaggcctggagagcaccggcatctacagagtgcccggcaacaacgccgtggtgagcagcctgcaggagcagctgaacagaggccccggcgacatcaacctgcaggacgagagatggcaggacctgaacgtgatcagcagcctgctgaagagcttcttcagaaagctgcccgagcccctgttcaccgacgacaagtacaacgacttcatcgaggccaacagaatcgaggacgccagagagagaatgagaaccctgagaaagctgatcagagacctgcccggccactactacgagaccctgaagttcctggtgggccacctgaagaccatcgccgaccacagcgagaagaacaagatggagcccagaaacctggccctggtgttcggccccaccctggtgagaaccagcgaggacaacatgaccgacatggtgacccacatgcccgacagatacaagatcgtggagaccctgatccagcacagcgactggttcttcagcgacgaggaggacaagggcgagagaacccccgtgggcgacaaggagccccaggccgtgcccaacatcgagtacctgctgcccaacatcggcagaaccgtgccccccggcgaccccggcagcgacagcaccacctgcagcagcgccaagagcaagggcagctgggcccccaagaaggagccctacgccagagagatgctggccatcagcttcatcagcgccgtgaacagaaagagaaagaagagaagagaggccagaggcctgggcagcagcaccgacgacgacagcgagcaggaggcccacaagcccggcgccggcgccaccgcccccggcacccaggagagaccccagggccccctgcccggcgccgtggcccccgaggcccccggcagactgagcccccccgccgcccccgaggagagacccgccgccgacaccagaagcatcgtgagcggctacagcaccctgagcaccatggacagaagcgtgtgcagcggcgccagcggcagaagagccggcgccggcgacgaggccgacgacgagagaagcgagctgagccacgtggagaccgacaccgagggcgccgccggcgccggccccggcggcagactgaccagaagacccagcttcagcagccaccacctgatgccctgcgacaccctggccagaagaagactggccagaggcagacccgacggcgagggcgccggcagaggcggccccagagcccccgagccccccggcagcgccagcagcagcagccaggagagcctgagaccccccgccgccgccctggccagcagacccagcagaatggaggccctgagactgagactgagaggcaccgccgacgacatgctggccgtgagactgagaagacccctgagccccgagaccagaagaagaagaagcagctggagaagacacaccgtggtggtgcagagccccctgaccgacctgaacttcaacgagtggaaggagctgggcggcggcggcccccccgagcccgccggcgccagagcccacagcgacaacaaggacagcggcctgagcagcctggagagcaccaaggccagagcccccagcagcgccgccagccagccccccgcccccggcgacaccggcagcctgcagagccagccccccagaagaagcgccgccagcagactgcaccagtgcctgtag

SEQ ID NO: 97102 - DNA, 3435 bp, synthetic construct
  misc_feature 1..3435: note = Description of Artificial Sequence: Synthetic coding sequence
  source 1..3435: mol_type = other DNA
atgaacggcgtggccttctgcctggtgggcatcccccccagacccgagcccagacccccccagctgcccctgggccccagagacggctgcagccccagaagacccttcccctggcagggccccagaaccctgctgctgtacaagagcccccaggacggcttcggcttcaccctgagacacttcatcgtgtacccccccgagagcgccgtgcactgcagcctgaaggaggaggagaacggcggcagaggcggcggccccagccccagatacagactggagcccatggacaccatcttcgtgaagaacgtgaaggaggacggccccgcccacagagccggcctgagaaccggcgacagactggtgaaggtgaacggcgagagcgtgatcggcaagacctacagccaggtgatcgccctgatccagaacagcgacgacaccctggagctgagcatcatgcccaaggacgaggacatcctgcagctggcctacagccaggacgcctacctgaagggcaacgagccctacagcggcgaggccagaagcatccccgagcccccccccatctgctaccccagaaagacctacgccccccccgccagagccagcaccagagccaccatggtgcccgagcccaccagcgccctgcccagcgaccccagaagccccgccgcctggagcgaccccggcctgagagtgccccccgccgccagagcccacctggacaacagcagcctgggcatgagccagcccagacccagccccggcgccttcccccacctgagcagcgagcccagaacccccagagccttccccgagcccggcagcagagtgccccccagcagactggagtgccagcaggccctgagccactggctgagcaaccaggtgcccagaagagccggcgagagaagatgccccgccatggcccccagagccagaagcgccagccaggacagactggaggaggtggccgcccccagaccctggccctgcagcaccagccaggacgccctgagccagctgggccaggagggctggcacagagccagaagcgacgactacctgagcagagccaccagaagcgccgaggccctgggccccggcgccctggtgagccccagattcgagagatgcggctgggccagccagagaagcagcgccagaacccccgcctgccccaccagagacctgcccggcccccaggcccccccccccagcggcctgcagggcctggacgacctgggctacatcggctacagaagctacagccccagcttccagagaagaaccggcctgctgcacgccctgagcttcagagacagccccttcggcggcctgcccaccttcaacctggcccagagccccgccagcttcccccccgaggccagcgagccccccagagtggtgagacccgagcccagcaccagagccctggagccccccgccgaggacagaggcgacgaggtggtgctgagacagaagccccccaccggcagaaaggtgcagctgacccccgccagacagatgaacctgggcttcggcgacgagagccccgagcccgaggccagcggcagaggcgagagactgggcagaaaggtggcccccctggccaccaccgaggacagcctggccagcatccccttcatcgacgagcccaccagccccagcatcgacctgcaggccaagcacgtgcccgccagcgccgtggtgagcagcgccatgaacagcgcccccgtgctgggcaccagccccagcagccccaccttcaccttcaccctgggcagacactacagccaggactgcagcagcatcaaggccggcagaagaagcagctacctgctggccatcaccaccgagagaagcaagagctgcgacgacggcctgaacaccttcagagacgagggcagagtgctgagaagactgcccaacagaatccccagcctgagaatgctgagaagcttcttcaccgacggcagcctggacagctggggcaccagcgaggacgccgacgcccccagcaagagacacagcaccagcgacctgagcgacgccaccttcagcgacatcagaagagagggctggctgtactacaagcagatcctgaccaagaagggcaagaaggccggcagcggcctgagacagtggaagagagtgtacgccgccctgagagccagaagcctgagcctgagcaaggagagaagagagcccggccccgccgccgccggcgccgccgccgccggcgccggcgaggacgaggccgcccccgtgtgcatcggcagctgcctggtggacatcagctacagcgagaccaagagaagacacgtgttcagactgaccaccgccgacttctgcgagtacctgttccaggccgaggacagagacgacatgctgggctggatcagagccatcagagagaacagcagagccgagggcgaggaccccggctgcgccaaccaggccctgatcagcaagaagctgaacgactacagaaaggtgagccacagcagcggccccaaggccgacagcagccccaagggcagcagaggcctgggcggcctgaagagcgagttcctgaagcagagcgccgccagaggcctgagaacccaggacctgcccgccggcagcaaggacgacagcgccgccgcccccaagaccccctggggcatcaacatcatcaagaagaacaagaaggccgcccccagagccttcggcgtgagactggaggagtgccagcccgccaccgagaaccagagagtgcccctgatcgtggccgcctgctgcagaatcgtggaggccagaggcctggagagcaccggcatctacagagtgcccggcaacaacgccgtggtgagcagcctgcaggagcagctgaacagaggccccggcgacatcaacctgcaggacgagagatggcaggacctgaacgtgatcagcagcctgctgaagagcttcttcagaaagctgcccgagcccctgttcaccgacgacaagtacaacgacttcatcgaggccaacagaatcgaggacgccagagagagaatgagaaccctgagaaagctgatcagagacctgcccggccactactacgagaccctgaagttcctggtgggccacctgaagaccatcgccgaccacagcgagaagaacaagatggagcccagaaacctggccctggtgttcggccccaccctggtgagaaccagcgaggacaacatgaccgacatggtgacccacatgcccgacagatacaagatcgtggagaccctgatccagcacagcgactggttcttcagcgacgaggaggacaagggcgagagaacccccgtgggcgacaaggagccccaggccgtgcccaacatcgagtacctgctgcccaacatcggcagaaccgtgccccccggcgaccccggcagcgccgacctgctggagatctag

SEQ ID NO: 97103 - DNA, 4194 bp, synthetic construct
  misc_feature 1..4194: note = Description of Artificial Sequence: Synthetic coding sequence
  source 1..4194: mol_type = other DNA
atggacaccatcttcgtgaagaacgtgaaggaggacggccccgcccacagagccggcctgagaaccggcgacagactggtgaaggtgaacggcgagagcgtgatcggcaagacctacagccaggtgatcgccctgatccagaacagcgacgacaccctggagctgagcatcatgcccaaggacgaggacatcctgcagctggcctacagccaggacgcctacctgaagggcaacgagccctacagcggcgaggccagaagcatccccgagcccccccccatctgctaccccagaaagacctacgccccccccgccagagccagcaccagagccaccatggtgcccgagcccaccagcgccctgcccagcgaccccagaagccccgccgcctggagcgaccccggcctgagagtgccccccgccgccagagcccacctggacaacagcagcctgggcatgagccagcccagacccagccccggcgccttcccccacctgagcagcgagcccagaacccccagagccttccccgagcccggcagcagagtgccccccagcagactggagtgccagcaggccctgagccactggctgagcaaccaggtgcccagaagagccggcgagagaagatgccccgccatggcccccagagccagaagcgccagccaggacagactggaggaggtggccgcccccagaccctggccctgcagcaccagccaggacgccctgagccagctgggccaggagggctggcacagagccagaagcgacgactacctgagcagagccaccagaagcgccgaggccctgggccccggcgccctggtgagccccagattcgagagatgcggctgggccagccagagaagcagcgccagaacccccgcctgccccaccagagacctgcccggcccccaggcccccccccccagcggcctgcagggcctggacgacctgggctacatcggctacagaagctacagccccagcttccagagaagaaccggcctgctgcacgccctgagcttcagagacagccccttcggcggcctgcccaccttcaacctggcccagagccccgccagcttcccccccgaggccagcgagccccccagagtggtgagacccgagcccagcaccagagccctggagccccccgccgaggacagaggcgacgaggtggtgctgagacagaagccccccaccggcagaaaggtgcagctgacccccgccagacagatgaacctgggcttcggcgacgagagccccgagcccgaggccagcggcagaggcgagagactgggcagaaaggtggcccccctggccaccaccgaggacagcctggccagcatccccttcatcgacgagcccaccagccccagcatcgacctgcaggccaagcacgtgcccgccagcgccgtggtgagcagcgccatgaacagcgcccccgtgctgggcaccagccccagcagccccaccttcaccttcaccctgggcagacactacagccaggactgcagcagcatcaaggccggcagaagaagcagctacctgctggccatcaccaccgagagaagcaagagctgcgacgacggcctgaacaccttcagagacgagggcagagtgctgagaagactgcccaacagaatccccagcctgagaatgctgagaagcttcttcaccgacggcagcctggacagctggggcaccagcgaggacgccgacgcccccagcaagagacacagcaccagcgacctgagcgacgccaccttcagcgacatcagaagagagggctggctgtactacaagcagatcctgaccaagaagggcaagaaggccggcagcggcctgagacagtggaagagagtgtacgccgccctgagagccagaagcctgagcctgagcaaggagagaagagagcccggccccgccgccgccggcgccgccgccgccggcgccggcgaggacgaggccgcccccgtgtgcatcggcagctgcctggtggacatcagctacagcgagaccaagagaagacacgtgttcagactgaccaccgccgacttctgcgagtacctgttccaggccgaggacagagacgacatgctgggctggatcagagccatcagagagaacagcagagccgagggcgaggaccccggctgcgccaaccaggccctgatcagcaagaagctgaacgactacagaaaggtgagccacagcagcggccccaaggccgacagcagccccaagggcagcagaggcctgggcggcctgaagagcgagttcctgaagcagagcgccgccagaggcctgagaacccaggacctgcccgccggcagcaaggacgacagcgccgccgcccccaagaccccctggggcatcaacatcatcaagaagaacaagaaggccgcccccagagccttcggcgtgagactggaggagtgccagcccgccaccgagaaccagagagtgcccctgatcgtggccgcctgctgcagaatcgtggaggccagaggcctggagagcaccggcatctacagagtgcccggcaacaacgccgtggtgagcagcctgcaggagcagctgaacagaggccccggcgacatcaacctgcaggacgagagatggcaggacctgaacgtgatcagcagcctgctgaagagcttcttcagaaagctgcccgagcccctgttcaccgacgacaagtacaacgacttcatcgaggccaacagaatcgaggacgccagagagagaatgagaaccctgagaaagctgatcagagacctgcccggccactactacgagaccctgaagttcctggtgggccacctgaagaccatcgccgaccacagcgagaagaacaagatggagcccagaaacctggccctggtgttcggccccaccctggtgagaaccagcgaggacaacatgaccgacatggtgacccacatgcccgacagatacaagatcgtggagaccctgatccagcacagcgactggttcttcagcgacgaggaggacaagggcgagagaacccccgtgggcgacaaggagccccaggccgtgcccaacatcgagtacctgctgcccaacatcggcagaaccgtgccccccggcgaccccggcagcgacagcaccacctgcagcagcgccaagagcaagggcagctgggcccccaagaaggagccctacgccagagagatgctggccatcagcttcatcagcgccgtgaacagaaagagaaagaagagaagagaggccagaggcctgggcagcagcaccgacgacgacagcgagcaggaggcccacaagcccggcgccggcgccaccgcccccggcacccaggagagaccccagggccccctgcccggcgccgtggcccccgaggcccccggcagactgagcccccccgccgcccccgaggagagacccgccgccgacaccagaagcatcgtgagcggctacagcaccctgagcaccatggacagaagcgtgtgcagcggcgccagcggcagaagagccggcgccggcgacgaggccgacgacgagagaagcgagctgagccacgtggagaccgacaccgagggcgccgccggcgccggccccggcggcagactgaccagaagacccagcttcagcagccaccacctgatgccctgcgacaccctggccagaagaagactggccagaggcagacccgacggcgagggcgccggcagaggcggccccagagcccccgagccccccggcagcgccagcagcagcagccaggagagcctgagaccccccgccgccgccctggccagcagacccagcagaatggaggccctgagactgagactgagaggcaccgccgacgacatgctggccgtgagactgagaagacccctgagccccgagaccagaagaagaagaagcagctggagaagacacaccgtggtggtgcagagccccctgaccgacctgaacttcaacgagtggaaggagctgggcggcggcggcccccccgagcccgccggcgccagagcccacagcgacaacaaggacagcggcctgagcagcctggagagcaccaaggccagagcccccagcagcgccgccagccagccccccgcccccggcgacaccggcagcctgcagagccagccccccagaagaagcgccgccagcagactgcaccagtgcctgtag

SEQ ID NO: 97104 - DNA, 1968 bp, synthetic construct
  misc_feature 1..1968: note = Description of Artificial Sequence: Synthetic coding sequence
  source 1..1968: mol_type = other DNA
atgcccgaggacagaaacagcggcggctgccccgccggcgccctggccagcacccccttcatccccaagaccacctacagaagaatcaagagatgcttcagcttcagaaagggcatcttcggccagaagctggaggacaccgtgagatacgagaagagatacggcaacagactggcccccatgctggtggagcagtgcgtggacttcatcagacagagaggcctgaaggaggagggcctgttcagactgcccggccaggccaacctggtgaaggagctgcaggacgccttcgactgcggcgagaagcccagcttcgacagcaacaccgacgtgcacaccgtggccagcctgctgaagctgtacctgagagagctgcccgagcccgtgatcccctacgccaagtacgaggacttcctgagctgcgccaagctgctgagcaaggaggaggaggccggcgtgaaggagctggccaagcaggtgaagagcctgcccgtggtgaactacaacctgctgaagtacatctgcagattcctggacgaggtgcagagctacagcggcgtgaacaagatgagcgtgcagaacctggccaccgtgttcggccccaacatcctgagacccaaggtggaggaccccctgaccatcatggagggcaccgtggtggtgcagcagctgatgagcgtgatgatcagcaagcacgactgcctgttccccaaggacgccgagctgcagagcaagccccaggacggcgtgagcaacaacaacgagatccagaagaaggccaccatgggccagctgcagaacaaggagaacaacaacaccaaggacagccccagcagacagtgcagctgggacaagagcgagagcccccagagaagcagcatgaacaacggcagccccaccgccctgagcggcagcaagaccaacagccccaagaacagcgtgcacaagctggacgtgagcagaagcccccccctgatggtgaagaagaaccccgccttcaacaagggcagcggcatcgtgaccaacggcagcttcagcagcagcaacgccgagggcctggagaagacccagaccacccccaacggcagcctgcaggccagaagaagcagcagcctgaaggtgagcggcaccaagatgggcacccacagcgtgcagaacggcaccgtgagaatgggcatcctgaacagcgacaccctgggcaaccccaccaacgtgagaaacatgagctggctgcccaacggctacgtgaccctgagagacaacaagcagaaggagcaggccggcgagctgggccagcacaacagactgagcacctacgacaacgtgcaccagcagttcagcatgatgaacctggacgacaagcagagcatcgacagcgccacctggagcaccagcagctgcgagatcagcctgcccgagaacagcaacagctgcagaagcagcaccaccacctgccccgagcaggacttcttcggcggcaacttcgaggaccccgtgctggacggccccccccaggacgacctgagccaccccagagactacgagagcaagagcgaccacagaagcgtgggcggcagaagcagcagagccaccagcagcagcgacaacagcgagaccttcgtgggcaacagcagcagcaaccacagcgccctgcacagcctggtgagcagcctgaagcaggagatgaccaagcagaagatcgagtacgagagcagaatcaagagcctggagcagagaaacctgaccctggagaccgagatgatgagcctgcacgacgagctggaccaggagagaaagaagttcaccatgatcgagatcaagatgagaaacgccgagagagccaaggaggacgccgagaagagaaacgacatgctgcagaaggagatggagcagttcttcagcaccttcggcgagctgaccgtggagcccagaagaaccgagagaggcaacaccatctggatccagtag

SEQ ID NO: 97105 - DNA, 1962 bp, synthetic construct
  misc_feature 1..1962: note = Description of Artificial Sequence: Synthetic coding sequence
  source 1..1962: mol_type = other DNA
atgaccgccaaccacgagagctacctgctgatggccagcacccagaacgacatggaggactgggtgaagagcatcagaagagtgatctggggccccttcggcggcggcatcttcggccagaagctggaggacaccgtgagatacgagaagagatacggcaacagactggcccccatgctggtggagcagtgcgtggacttcatcagacagagaggcctgaaggaggagggcctgttcagactgcccggccaggccaacctggtgaaggagctgcaggacgccttcgactgcggcgagaagcccagcttcgacagcaacaccgacgtgcacaccgtggccagcctgctgaagctgtacctgagagagctgcccgagcccgtgatcccctacgccaagtacgaggacttcctgagctgcgccaagctgctgagcaaggaggaggaggccggcgtgaaggagctggccaagcaggtgaagagcctgcccgtggtgaactacaacctgctgaagtacatctgcagattcctggacgaggtgcagagctacagcggcgtgaacaagatgagcgtgcagaacctggccaccgtgttcggccccaacatcctgagacccaaggtggaggaccccctgaccatcatggagggcaccgtggtggtgcagcagctgatgagcgtgatgatcagcaagcacgactgcctgttccccaaggacgccgagctgcagagcaagccccaggacggcgtgagcaacaacaacgagatccagaagaaggccaccatgggccagctgcagaacaaggagaacaacaacaccaaggacagccccagcagacagtgcagctgggacaagagcgagagcccccagagaagcagcatgaacaacggcagccccaccgccctgagcggcagcaagaccaacagccccaagaacagcgtgcacaagctggacgtgagcagaagcccccccctgatggtgaagaagaaccccgccttcaacaagggcagcggcatcgtgaccaacggcagcttcagcagcagcaacgccgagggcctggagaagacccagaccacccccaacggcagcctgcaggccagaagaagcagcagcctgaaggtgagcggcaccaagatgggcacccacagcgtgcagaacggcaccgtgagaatgggcatcctgaacagcgacaccctgggcaaccccaccaacgtgagaaacatgagctggctgcccaacggctacgtgaccctgagagacaacaagcagaaggagcaggccggcgagctgggccagcacaacagactgagcacctacgacaacgtgcaccagcagttcagcatgatgaacctggacgacaagcagagcatcgacagcgccacctggagcaccagcagctgcgagatcagcctgcccgagaacagcaacagctgcagaagcagcaccaccacctgccccgagcaggacttcttcggcggcaacttcgaggaccccgtgctggacggccccccccaggacgacctgagccaccccagagactacgagagcaagagcgaccacagaagcgtgggcggcagaagcagcagagccaccagcagcagcgacaacagcgagaccttcgtgggcaacagcagcagcaaccacagcgccctgcacagcctggtgagcagcctgaagcaggagatgaccaagcagaagatcgagtacgagagcagaatcaagagcctggagcagagaaacctgaccctggagaccgagatgatgagcctgcacgacgagctggaccaggagagaaagaagttcaccatgatcgagatcaagatgagaaacgccgagagagccaaggaggacgccgagaagagaaacgacatgctgcagaaggagatggagcagttcttcagcaccttcggcgagctgaccgtggagcccagaagaaccgagagaggcaacaccatctggatccagtag

SEQ ID NO: 97106 - DNA, 2247 bp, synthetic construct
  misc_feature 1..2247: note = Description of Artificial Sequence: Synthetic coding sequence
  source 1..2247: mol_type = other DNA
atggaggagaacaacgacagcaccgagaacccccagcagggccagggcagacagaacgccatcaagtgcggctggctgagaaagcagggcggcttcgtgaagacctggcacaccagatggttcgtgctgaagggcgaccagctgtactacttcaaggacgaggacgagaccaagcccctgggcaccatcttcctgcccggcaacaaggtgagcgagcacccctgcaacgaggagaaccccggcaagttcctgttcgaggtggtgcccggcggcgacagagacagaatgaccgccaaccacgagagctacctgctgatggccagcacccagaacgacatggaggactgggtgaagagcatcagaagagtgatctggggccccttcggcggcggcatcttcggccagaagctggaggacaccgtgagatacgagaagagatacggcaacagactggcccccatgctggtggagcagtgcgtggacttcatcagacagagaggcctgaaggaggagggcctgttcagactgcccggccaggccaacctggtgaaggagctgcaggacgccttcgactgcggcgagaagcccagcttcgacagcaacaccgacgtgcacaccgtggccagcctgctgaagctgtacctgagagagctgcccgagcccgtgatcccctacgccaagtacgaggacttcctgagctgcgccaagctgctgagcaaggaggaggaggccggcgtgaaggagctggccaagcaggtgaagagcctgcccgtggtgaactacaacctgctgaagtacatctgcagattcctggacgaggtgcagagctacagcggcgtgaacaagatgagcgtgcagaacctggccaccgtgttcggccccaacatcctgagacccaaggtggaggaccccctgaccatcatggagggcaccgtggtggtgcagcagctgatgagcgtgatgatcagcaagcacgactgcctgttccccaaggacgccgagctgcagagcaagccccaggacggcgtgagcaacaacaacgagatccagaagaaggccaccatgggccagctgcagaacaaggagaacaacaacaccaaggacagccccagcagacagtgcagctgggacaagagcgagagcccccagagaagcagcatgaacaacggcagccccaccgccctgagcggcagcaagaccaacagccccaagaacagcgtgcacaagctggacgtgagcagaagcccccccctgatggtgaagaagaaccccgccttcaacaagggcagcggcatcgtgaccaacggcagcttcagcagcagcaacgccgagggcctggagaagacccagaccacccccaacggcagcctgcaggccagaagaagcagcagcctgaaggtgagcggcaccaagatgggcacccacagcgtgcagaacggcaccgtgagaatgggcatcctgaacagcgacaccctgggcaaccccaccaacgtgagaaacatgagctggctgcccaacggctacgtgaccctgagagacaacaagcagaaggagcaggccggcgagctgggccagcacaacagactgagcacctacgacaacgtgcaccagcagttcagcatgatgaacctggacgacaagcagagcatcgacagcgccacctggagcaccagcagctgcgagatcagcctgcccgagaacagcaacagctgcagaagcagcaccaccacctgccccgagcaggacttcttcggcggcaacttcgaggaccccgtgctggacggccccccccaggacgacctgagccaccccagagactacgagagcaagagcgaccacagaagcgtgggcggcagaagcagcagagccaccagcagcagcgacaacagcgagaccttcgtgggcaacagcagcagcaaccacagcgccctgcacagcctggtgagcagcctgaagcaggagatgaccaagcagaagatcgagtacgagagcagaatcaagagcctggagcagagaaacctgaccctggagaccgagatgatgagcctgcacgacgagctggaccaggagagaaagaagttcaccatgatcgagatcaagatgagaaacgccgagagagccaaggaggacgccgagaagagaaacgacatgctgcagaaggagatggagcagttcttcagcaccttcggcgagctgaccgtggagcccagaagaaccgagagaggcaacaccatctggatccagtag

SEQ ID NO: 97107 - DNA, 741 bp, synthetic construct
  misc_feature 1..741: note = Description of Artificial Sequence: Synthetic coding sequence
  source 1..741: mol_type = other DNA
atggaggagaacaacgacagcaccgagaacccccagcagggccagggcagacagaacgccatcaagtgcggctggctgagaaagcagggcggcttcgtgaagacctggcacaccagatggttcgtgctgaagggcgaccagctgtactacttcaaggacgaggacgagaccaagcccctgggcaccatcttcctgcccggcaacaaggtgagcgagcacccctgcaacgaggagaaccccggcaagttcctgttcgaggtggtgcccggcggcgacagagacagaatgaccgccaaccacgagagctacctgctgatggccagcacccagaacgacatggaggactgggtgaagagcatcagaagagtgatctggggccccttcggcggcggcatcttcggccagaagctggaggacaccgtgagatacgagaagagatacggcaacagactggcccccatgctggtggagcagtgcgtggacttcatcagacagagaggcctgaaggaggagggcctgttcagactgcccggccaggccaacctggtgaaggagctgcaggacgccttcgactgcggcgagaagcccagcttcgacagcaacaccgacgtgcacaccgtggccagcctgctgaagctgtacctgagagagctgcccgagcccgtgatcccctacgccaagtacgaggacttcctgagctgcgccaagctgctgagcaaggaggaggaggccgtgagctag

SEQ ID NO: 97108 - DNA, 249 bp, synthetic construct
  misc_feature 1..249: note = Description of Artificial Sequence: Synthetic coding sequence
  source 1..249: mol_type = other DNA
atgaccgccaaccacgagagctacctgctgatggccagcacccagaacgacatggaggactgggtgaagagcatcagaagagtgatctggggccccttcggcggcggcatcttcggccagaagctggaggacaccgtgagatacgagaagagatacggcaacagactggcccccatgctggtggagcagtgcgtggacttcatcagacagagaggcctgaaggaggagggcctgttcagactgccctag

SEQ ID NO: 97109 - DNA, 1938 bp, synthetic construct
  misc_feature 1..1938: note = Description of Artificial Sequence: Synthetic coding sequence
  source 1..1938: mol_type = other DNA
atgagcctgaagctgcccagaaactgggacttcaacctgaaggtggaggccgccaagatcgccagaagcagaagcgtgatgaccggcgagcagatggccgccttccaccccagcagcacccccaaccccctggagagacccatcaagatgggctggctgaagaagcagagaagcatcgtgaagaactggcagcagagatacttcgtgctgagagcccagcagctgtactactacaaggacgaggaggacaccaagccccagggctgcatgtacctgcccggctgcaccatcaaggagatcgccaccaaccccgaggaggccggcaagttcgtgttcgagatcatccccgccagctgggaccagaacagaatgggccaggacagctacgtgctgatggccagcagccaggccgagatggaggagtgggtgaagttcctgagaagagtggccggcaccccctgcggcgtgttcggccagagactggacgagaccgtggcctacgagcagaagttcggcccccacctggtgcccatcctggtggagaagtgcgccgagttcatcctggagcacggcagaaacgaggagggcatcttcagactgcccggccaggacaacctggtgaagcagctgagagacgccttcgacgccggcgagagacccagcttcgacagagacaccgacgtgcacaccgtggccagcctgctgaagctgtacctgagagacctgcccgagcccgtggtgccctggagccagtacgagggcttcctgctgtgcggccagctgaccaacgccgacgaggccaaggcccagcaggagctgatgaagcagctgagcatcctgcccagagacaactacagcctgctgagctacatctgcagattcctgcacgagatccagctgaactgcgccgtgaacaagatgagcgtggacaacctggccaccgtgatcggcgtgaacctgatcagaagcaaggtggaggaccccgccgtgatcatgagaggcaccccccagatccagagagtgatgaccatgatgatcagagaccacgaggtgctgttccccaagagcaaggacatccccctgagcccccccgcccagaagaacgaccccaagaaggcccccgtggccagaagcagcgtgggctgggacgccaccgaggacctgagaatcagcagaaccgacagcttcagcagcatgaccagcgacagcgacaccaccagccccaccggccagcagcccagcgacgccttccccgaggacagcagcaaggtgcccagagagaagcccggcgactggaagatgcagagcagaaagagaacccagaccctgcccaacagaaagtgcttcctgaccagcgccttccagggcgccaacagcagcaagatggagatcttcaagaacgagttctggagccccagcagcgaggccaaggccggcgagggccacagaagaaccatgagccaggacctgagacagctgagcgacagccagagaaccagcacctacgacaacgtgcccagcctgcccggcagccccggcgaggaggccagcgccctgagcagccaggcctgcgacagcaagggcgacaccctggccagccccaacagcgagaccggccccggcaagaagaacagcggcgaggaggagatcgacagcctgcagagaatggtgcaggagctgagaaaggagatcgagacccagaagcagatgtacgaggagcagatcaagaacctggagaaggagaactacgacgtgtgggccaaggtggtgagactgaacgaggagctggagaaggagaagaagaagagcgccgccctggagatcagcctgagaaacatggagagaagcagagaggacgtggagaagagaaacaaggccctggaggaggaggtgaaggagttcgtgaagagcatgaaggagcccaagaccgaggcctag

SEQ ID NO: 97110 - DNA, 1917 bp, synthetic construct
  misc_feature 1..1917: note = Description of Artificial Sequence: Synthetic coding sequence
  source 1..1917: mol_type = other DNA
atgagcctgggccagagcgcctgcctgttcctgagcatcgccagaagcagaagcgtgatgaccggcgagcagatggccgccttccaccccagcagcacccccaaccccctggagagacccatcaagatgggctggctgaagaagcagagaagcatcgtgaagaactggcagcagagatacttcgtgctgagagcccagcagctgtactactacaaggacgaggaggacaccaagccccagggctgcatgtacctgcccggctgcaccatcaaggagatcgccaccaaccccgaggaggccggcaagttcgtgttcgagatcatccccgccagctgggaccagaacagaatgggccaggacagctacgtgctgatggccagcagccaggccgagatggaggagtgggtgaagttcctgagaagagtggccggcaccccctgcggcgtgttcggccagagactggacgagaccgtggcctacgagcagaagttcggcccccacctggtgcccatcctggtggagaagtgcgccgagttcatcctggagcacggcagaaacgaggagggcatcttcagactgcccggccaggacaacctggtgaagcagctgagagacgccttcgacgccggcgagagacccagcttcgacagagacaccgacgtgcacaccgtggccagcctgctgaagctgtacctgagagacctgcccgagcccgtggtgccctggagccagtacgagggcttcctgctgtgcggccagctgaccaacgccgacgaggccaaggcccagcaggagctgatgaagcagctgagcatcctgcccagagacaactacagcctgctgagctacatctgcagattcctgcacgagatccagctgaactgcgccgtgaacaagatgagcgtggacaacctggccaccgtgatcggcgtgaacctgatcagaagcaaggtggaggaccccgccgtgatcatgagaggcaccccccagatccagagagtgatgaccatgatgatcagagaccacgaggtgctgttccccaagagcaaggacatccccctgagcccccccgcccagaagaacgaccccaagaaggcccccgtggccagaagcagcgtgggctgggacgccaccgaggacctgagaatcagcagaaccgacagcttcagcagcatgaccagcgacagcgacaccaccagccccaccggccagcagcccagcgacgccttccccgaggacagcagcaaggtgcccagagagaagcccggcgactggaagatgcagagcagaaagagaacccagaccctgcccaacagaaagtgcttcctgaccagcgccttccagggcgccaacagcagcaagatggagatcttcaagaacgagttctggagccccagcagcgaggccaaggccggcgagggccacagaagaaccatgagccaggacctgagacagctgagcgacagccagagaaccagcacctacgacaacgtgcccagcctgcccggcagccccggcgaggaggccagcgccctgagcagccaggcctgcgacagcaagggcgacaccctggccagccccaacagcgagaccggccccggcaagaagaacagcggcgaggaggagatcgacagcctgcagagaatggtgcaggagctgagaaaggagatcgagacccagaagcagatgtacgaggagcagatcaagaacctggagaaggagaactacgacgtgtgggccaaggtggtgagactgaacgaggagctggagaaggagaagaagaagagcgccgccctggagatcagcctgagaaacatggagagaagcagagaggacgtggagaagagaaacaaggccctggaggaggaggtgaaggagttcgtgaagagcatgaaggagcccaagaccgaggcctag

SEQ ID NO: 97111 - DNA, 1941 bp, synthetic construct
  misc_feature 1..1941: note = Description of Artificial Sequence: Synthetic coding sequence
  source 1..1941: mol_type = other DNA
atgagcctgaagctgcccagaaactgggacttcaacctgaaggtggaggccgccaagatcgccagaagcagaagcgtgatgaccggcgagcagatggccgccttccaccccagcagcacccccaaccccctggagagacccatcaagatgggctggctgaagaagcagagaagcatcgtgaagaactggcagcagagatacttcgtgctgagagcccagcagctgtactactacaaggacgaggaggacaccaagccccagggctgcatgtacctgcccggctgcaccatcaaggagatcgccaccaaccccgaggaggccggcaagttcgtgttcgagatcatccccgccagctgggaccagaacagaatgggccaggacagctacgtgctgatggccagcagccaggccgagatggaggagtgggtgaagttcctgagaagagtggccggcaccccctgcggcgccgtgttcggccagagactggacgagaccgtggcctacgagcagaagttcggcccccacctggtgcccatcctggtggagaagtgcgccgagttcatcctggagcacggcagaaacgaggagggcatcttcagactgcccggccaggacaacctggtgaagcagctgagagacgccttcgacgccggcgagagacccagcttcgacagagacaccgacgtgcacaccgtggccagcctgctgaagctgtacctgagagacctgcccgagcccgtggtgccctggagccagtacgagggcttcctgctgtgcggccagctgaccaacgccgacgaggccaaggcccagcaggagctgatgaagcagctgagcatcctgcccagagacaactacagcctgctgagctacatctgcagattcctgcacgagatccagctgaactgcgccgtgaacaagatgagcgtggacaacctggccaccgtgatcggcgtgaacctgatcagaagcaaggtggaggaccccgccgtgatcatgagaggcaccccccagatccagagagtgatgaccatgatgatcagagaccacgaggtgctgttccccaagagcaaggacatccccctgagcccccccgcccagaagaacgaccccaagaaggcccccgtggccagaagcagcgtgggctgggacgccaccgaggacctgagaatcagcagaaccgacagcttcagcagcatgaccagcgacagcgacaccaccagccccaccggccagcagcccagcgacgccttccccgaggacagcagcaaggtgcccagagagaagcccggcgactggaagatgcagagcagaaagagaacccagaccctgcccaacagaaagtgcttcctgaccagcgccttccagggcgccaacagcagcaagatggagatcttcaagaacgagttctggagccccagcagcgaggccaaggccggcgagggccacagaagaaccatgagccaggacctgagacagctgagcgacagccagagaaccagcacctacgacaacgtgcccagcctgcccggcagccccggcgaggaggccagcgccctgagcagccaggcctgcgacagcaagggcgacaccctggccagccccaacagcgagaccggccccggcaagaagaacagcggcgaggaggagatcgacagcctgcagagaatggtgcaggagctgagaaaggagatcgagacccagaagcagatgtacgaggagcagatcaagaacctggagaaggagaactacgacgtgtgggccaaggtggtgagactgaacgaggagctggagaaggagaagaagaagagcgccgccctggagatcagcctgagaaacatggagagaagcagagaggacgtggagaagagaaacaaggccctggaggaggaggtgaaggagttcgtgaagagcatgaaggagcccaagaccgaggcctag

SEQ ID NO: 97112 - DNA, 1920 bp, synthetic construct
  misc_feature 1..1920: note = Description of Artificial Sequence: Synthetic coding sequence
  source 1..1920: mol_type = other DNA
atgagcctgggccagagcgcctgcctgttcctgagcatcgccagaagcagaagcgtgatgaccggcgagcagatggccgccttccaccccagcagcacccccaaccccctggagagacccatcaagatgggctggctgaagaagcagagaagcatcgtgaagaactggcagcagagatacttcgtgctgagagcccagcagctgtactactacaaggacgaggaggacaccaagccccagggctgcatgtacctgcccggctgcaccatcaaggagatcgccaccaaccccgaggaggccggcaagttcgtgttcgagatcatccccgccagctgggaccagaacagaatgggccaggacagctacgtgctgatggccagcagccaggccgagatggaggagtgggtgaagttcctgagaagagtggccggcaccccctgcggcgccgtgttcggccagagactggacgagaccgtggcctacgagcagaagttcggcccccacctggtgcccatcctggtggagaagtgcgccgagttcatcctggagcacggcagaaacgaggagggcatcttcagactgcccggccaggacaacctggtgaagcagctgagagacgccttcgacgccggcgagagacccagcttcgacagagacaccgacgtgcacaccgtggccagcctgctgaagctgtacctgagagacctgcccgagcccgtggtgccctggagccagtacgagggcttcctgctgtgcggccagctgaccaacgccgacgaggccaaggcccagcaggagctgatgaagcagctgagcatcctgcccagagacaactacagcctgctgagctacatctgcagattcctgcacgagatccagctgaactgcgccgtgaacaagatgagcgtggacaacctggccaccgtgatcggcgtgaacctgatcagaagcaaggtggaggaccccgccgtgatcatgagaggcaccccccagatccagagagtgatgaccatgatgatcagagaccacgaggtgctgttccccaagagcaaggacatccccctgagcccccccgcccagaagaacgaccccaagaaggcccccgtggccagaagcagcgtgggctgggacgccaccgaggacctgagaatcagcagaaccgacagcttcagcagcatgaccagcgacagcgacaccaccagccccaccggccagcagcccagcgacgccttccccgaggacagcagcaaggtgcccagagagaagcccggcgactggaagatgcagagcagaaagagaacccagaccctgcccaacagaaagtgcttcctgaccagcgccttccagggcgccaacagcagcaagatggagatcttcaagaacgagttctggagccccagcagcgaggccaaggccggcgagggccacagaagaaccatgagccaggacctgagacagctgagcgacagccagagaaccagcacctacgacaacgtgcccagcctgcccggcagccccggcgaggaggccagcgccctgagcagccaggcctgcgacagcaagggcgacaccctggccagccccaacagcgagaccggccccggcaagaagaacagcggcgaggaggagatcgacagcctgcagagaatggtgcaggagctgagaaaggagatcgagacccagaagcagatgtacgaggagcagatcaagaacctggagaaggagaactacgacgtgtgggccaaggtggtgagactgaacgaggagctggagaaggagaagaagaagagcgccgccctggagatcagcctgagaaacatggagagaagcagagaggacgtggagaagagaaacaaggccctggaggaggaggtgaaggagttcgtgaagagcatgaaggagcccaagaccgaggcctag

SEQ ID NO: 97113 - DNA, 852 bp, synthetic construct
  misc_feature 1..852: note = Description of Artificial Sequence: Synthetic coding sequence
  source 1..852: mol_type = other DNA
atgaccggcgagcagatggccgccttccaccccagcagcacccccaaccccctggagagacccatcaagatgggctggctgaagaagcagagaagcatcgtgaagaactggcagcagagatacttcgtgctgagagcccagcagctgtactactacaaggacgaggaggacaccaagccccagggctgcatgtacctgcccggctgcaccatcaaggagatcgccaccaaccccgaggaggccggcaagttcgtgttcgagatcatccccgccagctgggaccagaacagaatgggccaggacagctacgtgctgatggccagcagccaggccgagatggaggagtgggtgaagttcctgagaagagtggccggcaccccctgcggcgccgtgttcggccagagactggacgagaccgtggcctacgagcagaagttcggcccccacctggtgcccatcctggtggagaagtgcgccgagttcatcctggagcacggcagaaacgaggagggcatcttcagactgcccggccaggacaacctggtgaagcagctgagagacgccttcgacgccggcgagagacccagcttcgacagagacaccgacgtgcacaccgtggccagcctgctgaagctgtacctgagagacctgcccgagcccgtggtgccctggagccagtacgagggcttcctgctgtgcggccagctgaccaacgccgacgaggccaagaactacagaaacagaaacgactgccagagcgtggtgagcgcccagatccaccagttctgccccagagtgagcctgctggcccacggccaggcccacctgctggtgaacgacctgctggtgtag

SEQ ID NO: 97114 - DNA, 1776 bp, synthetic construct
  misc_feature 1..1776: note = Description of Artificial Sequence: Synthetic coding sequence
  source 1..1776: mol_type = other DNA
atgagcctgggccagagcgcctgcctgttcctgagcatcgccagaagcagaagcgtgatgaccggcgagcagatggccgccttccaccccagcagcacccccaaccccctggagagacccatcaagatgggctggctgaagaagcagagaagcatcgtgaagaactggcagcagagatacttcgtgctgagagcccagcagctgtactactacaaggacgaggaggacaccaagccccagggctgcatgtacctgcccggctgcaccatcaaggagatcgccaccaaccccgaggaggccggcaagttcgtgttcgagatcatccccgccagctgggaccagaacagaatgggccaggacagctacgtgctgatggccagcagccaggccgagatggaggagtgggtgaagttcctgagaagagtggccggcaccccctgcggcgccgtgttcggccagagactggacgagaccgtggcctacgagcagaagttcggcccccacctggtgcccatcctggtggagaagtgcgccgagttcatcctggagcacggcagaaacgaggagggcatcttcagactgcccggccaggacaacctggtgaagcagctgagagacgccttcgacgccggcgagagacccagcttcgacagagacaccgacgtgcacaccgtggccagcctgctgaagctgtacctgagagacctgcccgagcccgtggtgccctggagccagtacgagggcttcctgctgtgcggccagctgaccaacgccgacgaggccaaggcccagcaggagctgatgaagcagctgagcatcctgcccagagacaactacagcctgctgagctacatctgcagattcctgcacgagatccagctgaactgcgccgtgaacaagatgagcgtggacaacctggccaccgtgatcggcgtgaacctgatcagaagcaaggtggaggaccccgccgtgatcatgagaggcaccccccagatccagagagtgatgaccatgatgatcagagaccacgaggtgctgttccccaagagcaaggacatccccctgagcccccccgcccagaagaacgaccccaagaaggcccccgtggccagaagcagcgtgggctgggacgccaccgaggacctgagaatcagcagaaccgacagcttcagcagcatgaccagcgacagcgacaccaccagccccaccggccagcagcccagcgacgccttccccgaggacagcagcaaggtgcccagagagaagcccggcgactggaagatgcagagcagaaagagaacccagaccctgcccaacagaaagtgcttcctgaccagcgccttccagggcgccaacagcagcaagatggagatcttcaagaacgagttctggagccccagcagcgaggccaaggccggcgagggccacagaagaaccatgagccaggacctgagacagctgagcgacagccagagaaccagcacctacgacaacgtgcccagcctgcccggcagccccggcgaggaggccagcgccctgagcagccaggcctgcgacagcaagggcgacaccctggccagccccaacagcgagaccggccccggcaagaagaacagcggcgaggaggagatcgacagcctgcagagaatggtgcaggagctgagaaaggagatcgagacccagaagcagatgtacgaggagcagatcaagaacctggagaaggagaactacgacgtgtgggccaaggtggtgagacccttcctgagcgccatctag

SEQ ID NO: 97115 - DNA, 1377 bp, synthetic construct
  misc_feature 1..1377: note = Description of Artificial Sequence: Synthetic coding sequence
  source 1..1377: mol_type = other DNA
atgagcctgggccagagcgcctgcctgttcctgagcatcgccagaagcagaagcgtgatgaccggcgagcagatggccgccttccaccccagcagcacccccaaccccctggagagacccatcaagatgggctggctgaagaagcagagaagcatcgtgaagaactggcagcagagatacttcgtgctgagagcccagcagctgtactactacaaggacgaggaggacaccaagccccagggctgcatgtacctgcccggctgcaccatcaaggagatcgccaccaaccccgaggaggccggcaagttcgtgttcgagatcatccccgccagctgggaccagaacagaatgggccaggacagctacgtgctgatggccagcagccaggccgagatggaggagtgggtgaagttcctgagaagagtggccggcaccccctgcggcgccgtgttcggccagagactggacgagaccgtggcctacgagcagaagttcggcccccacctggtgcccatcctggtggagaagtgcgccgagttcatcctggagcacggcagaaacgaggagggcatcttcagactgcccggccaggacaacctggtgaagcagctgagagacgccttcgacgccggcgagagacccagcttcgacagagacaccgacgtgcacaccgtggccagcctgctgaagctgtacctgagagacctgcccgagcccgtggtgccctggagccagtacgagggcttcctgctgtgcggccagctgaccaacgccgacgaggccaaggcccagcaggagctgatgaagcagctgagcatcctgcccagagacaactacagcctgctgagctacatctgcagattcctgcacgagatccagctgaactgcgccgtgaacaagatgagcgtggacaacctggccaccgtgatcggcgtgaacctgatcagaagcaaggtggaggaccccgccgtgatcatgagaggcaccccccagatccagagagtgatgaccatgatgatcagagaccacgaggtgctgttccccaagagcaaggacatccccctgagcccccccgcccagaagaacgaccccaagaaggcccccgtggccagaagcagcgtgggctgggacgccaccgaggacctgagaatcagcagaaccgacagcttcagcagcatggtgagatgcagagagcccagctgcttccactgggtgctgcccctggtgcaggccatcccctgcaaggcctgcagcagagtggccatctggggcgtgctgggcgacgccgtggccgtgggcgccgccgccaccgacagcagcgagcacaccctgaaggcctggcccctgagcaagagcagcttctactggcacctgtag

SEQ ID NO: 97116 - DNA, 1893 bp, synthetic construct
  misc_feature 1..1893: note = Description of Artificial Sequence: Synthetic coding sequence
  source 1..1893: mol_type = other DNA
atgagcctgggccagagcgcctgcctgttcctgagcatcgccagaagcagaagcgtgatgaccggcgagcagatggccgccttccaccccagcagcacccccaaccccctggagagacccatcaagatgggctggctgaagaagcagagaagcatcgtgaagaactggcagcagagctactactacaaggacgaggaggacaccaagccccagggctgcatgtacctgcccggctgcaccatcaaggagatcgccaccaaccccgaggaggccggcaagttcgtgttcgagatcatccccgccagctgggaccagaacagaatgggccaggacagctacgtgctgatggccagcagccaggccgagatggaggagtgggtgaagttcctgagaagagtggccggcaccccctgcggcgccgtgttcggccagagactggacgagaccgtggcctacgagcagaagttcggcccccacctggtgcccatcctggtggagaagtgcgccgagttcatcctggagcacggcagaaacgaggagggcatcttcagactgcccggccaggacaacctggtgaagcagctgagagacgccttcgacgccggcgagagacccagcttcgacagagacaccgacgtgcacaccgtggccagcctgctgaagctgtacctgagagacctgcccgagcccgtggtgccctggagccagtacgagggcttcctgctgtgcggccagctgaccaacgccgacgaggccaaggcccagcaggagctgatgaagcagctgagcatcctgcccagagacaactacagcctgctgagctacatctgcagattcctgcacgagatccagctgaactgcgccgtgaacaagatgagcgtggacaacctggccaccgtgatcggcgtgaacctgatcagaagcaaggtggaggaccccgccgtgatcatgagaggcaccccccagatccagagagtgatgaccatgatgatcagagaccacgaggtgctgttccccaagagcaaggacatccccctgagcccccccgcccagaagaacgaccccaagaaggcccccgtggccagaagcagcgtgggctgggacgccaccgaggacctgagaatcagcagaaccgacagcttcagcagcatgaccagcgacagcgacaccaccagccccaccggccagcagcccagcgacgccttccccgaggacagcagcaaggtgcccagagagaagcccggcgactggaagatgcagagcagaaagagaacccagaccctgcccaacagaaagtgcttcctgaccagcgccttccagggcgccaacagcagcaagatggagatcttcaagaacgagttctggagccccagcagcgaggccaaggccggcgagggccacagaagaaccatgagccaggacctgagacagctgagcgacagccagagaaccagcacctacgacaacgtgcccagcctgcccggcagccccggcgaggaggccagcgccctgagcagccaggcctgcgacagcaagggcgacaccctggccagccccaacagcgagaccggccccggcaagaagaacagcggcgaggaggagatcgacagcctgcagagaatggtgcaggagctgagaaaggagatcgagacccagaagcagatgtacgaggagcagatcaagaacctggagaaggagaactacgacgtgtgggccaaggtggtgagactgaacgaggagctggagaaggagaagaagaagagcgccgccctggagatcagcctgagaaacatggagagaagcagagaggacgtggagaagagaaacaaggccctggaggaggaggtgaaggagttcgtgaagagcatgaaggagcccaagaccgaggcctag

SEQ ID NO: 97117 - DNA, 852 bp, synthetic construct; identical to SEQ ID NO: 97113
  misc_feature 1..852: note = Description of Artificial Sequence: Synthetic coding sequence
  source 1..852: mol_type = other DNA

SEQ ID NO: 97118 - DNA, 1821 bp, synthetic construct
  misc_feature 1..1821: note = Description of Artificial Sequence: Synthetic coding sequence
  source 1..1821: mol_type = other DNA
atgagcctgaagctgcccagaaactgggacttcaacctgaaggtggaggccgccaagatcgccagaagcagaagcgtgatgaccggcgagcagatggccgccttccaccccagcagcacccccaaccccctggagagacccatcaagatgggctggctgaagaagcagagaagcatcgtgaagaactggcagcagagatacttcgtgctgagagcccagcagctgtactactacaaggacgaggaggacaccaagccccagggctgcatgtacctgcccggctgcaccatcaaggagatcgccaccaaccccgaggaggccggcaagttcgtgttcgagatcatccccgtgttcggccagagactggacgagaccgtggcctacgagcagaagttcggcccccacctggtgcccatcctggtggagaagtgcgccgagttcatcctggagcacggcagaaacgaggagggcatcttcagactgcccggccaggacaacctggtgaagcagctgagagacgccttcgacgccggcgagagacccagcttcgacagagacaccgacgtgcacaccgtggccagcctgctgaagctgtacctgagagacctgcccgagcccgtggtgccctggagccagtacgagggcttcctgctgtgcggccagctgaccaacgccgacgaggccaaggcccagcaggagctgatgaagcagctgagcatcctgcccagagacaactacagcctgctgagctacatctgcagattcctgcacgagatccagctgaactgcgccgtgaacaagatgagcgtggacaacctggccaccgtgatcggcgtgaacctgatcagaagcaaggtggaggaccccgccgtgatcatgagaggcaccccccagatccagagagtgatgaccatgatgatcagagaccacgaggtgctgttccccaagagcaaggacatccccctgagcccccccgcccagaagaacgaccccaagaaggcccccgtggccagaagcagcgtgggctgggacgccaccgaggacctgagaatcagcagaaccgacagcttcagcagcatgaccagcgacagcgacaccaccagccccaccggccagcagcccagcgacgccttccccgaggacagcagcaaggtgcccagagagaagcccggcgactggaagatgcagagcagaaagagaacccagaccctgcccaacagaaagtgcttcctgaccagcgccttccagggcgccaacagcagcaagatggagatcttcaagaacgagttctggagccccagcagcgaggccaaggccggcgagggccacagaagaaccatgagccaggacctgagacagctgagcgacagccagagaaccagcacctacgacaacgtgcccagcctgcccggcagccccggcgaggaggccagcgccctgagcagccaggcctgcgacagcaagggcgacaccctggccagccccaacagcgagaccggccccggcaagaagaacagcggcgaggaggagatcgacagcctgcagagaatggtgcaggagctgagaaaggagatcgagacccagaagcagatgtacgaggagcagatcaagaacctggagaaggagaactacgacgtgtgggccaaggtggtgagactgaacgaggagctggagaaggagaagaagaagagcgccgccctggagatcagcctgagaaacatggagagaagcagagaggacgtggagaagagaaacaaggccctggaggaggaggtgaaggagttcgtgaagagcatgaaggagcccaagaccgaggcctag

SEQ ID NO: 97119 - DNA, 2445 bp, synthetic construct
  misc_feature 1..2445: note = Description of Artificial Sequence: Synthetic coding sequence
  source 1..2445: mol_type = other DNA
atgggcctgcccgccctggagttcagcgactgctgcctggacagcccccacttcagagagaccctgaagagccacgaggccgagctggacaagaccaacaagttcatcaaggagctgatcaaggacggcaagagcctgatcagcgccctgaagaacctgagcagcgccaagagaaagttcgccgacagcctgaacgagttcaagttccagtgcatcggcgacgccgagaccgacgacgagatgtgcatcgccagaagcctgcaggagttcgccaccgtgctgagaaacctggaggacgagagaatcagaatgatcgagaacgccagcgaggtgctgatcacccccctggagaagttcagaaaggagcagatcggcgccgccaaggaggccaagaagaagtacgacaaggagaccgagaagtactgcggcatcctggagaagcacctgaacctgagcagcaagaagaaggagagccagctgcaggaggccgacagccaggtggacctggtgagacagcacttctacgaggtgagcctggagtacgtgttcaaggtgcaggaggtgcaggagagaaagatgttcgagttcgtggagcccctgctggccttcctgcagggcctgttcaccttctaccaccacggctacgagctggccaaggacttcggcgacttcaagacccagctgaccatcagcatccagaacaccagaaacagattcgagggcaccagaagcgaggtggagagcctgatgaagaagatgaaggagaaccccctggagcacaagaccatcagcccctacaccatggagggctacctgtacgtgcaggagaagagacacttcggcaccagctgggtgaagcactactgcacctaccagagagacagcaagcagatcaccatggtgcccttcgaccagaagagcggcggcaagggcggcgaggacgagagcgtgatcctgaagagctgcaccagaagaaagaccgacagcatcgagaagagattctgcttcgacgtggaggccgtggacagacccggcgtgatcaccatgcaggccctgagcgaggaggacagaagactgtggatggaggccatggacggcagagagcccgtgtacaacagcaacaaggacagccagagcgagggcaccgcccagctggacagcatcggcttcagcatcatcagaaagtgcatccacgccgtggagaccagaggcatcaacgagcagggcctgtacagaatcgtgggcgtgaacagcagagtgcagaagctgctgagcgtgctgatggaccccaagaccgccagcgagaccgagaccgacatctgcgccgagtgggagatcaagaccatcaccagcgccctgaagacctacctgagaatgctgcccggccccctgatgatgtaccagttccagagaagcttcatcaaggccgccaagctggagaaccaggagagcagagtgagcgagatccacagcctggtgcacagactgcccgagaagaacagacagatgctgcagctgctgatgaaccacctggccaacgtggccaacaaccacaagcagaacctgatgaccgtggccaacctgggcgtggtgttcggccccaccctgctgagaccccaggaggagaccgtggccgccatcatggacatcaagttccagaacatcgtgatcgagatcctgatcgagaaccacgagaagatcttcaacaccgtgcccgacatgcccctgaccaacgcccagctgcacctgagcagaaagaagagcagcgacagcaagccccccagctgcagcgagagacccctgaccctgttccacaccgtgcagagcaccgagaagcaggagcagagaaacagcatcatcaacagcagcctggagagcgtgagcagcaaccccaacagcatcctgaacagcagcagcagcctgcagcccaacatgaacagcagcgaccccgacctggccgtggtgaagcccaccagacccaacagcctgccccccaaccccagccccaccagccccctgagccccagctggcccatgttcagcgcccccagcagccccatgcccaccagcagcaccagcagcgacagcagccccgtgagaagcgtggccggcttcgtgtggttcagcgtggccgccgtggtgctgagcctggccagaagcagcctgcacgccgtgttcagcctgctggtgaacttcgtgccctgccaccccaacctgcacctgctgttcgacagacccgaggaggccgtgcacgaggacagcagcacccccttcagaaaggccaaggccctgtacgcctgcaaggccgagcacgacagcgagctgagcttcaccgccggcaccgtgttcgacaacgtgcaccccagccaggagcccggctggctggagggcaccctgaacggcaagaccggcctgatccccgagaactacgtggagttcctgtag

SEQ ID NO: 97120 - DNA, 2280 bp, synthetic construct
  misc_feature 1..2280: note = Description of Artificial Sequence: Synthetic coding sequence
  source 1..2280: mol_type = other DNA
atgggcctgcccgccctggagttcagcgactgctgcctggacagcccccacttcagagagaccctgaagagccacgaggccgagctggacaagaccaacaagttcatcaaggagctgatcaaggacggcaagagcctgatcagcgccctgaagaacctgagcagcgccaagagaaagttcgccgacagcctgaacgagttcaagttccagtgcatcggcgacgccgagaccgacgacgagatgtgcatcgccagaagcctgcaggagttcgccaccgtgctgagaaacctggaggacgagagaatcagaatgatcgagaacgccagcgaggtgctgatcacccccctggagaagttcagaaaggagcagatcggcgccgccaaggaggccaagaagaagtacgacaaggagaccgagaagtactgcggcatcctggagaagcacctgaacctgagcagcaagaagaaggagagccagctgcaggaggccgacagccaggtggacctggtgagacagcacttctacgaggtgagcctggagtacgtgttcaaggtgcaggaggtgcaggagagaaagatgttcgagttcgtggagcccctgctggccttcctgcagggcctgttcaccttctaccaccacggctacgagctggccaaggacttcggcgacttcaagacccagctgaccatcagcatccagaacaccagaaacagattcgagggcaccagaagcgaggtggagagcctgatgaagaagatgaaggagaaccccctggagcacaagaccatcagcccctacaccatggagggctacctgtacgtgcaggagaagagacacttcggcaccagctgggtgaagcactactgcacctaccagagagacagcaagcagatcaccatggtgcccttcgaccagaagagcggcggcaagggcggcgaggacgagagcgtgatcctgaagagctgcaccagaagaaagaccgacagcatcgagaagagattctgcttcgacgtggaggccgtggacagacccggcgtgatcaccatgcaggccctgagcgaggaggacagaagactgtggatggaggccatggacggcagagagcccgtgtacaacagcaacaaggacagccagagcgagggcaccgcccagctggacagcatcggcttcagcatcatcagaaagtgcatccacgccgtggagaccagaggcatcaacgagcagggcctgtacagaatcgtgggcgtgaacagcagagtgcagaagctgctgagcgtgctgatggaccccaagaccgccagcgagaccgagaccgacatctgcgccgagtgggagatcaagaccatcaccagcgccctgaagacctacctgagaatgctgcccggccccctgatgatgtaccagttccagagaagcttcatcaaggccgccaagctggagaaccaggagagcagagtgagcgagatccacagcctggtgcacagactgcccgagaagaacagacagatgctgcagctgctgatgaaccacctggccaacgtggccaacaaccacaagcagaacctgatgaccgtggccaacctgggcgtggtgttcggccccaccctgctgagaccccaggaggagaccgtggccgccatcatggacatcaagttccagaacatcgtgatcgagatcctgatcgagaaccacgagaagatcttcaacaccgtgcccgacatgcccctgaccaacgcccagctgcacctgagcagaaagaagagcagcgacagcaagccccccagctgcagcgagagacccctgaccctgttccacaccgtgcagagcaccgagaagcaggagcagagaaacagcatcatcaacagcagcctggagagcgtgagcagcaaccccaacagcatcctgaacagcagcagcagcctgcagcccaacatgaacagcagcgaccccgacctggccgtggtgaagcccaccagacccaacagcctgccccccaaccccagccccaccagccccctgagccccagctggcccatgttcagcgcccccagcagccccatgcccaccagcagcaccagcagcgacagcagccccgtgagcacccccttcagaaaggccaaggccctgtacgcctgcaaggccgagcacgacagcgagctgagcttcaccgccggcaccgtgttcgacaacgtgcaccccagccaggagcccggctggctggagggcaccctgaacggcaagaccggcctgatccccgagaactacgtggagttcctgtag

SEQ ID NO: 97121 - DNA, 885 bp, synthetic construct
  misc_feature 1..885: note = Description of Artificial Sequence: Synthetic coding sequence
  source 1..885: mol_type = other DNA
tgacccaagaccgccagcgagaccgagaccgacatctgcgccgagtgggagatcaagaccatcaccagcgccctgaagacctacctgagaatgctgcccggccccctgatgatgtaccagttccagagaagcttcatcaaggccgccaagctggagaaccaggagagcagagtgagcgagatccacagcctggtgcacagactgcccgagaagaacagacagatgctgcagctgctgatgaaccacctggccaacgtggccaacaaccacaagcagaacctgatgaccgtggccaacctgggcgtggtgttcggccccaccctgctgagaccccaggaggagaccgtggccgccatcatggacatcaagttccagaacatcgtgatcgagatcctgatcgagaaccacgagaagatcttcaacaccgtgcccgacatgcccctgaccaacgcccagctgcacctgagcagaaagaagagcagcgacagcaagccccccagctgcagcgagagacccctgaccctgttccacaccgtgcagagcaccgagaagcaggagcagagaaacagcatcatcaacagcagcctggagagcgtgagcagcaaccccaacagcatcctgaacagcagcagcagcctgcagcccaacatgaacagcagcgaccccgacctggccgtggtgaagcccaccagacccaacagcctgacccccttcagaaaggccaaggccctgtacgcctgcaaggccgagcacgacagcgagctgagcttcaccgccggcaccgtgttcgacaacgtgcaccccagccaggagcccggctggctggagggcaccctgaacggcaagaccggcctgatccccgagaactacgtggagttcctgtag

SEQ ID NO: 97122 - DNA, 861 bp, synthetic construct
  misc_feature 1..861: note = Description of Artificial Sequence: Synthetic coding sequence
  source 1..861: mol_type = other DNA
atggaccccaagaccgccagcgagaccgagaccgacatctgcgccgagtgggagatcaagaccatcaccagcgccctgaagacctacctgagaatgctgcccggccccctgatgatgtaccagttccagagaagcttcatcaaggccgccaagctggagaaccaggagagcagagtgagcgagatccacagcctggtgcacagactgcccgagaagaacagacagatgctgcagctgctgatgaaccacctggccaacgtggccaacaaccacaagcagaacctgatgaccgtggccaacctgggcgtggtgttcggccccaccctgctgagaccccaggaggagaccgtggccgccatcatggacatcaagttccagaacatcgtgatcgagatcctgatcgagaaccacgagaagatcttcaacaccgtgcccgacatgcccctgaccaacgcccagctgcacctgagcagaaagaagagcagcgacagcaagccccccagctgcagcgagagacccctgaccctgttccacaccgtgcagagcaccgagaagcaggagcagagaaacagcatcatcaacagcagcctggagagcgtgagcagcaaccccaacagcatcctgaacagcagcagcagcctgcagcccaacatgaacagcagcgaccccgacctggccgtggtgaagcccaccagacccaacagcctgccccccaaccccagccccaccagccccctgagccccagctggcccatgttcagcgcccccagcagccccatgcccaccagcagcaccagcagcgacagcagccccagaatcacctggagcagcagcaacagaggcccccagcagaactgctag

SEQ ID NO: 97123 - DNA, 1167 bp, synthetic construct
  misc_feature 1..1167: note = Description of Artificial Sequence: Synthetic coding sequence
  source 1..1167: mol_type = other DNA
tgagcccagctggacagcatcggcttcagcatcatcagaaagtgcatccacgccgtggagaccagaggcatcaacgagcagggcctgtacagaatcgtgggcgtgaacagcagagtgcagaagctgctgagcgtgctgatggaccccaagaccgccagcgagaccgagaccgacatctgcgccgagtgggagatcaagaccatcaccagcgccctgaagacctacctgagaatgctgcccggccccctgatgatgtaccagttccagagaagcttcatcaaggccgccaagctggagaaccaggagagcagagtgagcgagatccacagcctggtgcacagactgcccgagaagaacagacagatgctgcagctgctgatgaaccacctggccaacgtggccaacaaccacaagcagaacctgatgaccgtggccaacctgggcgtggtgttcggccccaccctgctgagaccccaggaggagaccgtggccgccatcatggacatcaagttccagaacatcgtgatcgagatcctgatcgagaaccacgagaagatcttcaacaccgtgcccgacatgcccctgaccaacgcccagctgcacctgagcagaaagaagagcagcgacagcaagccccccagctgcagcgagagacccctgaccctgttccacaccgtgcagagcaccgagaagcaggagcagagaaacagcatcatcaacagcagcctggagagcgtgagcagcaaccccaacagcatcctgaacagcagcagcagcctgcagcccaacatgaacagcagcgaccccgacctggccgtggtgaagcccaccagacccaacagcctgccccccaaccccagccccaccagccccctgagccccagctggcccatgttcagcgcccccagcagccccatgcccaccagcagcaccagcagcgacagcagccccgtgagacccgaggaggccgtgcacgaggacagcagcacccccttcagaaaggccaaggccctgtacgcctgcaaggccgagcacgacagcgagctgagcttcaccgccggcaccgtgttcgacaacgtgcaccccagccaggagcccggctggctggagggcaccctgaacggcaagaccggcctgatccccgagaactacgtggagttcctgtag

SEQ ID NO: 97124 - DNA, 792 bp, synthetic construct
  misc_feature 1..792: note = Description of Artificial Sequence: Synthetic coding sequence
  source 1..792: mol_type = other DNA
atggccgccgacgtggtgggcgacgtgtacgtgctggtggagcaccccttcgagtacaccggcaaggacggcagaagagtggccatcagacccaacgagagatacagactgctgagaagaagcaccgagcactggtggcacgtgagaagagagcccggcggcagacccttctacctgcccgcccagtacgtgagagagctgcccgccctgggcaaccccgccgccgccgccccccccggcccccaccccagccccgccgcccccgagcccctggcctacgactacagattcgtgagcgccgccgccaccgccggccccgacggcgcccccgaggagagcggcggcagagccagcagcctgtgcggccccgcccagagaggcgccgccacccagagaagcagcctggcccccggcctgcccgcctgcctgtacctgagacccgccgcccccgtgagacccgcccagagcctgaacgacctggcctgcgccgccgtgagcccccccgccggcctgctgggcagcagcggcagcttcaaggcctgcagcgtggccggcagctgggtgtgccccagacccctggccagaagcgacagcgagaacgtgtacgaggtgatccaggacctgcacgtgcccccccccgaggagagcgccgagcaggtgccccccagagccctgggcagaggcggcggctggagagccagagacagagccagaaccgagcccggcagaaaggagaccagaagcgcccagagaagagccagaagaccccccctgagcgaggacttcggctag

SEQ ID NO: 97125 - DNA, 1647 bp, synthetic construct
  misc_feature 1..1647: note = Description of Artificial Sequence: Synthetic coding sequence
  source 1..1647: mol_type = other DNA
atgcagcccggcctgagccccggcagccccggcgaccccagaccccccacccccgagaccgactaccccgagagcctgaccagctaccccgaggaggactacagccccgtgggcagcttcggcgagcccggccccaccagccccctgaccaccccccccggctggagctgccacgtgagccaggacaagcagatgctgtacaccaaccacttcacccaggagcagtgggtgagactggaggacccccacggcaagccctacttctacaaccccgaggacagcagcgtgagatgggagctgccccaggtgcccgtgcccgcccccagaagcatccacaagagcagccaggacggcgacacccccgcccaggccagcccccccgaggagaaggtgcccgccgagctggacgaggtgggcagctgggaggaggtgagccccgccaccgccgccgtgagaaccaagaccctggacaaggccggcgtgctgcacagaaccaagaccgccgacaagggcaagagactgagaaagaagcactggagcgccagctggaccgtgctggagggcggcgtgctgaccttcttcaaggacagcaagaccagcgccgccggcggcctgagacagcccagcaagttcagcacccccgagtacaccgtggagctgagaggcgccaccctgagctgggcccccaaggacaagagcagcagaaagaacgtgctggagctgagaagcagagacggcagcgagtacctgatccagcacgacagcgaggccatcatcagcacctggcacaaggccatcgcccagggcatccaggagctgagcgccgagctgccccccgaggagagcgagagcagcagagtggacttcggcagcagcgagagactgggcagctggcaggagaaggaggaggacgccagacccaacgccgccgcccccgccctgggccccgtgggcctggagagcgacctgagcaaggtgagacacaagctgagaaagttcctgcagagaagacccaccctgcagagcctgagagagaagggctacatcaaggaccaggtgttcggctgcgccctggccgccctgtgcgagagagagagaagcagagtgcccagattcgtgcagcagtgcatcagagccgtggaggccagaggcctggacatcgacggcctgtacagaatcagcggcaacctggccaccatccagaagctgagatacaaggtggaccacgacgagagactggacctggacgacggcagatgggaggacgtgcacgtgatcaccggcgccctgaagctgttcttcagagagctgcccgagcccctgttccccttcagccacttcagacagttcatcgccgccatcaagctgcaggaccaggccagaagaagcagatgcgtgagagacctggtgagaagcctgcccgcccccaaccacgacaccctgagaatgctgttccagcacctgtgcagagtgatcgagcacggcgagcagaacagaatgagcgtgcagagcgtggccatcgtgttcggccccaccctgctgagacccgaggtggaggagaccagcatgcccatgaccatggtgttccagaaccaggtggtggagctgatcctgcagcagtgcgccgacatcttccccccccactag

SEQ ID NO: 97126 - DNA, 2670 bp, synthetic construct
  misc_feature 1..2670: note = Description of Artificial Sequence: Synthetic coding sequence
  source 1..2670: mol_type = other DNA
atggccgccgacgtggtgggcgacgtgtacgtgctggtggagcaccccttcgagtacaccggcaaggacggcagaagagtggccatcagacccaacgagagatacagactgctgagaagaagcaccgagcactggtggcacgtgagaagagagcccggcggcagacccttctacctgcccgcccagtacgtgagagagctgcccgccctgggcaaccccgccgccgccgccccccccggcccccaccccagccccgccgcccccgagcccctggcctacgactacagattcgtgagcgccgccgccaccgccggccccgacggcgcccccgaggagagcggcggcagagccagcagcctgtgcggccccgcccagagaggcgccgccacccagagaagcagcctggcccccggcctgcccgcctgcctgtacctgagacccgccgcccccgtgagacccgcccagagcctgaacgacctggcctgcgccgccgtgagcccccccgccggcctgctgggcagcagcggcagcttcaaggcctgcagcgtggccggcagctgggtgtgccccagacccctggccagaagcgacagcgagaacgtgtacgaggtgatccaggacctgcacgtgcccccccccgaggagagcgccgagcaggtggacgacccccccgagcccgtgtacgccaacatcgagagacagcccagagccaccagccccggcgccgccgccgcccccctgcccagccccgtgtgggagacccacaccgacgccggcaccggcagaccctactactacaaccccgacaccggcgtgaccacctgggagagccccttcgaggccgccgagggcgccgccagccccgccaccagccccgccagcgtggacagccacgtgagcctggagaccgagtggggccagtactgggacgaggagagcagaagagtgttcttctacaaccccctgaccggcgagaccgcctgggaggacgaggccgagaacgagcccgaggaggagctggagatgcagcccggcctgagccccggcagccccggcgaccccagaccccccacccccgagaccgactaccccgagagcctgaccagctaccccgaggaggactacagccccgtgggcagcttcggcgagcccggccccaccagccccctgaccaccccccccggctggagctgccacgtgagccaggacaagcagatgctgtacaccaaccacttcacccaggagcagtgggtgagactggaggacccccacggcaagccctacttctacaaccccgaggacagcagcgtgagatgggagctgccccaggtgcccgtgcccgcccccagaagcatccacaagagcagccaggacggcgacacccccgcccaggccagcccccccgaggagaaggtgcccgccgagctggacgaggtgggcagctgggaggaggtgagccccgccaccgccgccgtgagaaccaagaccctggacaaggccggcgtgctgcacagaaccaagaccgccgacaagggcaagagactgagaaagaagcactggagcgccagctggaccgtgctggagggcggcgtgctgaccttcttcaaggacagcaagaccagcgccgccggcggcctgagacagcccagcaagttcagcacccccgagtacaccgtggagctgagaggcgccaccctgagctgggcccccaaggacaagagcagcagaaagaacgtgctggagctgagaagcagagacggcagcgagtacctgatccagcacgacagcgaggccatcatcagcacctggcacaaggccatcgcccagggcatccaggagctgagcgccgagctgccccccgaggagagcgagagcagcagagtggacttcggcagcagcgagagactgggcagctggcaggagaaggaggaggacgccagacccaacgccgccgcccccgccctgggccccgtgggcctggagagcgacctgagcaaggtgagacacaagctgagaaagttcctgcagagaagacccaccctgcagagcctgagagagaagggctacatcaaggaccaggtgttcggctgcgccctggccgccctgtgcgagagagagagaagcagagtgcccagattcgtgcagcagtgcatcagagccgtggaggccagaggcctggacatcgacggcctgtacagaatcagcggcaacctggccaccatccagaagctgagatacaaggtggaccacgacgagagactggacctggacgacggcagatgggaggacgtgcacgtgatcaccggcgccctgaagctgttcttcagagagctgcccgagcccctgttccccttcagccacttcagacagttcatcgccgccatcaagctgcaggaccaggccagaagaagcagatgcgtgagagacctggtgagaagcctgcccgcccccaaccacgacaccctgagaatgctgttccagcacctgtgcagagtgatcgagcacggcgagcagaacagaatgagcgtgcagagcgtggccatcgtgttcggccccaccctgctgagacccgaggtggaggagaccagcatgcccatgaccatggtgttccagaaccaggtggtggagctgatcctgcagcagtgcgccgacatcttccccccccactag

SEQ ID NO: 97127 - DNA, 2589 bp, synthetic construct
  misc_feature 1..2589: note = Description of Artificial Sequence: Synthetic coding sequence
  source 1..2589: mol_type = other DNA
atggccgccgacgtggtgggcgacgtgtacgtgctggtggagcaccccttcgagtacaccggcaaggacggcagaagagtggccatcagacccaacgagagatacagactgctgagaagaagcaccgagcactggtggcacgtgagaagagagcccggcggcagacccttctacctgcccgcccagtacgtgagagagctgcccgccctgggcaaccccgccgccgccgccccccccggcccccaccccagccccgccgcccccgagcccctggcctacgactacagattcgtgagcgccgccgccaccgccggccccgacggcgcccccgaggagagcggcggcagagccagcagcctgtgcggccccgcccagagaggcgccgccacccagagaagcagcctggcccccggcctgcccgcctgcctgtacctgagacccgccgcccccgtgagacccgcccagagcctgaacgacctggcctgcgccgccgtgagcccccccgccggcctgctgggcagcagcggcagcttcaaggcctgcagcgtggccggcagctgggtgtgccccagacccctggccagaagcgacagcgagaacgtgtacgaggtgatccaggacctgcacgtgcccccccccgaggagagcgccgagcaggtggacgacccccccgagcccgtgtacgccaacatcgagagacagcccagagccaccagccccggcgccgccgccgcccccctgcccagccccgtgtgggagacccacaccgacgccggcaccggcagaccctactactacaaccccgacaccggcgtgaccacctgggagagccccttcgaggccgccgagggcgccgccagccccgccaccagccccgccagcgtggacagccacgtgagcctggagaccgagtggggccagtactgggacgaggagagcagaagagtgttcttctacaaccccctgaccggcgagaccgcctgggaggacgaggccgagaacgagcccgaggaggagctggagatgcagcccggcctgagccccggcagccccggcgaccccagaccccccacccccgagaccgactaccccgagagcctgaccagctaccccgaggaggactacagccccgtgggcagcttcggcgagcccggccccaccagccccctgaccaccccccccggctggagctgccacgtgagccaggacaagcagatgctgtacaccaaccacttcacccaggagcaggtgcccgtgcccgcccccagaagcatccacaagagcagccaggacggcgacacccccgcccaggccagcccccccgaggagaaggtgcccgccgagctggacgaggtgggcagctgggaggaggtgagccccgccaccgccgccgtgagaaccaagaccctggacaaggccggcgtgctgcacagaaccaagaccgccgacaagggcaagagactgagaaagaagcactggagcgccagctggaccgtgctggagggcggcgtgctgaccttcttcaaggacagcaagaccagcgccgccggcggcctgagacagcccagcaagttcagcacccccgagtacaccgtggagctgagaggcgccaccctgagctgggcccccaaggacaagagcagcagaaagaacgtgctggagctgagaagcagagacggcagcgagtacctgatccagcacgacagcgaggccatcatcagcacctggcacaaggccatcgcccagggcatccaggagctgagcgccgagctgccccccgaggagagcgagagcagcagagtggacttcggcagcagcgagagactgggcagctggcaggagaaggaggaggacgccagacccaacgccgccgcccccgccctgggccccgtgggcctggagagcgacctgagcaaggtgagacacaagctgagaaagttcctgcagagaagacccaccctgcagagcctgagagagaagggctacatcaaggaccaggtgttcggctgcgccctggccgccctgtgcgagagagagagaagcagagtgcccagattcgtgcagcagtgcatcagagccgtggaggccagaggcctggacatcgacggcctgtacagaatcagcggcaacctggccaccatccagaagctgagatacaaggtggaccacgacgagagactggacctggacgacggcagatgggaggacgtgcacgtgatcaccggcgccctgaagctgttcttcagagagctgcccgagcccctgttccccttcagccacttcagacagttcatcgccgccatcaagctgcaggaccaggccagaagaagcagatgcgtgagagacctggtgagaagcctgcccgcccccaaccacgacaccctgagaatgctgttccagcacctgtgcagagtgatcgagcacggcgagcagaacagaatgagcgtgcagagcgtggccatcgtgttcggccccaccctgctgagacccgaggtggaggagaccagcatgcccatgaccatggtgttccagaaccaggtggtggagctgatcctgcagcagtgcgccgacatcttccccccccactag

SEQ ID NO: 97128 - DNA, 1647 bp, synthetic construct; identical to SEQ ID NO: 97125
  misc_feature 1..1647: note = Description of Artificial Sequence: Synthetic coding sequence
  source 1..1647: mol_type = other DNA

SEQ ID NO: 97129 - DNA, 792 bp, synthetic construct; identical to SEQ ID NO: 97124
  misc_feature 1..792: note = Description of Artificial Sequence: Synthetic coding sequence
  source 1..792: mol_type = other DNA

SEQ ID NO: 97130 - DNA, 1566 bp, synthetic construct
  misc_feature 1..1566: note = Description of Artificial Sequence: Synthetic coding sequence
  source 1..1566: mol_type = other DNA
atgcagcccggcctgagccccggcagccccggcgaccccagaccccccacccccgagaccgactaccccgagagcctgaccagctaccccgaggaggactacagccccgtgggcagcttcggcgagcccggccccaccagccccctgaccaccccccccggctggagctgccacgtgagccaggacaagcagatgctgtacaccaaccacttcacccaggagcaggtgcccgtgcccgcccccagaagcatccacaagagcagccaggacggcgacacccccgcccaggccagcccccccgaggagaaggtgcccgccgagctggacgaggtgggcagctgggaggaggtgagccccgccaccgccgccgtgagaaccaagaccctggacaaggccggcgtgctgcacagaaccaagaccgccgacaagggcaagagactgagaaagaagcactggagcgccagctggaccgtgctggagggcggcgtgctgaccttcttcaaggacagcaagaccagcgccgccggcggcctgagacagcccagcaagttcagcacccccgagtacaccgtggagctgagaggcgccaccctgagctgggcccccaaggacaagagcagcagaaagaacgtgctggagctgagaagcagagacggcagcgagtacctgatccagcacgacagcgaggccatcatcagcacctggcacaaggccatcgcccagggcatccaggagctgagcgccgagctgccccccgaggagagcgagagcagcagagtggacttcggcagcagcgagagactgggcagctggcaggagaaggaggaggacgccagacccaacgccgccgcccccgccctgggccccgtgggcctggagagcgacctgagcaaggtgagacacaagctgagaaagttcctgcagagaagacccaccctgcagagcctgagagagaagggctacatcaaggaccaggtgttcggctgcgccctggccgccctgtgcgagagagagagaagcagagtgcccagattcgtgcagcagtgcatcagagccgtggaggccagaggcctggacatcgacggcctgtacagaatcagcggcaacctggccaccatccagaagctgagatacaaggtggaccacgacgagagactggacctggacgacggcagatgggaggacgtgcacgtgatcaccggcgccctgaagctgttcttcagagagctgcccgagcccctgttccccttcagccacttcagacagttcatcgccgccatcaagctgcaggaccaggccagaagaagcagatgcgtgagagacctggtgagaagcctgcccgcccccaaccacgacaccctgagaatgctgttccagcacctgtgcagagtgatcgagcacggcgagcagaacagaatgagcgtgcagagcgtggccatcgtgttcggccccaccctgctgagacccgaggtggaggagaccagcatgcccatgaccatggtgttccagaaccaggtggtggagctgatcctgcagcagtgcgccgacatcttccccccccactag

SEQ ID NO: 97131 - DNA, 2013 bp, synthetic construct
  misc_feature 1..2013: note = Description of Artificial Sequence: Synthetic coding sequence
  source 1..2013: mol_type = other DNA
atgctgagcaacgagagcctgcacccccccgccttcagcagaagcaacagcgaggccagcgtggacagcgccagcatggaggacttctggagagagatcgagagcatcaaggacagcagcatgggcggccaggaggagcccccccccgccgaggtgacccccgtggacgagggcgagctggaggccgagtggctgcaggacgtgggcctgagcaccctgatcagcggcgacgaggaggaggacggcaaggccctgctgagcaccctgaccagaacccaggccgccgccgtgcagaagagataccacacctacacccagaccatgagaaagaaggacaagcagagcatcagagacgtgagagacatcttcggcgtgagcgagagcccccccagagacacctgcggcaaccacaccaaccagctggacggcaccaaggaggagagagagctgcccagagtgatcaagaccagcggcagcatgcccgacgacgccagcctgaacagcaccaccctgagcgacgccagccaggacaaggagggcagcttcgccgtgcccagaagcgacagcgtggccatcctggagaccatccccgtgctgcccgtgcacagcaacggcagccccgagcccggccagcccgtgcagaacgccatcagcgacgacgacttcctggagaagaacatcccccccgaggccgaggagctgagcttcgaggtgagctacagcgagatggtgaccgaggccctgaagagaaacaagctgaagaagagcgagatcaagaaggaggactacgtgctgaccaagttcaacgtgcagaagaccagattcggcctgaccgaggccggcgacctgagcgccgaggacatgaagaagatcagacacctgagcctgatcgagctgaccgccttcttcgacgccttcggcatccagctgaagagaaacaagaccgagaaggtgaagggcagagacaacggcatcttcggcgtgcccctgaccgtgctgctggacggcgacagaaagaaggaccccggcgtgaaggtgcccctggtgctgcagaagttcttcgagaaggtggaggagagcggcctggagagcgagggcatcttcagactgagcggctgcaccgccaaggtgaagcagtacagagaggagctggacgccaagttcaacgccgacaagttcaagtgggacaagatgtgccacagagaggccgccgtgatgctgaaggccttcttcagagagctgcccaccagcctgttccccgtggagtacatccccgccttcatcagcctgatggagagaggcccccacgtgaaggtgcagttccaggccctgcacctgatggtgatggccctgcccgacgccaacagagacgccgcccaggccctgatgaccttcttcaacaaggtgatcgccaacgagagcaagaacagaatgagcctgtggaacatcagcaccgtgatggcccccaacctgttcttcagcagaagcaagcacagcgactacgaggagctgctgctggccaacaccgccgcccacatcatcagactgatgctgaagtaccagaagatcctgtggaaggtgcccagcttcctgatcacccaggtgagaagaatgaacgaggccaccatgctgctgaagaagcagctgcccagcgtgagaaagctgctgagaagaaagaccctggagagagagaccgccagccccaagaccagcaaggtgctgcagaagagccccagcgccagaagaatgagcgacgtgcccgagggcgtgatcagagtgcacgcccccctgctgagcaaggtgagcatggccatccagctgaacaaccagaccaaggccaaggacatcctggccaagttccagtacgagaacagaatcctgcactggcagagagccgccctgagcttcctgaacggcaagtgggtgaagaaggagagagaggagagcaccgagaccaacagaagccccaagcacgtgttcctgttcaccatcggcctggacatcagcacctag

SEQ ID NO: 97132 - DNA, 1713 bp, synthetic construct
  misc_feature 1..1713: note = Description of Artificial Sequence: Synthetic coding sequence
  source 1..1713: mol_type = other DNA
atgagaaagaaggacaagcagagcatcagagacgtgagagacatcttcggcgtgagcgagagcccccccagagacacctgcggcaaccacaccaaccagctggacggcaccaaggaggagagagagctgcccagagtgatcaagaccagcggcagcatgcccgacgacgccagcctgaacagcaccaccctgagcgacgccagccaggacaaggagggcagcttcgccgtgcccagaagcgacagcgtggccatcctggagaccatccccgtgctgcccgtgcacagcaacggcagccccgagcccggccagcccgtgcagaacgccatcagcgacgacgacttcctggagaagaacatcccccccgaggccgaggagctgagcttcgaggtgagctacagcgagatggtgaccgaggccctgaagagaaacaagctgaagaagagcgagatcaagaaggaggactacgtgctgaccaagttcaacgtgcagaagaccagattcggcctgaccgaggccggcgacctgagcgccgaggacatgaagaagatcagacacctgagcctgatcgagctgaccgccttcttcgacgccttcggcatccagctgaagagaaacaagaccgagaaggtgaagggcagagacaacggcatcttcggcgtgcccctgaccgtgctgctggacggcgacagaaagaaggaccccggcgtgaaggtgcccctggtgctgcagaagttcttcgagaaggtggaggagagcggcctggagagcgagggcatcttcagactgagcggctgcaccgccaaggtgaagcagtacagagaggagctggacgccaagttcaacgccgacaagttcaagtgggacaagatgtgccacagagaggccgccgtgatgctgaaggccttcttcagagagctgcccaccagcctgttccccgtggagtacatccccgccttcatcagcctgatggagagaggcccccacgtgaaggtgcagttccaggccctgcacctgatggtgatggccctgcccgacgccaacagagacgccgcccaggccctgatgaccttcttcaacaaggtgatcgccaacgagagcaagaacagaatgagcctgtggaacatcagcaccgtgatggcccccaacctgttcttcagcagaagcaagcacagcgactacgaggagctgctgctggccaacaccgccgcccacatcatcagactgatgctgaagtaccagaagatcctgtggaaggtgcccagcttcctgatcacccaggtgagaagaatgaacgaggccaccatgctgctgaagaagcagctgcccagcgtgagaaagctgctgagaagaaagaccctggagagagagaccgccagccccaagaccagcaaggtgctgcagaagagccccagcgccagaagaatgagcgacgtgcccgagggcgtgatcagagtgcacgcccccctgctgagcaaggtgagcatggccatccagctgaacaaccagaccaaggccaaggacatcctggccaagttccagtacgagaacagccacggcagcagcgagtgcatcaagatccagaaccagagactgtacgagatcggcggcaacatcggcgagcactgcctggaccccgacgcctacatcctggacgtgtacagaatcaacccccaggccgagtgggtgatcaagccccagcagagcagctag

SEQ ID NO: 97133 - DNA, 1638 bp, synthetic construct
  misc_feature 1..1638: note = Description of Artificial Sequence: Synthetic coding sequence
  source 1..1638: mol_type = other DNA
atgaacgagctgcccagagacacctgcggcaaccacaccaaccagctggacggcaccaaggaggagagagagctgcccagagtgatcaagaccagcggcagcatgcccgacgacgccagcctgaacagcaccaccctgagcgacgccagccaggacaaggagggcagcttcgccgtgcccagaagcgacagcgtggccatcctggagaccatccccgtgctgcccgtgcacagcaacggcagccccgagcccggccagcccgtgcagaacgccatcagcgacgacgacttcctggagaagaacatcccccccgaggccgaggagctgagcttcgaggtgagctacagcgagatggtgaccgaggccctgaagagaaacaagctgaagaagagcgagatcaagaaggaggactacgtgctgaccaagttcaacgtgcagaagaccagattcggcctgaccgaggccggcgacctgagcgccgaggacatgaagaagatcagacacctgagcctgatcgagctgaccgccttcttcgacgccttcggcatccagctgaagagaaacaagaccgagaaggtgaagggcagagacaacggcatcttcggcgtgcccctgaccgtgctgctggacggcgacagaaagaaggaccccggcgtgaaggtgcccctggtgctgcagaagttcttcgagaaggtggaggagagcggcctggagagcgagggcatcttcagactgagcggctgcaccgccaaggtgaagcagtacagagaggagctggacgccaagttcaacgccgacaagttcaagtgggacaagatgtgccacagagaggccgccgtgatgctgaaggccttcttcagagagctgcccaccagcctgttccccgtggagtacatccccgccttcatcagcctgatggagagaggcccccacgtgaaggtgcagttccaggccctgcacctgatggtgatggccctgcccgacgccaacagagacgccgcccaggccctgatgaccttcttcaacaaggtgatcgccaacgagagcaagaacagaatgagcctgtggaacatcagcaccgtgatggcccccaacctgttcttcagcagaagcaagcacagcgactacgaggagctgctgctggccaacaccgccgcccacatcatcagactgatgctgaagtaccagaagatcctgtggaaggtgcccagcttcctgatcacccaggtgagaagaatgaacgaggccaccatgctgctgaagaagcagctgcccagcgtgagaaagctgctgagaagaaagaccctggagagagagaccgccagccccaagaccagcaaggtgctgcagaagagccccagcgccagaagaatgagcgacgtgcccgagggcgtgatcagagtgcacgcccccctgctgagcaaggtgagcatggccatccagctgaacaaccagaccaaggccaaggacatcctggccaagttccagtacgagaacagaatcctgcactggcagagagccgccctgagcttcctgaacggcaagtgggtgaagaaggagagagaggagagcaccgagaccaacagaagccccaagcacgtgttcctgttcaccatcggcctggacatcagcacctag

SEQ ID NO: 97134 - DNA, 2169 bp, synthetic construct
  misc_feature 1..2169: note = Description of Artificial Sequence: Synthetic coding sequence
  source 1..2169: mol_type = other DNA
atggaggtggaggacagcggcggcgtggtgctgaccgcctaccacagctacgccagagcccagccccccaacgccgagagcagatgcgcccccagagccgccgccagccaccccctgagcagaaagagcatccccagatgcagaagaatcaacagaatgctgagcaacgagagcctgcacccccccgccttcagcagaagcaacagcgaggccagcgtggacagcgccagcatggaggacttctggagagagatcgagagcatcaaggacagcagcatgggcggccaggaggagcccccccccgccgaggtgacccccgtggacgagggcgagctggaggccgagtggctgcaggacgtgggcctgagcaccctgatcagcggcgacgaggaggaggacggcaaggccctgctgagcaccctgaccagaacccaggccgccgccgtgcagaagagataccacacctacacccagaccatgagaaagaaggacaagcagagcatcagagacgtgagagacatcttcggcgtgagcgagagcccccccagagacacctgcggcaaccacaccaaccagctggacggcaccaaggaggagagagagctgcccagagtgatcaagaccagcggcagcatgcccgacgacgccagcctgaacagcaccaccctgagcgacgccagccaggacaaggagggcagcttcgccgtgcccagaagcgacagcgtggccatcctggagaccatccccgtgctgcccgtgcacagcaacggcagccccgagcccggccagcccgtgcagaacgccatcagcgacgacgacttcctggagaagaacatcccccccgaggccgaggagctgagcttcgaggtgagctacagcgagatggtgaccgaggccctgaagagaaacaagctgaagaagagcgagatcaagaaggaggactacgtgctgaccaagttcaacgtgcagaagaccagattcggcctgaccgaggccggcgacctgagcgccgaggacatgaagaagatcagacacctgagcctgatcgagctgaccgccttcttcgacgccttcggcatccagctgaagagaaacaagaccgagaaggtgaagggcagagacaacggcatcttcggcgtgcccctgaccgtgctgctggacggcgacagaaagaaggaccccggcgtgaaggtgcccctggtgctgcagaagttcttcgagaaggtggaggagagcggcctggagagcgagggcatcttcagactgagcggctgcaccgccaaggtgaagcagtacagagaggagctggacgccaagttcaacgccgacaagttcaagtgggacaagatgtgccacagagaggccgccgtgatgctgaaggccttcttcagagagctgcccaccagcctgttccccgtggagtacatccccgccttcatcagcctgatggagagaggcccccacgtgaaggtgcagttccaggccctgcacctgatggtgatggccctgcccgacgccaacagagacgccgcccaggccctgatgaccttcttcaacaaggtgatcgccaacgagagcaagaacagaatgagcctgtggaacatcagcaccgtgatggcccccaacctgttcttcagcagaagcaagcacagcgactacgaggagctgctgctggccaacaccgccgcccacatcatcagactgatgctgaagtaccagaagatcctgtggaaggtgcccagcttcctgatcacccaggtgagaagaatgaacgaggccaccatgctgctgaagaagcagctgcccagcgtgagaaagctgctgagaagaaagaccctggagagagagaccgccagccccaagaccagcaaggtgctgcagaagagccccagcgccagaagaatgagcgacgtgcccgagggcgtgatcagagtgcacgcccccctgctgagcaaggtgagcatggccatccagctgaacaaccagaccaaggccaaggacatcctggccaagttccagtacgagaacagaatcctgcactggcagagagccgccctgagcttcctgaacggcaagtgggtgaagaaggagagagaggagagcaccgagaccaacagaagccccaagcacgtgttcctgttcaccatcggcctggacatcagcacctag

SEQ ID NO: 97135 - DNA, 1692 bp, synthetic construct
  misc_feature 1..1692: note = Description of Artificial Sequence: Synthetic coding sequence
  source 1..1692: mol_type = other DNA
atgagaaagaaggacaagcagagcatcagagacgtgagagacatcttcggcgtgagcgagagcccccccagagacacctgcggcaaccacaccaaccagctggacggcaccaaggaggagagagagctgcccagagtgatcaagaccagcggcagcatgcccgacgacgccagcctgaacagcaccaccctgagcgacgccagccaggacaaggagggcagcttcgccgtgcccagaagcgacagcgtggccatcctggagaccatccccgtgctgcccgtgcacagcaacggcagccccgagcccggccagcccgtgcagaacgccatcagcgacgacgacttcctggagaagaacatcccccccgaggccgaggagctgagcttcgaggtgagctacagcgagatggtgaccgaggccctgaagagaaacaagctgaagaagagcgagatcaagaaggaggactacgtgctgaccaagttcaacgtgcagaagaccagattcggcctgaccgaggccggcgacctgagcgccgaggacatgaagaagatcagacacctgagcctgatcgagctgaccgccttcttcgacgccttcggcatccagctgaagagaaacaagaccgagaaggtgaagggcagagacaacggcatcttcggcgtgcccctgaccgtgctgctggacggcgacagaaagaaggaccccggcgtgaaggtgcccctggtgctgcagaagttcttcgagaaggtggaggagagcggcctggagagcgagggcatcttcagactgagcggctgcaccgccaaggtgaagcagtacagagaggagctggacgccaagttcaacgccgacaagttcaagtgggacaagatgtgccacagagaggccgccgtgatgctgaaggccttcttcagagagctgcccaccagcctgttccccgtggagtacatccccgccttcatcagcctgatggagagaggcccccacgtgaaggtgcagttccaggccctgcacctgatggtgatggccctgcccgacgccaacagagacgccgcccaggccctgatgaccttcttcaacaaggtgatcgccaacgagagcaagaacagaatgagcctgtggaacatcagcaccgtgatggcccccaacctgttcttcagcagaagcaagcacagcgactacgaggagctgctgctggccaacaccgccgcccacatcatcagactgatgctgaagtaccagaagatcctgtggaaggtgcccagcttcctgatcacccaggtgagaagaatgaacgaggccaccatgctgctgaagaagcagctgcccagcgtgagaaagctgctgagaagaaagaccctggagagagagaccgccagccccaagaccagcaaggtgctgcagaagagccccagcgccagaagaatgagcgacgtgcccgagggcgtgatcagagtgcacgcccccctgctgagcaaggtgagcatggccatccagctgaacaaccagaccaaggccaaggacatcctggccaagttccagtacgagaacagaatcctgcactggcagagagccgccctgagcttcctgaacggcaagtgggtgaagaaggagagagaggagagcaccgagaccaacagaagccccaagcacgtgttcctgttcaccatcggcctggacatcagcacctag

SEQ ID NO: 97136 - DNA, 1713 bp, synthetic construct; identical to SEQ ID NO: 97132
  misc_feature 1..1713: note = Description of Artificial Sequence: Synthetic coding sequence
  source 1..1713: mol_type = other DNA

SEQ ID NO: 97137 - DNA, 354 bp, synthetic construct
  misc_feature 1..354: note = Description of Artificial Sequence: Synthetic coding sequence
  source 1..354: mol_type = other DNA
atgctgagcaacgagagcctgcacccccccgccttcagcagaagcaacagcgaggccagcgtggacagcgccagcatggaggacttctggagagagatcgagagcatcaaggacagcagcatgggcggccaggaggagcccccccccgccgaggtgacccccgtggacgagggcgagctggaggccgagtggctgcaggacgtgggcctgagcaccctgatcagcggcgacgaggaggaggacggcaaggccctgctgagcaccctgaccagaacccaggccgccgccgtgcagaagagataccacacctacacccagaccatgagaaagaaggacaagcagagcatcagatag

SEQ ID NO: 97138 - DNA, 1665 bp, synthetic construct
  misc_feature 1..1665: note = Description of Artificial Sequence: Synthetic coding sequence
  source 1..1665: mol_type = other DNA
atggccttcatgagaatcaacgtgatcatgaacgagctgcccagagacacctgcggcaaccacaccaaccagctggacggcaccaaggaggagagagagctgcccagagtgatcaagaccagcggcagcatgcccgacgacgccagcctgaacagcaccaccctgagcgacgccagccaggacaaggagggcagcttcgccgtgcccagaagcgacagcgtggccatcctggagaccatccccgtgctgcccgtgcacagcaacggcagccccgagcccggccagcccgtgcagaacgccatcagcgacgacgacttcctggagaagaacatcccccccgaggccgaggagctgagcttcgaggtgagctacagcgagatggtgaccgaggccctgaagagaaacaagctgaagaagagcgagatcaagaaggaggactacgtgctgaccaagttcaacgtgcagaagaccagattcggcctgaccgaggccggcgacctgagcgccgaggacatgaagaagatcagacacctgagcctgatcgagctgaccgccttcttcgacgccttcggcatccagctgaagagaaacaagaccgagaaggtgaagggcagagacaacggcatcttcggcgtgcccctgaccgtgctgctggacggcgacagaaagaaggaccccggcgtgaaggtgcccctggtgctgcagaagttcttcgagaaggtggaggagagcggcctggagagcgagggcatcttcagactgagcggctgcaccgccaaggtgaagcagtacagagaggagctggacgccaagttcaacgccgacaagttcaagtgggacaagatgtgccacagagaggccgccgtgatgctgaaggccttcttcagagagctgcccaccagcctgttccccgtggagtacatccccgccttcatcagcctgatggagagaggcccccacgtgaaggtgcagttccaggccctgcacctgatggtgatggccctgcccgacgccaacagagacgccgcccaggccctgatgaccttcttcaacaaggtgatcgccaacgagagcaagaacagaatgagcctgtggaacatcagcaccgtgatggcccccaacctgttcttcagcagaagcaagcacagcgactacgaggagctgctgctggccaacaccgccgcccacatcatcagactgatgctgaagtaccagaagatcctgtggaaggtgcccagcttcctgatcacccaggtgagaagaatgaacgaggccaccatgctgctgaagaagcagctgcccagcgtgagaaagctgctgagaagaaagaccctggagagagagaccgccagccccaagaccagcaaggtgctgcagaagagccccagcgccagaagaatgagcgacgtgcccgagggcgtgatcagagtgcacgcccccctgctgagcaaggtgagcatggccatccagctgaacaaccagaccaaggccaaggacatcctggccaagttccagtacgagaacagaatcctgcactggcagagagccgccctgagcttcctgaacggcaagtgggtgaagaaggagagagaggagagcaccgagaccaacagaagccccaagcacgtgttcctgttcaccatcggcctggacatcagcacctag

SEQ ID NO: 97139 - DNA, 3786 bp, synthetic construct
  misc_feature 1..3786: note = Description of Artificial Sequence: Synthetic coding sequence
  source 1..3786: mol_type = other DNA
atgatcgcccacaagcagaagaagaccaagaagaagagagcctgggccagcggccagctgagcaccgacatcaccaccagcgagatgggcctgaagagcctgagcagcaacagcatcttcgaccccgactacatcaaggagctggtgaacgacatcagaaagttcagccacatgctgctgtacctgaaggaggccatcttcagcgactgcttcaaggaggtgatccacatcagactggaggagctgctgagagtgctgaagagcatcatgaacaagcaccagaacctgaacagcgtggacctgcagaacgccgccgagatgctgaccgccaaggtgaaggccgtgaacttcaccgaggtgaacgaggagaacaagaacgacctgttccaggaggtgttcagcagcatcgagaccctggccttcaccttcggcaacatcctgaccaacttcctgatgggcgacgtgggcaacgacagcctgctgagactgcccgtgagcagagagaccaagagcttcgagaacgtgagcgtggagagcgtggacagcagcagcgagaagggcaacttcagccccctggagctggacaacgtgctgctgaagaacaccgacagcatcgagctggccctgagctacgccaagacctggagcaagtacaccaagaacatcgtgagctgggtggagaagaagctgaacctggagctggagagcaccagaaacatggtgaagctggccgaggccaccagaaccaacatcggcatccaggagttcatgcccctgcagagcctgttcaccaacgccctgctgaacgacatcgagagcagccacctgctgcagcagaccatcgccgccctgcaggccaacaagttcgtgcagcccctgctgggcagaaagaacgagatggagaagcagagaaaggagatcaaggagctgtggaagcaggagcagaacaagatgctggaggccgagaacgccctgaagaaggccaagctgctgtgcatgcagagacaggacgagtacgagaaggccaagagcagcatgttcagagccgaggaggagcacctgagcagcagcggcggcctggccaagaacctgaacaagcagctggagaagaagagaagactggaggaggaggccctgcagaaggtggaggaggccaacgagctgtacaaggtgtgcgtgaccaacgtggaggagagaagaaacgacctggagaacaccaagagagagatcctggcccagctgagaaccctggtgttccagtgcgacctgaccctgaaggccgtgaccgtgaacctgttccacatgcagcacctgcaggccgccagcctggccgacagcctgcagagcctgtgcgacagcgccaagctgtacgaccccggccaggagtacagcgagttcgtgaaggccaccaacagcaccgaggaggagaaggtggacggcaacgtgaacaagcacctgaacagcagccagcccagcggcttcggccccgccaacagcctggaggacgtggtgagactgcccgacagcagcaacaagatcgaggaggacagatgcagcaacagcgccgacatcaccggccccagcttcatcagaagctggaccttcggcatgttcagcgacagcgagagcaccggcggcagcagcgagagcagaagcctggacagcgagagcatcagccccggcgacttccacagaaagctgcccagaacccccagcagcggcaccatgagcagcgccgacgacctggacgagagagagccccccagccccagcgagaccggccccaacagcctgggcaccttcaagaagaccctgatgagcaaggccgccctgacccacaagttcagaaagctgagaagccccaccaagtgcagagactgcgagggcatcgtggtgttccagggcgtggagtgcgaggagtgcctgctggtgtgccacagaaagtgcctggagaacctggtgatcatctgcggccaccagaagctgcccggcaagatccacctgttcggcgccgagttcacccaggtggccaagaaggagcccgacggcatccccttcatcctgaagatctgcgccagcgagatcgagaacagagccctgtgcctgcagggcatctacagagtgtgcggcaacaagatcaagaccgagaagctgtgccaggccctggagaacggcatgcacctggtggacatcagcgagttcagcagccacgacatctgcgacgtgctgaagctgtacctgagacagctgcccgagcccttcatcctgttcagactgtacaaggagttcatcgacctggccaaggagatccagcacgtgaacgaggagcaggagaccaagaagaacagcctggaggacaagaagtggcccaacatgtgcatcgagatcaacagaatcctgctgaagagcaaggacctgctgagacagctgcccgccagcaacttcaacagcctgcacttcctgatcgtgcacctgaagagagtggtggaccacgccgaggagaacaagatgaacagcaagaacctgggcgtgatcttcggccccagcctgatcagacccagacccaccaccgcccccatcaccatcagcagcctggccgagtacagcaaccaggccagactggtggagttcctgatcacctacagccagaagatcttcgacggcagcctgcagccccaggacgtgatgtgcagcatcggcgtggtggaccagggctgcttccccaagcccctgctgagccccgaggagagagacatcgagagaagcatgaagagcctgttcttcagcagcaaggaggacatccacaccagcgagagcgagagcaagatcttcgagagagccaccagcttcgaggagagcgagagaaagcagaacgccctgggcaagtgcgacgcctgcctgagcgacaaggcccagctgctgctggaccaggaggccgagagcgccagccagaagatcgaggacggcaagacccccaagcccctgagcctgaagagcgacagaagcaccaacaacgtggagagacacacccccagaaccaagatcagacccgtgagcctgcccgtggacagactgctgctggccagcccccccaacgagagaaacggcagaaacatgggcaacgtgaacctggacaagttctgcaagaaccccgccttcgagggcgtgaacagaaaggacgccgccaccaccgtgtgcagcaagttcaacggcttcgaccagcagaccctgcagaagatccaggacaagcagtacgagcagaacagcctgaccgccaagaccaccatgatcatgcccagcgccctgcaggagaagggcgtgaccaccagcctgcagatcagcggcgaccacagcatcaacgccacccagcccagcaagccctacgccgagcccgtgagaagcgtgagagaggccagcgagagaagaagcagcgacagctaccccctggcccccgtgagagcccccagaaccctgcagccccagcactggaccaccttctacaagccccacgcccccatcatcagcatcagaggcaacgaggagaagcccgccagccccagcgccgccgtgccccccggcaccgaccacgacccccacggcctggtggtgaagagcatgcccgaccccgacaaggccagcgcctgccccggccaggccaccggccagcccaaggaggacagcgaggagctgggcctgcccgacgtgaaccccatgtgccagagacccagactgaagagaatgcagcagttcgaggacctggagggcgagatcccccagttcgtgtag

SEQ ID NO: 97140 - DNA, 1182 bp, synthetic construct
  misc_feature 1..1182: note = Description of Artificial Sequence: Synthetic coding sequence
  source 1..1182: mol_type = other DNA
atgatcgcccacaagcagaagaagaccaagaagaagagagcctgggccagcggccagctgagcaccgacatcaccaccagcgagatgggcctgaagagcctgagcagcaacagcatcttcgaccccgactacatcaaggagctggtgaacgacatcagaaagttcagccacatgctgctgtacctgaaggaggccatcttcagcgactgcttcaaggaggtgatccacatcagactggaggagctgctgagagtgctgaagagcatcatgaacaagcaccagaacctgaacagcgtggacctgcagaacgccgccgagatgctgaccgccaaggtgaaggccgtgaacttcaccgaggtgaacgaggagaacaagaacgacctgttccaggaggtgttcagcagcatcgagaccctggccttcaccttcggcaacatcctgaccaacttcctgatgggcgacgtgggcaacgacagcctgctgagactgcccgtgagcagagagaccaagagcttcgagaacgtgagcgtggagagcgtggacagcagcagcgagaagggcaacttcagccccctggagctggacaacgtgctgctgaagaacaccgacagcatcgagctggccctgagctacgccaagacctggagcaagtacaccaagaacatcgtgagctgggtggagaagaagctgaacctggagctggagagcaccagaaacatggtgaagctggccgaggccaccagaaccaacatcggcatccaggagttcatgcccctgcagagcctgttcaccaacgccctgctgaacgacatcgagagcagccacctgctgcagcagaccatcgccgccctgcaggccaacaagttcgtgcagcccctgctgggcagaaagaacgagatggagaagcagagaaaggagatcaaggagctgtggaagcaggagcagaacaagatgctggaggccgagaacgccctgaagaaggccaagctgctgtgcatgcagagacaggacgagtacgagaaggccaagagcagcatgttcagagccgaggaggagcacctgagcagcagcggcggcctggccaagaacctgaacaagcagctggagaagaagagaagactggaggaggaggccctgcagaaggtgaccatcttcttcttcttcatctgcaagctgaactag

SEQ ID NO: 97141 - DNA, 3306 bp, synthetic construct
  misc_feature 1..3306: note = Description of Artificial Sequence: Synthetic coding sequence
  source 1..3306: mol_type = other DNA
atgaagagcagacagaagggcaagaagaagggcagcgccaaggagagagtgttcggctgcgacctgcaggagcacctgcagcacagcggccaggaggtgccccaggtgctgaagagctgcgccgagttcgtggaggagtacggcgtggtggacggcatctacagactgagcggcgtgagcagcaacatccagaagctgagacaggagttcgagagcgagagaaagcccgacctgagaagagacgtgtacctgcaggacatccactgcgtgagcagcctgtgcaaggcctacttcagagagctgcccgaccccctgctgacctacagactgtacgacaagttcgccgaggccgtgggcgtgcagctggagcccgagagactggtgaagatcctggaggtgctgagagagctgcccgtgcccaactacagaaccctggagttcctgatgagacacctggtgcacatggccagcttcagcgcccagaccaacatgcacgccagaaacctggccatcgtgtgggcccccaacctgctgagaagcaaggacatcgaggccagcggcttcaacggcaccgccgccttcatggaggtgagagtgcagagcatcgtggtggagttcatcctgacccacgtggaccagctgttcggcggcgccgccctgagcggcggcgaggtggagagcggctggagaagcctgcccggcaccagagccagcggcagccccgaggacctgatgcccagacccctgccctaccacctgcccagcatcctgcaggccggcgacggccccccccagatgagaccctaccacaccatcatcgagatcgccgagcacaagagaaagggcagcctgaaggtgagaaagtggagaagcatcttcaacctgggcagaagcggccacgagaccaagagaaagctgcccagaggcgccgaggacagagaggacaagagcaacaagggcaccctgagacccgccaagagcatggacagcctgagcgccgccgccggcgccagcgacgagcccgagggcctggtgggccccagcagccccagacccagccccctgctgcccgagagcctggagaacgacagcatcgaggccgccgagggcgagcaggagcccgaggccgaggccctgggcggcaccaacagcgagcccggcacccccagagccggcagaagcgccatcagagccggcggcagcagcagagccgagagatgcgccggcgtgcacatcagcgacccctacaacgtgaacctgcccctgcacatcaccagcatcctgagcgtgccccccaacatcatcagcaacgtgagcctggccagactgaccagaggcctggagtgccccgccctgcagcacagacccagccccgccagcggccccggccccggccccggcctgggccccggcccccccgacgagaagctggaggccagccccgccagcagccccctggccgacagcggccccgacgacctggcccccgccctggaggacagcctgagccaggaggtgcaggacagcttcagcttcctggaggacagcagcagcagcgagcccgagtgggtgggcgccgaggacggcgaggtggcccaggccgaggccgccggcgccgccttcagccccggcgaggacgaccccggcatgggctacctggaggagctgctgggcgtgggcccccaggtggaggagttcagcgtggagccccccctggacgacctgagcctggacgaggcccagttcgtgctggcccccagctgctgcagcctggacagcgccggccccagacccgaggtggaggaggagaacggcgaggaggtgttcctgagcgcctacgacgacctgagccccctgctgggccccaagccccccatctggaagggcagcggcagcctggagggcgaggccgccggctgcggcagacaggccctgggccagggcggcgaggagcaggcctgctgggaggtgggcgaggacaagcaggccgagcccggcggcagactggacatcagagaggaggccgagggcagccccgagaccaaggtggaggccggcaaggccagcgaggacagaggcgaggccggcggcagccaggagaccaaggtgagactgagagagggcagcagagaggagaccgaggccaaggaggagaagagcaagggccagaagaaggccgacagcatggaggccaagggcgtggaggagcccggcggcgacgagtacaccgacgagaaggagaaggagatcgagagagaggaggacgagcagagagaggaggcccaggtggaggccggcagagacctggagcagggcgcccaggaggaccaggtggccgaggagaagtgggaggtggtgcagaagcaggaggccgagggcgtgagagaggacgaggacaagggccagagagagaagggctaccacgaggccagaaaggaccagggcgacggcgaggacagcagaagccccgaggccgccaccgagggcggcgccggcgaggtgagcaaggagagagagagcggcgacggcgaggccgagggcgaccagagagccggcggctactacctggaggaggacaccctgagcgagggcagcggcgtggccagcctggaggtggactgcgccaaggagggcaacccccacagcagcgagatggaggaggtggccccccagcccccccagcccgaggagatggagcccgagggccagcccagccccgacggctgcctgtgcccctgcagcctgggcctgggcggcgtgggcatgagactggccagcaccctggtgcaggtgcagcaggtgagaagcgtgcccgtggtgccccccaagccccagttcgccaagatgcccagcgccatgtgcagcaagatccacgtggcccccgccaacccctgccccagacccggcagactggacggcacccccggcgagagagcctggggcagcagagccagcagaagcagctggagaaacggcggcagcctgagcttcgacgccgccgtggccctggccagagacagacagagaaccgaggcccagggcgtgagaagaacccagacctgcaccgagggcggcgactactgcctgatccccagaaccagcccctgcagcatgatcagcgcccacagccccagacccctgagctgcctggagctgcccagcgagggcgccgagggcagcggcagcagaagcagactgagcctgccccccagagagccccaggtgcccgaccccctgctgagcagccagagaagaagctacgccttcgagacccaggccaaccccggcaagggcgagggcctgtag

SEQ ID NO: 97142 - DNA, 2673 bp, synthetic construct
  misc_feature 1..2673: note = Description of Artificial Sequence: Synthetic coding sequence
  source 1..2673: mol_type = other DNA
atgaagagcagacagaagggcaagaagaagggcagcgccaaggagagagtgttcggctgcgacctgcaggagcacctgcagcacagcggccaggaggtgccccaggtgctgaagagctgcgccgagttcgtggaggagtacggcgtggtggacggcatctacagactgagcggcgtgagcagcaacatccagaagctgagacaggagttcgagagcgagagaaagcccgacctgagaagagacgtgtacctgcaggacatccactgcgtgagcagcctgtgcaaggcctacttcagagagctgcccgaccccctgctgacctacagactgtacgacaagttcgccgaggccgtgggcgtgcagctggagcccgagagactggtgaagatcctggaggtgctgagagagctgcccgtgcccaactacagaaccctggagttcctgatgagacacctggtgcacatggccagcttcagcgcccagaccaacatgcacgccagaaacctggccatcgtgtgggcccccaacctgctgagaagcaaggacatcgaggccagcggcttcaacggcaccgccgccttcatggaggtgagagtgcagagcatcgtggtggagttcatcctgacccacgtggaccagctgttcggcggcgccgccctgagcggcggcgaggtggagagcggctggagaagcctgcccggcaccagagccagcggcagccccgaggacctgatgcccagacccctgccctaccacctgcccagcatcctgcaggccggcgacggccccccccagatgagaccctaccacaccatcatcgagatcgccgagcacaagagaaagggcagcctgaaggtgagaaagtggagaagcatcttcaacctgggcagaagcggccacgagaccaagagaaagctgcccagaggcgccgaggacagagaggacaagagcaacaagggcaccctgagacccgccaagagcatggacagcctgagcgccgccgccggcgccagcgacgagcccgagggcctggtgggccccagcagccccagacccagccccctgctgcccgagagcctggagaacgacagcatcgaggccgccgagggcgagcaggagcccgaggccgaggccctgggcggcaccaacagcgagcccggcacccccagagccggcagaagcgccatcagagccggcggcagcagcagagccgagagatgcgccggcgtgcacatcagcgacccctacaacgtgaacctgcccctgcacatcaccagcatcctgagcgtgccccccaacatcatcagcaacgtgagcctggccagactgaccagaggcctggagtgccccgccctgcagcacagacccagccccgccagcggccccggccccggccccggcctgggccccggcccccccgacgagaagctggaggccagccccgccagcagccccctggccgacagcggccccgacgacctggcccccgccctggaggacagcctgagccaggaggtgcaggacagcttcagcttcctggaggacagcagcagcagcgagcccgagtgggtgggcgccgaggacggcgaggtggcccaggccgaggccgccggcgccgccttcagccccggcgaggacgaccccggcatgggctacctggaggagctgctgggcgtgggcccccaggtggaggagttcagcgtggagccccccctggacgacctgagcctggacgaggcccagttcgtgctggcccccagctgctgcagcctggacagcgccggccccagacccgaggtggaggaggagaacggcgaggaggtgttcctgagcgcctacgacgacctgagccccctgctgggccccaagccccccatctggaagggcagcggcagcctggagggcgaggccgccggctgcggcagacaggccctgggccagggcggcgaggagcaggcctgctgggaggtgggcgaggacaagcaggccgagcccggcggcagactggacatcagagaggaggccgagggcaccccccagcccccccagcccgaggagatggagcccgagggccagcccagccccgacggctgcctgtgcccctgcagcctgggcctgggcggcgtgggcatgagactggccagcaccctggtgcaggtgcagcaggtgagaagcgtgcccgtggtgccccccaagccccagttcgccaagatgcccagcgccatgtgcagcaagatccacgtggcccccgccaacccctgccccagacccggcagactggacggcacccccggcgagagagcctggggcagcagagccagcagaagcagctggagaaacggcggcagcctgagcttcgacgccgccgtggccctggccagagacagacagagaaccgaggcccagggcgtgagaagaacccagacctgcaccgagggcggcgactactgcctgatccccagaaccagcccctgcagcatgatcagcgcccacagccccagacccctgagctgcctggagctgcccagcgagggcgccgagggcagcggcagcagaagcagactgagcctgccccccagagagccccaggtgcccgaccccctgctgagcagccagagaagaagctacgccttcgagacccaggccaaccccggcaagggcgagggcctgtag

SEQ ID NO: 97143 - DNA, 1500 bp, synthetic construct
  misc_feature 1..1500: note = Description of Artificial Sequence: Synthetic coding sequence
  source 1..1500: mol_type = other DNA
atgagacacctggtgcacatggccagcttcagcgcccagaccaacatgcacgccagaaacctggccatcgtgtgggcccccaacctgctgagaagcaaggacatcgaggccagcggcttcaacggcaccgccgccttcatggaggtgagagtgcagagcatcgtggtggagttcatcctgacccacgtggaccagctgttcggcggcgccgccctgagcggcggcgaggtggagagcggctggagaagcctgcccggcaccagagccagcggcagccccgaggacctgatgcccagacccctgccctaccacctgcccagcatcctgcaggccggcgacggccccccccagatgagaccctaccacaccatcatcgagatcgccgagcacaagagaaagggcagcctgaaggtgagaaagtggagaagcatcttcaacctgggcagaagcggccacgagaccaagagaaagctgcccagaggcgccgaggacagagaggacaagagcaacaagggcaccctgagacccgccaagagcatggacagcctgagcgccgccgccggcgccagcgacgagcccgagggcctggtgggccccagcagccccagacccagccccctgctgcccgagagcctggagaacgacagcatcgaggccgccgagggcgagcaggagcccgaggccgaggccctgggcggcaccaacagcgagcccggcacccccagagccggcagaagcgccatcagagccggcggcagcagcagagccgagagatgcgccggcgtgcacatcagcgacccctacaacgtgaacctgcccctgcacatcaccagcatcctgagcgtgccccccaacatcatcagcaacgtgagcctggccagactgaccagaggcctggagtgccccgccctgcagcacagacccagccccgccagcggccccggccccggccccggcctgggccccggcccccccgacgagaagctggaggccagccccgccagcagccccctggccgacagcggccccgacgacctggcccccgccctggaggacagcctgagccaggaggtgcaggacagcttcagcttcctggaggacagcagcagcagcgagcccgagtgggtgggcgccgaggacggcgaggtggcccaggccgaggccgccggcgccgccttcagccccggcgaggacgaccccggcatgggctacctggaggagctgctgggcgtgggcccccaggtggaggagttcagcgtggagccccccctggacgacctgagcctggacgaggcccagttcgtgctggcccccagctgctgcagcctggacagcgccggccccagacccgaggtggaggaggagaacggcgaggaggtgttcctgagcgcctacgacgacctgagccccgccctgggcctgctgctgcagcccggctggggccacagaagccacagcagcgagggccagtgcctgagaatcaaggccgtgttcctgtag

SEQ ID NO: 97144 - DNA, 4335 bp, synthetic construct
  misc_feature 1..4335: note = Description of Artificial Sequence: Synthetic coding sequence
  source 1..4335: mol_type = other DNA
atgaagaacaagggcgccaagcagaagctgaagagaaagggcgccgccagcgccttcggctgcgacctgaccgagtacctggagagcagcggccaggacgtgccctacgtgctgaagagctgcgccgagttcatcgagacccacggcatcgtggacggcatctacagactgagcggcgtgaccagcaacatccagagactgagacaggagttcggcagcgaccagtgccccgacctgaccagagaggtgtacctgcaggacatccactgcgtgggcagcctgtgcaagctgtacttcagagagctgcccaaccccctgctgacctacgagctgtacgagaagttcaccgaggccgtgagccactgccccgaggagggccagctggccagaatccagaacgtgatccaggagctgccccccagccactacagaaccctggagtacctgatcagacacctggcccacatcgccagcttcagcagcaagaccaacatgcacgccagaaacctggccctggtgtgggcccccaacctgctgagaagcaaggagatcgaggccaccggctgcaacggcgacgccgccttcctggccgtgagagtgcagcaggtggtgatcgagttcatcctgaaccacgtggaccagatcttcaacaacggcgcccccggcagcctggagaacgacgagaacagacccatcatgaagagcctgaccctgcccgccctgagcctgcccatgaagctggtgagcctggaggaggcccaggccagaagcctggccaccaaccaccccgccagaaaggagagaagagagaacagcctgcccgagatcgtgccccccatgggcaccctgttccacaccgtgctggagctgcccgacaacaagagaaagctgagcagcaagagcaagaagtggaagagcatcttcaacctgggcagaagcggcagcgacagcaagagcaagctgagcagaaacggcagcgtgttcgtgagaggccagagactgagcgtggagaaggccaccatcagacccgccaagagcatggacagcctgtgcagcgtgcccgtggagggcaaggagaccaagggcaacttcaacagaaccgtgaccaccggcggcttcttcatccccgccaccaagatgcacagcaccggcaccggcagcagctgcgacctgaccaagcaggagggcgagtggggccaggagggcatgccccccggcgccgagggcggcttcgacgtgagcagcgacagaagccacctgcagggcgcccaggccagacccccccccgagcagctgaaggtgttcagacccgtggaggaccccgagagcgagcagaccgcccccaagatgctgggcatgttctacaccagcaacgacagccccagcaagagcgtgttcaccagcagcctgttccagatggagcccagccccagaaaccagagaaaggccctgaacatcagcgagcccttcgccgtgagcgtgcccctgagagtgagcgccgtgatcagcaccaacagcaccccctgcagaaccccccccaaggagctgcagagcctgagcagcctggaggagttcagcttccacggcagcgagagcggcggctggcccgaggaggagaagcccctgggcgccgagaccagcgccgccagcgtgcccaagaaggccggcctggaggacgccaaggccgtgcccgaggcccccggcaccgtggagtgcagcaagggcctgagccaggagcccggcgcccacctggaggagaagaagacccccgagagcagcctgagcagccagcacctgaacgagctggagaagagacccaaccccgagaaggtggtggaggagggcagagaggccggcgagatggagagcagcaccctgcaggagagccccagagccagagccgaggccgtgctgctgcacgagatggacgaggacgacctggccaacgccctgatctggcccgagatccagcaggagctgaagatcatcgagagcgaggaggagctgagcagcctgcccccccccgccctgaagaccagccccatccagcccatcctggagagcagcctgggccccttcatccccagcgagccccccggcagcctgccctgcggcagcttccccgcccccgtgagcacccccctggaggtgtggaccagagaccccgccaaccagagcacccagggcgccagcaccgccgccagcagagagaagcccgagcccgagcagggcctgcaccccgacctggccagcctggcccccctggagatcgtgcccttcgagaaggccagcccccaggccaccgtggaggtgggcggccccggcaacctgagcccccccctgccccccgccccccccccccccacccccctggaggagagcacccccgtgctgctgagcaagggcggccccgagagagaggacagcagcagaaagctgagaaccgacctgtacatcgaccagctgaagagccaggacagccccgagatcagcagcctgtgccagggcgaggaggccacccccagacacagcgacaagcagaacagcaagaacgccgccagcgagggcaagggctgcggcttccccagccccaccagagaggtggagatcgtgagccaggaggaggaggacgtgacccacagcgtgcaggagcccagcgactgcgacgaggacgacaccgtgaccgacatcgcccagcacggcctggagatggtggagccctgggaggagccccagtgggtgaccagccccctgcacagccccaccctgaaggacgcccacaaggcccaggtgcagggcctgcagggccaccagctggagaagagactgagccacagacccagcctgagacagagccacagcctggacagcaagcccaccgtgaagagccagtggaccctggaggtgcccagcagcagcagctgcgccaacctggagaccgagagaaacagcgaccccctgcagccccaggcccccagaagagagatcaccggctgggacgagaaggccctgagaagcttcagagagttcagcggcctgaagggcgccgaggccccccccaaccagaagggccccagcggcgtgcagcccaaccccgccgagaccagccccatcagcctggccgagggcaaggagctgggcacccacctgggccacagcagcccccagatcagacagggcggcgtgcccggccccgagagcagcaaggagagcagccccagcgtgcaggacagcaccagccccggcgagcaccccgccaagctgcagctgaagagcaccgagtgcggcccccccaagggcaagaacagacccagcagcctgaacctggaccccgccatccccatcgccgacctgttctggttcgagaacgtggccagcttcagcagccccggcatgcaggtgagcgagcccggcgaccccaaggtgacctggatgaccagcagctactgcaaggccgacccctggagagtgtacagccaggacccccaggacctggacatcgtggcccacgccctgaccggcagaagaaacagcgcccccgtgagcgtgagcgccgtgagaaccagcttcatggtgaagatgtgccaggccagagccgtgcccgtgatcccccccaagatccagtacacccagatcccccagcccctgcccagccagagcagcggcgagaacggcgtgcagcccctggagagaagccaggagggccccagcagcaccagcggcaccacccagaagcccgccaaggacgacagccccagcagcctggagagcagcaaggaggagaagcccaagcaggaccccggcgccatcaagagcagccccgtggacgccaccgccccctgcatgtgcgagggccccaccctgagccccgagcccggcagcagcaacctgctgagcacccaggacgccgtggtgcagtgcagaaagagaatgagcgagaccgagcccagcggcgacaacctgctgagcagcaagctggagagacccagcggcggcagcaagcccttccacagaagcagacccggcagaccccagagcctgatcctgttcagcccccccttccccatcatggaccacctgccccccagcagcaccgtgaccgacagcaaggtgctgctgagccccatcagaagccccacccagaccgtgagccccggcctgctgtgcggcgagctggccgagaacacctgggtgacccccgagggcgtgaccctgagaaacaagatgaccatccccaagaacggccagagactggagaccagcaccagctgcttctaccagccccagagaagaagcgtgatcctggacggcagaagcggcagacagatcgagtag

SEQ ID NO: 97145 - DNA, 3300 bp, synthetic construct
  misc_feature 1..3300: note = Description of Artificial Sequence: Synthetic coding sequence
  source 1..3300: mol_type = other DNA
atgaagaacaagggcgccaagcagaagctgaagagaaagggcgccgccagcgccttcggctgcgacctgaccgagtacctggagagcagcggccaggacgtgccctacgtgctgaagagctgcgccgagttcatcgagacccacggcatcgtggacggcatctacagactgagcggcgtgaccagcaacatccagagactgagacaggagttcggcagcgaccagtgccccgacctgaccagagaggtgtacctgcaggacatccactgcgtgggcagcctgtgcaagctgtacttcagagagctgcccaaccccctgctgacctacgagctgtacgagaagttcaccgaggccgtgagccactgccccgaggagggccagctggccagaatccagaacgtgatccaggagctgccccccagccactacagaaccctggagtacctgatcagacacctggcccacatcgccagcttcagcagcaagaccaacatgcacgccagaaacctggccctggtgtgggcccccaacctgctgagaagcaaggagatcgaggccaccggctgcaacggcgacgccgccttcctggccgtgagagtgcagcaggtggtgatcgagttcatcctgaaccacgtggaccagatcttcaacaacggcgcccccggcagcctggagaacgacgagaacagacccatcatgaagagcctgaccctgcccgccctgagcctgcccatgaagctggtgagcctggaggaggcccaggccagaagcctggccaccaaccaccccgccagaaaggagagaagagagaacagcctgcccgagatcgtgccccccatgggcaccctgttccacaccgtgctggagctgcccgacaacaagagaaagctgagcagcaagagcaagaagtggaagagcatcttcaacctgggcagaagcggcagcgacagcaagagcaagctgagcagaaacggcagcgtgttcgtgagaggccagagactgagcgtggagaaggccaccatcagacccgccaagagcatggacagcctgtgcagcgtgcccgtggagggcaaggagaccaagggcaacttcaacagaaccgtgaccaccggcggcttcttcatccccgccaccaagatgcacagcaccggcaccggcagcagctgcgacctgaccaagcaggagggcgagtggggccaggagggcatgccccccggcgccgagggcggcttcgacgtgagcagcgacagaagccacctgcagggcgcccaggccagacccccccccgagcagctgaaggtgttcagacccgtggaggaccccgagagcgagcagaccgcccccaagatgctgggcatgttctacaccagcaacgacagccccagcaagagcgtgttcaccagcagcctgttccagatggagcccagccccagaaaccagagaaaggccctgaacatcagcgagcccttcgccgtgagcgtgcccctgagagtgagcgccgtgatcagcaccaacagcaccccctgcagaaccccccccaaggagctgcagagcctgagcagcctggaggagttcagcttccacggcagcgagagcggcggctggcccgaggaggagaagcccctgggcgccgagaccagcgccgccagcgtgcccaagaaggccggcctggaggacgccaaggccgtgcccgaggcccccggcaccgtggagtgcagcaagggcctgagccaggagcccggcgcccacctggaggagaagaagacccccgagagcagcctgagcagccagcacctgaacgagctggagaagagacccaaccccgagaaggtggtggaggagggcagagaggccggcgagatggagagcagcaccctgcaggagagccccagagccagagccgaggccgtgctgctgcacgagatggacgaggacgacctggccaacgccctgatctggcccgagatccagcaggagctgaagatcatcgagagcgaggaggagctgagcagcctgcccccccccgccctgaagaccagccccatccagcccatcctggagagcagcctgggccccttcatccccagcgagccccccggcagcctgccctgcggcagcttccccgcccccgtgagcacccccctggaggtgtggaccagagaccccgccaaccagagcacccagggcgccagcaccgccgccagcagagagaagcccgagcccgagcagggcctgcaccccgacctggccagcctggcccccctggagatcgtgcccttcgagaaggccagcccccaggccaccgtggaggtgggcggccccggcaacctgagcccccccctgccccccgccccccccccccccacccccctggaggagagcacccccgtgctgctgagcaagggcggccccgagagagaggacagcagcagaaagctgagaaccgacctgtacatcgaccagctgaagagccaggacagccccgagatcagcagcctgtgccagggcgaggaggccacccccagacacagcgacaagcagaacagcaagaacgccgccagcgagggcaagggctgcggcttccccagccccaccagagaggtggagatcgtgagccaggaggaggaggacgtgacccacagcgtgcaggagcccagcgactgcgacgaggacgacaccgtgaccgacatcgcccagcacggcctggagatggtggagccctgggaggagccccagtgggtgaccagccccctgcacagccccaccctgaaggacgcccacaaggcccaggtgcagggcctgcagggccaccagctggagaagagactgagccacagacccagcctgagacagagccacagcctggacagcaagcccaccgtgaagagccagtggaccctggaggtgcccagcagcagcagctgcgccaacctggagaccgagagaaacagcgaccccctgcagccccaggcccccagaagagagatcaccggctgggacgagaaggccctgagaagcttcagagagttcagcggcctgaagggcgccgaggccccccccaaccagaagggccccagcggcgtgcagcccaaccccgcccagcccgtgggccccctgagaaacctgcccaagatgatcctgccccccccctggaaggcccagagaaagaagaaccagagcaagatccccgagcccctgagcccccaccagtggatgcccctgcaccccgcctgcgccagagacctgcccttcctgcagaaccaggccagactgacctgcagcccccccagaatgcagtag

SEQ ID NO: 97146 - DNA, 4509 bp, synthetic construct
  misc_feature 1..4509: note = Description of Artificial Sequence: Synthetic coding sequence
  source 1..4509: mol_type = other DNA
atgatggccaagaacaaggagcccagaccccccagctacaccatcagcatcgtgggcctgagcggcaccgagaaggacaagggcaactgcggcgtgggcaagagctgcctgtgcaacagattcgtgagaagcaaggccgacgagtactaccccgagcacaccagcgtgctgagcaccatcgacttcggcggcagagtggtgaacaacgaccacttcctgtactggggcgacatcatccagaacagcgaggacggcgtggagtgcaagatccacgtgatcgagcagaccgagttcatcgacgaccagaccttcctgccccacagaagcaccaacctgcagccctacatcaagagagccgccgccagcaagctgcagagcgccgagaagctgatgtacatctgcaccgaccagctgggcctggagcaggacttcgagcagaagcagatgcccgagggcaagctgaacgtggacggcttcctgctgtgcatcgacgtgagccagggctgcaacagaaagttcgacgaccagctgaagttcgtgaacaacctgttcgtgcagctgagcaagagcaagaagcccgtgatcatcgccgccaccaagtgcgacgagtgcgtggaccactacctgagagaggtgcaggccttcgccagcaacaagaagaacctgctggtggtggagaccagcgccagattcaacgtgaacatcgagacctgcttcaccgccctggtgcagatgctggacaagaccagaagcaagcccaagatcatcccctacctggacgcctacaagacccagagacagctggtggtgaccgccaccgacaagttcgagaagctggtgcagaccgtgagagactaccacgccacctggaagaccgtgagcaacaagctgaagaaccaccccgactacgaggagtacatcaacctggagggcaccagaaaggccagaaacaccttcagcaagcacatcgagcagctgaagcaggagcacatcagaaagagaagagaggagtacatcaacaccctgcccagagccttcaacaccctgctgcccaacctggaggagatcgagcacctgaactggagcgaggccctgaagctgatggagaagagagccgacttccagctgtgcttcgtggtgctggagaagaccccctgggacgagaccgaccacatcgacaagatcaacgacagaagaatccccttcgacctgctgagcaccctggaggccgagaaggtgtaccagaaccacgtgcagcacctgatcagcgagaagagaagagtggagatgaaggagaagttcaagaagaccctggagaagatccagttcatcagccccggccagccctgggaggaggtgatgtgcttcgtgatggaggacgaggcctacaagtacatcaccgaggccgacagcaaggaggtgtacggcagacaccagagagagatcgtggagaaggccaaggaggagttccaggagatgctgttcgagcacagcgagctgttctacgacctggacctgaacgccacccccagcagcgacaagatgagcgagatccacaccgtgctgagcgaggagcccagatacaaggccctgcagaagctggcccccgacagagagagcctgctgctgaagcacatcggcttcgtgtaccaccccaccaaggagacctgcctgagcggccagaactgcaccgacatcaaggtggagcagctgctggccagcagcctgctgcagctggaccacggcagactgagactgtaccacgacagcaccaacatcgacaaggtgaacctgttcatcctgggcaaggacggcctggcccaggagctggccaacgagatcagaacccagagcaccgacgacgagtacgccctggacggcaagatctacgagctggacctgagacccgtggacgccaagagcccctacttcctgagccagctgtggaccgccgccttcaagccccacggctgcttctgcgtgttcaacagcatcgagagcctgagcttcatcggcgagttcatcggcaagatcagaaccgaggccagccagatcagaaaggacaagtacatggccaacctgcccttcaccctgatcctggccaaccagagagacagcatcagcaagaacctgcccatcctgagacaccagggccagcagctggccaacaagctgcagtgccccttcgtggacgtgcccgccggcacctaccccagaaagttcaacgagacccagatcaagcaggccctgagaggcgtgctggagagcgtgaagcacaacctggacgtggtgagccccatccccgccaacaaggacctgagcgaggccgacctgagaatcgtgatgtgcgccatgtgcggcgaccccttcagcgtggacctgatcctgagccccttcctggacagccacagctgcagcgccgcccaggccggccagaacaacagcctgatgctggacaagatcatcggcgagaagagaagaagaatccagatcaccatcctgagctaccacagcagcatcggcgtgagaaaggacgagctggtgcacggctacatcctggtgtacagcgccaagagaaaggccagcatgggcatgctgagagccttcctgagcgaggtgcaggacaccatccccgtgcagctggtggccgtgaccgacagccaggccgacttcttcgagaacgaggccatcaaggagctgatgaccgagggcgagcacatcgccaccgagatcaccgccaagttcaccgccctgtacagcctgagccagtaccacagacagaccgaggtgttcaccctgttcttcagcgacgtgctggagaagaagaacatgatcgagaacagctacctgagcgacaacaccagagagagcacccaccagagcgaggacgtgttcctgcccagccccagagactgcttcccctacaacaactaccccgacagcgacgacgacaccgaggccccccccccctacagccccatcggcgacgacgtgcagctgctgcccacccccagcgacagaagcagatacagactggacctggagggcaacgagtaccccatccacagcacccccaactgccacgaccacgagagaaaccacaaggtgcccccccccatcaagcccaagcccgtggtgcccaagaccaacgtgaagaagctggaccccaacctgctgaagaccatcgaggccggcatcggcaagaaccccagaaagcagaccagcagagtgcccctggcccaccccgaggacatggaccccagcgacaactacgccgagcccatcgacaccatcttcaagcagaagggctacagcgacgagatctacgtggtgcccgacgacagccagaacagaatcaagatcagaaacagcttcgtgaacaacacccagggcgacgaggagaacggcttcagcgacagaaccagcaagagccacggcgagagaagacccagcaagtacaagtacaagagcaagaccctgttcagcaaggccaagagctactacagaagaacccacagcgacgccagcgacgacgaggccttcaccaccagcaagaccaagagaaagggcagacacagaggcagcgaggaggaccccctgctgagccccgtggagacctggaagggcggcatcgacaaccccgccatcaccagcgaccaggagctggacgacaagaagatgaagaagaagacccacaaggtgaaggaggacaagaagcagaagaagaagaccaagaacttcaacccccccaccagaagaaactgggagagcaactacttcggcatgcccctgcaggacctggtgaccgccgagaagcccatccccctgttcgtggagaagtgcgtggagttcatcgaggacaccggcctgtgcaccgagggcctgtacagagtgagcggcaacaagaccgaccaggacaacatccagaagcagttcgaccaggaccacaacatcaacctggtgagcatggaggtgaccgtgaacgccgtggccggcgccctgaaggccttcttcgccgacctgcccgaccccctgatcccctacagcctgcaccccgagctgctggaggccgccaagatccccgacaagaccgagagactgcacgccctgaaggagatcgtgaagaagttccaccccgtgaactacgacgtgttcagatacgtgatcacccacctgaacagagtgagccagcagcacaagatcaacctgatgaccgccgacaacctgagcatctgcttctggcccaccctgatgagacccgacttcgagaacagagagttcctgagcaccaccaagatccaccagagcgtggtggagaccttcatccagcagtgccagttcttcttctacaacggcgagatcgtggagaccaccaacatcgtggccccccccccccccagcaaccccggccagctggtggagcccatggtgcccctgcagctgcccccccccctgcagccccagctgatccagccccagctgcagaccgaccccctgggcatcatctag

SEQ ID NO: 97147 - DNA, 714 bp, synthetic construct
  misc_feature 1..714: note = Description of Artificial Sequence: Synthetic coding sequence
  source 1..714: mol_type = other DNA
atgagcctgcccccccccccccccggccccctgcccctgagaagaagaagaagaagacccaccctgctgggcctgtgcaccgagggcctgtacagagtgagcggcaacaagaccgaccaggacaacatccagaagcagttcgaccaggaccacaacatcaacctggtgagcatggaggtgaccgtgaacgccgtggccggcgccctgaaggccttcttcgccgacctgcccgaccccctgatcccctacagcctgcaccccgagctgctggaggccgccaagatccccgacaagaccgagagactgcacgccctgaaggagatcgtgaagaagttccaccccgtgaactacgacgtgttcagatacgtgatcacccacctgaacagagtgagccagcagcacaagatcaacctgatgaccgccgacaacctgagcatctgcttctggcccaccctgatgagacccgacttcgagaacagagagttcctgagcaccaccaagatccaccagagcgtggtggagaccttcatccagcagtgccagttcttcttctacaacggcgagatcgtggagaccaccaacatcgtggccccccccccccccagcaaccccggccagctggtggagcccatggtgcccctgcagctgcccccccccctgcagccccagctgatccagccccagctgcagaccgaccccctgggcatcatctag

SEQ ID NO: 97148 - DNA, 4506 bp, synthetic construct
  misc_feature 1..4506: note = Description of Artificial Sequence: Synthetic coding sequence
  source 1..4506: mol_type = other DNA
atgatggccaagaacaaggagcccagaccccccagctacaccatcagcatcgtgggcctgagcggcaccgagaaggacaagggcaactgcggcgtgggcaagagctgcctgtgcaacagattcgtgagaagcaaggccgacgagtactaccccgagcacaccagcgtgctgagcaccatcgacttcggcggcagagtggtgaacaacgaccacttcctgtactggggcgacatcatccagaacagcgaggacggcgtggagtgcaagatccacgtgatcgagcagaccgagttcatcgacgaccagaccttcctgccccacagaagcaccaacctgcagccctacatcaagagagccgccgccagcaagctgcagagcgccgagaagctgatgtacatctgcaccgaccagctgggcctggagcaggacttcgagcagaagcagatgcccgagggcaagctgaacgtggacggcttcctgctgtgcatcgacgtgagccagggctgcaacagaaagttcgacgaccagctgaagttcgtgaacaacctgttcgtgcagctgagcaagagcaagaagcccgtgatcatcgccgccaccaagtgcgacgagtgcgtggaccactacctgagagaggtgcaggccttcgccagcaacaagaagaacctgctggtggtggagaccagcgccagattcaacgtgaacatcgagacctgcttcaccgccctggtgcagatgctggacaagaccagaagcaagcccaagatcatcccctacctggacgcctacaagacccagagacagctggtggtgaccgccaccgacaagttcgagaagctggtgcagaccgtgagagactaccacgccacctggaagaccgtgagcaacaagctgaagaaccaccccgactacgaggagtacatcaacctggagggcaccagaaaggccagaaacaccttcagcaagcacatcgagcagctgaagcaggagcacatcagaaagagaagagaggagtacatcaacaccctgcccagagccttcaacaccctgctgcccaacctggaggagatcgagcacctgaactggagcgaggccctgaagctgatggagaagagagccgacttccagctgtgcttcgtggtgctggagaagaccccctgggacgagaccgaccacatcgacaagatcaacgacagaagaatccccttcgacctgctgagcaccctggaggccgagaaggtgtaccagaaccacgtgcagcacctgatcagcgagaagagaagagtggagatgaaggagaagttcaagaagaccctggagaagatccagttcatcagccccggccagccctgggaggaggtgatgtgcttcgtgatggaggacgaggcctacaagtacatcaccgaggccgacagcaaggaggtgtacggcagacaccagagagagatcgtggagaaggccaaggaggagttccaggagatgctgttcgagcacagcgagctgttctacgacctggacctgaacgccacccccagcagcgacaagatgagcgagatccacaccgtgctgagcgaggagcccagatacaaggccctgcagaagctggcccccgacagagagagcctgctgctgaagcacatcggcttcgtgtaccaccccaccaaggagacctgcctgagcggccagaactgcaccgacatcaaggtggagcagctgctggccagcagcctgctgcagctggaccacggcagactgagactgtaccacgacagcaccaacatcgacaaggtgaacctgttcatcctgggcaaggacggcctggcccaggagctggccaacgagatcagaacccagagcaccgacgacgagtacgccctggacggcaagatctacgagctggacctgagacccgtggacgccaagagcccctacttcctgagccagctgtggaccgccgccttcaagccccacggctgcttctgcgtgttcaacagcatcgagagcctgagcttcatcggcgagttcatcggcaagatcagaaccgaggccagccagatcagaaaggacaagtacatggccaacctgcccttcaccctgatcctggccaaccagagagacagcatcagcaagaacctgcccatcctgagacaccagggccagcagctggccaacaagctgcagtgccccttcgtggacgtgcccgccggcacctaccccagaaagttcaacgagacccagatcaagcaggccctgagaggcgtgctggagagcgtgaagcacaacctggacgtggtgagccccatccccgccaacaaggacctgagcgaggccgacctgagaatcgtgatgtgcgccatgtgcggcgaccccttcagcgtggacctgatcctgagccccttcctggacagccacagctgcagcgccgcccaggccggccagaacaacagcctgatgctggacaagatcatcggcgagaagagaagaagaatccagatcaccatcctgagctaccacagcagcatcggcgtgagaaaggacgagctggtgcacggctacatcctggtgtacagcgccaagagaaaggccagcatgggcatgctgagagccttcctgagcgaggtgcaggacaccatccccgtgcagctggtggccgtgaccgacagccaggccgacttcttcgagaacgaggccatcaaggagctgatgaccgagggcgagcacatcgccaccgagatcaccgccaagttcaccgccctgtacagcctgagccagtaccacagacagaccgaggtgttcaccctgttcttcagcgacgtgctggagaagaagaacatgatcgagaacagctacctgagcgacaacaccagagagagcacccaccagagcgaggacgtgttcctgcccagccccagagactgcttcccctacaacaactaccccgacagcgacgacgacaccgaggccccccccccctacagccccatcggcgacgacgtgcagctgctgcccacccccagcgacagaagcagatacagactggacctggagggcaacgagtaccccatccacagcacccccaactgccacgaccacgagagaaaccacaaggtgcccccccccatcaagcccaagcccgtggtgcccaagaccaacgtgaagaagctggaccccaacctgctgaagaccatcgaggccggcatcggcaagaaccccagaaagcagaccagcagagtgcccctggcccaccccgaggacatggaccccagcgacaactacgccgagcccatcgacaccatcttcaagcagaagggctacagcgacgagatctacgtggtgcccgacgacagccagaacagaatcaagatcagaaacagcttcgtgaacaacacccagggcgacgaggagaacggcttcagcgacagaaccagcaagagccacggcgagagaagacccagcaagtacaagtacaagagcaagaccctgttcagcaaggccaagagctactacagaagaacccacagcgacgccagcgacgacgaggccttcaccaccagcaagaccaagagaaagggcagacacagaggcagcgaggaggaccccctgctgagccccgtggagacctggaagggcggcatcgacaaccccgccatcaccagcgaccaggagctggacgacaagaagatgaagaagaagacccacaaggtgaaggaggacaagaagaagaagaagaccaagaacttcaacccccccaccagaagaaactgggagagcaactacttcggcatgcccctgcaggacctggtgaccgccgagaagcccatccccctgttcgtggagaagtgcgtggagttcatcgaggacaccggcctgtgcaccgagggcctgtacagagtgagcggcaacaagaccgaccaggacaacatccagaagcagttcgaccaggaccacaacatcaacctggtgagcatggaggtgaccgtgaacgccgtggccggcgccctgaaggccttcttcgccgacctgcccgaccccctgatcccctacagcctgcaccccgagctgctggaggccgccaagatccccgacaagaccgagagactgcacgccctgaaggagatcgtgaagaagttccaccccgtgaactacgacgtgttcagatacgtgatcacccacctgaacagagtgagccagcagcacaagatcaacctgatgaccgccgacaacctgagcatctgcttctggcccaccctgatgagacccgacttcgagaacagagagttcctgagcaccaccaagatccaccagagcgtggtggagaccttcatccagcagtgccagttcttcttctacaacggcgagatcgtggagaccaccaacatcgtggccccccccccccccagcaaccccggccagctggtggagcccatggtgcccctgcagctgcccccccccctgcagccccagctgatccagccccagctgcagaccgaccccctgggcatcatctag

SEQ ID NO: 97149 - DNA, 726 bp, synthetic construct
  misc_feature 1..726: note = Description of Artificial Sequence: Synthetic coding sequence
  source 1..726: mol_type = other DNA
atgcccctgcaggacctggtgaccgccgagaagcccatccccctgttcgtggagaagtgcgtggagttcatcgaggacaccggcctgtgcaccgagggcctgtacagagtgagcggcaacaagaccgaccaggacaacatccagaagcagttcgaccaggaccacaacatcaacctggtgagcatggaggtgaccgtgaacgccgtggccggcgccctgaaggccttcttcgccgacctgcccgaccccctgatcccctacagcctgcaccccgagctgctggaggccgccaagatccccgacaagaccgagagactgcacgccctgaaggagatcgtgaagaagttccaccccgtgaactacgacgtgttcagatacgtgatcacccacctgaacagagtgagccagcagcacaagatcaacctgatgaccgccgacaacctgagcatctgcttctggcccaccctgatgagacccgacttcgagaacagagagttcctgagcaccaccaagatccaccagagcgtggtggagaccttcatccagcagtgccagttcttcttctacaacggcgagatcgtggagaccaccaacatcgtggccccccccccccccagcaaccccggccagctggtggagcccatggtgcccctgcagctgcccccccccctgcagccccagctgatccagccccagctgcagaccgaccccctgggcatcatctag

SEQ ID NO: 97150 - DNA, 4509 bp, synthetic construct; identical to SEQ ID NO: 97146
  misc_feature 1..4509: note = Description of Artificial Sequence: Synthetic coding sequence
  source 1..4509: mol_type = other DNA

SEQ ID NO: 97151 - DNA, 414 bp, synthetic construct
  misc_feature 1..414: note = Description of Artificial Sequence: Synthetic coding sequence
  source 1..414: mol_type = other DNA
atgcccctgcaggacctggtgaccgccgagaagcccatccccctgttcgtggagaagtgcgtggagttcatcgaggacaccggcctgtgcaccgagggcctgtacagagtgagcggcaacaagaccgaccaggacaacatccagaagcagttcgaccaggaccacaacatcaacctggtgagcatggaggtgaccgtgaacgccgtggccggcgccctgaaggccttcttcgccgacctgcccgaccccctgatcccctacagcctgcaccccgagctgctggaggccgccaagatccccgacaagaccgagagactgcacgccctgaaggagatcgtgaagaagttccaccccgtgaactacgacgtgttcagatacgtgatcacccacctgaacagagtgagccagcagtag

SEQ ID NO: 97152 - DNA, 114 bp, synthetic construct
  misc_feature 1..114: note = Description of Artificial Sequence: Synthetic coding sequence
  source 1..114: mol_type = other DNA
atgatggccaagaacaaggagcccagaccccccagctacaccatcagcatcgtgggcctgagcggcaccgagaaggacaagggcaactgcggcgtgggcaagagctgcctgtag

SEQ ID NO: 97153 - DNA, 423 bp, synthetic construct
  misc_feature 1..423: note = Description of Artificial Sequence: Synthetic coding sequence
  source 1..423: mol_type = other DNA
atgatggccaagaacaaggagcccagaccccccagctacaccatcagcatcgtgggcctgagcggcaccgagaaggacaagggcaactgcggcgtgggcaagagctgcctgtgcaacagattcgtgagaagcaaggccgacgagtactaccccgagcacaccagcgtgctgagcaccatcgacttcggcggcagagtggtgaacaacgaccacttcctgtactggggcgacatcatccagaacagcgaggacggcgtggagtgcaagatccacgtgatcgagcagaccgagttcatcgacgaccagaccttcctgccccacagaagcaccaacctgcagccctacatcaagagagccgccgccagcaagctgcagagcgccgagaagctgatgtacatctgcaccgaccagctgggcctgtag

SEQ ID NO: 97154 - DNA, 4506 bp, synthetic construct; identical to SEQ ID NO: 97148
  misc_feature 1..4506: note = Description of Artificial Sequence: Synthetic coding sequence
  source 1..4506: mol_type = other DNA

SEQ ID NO: 97155 - DNA, 2316 bp, synthetic construct
  misc_feature 1..2316: note = Description of Artificial Sequence: Synthetic coding sequence
  source 1..2316: mol_type = other DNA
atgagcggcagaagcgtgagactgagaagcgtgcccatccagagcctgagcgagctggagagagccagactgcaggaggtggccttctaccagctgcagcaggactgcgacctgagctgccagatcaccatccccaaggacggccagaagagaaagaagagcctgagaaagaagctggacagcctgggcaaggagaagaacaaggacaaggagttcatcccccaggccttcggcatgcccctgagccaggtgatcgccaacgacagagcctacaagctgaagcaggacctgcagagagacgagcagaaggacgccagcgacttcgtggccagcctgctgcccttcggcaacaagagacagaacaaggagctgagcagcagcaacagcagcctgagcagcaccagcgagacccccaacgagagcaccagccccaacacccccgagcccgcccccagagccagaagaagaggcgccatgagcgtggacagcatcaccgacctggacgacaaccagagcagactgctggaggccctgcagctgagcctgcccgccgaggcccagagcaagaaggagaaggccagagacaagaagctgagcctgaaccccatctacagacaggtgcccagactggtggacagctgctgccagcacctggagaagcacggcctgcagaccgtgggcatcttcagagtgggcagcagcaagaagagagtgagacagctgagagaggagttcgacagaggcatcgacgtgagcctggaggaggagcacagcgtgcacgacgtggccgccctgctgaaggagttcctgagagacatgcccgaccccctgctgaccagagagctgtacaccgccttcatcaacaccctgctgctggagcccgaggagcagctgggcaccctgcagctgctgatctacctgctgcccccctgcaactgcgacaccctgcacagactgctgcagttcctgagcatcgtggccagacacgccgacgacaacatcagcaaggacggccaggaggtgaccggcaacaagatgaccagcctgaacctggccaccatcttcggccccaacctgctgcacaagcagaagagcagcgacaaggagttcagcgtgcagagcagcgccagagccgaggagagcaccgccatcatcgccgtggtgcagaagatgatcgagaactacgaggccctgttcatggtgccccccgacctgcagaacgaggtgctgatcagcctgctggagaccgaccccgacgtggtggactacctgctgagaagaaaggccagccagagcagcagccccgacatgctgcagagcgaggtgagcttcagcgtgggcggcagacacagcagcaccgacagcaacaaggccagcagcggcgacatcagcccctacgacaacaacagccccgtgctgagcgagagaagcctgctggccatgcaggaggacgccgcccccggcggcagcgagaagctgtacagagtgcccggccagttcatgctggtgggccacctgagcagcagcaagagcagagagagcagccccggccccagactgggcaaggacctgagcgaggagcccttcgacatctggggcacctggcacagcaccctgaagagcggcagcaaggaccccggcatgaccggcagcagcggcgacatcttcgagagcagcagcctgagagccggcccctgcagcctgagccagggcaacctgagccccaactggcccagatggcagggcagccccgccgagctggacagcgacacccagggcgccagaagaacccaggccgccgcccccgccaccgagggcagagcccaccccgccgtgagcagagcctgcagcaccccccacgtgcaggtggccggcaaggccgagagacccaccgccagaagcgagcagtacctgaccctgagcggcgcccacgacctgagcgagagcgagctggacgtggccggcctgcagagcagagccaccccccagtgccagagaccccacggcagcggcagagacgacaagagacccccccccccctaccccggccccggcaagcccgccgccgccgccgcctggatccagggcccccccgagggcgtggagacccccaccgaccagggcggccaggccgccgagagagagcagcaggtgacccagaagaagctgagcagcgccaacagcctgcccgccggcgagcaggacagccccagactgggcgacgccggctggctggactggcagagagagagatggcagatctgggagctgctgagcaccgacaaccccgacgccctgcccgagaccctggtgtag

SEQ ID NO: 97156 - DNA, 2925 bp, synthetic construct
  misc_feature 1..2925: note = Description of Artificial Sequence: Synthetic coding sequence
  source 1..2925: mol_type = other DNA
atgagcgcccagagcctgctgcacagcgtgttcagctgcagcagccccgccagcagcagcgccgccagcgccaagggcttcagcaagagaaagctgagacagaccagaagcctggaccccgccctgatcggcggctgcggcagcgacgaggccggcgccgagggcagcgccagaggcgccaccgccggcagactgtacagccccagcctgcccgccgagagcctgggccccagactggccagcagcagcagaggccccccccccagagccaccagactgcccccccccggccccctgtgcagcagcttcagcacccccagcaccccccaggagaagagccccagcggcagcttccacttcgactacgaggtgcccctgggcagaggcggcctgaagaagagcatggcctgggacctgcccagcgtgctggccggccccgccagcagcagaagcgccagcagcatcctgtgcagcagcggcggcggccccaacggcatcttcgccagccccagaagatggctgcagcagagaaagttccagagcccccccgacagcagaggccacccctacgtggtgtggaagagcgagggcgacttcacctggaacagcatgagcggcagaagcgtgagactgagaagcgtgcccatccagagcctgagcgagctggagagagccagactgcaggaggtggccttctaccagctgcagcaggactgcgacctgagctgccagatcaccatccccaaggacggccagaagagaaagaagagcctgagaaagaagctggacagcctgggcaaggagaagaacaaggacaaggagttcatcccccaggccttcggcatgcccctgagccaggtgatcgccaacgacagagcctacaagctgaagcaggacctgcagagagacgagcagaaggacgccagcgacttcgtggccagcctgctgcccttcggcaacaagagacagaacaaggagctgagcagcagcaacagcagcctgagcagcaccagcgagacccccaacgagagcaccagccccaacacccccgagcccgcccccagagccagaagaagaggcgccatgagcgtggacagcatcaccgacctggacgacaaccagagcagactgctggaggccctgcagctgagcctgcccgccgaggcccagagcaagaaggagaaggccagagacaagaagctgagcctgaaccccatctacagacaggtgcccagactggtggacagctgctgccagcacctggagaagcacggcctgcagaccgtgggcatcttcagagtgggcagcagcaagaagagagtgagacagctgagagaggagttcgacagaggcatcgacgtgagcctggaggaggagcacagcgtgcacgacgtggccgccctgctgaaggagttcctgagagacatgcccgaccccctgctgaccagagagctgtacaccgccttcatcaacaccctgctgctggagcccgaggagcagctgggcaccctgcagctgctgatctacctgctgcccccctgcaactgcgacaccctgcacagactgctgcagttcctgagcatcgtggccagacacgccgacgacaacatcagcaaggacggccaggaggtgaccggcaacaagatgaccagcctgaacctggccaccatcttcggccccaacctgctgcacaagcagaagagcagcgacaaggagttcagcgtgcagagcagcgccagagccgaggagagcaccgccatcatcgccgtggtgcagaagatgatcgagaactacgaggccctgttcatggtgccccccgacctgcagaacgaggtgctgatcagcctgctggagaccgaccccgacgtggtggactacctgctgagaagaaaggccagccagagcagcagccccgacatgctgcagagcgaggtgagcttcagcgtgggcggcagacacagcagcaccgacagcaacaaggccagcagcggcgacatcagcccctacgacaacaacagccccgtgctgagcgagagaagcctgctggccatgcaggaggacgccgcccccggcggcagcgagaagctgtacagagtgcccggccagttcatgctggtgggccacctgagcagcagcaagagcagagagagcagccccggccccagactgggcaaggacctgagcgaggagcccttcgacatctggggcacctggcacagcaccctgaagagcggcagcaaggaccccggcatgaccggcagcagcggcgacatcttcgagagcagcagcctgagagccggcccctgcagcctgagccagggcaacctgagccccaactggcccagatggcagggcagccccgccgagctggacagcgacacccagggcgccagaagaacccaggccgccgcccccgccaccgagggcagagcccaccccgccgtgagcagagcctgcagcaccccccacgtgcaggtggccggcaaggccgagagacccaccgccagaagcgagcagtacctgaccctgagcggcgcccacgacctgagcgagagcgagctggacgtggccggcctgcagagcagagccaccccccagtgccagagaccccacggcagcggcagagacgacaagagacccccccccccctaccccggccccggcaagcccgccgccgccgccgcctggatccagggcccccccgagggcgtggagacccccaccgaccagggcggccaggccgccgagagagagcagcaggtgacccagaagaagctgagcagcgccaacagcctgcccgccggcgagcaggacagccccagactgggcgacgccggctggctggactggcagagagagagatggcagatctgggagctgctgagcaccgacaaccccgacgccctgcccgagaccctggtgtag

SEQ ID NO: 97157 - DNA, 1806 bp, synthetic construct
  misc_feature 1..1806: note = Description of Artificial Sequence: Synthetic coding sequence
  source 1..1806: mol_type = other DNA
ctggagctgtacgacctgcagatcctgggcaccaagccccccatgaacagcgacacccacagaaacttcgaccccaccgccaccctgagaaaccagggcgacttcacctggaacagcatgagcggcagaagcgtgagactgagaagcgtgcccatccagagcctgagcgagctggagagagccagactgcaggaggtggccttctaccagctgcagcaggactgcgacctgagctgccagatcaccatccccaaggacggccagaagagaaagaagagcctgagaaagaagctggacagcctgggcaaggagaagaacaaggacaaggagttcatcccccaggccttcggcatgcccctgagccaggtgatcgccaacgacagagcctacaagctgaagcaggacctgcagagagacgagcagaaggacgccagcgacttcgtggccagcctgctgcccttcggcaacaagagacagaacaaggagctgagcagcagcaacagcagcctgagcagcaccagcgagacccccaacgagagcaccagccccaacacccccgagcccgcccccagagccagaagaagaggcgccatgagcgtggacagcatcaccgacctggacgacaaccagagcagactgctggaggccctgcagctgagcctgcccgccgaggcccagagcaagaaggagaaggccagagacaagaagctgagcctgaaccccatctacagacaggtgcccagactggtggacagctgctgccagcacctggagaagcacggcctgcagaccgtgggcatcttcagagtgggcagcagcaagaagagagtgagacagctgagagaggagttcgacagaggcatcgacgtgagcctggaggaggagcacagcgtgcacgacgtggccgccctgctgaaggagttcctgagagacatgcccgaccccctgctgaccagagagctgtacaccgccttcatcaacaccctgctgctggagcccgaggagcagctgggcaccctgcagctgctgatctacctgctgcccccctgcaactgcgacaccctgcacagactgctgcagttcctgagcatcgtggccagacacgccgacgacaacatcagcaaggacggccaggaggtgaccggcaacaagatgaccagcctgaacctggccaccatcttcggccccaacctgctgcacaagcagaagagcagcgacaaggagttcagcgtgcagagcagcgccagagccgaggagagcaccgccatcatcgccgtggtgcagaagatgatcgagaactacgaggccctgttcatggtgccccccgacctgcagaacgaggtgctgatcagcctgctggagaccgaccccgacgtggtggactacctgctgagaagaaaggccagccagagcagcagccccgacatgctgcagagcgaggtgagcttcagcgtgggcggcagacacagcagcaccgacagcaacaaggccagcagcggcgacatcagcccctacgacaacaacagccccgtgctgagcgagagaagcctgctggccatgcaggaggacgccgcccccggcggcagcgagaagctgtacagagtgcccggccagttcatgctggtgggccacctgagcagcagcaagagcagagagagcagccccggccccagactgggcaagggcaactggagcctggccagcagaagatggcccaagcaggccaccctgctgctgctgcacgtggcctggtgcggcgccctgagaaccttcagcagcagcctgccctacctgatgttcctgtag

SEQ ID NO: 97158 - DNA, 2298 bp, synthetic construct
  misc_feature 1..2298: note = Description of Artificial Sequence: Synthetic coding sequence
  source 1..2298: mol_type = other DNA
atgagcgcccagagcctgctgcacagcgtgttcagctgcagcagccccgccagcagcagcgccgccagcgccaagggcttcagcaagagaaagctgagacagaccagaagcctggaccccgccctgatcggcggctgcggcagcgacgaggccggcgccgagggcagcgccagaggcgccaccgccggcagactgtacagccccagcctgcccgccgagagcctgggccccagactggccagcagcagcagaggccccccccccagagccaccagactgcccccccccggccccctgtgcagcagcttcagcacccccagcaccccccaggagaagagccccagcggcagcttccacttcgactacgaggtgcccctgggcagaggcggcctgaagaagagcatggcctgggacctgcccagcgtgctggccggccccgccagcagcagaagcgccagcagcatcctgtgcagcagcggcggcggccccaacggcatcttcgccagccccagaagatggctgcagcagagaaagttccagagcccccccgacagcagaggccacccctacgtggtgtggaagagcgagggcgacttcacctggaacagcatgagcggcagaagcgtgagactgagaagcgtgcccatccagagcctgagcgagctggagagagccagactgcaggaggtggccttctaccagctgcagcaggactgcgacctgagctgccagatcaccatccccaaggacggccagaagagaaagaagagcctgagaaagaagctggacagcctgggcaaggagaagaacaaggacaaggagttcatcccccaggccttcggcatgcccctgagccaggtgatcgccaacgacagagcctacaagctgaagcaggacctgcagagagacgagcagaaggacgccagcgacttcgtggccagcctgctgcccttcggcaacaagagacagaacaaggagctgagcagcagcaacagcagcctgagcagcaccagcgagacccccaacgagagcaccagccccaacacccccgagcccgcccccagagccagaagaagaggcgccatgagcgtggacagcatcaccgacctggacgacaaccagagcagactgctggaggccctgcagctgagcctgcccgccgaggcccagagcaagaaggagaaggccagagacaagaagctgagcctgaaccccatctacagacaggtgcccagactggtggacagctgctgccagcacctggagaagcacggcctgcagaccgtgggcatcttcagagtgggcagcagcaagaagagagtgagacagctgagagaggagttcgacagaggcatcgacgtgagcctggaggaggagcacagcgtgcacgacgtggccgccctgctgaaggagttcctgagagacatgcccgaccccctgctgaccagagagctgtacaccgccttcatcaacaccctgctgctggagcccgaggagcagctgggcaccctgcagctgctgatctacctgctgcccccctgcaactgcgacaccctgcacagactgctgcagttcctgagcatcgtggccagacacgccgacgacaacatcagcaaggacggccaggaggtgaccggcaacaagatgaccagcctgaacctggccaccatcttcggccccaacctgctgcacaagcagaagagcagcgacaaggagttcagcgtgcagagcagcgccagagccgaggagagcaccgccatcatcgccgtggtgcagaagatgatcgagaactacgaggccctgttcatggtgccccccgacctgcagaacgaggtgctgatcagcctgctggagaccgaccccgacgtggtggactacctgctgagaagaaaggccagccagagcagcagccccgacatgctgcagagcgaggtgagcttcagcgtgggcggcagacacagcagcaccgacagcaacaaggccagcagcggcgacatcagcccctacgacaacaacagccccgtgctgagcgagagaagcctgctggccatgcaggaggacgccgcccccggcggcagcgagaagctgtacagagtgcccggccagttcatgctggtgggccacctgagcagcagcaagagcagagagagcagccccggccccagactgggcaagggcaactggagcctggccagcagaagatggcccaagcaggccaccctgctgctgctgcacgtggcctggtgcggcgccctgagaaccttcagcagcagcctgccctacctgatgttcctgtag

SEQ ID NO: 97159 - DNA, 2073 bp, synthetic construct
  misc_feature 1..2073: note = Description of Artificial Sequence: Synthetic coding sequence
  source 1..2073: mol_type = other DNA
atgagcgcccagagcctgctgcacagcgtgttcagctgcagcagccccgccagcagcagcgccgccagcgccaagggcttcagcaagagaaagctgagacagaccagaagcctggaccccgccctgatcggcggctgcggcagcgacgaggccggcgccgagggcagcgccagaggcgccaccgccggcagactgtacagccccagcctgcccgccgagagcctgggccccagactggccagcagcagcagaggccccccccccagagccaccagactgcccccccccggccccctgtgcagcagcttcagcacccccagcaccccccaggagaagagccccagcggcagcttccacttcgactacgaggtgcccctgggcagaggcggcctgaagaagagcatggcctgggacctgcccagcgtgctggccggccccgccagcagcagaagcgccagcagcatcctgtgcagcagcggcggcggccccaacggcatcttcgccagccccagaagatggctgcagcagagaaagttccagagcccccccgacagcagaggccacccctacgtggtgtggaagagcgagctggagctgtacgacctgcagatcctgggcaccaagccccccatgaacagcgacacccacagaaacttcgaccccaccgccaccctgagaaaccagggcgacttcacctggaacagcatgagcggcagaagcgtgagactgagaagcgtgcccatccagagcctgagcgagctggagagagccagactgcaggaggtggccttctaccagctgcagcaggactgcgacctgagctgccagatcaccatccccaaggacggccagaagagaaagaagagcctgagaaagaagctggacagcctgggcaaggagaagaacaaggacaaggagttcatcccccaggccttcggcatgcccctgagccaggtgatcgccaacgacagagcctacaagctgaagcaggacctgcagagagacgagcagaaggacgccagcgacttcgtggccagcctgctgcccttcggcaacaagagacagaacaaggagctgagcagcagcaacagcagcctgagcagcaccagcgagacccccaacgagagcaccagccccaacacccccgagcccgcccccagagccagaagaagaggcgccatgagcgtggacagcatcaccgacctggacgacaaccagagcagactgctggaggccctgcagctgagcctgcccgccgaggcccagagcaagaaggagaaggccagagacaagaagctgagcctgaaccccatctacagacaggtgcccagactggtggacagctgctgccagcacctggagaagcacggcctgcagaccgtgggcatcttcagagtgggcagcagcaagaagagagtgagacagctgagagaggagttcgacagaggcatcgacgtgagcctggaggaggagcacagcgtgcacgacgtggccgccctgctgaaggagttcctgagagacatgcccgaccccctgctgaccagagagctgtacaccgccttcatcaacaccctgctgctggagcccgaggagcagctgggcaccctgcagctgctgatctacctgctgcccccctgcaactgcgacaccctgcacagactgctgcagttcctgagcatcgtggccagacacgccgacgacaacatcagcaaggacggccaggaggtgaccggcaacaagatgaccagcctgaacctggccaccatcttcggccccaacctgctgcacaagcagaagagcagcgacaaggagttcagcgtgcagagcagcgccagagccgaggagagcaccgccatcatcgccgtggtgcagaagatgatcgagaactacgaggccctgttcatggtgccccccgacctgcagaacgaggtgctgatcagcctgctggagaccgaccccgacgtggtggactacctgctgagaagaaaggccagccagagcagcaccagcagcgtgctgcccgccgccgtgcaggcctgcccccagtaccccgccagcatgttcaccccctag

SEQ ID NO: 97160 - DNA, 2316 bp, synthetic construct; identical to SEQ ID NO: 97155
  misc_feature 1..2316: note = Description of Artificial Sequence: Synthetic coding sequence
  source 1..2316: mol_type = other DNA

SEQ ID NO: 97161 - DNA, 1404 bp, synthetic construct
  misc_feature 1..1404: note = Description of Artificial Sequence: Synthetic coding sequence
  source 1..1404: mol_type = other DNA
atgtacagaatcttcggcgacttcacctggaacagcatgagcggcagaagcgtgagactgagaagcgtgcccatccagagcctgagcgagctggagagagccagactgcaggaggtggccttctaccagctgcagcaggactgcgacctgagctgccagatcaccatccccaaggacggccagaagagaaagaagagcctgagaaagaagctggacagcctgggcaaggagaagaacaaggacaaggagttcatcccccaggccttcggcatgcccctgagccaggtgatcgccaacgacagagcctacaagctgaagcaggacctgcagagagacgagcagaaggacgccagcgacttcgtggccagcctgctgcccttcggcaacaagagacagaacaaggagctgagcagcagcaacagcagcctgagcagcaccagcgagacccccaacgagagcaccagccccaacacccccgagcccgcccccagagccagaagaagaggcgccatgagcgtggacagcatcaccgacctggacgacaaccagagcagactgctggaggccctgcagctgagcctgcccgccgaggcccagagcaagaaggagaaggccagagacaagaagctgagcctgaaccccatctacagacaggtgcccagactggtggacagctgctgccagcacctggagaagcacggcctgcagaccgtgggcatcttcagagtgggcagcagcaagaagagagtgagacagctgagagaggagttcgacagaggcatcgacgtgagcctggaggaggagcacagcgtgcacgacgtggccgccctgctgaaggagttcctgagagacatgcccgaccccctgctgaccagagagctgtacaccgccttcatcaacaccctgctgctggagcccgaggagcagctgggcaccctgcagctgctgatctacctgctgcccccctgcaactgcgacaccctgcacagactgctgcagttcctgagcatcgtggccagacacgccgacgacaacatcagcaaggacggccaggaggtgaccggcaacaagatgaccagcctgaacctggccaccatcttcggccccaacctgctgcacaagcagaagagcagcgacaaggagttcagcgtgcagagcagcgccagagccgaggagagcaccgccatcatcgccgtggtgcagaagatgatcgagaactacgaggccctgttcatggtgccccccgacctgcagaacgaggtgctgatcagcctgctggagaccgaccccgacgtggtggactacctgctgagaagaaaggccagccagagcagcaccagcagcgtgctgcccgccgccgtgcaggcctgcccccagtaccccgccagcatgttcaccccctag

SEQ ID NO: 97162 - DNA, 1815 bp, synthetic construct
  misc_feature 1..1815: note = Description of Artificial Sequence: Synthetic coding sequence
  source 1..1815: mol_type = other DNA
atgaagagactgcacatcttcggccccaagatccacagcagcggcggcctgtggcagcagaagggcgacttcacctggaacagcatgagcggcagaagcgtgagactgagaagcgtgcccatccagagcctgagcgagctggagagagccagactgcaggaggtggccttctaccagctgcagcaggactgcgacctgagctgccagatcaccatccccaaggacggccagaagagaaagaagagcctgagaaagaagctggacagcctgggcaaggagaagaacaaggacaaggagttcatcccccaggccttcggcatgcccctgagccaggtgatcgccaacgacagagcctacaagctgaagcaggacctgcagagagacgagcagaaggacgccagcgacttcgtggccagcctgctgcccttcggcaacaagagacagaacaaggagctgagcagcagcaacagcagcctgagcagcaccagcgagacccccaacgagagcaccagccccaacacccccgagcccgcccccagagccagaagaagaggcgccatgagcgtggacagcatcaccgacctggacgacaaccagagcagactgctggaggccctgcagctgagcctgcccgccgaggcccagagcaagaaggagaaggccagagacaagaagctgagcctgaaccccatctacagacaggtgcccagactggtggacagctgctgccagcacctggagaagcacggcctgcagaccgtgggcatcttcagagtgggcagcagcaagaagagagtgagacagctgagagaggagttcgacagaggcatcgacgtgagcctggaggaggagcacagcgtgcacgacgtggccgccctgctgaaggagttcctgagagacatgcccgaccccctgctgaccagagagctgtacaccgccttcatcaacaccctgctgctggagcccgaggagcagctgggcaccctgcagctgctgatctacctgctgcccccctgcaactgcgacaccctgcacagactgctgcagttcctgagcatcgtggccagacacgccgacgacaacatcagcaaggacggccaggaggtgaccggcaacaagatgaccagcctgaacctggccaccatcttcggccccaacctgctgcacaagcagaagagcagcgacaaggagttcagcgtgcagagcagcgccagagccgaggagagcaccgccatcatcgccgtggtgcagaagatgatcgagaactacgaggccctgttcatggtgccccccgacctgcagaacgaggtgctgatcagcctgctggagaccgaccccgacgtggtggactacctgctgagaagaaaggccagccagagcagcagccccgacatgctgcagagcgaggtgagcttcagcgtgggcggcagacacagcagcaccgacagcaacaaggccagcagcggcgacatcagcccctacgacaacaacagccccgtgctgagcgagagaagcctgctggccatgcaggaggacgccgcccccggcggcagcgagaagctgtacagagtgcccggccagttcatgctggtgggccacctgagcagcagcaagagcagagagagcagccccggccccagactgggcaaggacctgagcgaggagcccttcgacatctggggcacctggcacagcaccctgaagagcggcagcaaggaccccggcatgaccggcaccacccccctgctgaacatcagcagccaggaggaccacagacagaaggacctgagactgatcttcaagatctacccctag

SEQ ID NO: 97163 - DNA, 918 bp, synthetic construct
  misc_feature 1..918: note = Description of Artificial Sequence: Synthetic coding sequence
  source 1..918: mol_type = other DNA
atggccggccaggaccccgccctgagcaccagccaccccttctacgacgtggccagacacggcatcctgcaggtggccggcgacgacagattcggcagaagagtggtgaccttcagctgctgcagaatgccccccagccacgagctggaccaccagagactgctggagtacctgaagtacaccctggaccagtacgtggagaacgactacaccatcgtgtacttccactacggcctgaacagcagaaacaagcccagcctgggctggctgcagagcgcctacaaggagttcgacagaaagtacaagaagaacctgaaggccctgtacgtggtgcaccccaccagcttcatcaaggtgctgtggaacatcctgaagcccctgatcagccacaagttcggcaagaaggtgatctacttcaactacctgagcgagctgcacgagcacctgaagtacgaccagctggtgatcccccccgaggtgctgagatacgacgagaagctgcagagcctgcacgagggcagaacccccccccccaccaagacccccccccccagaccccccctgcccacccagcagttcggcgtgagcctgcagtacctgaaggacaagaaccagggcgagctgatcccccccgtgctgagattcaccgtgacctacctgagagagaagggcctgagaaccgagggcctgttcagaagaagcgccagcgtgcagaccgtgagagagatccagagactgtacaaccagggcaagcccgtgaacttcgacgactacggcgacatccacatccccgccgtgatcctgaagaccttcctgagagagctgccccagcccctgctgaccttccaggcctacgagcagatcctgggcatcacctgcgtgcccggcgagcacctgcagcagaacgagcagctgtag

SEQ ID NO: 97164 - DNA, 1302 bp, synthetic construct
  misc_feature 1..1302: note = Description of Artificial Sequence: Synthetic coding sequence
  source 1..1302: mol_type = other DNA
atggccggccaggaccccgccctgagcaccagccaccccttctacgacgtggccagacacggcatcctgcaggtggccggcgacgacagattcggcagaagagtggtgaccttcagctgctgcagaatgccccccagccacgagctggaccaccagagactgctggagtacctgaagtacaccctggaccagtacgtggagaacgactacaccatcgtgtacttccactacggcctgaacagcagaaacaagcccagcctgggctggctgcagagcgcctacaaggagttcgacagaaagtacaagaagaacctgaaggccctgtacgtggtgcaccccaccagcttcatcaaggtgctgtggaacatcctgaagcccctgatcagccacaagttcggcaagaaggtgatctacttcaactacctgagcgagctgcacgagcacctgaagtacgaccagctggtgatcccccccgaggtgctgagatacgacgagaagctgcagagcctgcacgagggcagaacccccccccccaccaagacccccccccccagaccccccctgcccacccagcagttcggcgtgagcctgcagtacctgaaggacaagaaccagggcgagctgatcccccccgtgctgagattcaccgtgacctacctgagagagaagggcctgagaaccgagggcctgttcagaagaagcgccagcgtgcagaccgtgagagagatccagagactgtacaaccagggcaagcccgtgaacttcgacgactacggcgacatccacatccccgccgtgatcctgaagaccttcctgagagagctgccccagcccctgctgaccttccaggcctacgagcagatcctgggcatcacctgcgtggagagcagcctgagagtgaccggctgcagacagatcctgagaagcctgcccgagcacaactacgtggtgctgagatacctgatgggcttcctgcacgccgtgagcagagagagcatcttcaacaagatgaacagcagcaacctggcctgcgtgttcggcctgaacctgatctggcccagccagggcgtgagcagcctgagcgccctggtgcccctgaacatgttcaccgagctgctgatcgagtactacgagaagatcttcagcacccccgaggcccccggcgagcacggcctggccccctgggagcagggcagcagagccgcccccctgcaggaggccgtgcccagaacccaggccaccggcctgaccaagcccaccctgccccccagccccctgatggccgccagaagaagactgtag

SEQ ID NO: 97165 - DNA, 1668 bp, synthetic construct
  misc_feature 1..1668: note = Description of Artificial Sequence: Synthetic coding sequence
  source 1..1668: mol_type = other DNA
atgagcagccccagcctgagcgacctgggcaagagagagcccgccgccgccgccgacgagagaggcacccagcagagaagagcctgcgccaacgccacctggaacagcatccacaacggcgtgatcgccgtgttccagagaaagggcctgcccgaccaggagctgttcagcctgaacgagggcgtgagacagctgctgaagaccgagctgggcagcttcttcaccgagtacctgcagaaccagctgctgaccaagggcatggtgatcctgagagacaagatcagattctacgaggagctgcagagagacaaggccgccgccgccgccgtgctgggcgccgtgagaaagagacccagcgtggtgcccatggccggccaggaccccgccctgagcaccagccaccccttctacgacgtggccagacacggcatcctgcaggtggccggcgacgacagattcggcagaagagtggtgaccttcagctgctgcagaatgccccccagccacgagctggaccaccagagactgctggagtacctgaagtacaccctggaccagtacgtggagaacgactacaccatcgtgtacttccactacggcctgaacagcagaaacaagcccagcctgggctggctgcagagcgcctacaaggagttcgacagaaagtacaagaagaacctgaaggccctgtacgtggtgcaccccaccagcttcatcaaggtgctgtggaacatcctgaagcccctgatcagccacaagttcggcaagaaggtgatctacttcaactacctgagcgagctgcacgagcacctgaagtacgaccagctggtgatcccccccgaggtgctgagatacgacgagaagctgcagagcctgcacgagggcagaacccccccccccaccaagacccccccccccagaccccccctgcccacccagcagttcggcgtgagcctgcagtacctgaaggacaagaaccagggcgagctgatcccccccgtgctgagattcaccgtgacctacctgagagagaagggcctgagaaccgagggcctgttcagaagaagcgccagcgtgcagaccgtgagagagatccagagactgtacaaccagggcaagcccgtgaacttcgacgactacggcgacatccacatccccgccgtgatcctgaagaccttcctgagagagctgccccagcccctgctgaccttccaggcctacgagcagatcctgggcatcacctgcgtggagagcagcctgagagtgaccggctgcagacagatcctgagaagcctgcccgagcacaactacgtggtgctgagatacctgatgggcttcctgcacgccgtgagcagagagagcatcttcaacaagatgaacagcagcaacctggcctgcgtgttcggcctgaacctgatctggcccagccagggcgtgagcagcctgagcgccctggtgcccctgaacatgttcaccgagctgctgatcgagtactacgagaagatcttcagcacccccgaggcccccggcgagcacggcctggccccctgggagcagggcagcagagccgcccccctgcaggaggccgtgcccagaacccaggccaccggcctgaccaagcccaccctgccccccagccccctgatggccgccagaagaagactgtag

SEQ ID NO: 97166 - DNA, 1395 bp, synthetic construct
  misc_feature 1..1395: note = Description of Artificial Sequence: Synthetic coding sequence
  source 1..1395: mol_type = other DNA
atggccggccaggaccccgccctgagcaccagccaccccttctacgacgtggccagacacggcatcctgcaggtggccggcgacgacagattcggcagaagagtggtgaccttcagctgctgcagaatgccccccagccacgagctggaccaccagagactgctggagtacctgaagtacaccctggaccagtacgtggagaacgactacaccatcgtgtacttccactacggcctgaacagcagaaacaagcccagcctgggctggctgcagagcgcctacaaggagttcgacagaaaggacggcgacctgaccatgtggcccagactggtgagcaacagcaagctgaagagaagcagccacctgagcctgcccaagtactgggactacagatacaagaagaacctgaaggccctgtacgtggtgcaccccaccagcttcatcaaggtgctgtggaacatcctgaagcccctgatcagccacaagttcggcaagaaggtgatctacttcaactacctgagcgagctgcacgagcacctgaagtacgaccagctggtgatcccccccgaggtgctgagatacgacgagaagctgcagagcctgcacgagggcagaacccccccccccaccaagacccccccccccagaccccccctgcccacccagcagttcggcgtgagcctgcagtacctgaaggacaagaaccagggcgagctgatcccccccgtgctgagattcaccgtgacctacctgagagagaagggcctgagaaccgagggcctgttcagaagaagcgccagcgtgcagaccgtgagagagatccagagactgtacaaccagggcaagcccgtgaacttcgacgactacggcgacatccacatccccgccgtgatcctgaagaccttcctgagagagctgccccagcccctgctgaccttccaggcctacgagcagatcctgggcatcacctgcgtggagagcagcctgagagtgaccggctgcagacagatcctgagaagcctgcccgagcacaactacgtggtgctgagatacctgatgggcttcctgcacgccgtgagcagagagagcatcttcaacaagatgaacagcagcaacctggcctgcgtgttcggcctgaacctgatctggcccagccagggcgtgagcagcctgagcgccctggtgcccctgaacatgttcaccgagctgctgatcgagtactacgagaagatcttcagcacccccgaggcccccggcgagcacggcctggccccctgggagcagggcagcagagccgcccccctgcaggaggccgtgcccagaacccaggccaccggcctgaccaagcccaccctgccccccagccccctgatggccgccagaagaagactgtag

SEQ ID NO: 97167 - DNA, 393 bp, synthetic construct
  misc_feature 1..393: note = Description of Artificial Sequence: Synthetic coding sequence
  source 1..393: mol_type = other DNA
atggccggccaggaccccgccctgagcaccagccaccccttctacgacgtggccagacacggcatcctgcaggtggccggcgacgacagattcggcagaagagtggtgaccttcagctgctgcagaatgccccccagccacgagctggaccaccagagactgctggagtacctgaagtacaccctggaccagtacgtggagaacgactacaccatcgtgtacttccactacggcctgaacagcagaaacaagcccagcctgggctggctgcagagcgcctacaaggagttcgacagaaaggacggcgacctgaccatgtggcccagactggtgagcaacagcaagctgaagagaagcagccacctgagcctgcccaagtactgggactactag

SEQ ID NO: 97168 - DNA, 348 bp, synthetic construct
  misc_feature 1..348: note = Description of Artificial Sequence: Synthetic coding sequence
  source 1..348: mol_type = other DNA
atggccggccaggaccccgccctgagcaccagccaccccttctacgacgtggccagacacggcatcctgcaggtggccggcgacgacagattcggcagaagagtggtgaccttcagctgctgcagaatgccccccagccacgagctggaccaccagagactgctggagtacctgaagtacaccctggaccagtacgtggagaacgactacaccatcgtgtacttccactacggcctgaacagcagaaacaagcccagcctgggctggctgcagagcgcctacaaggagttcgacagaaagtacaagaagaacctgaaggccctgtacgtggtgcaccccaccagctag

SEQ ID NO: 97169 - DNA, 1932 bp, synthetic construct
  misc_feature 1..1932: note = Description of Artificial Sequence: Synthetic coding sequence
  source 1..1932: mol_type = other DNA
atgagaaccctgagaagactgaagttcatgagcagccccagcctgagcgacctgggcaagagagagcccgccgccgccgccgacgagagaggcacccagcagagaagagcctgcgccaacgccacctggaacagcatccacaacggcgtgatcgccgtgttccagagaaagggcctgcccgaccaggagctgttcagcctgaacgagggcgtgagacagctgctgaagaccgagctgggcagcttcttcaccgagtacctgcagaaccagctgctgaccaagggcatggtgatcctgagagacaagatcagattctacgagggccagaagctgctggacagcctggccgagacctgggacttcttcttcagcgacgtgctgcccatgctgcaggccatcttctaccccgtgcagggcaaggagcccagcgtgagacagctggccctgctgcacttcagaaacgccatcaccctgagcgtgaagctggaggacgccctggccagagcccacgccagagtgccccccgccatcgtgcagatgctgctggtgctgcagggcgtgcacgagagcagaggcgtgaccgaggactacctgagactggagaccctggtgcagaaggtggtgagcccctacctgggcacctacggcctgcacagcagcgagggccccttcacccacagctgcatcctggagctgcagagagacaaggccgccgccgccgccgtgctgggcgccgtgagaaagagacccagcgtggtgcccatggccggccaggaccccgccctgagcaccagccaccccttctacgacgtggccagacacggcatcctgcaggtggccggcgacgacagattcggcagaagagtggtgaccttcagctgctgcagaatgccccccagccacgagctggaccaccagagactgctggagtacaagaagaacctgaaggccctgtacgtggtgcaccccaccagcttcatcaaggtgctgtggaacatcctgaagcccctgatcagccacaagttcggcaagaaggtgatctacttcaactacctgagcgagctgcacgagcacctgaagtacgaccagctggtgatcccccccgaggtgctgagatacgacgagaagctgcagagcctgcacgagggcagaacccccccccccaccaagacccccccccccagaccccccctgcccacccagcagttcggcgtgagcctgcagtacctgaaggacaagaaccagggcgagctgatcccccccgtgctgagattcaccgtgacctacctgagagagaagggcctgagaaccgagggcctgttcagaagaagcgccagcgtgcagaccgtgagagagatccagagactgtacaaccagggcaagcccgtgaacttcgacgactacggcgacatccacatccccgccgtgatcctgaagaccttcctgagagagctgccccagcccctgctgaccttccaggcctacgagcagatcctgggcatcacctgcgtggagagcagcctgagagtgaccggctgcagacagatcctgagaagcctgcccgagcacaactacgtggtgctgagatacctgatgggcttcctgcacgccgtgagcagagagagcatcttcaacaagatgaacagcagcaacctggcctgcgtgttcggcctgaacctgatctggcccagccagggcgtgagcagcctgagcgccctggtgcccctgaacatgttcaccgagctgctgatcgagtactacgagaagatcttcagcacccccgaggcccccggcgagcacggcctggccccctgggagcagggcagcagagccgcccccctgcaggaggccgtgcccagaacccaggccaccggcctgaccaagcccaccctgccccccagccccctgatggccgccagaagaagactgtag

SEQ ID NO: 97170 - DNA, 2322 bp, synthetic construct
  misc_feature 1..2322: note = Description of Artificial Sequence: Synthetic coding sequence
  source 1..2322: mol_type = other DNA
cagacccagaccgagagcctgaccctgtgcagcggcgaggccgagagaagaggcaaggaggagtggcccgacagccaccactaccccggccccacccccgcccccgagagcagcgacggcccccacaaggtgaccgtgctggccaccatgctgagcagcagatggtggcccagcagctggggcatcctgggcctgggccccagaagcccccccagaggcagccagctgtgcgccctgtacgccttcacctacaccggcgccgacggccagcaggtgagcctggccgagggcgacagattcctgctgctgagaaagaccaacagcgactggtggctggccagaagactggaggcccccagcaccagcagacccatcttcgtgcccgccgcctacatgatcgaggagagcatccccagccagagccccaccaccgtgatccccggccagctgctgtggacccccggccccaagctgttccacggcagcctggaggagctgagccaggccctgcccagcagagcccaggccagcagcgagcagcccccccccctgcccagaaagatgtgcagaagcgtgagcaccgacaacctgagccccagcctgctgaagcccttccaggagggccccagcggcagaagcctgagccaggaggacctgcccagcgaggccagcgccagcaccgccggcccccagcccctgatgagcgagccccccgtgtactgcaacctggtggacctgagaagatgccccagaagccccccccccggccccgcctgccccctgctgcagagactggacgcctgggagcagcacctggaccccaacagcggcagatgcttctacatcaacagcctgaccggctgcaagagctggaagccccccagaagaagcagaagcgagaccaaccccggcagcatggagggcacccagaccctgaagagaaacaacgacgtgctgcagccccaggccaagggcttcagaagcgacaccggcacccccgagcccctggacccccagggcagcctgagcctgagccagagaaccagccagctggacccccccgccctgcaggcccccagacccctgccccagctgctggacgacccccacgaggtggagaagagcggcctgctgaacatgaccaagatcgcccagggcggcagaaagctgagaaagaactggggccccagctgggtggtgctgaccggcaacagcctggtgttctacagagagcccccccccaccgcccccagcagcggctggggccccgccggcagcagacccgagagcagcgtggacctgagaggcgccgccctggcccacggcagacacctgagcagcagaagaaacgtgctgcacatcagaaccatccccggccacgagttcctgctgcagagcgaccacgagaccgagctgagagcctggcacagagccctgagaaccgtgatcgagagactggacagagagaaccccctggagctgagactgagcggcagcggccccgccgagctgagcgccggcgaggacgaggaggaggagagcgagctggtgagcaagcccctgctgagactgagcagcagaagaagcagcatcagaggccccgagggcaccgagcagaacagagtgagaaacaagctgaagagactgatcgccaagagaccccccctgcagagcctgcaggagagaggcctgctgagagaccaggtgttcggctgccagctggagagcctgtgccagagagagggcgacaccgtgcccagcttcctgagactgtgcatcgccgccgtggacaagagaggcctggacgtggacggcatctacagagtgagcggcaacctggccgtggtgcagaagctgagattcctggtggacagagagagagccgtgaccagcgacggcagatacgtgttccccgagcagcccggccaggagggcagactggacctggacagcaccgagtgggacgacatccacgtggtgaccggcgccctgaagctgttcctgagagagctgccccagcccctggtgccccccctgctgctgccccacttcagagccgccctggccctgagccagatccaggagctgatcggcagcatgcccaagcccaaccacgacaccctgagatacctgctggagcacctgtgcagagtgatcgcccacagcgacaagaacagaatgaccccccacaacctgggcatcgtgttcggccccaccctgttcagacccgagcaggagaccagcgaccccgccgcccacgccctgtaccccggccagctggtgcagctgatgctgaccaacttcaccagcctgttcccctag

SEQ ID NO: 97171 - DNA, 2253 bp, synthetic construct
  misc_feature 1..2253: note = Description of Artificial Sequence: Synthetic coding sequence
  source 1..2253: mol_type = other DNA
atgctgagcagcagatggtggcccagcagctggggcatcctgggcctgggccccagaagcccccccagaggcagccagctgtgcgccctgtacgccttcacctacaccggcgccgacggccagcaggtgagcctggccgagggcgacagattcctgctgctgagaaagaccaacagcgactggtggctggccagaagactggaggcccccagcaccagcagacccatcttcgtgcccgccgcctacatgatcgaggagagcatccccagccagagccccaccaccgtgatccccggccagctgctgtggacccccggccccaagctgttccacggcagcctggaggagctgagccaggccctgcccagcagagcccaggccagcagcgagcagcccccccccctgcccagaaagatgtgcagaagcgtgagcaccgacaacctgagccccagcctgctgaagcccttccaggagggccccagcggcagaagcctgagccaggaggacctgcccagcgaggccagcgccagcaccgccggcccccagcccctgatgagcgagccccccgtgtactgcaacctggtggacctgagaagatgccccagaagccccccccccggccccgcctgccccctgctgcagagactggacgcctgggagcagcacctggaccccaacagcggcagatgcttctacatcaacagcctgaccggctgcaagagctggaagccccccagaagaagcagaagcgagaccaaccccggcagcatggagggcacccagaccctgaagagaaacaacgacgtgctgcagccccaggccaagggcttcagaagcgacaccggcacccccgagcccctggacccccagggcagcctgagcctgagccagagaaccagccagctggacccccccgccctgcaggcccccagacccctgccccagctgctggacgacccccacgaggtggagaagagcggcctgctgaacatgaccaagatcgcccagggcggcagaaagctgagaaagaactggggccccagctgggtggtgctgaccggcaacagcctggtgttctacagagagcccccccccaccgcccccagcagcggctggggccccgccggcagcagacccgagagcagcgtggacctgagaggcgccgccctggcccacggcagacacctgagcagcagaagaaacgtgctgcacatcagaaccatccccggccacgagttcctgctgcagagcgaccacgagaccgagctgagagcctggcacagagccctgagaaccgtgatcgagagactggtgagatgggtggaggccagaagagaggcccccaccggcagagaccagggcagcggcgacagagagaaccccctggagctgagactgagcggcagcggccccgccgagctgagcgccggcgaggacgaggaggaggagagcgagctggtgagcaagcccctgctgagactgagcagcagaagaagcagcatcagaggccccgagggcaccgagcagaacagagtgagaaacaagctgaagagactgatcgccaagagaccccccctgcagagcctgcaggagagaggcctgctgagagaccaggtgttcggctgccagctggagagcctgtgccagagagagggcgacaccgtgcccagcttcctgagactgtgcatcgccgccgtggacaagagaggcctggacgtggacggcatctacagagtgagcggcaacctggccgtggtgcagaagctgagattcctggtggacagagagagagccgtgaccagcgacggcagatacgtgttccccgagcagcccggccaggagggcagactggacctggacagcaccgagtgggacgacatccacgtggtgaccggcgccctgaagctgttcctgagagagctgccccagcccctggtgccccccctgctgctgccccacttcagagccgccctggccctgagcgagagcgagcagtgcctgagccagatccaggagctgatcggcagcatgcccaagcccaaccacgacaccctgagatacctgctggagcacctgtgcagagtgatcgcccacagcgacaagaacagaatgaccccccacaacctgggcatcgtgttcggccccaccctgttcagacccgagcaggagaccagcgaccccgccgcccacgccctgtaccccggccagctggtgcagctgatgctgaccaacttcaccagcctgttcccctag

SEQ ID NO: 97172 - DNA, 2196 bp, synthetic construct
  misc_feature 1..2196: note = Description of Artificial Sequence: Synthetic coding sequence
  source 1..2196: mol_type = other DNA
atgctgagcagcagatggtggcccagcagctggggcatcctgggcctgggccccagaagcccccccagaggcagccagctgtgcgccctgtacgccttcacctacaccggcgccgacggccagcaggtgagcctggccgagggcgacagattcctgctgctgagaaagaccaacagcgactggtggctggccagaagactggaggcccccagcaccagcagacccatcttcgtgcccgccgcctacatgatcgaggagagcatccccagccagagccccaccaccgtgatccccggccagctgctgtggacccccggccccaagctgttccacggcagcctggaggagctgagccaggccctgcccagcagagcccaggccagcagcgagcagcccccccccctgcccagaaagatgtgcagaagcgtgagcaccgacaacctgagccccagcctgctgaagcccttccaggagggccccagcggcagaagcctgagccaggaggacctgcccagcgaggccagcgccagcaccgccggcccccagcccctgatgagcgagccccccgtgtactgcaacctggtggacctgagaagatgccccagaagccccccccccggccccgcctgccccctgctgcagagactggacgcctgggagcagcacctggaccccaacagcggcagatgcttctacatcaacagcctgaccggctgcaagagctggaagccccccagaagaagcagaagcgagaccaaccccggcagcatggagggcacccagaccctgaagagaaacaacgacgtgctgcagccccaggccaagggcttcagaagcgacaccggcacccccgagcccctggacccccagggcagcctgagcctgagccagagaaccagccagctggacccccccgccctgcaggcccccagacccctgccccagctgctggacgacccccacgaggtggagaagagcggcctgctgaacatgaccaagatcgcccagggcggcagaaagctgagaaagaactggggccccagctgggtggtgctgaccggcaacagcctggtgttctacagagagcccccccccaccgcccccagcagcggctggggccccgccggcagcagacccgagagcagcgtggacctgagaggcgccgccctggcccacggcagacacctgagcagcagaagaaacgtgctgcacatcagaaccatccccggccacgagttcctgctgcagagcgaccacgagaccgagctgagagcctggcacagagccctgagaaccgtgatcgagagactggacagagagaaccccctggagctgagactgagcggcagcggccccgccgagctgagcgccggcgaggacgaggaggaggagagcgagctggtgagcaagcccctgctgagactgagcagcagaagaagcagcatcagaggccccgagggcaccgagcagaacagagtgagaaacaagctgaagagactgatcgccaagagaccccccctgcagagcctgcaggagagaggcctgctgagagaccaggtgttcggctgccagctggagagcctgtgccagagagagggcgacaccgtgcccagcttcctgagactgtgcatcgccgccgtggacaagagaggcctggacgtggacggcatctacagagtgagcggcaacctggccgtggtgcagaagctgagattcctggtggacagagagagagccgtgaccagcgacggcagatacgtgttccccgagcagcccggccaggagggcagactggacctggacagcaccgagtgggacgacatccacgtggtgaccggcgccctgaagctgttcctgagagagctgccccagcccctggtgccccccctgctgctgccccacttcagagccgccctggccctgagcgagagcgagcagtgcctgagccagatccaggagctgatcggcagcatgcccaagcccaaccacgacaccctgagatacctgctggagcacctgtgcagagtgatcgcccacagcgacaagaacagaatgaccccccacaacctgggcatcgtgttcggccccaccctgttcagacccgagcaggagaccagcgaccccgccgcccacgccctgtaccccggccagctggtgcagctgatgctgaccaacttcaccagcctgttcccctag

SEQ ID NO: 97173 - DNA, 2466 bp, synthetic construct
  misc_feature 1..2466: note = Description of Artificial Sequence: Synthetic coding sequence
  source 1..2466: mol_type = other DNA
atgagaagaggcagcagcgacagctgcgccagcggcagccaggtggccggcaccaccgtggccggccccgcccaccccgagagcctgaccctgtgcagcggcgaggccgagagaagaggcaaggaggagtggcccgacagccaccactaccccggccccacccccgcccccgagagcagcgacggcccccacaaggtgaccgtgctggccaccatgctgagcagcagatggtggcccagcagctggggcatcctgggcctgggccccagaagcccccccagaggcagccagctgtgcgccctgtacgccttcacctacaccggcgccgacggccagcaggtgagcctggccgagggcgacagattcctgctgctgagaaagaccaacagcgactggtggctggccagaagactggaggcccccagcaccagcagacccatcttcgtgcccgccgcctacatgatcgaggagagcatccccagccagagccccaccaccgtgatccccggccagctgctgtggacccccggccccaagctgttccacggcagcctggaggagctgagccaggccctgcccagcagagcccaggccagcagcgagcagcccccccccctgcccagaaagatgtgcagaagcgtgagcaccgacaacctgagccccagcctgctgaagcccttccaggagggccccagcggcagaagcctgagccaggaggacctgcccagcgaggccagcgccagcaccgccggcccccagcccctgatgagcgagccccccgtgtactgcaacctggtggacctgagaagatgccccagaagccccccccccggccccgcctgccccctgctgcagagactggacgcctgggagcagcacctggaccccaacagcggcagatgcttctacatcaacagcctgaccggctgcaagagctggaagccccccagaagaagcagaagcgagaccaaccccggcagcatggagggcacccagaccctgaagagaaacaacgacgtgctgcagccccaggccaagggcttcagaagcgacaccggcacccccgagcccctggacccccagggcagcctgagcctgagccagagaaccagccagctggacccccccgccctgcaggcccccagacccctgccccagctgctggacgacccccacgaggtggagaagagcggcctgctgaacatgaccaagatcgcccagggcggcagaaagctgagaaagaactggggccccagctgggtggtgctgaccggcaacagcctggtgttctacagagagcccccccccaccgcccccagcagcggctggggccccgccggcagcagacccgagagcagcgtggacctgagaggcgccgccctggcccacggcagacacctgagcagcagaagaaacgtgctgcacatcagaaccatccccggccacgagttcctgctgcagagcgaccacgagaccgagctgagagcctggcacagagccctgagaaccgtgatcgagagactggtgagatgggtggaggccagaagagaggcccccaccggcagagaccagggcagcggcgacagagagaaccccctggagctgagactgagcggcagcggccccgccgagctgagcgccggcgaggacgaggaggaggagagcgagctggtgagcaagcccctgctgagactgagcagcagaagaagcagcatcagaggccccgagggcaccgagcagaacagagtgagaaacaagctgaagagactgatcgccaagagaccccccctgcagagcctgcaggagagaggcctgctgagagaccaggtgttcggctgccagctggagagcctgtgccagagagagggcgacaccgtgcccagcttcctgagactgtgcatcgccgccgtggacaagagaggcctggacgtggacggcatctacagagtgagcggcaacctggccgtggtgcagaagctgagattcctggtggacagagagagagccgtgaccagcgacggcagatacgtgttccccgagcagcccggccaggagggcagactggacctggacagcaccgagtgggacgacatccacgtggtgaccggcgccctgaagctgttcctgagagagctgccccagcccctggtgccccccctgctgctgccccacttcagagccgccctggccctgagcgagagcgagcagtgcctgagccagatccaggagctgatcggcagcatgcccaagcccaaccacgacaccctgagatacctgctggagcacctgtgcagagtgatcgcccacagcgacaagaacagaatgaccccccacaacctgggcatcgtgttcggccccaccctgttcagacccgagcaggagaccagcgaccccgccgcccacgccctgtaccccggccagctggtgcagctgatgctgaccaacttcaccagcctgttcccctag

SEQ ID NO: 97174 - DNA, 900 bp, synthetic construct
  misc_feature 1..900: note = Description of Artificial Sequence: Synthetic coding sequence
  source 1..900: mol_type = other DNA
atgaccaagatcgcccagggcggcagaaagctgagaaagaactggggccccagctgggtggtgctgaccggcaacagcctggtgttctacagagagcccccccccaccgcccccagcagcggctggggccccgccggcagcagacccgagagcagcgtggacctgagaggcgccgccctggcccacggcagacacctgagcagcagaagaaacgtgctgcacatcagaaccatccccggccacgagttcctgctgcagagcgaccacgagaccgagctgagagcctggcacagagccctgagaaccgtgatcgagagactggacagagagaaccccctggagctgagactgagcggcagcggccccgccgagctgagcgccggcgaggacgaggaggaggagagcgagctggtgagcaagcccctgctgagactgagcagcagaagaagcagcatcagaggccccgagggcaccgagcagaacagagtgagaaacaagctgaagagactgatcgccaagagaccccccctgcagagcctgcaggagagaggcctgctgagagaccaggtgttcggctgccagctggagagcctgtgccagagagagggcgacaccgtgcccagcttcctgagactgtgcatcgccgccgtggacaagagaggcctggacgtggacggcatctacagagtgagcggcaacctggccgtggtgcagaagctgagattcctggtggacagagagagagccgtgaccagcgacggcagatacgtgttccccgagcagcccggccaggccctgagcgagagcgagcagtgcctgagccagatccaggagctgatcggcagcatgcccaagcccaaccacgacaccctgagatacctgctggagcacctgtgctag

SEQ ID NO: 97175 - DNA, 1923 bp, synthetic construct
  misc_feature 1..1923: note = Description of Artificial Sequence: Synthetic coding sequence
  source 1..1923: mol_type = other DNA
atgctgagcagcagatggtggcccagcagctggggcatcctgggcctgggccccagaagcccccccagaggcagccagctgtgcgccctgtacgccttcacctacaccggcgccgacggccagcaggtgagcctggccgagggcgacagattcctgctgctgagaaagaccaacagcgactggtggctggccagaagactggaggcccccagcaccagcagacccatcttcgtgcccgccgcctacatgatcgaggagagcatccccagccagagccccaccaccgtgatccccggccagctgctgtggacccccggccccaagctgttccacggcagcctggaggagctgagccaggccctgcccagcagagcccaggccagcagcgagcagcccccccccctgcccagaaagatgtgcagaagcgtgagcaccgacaacctgagccccagcctgctgaagcccttccaggagggccccagcggcagaagcctgagccaggaggacctgcccagcgaggccagcgccagcaccgccggcccccagcccctgatgagcgagccccccgtgtactgcaacctggtggacctgagaagatgccccagaagccccccccccggccccgcctgccccctgctgcagagactggacgcctgggagcagcacctggaccccaacagcggcagatgcttctacatcaacagcctgaccggctgcaagagctggaagccccccagaagaagcagaagcgagaccaaccccggcagcatggagggcacccagaccctgaagagaaacaacgacgtgctgcagccccaggccaagggcttcagaagcgacaccggcacccccgagcccctggacccccagggcagcctgagcctgagccagagaaccagccagctggacccccccgccctgcaggcccccagacccctgccccagctgctggacgacccccacgaggtggagaagagcggcctgctgaacatgaccaagatcgcccagggcggcagaaagctgagaaagaactggggccccagctgggtggtgctgaccggcaacagcctggtgttctacagagagcccccccccaccgcccccagcagcggctggggccccgccggcagcagacccgagagcagcgtggacctgagaggcgccgccctggcccacggcagacacctgagcagcagaagaaacgtgctgcacatcagaaccatccccggccacgagttcctgctgcagagcgaccacgagaccgagctgagagcctggcacagagccctgagaaccgtgatcgagagactggacagagagaaccccctggagctgagactgagcggcagcggccccgccgagctgagcgccggcgaggacgaggaggaggagagcgagctggtgagcaagcccctgctgagactgagcagcagaagaagcagcatcagaggccccgagggcaccgagcagaacagagtgagaaacaagctgaagagactgatcgccaagagaccccccctgcagagcctgcaggagagaggcctgctgagagaccaggtgttcggctgccagctggagagcctgtgccagagagagggcgacaccgtgcccagcttcctgagactgtgcatcgccgccgtggacaagagaggcctggacgtggacggcatctacagagtgagcggcaacctggccgtggtgcagaagctgagattcctggtggacagagagagagccgtgaccagcgacggcagatacgtgttccccgagcagcccggccaggagggcagactggacctggacagcaccgagtgggacgacatccacgtggtgaccggcgccctgaagctgttcctgagagagctgccccagcccctggtgccccccctgctgctgccccacttcagagccgccctgggctag

SEQ ID NO: 97176 - DNA, 1644 bp, synthetic construct
  misc_feature 1..1644: note = Description of Artificial Sequence: Synthetic coding sequence
  source 1..1644: mol_type = other DNA
atgagcgagccccccgtgtactgcaacctggtggacctgagaagatgccccagaagccccccccccggccccgcctgccccctgctgcagagactggacgcctgggagcagcacctggaccccaacagcggcagatgcttctacatcaacagcctgaccggctgcaagagctggaagccccccagaagaagcagaagcgagaccaaccccggcagcatggagggcacccagaccctgaagagaaacaacgacgtgctgcagccccaggccaagggcttcagaagcgacaccggcacccccgagcccctggacccccagggcagcctgagcctgagccagagaaccagccagctggacccccccgccctgcaggcccccagacccctgccccagctgctggacgacccccacgaggtggagaagagcggcctgctgaacatgaccaagatcgcccagggcggcagaaagctgagaaagaactggggccccagctgggtggtgctgaccggcaacagcctggtgttctacagagagcccccccccaccgcccccagcagcggctggggccccgccggcagcagacccgagagcagcgtggacctgagaggcgccgccctggcccacggcagacacctgagcagcagaagaaacgtgctgcacatcagaaccatccccggccacgagttcctgctgcagagcgaccacgagaccgagctgagagcctggcacagagccctgagaaccgtgatcgagagactggacagagagaaccccctggagctgagactgagcggcagcggccccgccgagctgagcgccggcgaggacgaggaggaggagagcgagctggtgagcaagcccctgctgagactgagcagcagaagaagcagcatcagaggccccgagggcaccgagcagaacagagtgagaaacaagctgaagagactgatcgccaagagaccccccctgcagagcctgcaggagagaggcctgctgagagaccaggtgttcggctgccagctggagagcctgtgccagagagagggcgacaccgtgcccagcttcctgagactgtgcatcgccgccgtggacaagagaggcctggacgtggacggcatctacagagtgagcggcaacctggccgtggtgcagaagctgagattcctggtggacagagagagagccgtgaccagcgacggcagatacgtgttccccgagcagcccggccaggagggcagactggacctggacagcaccgagtgggacgacatccacgtggtgaccggcgccctgaagctgttcctgagagagctgccccagcccctggtgccccccctgctgctgccccacttcagagccgccctggccctgagcgagagcgagcagtgcctgagccagatccaggagctgatcggcagcatgcccaagcccaaccacgacaccctgagatacctgctggagcacctgtgcagagtgatcgcccacagcgacaagaacagaatgaccccccacaacctgggcatcgtgttcggccccaccctgttcagacccgagcaggagaccagcgaccccgccgcccacgccctgtaccccggccagctggtgcagctgatgctgaccaacttcaccagcctgttcccctag

SEQ ID NO: 97177 - DNA, 894 bp, synthetic construct
  misc_feature 1..894: note = Description of Artificial Sequence: Synthetic coding sequence
  source 1..894: mol_type = other DNA
atgagcgagccccccgtgtactgcaacctggtggacctgagaagatgccccagaagccccccccccggccccgcctgccccctgctgcagagactggacgcctgggagcagcacctggaccccaacagcggcagatgcttctacatcaacagcctgaccggctgcaagagctggaagccccccagaagaagcagaagcgagaccaaccccggcagcatggagggcacccagaccctgaagagaaacaacgacgtgctgcagccccaggccaagggcttcagaagcgacaccggcacccccgagcccctggacccccagggcagcctgagcctgagccagagaaccagccagctggacccccccgccctgcaggcccccagacccctgccccagctgctggacgacccccacgaggtggagaagagcggcctgctgaacatgaccaagatcgcccagggcggcagaaagctgagaaagaactggggccccagctgggtggtgctgaccggcaacagcctggtgttctacagagagcccccccccaccgcccccagcagcggctggggccccgccggcagcagacccgagagcagcgtggacctgagaggcgccgccctggcccacggcagacacctgagcagcagaagaaacgtgctgcacatcagaaccatccccggccacgagttcctgctgcagagcgaccacgagaccgagctgagagcctggcacagagccctgagaaccgtgatcgagagactggacagagagaaccccctggagctgagactgagcggcagcggccccgccgagctgagcgccggcgaggacgaggaggaggagagcgagctggtgagcaagcccctgctgagactgagcagcagaagaagcagctag

SEQ ID NO: 97178 - DNA, 186 bp, synthetic construct
  misc_feature 1..186: note = Description of Artificial Sequence: Synthetic coding sequence
  source 1..186: mol_type = other DNA
atgagcgagccccccgtgtactgcaacctggtggacctgagaagatgccccagaagccccccccccggccccgcctgccccctgctgcagagactggacgcctgggagcagcacctggaccccaacagcggcagatgcttctacatcaacagcctgaccggctgcaagagctggaagcccccctag

SEQ ID NO: 97179 - DNA, 471 bp, synthetic construct
  misc_feature 1..471: note = Description of Artificial Sequence: Synthetic coding sequence
  source 1..471: mol_type = other DNA
tgagagggcgacaccgtgcccagcttcctgagactgtgcatcgccgccgtggacaagagaggcctggacgtggacggcatctacagagtgagcggcaacctggccgtggtgcagaagctgagattcctggtggacagagagagagccgtgaccagcgacggcagatacgtgttccccgagcagcccggccaggccctgagcgagagcgagcagtgcctgagccagatccaggagctgatcggcagcatgcccaagcccaaccacgacaccctgagatacctgctggagcacctgtgcagagtgatcgcccacagcgacaagaacagaatgaccccccacaacctgggcatcgtgttcggccccaccctgttcagacccgagcaggagaccagcgaccccgccgcccacgccctgtaccccggccagctggtgcagctgatgctgaccaacttcaccagcctgttcccctag

SEQ ID NO: 97180 - DNA, 396 bp, synthetic construct
  misc_feature 1..396: note = Description of Artificial Sequence: Synthetic coding sequence
  source 1..396: mol_type = other DNA
atgagcgagccccccgtgtactgcaacctggtggacctgagaagatgccccagaagccccccccccggccccgcctgccccctgctgcagagactggacgcctgggagcagcacctggaccccaacagcggcagatgcttctacatcaacagcctgaccggctgcaagagctggaagccccccagaagaagcagaagcgagaccaaccccggcagcatggagggcacccagaccctgaagagaaacaacgacgtgctgcagccccaggccaagggcttcagaagcgacaccggcacccccgagcccctggacccccagggcagcctgagcctgagccagagaaccagccagctggacccccccgccctgcaggcccccagacccctgccccagtag

SEQ ID NO: 97181 - DNA, 2028 bp, synthetic construct
  misc_feature 1..2028: note = Description of Artificial Sequence: Synthetic coding sequence
  source 1..2028: mol_type = other DNA
gagcccggcagcggcagcagagaccccggccccggcatcgccgagcccgacctgggcagacccgccggccacctgagagccgacaccagccccgccgagcccagagagatggaggacttcgccagaggcgccgccagccccggccccagcagacccggcctggtgcccgtgagcatcatcggcgccgaggacgaggacttcgagaacgagctggagaccaacagcgaggagcagaacagccagttccagagcctggagcaggtgaagagaagacccgcccacctgatggccctgctgcagcacgtggccctgcagttcgagcccggccccctgctgtgctgcctgcacgccgacatgctgggcagcctgggccccaaggaggccaagaaggccttcctggacttctaccacagcttcctggagaagaccgccgtgctgagagtgcccgtgccccccaacgtggccttcgagctggacagaaccagagccgacctgatcagcgaggacgtgcagagaagattcgtgcaggaggtggtgcagagccagcaggtggccgtgggcagacagctggaggacttcagaagcaagagactgatgggcatgaccccctgggagcaggagctggcccagctggaggcctgggtgggcagagacagagccagctacgaggccagagagagacacgtggccgagagactgctgatgcacctggaggagatgcagcacaccatcagcaccgacgaggagaagagcgccgccgtggtgaacgccatcggcctgtacatgagacacctgggcgtgagaaccaagagcggcgacaagaagagcggcagaaacttcttcagaaagaaggtgatgggcaacagaagaagcgacgagcccgccaagaccaagaagggcctgagcagcatcctggacgccgccagatggaacagaggcgagccccaggtgcccgacttcagacacctgaaggccgaggtggacgccgagaagcccggcgccaccgacagaaagggcggcgtgggcatgcccagcagagacagaaacatcggcgcccccggccaggacacccccggcgtgagcctgcaccccctgagcctggacagccccgacagagagcccggcgccgacgcccccctggagctgggcgacagcagcccccagggccccatgagcctggagagcctggccccccccgagagcaccgacgagggcgccgagaccgagagatgccccggctggggcgccggcgccggcggcgtggcctactgggccctggtgggcggctgcagagtgaccgccgccatctgcgcctgcctgagccaggccctggccccccacgcccccctgctgctgagcggcagcggccacagcagccccttcttcttccccttcctgatcagcctgctgctgccccactgcccccccttcctgctgagcttcctgttccccctgctgctgcccctgctgcccttcttcaccaaccccagccccccccccttcctgagcaccacccccagcatcagcttcatcagcagccccctgctgagccacctgcccccccccctgttccccccccacagcagcctgacctgggtgttcttcccccacctgcccagccccagcgacctgcccgccaccttccacttcttcagccccagccccttcagcttcaagcccccctgccccctgccccccacccccagactggcccccgccagctggtgccccagcctgaaccccccccccctgtgcagcgtgccctggggcccctgccccccctacagctggggcgccggcagcgccagctgccccagcctgtgcagatgcttcggcgaccccctggtgggcgccggcagatgggtgagattccacctgggcccccccctgaccctgtgccccagcctgcccagaagatggaagagatgggtgcccggcccctgggtgggcgagggcctggcccccccccccttcctgcccgccccccccctgagcccctggcccctgccccccctgcacagcctgtag

SEQ ID NO: 97182 - DNA, 2784 bp, synthetic construct
  misc_feature 1..2784: note = Description of Artificial Sequence: Synthetic coding sequence
  source 1..2784: mol_type = other DNA
atggccagcctgagcacctggagcagccccgccgagcccagagagatggaggacttcgccagaggcgccgccagccccggccccagcagacccggcctggtgcccgtgagcatcatcggcgccgaggacgaggacttcgagaacgagctggagaccaacagcgaggagcagaacagccagttccagagcctggagcaggtgaagagaagacccgcccacctgatggccctgctgcagcacgtggccctgcagttcgagcccggccccctgctgtgctgcctgcacgccgacatgctgggcagcctgggccccaaggaggccaagaaggccttcctggacttctaccacagcttcctggagaagaccgccgtgctgagagtgcccgtgccccccaacgtggccttcgagctggacagaaccagagccgacctgatcagcgaggacgtgcagagaagattcgtgcaggaggtggtgcagagccagcaggtggccgtgggcagacagctggaggacttcagaagcaagagactgatgggcatgaccccctgggagcaggagctggcccagctggaggcctgggtgggcagagacagagccagctacgaggccagagagagacacgtggccgagagactgctgatgcacctggaggagatgcagcacaccatcagcaccgacgaggagaagagcgccgccgtggtgaacgccatcggcctgtacatgagacacctgggcgtgagaaccaagagcggcgacaagaagagcggcagaaacttcttcagaaagaaggtgatgggcaacagaagaagcgacgagcccgccaagaccaagaagggcctgagcagcatcctggacgccgccagatggaacagaggcgagccccaggtgcccgacttcagacacctgaaggccgaggtggacgccgagaagcccggcgccaccgacagaaagggcggcgtgggcatgcccagcagagacagaaacatcggcgcccccggccaggacacccccggcgtgagcctgcaccccctgagcctggacagccccgacagagagcccggcgccgacgcccccctggagctgggcgacagcagcccccagggccccatgagcctggagagcctggccccccccgagagcaccgacgagggcgccgagaccgagagccccgagcccggcgacgagggcgagcccggcagaagcggcctggagctggagcccgaggagccccccggctggagagagctggtgccccccgacaccctgcacagcctgcccaagagccaggtgaagagacaggaggtgatcagcgagctgctggtgaccgaggccgcccacgtgagaatgctgagagtgctgcacgacctgttcttccagcccatggccgagtgcctgttcttccccctggaggagctgcagaacatcttccccagcctggacgagctgatcgaggtgcacagcctgttcctggacagactgatgaagagaagacaggagagcggctacctgatcgaggagatcggcgacgtgctgctggccagattcgacggcgccgagggcagctggttccagaagatcagcagcagattctgcagcagacagagcttcgccctggagcagctgaaggccaagcagagaaaggaccccagattctgcgccttcgtgcaggaggccgagagcagacccagatgcagaagactgcagctgaaggacatgatccccaccgagatgcagagactgaccaagtaccccctgctgctgcagagcatcggccagaacaccgaggagcccaccgagagagagaaggtggagctggccgccgagtgctgcagagagatcctgcaccacgtgaaccaggccgtgagagacatggaggacctgctgagactgaaggactaccagagaagactggacctgagccacctgagacagagcagcgaccccatgctgagcgagttcaagaacctggacatcaccaagaagaagctggtgcacgagggccccctgacctggagagtgaccaaggacaaggccgtggaggtgcacgtgctgctgctggacgacctgctgctgctgctgcagagacaggacgagagactgctgctgaagagccacagcagaaccctgacccccacccccgacggcaagaccatgctgagacccgtgctgagactgaccagcgccatgaccagagaggtggccaccgaccacaaggccttctacgtgctgttcacctgggaccaggaggcccagatctacgagctggtggcccagaccgtgagcgagagaaagaactggtgcgccctgatcaccgagaccgccggcagcctgaaggtgcccgcccccgccagcagacccaagcccagacccagccccagcagcaccagagagcccctgctgagcagcagcgagaacggcaacggcggcagagagaccagccccgccgacgccagaaccgagagaatcctgagcgacctgctgcccttctgcagacccggccccgagggccagctggccgccaccgccctgagaaaggtgctgagcctgaagcagctgctgttccccgccgaggaggacaacggcgccggcccccccagagacggcgacggcgtgcccggcggcggccccctgagccccgccagaacccaggagatccaggagaacctgctgagcctggaggagaccatgaagcagctggaggagctggaggaggagttctgcagactgagacccctgctgagccagctgggcggcaacagcgtgccccagcccggctgcacctag

SEQ ID NO: 97183 - DNA, 2640 bp, synthetic construct
  misc_feature 1..2640: note = Description of Artificial Sequence: Synthetic coding sequence
  source 1..2640: mol_type = other DNA
atggaggacttcgccagaggcgccgccagccccggccccagcagacccggcctggtgcccgtgagcatcatcggcgccgaggacgaggacttcgagaacgagctggagaccaacagcgaggagcagaacagccagttccagagcctggagcaggtgaagagaagacccgcccacctgatggccctgctgcagcacgtggccctgcagttcgagcccggccccctggtgctgagagtgcccgtgccccccaacgtggccttcgagctggacagaaccagagccgacctgatcagcgaggacgtgcagagaagattcgtgcaggaggtggtgcagagccagcaggtggccgtgggcagacagctggaggacttcagaagcaagagactgatgggcatgaccccctgggagcaggagctggcccagctggaggcctgggtgggcagagacagagccagctacgaggccagagagagacacgtggccgagagactgctgatgcacctggaggagatgcagcacaccatcagcaccgacgaggagaagagcgccgccgtggtgaacgccatcggcctgtacatgagacacctgggcgtgagaaccaagagcggcgacaagaagagcggcagaaacttcttcagaaagaaggtgatgggcaacagaagaagcgacgagcccgccaagaccaagaagggcctgagcagcatcctggacgccgccagatggaacagaggcgagccccaggtgcccgacttcagacacctgaaggccgaggtggacgccgagaagcccggcgccaccgacagaaagggcggcgtgggcatgcccagcagagacagaaacatcggcgcccccggccaggacacccccggcgtgagcctgcaccccctgagcctggacagccccgacagagagcccggcgccgacgcccccctggagctgggcgacagcagcccccagggccccatgagcctggagagcctggccccccccgagagcaccgacgagggcgccgagaccgagagccccgagcccggcgacgagggcgagcccggcagaagcggcctggagctggagcccgaggagccccccggctggagagagctggtgccccccgacaccctgcacagcctgcccaagagccaggtgaagagacaggaggtgatcagcgagctgctggtgaccgaggccgcccacgtgagaatgctgagagtgctgcacgacctgttcttccagcccatggccgagtgcctgttcttccccctggaggagctgcagaacatcttccccagcctggacgagctgatcgaggtgcacagcctgttcctggacagactgatgaagagaagacaggagagcggctacctgatcgaggagatcggcgacgtgctgctggccagattcgacggcgccgagggcagctggttccagaagatcagcagcagattctgcagcagacagagcttcgccctggagcagctgaaggccaagcagagaaaggaccccagattctgcgccttcgtgcaggaggccgagagcagacccagatgcagaagactgcagctgaaggacatgatccccaccgagatgcagagactgaccaagtaccccctgctgctgcagagcatcggccagaacaccgaggagcccaccgagagagagaaggtggagctggccgccgagtgctgcagagagatcctgcaccacgtgaaccaggccgtgagagacatggaggacctgctgagactgaaggactaccagagaagactggacctgagccacctgagacagagcagcgaccccatgctgagcgagttcaagaacctggacatcaccaagaagaagctggtgcacgagggccccctgacctggagagtgaccaaggacaaggccgtggaggtgcacgtgctgctgctggacgacctgctgctgctgctgcagagacaggacgagagactgctgctgaagagccacagcagaaccctgacccccacccccgacggcaagaccatgctgagacccgtgctgagactgaccagcgccatgaccagagaggtggccaccgaccacaaggccttctacgtgctgttcacctgggaccaggaggcccagatctacgagctggtggcccagaccgtgagcgagagaaagaactggtgcgccctgatcaccgagaccgccggcagcctgaaggtgcccgcccccgccagcagacccaagcccagacccagccccagcagcaccagagagcccctgctgagcagcagcgagaacggcaacggcggcagagagaccagccccgccgacgccagaaccgagagaatcctgagcgacctgctgcccttctgcagacccggccccgagggccagctggccgccaccgccctgagaaaggtgctgagcctgaagcagctgctgttccccgccgaggaggacaacggcgccggcccccccagagacggcgacggcgtgcccggcggcggccccctgagccccgccagaacccaggagatccaggagaacctgctgagcctggaggagaccatgaagcagctggaggagctggaggaggagttctgcagactgagacccctgctgagccagctgggcggcaacagcgtgccccagcccggctgcacctag

SEQ ID NO: 97184 - DNA, 2739 bp, synthetic construct
  misc_feature 1..2739: note = Description of Artificial Sequence: Synthetic coding sequence
  source 1..2739: mol_type = other DNA
atggaggacttcgccagaggcgccgccagccccggccccagcagacccggcctggtgcccgtgagcatcatcggcgccgaggacgaggacttcgagaacgagctggagaccaacagcgaggagcagaacagccagttccagagcctggagcaggtgaagagaagacccgcccacctgatggccctgctgcagcacgtggccctgcagttcgagcccggccccctgctgtgctgcctgcacgccgacatgctgggcagcctgggccccaaggaggccaagaaggccttcctggacttctaccacagcttcctggagaagaccgccgtgctgagagtgcccgtgccccccaacgtggccttcgagctggacagaaccagagccgacctgatcagcgaggacgtgcagagaagattcgtgcaggaggtggtgcagagccagcaggtggccgtgggcagacagctggaggacttcagaagcaagagactgatgggcatgaccccctgggagcaggagctggcccagctggaggcctgggtgggcagagacagagccagctacgaggccagagagagacacgtggccgagagactgctgatgcacctggaggagatgcagcacaccatcagcaccgacgaggagaagagcgccgccgtggtgaacgccatcggcctgtacatgagacacctgggcgtgagaaccaagagcggcgacaagaagagcggcagaaacttcttcagaaagaaggtgatgggcaacagaagaagcgacgagcccgccaagaccaagaagggcctgagcagcatcctggacgccgccagatggaacagaggcgagccccaggtgcccgacttcagacacctgaaggccgaggtggacgccgagaagcccggcgccaccgacagaaagggcggcgtgggcatgcccagcagagacagaaacatcggcgcccccggccaggacacccccggcgtgagcctgcaccccctgagcctggacagccccgacagagagcccggcgccgacgcccccctggagctgggcgacagcagcccccagggccccatgagcctggagagcctggccccccccgagagcaccgacgagggcgccgagaccgagagccccgagcccggcgacgagggcgagcccggcagaagcggcctggagctggagcccgaggagccccccggctggagagagctggtgccccccgacaccctgcacagcctgcccaagagccaggtgaagagacaggaggtgatcagcgagctgctggtgaccgaggccgcccacgtgagaatgctgagagtgctgcacgacctgttcttccagcccatggccgagtgcctgttcttccccctggaggagctgcagaacatcttccccagcctggacgagctgatcgaggtgcacagcctgttcctggacagactgatgaagagaagacaggagagcggctacctgatcgaggagatcggcgacgtgctgctggccagattcgacggcgccgagggcagctggttccagaagatcagcagcagattctgcagcagacagagcttcgccctggagcagctgaaggccaagcagagaaaggaccccagattctgcgccttcgtgcaggaggccgagagcagacccagatgcagaagactgcagctgaaggacatgatccccaccgagatgcagagactgaccaagtaccccctgctgctgcagagcatcggccagaacaccgaggagcccaccgagagagagaaggtggagctggccgccgagtgctgcagagagatcctgcaccacgtgaaccaggccgtgagagacatggaggacctgctgagactgaaggactaccagagaagactggacctgagccacctgagacagagcagcgaccccatgctgagcgagttcaagaacctggacatcaccaagaagaagctggtgcacgagggccccctgacctggagagtgaccaaggacaaggccgtggaggtgcacgtgctgctgctggacgacctgctgctgctgctgcagagacaggacgagagactgctgctgaagagccacagcagaaccctgacccccacccccgacggcaagaccatgctgagacccgtgctgagactgaccagcgccatgaccagagaggtggccaccgaccacaaggccttctacgtgctgttcacctgggaccaggaggcccagatctacgagctggtggcccagaccgtgagcgagagaaagaactggtgcgccctgatcaccgagaccgccggcagcctgaaggtgcccgcccccgccagcagacccaagcccagacccagccccagcagcaccagagagcccctgctgagcagcagcgagaacggcaacggcggcagagagaccagccccgccgacgccagaaccgagagaatcctgagcgacctgctgcccttctgcagacccggccccgagggccagctggccgccaccgccctgagaaaggtgctgagcctgaagcagctgctgttccccgccgaggaggacaacggcgccggcccccccagagacggcgacggcgtgcccggcggcggccccctgagccccgccagaacccaggagatccaggagaacctgctgagcctggaggagaccatgaagcagctggaggagctggaggaggagttctgcagactgagacccctgctgagccagctgggcggcaacagcgtgccccagcccggctgcacctag

SEQ ID NO: 97185 - DNA, 2847 bp, synthetic construct
  misc_feature 1..2847: note = Description of Artificial Sequence: Synthetic coding sequence
  source 1..2847: mol_type = other DNA
atggccagcctgagcacctggagcagccccgccgagcccagagagatggaggacttcgccagaggcgccgccagccccggccccagcagacccggcctggtgcccgtgagcatcatcggcgccgaggacgaggacttcgagaacgagctggagaccaacagcgaggagcagaacagccagttccagagcctggagcaggtgaagagaagacccgcccacctgatggccctgctgcagcacgtggccctgcagttcgagcccggccccctggtgctgagagtgcccgtgccccccaacgtggccttcgagctggacagaaccagagccgacctgatcagcgaggacgtgcagagaagattcgtgcaggaggtggtgcagagccagcaggtggccgtgggcagacagctggaggacttcagaagcaagagactgatgggcatgaccccctgggagcaggagctggcccagctggaggcctgggtgggcagagacagagccagctacgaggccagagagagacacgtggccgagagactgctgatgcacctggaggagatgcagcacaccatcagcaccgacgaggagaagagcgccgccgtggtgaacgccatcggcctgtacatgagacacctgggcgtgagaaccaagagcggcgacaagaagagcggcagaaacttcttcagaaagaaggtgatgggcaacagaagaagcgacgagcccgccaagaccaagaagggcctgagcagcatcctggacgccgccagatggaacagaggcgagccccaggtgcccgacttcagacacctgaaggccgaggtggacgccgagaagcccggcgccaccgacagaaagggcggcgtgggcatgcccagcagagacagaaacatcggcgcccccggccaggacacccccggcgtgagcctgcaccccctgagcctggacagccccgacagagagcccggcgccgacgcccccctggagctgggcgacagcagcccccagggccccatgagcctggagagcctggccccccccgagagcaccgacgagggcgccgagaccgagagccccgagcccggcgacgagggcgagcccggcagaagcggcctggagctggagcccgaggagccccccggctggagagagctggtgccccccgacaccctgcacagcctgcccaagagccaggtgaagagacaggaggtgatcagcgagctgctggtgaccgaggccgcccacgtgagaatgctgagagtgctgcacgacctgttcttccagcccatggccgagtgcctgttcttccccctggaggagctgcagaacatcttccccagcctggacgagctgatcgaggtgcacagcctgttcctggacagactgatgaagagaagacaggagagcggctacctgatcgaggagatcggcgacgtgctgctggccagattcgacggcgccgagggcagctggttccagaagatcagcagcagattctgcagcagacagagcttcgccctggagcagctgaaggccaagcagagaaaggaccccagattctgcgccttcgtgcaggaggccgagagcagacccagatgcagaagactgcagctgaaggacatgatccccaccgagatgcagagactgaccaagtaccccctgctgctgcagagcatcggccagaacaccgaggagcccaccgagagagagaaggtggagctggccgccgagtgctgcagagagatcctgcaccacgtgaaccaggccgtgagagacatggaggacctgctgagactgaaggactaccagagaagactggacctgagccacctgagacagagcagcgaccccatgctgagcgagttcaagaacctggacatcaccaagaagaagctggtgcacgagggccccctgacctggagagtgaccaaggacaaggccgtggaggtgcacgtgctgctgctggacgacctgctgctgctgctgcagagacaggacgagagactgctgctgaagagccacagcagaaccctgacccccacccccgacggcaagaccatgctgagacccgtgctgagactgaccagcgccatgaccagagaggtggccaccgaccacaaggccttctacgtgctgttcacctgggaccaggaggcccagatctacgagctggtggcccagaccgtgagcgagagaaagaactggtgcgccctgatcaccgagaccgccggcagcctgaaggtgcccgcccccgccagcagacccaagcccagacccagccccagcagcaccagagagcccctgctgagcagcagcgagaacggcaacggcggcagagagaccagccccgccgacgccagaaccgagagaatcctgagcgacctgctgcccttctgcagacccggccccgagggccagctggccgccaccgccctgagaaagggcgtgggcggcggcatcctgccccccgagaccccccccgtgagcgcctggggcgagctgtgcccccccgcctggctgcacctgagattcccccccagaaaggccttctgcaagaaggagagaaacggcggcgaggacgtgagagaccacccccacccccacagctgcagaagcatcagccaccccgagggcctgagaagaggcagctgcggccccagactgggcggcgcccagctgggcctgctggccccccacgagcccagacccagcctgccccccgccctgtgcctgggcgacagcggcctgcacagcggcggccaccacggcgaccccggccacctgagcatcgcctgcggcggccaccccagcacccccacccccaagtgcctgagaagcgtgttcatcccctag

SEQ ID NO: 97186 - DNA, 4023 bp, synthetic construct
  misc_feature 1..4023: note = Description of Artificial Sequence: Synthetic coding sequence
  source 1..4023: mol_type = other DNA
atgagaccccccggcttcctgagcagagcccccagcctgaacagagccgagagaggcatctggagctgcagcatggaccagagagagcccctgccccccgcccccgccgagaacgagatgaagtacgacaccaacaacaacgaggaggaggagggcgagcagttcgacttcgacagcggcgacgagatccccgaggccgacagacaggcccccagcgcccccgagaccggcggcgccggcgccagcgaggcccccgcccccaccggcggcgaggacggcgccggcgccgagaccacccccgtggccgagcccaccaagctggtgctgcccatgaaggtgaacccctacagcgtgatcgacatcacccccttccaggaggaccagccccccacccccgtgcccagcgccgaggaggagaacgtgggcctgcacgtgccctgcggctacctggtgcccgtgccctgcggctacgccgtgcccagcaacctgcccctgctgctgcccgcctacagcagccccgtgatcatctgcgccaccagcctggacgaggaggccgagacccccgaggtgaccgaggacagacagcccaacagcctgagcagcgaggagccccccaccagcgaggaccaggtgggcagagaggacagcgccctggccagatgggccgccgaccccgccaacaccgcctggatggagaaccccgaggaggccatctacgacgacgtgcccagagagaacagcgacagcgagcccgacgagatgatctacgacgacgtggagaacggcgacgagggcggcaacagcagcctggagtacggctggagcagcagcgagttcgagagctacgaggagcagagcgacagcgagtgcaagaacggcatccccagaagcttcctgagaagcaaccacaagaagcagctgagccacgacctgaccagactgaaggagcactacgagaagaagatgagagacctgatggccagcaccgtgggcgtggtggagatccagcagctgagacagaagcacgagctgaagatgcagaagctggtgaaggccgccaaggacggcaccaaggacggcctggagagaaccagagccgccgtgaagagaggcagaagcttcatcagaaccaagagcctgatcgcccaggaccacagaagcagcctggaggaggagcagaacctgttcatcgacgtggactgcaagcaccccgaggccatcctgacccccatgcccgagggcctgagccagcagcaggtggtgagaagatacatcctgggcagcgtggtggacagcgagaagaactacgtggacgccctgaagagaatcctggagcagtacgagaagcccctgagcgagatggagcccaaggtgctgagcgagagaaagctgaagaccgtgttctacagagtgaaggagatcctgcagtgccacagcctgttccagatcgccctggccagcagagtgagcgagtgggacagcgtggagatgatcggcgacgtgttcgtggccagcttcagcaagagcatggtgctggacgcctacagcgagtacgtgaacaacttcagcaccgccgtggccgtgctgaagaagacctgcgccaccaagcccgccttcctggagttcctgaagcaggagcaggaggccagccccgacagaaccaccctgtacagcctgatgatgaagcccatccagagattcccccagttcatcctgctgctgcaggacatgctgaagaacaccagcaagggccaccccgacagactgcccctgcagatggccctgaccgagctggagaccctggccgagaagctgaacgagagaaagagagacgccgaccagagatgcgaggtgaagcagatcgccaaggccatcaacgagagatacctgaacaagctgctgagcagcggcagcagatacctgatcagaagcgacgacatgatcgagaccgtgtacaacgacagaggcgagatcgtgaagaccaaggagagaagagtgttcatgctgaacgacgtgctgatgtgcgccaccgtgagcagcagacccagccacgacagcagagtgatgagcagccagagatacctgctgaagtggagcgtgcccctgggccacgtggacgccatcgagtacggcagcagcgccggcaccggcgagcacagcagacacctggccgtgcacccccccgagagcctggccgtggtggccaacgccaagcccaacaaggtgtacatgggccccggccagctgtaccaggacctgcagaacctgctgcacgacctgaacgtgatcggccagatcacccagctgatcggcaacctgaagggcaactaccagaacctgaaccagagcgtggcccacgactggaccagcggcctgcagagactgatcctgaagaaggaggacgagatcagagccgccgactgctgcagaatccagctgcagctgcccggcaagcaggacaagagcggcagacccaccttcttcaccgccgtgttcaacaccttcacccccgccatcaaggagagctgggtgaacagcctgcagatggccaagctggccctggaggaggagaaccacatgggctggttctgcgtggaggacgacggcaaccacatcaagaaggagaagcaccccctgctggtgggccacatgcccgtgatggtggccaagcagcaggagttcaagatcggcagctgcacccaccagatgggccagatcgccatcgtgagcttccagaacagcacccccaaggtgatcgagtgcttcaacgtggagagcagaatcctgtgcatgctgtacgtgcccgtggaggagaagagaagagagcccggcgccccccccgaccccgagacccccgccgtgagagccagcgacgtgcccaccatctgcgtgggcaccgaggagggcagcatcagcatctacaagagcagccagggcagcaagaaggtgagactgcagcacttcttcacccccgagaagagcaccgtgatgagcctggcctgcaccagccagagcctgtacgccggcctggtgaacggcgccgtggccagctacgccagagcccccgacggcagctgggacagcgagccccagaaggtgatcaagctgggcgtgctgcccgtgagaagcctgctgatgatggaggacaccctgtgggccgccagcggcggccaggtgttcatcatcagcgtggagacccacgccgtggagggccagctggaggcccaccaggaggagggcatggtgatcagccacatggccgtgagcggcgtgggcatctggatcgccttcaccagcggcagcaccctgagactgttccacaccgagaccctgaagcacctgcaggacatcaacatcgccacccccgtgcacaacatgctgcccggccaccagagactgagcgtgaccagcctgctggtgtgccacggcctgctgatggtgggcaccagcctgggcgtgctggtggccctgcccgtgcccagactgcagggcatccccaaggtgaccggcagaggcatggtgagctaccacgcccacaacagccccgtgaagttcatcgtgctggccaccgccctgcacgagaaggacaaggacaagagcagagacagcctggcccccggccccgagccccaggacgaggaccagaaggacgccctgcccagcggcggcgccggcagcagcctgagccagggcgaccccgacgccgccatctggctgggcgacagcctgggcagcatgacccagaagagcgacctgagcagcagcagcggcagcctgagcctgagccacggcagcagcagcctggagcacagaagcgaggacagcaccatctacgacctgctgaaggaccccgtgagcctgagaagcaaggccagaagagccaagaaggccaaggccagcagcgccctggtggtgtgcggcggccagggccacagaagagtgcacagaaaggccagacagccccaccaggaggagctggcccccaccgtgatggtgtggcagatccccctgctgaacatctag

SEQ ID NO: 97187 - DNA, 4035 bp, synthetic construct
  misc_feature 1..4035: note = Description of Artificial Sequence: Synthetic coding sequence
  source 1..4035: mol_type = other DNA
atggaccagagagagcccctgccccccgcccccgccgagaacgagatgaagtacgacaccaacaacaacgaggaggaggagggcgagcagttcgacttcgacagcggcgacgagatccccgaggccgacagacaggcccccagcgcccccgagaccggcggcgccggcgccagcgaggcccccgcccccaccggcggcgaggacggcgccggcgccgagaccacccccgtggccgagcccaccaagctggtgctgcccatgaaggtgaacccctacagcgtgatcgacatcacccccttccaggaggaccagccccccacccccgtgcccagcgccgaggaggagaacgtgggcctgcacgtgccctgcggctacctggtgcccgtgccctgcggctacgccgtgcccagcaacctgcccctgctgctgcccgcctacagcagccccgtgatcatctgcgccaccagcctggacgaggaggagacccccgaggtgaccgaggacagacagcccaacagcctgagcagcgaggagccccccaccagcgaggaccaggtgggcagagaggacagcgccctggccagatgggccgccgaccccgccaacaccgcctggatggagaaccccgaggaggccatctacgacgacgtgcccagagagaacagcgacagcgagcccgacgagatgatctacgacgacgtggagaacggcgacgagggcggcaacagcagcctggagtacggctggagcagcagcgagttcgagagctacgaggagcagagcgacagcgagtgcaagaacggcatccccagaagcttcctgagaagcaaccacaagaagcagctgagccacgacctgaccagactgaaggagcactacgagaagaagatgagagacctgatggccagcaccgtgggcgtggtggagatccagcagctgagacagaagcacgagctgaagatgcagaagctggtgaaggccgccaaggacggcaccaaggacggcctggagagaaccagagccgccgtgaagagaggcagaagcttcatcagaaccaagagcctgatcgcccaggaccacagaagcagcctggaggaggagcagaacctgttcatcgacgtggactgcaagcaccccgaggccatcctgacccccatgcccgagggcctgagccagcagcaggtggtgagaagatacatcctgggcagcgtggtggacagcgagaagaactacgtggacgccctgaagagaatcctggagcagtacgagaagcccctgagcgagatggagcccaaggtgctgagcgagagaaagctgaagaccgtgttctacagagtgaaggagatcctgcagtgccacagcctgttccagatcgccctggccagcagagtgagcgagtgggacagcgtggagatgatcggcgacgtgttcgtggccagcttcagcaagagcatggtgctggacgcctacagcgagtacgtgaacaacttcagcaccgccgtggccgtgctgaagaagacctgcgccaccaagcccgccttcctggagttcctgaagcaggagcaggaggccagccccgacagaaccaccctgtacagcctgatgatgaagcccatccagagattcccccagttcatcctgctgctgcaggacatgctgaagaacaccagcaagggccaccccgacagactgcccctgcagatggccctgaccgagctggagaccctggccgagaagctgaacgagagaaagagagacgccgaccagagatgcgaggtgaagcagatcgccaaggccatcaacgagagatacctgaacaagctgctgagcagcggcagcagatacctgatcagaagcgacgacatgatcgagaccgtgtacaacgacagaggcgagatcgtgaagaccaaggagagaagagtgttcatgctgaacgacgtgctgatgtgcgccaccgtgagcagcagacccagccacgacagcagagtgatgagcagccagagatacctgctgaagtggagcgtgcccctgggccacgtggacgccatcgagtacggcagcagcgccggcaccggcgagcacagcagacacctggccgtgcacccccccgagagcctggccgtggtggccaacgccaagcccaacaaggtgtacatgggccccggccagctgtaccaggacctgcagaacctgctgcacgacctgaacgtgatcggccagatcacccagctgatcggcaacctgaagggcaactaccagaacctgaaccagagcgtggcccacgactggaccagcggcctgcagagactgatcctgaagaaggaggacgagatcagagccgccgactgctgcagaatccagctgcagctgcccggcaagcaggacaagagcggcagacccaccttcttcaccgccgtgttcaacaccttcacccccgccatcaaggagagctgggtgaacagcctgcagatggccaagctggccctggaggaggagaaccacatgggctggttctgcgtggaggacgacggcaaccacatcaagaaggagaagcaccccctgctggtgggccacatgcccgtgatggtggccaagcagcaggagttcaagatcgagtgcgccgcctacaaccccgagccctacctgaacaacgagagccagcccgacagcttcagcaccgcccacggcttcctgtggatcggcagctgcacccaccagatgggccagatcgccatcgtgagcttccagaacagcacccccaaggtgatcgagtgcttcaacgtggagagcagaatcctgtgcatgctgtacgtgcccgtggaggagaagagaagagagcccggcgccccccccgaccccgagacccccgccgtgagagccagcgacgtgcccaccatctgcgtgggcaccgaggagggcagcatcagcatctacaagagcagccagggcagcaagaaggtgagactgcagcacttcttcacccccgagaagagcaccgtgatgagcctggcctgcaccagccagagcctgtacgccggcctggtgaacggcgccgtggccagctacgccagagcccccgacggcagctgggacagcgagccccagaaggtgatcaagctgggcgtgctgcccgtgagaagcctgctgatgatggaggacaccctgtgggccgccagcggcggccaggtgttcatcatcagcgtggagacccacgccgtggagggccagctggaggcccaccaggaggagggcatggtgatcagccacatggccgtgagcggcgtgggcatctggatcgccttcaccagcggcagcaccctgagactgttccacaccgagaccctgaagcacctgcaggacatcaacatcgccacccccgtgcacaacatgctgcccggccaccagagactgagcgtgaccagcctgctggtgtgccacggcctgctgatggtgggcaccagcctgggcgtgctggtggccctgcccgtgcccagactgcagggcatccccaaggtgaccggcagaggcatggtgagctaccacgcccacaacagccccgtgaagttcatcgtgctggccaccgccctgcacgagaaggacaaggacaagagcagagacagcctggcccccggccccgagccccaggacgaggaccagaaggacgccctgcccagcggcggcgccggcagcagcctgagccagggcgaccccgacgccgccatctggctgggcgacagcctgggcagcatgacccagaagagcgacctgagcagcagcagcggcagcctgagcctgagccacggcagcagcagcctggagcacagaagcgaggacagcaccatctacgacctgctgaaggaccccgtgagcctgagaagcaaggccagaagagccaagaaggccaaggccagcagcgccctggtggtgtgcggcggccagggccacagaagagtgcacagaaaggccagacagccccaccaggaggagctggcccccaccgtgatggtgtggcagatccccctgctgaacatctag

SEQ ID NO: 97188 - DNA, 1833 bp, synthetic construct
  misc_feature 1..1833: note = Description of Artificial Sequence: Synthetic coding sequence
  source 1..1833: mol_type = other DNA
atgagaccccccggcttcctgagcagagcccccagcctgaacagagccgagagaggcatctggagctgcagcatggaccagagagagcccctgccccccgcccccgccgagaacgagatgaagtacgacaccaacaacaacgaggaggaggagggcgagcagttcgacttcgacagcggcgacgagatccccgaggccgacagacaggcccccagcgcccccgagaccggcggcgccggcgccagcgaggcccccgcccccaccggcggcgaggacggcgccggcgccgagaccacccccgtggccgagcccaccaagctggtgctgcccatgaaggtgaacccctacagcgtgatcgacatcacccccttccaggaggaccagccccccacccccgtgcccagcgccgaggaggagaacgtgggcctgcacgtgccctgcggctacctggtgcccgtgccctgcggctacgccgtgcccagcaacctgcccctgctgctgcccgcctacagcagccccgtgatcatctgcgccaccagcctggacgaggaggccgagacccccgaggtgaccgaggacagacagcccaacagcctgagcagcgaggagccccccaccagcgaggaccaggtgggcagagaggacagcgccctggccagatgggccgccgaccccgccaacaccgcctggatggagaaccccgaggaggccatctacgacgacgtgcccagagagaacagcgacagcgagcccgacgagatgatctacgacgacgtggagaacggcgacgagggcggcaacagcagcctggagtacggctggagcagcagcgagttcgagagctacgaggagcagagcgacagcgagtgcaagaacggcatccccagaagcttcctgagaagcaaccacaagaagcagatgcagaagctggtgaaggccgccaaggacggcaccaaggacggcctggagagaaccagagccgccgtgaagagaggcagaagcttcatcagaaccaagagcctgatcgcccaggaccacagaagcagcctggaggaggagcagaacctgttcatcgacgtggactgcaagcaccccgaggccatcctgacccccatgcccgagggcctgagccagcagcaggtggtgagaagatacatcctgggcagcgtggtggacagcgagaagaactacgtggacgccctgaagagaatcctggagcagtacgagaagcccctgagcgagatggagcccaaggtgctgagcgagagaaagctgaagaccgtgttctacagagtgaaggagatcctgcagtgccacagcctgttccagatcgccctggccagcagagtgagcgagtgggacagcgtggagatgatcggcgacgtgttcgtggccagcttcagcaagagcatggtgctggacgcctacagcgagtacgtgaacaacttcagcaccgccgtggccgtgctgaagaagacctgcgccaccaagcccgccttcctggagttcctgaagcaggagcaggaggccagccccgacagaaccaccctgtacagcctgatgatgaagcccatccagagattcccccagttcatcctgctgctgcaggacatgctgaagaacaccagcaagggccaccccgacagactgcccctgcagatggccctgaccgagctggagaccctggccgagaagctgaacgagagaaagagagacgccgaccagagatgcgaggtgaagcagatcgccaaggccatcaacgagagatacctgaacaaggtggagagaggcttcctgcagctgtacagcaagatcatcttcgccctgtgctag

SEQ ID NO: 97189 - DNA, 4110 bp, synthetic construct
  misc_feature 1..4110: note = Description of Artificial Sequence: Synthetic coding sequence
  source 1..4110: mol_type = other DNA
atgagaccccccggcttcctgagcagagcccccagcctgaacagagccgagagaggcatctggagctgcagcatggaccagagagagcccctgccccccgcccccgccgagaacgagatgaagtacgacaccaacaacaacgaggaggaggagggcgagcagttcgacttcgacagcggcgacgagatccccgaggccgacagacaggcccccagcgcccccgagaccggcggcgccggcgccagcgaggcccccgcccccaccggcggcgaggacggcgccggcgccgagaccacccccgtggccgagcccaccaagctggtgctgcccatgaaggtgaacccctacagcgtgatcgacatcacccccttccaggaggaccagccccccacccccgtgcccagcgccgaggaggagaacgtgggcctgcacgtgccctgcggctacctggtgcccgtgccctgcggctacgccgtgcccagcaacctgcccctgctgctgcccgcctacagcagccccgtgatcatctgcgccaccagcctggacgaggaggccgagacccccgaggtgaccgaggacagacagcccaacagcctgagcagcgaggagccccccaccagcgaggaccaggtgggcagagaggacagcgccctggccagatgggccgccgaccccgccaacaccgcctggatggagaaccccgaggaggccatctacgacgacgtgcccagagagaacagcgacagcgagcccgacgagatgatctacgacgacgtggagaacggcgacgagggcggcaacagcagcctggagtacggctggagcagcagcgagttcgagagctacgaggagcagagcgacagcgagtgcaagaacggcatccccagaagcttcctgagaagcaaccacaagaagcagctgagccacgacctgaccagactgaaggagcactacgagaagaagatgagagacctgatggccagcaccgtgggcgtggtggagatccagcagctgagacagaagcacgagctgaagatgcagaagctggtgaaggccgccaaggacggcaccaaggacggcctggagagaaccagagccgccgtgaagagaggcagaagcttcatcagaaccaagagcctgatcgcccaggaccacagaagcagcctggaggaggagcagaacctgttcatcgacgtggactgcaagcaccccgaggccatcctgacccccatgcccgagggcctgagccagcagcaggtggtgagaagatacatcctgggcagcgtggtggacagcgagaagaactacgtggacgccctgaagagaatcctggagcagtacgagaagcccctgagcgagatggagcccaaggtgctgagcgagagaaagctgaagaccgtgttctacagagtgaaggagatcctgcagtgccacagcctgttccagatcgccctggccagcagagtgagcgagtgggacagcgtggagatgatcggcgacgtgttcgtggccagcttcagcaagagcatggtgctggacgcctacagcgagtacgtgaacaacttcagcaccgccgtggccgtgctgaagaagacctgcgccaccaagcccgccttcctggagttcctgaagcaggagcaggaggccagccccgacagaaccaccctgtacagcctgatgatgaagcccatccagagattcccccagttcatcctgctgctgcaggacatgctgaagaacaccagcaagggccaccccgacagactgcccctgcagatggccctgaccgagctggagaccctggccgagaagctgaacgagagaaagagagacgccgaccagagatgcgaggtgaagcagatcgccaaggccatcaacgagagatacctgaacaagctgctgagcagcggcagcagatacctgatcagaagcgacgacatgatcgagaccgtgtacaacgacagaggcgagatcgtgaagaccaaggagagaagagtgttcatgctgaacgacgtgctgatgtgcgccaccgtgagcagcagacccagccacgacagcagagtgatgagcagccagagatacctgctgaagtggagcgtgcccctgggccacgtggacgccatcgagtacggcagcagcgccggcaccggcgagcacagcagacacctggccgtgcacccccccgagagcctggccgtggtggccaacgccaagcccaacaaggtgtacatgggccccggccagctgtaccaggacctgcagaacctgctgcacgacctgaacgtgatcggccagatcacccagctgatcggcaacctgaagggcaactaccagaacctgaaccagagcgtggcccacgactggaccagcggcctgcagagactgatcctgaagaaggaggacgagatcagagccgccgactgctgcagaatccagctgcagctgcccggcaagcaggacaagagcggcagacccaccttcttcaccgccgtgttcaacaccttcacccccgccatcaaggagagctgggtgaacagcctgcagatggccaagctggccctggaggaggagaaccacatgggctggttctgcgtggaggacgacggcaaccacatcaagaaggagaagcaccccctgctggtgggccacatgcccgtgatggtggccaagcagcaggagttcaagatcgagtgcgccgcctacaaccccgagccctacctgaacaacgagagccagcccgacagcttcagcaccgcccacggcttcctgtggatcggcagctgcacccaccagatgggccagatcgccatcgtgagcttccagaacagcacccccaaggtgatcgagtgcttcaacgtggagagcagaatcctgtgcatgctgtacgtgcccgtggaggagaagagaagagagcccggcgccccccccgaccccgagacccccgccgtgagagccagcgacgtgcccaccatctgcgtgggcaccgaggagggcagcatcagcatctacaagagcagccagggcagcaagaaggtgagactgcagcacttcttcacccccgagaagagcaccgtgatgagcctggcctgcaccagccagagcctgtacgccggcctggtgaacggcgccgtggccagctacgccagagcccccgacggcagctgggacagcgagccccagaaggtgatcaagctgggcgtgctgcccgtgagaagcctgctgatgatggaggacaccctgtgggccgccagcggcggccaggtgttcatcatcagcgtggagacccacgccgtggagggccagctggaggcccaccaggaggagggcatggtgatcagccacatggccgtgagcggcgtgggcatctggatcgccttcaccagcggcagcaccctgagactgttccacaccgagaccctgaagcacctgcaggacatcaacatcgccacccccgtgcacaacatgctgcccggccaccagagactgagcgtgaccagcctgctggtgtgccacggcctgctgatggtgggcaccagcctgggcgtgctggtggccctgcccgtgcccagactgcagggcatccccaaggtgaccggcagaggcatggtgagctaccacgcccacaacagccccgtgaagttcatcgtgctggccaccgccctgcacgagaaggacaaggacaagagcagagacagcctggcccccggccccgagccccaggacgaggaccagaaggacgccctgcccagcggcggcgccggcagcagcctgagccagggcgaccccgacgccgccatctggctgggcgacagcctgggcagcatgacccagaagagcgacctgagcagcagcagcggcagcctgagcctgagccacggcagcagcagcctggagcacagaagcgaggacagcaccatctacgacctgctgaaggaccccgtgagcctgagaagcaaggccagaagagccaagaaggccaaggccagcagcgccctggtggtgtgcggcggccagggccacagaagagtgcacagaaaggccagacagccccaccaggaggagctggcccccaccgtgatggtgtggcagatccccctgctgaacatctag

SEQ ID NO: 97190 - DNA, 4107 bp, synthetic construct
  misc_feature 1..4107: note = Description of Artificial Sequence: Synthetic coding sequence
  source 1..4107: mol_type = other DNA
atgagaccccccggcttcctgagcagagcccccagcctgaacagagccgagagaggcatctggagctgcagcatggaccagagagagcccctgccccccgcccccgccgagaacgagatgaagtacgacaccaacaacaacgaggaggaggagggcgagcagttcgacttcgacagcggcgacgagatccccgaggccgacagacaggcccccagcgcccccgagaccggcggcgccggcgccagcgaggcccccgcccccaccggcggcgaggacggcgccggcgccgagaccacccccgtggccgagcccaccaagctggtgctgcccatgaaggtgaacccctacagcgtgatcgacatcacccccttccaggaggaccagccccccacccccgtgcccagcgccgaggaggagaacgtgggcctgcacgtgccctgcggctacctggtgcccgtgccctgcggctacgccgtgcccagcaacctgcccctgctgctgcccgcctacagcagccccgtgatcatctgcgccaccagcctggacgaggaggccgagacccccgaggtgaccgaggacagacagcccaacagcctgagcagcgaggagccccccaccagcgaggaccaggtgggcagagaggacagcgccctggccagatgggccgccgaccccgccaacaccgcctggatggagaaccccgaggaggccatctacgacgacgtgcccagagagaacagcgacagcgagcccgacgagatgatctacgacgacgtggagaacggcgacgagggcggcaacagcagcctggagtacggctggagcagcagcgagttcgagagctacgaggagcagagcgacagcgagtgcaagaacggcatccccagaagcttcctgagaagcaaccacaagaagcagctgagccacgacctgaccagactgaaggagcactacgagaagaagatgagagacctgatggccagcaccgtgggcgtggtggagatccagcagctgagacagaagcacgagctgaagatgcagaagctggtgaaggccgccaaggacggcaccaaggacggcctggagagaaccagagccgccgtgaagagaggcagaagcttcatcagaaccaagagcctgatcgcccaggaccacagaagcagcctggaggaggagcagaacctgttcatcgacgtggactgcaagcaccccgaggccatcctgacccccatgcccgagggcctgagccagcagcaggtggtgagaagatacatcctgggcagcgtggtggacagcgagaagaactacgtggacgccctgaagagaatcctggagcagtacgagaagcccctgagcgagatggagcccaaggtgctgagcgagagaaagctgaagaccgtgttctacagagtgaaggagatcctgcagtgccacagcctgttccagatcgccctggccagcagagtgagcgagtgggacagcgtggagatgatcggcgacgtgttcgtggccagcttcagcaagagcatggtgctggacgcctacagcgagtacgtgaacaacttcagcaccgccgtggccgtgctgaagaagacctgcgccaccaagcccgccttcctggagttcctgaaggagcaggaggccagccccgacagaaccaccctgtacagcctgatgatgaagcccatccagagattcccccagttcatcctgctgctgcaggacatgctgaagaacaccagcaagggccaccccgacagactgcccctgcagatggccctgaccgagctggagaccctggccgagaagctgaacgagagaaagagagacgccgaccagagatgcgaggtgaagcagatcgccaaggccatcaacgagagatacctgaacaagctgctgagcagcggcagcagatacctgatcagaagcgacgacatgatcgagaccgtgtacaacgacagaggcgagatcgtgaagaccaaggagagaagagtgttcatgctgaacgacgtgctgatgtgcgccaccgtgagcagcagacccagccacgacagcagagtgatgagcagccagagatacctgctgaagtggagcgtgcccctgggccacgtggacgccatcgagtacggcagcagcgccggcaccggcgagcacagcagacacctggccgtgcacccccccgagagcctggccgtggtggccaacgccaagcccaacaaggtgtacatgggccccggccagctgtaccaggacctgcagaacctgctgcacgacctgaacgtgatcggccagatcacccagctgatcggcaacctgaagggcaactaccagaacctgaaccagagcgtggcccacgactggaccagcggcctgcagagactgatcctgaagaaggaggacgagatcagagccgccgactgctgcagaatccagctgcagctgcccggcaagcaggacaagagcggcagacccaccttcttcaccgccgtgttcaacaccttcacccccgccatcaaggagagctgggtgaacagcctgcagatggccaagctggccctggaggaggagaaccacatgggctggttctgcgtggaggacgacggcaaccacatcaagaaggagaagcaccccctgctggtgggccacatgcccgtgatggtggccaagcagcaggagttcaagatcgagtgcgccgcctacaaccccgagccctacctgaacaacgagagccagcccgacagcttcagcaccgcccacggcttcctgtggatcggcagctgcacccaccagatgggccagatcgccatcgtgagcttccagaacagcacccccaaggtgatcgagtgcttcaacgtggagagcagaatcctgtgcatgctgtacgtgcccgtggaggagaagagaagagagcccggcgccccccccgaccccgagacccccgccgtgagagccagcgacgtgcccaccatctgcgtgggcaccgaggagggcagcatcagcatctacaagagcagccagggcagcaagaaggtgagactgcagcacttcttcacccccgagaagagcaccgtgatgagcctggcctgcaccagccagagcctgtacgccggcctggtgaacggcgccgtggccagctacgccagagcccccgacggcagctgggacagcgagccccagaaggtgatcaagctgggcgtgctgcccgtgagaagcctgctgatgatggaggacaccctgtgggccgccagcggcggccaggtgttcatcatcagcgtggagacccacgccgtggagggccagctggaggcccaccaggaggagggcatggtgatcagccacatggccgtgagcggcgtgggcatctggatcgccttcaccagcggcagcaccctgagactgttccacaccgagaccctgaagcacctgcaggacatcaacatcgccacccccgtgcacaacatgctgcccggccaccagagactgagcgtgaccagcctgctggtgtgccacggcctgctgatggtgggcaccagcctgggcgtgctggtggccctgcccgtgcccagactgcagggcatccccaaggtgaccggcagaggcatggtgagctaccacgcccacaacagccccgtgaagttcatcgtgctggccaccgccctgcacgagaaggacaaggacaagagcagagacagcctggcccccggccccgagccccaggacgaggaccagaaggacgccctgcccagcggcggcgccggcagcagcctgagccagggcgaccccgacgccgccatctggctgggcgacagcctgggcagcatgacccagaagagcgacctgagcagcagcagcggcagcctgagcctgagccacggcagcagcagcctggagcacagaagcgaggacagcaccatctacgacctgctgaaggaccccgtgagcctgagaagcaaggccagaagagccaagaaggccaaggccagcagcgccctggtggtgtgcggcggccagggccacagaagagtgcacagaaaggccagacagccccaccaggaggagctggcccccaccgtgatggtgtggcagatccccctgctgaacatctag

SEQ ID NO: 97191 - DNA, 2949 bp, synthetic construct
  misc_feature 1..2949: note = Description of Artificial Sequence: Synthetic coding sequence
  source 1..2949: mol_type = other DNA
atgctgcccagcagcagctggggcaagagaaagctgagaggcagactgggctgggtgagaagcgacgccagaggcgtgatgtgggccagacaggagggcctgcaccacccccacccccacgccgtgatcagatgccccagcagcagcagcagcagcgtgagctgcagcggcgacagcgaggaggaggacatgggcctgctggaggtgagcgtgagcgacatcaagccccccgcccccgagctgggccccatgcccgagggcctgagcccccagcaggtggtgagaagacacatcctgggcagcatcgtgcagagcgagggcagctacgtggagagcctgaagagaatcctgcaggactacagaaaccccctgatggagatggagcccaaggccctgagcgccagaaagtgccaggtggtgttcttcagagtgaaggagatcctgcactgccacagcatgttccagatcgccctgagcagcagagtggccgagtgggacagcaccgagaagatcggcgacctgttcgtggccagcgacatgctgaagaacacccccagaggccaccccgacagactgagcctgcagctggccctgaccgagctggagaccctggccgagaagctgaacgagcagaagagactggccgaccaggtggccgagatccagcagctgaccaagagcgtgagcgacagaagcagcctgaacaagctgctgaccagcggccagagacagctgctgctgtgcgagaccctgaccgagaccgtgtacggcgacagaggccagctgatcaagagcaaggagagaagagtgttcctgctgaacgacatgctggtgtgcgccaacatcaacttcaagggccagctggagatcagcagcctggtgcccctgggccccaagtacgtggtgaagtggaacaccgccctgccccaggtgcaggtggtggaggtgggccaggacggcggcacctacgacaaggacaacgtgctgatccagcacagcggcgccaagaaggccagcgccagcggccaggcccagaacaaggtgtacctgggcccccccagactgttccaggagctgcaggacctgcagaaggacctggccgtggtggagcagatcaccctgctgatcagcaccctgcacggcacctaccagaacctgaacatgaccgtggcccaggactggtgcctggccctgcagagactgatgagagtgaaggaggaggagatccacagcgccaacaagtgcagactgagactgctgctgcccggcaagcccgacaagagcggcagacccatcagcttcatggtggtgttcatcacccccaaccccctgagcaagatcagctgggtgaacagactgcacctggccaagatcggcctgagagaggagaaccagcccggctggctgtgccccgacgaggacaagaagagcaaggcccccttctggtgccccatcctggcctgctgcatccccgccttcagcagcagagccctgagcctgcagctgggcgccctggtgcacagccccgtgaactgccccctgctgggcttcagcgccgtgagcaccagcctgccccagggctacctgtgggtgggcggcggccaggagggcgccggcggccaggtggagatcttcagcctgaacagacccagccccagaaccgtgaagagcttccccctggccgcccccgtgctgtgcatggagtacatccccgagctggaggaggaggccgagagcagagacgagagccccaccgtggccgaccccagcgccaccgtgcaccccaccatctgcctgggcctgcaggacggcagcatcctgctgtacagcagcgtggacaccggcacccagtgcctggtgagctgcagaagccccggcctgcagcccgtgctgtgcctgagacacagccccttccacctgctggccggcctgcaggacggcaccctggccgcctaccccagaaccagcggcggcgtgctgtgggacctggagagcccccccgtgtgcctgaccgtgggccccggccccgtgagaaccctgctgagcctggaggacgccgtgtgggccagctgcggcccctgggtgaccgtgctggaggccaccaccctgcagccccagcagagcttcgaggcccaccaggacgaggccgtgagcgtgacccacatggtgaaggccggcagcggcgtgtggatggccttcagcagcggcaccagcatcagactgttccacaccgagaccctggagcacctgcaggagatcaacatcgccaccagaaccaccttcctgctgcccggccagaagcacctgtgcgtgaccagcctgctgatctgccagggcctgctgtgggtgggcaccgaccagggcgtgatcgtgctgctgcccgtgcccagactggagggcatccccaagatcaccggcaagggcatggtgagcctgaacggccactgcggccccgtggccttcctggccgtggccaccagcatcctggcccccgacatcctgagaagcgaccaggaggaggccgagggccccagagccgaggaggacaagcccgacggccaggcccacgagcccatgcccgacagccacgtgggcagagagctgaccagaaagaagggcatcctgctgcagtacagactgagaagcaccgcccacctgcccggccccctgctgagcatgagagagcccgcccccgccgacggcgccgccctggagcacagcgaggaggacggcagcatctacgagatggccgacgaccccgacatctgggtgagaagcagaccctgcgccagagacgcccacagaaaggagatctgcagcgtggccatcatcagcggcggccagggctacagaaacttcggcagcgccctgggcagcagcggcagacaggccccctgcggcgagaccgacagcaccctgctgatctggcaggtgcccctgatgctgtag

SEQ ID NO: 97192 - DNA, 3840 bp, synthetic construct
  misc_feature 1..3840: note = Description of Artificial Sequence: Synthetic coding sequence
  source 1..3840: mol_type = other DNA
atggccagcagcaacccccccccccagcccgccatcggcgaccagctggtgcccggcgtgcccggccccagcagcgaggccgaggacgaccccggcgaggccttcgagttcgacgacagcgacgacgaggaggacaccagcgccgccctgggcgtgcccagcctggcccccgagagagacaccgacccccccctgatccacctggacagcatccccgtgaccgaccccgaccccgccgccgccccccccggcaccggcgtgcccgcctgggtgagcaacggcgacgccgccgacgccgccttcagcggcgccagacacagcagctggaagagaaagagcagcagaagaatcgacagattcaccttccccgccctggaggaggacgtgatctacgacgacgtgccctgcgagagccccgacgcccaccagcccggcgccgagagaaacctgctgtacgaggacgcccacagagccggcgcccccagacaggccgaggacctgggctggagcagcagcgagttcgagagctacagcgaggacagcggcgaggaggccaagcccgaggtggaggtggagcccgccaagcacagagtgagcttccagcccaagctgagccccgacctgaccagactgaaggagagatacgccagaaccaagagagacatcctggccctgagagtgggcggcagagacatgcaggagctgaagcacaagtacgactgcaagatgacccagctgatgaaggccgccaagagcggcaccaaggacggcctggagaagaccagaatggccgtgatgagaaaggtgagcttcctgcacagaaaggacgtgctgggcgacagcgaggaggaggacatgggcctgctggaggtgagcgtgagcgacatcaagccccccgcccccgagctgggccccatgcccgagggcctgagcccccagcaggtggtgagaagacacatcctgggcagcatcgtgcagagcgagggcagctacgtggagagcctgaagagaatcctgcaggactacagaaaccccctgatggagatggagcccaaggccctgagcgccagaaagtgccaggtggtgttcttcagagtgaaggagatcctgcactgccacagcatgttccagatcgccctgagcagcagagtggccgagtgggacagcaccgagaagatcggcgacctgttcgtggccagcttcagcaagagcatggtgctggacgtgtacagcgactacgtgaacaacttcaccagcgccatgagcatcatcaagaaggcctgcctgaccaagcccgccttcctggagttcctgaagagaagacaggtgtgcagccccgacagagtgaccctgtacggcctgatggtgaagcccatccagagattcccccagttcatcctgctgctgcaggacatgctgaagaacacccccagaggccaccccgacagactgagcctgcagctggccctgaccgagctggagaccctggccgagaagctgaacgagcagaagagactggccgaccaggtggccgagatccagcagctgaccaagagcgtgagcgacagaagcagcctgaacaagctgctgaccagcggccagagacagctgctgctgtgcgagaccctgaccgagaccgtgtacggcgacagaggccagctgatcaagagcaaggagagaagagtgttcctgctgaacgacatgctggtgtgcgccaacatcaacttcaagcccgccaaccacagaggccagctggagatcagcagcctggtgcccctgggccccaagtacgtggtgaagtggaacaccgccctgccccaggtgcaggtggtggaggtgggccaggacggcggcacctacgacaaggacaacgtgctgatccagcacagcggcgccaagaaggccagcgccagcggccaggcccagaacaaggtgtacctgggcccccccagactgttccaggagctgcaggacctgcagaaggacctggccgtggtggagcagatcaccctgctgatcagcaccctgcacggcacctaccagaacctgaacatgaccgtggcccaggactggtgcctggccctgcagagactgatgagagtgaaggaggaggagatccacagcgccaacaagtgcagactgagactgctgctgcccggcaagcccgacaagagcggcagacccatcagcttcatggtggtgttcatcacccccaaccccctgagcaagatcagctgggtgaacagactgcacctggccaagatcggcctgagagaggagaaccagcccggctggctgtgccccgacgaggacaagaagagcaaggcccccttctggtgccccatcctggcctgctgcatccccgccttcagcagcagagccctgagcctgcagctgggcgccctggtgcacagccccgtgaactgccccctgctgggcttcagcgccgtgagcaccagcctgccccagggctacctgtgggtgggcggcggccaggagggcgccggcggccaggtggagatcttcagcctgaacagacccagccccagaaccgtgaagagcttccccctggccgcccccgtgctgtgcatggagtacatccccgagctggaggaggaggccgagagcagagacgagagccccaccgtggccgaccccagcgccaccgtgcaccccaccatctgcctgggcctgcaggacggcagcatcctgctgtacagcagcgtggacaccggcacccagtgcctggtgagctgcagaagccccggcctgcagcccgtgctgtgcctgagacacagccccttccacctgctggccggcctgcaggacggcaccctggccgcctaccccagaaccagcggcggcgtgctgtgggacctggagagcccccccgtgtgcctgaccgtgggccccggccccgtgagaaccctgctgagcctggaggacgccgtgtgggccagctgcggcccctgggtgaccgtgctggaggccaccaccctgcagccccagcagagcttcgaggcccaccaggacgaggccgtgagcgtgacccacatggtgaaggccggcagcggcgtgtggatggccttcagcagcggcaccagcatcagactgttccacaccgagaccctggagcacctgcaggagatcaacatcgccaccagaaccaccttcctgctgcccggccagaagcacctgtgcgtgaccagcctgctgatctgccagggcctgctgtgggtgggcaccgaccagggcgtgatcgtgctgctgcccgtgcccagactggagggcatccccaagatcaccggcaagggcatggtgagcctgaacggccactgcggccccgtggccttcctggccgtggccaccagcatcctggcccccgacatcctgagaagcgaccaggaggaggccgagggccccagagccgaggaggacaagcccgacggccaggcccacgagcccatgcccgacagccacgtgggcagagagctgaccagaaagaagggcatcctgctgcagtacagactgagaagcaccgcccacctgcccggccccctgctgagcatgagagagcccgcccccgccgacggcgccgccctggagcacagcgaggaggacggcagcatctacgagatggccgacgaccccgacatctgggtgagaagcagaccctgcgccagagacgcccacagaaaggagatctgcagcgtggccatcatcagcggcggccagggctacagaaacttcggcagcgccctgggcagcagcggcagacaggccccctgcggcgagaccgacagcaccctgctgatctggcaggtgcccctgatgctgtag

SEQ ID NO: 97193 - DNA, 3159 bp, synthetic construct
  misc_feature 1..3159: note = Description of Artificial Sequence: Synthetic coding sequence
  source 1..3159: mol_type = other DNA
atgctgcccagcagcagctggggcaagagaaagctgagaggcagactgggctgggtgagaagcgacgccagaggcgtgatgtgggccagacaggagggcctgcaccacccccacccccacgccgtgatcagatgccccagcagcagcagcagcagcgtgagctgcagcggcgacagcgaggaggaggacatgggcctgctggaggtgagcgtgagcgacatcaagccccccgcccccgagctgggccccatgcccgagggcctgagcccccagcaggtggtgagaagacacatcctgggcagcatcgtgcagagcgagggcagctacgtggagagcctgaagagaatcctgcaggactacagaaaccccctgatggagatggagcccaaggccctgagcgccagaaagtgccaggtggtgttcttcagagtgaaggagatcctgcactgccacagcatgttccagatcgccctgagcagcagagtggccgagtgggacagcaccgagaagatcggcgacctgttcgtggccagcttcagcaagagcatggtgctggacgtgtacagcgactacgtgaacaacttcaccagcgccatgagcatcatcaagaaggcctgcctgaccaagcccgccttcctggagttcctgaagagaagacaggtgtgcagccccgacagagtgaccctgtacggcctgatggtgaagcccatccagagattcccccagttcatcctgctgctgcaggacatgctgaagaacacccccagaggccaccccgacagactgagcctgcagctggccctgaccgagctggagaccctggccgagaagctgaacgagcagaagagactggccgaccaggtggccgagatccagcagctgaccaagagcgtgagcgacagaagcagcctgaacaagctgctgaccagcggccagagacagctgctgctgtgcgagaccctgaccgagaccgtgtacggcgacagaggccagctgatcaagagcaaggagagaagagtgttcctgctgaacgacatgctggtgtgcgccaacatcaacttcaagggccagctggagatcagcagcctggtgcccctgggccccaagtacgtggtgaagtggaacaccgccctgccccaggtgcaggtggtggaggtgggccaggacggcggcacctacgacaaggacaacgtgctgatccagcacagcggcgccaagaaggccagcgccagcggccaggcccagaacaaggtgtacctgggcccccccagactgttccaggagctgcaggacctgcagaaggacctggccgtggtggagcagatcaccctgctgatcagcaccctgcacggcacctaccagaacctgaacatgaccgtggcccaggactggtgcctggccctgcagagactgatgagagtgaaggaggaggagatccacagcgccaacaagtgcagactgagactgctgctgcccggcaagcccgacaagagcggcagacccatcagcttcatggtggtgttcatcacccccaaccccctgagcaagatcagctgggtgaacagactgcacctggccaagatcggcctgagagaggagaaccagcccggctggctgtgccccgacgaggacaagaagagcaaggcccccttctggtgccccatcctggcctgctgcatccccgccttcagcagcagagccctgagcctgcagctgggcgccctggtgcacagccccgtgaactgccccctgctgggcttcagcgccgtgagcaccagcctgccccagggctacctgtgggtgggcggcggccaggagggcgccggcggccaggtggagatcttcagcctgaacagacccagccccagaaccgtgaagagcttccccctggccgcccccgtgctgtgcatggagtacatccccgagctggaggaggaggccgagagcagagacgagagccccaccgtggccgaccccagcgccaccgtgcaccccaccatctgcctgggcctgcaggacggcagcatcctgctgtacagcagcgtggacaccggcacccagtgcctggtgagctgcagaagccccggcctgcagcccgtgctgtgcctgagacacagccccttccacctgctggccggcctgcaggacggcaccctggccgcctaccccagaaccagcggcggcgtgctgtgggacctggagagcccccccgtgtgcctgaccgtgggccccggccccgtgagaaccctgctgagcctggaggacgccgtgtgggccagctgcggcccctgggtgaccgtgctggaggccaccaccctgcagccccagcagagcttcgaggcccaccaggacgaggccgtgagcgtgacccacatggtgaaggccggcagcggcgtgtggatggccttcagcagcggcaccagcatcagactgttccacaccgagaccctggagcacctgcaggagatcaacatcgccaccagaaccaccttcctgctgcccggccagaagcacctgtgcgtgaccagcctgctgatctgccagggcctgctgtgggtgggcaccgaccagggcgtgatcgtgctgctgcccgtgcccagactggagggcatccccaagatcaccggcaagggcatggtgagcctgaacggccactgcggccccgtggccttcctggccgtggccaccagcatcctggcccccgacatcctgagaagcgaccaggaggaggccgagggccccagagccgaggaggacaagcccgacggccaggcccacgagcccatgcccgacagccacgtgggcagagagctgaccagaaagaagggcatcctgctgcagtacagactgagaagcaccgcccacctgcccggccccctgctgagcatgagagagcccgcccccgccgacggcgccgccctggagcacagcgaggaggacggcagcatctacgagatggccgacgaccccgacatctgggtgagaagcagaccctgcgccagagacgcccacagaaaggagatctgcagcgtggccatcatcagcggcggccagggctacagaaacttcggcagcgccctgggcagcagcggcagacaggccccctgcggcgagaccgacagcaccctgctgatctggcaggtgcccctgatgctgtag

SEQ ID NO: 97194 - DNA, 3723 bp, synthetic construct
  misc_feature 1..3723: note = Description of Artificial Sequence: Synthetic coding sequence
  source 1..3723: mol_type = other DNA
atggccagcagcaacccccccccccagcccgccatcggcgaccagctggtgcccggcgtgcccggccccagcagcgaggccgaggacgaccccggcgaggccttcgagttcgacgacagcgacgacgaggaggacaccagcgccgccctgggcgtgcccagcctggcccccgagagagacaccgacccccccctgatccacctggacagcatccccgtgaccgaccccgaccccgccgccgccccccccggcaccggcgtgcccgcctgggtgagcaacggcgacgccgccgacgccgccttcagcggcgccagacacagcagctggaagagaaagagcagcagaagaatcgacagattcaccttccccgccctggaggaggacgtgatctacgacgacgtgccctgcgagagccccgacgcccaccagcccggcgccgagagaaacctgctgtacgaggacgcccacagagccggcgcccccagacaggccgaggacctgggctggagcagcagcgagttcgagagctacagcgaggacagcggcgaggaggccaagcccgaggtggaggtggagcccgccaagcacagagtgagcttccagcccaagatgacccagctgatgaaggccgccaagagcggcaccaaggacggcctggagaagaccagaatggccgtgatgagaaaggtgagcttcctgcacagaaaggacgtgctgggcgacagcgaggaggaggacatgggcctgctggaggtgagcgtgagcgacatcaagccccccgcccccgagctgggccccatgcccgagggcctgagcccccagcaggtggtgagaagacacatcctgggcagcatcgtgcagagcgagggcagctacgtggagagcctgaagagaatcctgcaggactacagaaaccccctgatggagatggagcccaaggccctgagcgccagaaagtgccaggtggtgttcttcagagtgaaggagatcctgcactgccacagcatgttccagatcgccctgagcagcagagtggccgagtgggacagcaccgagaagatcggcgacctgttcgtggccagcttcagcaagagcatggtgctggacgtgtacagcgactacgtgaacaacttcaccagcgccatgagcatcatcaagaaggcctgcctgaccaagcccgccttcctggagttcctgaagagaagacaggtgtgcagccccgacagagtgaccctgtacggcctgatggtgaagcccatccagagattcccccagttcatcctgctgctgcaggacatgctgaagaacacccccagaggccaccccgacagactgagcctgcagctggccctgaccgagctggagaccctggccgagaagctgaacgagcagaagagactggccgaccaggtggccgagatccagcagctgaccaagagcgtgagcgacagaagcagcctgaacaagctgctgaccagcggccagagacagctgctgctgtgcgagaccctgaccgagaccgtgtacggcgacagaggccagctgatcaagagcaaggagagaagagtgttcctgctgaacgacatgctggtgtgcgccaacatcaacttcaagcccgccaaccacagaggccagctggagatcagcagcctggtgcccctgggccccaagtacgtggtgaagtggaacaccgccctgccccaggtgcaggtggtggaggtgggccaggacggcggcacctacgacaaggacaacgtgctgatccagcacagcggcgccaagaaggccagcgccagcggccaggcccagaacaaggtgtacctgggcccccccagactgttccaggagctgcaggacctgcagaaggacctggccgtggtggagcagatcaccctgctgatcagcaccctgcacggcacctaccagaacctgaacatgaccgtggcccaggactggtgcctggccctgcagagactgatgagagtgaaggaggaggagatccacagcgccaacaagtgcagactgagactgctgctgcccggcaagcccgacaagagcggcagacccatcagcttcatggtggtgttcatcacccccaaccccctgagcaagatcagctgggtgaacagactgcacctggccaagatcggcctgagagaggagaaccagcccggctggctgtgccccgacgaggacaagaagagcaaggcccccttctggtgccccatcctggcctgctgcatccccgccttcagcagcagagccctgagcctgcagctgggcgccctggtgcacagccccgtgaactgccccctgctgggcttcagcgccgtgagcaccagcctgccccagggctacctgtgggtgggcggcggccaggagggcgccggcggccaggtggagatcttcagcctgaacagacccagccccagaaccgtgaagagcttccccctggccgcccccgtgctgtgcatggagtacatccccgagctggaggaggaggccgagagcagagacgagagccccaccgtggccgaccccagcgccaccgtgcaccccaccatctgcctgggcctgcaggacggcagcatcctgctgtacagcagcgtggacaccggcacccagtgcctggtgagctgcagaagccccggcctgcagcccgtgctgtgcctgagacacagccccttccacctgctggccggcctgcaggacggcaccctggccgcctaccccagaaccagcggcggcgtgctgtgggacctggagagcccccccgtgtgcctgaccgtgggccccggccccgtgagaaccctgctgagcctggaggacgccgtgtgggccagctgcggcccctgggtgaccgtgctggaggccaccaccctgcagccccagcagagcttcgaggcccaccaggacgaggccgtgagcgtgacccacatggtgaaggccggcagcggcgtgtggatggccttcagcagcggcaccagcatcagactgttccacaccgagaccctggagcacctgcaggagatcaacatcgccaccagaaccaccttcctgctgcccggccagaagcacctgtgcgtgaccagcctgctgatctgccagggcctgctgtgggtgggcaccgaccagggcgtgatcgtgctgctgcccgtgcccagactggagggcatccccaagatcaccggcaagggcatggtgagcctgaacggccactgcggccccgtggccttcctggccgtggccaccagcatcctggcccccgacatcctgagaagcgaccaggaggaggccgagggccccagagccgaggaggacaagcccgacggccaggcccacgagcccatgcccgacagccacgtgggcagagagctgaccagaaagaagggcatcctgctgcagtacagactgagaagcaccgcccacctgcccggccccctgctgagcatgagagagcccgcccccgccgacggcgccgccctggagcacagcgaggaggacggcagcatctacgagatggccgacgaccccgacatctgggtgagaagcagaccctgcgccagagacgcccacagaaaggagatctgcagcgtggccatcatcagcggcggccagggctacagaaacttcggcagcgccctgggcagcagcggcagacaggccccctgcggcgagaccgacagcaccctgctgatctggcaggtgcccctgatgctgtag

SEQ ID NO: 97195 - DNA, 1467 bp, synthetic construct
  misc_feature 1..1467: note = Description of Artificial Sequence: Synthetic coding sequence
  source 1..1467: mol_type = other DNA
atgacccagctgatgaaggccgccaagagcggcaccaaggacggcctggagaagaccagaatggccgtgatgagaaaggtgagcttcctgcacagaaaggacgtgctgggcgacagcgaggaggaggacatgggcctgctggaggtgagcgtgagcgacatcaagccccccgcccccgagctgggccccatgcccgagggcctgagcccccagcaggtggtgagaagacacatcctgggcagcatcgtgcagagcgagggcagctacgtggagagcctgaagagaatcctgcaggactacagaaaccccctgatggagatggagcccaaggccctgagcgccagaaagtgccaggtggtgttcttcagagtgaaggagatcctgcactgccacagcatgttccagatcgccctgagcagcagagtggccgagtgggacagcaccgagaagatcggcgacctgttcgtggccagcttcagcaagagcatggtgctggacgtgtacagcgactacgtgaacaacttcaccagcgccatgagcatcatcaagaaggcctgcctgaccaagcccgccttcctggagttcctgaagagaagacaggtgtgcagccccgacagagtgaccctgtacggcctgatggtgaagcccatccagagattcccccagttcatcctgctgctgcaggacatgctgaagaacacccccagaggccaccccgacagactgagcctgcagctggccctgaccgagctggagaccctggccgagaagctgaacgagcagaagagactggccgaccaggtggccgagatccagcagctgaccaagagcgtgagcgacagaagcagcctgaacaagctgctgaccagcggccagagacagctgctgctgtgcgagaccctgaccgagaccgtgtacggcgacagaggccagctgatcaagagcaaggagagaagagtgttcctgctgaacgacatgctggtgtgcgccaacatcaacttcaagcccgccaaccacagaggccagctggagatcagcagcctggtgcccctgggccccaagtacgtggtgaagtggaacaccgccctgccccaggtgcaggtggtggaggtgggccaggacggcggcacctacgacaaggacaacgtgctgatccagcacagcggcgccaagaaggccagcgccagcggccaggcccagaacaaggtgtacctgggcccccccagactgttccaggagctgcaggacctgcagaaggacctggccgtggtggagcagatcaccctgctgatcagcaccctgcacggcacctaccagaacctgaacatgaccgtggcccaggactggtgcctggccctgcagagactgatgagagtgaaggaggaggagatccacagcgccaacaagtgcagactgagactgctgctgcccggcaagcccgacaagggcacctggagcgacatgtag

SEQ ID NO: 97196 - DNA, 3204 bp, synthetic construct
  misc_feature 1..3204: note = Description of Artificial Sequence: Synthetic coding sequence
  source 1..3204: mol_type = other DNA
atggccagcagcaacccccccccccagcccgccatcggcgaccagctggtgcccggcgtgcccggccccagcagcgaggccgaggacgaccccggcgaggccttcgagttcgacgacagcgacgacgaggaggacaccagcgccgccctgggcgtgcccagcctggcccccgagagagacaccgacccccccctgatccacctggacagcatccccgtgaccgaccccgaccccgccgccgccccccccggcaccggcgtgcccgcctgggtgagcaacggcgacgccgccgacgccgccttcagcggcgccagacacagcagctggaagagaaagagcagcagaagaatcgacagattcaccttccccgccctggaggaggacgtgatctacgacgacgtgccctgcgagagccccgacgcccaccagcccggcgccgagagaaacctgctgtacgaggacgcccacagagccggcgcccccagacaggccgaggacctgggctggagcagcagcgagttcgagagctacagcgaggacagcggcgaggaggccaagcccgaggtggaggtggagcccgccaagcacagagtgagcttccagcccaagctgagccccgacctgaccagactgaaggagagatacgccagaaccaagagagacatcctggccctgagagtgggcggcagagacatgcaggagctgaagcacaagtacgactgcaagatgacccagctgatgaaggccgccaagagcggcaccaaggacggcctggagaagaccagaatggccgtgatgagaaaggtgagcttcctgcacagaaaggacgtgctgggcgacagcgaggaggaggacatgggcctgctggaggtgagcgtgagcgacatcaagccccccgcccccgagctgggccccatgcccgagggcctgagcccccagcaggtggtgagaagacacatcctgggcagcatcgtgcagagcgagggcagctacgtggagagcctgaagagaatcctgcaggactacagaaaccccctgatggagatggagcccaaggccctgagcgccagaaagtgccaggtggtgttcttcagagtgaaggagatcctgcactgccacagcatgttccagatcgccctgagcagcagagtggccgagtgggacagcaccgagaagatcggcgacctgttcgtggccagcttcagcaagagcatggtgctggacgtgtacagcgactacgtgaacaacttcaccagcgccatgagcatcatcaagaaggcctgcctgaccaagcccgccttcctggagttcctgaagagaagacaggtgtgcagccccgacagagtgaccctgtacggcctgatggtgaagcccatccagagattcccccagttcatcctgctgctgcaggacatgctgaagaacacccccagaggccaccccgacagactgagcctgcagctggccctgaccgagctggagaccctggccgagaagctgaacgagcagaagagactggccgaccaggtggccgagatccagcagctgaccaagagcgtgagcgacagaagcagcctgaacaagctgctgaccagcggccagagacagctgctgctgtgcgagaccctgaccgagaccgtgtacggcgacagaggccagctgatcaagagcaaggagagaagagtgttcctgctgaacgacatgctggtgtgcgccaacatcaacttcaagggccagctggagatcagcagcctggtgcccctgggccccaagtacgtggtgaagtggaacaccgccctgccccaggtgcaggtggtggaggtgggccaggacggcggcacctacgacaaggacaacgtgctgatccagcacagcggcgccaagaaggccagcgccagcggccaggcccagaacaaggtgtacctgggcccccccagactgttccaggagctgcaggacctgcagaaggacctggccgtggtggagcagatcaccctgctgatcagcaccctgcacggcacctaccagaacctgaacatgaccgtggcccaggactggtgcctggccctgcagagactgatgagagtgaaggaggaggagatccacagcgccaacaagtgcagactgagactgctgctgcccggcaagcccgacaagagcggcagacccatcagcttcatggtggtgttcatcacccccaaccccctgagcaagatcagctgggtgaacagactgcacctggccaagatcggcctgagagaggagaaccagcccggctggctgtgccccgacgaggacaagaagagcaaggcccccttctggtgccccatcctggcctgctgcatccccgccttcagcagcagagccctgagcctgcagctgggcgccctggtgcacagccccgtgaactgccccctgctgggcttcagcgccgtgagcaccagcctgccccagggctacctgtgggtgggcggcggccaggagggcgccggcggccaggtggagatcttcagcctgaacagacccagccccagaaccgtgaagagcttccccctggccgcccccgtgctgtgcatggagtacatccccgagctggaggaggaggccgagagcagagacgagagccccaccgtggccgaccccagcgccaccgtgcaccccaccatctgcctgggcctgcaggacggcagcatcctgctgtacagcagcgtggacaccggcacccagtgcctggtgagctgcagaagccccggcctgcagcccgtgctgtgcctgagacacagccccttccacctgctggccggcctgcaggacggcaccctggccgcctaccccagaaccagcggcggcgtgctgtgggacctggagagcccccccgtgtgcctgaccgtgggccccggccccgtgagaaccctgctgagcctggaggacgccgtgtgggccagctgcggcccctgggtgaccgtgctggaggccaccaccctgcagccccagcagagcttcgaggcccaccaggacgaggccgtgagcgtgacccacatggtgaaggccggcagcggcgtgtggatggccttcagcagcggcaccagcatcagactgttccacaccgagaccctggagcacctgcaggagatcaacatcgccaccagaaccaccttcctgctgcccgacagaagcctgatcaagtgcagccccagagcctag

SEQ ID NO: 97197 - DNA, 3723 bp, synthetic construct; identical to SEQ ID NO: 97194
  misc_feature 1..3723: note = Description of Artificial Sequence: Synthetic coding sequence
  source 1..3723: mol_type = other DNA

SEQ ID NO: 97198 - DNA, 3129 bp, synthetic construct
  misc_feature 1..3129: note = Description of Artificial Sequence: Synthetic coding sequence
  source 1..3129: mol_type = other DNA
atgctgcccagcagcagctggggcaagagaaagctgagaggcagactgggctgggtgagaagcgacgccagaggcgtgatgtgggccagacaggagggcctgcaccacccccacccccacgccgtgatcagatgccccagcagcagcagcagcagcgtgagctgcagcggcgacagcgaggaggaggacatgggcctgctggaggtgagcgtgagcgacatcaagccccccgcccccgagctgggccccatgcccgagggcctgagcccccagcaggtggtgagaagacacatcctgggcagcatcgtgcagagcgagggcagctacgtggagagcctgaagagaatcctgcaggactacagaaaccccctgatggagatggagcccaaggccctgagcgccagaaagtgccaggtggtgttcttcagagtgaaggagatcctgcactgccacagcatgttccagatcgccctgagcagcagagtggccgagtgggacagcaccgagaagatcggcgacctgttcgtggccagcttcagcaagagcatggtgctggacgtgtacagcgactacgtgaacaacttcaccagcgccatgagcatcatcaagaaggcctgcctgaccaagcccgccttcctggagttcctgaagagaagacaggtgtgcagccccgacagagtgaccctgtacggcctgatggtgaagcccatccagagattcccccagttcatcctgctgctgcaggacatgctgaagaacacccccagaggccaccccgacagactgagcctgcagctggccctgaccgagctggagaccctggccgagaagctgaacgagcagaagagactggccgaccaggtggccgagatccagcagctgaccaagagcgtgagcgacagaagcagcctgaacaagctgctgaccagcggccagagacagctgctgctgtgcgagaccctgaccgagaccgtgtacggcgacagaggccagctgatcaagagcaaggagagaagagtgttcctgctgaacgacatgctggtgtgcgccaacatcaacttcaagggccagctggagatcagcagcctggtgcccctgggccccaagtacgtggtgaagtggaacaccgccctgccccaggtgcaggtggtggaggtgggccaggacggcggcacctacgacaaggacaacgtgctgatccagcacagcggcgccaagaaggccagcgccagcggccaggcccagaacaaggtgtacctgggcccccccagactgttccaggagctgcaggacctgcagaaggacctggccgtggtggagcagatcaccctgctgatcagcaccctgcacggcacctaccagaacctgaacatgaccgtggcccaggactggtgcctggccctgcagagactgatgagagtgaaggaggaggagatccacagcgccaacaagtgcagactgagactgctgctgcccggcaagcccgacaagagcggcagacccatcagcttcatggtggtgttcatcacccccaaccccctgagcaagatcagctgggtgaacagactgcacctggccaagatcggcctgagagaggagaaccagcccggctggctgtgccccgacgaggacaagaagagcaaggcccccttctggtgccccatcctggcctgctgcatccccgccttcagcagcagagccctgagcctgcagctgggcgccctggtgcacagccccgtgaactgccccctgctgggcttcagcgccgtgagcaccagcctgccccagggctacctgtgggtgggcggcggccaggagggcgccggcggccaggtggagatcttcagcctgaacagacccagccccagaaccgtgaagagcttccccctggccgcccccgtgctgtgcatggagtacatccccgagctggaggaggaggccgagagcagagacgagagccccaccgtggccgaccccagcgccaccgtgcaccccaccatctgcctgggcctgcaggacggcagcatcctgctgtacagcagcgtggacaccggcacccagtgcctggtgagctgcagaagccccggcctgcagcccgtgctgtgcctgagacacagccccttccacctgctggccggcctgcaggacggcaccctggccgcctaccccagaaccagcggcggcgtgctgtgggacctggagagcccccccgtgtgcctgaccgtgggccccggccccgtgagaaccctgctgagcctggaggacgccgtgtgggccagctgcggcccctgggtgaccgtgctggaggccaccaccctgcagccccagcagagcttcgaggcccaccaggacgaggccgtgagcgtgacccacatggtgaaggccggcagcggcgtgtggatggccttcagcagcggcaccagcatcagactgttccacaccgagaccctggagcacctgcaggagatcaacatcgccaccagaaccaccttcctgctgcccggccagaagcacctgtgcgtgaccagcctgctgatctgccagggcctgctgtgggtgggcaccgaccagggcgtgatcgtgctgctgcccgtgcccagactggagggcatccccaagatcaccggcaagggcatggtgagcctgaacggccactgcggccccgtggccttcctggccgtggccaccagcatcctggcccccgacatcctgagaagcgaccaggaggaggccgagggccccagagccgaggaggacaagcccgacggccaggcccacgagcccatgcccgacagccacgtgggcagagagctgaccagaaagaagggcatcctgctgcagtacagactgagaagcaccgcccacctgcccggccccctgctgagcatgagagagcccgcccccgccgacggcgccgccctggagcacagcgaggaggacggcagcatctacgagatggccttcttcctgaaggccaagaacaccaagccccacaactgcctggccagccccgtgagcctggtgtgggccctggccggcctgcagggcagccacacccccctgctggagggctgcgtgagagtgagcgtgtgcgagtgcgtgggctggtgcgtgaacatctacaagtag

SEQ ID NO: 97199 - DNA, 4578 bp, synthetic construct
  misc_feature 1..4578: note = Description of Artificial Sequence: Synthetic coding sequence
  source 1..4578: mol_type = other DNA
atgagcggcacccagagcaccatcaccgacagattccccctgaagaagcccatcagacacggcagcatcctgaacagagagagccccaccgacaagaagcagaaggtggagagaatcgccagccacgacttcgaccccaccggcctggtgcagagatgcgtgatcatccagaaggacgacaacggcttcggcctgaccgtgagcggcgacaaccccgtgttcgtgcagagcgtgaaggaggacggcgccgccatgagagccggcgtgcagaccggcgacagaatcatcaaggtgaacggcaccctggtgacccacagcaaccacctggaggtggtgaagctgatcaagagcggcagctacgtggccctgaccgtgcagggcagaccccccggcagcccccagatccccctggccgacagcgaggtggagcccagcgtgatcggccacatgagccccatcatgaccagcccccacagccccggcgccagcggcaacatggagagaatcaccagccccgtgctgatgggcgaggagaacaacgtggtgcacaaccagaaggtggagatcctgagaaagatgctgcagaaggagcaggagagactgcagctgctgcaggaggactacaacagaacccccgcccagagactgctgaaggagatccaggaggccaagaagcacatcccccagctgcaggagcagctgagcaaggccaccggcagcgcccaggacggcgccgtggtgacccccagcagacccctgggcgacaccctgaccgtgagcgaggccgagaccgaccccggcgacgtgctgggcagaaccgactgcagcagcggcgacgccagcagacccagcagcgacaacgccgacagccccaagagcggccccaaggagagaatctacctggaggagaaccccgagaagagcgagaccatccaggacaccgacacccagagcctggtgggcagccccagcaccagaatcgccccccacatcatcggcgccgaggacgacgacttcggcaccgagcacgagcagatcaacggccagtgcagctgcttccagagcatcgagctgctgaagagcagacccgcccacctggccgtgttcctgcaccacgtggtgagccagttcgaccccgccaccctgctgtgctacctgtacagcgacctgtacaagcacaccaacagcaaggagaccagaagaatcttcctggagttccaccagttcttcctggacagaagcgcccacctgaaggtgagcgtgcccgacgagatgagcgccgacctggagaagagaagacccgagctgatccccgaggacctgcacagacactacatccagaccatgcaggagagagtgcaccccgaggtgcagagacacctggaggacttcagacagaagagaagcatgggcctgaccctggccgagagcgagctgaccaagctggacgccgagagagacaaggacagactgaccctggagaaggagagaacctgcgccgagcagatcgtggccaagatcgaggaggtgctgatgaccgcccaggccgtggaggaggacaagagcagcaccatgcagtacgtgatcctgatgtacatgaagcacctgggcgtgaaggtgaaggagcccagaaacctggagcacaagagaggcagaatcggcttcctgcccaagatcaagcagagcatgaagaaggacaaggagggcgaggagaagggcaagagaagaggcttccccagcatcctgggcccccccagaagacccagcagacacgacaacagcgccatcggcagagccatggagctgcagaaggccagacaccccaagcacctgagcacccccagcagcgtgagccccgagccccaggacagcgccaagctgagacagagcggcctggccaacgagggcaccgacgccggctacctgcccgccaacagcatgagcagcgtggccagcggcgccagcttcagccaggagggcggcaaggagaacgacaccggcagcaagcaggtgggcgagaccagcgcccccggcgacaccctggacggcacccccagaaccctgaacaccgtgttcgacttcccccccccccccctggaccaggtgcaggaggaggagtgcgaggtggagagagtgaccgagcacggcacccccaagcccttcagaaagttcgacagcgtggccttcggcgagagccagagcgaggacgagcagttcgagaacgacctggagaccgacccccccaactggcagcagctggtgagcagagaggtgctgctgggcctgaagccctgcgagatcaagagacaggaggtgatcaacgagctgttctacaccgagagagcccacgtgagaaccctgaaggtgctggaccaggtgttctaccagagagtgagcagagagggcatcctgagccccagcgagctgagaaagatcttcagcaacctggaggacatcctgcagctgcacatcggcctgaacgagcagatgaaggccgtgagaaagagaaacgagaccagcgtgatcgaccagatcggcgaggacctgctgacctggttcagcggccccggcgaggagaagctgaagcacgccgccgccaccttctgcagcaaccagcccttcgccctggagatgatcaagagcagacagaagaaggacagcagattccagaccttcgtgcaggacgccgagagcaaccccctgtgcagaagactgcagctgaaggacatcatccccacccagatgcagagactgaccaagtaccccctgctgctggacaacatcgccaagtacaccgagtggcccaccgagagagagaaggtgaagaaggccgccgaccactgcagacagatcctgaactacgtgaaccaggccgtgaaggaggccgagaacaagcagagactggaggactaccagagaagactggacaccagcagcctgaagctgagcgagtaccccaacgtggaggagctgagaaacctggacctgaccaagagaaagatgatccacgagggccccctggtgtggaaggtgaacagagacaagaccatcgacctgtacaccctgctgctggaggacatcctggtgctgctgcagaagcaggacgacagactggtgctgagatgccacagcaagatcctggccagcaccgccgacagcaagcacaccttcagccccgtgatcaagctgagcaccgtgctggtgagacaggtggccaccgacaacaaggccctgttcgtgatcagcatgagcgacaacggcgcccagatctacgagctggtggcccagaccgtgagcgagaagaccgtgtggcaggacctgatctgcagaatggccgccagcgtgaaggagcagagcaccaagcccatccccctgccccagagcacccccggcgagggcgacaacgacgaggaggaccccagcaagctgaaggaggagcagcacggcatcagcgtgaccggcctgcagagccccgacagagacctgggcctggagagcaccctgatcagcagcaagccccagagccacagcctgagcaccagcggcaagagcgaggtgagagacctgttcgtggccgagagacagttcgccaaggagcagcacaccgacggcaccctgaaggaggtgggcgaggactaccagatcgccatccccgacagccacctgcccgtgagcgaggagagatgggccctggacgccctgagaaacctgggcctgctgaagcagctgctggtgcagcagctgggcctgaccgagaagagcgtgcaggaggactggcagcacttccccagatacagaaccgccagccagggcccccagaccgacagcgtgatccagaacagcgagaacatcaaggcctaccacagcggcgagggccacatgcccttcagaaccggcaccggcgacatcgccacctgctacagccccagaaccagcaccgagagcttcgcccccagagacagcgtgggcctggccccccaggacagccaggccagcaacatcctggtgatggaccacatgatcatgacccccgagatgcccaccatggagcccgagggcggcctggacgacagcggcgagcacttcttcgacgccagagaggcccacagcgacgagaaccccagcgagggcgacggcgccgtgaacaaggaggagaaggacgtgaacctgagaatcagcggcaactacctgatcctggacggctacgaccccgtgcaggagagcagcaccgacgaggaggtggccagcagcctgaccctgcagcccatgaccggcatccccgccgtggagagcacccaccagcagcagcacagcccccagaacacccacagcgacggcgccatcagccccttcacccccgagttcctggtgcagcagagatggggcgccatggagtacagctgcttcgagatccagagccccagcagctgcgccgacagccagagccagatcatggagtacatccacaagatcgaggccgacctggagcacctgaagaaggtggaggagagctacaccatcctgtgccagagactggccggcagcgccctgaccgacaagcacagcgacaagagctag

SEQ ID NO: 97200 - DNA, 4635 bp, synthetic construct
  misc_feature 1..4635: note = Description of Artificial Sequence: Synthetic coding sequence
  source 1..4635: mol_type = other DNA
atgagcggcacccagagcaccatcaccgacagattccccctgaagaagcccatcagacacggcagcatcctgaacagagagagccccaccgacaagaagcagaaggtggagagaatcgccagccacgacttcgaccccaccgacagcagcagcaagaagaccaagagcagcagcgaggagagcagaagcgagatctacggcctggtgcagagatgcgtgatcatccagaaggacgacaacggcttcggcctgaccgtgagcggcgacaaccccgtgttcgtgcagagcgtgaaggaggacggcgccgccatgagagccggcgtgcagaccggcgacagaatcatcaaggtgaacggcaccctggtgacccacagcaaccacctggaggtggtgaagctgatcaagagcggcagctacgtggccctgaccgtgcagggcagaccccccggcagcccccagatccccctggccgacagcgaggtggagcccagcgtgatcggccacatgagccccatcatgaccagcccccacagccccggcgccagcggcaacatggagagaatcaccagccccgtgctgatgggcgaggagaacaacgtggtgcacaaccagaaggtggagatcctgagaaagatgctgcagaaggagcaggagagactgcagctgctgcaggaggactacaacagaacccccgcccagagactgctgaaggagatccaggaggccaagaagcacatcccccagctgcaggagcagctgagcaaggccaccggcagcgcccaggacggcgccgtggtgacccccagcagacccctgggcgacaccctgaccgtgagcgaggccgagaccgaccccggcgacgtgctgggcagaaccgactgcagcagcggcgacgccagcagacccagcagcgacaacgccgacagccccaagagcggccccaaggagagaatctacctggaggagaaccccgagaagagcgagaccatccaggacaccgacacccagagcctggtgggcagccccagcaccagaatcgccccccacatcatcggcgccgaggacgacgacttcggcaccgagcacgagcagatcaacggccagtgcagctgcttccagagcatcgagctgctgaagagcagacccgcccacctggccgtgttcctgcaccacgtggtgagccagttcgaccccgccaccctgctgtgctacctgtacagcgacctgtacaagcacaccaacagcaaggagaccagaagaatcttcctggagttccaccagttcttcctggacagaagcgcccacctgaaggtgagcgtgcccgacgagatgagcgccgacctggagaagagaagacccgagctgatccccgaggacctgcacagacactacatccagaccatgcaggagagagtgcaccccgaggtgcagagacacctggaggacttcagacagaagagaagcatgggcctgaccctggccgagagcgagctgaccaagctggacgccgagagagacaaggacagactgaccctggagaaggagagaacctgcgccgagcagatcgtggccaagatcgaggaggtgctgatgaccgcccaggccgtggaggaggacaagagcagcaccatgcagtacgtgatcctgatgtacatgaagcacctgggcgtgaaggtgaaggagcccagaaacctggagcacaagagaggcagaatcggcttcctgcccaagatcaagcagagcatgaagaaggacaaggagggcgaggagaagggcaagagaagaggcttccccagcatcctgggcccccccagaagacccagcagacacgacaacagcgccatcggcagagccatggagctgcagaaggccagacaccccaagcacctgagcacccccagcagcgtgagccccgagccccaggacagcgccaagctgagacagagcggcctggccaacgagggcaccgacgccggctacctgcccgccaacagcatgagcagcgtggccagcggcgccagcttcagccaggagggcggcaaggagaacgacaccggcagcaagcaggtgggcgagaccagcgcccccggcgacaccctggacggcacccccagaaccctgaacaccgtgttcgacttcccccccccccccctggaccaggtgcaggaggaggagtgcgaggtggagagagtgaccgagcacggcacccccaagcccttcagaaagttcgacagcgtggccttcggcgagagccagagcgaggacgagcagttcgagaacgacctggagaccgacccccccaactggcagcagctggtgagcagagaggtgctgctgggcctgaagccctgcgagatcaagagacaggaggtgatcaacgagctgttctacaccgagagagcccacgtgagaaccctgaaggtgctggaccaggtgttctaccagagagtgagcagagagggcatcctgagccccagcgagctgagaaagatcttcagcaacctggaggacatcctgcagctgcacatcggcctgaacgagcagatgaaggccgtgagaaagagaaacgagaccagcgtgatcgaccagatcggcgaggacctgctgacctggttcagcggccccggcgaggagaagctgaagcacgccgccgccaccttctgcagcaaccagcccttcgccctggagatgatcaagagcagacagaagaaggacagcagattccagaccttcgtgcaggacgccgagagcaaccccctgtgcagaagactgcagctgaaggacatcatccccacccagatgcagagactgaccaagtaccccctgctgctggacaacatcgccaagtacaccgagtggcccaccgagagagagaaggtgaagaaggccgccgaccactgcagacagatcctgaactacgtgaaccaggccgtgaaggaggccgagaacaagcagagactggaggactaccagagaagactggacaccagcagcctgaagctgagcgagtaccccaacgtggaggagctgagaaacctggacctgaccaagagaaagatgatccacgagggccccctggtgtggaaggtgaacagagacaagaccatcgacctgtacaccctgctgctggaggacatcctggtgctgctgcagaagcaggacgacagactggtgctgagatgccacagcaagatcctggccagcaccgccgacagcaagcacaccttcagccccgtgatcaagctgagcaccgtgctggtgagacaggtggccaccgacaacaaggccctgttcgtgatcagcatgagcgacaacggcgcccagatctacgagctggtggcccagaccgtgagcgagaagaccgtgtggcaggacctgatctgcagaatggccgccagcgtgaaggagcagagcaccaagcccatccccctgccccagagcacccccggcgagggcgacaacgacgaggaggaccccagcaagctgaaggaggagcagcacggcatcagcgtgaccggcctgcagagccccgacagagacctgggcctggagagcaccctgatcagcagcaagccccagagccacagcctgagcaccagcggcaagagcgaggtgagagacctgttcgtggccgagagacagttcgccaaggagcagcacaccgacggcaccctgaaggaggtgggcgaggactaccagatcgccatccccgacagccacctgcccgtgagcgaggagagatgggccctggacgccctgagaaacctgggcctgctgaagcagctgctggtgcagcagctgggcctgaccgagaagagcgtgcaggaggactggcagcacttccccagatacagaaccgccagccagggcccccagaccgacagcgtgatccagaacagcgagaacatcaaggcctaccacagcggcgagggccacatgcccttcagaaccggcaccggcgacatcgccacctgctacagccccagaaccagcaccgagagcttcgcccccagagacagcgtgggcctggccccccaggacagccaggccagcaacatcctggtgatggaccacatgatcatgacccccgagatgcccaccatggagcccgagggcggcctggacgacagcggcgagcacttcttcgacgccagagaggcccacagcgacgagaaccccagcgagggcgacggcgccgtgaacaaggaggagaaggacgtgaacctgagaatcagcggcaactacctgatcctggacggctacgaccccgtgcaggagagcagcaccgacgaggaggtggccagcagcctgaccctgcagcccatgaccggcatccccgccgtggagagcacccaccagcagcagcacagcccccagaacacccacagcgacggcgccatcagccccttcacccccgagttcctggtgcagcagagatggggcgccatggagtacagctgcttcgagatccagagccccagcagctgcgccgacagccagagccagatcatggagtacatccacaagatcgaggccgacctggagcacctgaagaaggtggaggagagctacaccatcctgtgccagagactggccggcagcgccctgaccgacaagcacagcgacaagagctag

SEQ ID NO: 97201 - DNA, 2409 bp, synthetic construct
  misc_feature 1..2409: note = Description of Artificial Sequence: Synthetic coding sequence
  source 1..2409: mol_type = other DNA
atggactgcggcccccccgccaccctgcagccccacctgaccggcccccccggcaccgcccaccaccccgtggccgtgtgccagcaggagagcctgagcttcgccgagctgcccgccctgaagccccccagccccgtgtgcctggacctgttccccgtggcccccgaggagctgagagcccccggcagcagatggagcctgggcacccccgcccccctgcagggcctgctgtggcccctgagccccggcggcagcgacaccgagatcaccagcggcggcatgagacccagcagagccggcagctggccccactgccccggcgcccagccccccgccctggagggcccctggagccccagacacacccagccccagagaagagccagccacggcagcgagaagaagagcgcctggagaaagatgagagtgtaccagagagaggaggtgcccggctgccccgaggcccacgccgtgttcctggagcccggccaggtggtgcaggagcaggccctgagcaccgaggagcccagagtggagctgagcggcagcaccagagtgagcctggagggccccgagagaagaagattcagcgccagcgagctgatgaccagactgcacagcagcctgagactgggcagaaacagcgccgccagagccctgatcagcggcagcggcaccggcgccgccagagagggcaaggccagcggcatggaggccagaagcgtggagatgagcggcgacagagtgagcagacccgcccccggcgacagcagagagggcgactggagcgagcccagactggacacccaggaggagccccccctgggcagcagaagcaccaacgagagaagacagagcagattcctgctgaacagcgtgctgtaccaggagtacagcgacgtggccagcgccagagagctgagaagacagcagagagaggaggagggccccggcgacgaggccgagggcgccgaggagggccccggcccccccagagccaacctgagccccagcagcagcttcagagcccagagaagcgccagaggcagcaccttcagcctgtggcaggacatccccgacgtgagaggcagcggcgtgctggccaccctgagcctgagagactgcaagctgcaggaggccaagttcgagctgatcaccagcgaggccagctacatccacagcctgagcgtggccgtgggccacttcctgggcagcgccgagctgagcgagtgcctgggcgcccaggacaagcagtggctgttcagcaagctgcccgaggtgaagagcaccagcgagagattcctgcaggacctggagcagagactggaggccgacgtgctgagattcagcgtgtgcgacgtggtgctggaccactgccccgccttcagaagagtgtacctgccctacgtgaccaaccaggcctaccaggagagaacctaccagagactgctgctggagaaccccagattccccggcatcctggccagactggaggagagccccgtgtgccagagactgcccctgaccagcttcctgatcctgcccttccagagaatcaccagactgaagatgctggtggagaacatcctgaagagaaccgcccagggcagcgaggacgaggacatggccaccaaggccttcaacgccctgaaggagctggtgcaggagtgcaacgccagcgtgcagagcatgaagagaaccgaggagctgatccacctgagcaagaagatccacttcgagggcaagatcttccccctgatcagccaggccagatggctggtgagacacggcgagctggtggagctggcccccctgcccgccgccccccccgccaagctgaagctgagcagcaaggccgtgtacctgcacctgttcaacgactgcctgctgctgagcagaagaaaggagctgggcaagttcgccgtgttcgtgcacgccaagatggccgagctgcaggtgagagacctgagcctgaagctgcagggcatccccggccacgtgttcctgctgcagctgctgcacggccagcacatgaagcaccagttcctgctgagagccagaaccgagagcgagaagcagagatggatcagcgccctgtgccccagcagcccccaggaggacaaggaggtgatcagcgagggcgaggactgcccccaggtgcagtgcgtgagaacctacaaggccctgcaccccgacgagctgaccctggagaagaccgacatcctgagcgtgagaacctggaccagcgacggctggctggagggcgtgagactggccgacggcgagaagggctgggtgccccaggcctacgtggaggagatcagcagcctgagcgccagactgagaaacctgagagagaacaagagagtgaccagcgccaccagcaagctgggcgaggcccccgtgtag

SEQ ID NO: 97202 - DNA, 1575 bp, synthetic construct
  misc_feature 1..1575: note = Description of Artificial Sequence: Synthetic coding sequence
  source 1..1575: mol_type = other DNA
atggactgcggcccccccgccaccctgcagccccacctgaccggcccccccggcaccgcccaccaccccgtggccgtgtgccagcaggagagcctgagcttcgccgagctgcccgccctgaagccccccagccccgtgtgcctggacctgttccccgtggcccccgaggagctgagagcccccggcagcagatggagcctgggcacccccgcccccctgcagggcctgctgtggcccctgagccccggcggcagcgacaccgagatcaccagcggcggcatgagacccagcagagccggcagctggccccactgccccggcgcccagccccccgccctggagggcccctggagccccagacacacccagccccagagaagagccagccacggcagcgagaagaagagcgcctggagaaagatgagagtgtaccagagagaggaggtgcccggctgccccgaggcccacgccgtgttcctggagcccggccaggtggtgcaggagcaggccctgagcaccgaggagcccagagtggagctgagcggcagcaccagagtgagcctggagggccccgagagaagaagattcagcgccagcgagctgatgaccagactgcacagcagcctgagactgggcagaaacagcgccgccagagccctgatcagcggcagcggcaccggcgccgccagagagggcaaggccagcggcatggaggccagaagcgtggagatgagcggcgacagagtgagcagacccgcccccggcgacagcagagagggcgactggagcgagcccagactggacacccaggaggagccccccctgggcagcagaagcaccaacgagagaagacagagcagattcctgctgaacagcgtgctgtaccaggagtacagcgacgtggccagcgccagagagctgagaagacagcagagagaggaggagggccccggcgacgaggccgagggcgccgaggagggccccggcccccccagagccaacctgagccccagcagcagcttcagagcccagagaagcgccagaggcagcaccttcagcctgtggcaggacatccccgacgtgagaggcagcggcgtgctggccaccctgagcctgagagactgcaagctgcaggaggccaagttcgagctgatcaccagcgaggccagctacatccacagcctgagcgtggccgtgggccacttcctgggcagcgccgagctgagcgagtgcctgggcgcccaggacaagcagtggctgttcagcaagctgcccgaggtgaagagcaccagcgagagattcctgcaggacctggagcagagactggaggccgacgtgctgagattcagcgtgtgcgacgtggtgctggaccactgccccgccttcagaagagtgtacctgccctacgtgaccaaccaggcctaccaggagagaacctaccagagactgctgctggagaaccccagattccccggcatcctggccagactggaggagagccccgtgtgccagagactgcccctgaccagcttcctgatcctgcagccccccggcggccagggcggccaccagtag

SEQ ID NO: 97203 - DNA, 1509 bp, synthetic construct
  misc_feature 1..1509: note = Description of Artificial Sequence: Synthetic coding sequence
  source 1..1509: mol_type = other DNA
atggactgcggcccccccgccaccctgcagccccacctgaccggcccccccggcaccgcccaccaccccgtggccgtgtgccagcaggagagcctgagcttcgccgagctgcccgccctgaagccccccagccccgtgtgcctggacctgttccccgtggcccccgaggagctgagagcccccggcagcagatggagcctgggcacccccgcccccctgcagggcctgctgtggcccctgagccccggcggcagcgacaccgagatcaccagcggcggcatgagacccagcagagccggcagctggccccactgccccggcgcccagccccccgccctggagggcccctggagccccagacacacccagccccagagaagagccagccacggcagcgagaagaagagcgcctggagaaagatgagagtgtaccagagagaggaggtgcccggctgccccgaggcccacgccgtgttcctggagcccggccaggtggtgcaggagcaggccctgagcaccgaggagcccagagtggagctgagcggcagcaccagagtgagcctggagggccccgagagaagaagattcagcgccagcgagctgatgaccagactgcacagcagcctgagactgggcagaaacagcgccgccagagccctgatcagcggcagcggcaccggcgccgccagagagggcaaggccagcggcatggaggccagaagcgtggagatgagcggcgacagagtgagcagacccgcccccggcgacagcagagagggcgactggagcgagcccagactggacacccaggaggagccccccctgggcagcagaagcaccaacgagagaagacagagcagattcctgctgaacagcgtgctgtaccaggagtacagcgacgtggccagcgccagagagctgagaagacagcagagagaggaggagggccccggcgacgaggccgagggcgccgaggagggccccggcccccccagagccaacctgagccccagcagcagcttcagagcccagagaagcgccagaggcagcaccttcagcctgtggcaggacatccccgacgtgagaggcagcggcgtgctggccaccctgagcctgagagactgcaagctgcaggaggccaagttcgagctgatcaccagcgaggccagctacatccacagcctgagcgtggccgtgggccacttcctgggcagcgccgagctgagcgagtgcctgggcgcccaggacaagcagtggctgttcagcaagctgcccgaggtgaagagcaccagcgagagattcctgcaggacctggagcagagactggaggccgacgtgctgagattcagcgtgtgcgacgtggtgctggaccactgccccgccttcagaagagtgtacctgccctacgtgaccaaccaggcctaccaggagagaacctaccagagactgctgagagagaacaagagagtgaccagcgccaccagcaagctgggcgaggcccccgtgtag

SEQ ID NO: 97204 - DNA, 504 bp, synthetic construct
  misc_feature 1..504: note = Description of Artificial Sequence: Synthetic coding sequence
  source 1..504: mol_type = other DNA
gagagactggcccagttccccgccgccggcagaggcagccccggcccccccggcgccagactgggcgtgggcctggagaagggcagaggcagagaggtgtggagacccggcgtgtggggctgcgaggccagagccagcgaggtgaactggagctgccccttcgaccccgtgtgcgccctgccccaggccaagttcgagctgatcaccagcgaggccagctacatccacagcctgagcgtggccgtgggccacttcctgggcagcgccgagctgagcgagtgcctgggcgcccaggacaagcagtggctgttcagcaagctgcccgaggtgaagagcaccagcgagagattcctgcaggacctggagcagagactggaggccgacgtgctgagattcagcgtgtgcgacgtggtgctggaccactgccccgccttcagaagagtgtacctgccctacgtgaccaaccaggcctaccaggagagaacctaccagagactgctgtag

SEQ ID NO: 97205 - DNA, 924 bp, synthetic construct
  misc_feature 1..924: note = Description of Artificial Sequence: Synthetic coding sequence
  source 1..924: mol_type = other DNA
tgaagagacagaggccaggagagactggcccagttccccgccgccggcagaggcagccccggcccccccggcgccagactgggcgtgggcctggagaagggcagaggcagagaggtgtggagacccggcgtgtggggctgcgaggccagagccagcgaggtgaactggagctgccccttcgaccccgtgtgcgccctgccccaggccaagttcgagctgatcaccagcgaggccagctacatccacagcctgagcgtggccgtgggccacttcctgggcagcgccgagctgagcgagtgcctgggcgcccaggacaagcagtggctgttcagcaagctgcccgaggtgaagagcaccagcgagagattcctgcaggacctggagcagagactggaggccgacgtgctgagattcagcgtgtgcgacgtggtgctggaccactgccccgccttcagaagagtgtacctgccctacgtgaccaaccaggcctaccaggagagaacctaccagagactgctgctggagaaccccagattccccggcatcctggccagactggaggagagccccgtgtgccagagactgcccctgaccagcttcctgatcctgcccttccagagaatcaccagactgaagatgctggtggagaacatcctgaagagaaccgcccagggcagcgaggacgaggacatggccaccaaggccttcaacgccctgaaggagctggtgcaggagtgcaacgccagcgtgcagagcatgaagagaaccgaggagctgatccacctgagcaagaagatccacttcgagggcaagatcttccccctgatcagccaggccagatggctggtgagacacggcgagctggtggagctggcccccctgcccgccgccccccccgccaagctgaagctgagcagcaagtag

SEQ ID NO: 97206 - DNA, 1581 bp, synthetic construct
  misc_feature 1..1581: note = Description of Artificial Sequence: Synthetic coding sequence
  source 1..1581: mol_type = other DNA
atggtggccaaggactaccccttctacctgaccgtgaagagagccaactgcagcctggagctgccccccgccagcggccccgccaaggacgccgaggagcccagcaacaagagagtgaagcccctgagcagagtgaccagcctggccaacctgatcccccccgtgaaggccacccccctgaagagattcagccagaccctgcagagaagcatcagcttcagaagcgagagcagacccgacatcctggcccccagaccctggagcagaaacgccgcccccagcagcaccaagagaagagacagcaagctgtggagcgagaccttcgacgtgtgcgtgaaccagatgctgaccagcaaggagatcaagagacaggaggccatcttcgagctgagccagggcgaggaggacctgatcgaggacctgaagctggccaagaaggcctaccacgaccccatgctgaagctgagcatcatgaccgagcaggagctgaaccagatcttcggcaccctggacagcctgatccccctgcacgaggagctgctgagccagctgagagacgtgagaaagcccgacggcagcaccgagcacgtgggccccatcctggtgggctggctgccctgcctgagcagctacgacagctactgcagcaaccaggtggccgccaaggccctgctggaccacaagaagcaggaccacagagtgcaggacttcctgcagagatgcctggagagccccttcagcagaaagctggacctgtggaacttcctggacatccccagaagcagactggtgaagtaccccctgctgctgagagagatcctgagacacacccccaacgacaaccccgaccagcagcacctggaggaggccatcaacatcatccagggcatcgtggccgagatcaacaccaagaccggcgagagcgagtgcagatactacaaggagagactgctgtacctggaggagggccagaaggacagcctgatcgacagcagcagagtgctgtgctgccacggcgagctgaagaacaacagaggcgtgaagctgcacgtgttcctgttccaggaggtgctggtgatcaccagagccgtgacccacaacgagcagctgtgctaccagctgtacagacagcccatccccgtgaaggacctgctgctggaggacctgcaggacggcgaggtgagactgggcggcagcctgagaggcgccttcagcaacaacgagagaatcaagaacttcttcagagtgagcttcaagaacggcagccagagccagacccacagcctgcaggccaacgacaccttcaacaagcagcagtggctgaactgcatcagacaggccaaggagaccgtgctgtgcgccgccggccaggccggcgtgctggacagcgagggcagcttcctgaaccccaccaccggcagcagagagctgcagggcgagaccaagctggagcagatggaccagagcgacagcgagagcgactgcagcatggacaccagcgaggtgagcctggactgcgagagaatggagcagaccgacagcagctgcggcaacagcagacacggcgagagcaacgtgtag

SEQ ID NO: 97207 - DNA, 1677 bp, synthetic construct
  misc_feature 1..1677: note = Description of Artificial Sequence: Synthetic coding sequence
  source 1..1677: mol_type = other DNA
atggacagcagcaccgccatgaaccagtgcagctgcagaggcatggaggagaacaaggagagacccaagagacagagacagaacaacttccccatgttccccagccccaaggcctggaacttcagaggcagaaagagaaagcagagcacccaggacgaggacgccgtgagcctgtgcagcctggacatcagcgagcccagcaacaagagagtgaagcccctgagcagagtgaccagcctggccaacctgatcccccccgtgaaggccacccccctgaagagattcagccagaccctgcagagaagcatcagcttcagaagcgagagcagacccgacatcctggcccccagaccctggagcagaaacgccgcccccagcagcaccaagagaagagacagcaagctgtggagcgagaccttcgacgtgtgcgtgaaccagatgctgaccagcaaggagatcaagagacaggaggccatcttcgagctgagccagggcgaggaggacctgatcgaggacctgaagctggccaagaaggcctaccacgaccccatgctgaagctgagcatcatgaccgagcaggagctgaaccagatcttcggcaccctggacagcctgatccccctgcacgaggagctgctgagccagctgagagacgtgagaaagcccgacggcagcaccgagcacgtgggccccatcctggtgggctggctgccctgcctgagcagctacgacagctactgcagcaaccaggtggccgccaaggccctgctggaccacaagaagcaggaccacagagtgcaggacttcctgcagagatgcctggagagccccttcagcagaaagctggacctgtggaacttcctggacatccccagaagcagactggtgaagtaccccctgctgctgagagagatcctgagacacacccccaacgacaaccccgaccagcagcacctggaggaggccatcaacatcatccagggcatcgtggccgagatcaacaccaagaccggcgagagcgagtgcagatactacaaggagagactgctgtacctggaggagggccagaaggacagcctgatcgacagcagcagagtgctgtgctgccacggcgagctgaagaacaacagaggcgtgaagctgcacgtgttcctgttccaggaggtgctggtgatcaccagagccgtgacccacaacgagcagctgtgctaccagctgtacagacagcccatccccgtgaaggacctgctgctggaggacctgcaggacggcgaggtgagactgggcggcagcctgagaggcgccttcagcaacaacgagagaatcaagaacttcttcagagtgagcttcaagaacggcagccagagccagacccacagcctgcaggccaacgacaccttcaacaagcagcagtggctgaactgcatcagacaggccaaggagaccgtgctgtgcgccgccggccaggccggcgtgctggacagcgagggcagcttcctgaaccccaccaccggcagcagagagctgcagggcgagaccaagctggagcagatggaccagagcgacagcgagagcgactgcagcatggacaccagcgaggtgagcctggactgcgagagaatggagcagaccgacagcagctgcggcaacagcagacacggcgagagcaacgtgtag

SEQ ID NO: 97208 - DNA, 1599 bp, synthetic construct
  misc_feature 1..1599: note = Description of Artificial Sequence: Synthetic coding sequence
  source 1..1599: mol_type = other DNA
atgatcgaggtgtgccaccacaactggctgctgtggctgtgccccagcaagttcggcatcttcatgtgctgcctggccagcaccaccggccagatggagctgagaagaaccagagagcccagcaacaagagagtgaagcccctgagcagagtgaccagcctggccaacctgatcccccccgtgaaggccacccccctgaagagattcagccagaccctgcagagaagcatcagcttcagaagcgagagcagacccgacatcctggcccccagaccctggagcagaaacgccgcccccagcagcaccaagagaagagacagcaagctgtggagcgagaccttcgacgtgtgcgtgaaccagatgctgaccagcaaggagatcaagagacaggaggccatcttcgagctgagccagggcgaggaggacctgatcgaggacctgaagctggccaagaaggcctaccacgaccccatgctgaagctgagcatcatgaccgagcaggagctgaaccagatcttcggcaccctggacagcctgatccccctgcacgaggagctgctgagccagctgagagacgtgagaaagcccgacggcagcaccgagcacgtgggccccatcctggtgggctggctgccctgcctgagcagctacgacagctactgcagcaaccaggtggccgccaaggccctgctggaccacaagaagcaggaccacagagtgcaggacttcctgcagagatgcctggagagccccttcagcagaaagctggacctgtggaacttcctggacatccccagaagcagactggtgaagtaccccctgctgctgagagagatcctgagacacacccccaacgacaaccccgaccagcagcacctggaggaggccatcaacatcatccagggcatcgtggccgagatcaacaccaagaccggcgagagcgagtgcagatactacaaggagagactgctgtacctggaggagggccagaaggacagcctgatcgacagcagcagagtgctgtgctgccacggcgagctgaagaacaacagaggcgtgaagctgcacgtgttcctgttccaggaggtgctggtgatcaccagagccgtgacccacaacgagcagctgtgctaccagctgtacagacagcccatccccgtgaaggacctgctgctggaggacctgcaggacggcgaggtgagactgggcggcagcctgagaggcgccttcagcaacaacgagagaatcaagaacttcttcagagtgagcttcaagaacggcagccagagccagacccacagcctgcaggccaacgacaccttcaacaagcagcagtggctgaactgcatcagacaggccaaggagaccgtgctgtgcgccgccggccaggccggcgtgctggacagcgagggcagcttcctgaaccccaccaccggcagcagagagctgcagggcgagaccaagctggagcagatggaccagagcgacagcgagagcgactgcagcatggacaccagcgaggtgagcctggactgcgagagaatggagcagaccgacagcagctgcggcaacagcagacacggcgagagcaacgtgtag

SEQ ID NO: 97209 - DNA, 2073 bp, synthetic construct
  misc_feature 1..2073: note = Description of Artificial Sequence: Synthetic coding sequence
  source 1..2073: mol_type = other DNA
atgccctgggaggagcccgccggcgagaagcccagctgcagccacagccagaaggccttccacatggagcccgcccagaagccctgcttcaccaccgacatggtgacctgggccctgctgtgcatcagcgccgagaccgtgagaggcgaggcccccagccagcccagaggcatcccccacagaagccccgtgagcgtggacgacctgtggctggagaagacccagagaaagaagctgcagaagcaggcccacgtggagagaagactgcacatcggcgccgtgcacaaggacggcgtgaagtgctggagaaagaccatcatcaccagccccgagagcctgaacctgcccagaagaagccaccccctgagccagagcgcccccaccggcctgaaccacatgggctggcccgagcacacccccggcaccgccatgcccgacggcgccctggacaccgccgtgtgcgccgacgaggtgggcagcgaggaggacctgtacgacgacctgcacagcagcagccaccactacagccaccccggcggcggcggcgagcagctggccatcaacgagctgatcagcgacggcagcgtggtgtgcgccgaggccctgtgggaccacgtgaccatggacgaccaggagctgggcttcaaggccggcgacgtgatcgaggtgatggacgccaccaacagagagtggtggtggggcagagtggccgacggcgagggctggttccccgccagcttcgtgagactgagagtgaaccaggacgagcccgccgacgacgacgcccccctggccggcaacagcggcgccgaggacggcggcgccgaggcccagagcagcaaggaccagatgagaaccaacgtgatcaacgagatcctgagcaccgagagagactacatcaagcacctgagagacatctgcgagggctacgtgagacagtgcagaaagagagccgacatgttcagcgaggagcagctgagaaccatcttcggcaacatcgaggacatctacagatgccagaaggccttcgtgaaggccctggagcagagattcaacagagagagaccccacctgagcgagctgggcgcctgcttcctggagcaccaggccgacttccagatctacagcgagtactgcaacaaccaccccaacgcctgcgtggagctgagcagactgaccaagctgagcaagtacgtgtacttcttcgaggcctgcagactgctgcagaagatgatcgacatcagcctggacggcttcctgctgacccccgtgcagaagatctgcaagtaccccctgcagctggccgagctgctgaagtacacccacccccagcacagagacttcaaggacgtggaggccgccctgcacgccatgaagaacgtggcccagctgatcaacgagagaaagagaagactggagaacatcgacaagatcgcccagtggcagagcagcatcgaggactgggagggcgaggacctgctggtgagaagcagcgagctgatctacagcggcgagctgaccagagtgacccagccccaggccaagagccagcagagaatgttcttcctgttcgaccaccagctgatctactgcaagaaggacctgctgagaagagacgtgctgtactacaagggcagactggacatggacggcctggaggtggtggacctggaggacggcaaggacagagacctgcacgtgagcatcaagaacgccttcagactgcacagaggcgccaccggcgacagccacctgctgtgcaccagaaagcccgagcagaagcagagatggctgaaggccttcgccagagagagagagcaggtgcagctggaccaggagaccggcttcagcatcaccgagctgcagagaaagcaggccatgctgaacgccagcaagcagcaggtgaccggcaagcccaaggccgtgggcagaccctgctacctgaccagacagaagcaccccgccctgcccagcaacagaccccagcagcaggtgctggtgctggccgagcccagaagaaagcccagcaccttctggcacagcatcagcagactggcccccttcagaaagtag

SEQ ID NO: 97210 - DNA, 1860 bp, synthetic construct
  misc_feature 1..1860: note = Description of Artificial Sequence: Synthetic coding sequence
  source 1..1860: mol_type = other DNA
atgagacccgacggccagcaggccctggacgccgtggtgagaagcttcgactgccacagcgaggccgccctgagacagagaaacgacgtgatctactgcagcctgcccagaaccgcccagggcatcgtgcagagagaggaccagctggaggtgctggtgagcctgagagaggtgtggggcagaagaagaggcagagacggcacctgcaccggcgccatgcccgacggcgccctggacaccgccgtgtgcgccgacgaggtgggcagcgaggaggacctgtacgacgacctgcacagcagcagccaccactacagccaccccggcggcggcggcgagcagctggccatcaacgagctgatcagcgacggcagcgtggtgtgcgccgaggccctgtgggaccacgtgaccatggacgaccaggagctgggcttcaaggccggcgacgtgatcgaggtgatggacgccaccaacagagagtggtggtggggcagagtggccgacggcgagggctggttccccgccagcttcgtgagactgagagtgaaccaggacgagcccgccgacgacgacgcccccctggccggcaacagcggcgccgaggacggcggcgccgaggcccagagcagcaaggaccagatgagaaccaacgtgatcaacgagatcctgagcaccgagagagactacatcaagcacctgagagacatctgcgagggctacgtgagacagtgcagaaagagagccgacatgttcagcgaggagcagctgagaaccatcttcggcaacatcgaggacatctacagatgccagaaggccttcgtgaaggccctggagcagagattcaacagagagagaccccacctgagcgagctgggcgcctgcttcctggagcaccaggccgacttccagatctacagcgagtactgcaacaaccaccccaacgcctgcgtggagctgagcagactgaccaagctgagcaagtacgtgtacttcttcgaggcctgcagactgctgcagaagatgatcgacatcagcctggacggcttcctgctgacccccgtgcagaagatctgcaagtaccccctgcagctggccgagctgctgaagtacacccacccccagcacagagacttcaaggacgtggaggccgccctgcacgccatgaagaacgtggcccagctgatcaacgagagaaagagaagactggagaacatcgacaagatcgcccagtggcagagcagcatcgaggactgggagggcgaggacctgctggtgagaagcagcgagctgatctacagcggcgagctgaccagagtgacccagccccaggccaagagccagcagagaatgttcttcctgttcgaccaccagctgatctactgcaagaaggacctgctgagaagagacgtgctgtactacaagggcagactggacatggacggcctggaggtggtggacctggaggacggcaaggacagagacctgcacgtgagcatcaagaacgccttcagactgcacagaggcgccaccggcgacagccacctgctgtgcaccagaaagcccgagcagaagcagagatggctgaaggccttcgccagagagagagagcaggtgcagctggaccaggagaccggcttcagcatcaccgagctgcagagaaagcaggccatgctgaacgccagcaagcagcaggtgaccggcaagcccaaggccgtgggcagaccctgctacctgaccagacagaagcaccccgccctgcccagcaacagaccccagcagcaggtgctggtgctggccgagcccagaagaaagcccagcaccttctggcacagcatcagcagactggcccccttcagaaagtag

SEQ ID NO: 97211 - DNA, 2013 bp, synthetic construct
  misc_feature 1..2013: note = Description of Artificial Sequence: Synthetic coding sequence
  source 1..2013: mol_type = other DNA
atgccctgggaggagcccgccggcgagaagcccagctgcagccacagccagaaggccttccacatggagcccgcccagaagccctgcttcaccaccgacatggtgacctgggccctgctgtgcatcagcgccgagaccgtgagaggcgaggcccccagccagcccagaggcatcccccacagaagccccgtgagcgtggacgacctgtggctggagaagacccagagaaagaagctgcagaagcaggcccacgtggagagaagactgcacatcggcgccgtgcacaaggacggcgtgaagtgctggagaaagaccatcatcaccagccccgagagcctgaacctgcccagaagaagccaccccctgagccagagcgcccccaccggcctgaaccacatgggctggcccgagcacacccccggcaccgccatgcccgacggcgccctggacaccgccgtgtgcgccgacgaggtgggcagcgaggaggacctgtacgacgacctgcacagcagcagccaccactacagccaccccggcggcggcggcgagcagctggccatcaacgagctgatcagcgacggcagcgtggtgtgcgccgaggccctgtgggaccacgtgaccatggacgaccaggagctgggcttcaaggccggcgacgtgatcgaggtgatggacgccaccaacagagagtggtggtggggcagagtggccgacggcgagggctggttccccgccagcttcgtgagactgagagtgaaccaggacgagcccgccgacgacgacgcccccctggccggcaacagcggcgccgaggacggcggcgccgaggcccagagcagcaaggaccagatgagaaccaacgtgatcaacgagatcctgagcaccgagagagactacatcaagcacctgagagacatctgcgagggctacgtgagacagtgcagaaagagagccgacatgttcagcgaggagcagctgagaaccatcttcggcaacatcgaggacatctacagatgccagaaggccttcgtgaaggccctggagcagagattcaacagagagagaccccacctgagcgagctgggcgcctgcttcctggagcaccaggccgacttccagatctacagcgagtactgcaacaaccaccccaacgcctgcgtggagctgagcagactgaccaagctgagcaagtacgtgtacttcttcgaggcctgcagactgctgcagaagatgatcgacatcagcctggacggcttcctgctgacccccgtgcagaagatctgcaagtaccccctgcagctggccgagctgctgaagtacacccacccccagcacagagacttcaaggacgtggaggccgccctgcacgccatgaagaacgtggcccagctgatcaacgagagaaagagaagactggagaacatcgacaagatcgcccagtggcagagcagcatcgaggactgggagggcgaggacctgctggtgagaagcagcgagctgatctacagcggcgagctgaccagagtgacccagccccaggccaagagccagcagagaatgttcttcctgttcgaccaccagctgatctactgcaagaaggacctgctgagaagagacgtgctgtactacaagggcagactggacatggacggcctggaggtggtggacctggaggacggcaaggacagagacctgcacgtgagcatcaagaacgccttcagactgcacagaggcgccaccggcgacagccacctgctgtgcaccagaaagcccgagcagaagcagagatggctgaaggccttcgccagagagagagagcaggtgcagctggaccaggagaccggcttcagcatcaccgagctgcagagaaagcaggccatgctgaacgccagcaagcagcaggtgaccggcaagcccaagggcagaagaaccgccgcccccccccccagactgcccggcccctaccccgccgacatcatccccttcagcgagccccagagccaggccagctag

SEQ ID NO: 97212 - DNA, 1893 bp, synthetic construct
  misc_feature 1..1893: note = Description of Artificial Sequence: Synthetic coding sequence
  source 1..1893: mol_type = other DNA
atgccctgggaggagcccgccggcgagaagcccagctgcagccacagccagaaggccttccacatggagcccgcccagaagccctgcttcaccaccgacatggtgacctgggccctgctgtgcatcagcgccgagaccgtgagaggcgaggcccccagccagcccagaggcatcccccacagaagccccgtgagcgtggacgacctgtggctggagaagacccagagaaagaagctgcagaagcaggcccacgtggagagaagactgcacatcggcgccgtgcacaaggacggcgtgaagtgctggagaaagaccatcatcaccagccccgagagcctgaacctgcccagaagaagccaccccctgagccagagcgcccccaccggcctgaaccacatgggctggcccgagcacacccccggcaccgccatgcccgacggcgccctggacaccgccgtgtgcgccgacgaggtgggcagcgaggaggacctgtacgacgacctgcacagcagcagccaccactacagccaccccggcggcggcggcgagcagctggccatcaacgagctgatcagcgacggcagcgtggtgtgcgccgaggccctgtgggaccacgtgaccatggacgaccaggagctgggcttcaaggccggcgacgtgatcgaggtgatggacgccaccaacagagagtggtggtggggcagagtggccgacggcgagggctggttccccgccagcttcgtgagactgagagtgaaccaggacgagcccgccgacgacgacgcccccctggccggcaacagcggcgccgaggacggcggcgccgaggcccagagcagcaaggaccagatgagaaccaacgtgatcaacgagatcctgagcaccgagagagactacatcaagcacctgagagacatctgcgagcaggccgacttccagatctacagcgagtactgcaacaaccaccccaacgcctgcgtggagctgagcagactgaccaagctgagcaagtacgtgtacttcttcgaggcctgcagactgctgcagaagatgatcgacatcagcctggacggcttcctgctgacccccgtgcagaagatctgcaagtaccccctgcagctggccgagctgctgaagtacacccacccccagcacagagacttcaaggacgtggaggccgccctgcacgccatgaagaacgtggcccagctgatcaacgagagaaagagaagactggagaacatcgacaagatcgcccagtggcagagcagcatcgaggactgggagggcgaggacctgctggtgagaagcagcgagctgatctacagcggcgagctgaccagagtgacccagccccaggccaagagccagcagagaatgttcttcctgttcgaccaccagctgatctactgcaagaaggacctgctgagaagagacgtgctgtactacaagggcagactggacatggacggcctggaggtggtggacctggaggacggcaaggacagagacctgcacgtgagcatcaagaacgccttcagactgcacagaggcgccaccggcgacagccacctgctgtgcaccagaaagcccgagcagaagcagagatggctgaaggccttcgccagagagagagagcaggtgcagctggaccaggagaccggcttcagcatcaccgagctgcagagaaagcaggccatgctgaacgccagcaagcagcaggtgaccggcaagcccaaggccgtgggcagaccctgctacctgaccagacagaagcaccccgccctgcccagcaacagaccccagcagcaggtgctggtgctggccgagcccagaagaaagcccagcaccttctggcacagcatcagcagactggcccccttcagaaagtag

SEQ ID NO: 97213 - DNA, 579 bp, synthetic construct
  misc_feature 1..579: note = Description of Artificial Sequence: Synthetic coding sequence
  source 1..579: mol_type = other DNA
atgccctgggaggagcccgccggcgagaagcccagctgcagccacagccagaaggccttccacatggagcccgcccagaagccctgcttcaccaccgacatggtgacctgggccctgctgtgcatcagcgccgagaccgtgagaggcgaggcccccagccagcccagaggcatcccccacagaagccccgtgagcgtggacgacctgtggctggagaagacccagagaaagaagctgcagaagcaggcccacgtggagagaagactgcacatcggcgccgtgcacaaggacggcgtgaagtgctggagaaagaccatcatcaccagccccgagagcctgaacctgcccagaagaagccaccccctgagccagagcgcccccaccggcctgaaccacatgggctggcccgagcacacccccggcaccgccgtgggcagaccctgctacctgaccagacagaagcaccccgccctgcccagcaacagaccccagcagcaggtgctggtgctggccgagcccagaagaaagcccagcaccttctggcacagcatcagcagactggcccccttcagaaagtag

SEQ ID NO: 97214 - DNA, 2013 bp, synthetic construct; identical to SEQ ID NO: 97211
  misc_feature 1..2013: note = Description of Artificial Sequence: Synthetic coding sequence
  source 1..2013: mol_type = other DNA

SEQ ID NO: 97215 - DNA, 4794 bp, synthetic construct
  misc_feature 1..4794: note = Description of Artificial Sequence: Synthetic coding sequence
  source 1..4794: mol_type = other DNA
atggaggccgaggaggcccagagaggcgccagcccccccatcagcgccatcgaggagttcagcatcatccccgaggcccccatgagaagcagccaggtgagcgccctgggcctggaggcccaggaggacgaggaccccagctacaagtggagagaggagcacagactgagcgccacccagcagagcgagctgagagacgtgtgcgactacgccatcgagaccatgcccagcttccccaaggagggcagcgccgacgtggagcccaaccaggagagcctggtggccgaggcctgcgacacccccgagcactgggaggccgtgccccagagcctggccggcagacaggccagaaccctggccccccccgagctgtgggcctgccccatccagagcgagcacctggacatggcccccttcagcagcgacctgggcagcgaggaggaggaggtggagttctggcccggcctgaccagcctgaccctgggcagcggccaggccgaggaggaggaggagaccagcagcgacaacagcggccagaccagatactacagcccctgcgaggagcaccccgccgagaccaaccagaacgagggcagcgagagcggcaccatcagacagggcgaggagctgccccccgaggagctgcaggagagccagggcctgctgcacccccaggaggtgcaggtgctggaggagcagggccagcaggaggccggcttcagaggcgagggcaccctgagagaggacgtgtgcgccgacggcctgctgggcgaggagcagatgatcgagcaggtgaacgacgagaagggcgagcagaagcagaagcaggagcaggtgcaggacgtgatgctgggcagacagggcgagagaatgggcctgaccggcgagcccgagggcctgaacgacggcgagtgggagcaggaggacatggagagaaaggcccagggccagggcggccccgagcagggcgaggagagaaagagagagctgcaggtgcccgaggagaacagagccgacagccaggacgagaagagccagaccttcctgggcaagagcgaggaggtgaccggcaagcaggaggaccacggcatcaaggagaagggcgtgcccgtgagcggccaggaggccaaggagcccgagagctgggacggcggcagactgggcgccgtgggcagagccagaagcagagaggaggagaacgagcaccacggccccagcatgcccgccctgatcgcccccgaggacagcccccactgcgacctgttccccggcgccagctacctgatgacccagatccccggcacccagaccgagagcagagccgaggagctgagccccgccgccctgagccccagcctggagcccatcagatgcagccaccagcccatcagcctgctgggcagcttcctgaccgaggagagccccgacaaggagatcgaccagaacagccagcaggaggagagcagactgagaaagggcaccgtgagcagccagggcaccgaggtggtgttcgccagcgccagcgtgaccccccccagaacccccgacagcgccccccccagccccgccgaggcctaccccatcacccccgccagcgtgagcgccagaccccccgtggccttccccagaagagagaccagctgcgccgccagagcccccgagaccgccagcgcccccctgagcatggacgaccccagcccctgcggcaccagcgagatgtgccccgccgccctgtacggcttccccagcaccggcaccagcccccccagaccccccgccaacagcaccggcaccgtgcagcacctgagaagcgacagcttccccggcagccacagaaccgagcagacccccgacctggtgggcatgctgctgagctacagccacagcgagctgccccagagaccccccaagcccgccatctacagcagcgtgacccccagaagagacagaagaagcggcagagactacagcaccgtgagcgccagccccaccgccctgagcaccctgaagcaggacagccaggagagcatcagcaacctggagagacccagcagcccccccagcatccagccctgggtgagcccccacaaccccgccttcgccaccgagagccccgcctacggcagcagccccagcttcgtgagcatggaggacgtgagaatccacgagcccctgccccccccccccccccagagaagagacacccaccccagcgtggtggagaccgacggccacgccagagtggtggtgcccaccctgaagcagcacagccaccccccccccctggccctgggcagcggcctgcacgccccccacaagggccccctgccccaggccagcgaccccgccgtggccagacagcacagacccctgcccagcacccccgacagcagccaccacgcccaggccacccccagatggagatacaacaagcccctgccccccacccccgacctgccccagccccacctgccccccatcagcgcccccggcagcagcagaatctacagacccctgccccccctgcccatcatcgacccccccaccgagcccccccccctgccccccaagagcagaggcagaagcagaagcaccagaggcggccacatgaacagcggcggccacgccaagaccagacccgcctgccaggactggaccgtgcccctgcccgccagcgccggcagaaccagctggccccccgccaccgccagaagcaccgagagcttcaccagcaccagcagaagcaagagcgaggtgagccccggcatggccttcagcaacatgaccaacttcctgtgccccagcagccccaccaccccctggacccccgagctgcagggccccaccagcaaggacgaggccggcgtgagcgagcaccccgaggcccccgccagagagcccctgagaagaaccaccccccagcagggcgccagcggccccggcagaagccccgtgggccaggccagacagcccgagaagcccagccacctgcacctggagaaggccagcagctggccccacagaagagacagcggcagaccccccggcgacagcagcggccaggccgtggcccccagcgagggcgccaacaagcacaagggctggagcagacagggcctgagaagacccagcatcctgcccgagggcagcagcgacagcagaggccccgccgtggagaagcaccccggccccagcgacaccgtggtgttcagagagaagaagcccaaggaggtgatgggcggcttcagcagaagatgcagcaagctgatcaacagcagccagctgctgtaccaggagtacagcgacgtggtgctgaacaaggagatccagagccagcagagactggagagcctgagcgagacccccggccccagcagccccagacagcccagaaaggccctggtgagcagcgagagctacctgcagagactgagcatggccagcagcggcagcctgtggcaggagatccccgtggtgagaaacagcaccgtgctgctgagcatgacccacgaggaccagaagctgcaggaggtgaagttcgagctgatcgtgagcgaggccagctacctgagaagcctgaacatcgccgtggaccacttccagctgagcaccagcctgagagccaccctgagcaaccaggagcaccagtggctgttcagcagactgcaggacgtgagagacgtgagcgccaccttcctgagcgacctggaggagaacttcgagaacaacatcttcagcttccaggtgtgcgacgtggtgctgaaccacgcccccgacttcagaagagtgtacctgccctacgtgaccaaccagacctaccaggagagaaccttccagagcctgatgaacagcaacagcaacttcagagaggtgctggagaagctggagagcgaccccgtgtgccagagactgagcctgaagagcttcctgatcctgcccttccagagaatcaccagactgaagctgctgctgcagaacatcctgaagagaacccagcccggcagcagcgaggaggccgaggccaccaaggcccaccacgccctggagcagctgatcagagactgcaacaacaacgtgcagagcatgagaagaaccgaggagctgatctacctgagccagaagatcgagttcgagtgcaagatcttccccctgatcagccagagcagatggctggtgaagagcggcgagctgaccgccctggagttcagcgccagccccggcctgagaagaaagctgaacaccagacccgtgcacctgcacctgttcaacgactgcctgctgctgagcagacccagagagggcagcagattcctggtgttcgaccacgcccccttcagcagcatcagaggcgagaagtgcgagatgaagctgcacggcccccacaagaacctgttcagactgttcctgagacagaacacccagggcgcccaggccgagttcctgttcagaaccgagacccagagcgagaagctgagatggatcagcgccctggccatgcccagagaggagctggacctgctggagtgctacaacagcccccaggtgcagtgcctgagagcctacaagcccagagagaacgacgagctggccctggagaaggccgacgtggtgatggtgacccagcagagcagcgacggctggctggagggcgtgagactgagcgacggcgagagaggctggttccccgtgcagcaggtggagttcatcagcaaccccgaggtgagagcccagaacctgaaggaggcccacagagtgaagaccgccaagctgcagctggtggagcagcaggcctag

SEQ ID NO: 97216 - DNA, 1197 bp, synthetic construct
  misc_feature 1..1197: note = Description of Artificial Sequence: Synthetic coding sequence
  source 1..1197: mol_type = other DNA
atggccagcagcggcagcctgtggcaggagatccccgtggtgagaaacagcaccgtgctgctgagcatgacccacgaggaccagaagctgcaggaggtgaagttcgagctgatcgtgagcgaggccagctacctgagaagcctgaacatcgccgtggaccacttccagctgagcaccagcctgagagccaccctgagcaaccaggagcaccagtggctgttcagcagactgcaggacgtgagagacgtgagcgccaccttcctgagcgacctggaggagaacttcgagaacaacatcttcagcttccaggtgtgcgacgtggtgctgaaccacgcccccgacttcagaagagtgtacctgccctacgtgaccaaccagacctaccaggagagaaccttccagagcctgatgaacagcaacagcaacttcagagaggtgctggagaagctggagagcgaccccgtgtgccagagactgagcctgaagagcttcctgatcctgcccttccagagaatcaccagactgaagctgctgctgcagaacatcctgaagagaacccagcccggcagcagcgaggaggccgaggccaccaaggcccaccacgccctggagcagctgatcagagactgcaacaacaacgtgcagagcatgagaagaaccgaggagctgatctacctgagccagaagatcgagttcgagtgcaagatcttccccctgatcagccagagcagatggctggtgaagagcggcgagctgaccgccctggagttcagcgccagccccggcctgagaagaaagctgaacaccagacccgtgcacctgcacctgttcaacgactgcctgctgctgagcagacccagagagagcgagaagctgagatggatcagcgccctggccatgcccagagaggagctggacctgctggagtgctacaacagcccccaggtgcagtgcctgagagcctacaagcccagagagaacgacgagctggccctggagaaggccgacgtggtgatggtgacccagcagagcagcgacggctggctggagggcgtgagactgagcgacggcgagagaggctggttccccgtgcagcaggtggagttcatcagcaaccccgaggtgagagcccagaacctgaaggaggcccacagagtgaagaccgccaagctgcagctggtggagcagcaggcctag

SEQ ID NO: 97217 - DNA, 1560 bp, synthetic construct
  misc_feature 1..1560: note = Description of Artificial Sequence: Synthetic coding sequence
  source 1..1560: mol_type = other DNA
atgggcggcttcagcagaagatgcagcaagctgatcaacagcagccagctgctgtaccaggagtacagcgacgtggtgctgaacaaggagatccagagccagcagagactggagagcctgagcgagacccccggccccagcagccccagacagcccagaaaggccctggtgagcagcgagagctacctgcagagactgagcatggccagcagcggcagcctgtggcaggagatccccgtggtgagaaacagcaccgtgctgctgagcatgacccacgaggaccagaagctgcaggaggtgaagttcgagctgatcgtgagcgaggccagctacctgagaagcctgaacatcgccgtggaccacttccagctgagcaccagcctgagagccaccctgagcaaccaggagcaccagtggctgttcagcagactgcaggacgtgagagacgtgagcgccaccttcctgagcgacctggaggagaacttcgagaacaacatcttcagcttccaggtgtgcgacgtggtgctgaaccacgcccccgacttcagaagagtgtacctgccctacgtgaccaaccagacctaccaggagagaaccttccagagcctgatgaacagcaacagcaacttcagagaggtgctggagaagctggagagcgaccccgtgtgccagagactgagcctgaagagcttcctgatcctgcccttccagagaatcaccagactgaagctgctgctgcagaacatcctgaagagaacccagcccggcagcagcgaggaggccgaggccaccaaggcccaccacgccctggagcagctgatcagagactgcaacaacaacgtgcagagcatgagaagaaccgaggagctgatctacctgagccagaagatcgagttcgagtgcaagatcttccccctgatcagccagagcagatggctggtgaagagcggcgagctgaccgccctggagttcagcgccagccccggcctgagaagaaagctgaacaccagacccgtgcacctgcacctgttcaacgactgcctgctgctgagcagacccagagagggcagcagattcctggtgttcgaccacgcccccttcagcagcatcagaggcgagaagtgcgagatgaagctgcacggcccccacaagaacctgttcagactgttcctgagacagaacacccagggcgcccaggccgagttcctgttcagaaccgagacccagagcgagaagctgagatggatcagcgccctggccatgcccagagaggagctggacctgctggagtgctacaacagcccccaggtgcagtgcctgagagcctacaagcccagagagaacgacgagctggccctggagaaggccgacgtggtgatggtgacccagcagagcagcgacggctggctggagggcgtgagactgagcgacggcgagagaggctggttccccgtgcagcaggtggagttcatcagcaaccccgaggtgagagcccagaacctgaaggaggcccacagagtgaagaccgccaagctgcagctggtggagcagcaggcctag

SEQ ID NO: 97218 - DNA, 2394 bp, synthetic construct
  misc_feature 1..2394: note = Description of Artificial Sequence: Synthetic coding sequence
  source 1..2394: mol_type = other DNA
tgagtggtggtgcccaccctgaagcagcacagccaccccccccccctggccctgggcagcggcctgcacgccccccacaagggccccctgccccaggccagcgaccccgccgtggccagacagcacagacccctgcccagcacccccgacagcagccaccacgcccaggccacccccagatggagatacaacaagcccctgccccccacccccgacctgccccagccccacctgccccccatcagcgcccccggcagcagcagaatctacagacccctgccccccctgcccatcatcgacccccccaccgagcccccccccctgccccccaagagcagaggcagaagcagaagcaccagaggcggccacatgaacagcggcggccacgccaagaccagacccgcctgccaggactggaccgtgcccctgcccgccagcgccggcagaaccagctggccccccgccaccgccagaagcaccgagagcttcaccagcaccagcagaagcaagagcgaggtgagccccggcatggccttcagcaacatgaccaacttcctgtgccccagcagccccaccaccccctggacccccgagctgcagggccccaccagcaaggacgaggccggcgtgagcgagcaccccgaggcccccgccagagagcccctgagaagaaccaccccccagcagggcgccagcggccccggcagaagccccgtgggccaggccagacagcccgagaagcccagccacctgcacctggagaaggccagcagctggccccacagaagagacagcggcagaccccccggcgacagcagcggccaggccgtggcccccagcgagggcgccaacaagcacaagggctggagcagacagggcctgagaagacccagcatcctgcccgagggcagcagcgacagcagaggccccgccgtggagaagcaccccggccccagcgacaccgtggtgttcagagagaagaagcccaaggaggtgatgggcggcttcagcagaagatgcagcaagctgatcaacagcagccagctgctgtaccaggagtacagcgacgtggtgctgaacaaggagatccagagccagcagagactggagagcctgagcgagacccccggccccagcagccccagacagcccagaaaggccctggtgagcagcgagagctacctgcagagactgagcatggccagcagcggcagcctgtggcaggagatccccgtggtgagaaacagcaccgtgctgctgagcatgacccacgaggaccagaagctgcaggaggtgaagttcgagctgatcgtgagcgaggccagctacctgagaagcctgaacatcgccgtggaccacttccagctgagcaccagcctgagagccaccctgagcaaccaggagcaccagtggctgttcagcagactgcaggacgtgagagacgtgagcgccaccttcctgagcgacctggaggagaacttcgagaacaacatcttcagcttccaggtgtgcgacgtggtgctgaaccacgcccccgacttcagaagagtgtacctgccctacgtgaccaaccagacctaccaggagagaaccttccagagcctgatgaacagcaacagcaacttcagagaggtgctggagaagctggagagcgaccccgtgtgccagagactgagcctgaagagcttcctgatcctgcccttccagagaatcaccagactgaagctgctgctgcagaacatcctgaagagaacccagcccggcagcagcgaggaggccgaggccaccaaggcccaccacgccctggagcagctgatcagagactgcaacaacaacgtgcagagcatgagaagaaccgaggagctgatctacctgagccagaagatcgagttcgagtgcaagatcttccccctgatcagccagagcagatggctggtgaagagcggcgagctgaccgccctggagttcagcgccagccccggcctgagaagaaagctgaacaccagacccgtgcacctgcacctgttcaacgactgcctgctgctgagcagacccagagagagcgagaagctgagatggatcagcgccctggccatgcccagagaggagctggacctgctggagtgctacaacagcccccaggtgcagtgcctgagagcctacaagcccagagagaacgacgagctggccctggagaaggccgacgtggtgatggtgacccagcagagcagcgacggctggctggagggcgtgagactgagcgacggcgagagaggctggttccccgtgcagcaggtggagttcatcagcaaccccgaggtgagagcccagaacctgaaggaggcccacagagtgaagaccgccaagctgcagctggtggagcagcaggcctag

SEQ ID NO: 97219 - DNA, 2958 bp, synthetic construct
  misc_feature 1..2958: note = Description of Artificial Sequence: Synthetic coding sequence
  source 1..2958: mol_type = other DNA
atgagcagaatcgagagcctgaccagagccagaatcgacagaagcagagagctggccagcaagaccagagagaaggagaagatgaaggaggccaaggacgccagatacaccaacggccacctgttcaccaccatcagcgtgagcggcatgaccatgtgctacgcctgcaacaagagcatcaccgccaaggaggccctgatctgccccacctgcaacgtgaccatccacaacagatgcaaggacaccctggccaactgcaccaaggtgaagcagaagcagcagaaggccgccctgctgaagaacaacaccgccctgcagagcgtgagcctgagaagcaagaccaccatcagagagagacccagcagcgccatctaccccagcgacagcttcagacagagcctgctgggcagcagaagaggcagaagcagcctgagcctggccaagagcgtgagcaccaccaacatcgccggccacttcaacgacgagagccccctgggcctgagaagaatcctgagccagagcaccgacagcctgaacatgagaaacagaaccctgagcgtggagagcctgatcgacgaggaggtgatctacagcgagctgatgagcgacttcgagatggacgagaaggacttcgccgccgacagctggagcctggccgtggacagcagcttcctgcagcagcacaagaaggaggtgatgaagcagcaggacgtgatctacgagctgatccagaccgagctgcaccacgtgagaaccctgaagatcatgaccagactgttcagaaccggcatgctggaggagctgcacctggagcccggcgtggtgcagggcctgttcccctgcgtggacgagctgagcgacatccacaccagattcctgagccagctgctggagagaagaagacaggccctgtgccccggcagcaccagaaacttcgtgatccacagactgggcgacctgctgatcagccagttcagcggccccagcgccgagcagatgtgcaagacctacagcgagttctgcagcagacacagcaaggccctgaagctgtacaaggagctgtacgccagagacaagagattccagcagttcatcagaaaggtgaccagacccgccgtgctgaagagacacggcgtgcaggagtgcatcctgctggtgacccagagaatcaccaagtaccccctgctgatcagcagaatcctgcagcacagccacggcatcgaggaggagagacaggacctgaccaccgccctgggcctggtgaaggagctgctgagcaacgtggacgagggcatctaccagctggagaagggcgccagactgcaggagatctacaacagaatggaccccagagcccagacccccgtgcccggcaagggccccttcggcagagaggagctgctgagaagaaagctgatccacgacggctgcctgctgtggaagaccgccaccggcagattcaaggacgtgctggtgctgctgatgaccgacgtgctggtgttcctgcaggagaaggaccagaagtacatcttccccaccctggacaagcccagcgtggtgagcctgcagaacctgatcgtgagagacatcgccaaccaggagaagggcatgttcctgatcagcgccgccccccccgagatgtacgaggtgcacaccgccagcagagacgacagaagcacctggatcagagtgatccagcagagcgtgagaacctgccccagcagagaggacttccccctgatcgagaccgaggacgaggcctacctgagaagaatcaagatggagctgcagcagaaggacagagccctggtggagctgctgagagagaaggtgggcctgttcgccgagatgacccacttccaggccgaggaggacggcggcagcggcatggccctgcccaccctgcccagaggcctgttcagaagcgagagcctggagagccccagaggcgagagactgctgcaggacgccatcagagaggtggagggcctgaaggacctgctggtgggccccggcgtggagctgctgctgacccccagagagcccgccctgcccctggagcccgacagcggcggcaacaccagccccggcgtgaccgccaacggcgaggccagaaccttcaacggcagcatcgagctgtgcagagccgacagcgacagcagccagagagacagaaacggcaaccagctgagaagcccccaggaggaggccctgcagagactggtgaacctgtacggcctgctgcacggcctgcaggccgccgtggcccagcaggacaccctgatggaggccagattccccgagggccccgagagaagagagaagctgtgcagagccaacagcagagacggcgaggccggcagagccggcgccgcccccgtggcccccgagaagcaggccaccgagctggccctgctgcagagacagcacgccctgctgcaggaggagctgagaagatgcagaagactgggcgaggagagagccaccgaggccggcagcctggaggccagactgagagagagcgagcaggccagagccctgctggagagagaggccgaggaggccagaagacagctggccgccctgggccagaccgagcccctgcccgccgaggccccctgggccagaagacccgtggaccccagaagaagaagcctgcccgccggcgacgccctgtacctgagcttcaaccccccccagcccagcagaggcaccgacagactggacctgcccgtgaccaccagaagcgtgcacagaaacttcgaggacagagagagacaggagctgggcagccccgaggagagactgcaggacagcagcgaccccgacaccggcagcgaggaggagggcagcagcagactgagccccccccacagccccagagacttcaccagaatgcaggacatccccgaggagaccgagagcagagacggcgaggccgtggccagcgagagctag

SEQ ID NO: 97220 - DNA, 2877 bp, synthetic construct
  misc_feature 1..2877: note = Description of Artificial Sequence: Synthetic coding sequence
  source 1..2877: mol_type = other DNA
atgaaggaggccaaggacgccagatacaccaacggccacctgttcaccaccatcagcgtgagcggcatgaccatgtgctacgcctgcaacaagagcatcaccgccaaggaggccctgatctgccccacctgcaacgtgaccatccacaacagatgcaaggacaccctggccaactgcaccaaggtgaagcagaagcagcagaaggccgccctgctgaagaacaacaccgccctgcagagcgtgagcctgagaagcaagaccaccatcagagagagacccagcagcgccatctaccccagcgacagcttcagacagagcctgctgggcagcagaagaggcagaagcagcctgagcctggccaagagcgtgagcaccaccaacatcgccggccacttcaacgacgagagccccctgggcctgagaagaatcctgagccagagcaccgacagcctgaacatgagaaacagaaccctgagcgtggagagcctgatcgacgaggaggtgatctacagcgagctgatgagcgacttcgagatggacgagaaggacttcgccgccgacagctggagcctggccgtggacagcagcttcctgcagcagcacaagaaggaggtgatgaagcagcaggacgtgatctacgagctgatccagaccgagctgcaccacgtgagaaccctgaagatcatgaccagactgttcagaaccggcatgctggaggagctgcacctggagcccggcgtggtgcagggcctgttcccctgcgtggacgagctgagcgacatccacaccagattcctgagccagctgctggagagaagaagacaggccctgtgccccggcagcaccagaaacttcgtgatccacagactgggcgacctgctgatcagccagttcagcggccccagcgccgagcagatgtgcaagacctacagcgagttctgcagcagacacagcaaggccctgaagctgtacaaggagctgtacgccagagacaagagattccagcagttcatcagaaaggtgaccagacccgccgtgctgaagagacacggcgtgcaggagtgcatcctgctggtgacccagagaatcaccaagtaccccctgctgatcagcagaatcctgcagcacagccacggcatcgaggaggagagacaggacctgaccaccgccctgggcctggtgaaggagctgctgagcaacgtggacgagggcatctaccagctggagaagggcgccagactgcaggagatctacaacagaatggaccccagagcccagacccccgtgcccggcaagggccccttcggcagagaggagctgctgagaagaaagctgatccacgacggctgcctgctgtggaagaccgccaccggcagattcaaggacgtgctggtgctgctgatgaccgacgtgctggtgttcctgcaggagaaggaccagaagtacatcttccccaccctggacaagcccagcgtggtgagcctgcagaacctgatcgtgagagacatcgccaaccaggagaagggcatgttcctgatcagcgccgccccccccgagatgtacgaggtgcacaccgccagcagagacgacagaagcacctggatcagagtgatccagcagagcgtgagaacctgccccagcagagaggacttccccctgatcgagaccgaggacgaggcctacctgagaagaatcaagatggagctgcagcagaaggacagagccctggtggagctgctgagagagaaggtgggcctgttcgccgagatgacccacttccaggccgaggaggacggcggcagcggcatggccctgcccaccctgcccagaggcctgttcagaagcgagagcctggagagccccagaggcgagagactgctgcaggacgccatcagagaggtggagggcctgaaggacctgctggtgggccccggcgtggagctgctgctgacccccagagagcccgccctgcccctggagcccgacagcggcggcaacaccagccccggcgtgaccgccaacggcgaggccagaaccttcaacggcagcatcgagctgtgcagagccgacagcgacagcagccagagagacagaaacggcaaccagctgagaagcccccaggaggaggccctgcagagactggtgaacctgtacggcctgctgcacggcctgcaggccgccgtggcccagcaggacaccctgatggaggccagattccccgagggccccgagagaagagagaagctgtgcagagccaacagcagagacggcgaggccggcagagccggcgccgcccccgtggcccccgagaagcaggccaccgagctggccctgctgcagagacagcacgccctgctgcaggaggagctgagaagatgcagaagactgggcgaggagagagccaccgaggccggcagcctggaggccagactgagagagagcgagcaggccagagccctgctggagagagaggccgaggaggccagaagacagctggccgccctgggccagaccgagcccctgcccgccgaggccccctgggccagaagacccgtggaccccagaagaagaagcctgcccgccggcgacgccctgtacctgagcttcaaccccccccagcccagcagaggcaccgacagactggacctgcccgtgaccaccagaagcgtgcacagaaacttcgaggacagagagagacaggagctgggcagccccgaggagagactgcaggacagcagcgaccccgacaccggcagcgaggaggagggcagcagcagactgagccccccccacagccccagagacttcaccagaatgcaggacatccccgaggagaccgagagcagagacggcgaggccgtggccagcgagagctag

SEQ ID NO: 97221 - DNA, 2961 bp, synthetic construct
  misc_feature 1..2961: note = Description of Artificial Sequence: Synthetic coding sequence
  source 1..2961: mol_type = other DNA
atgagcagaatcgagagcctgaccagagccagaatcgacagaagcagagagctggccagcaagaccagagagaaggagaagatgaaggaggccaaggacgccagatacaccaacggccacctgttcaccaccatcagcgtgagcggcatgaccatgtgctacgcctgcaacaagagcatcaccgccaaggaggccctgatctgccccacctgcaacgtgaccatccacaacagatgcaaggacaccctggccaactgcaccaaggtgaagcagaagcagcagaaggccgccctgctgaagaacaacaccgccctgcagagcgtgagcctgagaagcaagaccaccatcagagagagacccagcagcgccatctaccccagcgacagcttcagacagagcctgctgggcagcagaagaggcagaagcagcctgagcctggccaagagcgtgagcaccaccaacatcgccggccacttcaacgacgagagccccctgggcctgagaagaatcctgagccagagcaccgacagcctgaacatgagaaacagaaccctgagcgtggagagcctgatcgacgaggccgaggtgatctacagcgagctgatgagcgacttcgagatggacgagaaggacttcgccgccgacagctggagcctggccgtggacagcagcttcctgcagcagcacaagaaggaggtgatgaagcagcaggacgtgatctacgagctgatccagaccgagctgcaccacgtgagaaccctgaagatcatgaccagactgttcagaaccggcatgctggaggagctgcacctggagcccggcgtggtgcagggcctgttcccctgcgtggacgagctgagcgacatccacaccagattcctgagccagctgctggagagaagaagacaggccctgtgccccggcagcaccagaaacttcgtgatccacagactgggcgacctgctgatcagccagttcagcggccccagcgccgagcagatgtgcaagacctacagcgagttctgcagcagacacagcaaggccctgaagctgtacaaggagctgtacgccagagacaagagattccagcagttcatcagaaaggtgaccagacccgccgtgctgaagagacacggcgtgcaggagtgcatcctgctggtgacccagagaatcaccaagtaccccctgctgatcagcagaatcctgcagcacagccacggcatcgaggaggagagacaggacctgaccaccgccctgggcctggtgaaggagctgctgagcaacgtggacgagggcatctaccagctggagaagggcgccagactgcaggagatctacaacagaatggaccccagagcccagacccccgtgcccggcaagggccccttcggcagagaggagctgctgagaagaaagctgatccacgacggctgcctgctgtggaagaccgccaccggcagattcaaggacgtgctggtgctgctgatgaccgacgtgctggtgttcctgcaggagaaggaccagaagtacatcttccccaccctggacaagcccagcgtggtgagcctgcagaacctgatcgtgagagacatcgccaaccaggagaagggcatgttcctgatcagcgccgccccccccgagatgtacgaggtgcacaccgccagcagagacgacagaagcacctggatcagagtgatccagcagagcgtgagaacctgccccagcagagaggacttccccctgatcgagaccgaggacgaggcctacctgagaagaatcaagatggagctgcagcagaaggacagagccctggtggagctgctgagagagaaggtgggcctgttcgccgagatgacccacttccaggccgaggaggacggcggcagcggcatggccctgcccaccctgcccagaggcctgttcagaagcgagagcctggagagccccagaggcgagagactgctgcaggacgccatcagagaggtggagggcctgaaggacctgctggtgggccccggcgtggagctgctgctgacccccagagagcccgccctgcccctggagcccgacagcggcggcaacaccagccccggcgtgaccgccaacggcgaggccagaaccttcaacggcagcatcgagctgtgcagagccgacagcgacagcagccagagagacagaaacggcaaccagctgagaagcccccaggaggaggccctgcagagactggtgaacctgtacggcctgctgcacggcctgcaggccgccgtggcccagcaggacaccctgatggaggccagattccccgagggccccgagagaagagagaagctgtgcagagccaacagcagagacggcgaggccggcagagccggcgccgcccccgtggcccccgagaagcaggccaccgagctggccctgctgcagagacagcacgccctgctgcaggaggagctgagaagatgcagaagactgggcgaggagagagccaccgaggccggcagcctggaggccagactgagagagagcgagcaggccagagccctgctggagagagaggccgaggaggccagaagacagctggccgccctgggccagaccgagcccctgcccgccgaggccccctgggccagaagacccgtggaccccagaagaagaagcctgcccgccggcgacgccctgtacctgagcttcaaccccccccagcccagcagaggcaccgacagactggacctgcccgtgaccaccagaagcgtgcacagaaacttcgaggacagagagagacaggagctgggcagccccgaggagagactgcaggacagcagcgaccccgacaccggcagcgaggaggagggcagcagcagactgagccccccccacagccccagagacttcaccagaatgcaggacatccccgaggagaccgagagcagagacggcgaggccgtggccagcgagagctag

SEQ ID NO: 97222 - DNA, 2964 bp, synthetic construct
  misc_feature 1..2964: note = Description of Artificial Sequence: Synthetic coding sequence
  source 1..2964: mol_type = other DNA
atgtgctgctgctgcggctgctgccccctgctggcccacctggagcagggcagcctgagagagagaaccagagagaaggagaagatgaaggaggccaaggacgccagatacaccaacggccacctgttcaccaccatcagcgtgagcggcatgaccatgtgctacgcctgcaacaagagcatcaccgccaaggaggccctgatctgccccacctgcaacgtgaccatccacaacagatgcaaggacaccctggccaactgcaccaaggtgaagcagaagcagcagaaggccgccctgctgaagaacaacaccgccctgcagagcgtgagcctgagaagcaagaccaccatcagagagagacccagcagcgccatctaccccagcgacagcttcagacagagcctgctgggcagcagaagaggcagaagcagcctgagcctggccaagagcgtgagcaccaccaacatcgccggccacttcaacgacgagagccccctgggcctgagaagaatcctgagccagagcaccgacagcctgaacatgagaaacagaaccctgagcgtggagagcctgatcgacgaggccgaggtgatctacagcgagctgatgagcgacttcgagatggacgagaaggacttcgccgccgacagctggagcctggccgtggacagcagcttcctgcagcagcacaagaaggaggtgatgaagcagcaggacgtgatctacgagctgatccagaccgagctgcaccacgtgagaaccctgaagatcatgaccagactgttcagaaccggcatgctggaggagctgcacctggagcccggcgtggtgcagggcctgttcccctgcgtggacgagctgagcgacatccacaccagattcctgagccagctgctggagagaagaagacaggccctgtgccccggcagcaccagaaacttcgtgatccacagactgggcgacctgctgatcagccagttcagcggccccagcgccgagcagatgtgcaagacctacagcgagttctgcagcagacacagcaaggccctgaagctgtacaaggagctgtacgccagagacaagagattccagcagttcatcagaaaggtgaccagacccgccgtgctgaagagacacggcgtgcaggagtgcatcctgctggtgacccagagaatcaccaagtaccccctgctgatcagcagaatcctgcagcacagccacggcatcgaggaggagagacaggacctgaccaccgccctgggcctggtgaaggagctgctgagcaacgtggacgagggcatctaccagctggagaagggcgccagactgcaggagatctacaacagaatggaccccagagcccagacccccgtgcccggcaagggccccttcggcagagaggagctgctgagaagaaagctgatccacgacggctgcctgctgtggaagaccgccaccggcagattcaaggacgtgctggtgctgctgatgaccgacgtgctggtgttcctgcaggagaaggaccagaagtacatcttccccaccctggacaagcccagcgtggtgagcctgcagaacctgatcgtgagagacatcgccaaccaggagaagggcatgttcctgatcagcgccgccccccccgagatgtacgaggtgcacaccgccagcagagacgacagaagcacctggatcagagtgatccagcagagcgtgagaacctgccccagcagagaggacttccccctgatcgagaccgaggacgaggcctacctgagaagaatcaagatggagctgcagcagaaggacagagccctggtggagctgctgagagagaaggtgggcctgttcgccgagatgacccacttccaggccgaggaggacggcggcagcggcatggccctgcccaccctgcccagaggcctgttcagaagcgagagcctggagagccccagaggcgagagactgctgcaggacgccatcagagaggtggagggcctgaaggacctgctggtgggccccggcgtggagctgctgctgacccccagagagcccgccctgcccctggagcccgacagcggcggcaacaccagccccggcgtgaccgccaacggcgaggccagaaccttcaacggcagcatcgagctgtgcagagccgacagcgacagcagccagagagacagaaacggcaaccagctgagaagcccccaggaggaggccctgcagagactggtgaacctgtacggcctgctgcacggcctgcaggccgccgtggcccagcaggacaccctgatggaggccagattccccgagggccccgagagaagagagaagctgtgcagagccaacagcagagacggcgaggccggcagagccggcgccgcccccgtggcccccgagaagcaggccaccgagctggccctgctgcagagacagcacgccctgctgcaggaggagctgagaagatgcagaagactgggcgaggagagagccaccgaggccggcagcctggaggccagactgagagagagcgagcaggccagagccctgctggagagagaggccgaggaggccagaagacagctggccgccctgggccagaccgagcccctgcccgccgaggccccctgggccagaagacccgtggaccccagaagaagaagcctgcccgccggcgacgccctgtacctgagcttcaaccccccccagcccagcagaggcaccgacagactggacctgcccgtgaccaccagaagcgtgcacagaaacttcgaggacagagagagacaggagctgggcagccccgaggagagactgcaggacagcagcgaccccgacaccggcagcgaggaggagggcagcagcagactgagccccccccacagccccagagacttcaccagaatgcaggacatccccgaggagaccgagagcagagacggcgaggccgtggccagcgagagctag

SEQ ID NO: 97223 - DNA, 2877 bp, synthetic construct; identical to SEQ ID NO: 97220
  misc_feature 1..2877: note = Description of Artificial Sequence: Synthetic coding sequence
  source 1..2877: mol_type = other DNA

SEQ ID NO: 97224 - DNA, 1548 bp, synthetic construct
  misc_feature 1..1548: note = Description of Artificial Sequence: Synthetic coding sequence
  source 1..1548: mol_type = other DNA
atgctgagcaagagcgtgcccgtgagcggcatcaactgcctgctggacagaagcgacaccgacggcaacgtgagccagagcagcgccatcgacctgagaaagagatgcagccagctggagggccacagcggcaccagagtgggcagcagcctgagacagaccttcagcttcctgagcggcatgaccggcaaggccaagaccagagagaaggagaagatgaaggaggccaaggacgccagatacaccaacggccacctgttcaccaccatcagcgtgagcggcatgaccatgtgctacgcctgcaacaagagcatcaccgccaaggaggccctgatctgccccacctgcaacgtgaccatccacaacagatgcaaggacaccctggccaactgcaccaaggtgaagcagaagcagcagaaggccgccctgctgaagaacaacaccgccctgcagagcgtgagcctgagaagcaagaccaccatcagagagagacccagcagcgccatctaccccagcgacagcttcagacagagcctgctgggcagcagaagaggcagaagcagcctgagcctggccaagagcgtgagcaccaccaacatcgccggccacttcaacgacgagagccccctgggcctgagaagaatcctgagccagagcaccgacagcctgaacatgagaaacagaaccctgagcgtggagagcctgatcgacgaggccgaggtgatctacagcgagctgatgagcgacttcgagatggacgagaaggacttcgccgccgacagctggagcctggccgtggacagcagcttcctgcagcagcacaagaaggaggtgatgaagcagcaggacgtgatctacgagctgatccagaccgagctgcaccacgtgagaaccctgaagatcatgaccagactgttcagaaccggcatgctggaggagctgcacctggagcccggcgtggtgcagggcctgttcccctgcgtggacgagctgagcgacatccacaccagattcctgagccagctgctggagagaagaagacaggccctgtgccccggcagcaccagaaacttcgtgatccacagactgggcgacctgctgatcagccagttcagcggccccagcgccgagcagatgtgcaagacctacagcgagttctgcagcagacacagcaaggccctgaagctgtacaaggagctgtacgccagagacaagagattccagcagttcatcagaaaggtgaccagacccgccgtgctgaagagacacggcgtgcaggagtgcatcctgctggtgacccagagaatcaccaagtaccccctgctgatcagcagaatcctgcagcacagccacggcatcgaggaggagagacaggacctgaccaccgccctgggcctggtgaaggagctgctgagcaacgtggacgagggcatctaccagctggagaagggcgccagactgcaggagatctacaacctgctgctgctgttcagcctgagccccagcttcatggaggccctgggcgacaacctggccagctggagctag

SEQ ID NO: 97225 - DNA, 1332 bp, synthetic construct
  misc_feature 1..1332: note = Description of Artificial Sequence: Synthetic coding sequence
  source 1..1332: mol_type = other DNA
atgaaggaggccaaggacgccagatacaccaacggccacctgttcaccaccatcagcgtgagcggcatgaccatgtgctacgcctgcaacaagagcatcaccgccaaggaggccctgatctgccccacctgcaacgtgaccatccacaacagatgcaaggacaccctggccaactgcaccaaggtgaagcagaagcagcagaaggccgccctgctgaagaacaacaccgccctgcagagcgtgagcctgagaagcaagaccaccatcagagagagacccagcagcgccatctaccccagcgacagcttcagacagagcctgctgggcagcagaagaggcagaagcagcctgagcctggccaagagcgtgagcaccaccaacatcgccggccacttcaacgacgagagccccctgggcctgagaagaatcctgagccagagcaccgacagcctgaacatgagaaacagaaccctgagcgtggagagcctgatcgacgaggccgaggtgatctacagcgagctgatgagcgacttcgagatggacgagaaggacttcgccgccgacagctggagcctggccgtggacagcagcttcctgcagcagcacaagaaggaggtgatgaagcagcaggacgtgatctacgagctgatccagaccgagctgcaccacgtgagaaccctgaagatcatgaccagactgttcagaaccggcatgctggaggagctgcacctggagcccggcgtggtgcagggcctgttcccctgcgtggacgagctgagcgacatccacaccagattcctgagccagctgctggagagaagaagacaggccctgtgccccggcagcaccagaaacttcgtgatccacagactgggcgacctgctgatcagccagttcagcggccccagcgccgagcagatgtgcaagacctacagcgagttctgcagcagacacagcaaggccctgaagctgtacaaggagctgtacgccagagacaagagattccagcagttcatcagaaaggtgaccagacccgccgtgctgaagagacacggcgtgcaggagtgcatcctgctggtgacccagagaatcaccaagtaccccctgctgatcagcagaatcctgcagcacagccacggcatcgaggaggagagacaggacctgaccaccgccctgggcctggtgaaggagctgctgagcaacgtggacgagggcatctaccagctggagaagggcgccagactgcaggagatctacaacctgctgctgctgttcagcctgagccccagcttcatggaggccctgggcgacaacctggccagctggagctag

SEQ ID NO: 97226 - DNA, 4167 bp, synthetic construct
  misc_feature 1..4167: note = Description of Artificial Sequence: Synthetic coding sequence
  source 1..4167: mol_type = other DNA
atgagcagacccccccccaccggcaagatgcccggcgcccccgagaccgcccccggcgacggcgccggcgccagcagacagagaaagctggaggccctgatcagagaccccagaagccccatcaacgtggagagcctgctggacggcctgaacagcctggtgctggacctggacttccccgccctgagaaagaacaagaacatcgacaacttcctgaacagatacgagaagatcgtgaagaagatcagaggcctgcagatgaaggccgaggactacgacgtggtgaaggtgatcggcagaggcgccttcggcgaggtgcagctggtgagacacaaggccagccagaaggtgtacgccatgaagctgctgagcaagttcgagatgatcaagagaagcgacagcgccttcttctgggaggagagagacatcatggccttcgccaacagcccctgggtggtgcagctgttctacgccttccaggacgacagatacctgtacatggtgatggagtacatgcccggcggcgacctggtgaacctgatgagcaactacgacgtgcccgagaagtgggccaagttctacaccgccgaggtggtgctggccctggacgccatccacagcatgggcctgatccacagagacgtgaagcccgacaacatgctgctggacaagcacggccacctgaagctggccgacttcggcacctgcatgaagatggacgagaccggcatggtgcactgcgacaccgccgtgggcacccccgactacatcagccccgaggtgctgaagagccagggcggcgacggcttctacggcagagagtgcgactggtggagcgtgggcgtgttcctgtacgagatgctggtgggcgacacccccttctacgccgacagcctggtgggcacctacagcaagatcatggaccacaagaacagcctgtgcttccccgaggacgccgagatcagcaagcacgccaagaacctgatctgcgccttcctgaccgacagagaggtgagactgggcagaaacggcgtggaggagatcagacagcaccccttcttcaagaacgaccagtggcactgggacaacatcagagagaccgccgcccccgtggtgcccgagctgagcagcgacatcgacagcagcaacttcgacgacatcgaggacgacaagggcgacgtggagaccttccccatccccaaggccttcgtgggcaaccagctgcccttcatcggcttcacctactacagagagaacctgctgctgagcgacagccccagctgcagagagaccgacagcatccagagcagaaagaacgaggagagccaggagatccagaagaagctgtacaccctggaggagcacctgagcaacgagatgcaggccaaggaggagctggagcagaagtgcaagagcgtgaacaccagactggagaagaccgccaaggagctggaggaggagatcaccctgagaaagagcgtggagagcgccctgagacagctggagagagagaaggccctgctgcagcacaagaacgccgagtaccagagaaaggccgaccacgaggccgacaagaagagaaacctggagaacgacgtgaacagcctgaaggaccagctggaggacctgaagaagagaaaccagaacagccagatcagcaccgagaaggtgaaccagctgcagagacagctggacgagaccaacgccctgctgagaaccgagagcgacaccgccgccagactgagaaagacccaggccgagagcagcaagcagatccagcagctggagagcaacaacagagacctgcaggacaagaactgcctgctggagaccgccaagctgaagctggagaaggagttcatcaacctgcagagcgccctggagagcgagagaagagacagaacccacggcagcgagatcatcaacgacctgcagggcagaatctgcggcctggaggaggacctgaagaacggcaagatcctgctggccaaggtggagctggagaagagacagctgcaggagagattcaccgacctggagaaggagaagagcaacatggagatcgacatgacctaccagctgaaggtgatccagcagagcctggagcaggaggaggccgagcacaaggccaccaaggccagactggccgacaagaacaagatctacgagagcatcgaggaggccaagagcgaggccatgaaggagatggagaagaagctgctggaggagagaaccctgaagcagaaggtggagaacctgctgctggaggccgagaagagatgcagcctgctggactgcgacctgaagcagagccagcagaagatcaacgagctgctgaagcagaaggacgtgctgaacgaggacgtgagaaacctgaccctgaagatcgagcaggagacccagaagagatgcctgacccagaacgacctgaagatgcagacccagcaggtgaacaccctgaagatgagcgagaagcagctgaagcaggagaacaaccacctgatggagatgaagatgaacctggagaagcagaacgccgagctgagaaaggagagacaggacgccgacggccagatgaaggagctgcaggaccagctggaggccgagcagtacttcagcaccctgtacaagacccaggtgagagagctgaaggaggagtgcgaggagaagaccaagctgggcaaggagctgcagcagaagaagcaggagctgcaggacgagagagacagcctggccgcccagctggagatcaccctgaccaaggccgacagcgagcagctggccagaagcatcgccgaggagcagtacagcgacctggagaaggagaagatcatgaaggagctggagatcaaggagatgatggccagacacaagcaggagctgaccgagaaggacgccaccatcgccagcctggaggagaccaacagaaccctgaccagcgacgtggccaacctggccaacgagaaggaggagctgaacaacaagctgaaggacgtgcaggagcagctgagcagactgaaggacgaggagatcagcgccgccgccatcaaggcccagttcgagaagcagctgctgaccgagagaaccctgaagacccaggccgtgaacaagctggccgagatcatgaacagaaaggagcccgtgaagagaggcaacgacaccgacgtgagaagaaaggagaaggagaacagaaagctgcacatggagctgaagagcgagagagagaagctgacccagcagatgatcaagtaccagaaggagctgaacgagatgcaggcccagatcgccgaggagagccagatcagaatcgagctgcagatgaccctggacagcaaggacagcgacatcgagcagctgagaagccagctgcaggccctgcacatcggcctggacagcagcagcatcggcagcggccccggcgacgccgaggccgacgacggcttccccgagagcagactggagggctggctgagcctgcccgtgagaaacaacaccaagaagttcggctgggtgaagaagtacgtgatcgtgagcagcaagaagatcctgttctacgacagcgagcaggacaaggagcagagcaacccctacatggtgctggacatcgacaagctgttccacgtgagacccgtgacccagaccgacgtgtacagagccgacgccaaggagatccccagaatcttccagatcctgtacgccaacgagggcgagagcaagaaggagcaggagttccccgtggagcccgtgggcgagaagagcaactacatctgccacaagggccacgagttcatccccaccctgtaccacttccccaccaactgcgaggcctgcatgaagcccctgtggcacatgttcaagcccccccccgccctggagtgcagaagatgccacatcaagtgccacaaggaccacatggacaagaaggaggagatcatcgccccctgcaaggtgtactacgacatcagcaccgccaagaacctgctgctgctggccaacagcaccgaggagcagcagaagtgggtgagcagactggtgaagaagatccccaagaagccccccgcccccgaccccttcgccagaagcagccccagaaccagcatgaagatccagcagaaccagagcatcagaagacccagcagacagctggcccccaacaagcccagctag

SEQ ID NO: 97227 - DNA, 2241 bp, synthetic construct
  misc_feature 1..2241: note = Description of Artificial Sequence: Synthetic coding sequence
  source 1..2241: mol_type = other DNA
atgatctacaaggtggagtgcggcctggaggaggacctgaagaacggcaagatcctgctggccaaggtggagctggagaagagacagctgcaggagagattcaccgacctggagaaggagaagagcaacatggagatcgacatgacctaccagctgaaggtgatccagcagagcctggagcaggaggaggccgagcacaaggccaccaaggccagactggccgacaagaacaagatctacgagagcatcgaggaggccaagagcgaggccatgaaggagatggagaagaagctgctggaggagagaaccctgaagcagaaggtggagaacctgctgctggaggccgagaagagatgcagcctgctggactgcgacctgaagcagagccagcagaagatcaacgagctgctgaagcagaaggacgtgctgaacgaggacgtgagaaacctgaccctgaagatcgagcaggagacccagaagagatgcctgacccagaacgacctgaagatgcagacccagcaggtgaacaccctgaagatgagcgagaagcagctgaagcaggagaacaaccacctgatggagatgaagatgaacctggagaagcagaacgccgagctgagaaaggagagacaggacgccgacggccagatgaaggagctgcaggaccagctggaggccgagcagtacttcagcaccctgtacaagacccaggtgagagagctgaaggaggagtgcgaggagaagaccaagctgggcaaggagctgcagcagaagaagcaggagctgcaggacgagagagacagcctggccgcccagctggagatcaccctgaccaaggccgacagcgagcagctggccagaagcatcgccgaggagcagtacagcgacctggagaaggagaagatcatgaaggagctggagatcaaggagatgatggccagacacaagcaggagctgaccgagaaggacgccaccatcgccagcctggaggagaccaacagaaccctgaccagcgacgtggccaacctggccaacgagaaggaggagctgaacaacaagctgaaggacgtgcaggagcagctgagcagactgaaggacgaggagatcagcgccgccgccatcaaggcccagttcgagaagcagctgctgaccgagagaaccctgaagacccaggccgtgaacaagctggccgagatcatgaacagaaaggagcccgtgaagagaggcaacgacaccgacgtgagaagaaaggagaaggagaacagaaagctgcacatggagctgaagagcgagagagagaagctgacccagcagatgatcaagtaccagaaggagctgaacgagatgcaggcccagatcgccgaggagagccagatcagaatcgagctgcagatgaccctggacagcaaggacagcgacatcgagcagctgagaagccagctgcaggccctgcacatcggcctggacagcagcagcatcggcagcggccccggcgacgccgaggccgacgacggcttccccgagagcagactggagggctggctgagcctgcccgtgagaaacaacaccaagaagttcggctgggtgaagaagtacgtgatcgtgagcagcaagaagatcctgttctacgacagcgagcaggacaaggagcagagcaacccctacatggtgctggacatcgacaagctgttccacgtgagacccgtgacccagaccgacgtgtacagagccgacgccaaggagatccccagaatcttccagatcctgtacgccaacgagggcgagagcaagaaggagcaggagttccccgtggagcccgtgggcgagaagagcaactacatctgccacaagggccacgagttcatccccaccctgtaccacttccccaccaactgcgaggcctgcatgaagcccctgtggcacatgttcaagcccccccccgccctggagtgcagaagatgccacatcaagtgccacaaggaccacatggacaagaaggaggagatcatcgccccctgcaaggtgtactacgacatcagcaccgccaagaacctgctgctgctggccaacagcaccgaggagcagcagaagtgggtgagcagactggtgaagaagatccccaagaagccccccgcccccgaccccttcgccagaagcagccccagaaccagcatgaagatccagcagaaccagagcatcagaagacccagcagacagctggcccccaacaagcccagctag

SEQ ID NO: 97228 - DNA, 3438 bp, synthetic construct
  misc_feature 1..3438: note = Description of Artificial Sequence: Synthetic coding sequence
  source 1..3438: mol_type = other DNA
atggtgcactgcgacaccgccgtgggcacccccgactacatcagccccgaggtgctgaagagccagggcggcgacggcttctacggcagagagtgcgactggtggagcgtgggcgtgttcctgtacgagatgctggtgggcgacacccccttctacgccgacagcctggtgggcacctacagcaagatcatggaccacaagaacagcctgtgcttccccgaggacgccgagatcagcaagcacgccaagaacctgatctgcgccttcctgaccgacagagaggtgagactgggcagaaacggcgtggaggagatcagacagcaccccttcttcaagaacgaccagtggcactgggacaacatcagagagaccgccgcccccgtggtgcccgagctgagcagcgacatcgacagcagcaacttcgacgacatcgaggacgacaagggcgacgtggagaccttccccatccccaaggccttcgtgggcaaccagctgcccttcatcggcttcacctactacagagagaacctgctgctgagcgacagccccagctgcagagagaccgacagcatccagagcagaaagaacgaggagagccaggagatccagaagaagctgtacaccctggaggagcacctgagcaacgagatgcaggccaaggaggagctggagcagaagtgcaagagcgtgaacaccagactggagaagaccgccaaggagctggaggaggagatcaccctgagaaagagcgtggagagcgccctgagacagctggagagagagaaggccctgctgcagcacaagaacgccgagtaccagagaaaggccgaccacgaggccgacaagaagagaaacctggagaacgacgtgaacagcctgaaggaccagctggaggacctgaagaagagaaaccagaacagccagatcagcaccgagaaggtgaaccagctgcagagacagctggacgagaccaacgccctgctgagaaccgagagcgacaccgccgccagactgagaaagacccaggccgagagcagcaagcagatccagcagctggagagcaacaacagagacctgcaggacaagaactgcctgctggagaccgccaagctgaagctggagaaggagttcatcaacctgcagagcgccctggagagcgagagaagagacagaacccacggcagcgagatcatcaacgacctgcagggcagaatctgcggcctggaggaggacctgaagaacggcaagatcctgctggccaaggtggagctggagaagagacagctgcaggagagattcaccgacctggagaaggagaagagcaacatggagatcgacatgacctaccagctgaaggtgatccagcagagcctggagcaggaggaggccgagcacaaggccaccaaggccagactggccgacaagaacaagatctacgagagcatcgaggaggccaagagcgaggccatgaaggagatggagaagaagctgctggaggagagaaccctgaagcagaaggtggagaacctgctgctggaggccgagaagagatgcagcctgctggactgcgacctgaagcagagccagcagaagatcaacgagctgctgaagcagaaggacgtgctgaacgaggacgtgagaaacctgaccctgaagatcgagcaggagacccagaagagatgcctgacccagaacgacctgaagatgcagacccagcaggtgaacaccctgaagatgagcgagaagcagctgaagcaggagaacaaccacctgatggagatgaagatgaacctggagaagcagaacgccgagctgagaaaggagagacaggacgccgacggccagatgaaggagctgcaggaccagctggaggccgagcagtacttcagcaccctgtacaagacccaggtgagagagctgaaggaggagtgcgaggagaagaccaagctgggcaaggagctgcagcagaagaagcaggagctgcaggacgagagagacagcctggccgcccagctggagatcaccctgaccaaggccgacagcgagcagctggccagaagcatcgccgaggagcagtacagcgacctggagaaggagaagatcatgaaggagctggagatcaaggagatgatggccagacacaagcaggagctgaccgagaaggacgccaccatcgccagcctggaggagaccaacagaaccctgaccagcgacgtggccaacctggccaacgagaaggaggagctgaacaacaagctgaaggacgtgcaggagcagctgagcagactgaaggacgaggagatcagcgccgccgccatcaaggcccagttcgagaagcagctgctgaccgagagaaccctgaagacccaggccgtgaacaagctggccgagatcatgaacagaaaggagcccgtgaagagaggcaacgacaccgacgtgagaagaaaggagaaggagaacagaaagctgcacatggagctgaagagcgagagagagaagctgacccagcagatgatcaagtaccagaaggagctgaacgagatgcaggcccagatcgccgaggagagccagatcagaatcgagctgcagatgaccctggacagcaaggacagcgacatcgagcagctgagaagccagctgcaggccctgcacatcggcctggacagcagcagcatcggcagcggccccggcgacgccgaggccgacgacggcttccccgagagcagactggagggctggctgagcctgcccgtgagaaacaacaccaagaagttcggctgggtgaagaagtacgtgatcgtgagcagcaagaagatcctgttctacgacagcgagcaggacaaggagcagagcaacccctacatggtgctggacatcgacaagctgttccacgtgagacccgtgacccagaccgacgtgtacagagccgacgccaaggagatccccagaatcttccagatcctgtacgccaacgagggcgagagcaagaaggagcaggagttccccgtggagcccgtgggcgagaagagcaactacatctgccacaagggccacgagttcatccccaccctgtaccacttccccaccaactgcgaggcctgcatgaagcccctgtggcacatgttcaagcccccccccgccctggagtgcagaagatgccacatcaagtgccacaaggaccacatggacaagaaggaggagatcatcgccccctgcaaggtgtactacgacatcagcaccgccaagaacctgctgctgctggccaacagcaccgaggagcagcagaagtgggtgagcagactggtgaagaagatccccaagaagccccccgcccccgaccccttcgccagaagcagccccagaaccagcatgaagatccagcagaaccagagcatcagaagacccagcagacagctggcccccaacaagcccagctag

SEQ ID NO: 97229 - DNA, 2568 bp, synthetic construct
  misc_feature 1..2568: note = Description of Artificial Sequence: Synthetic coding sequence
  source 1..2568: mol_type = other DNA
atgagcgaggccagaagagacagcaccagcagcctgcagagaaagaagcccccctggctgaagctggacatccccagcgccgtgcccctgaccgccgaggagcccagcttcctgcagcccctgagaagacaggccttcctgagaagcgtgagcatgcccgccgagaccgcccacatcagcagcccccaccacgagctgagaagacccgtgctgcagagacagaccagcatcacccagaccatcagaagaggcaccgccgactggttcggcgtgagcaaggacagcgacagcacccagaagtggcagagaaagagcatcagacactgcagccagagatacggcaagctgaagccccaggtgctgagagagctggacctgcccagccaggacaacgtgagcctgaccagcaccgagacccccccccccctgtacgtgggcccctgccagctgggcatgcagaagatcatcgaccccctggccagaggcagagccttcagagtggccgacgacaccgccgagggcctgagcgccccccacacccccgtgacccccggcgccgccagcctgtgcagcttcagcagcagcagaagcggcttccacagactgcccagaagaagaaagagagagagcgtggccaagatgagcttcagagccgccgccgccctgatgaagggcagaagcgtgagagacggcaccttcagaagagcccagagaagaagcttcacccccgccagcttcctggaggaggacaccaccgacttccccgacgagctggacaccagcttcttcgccagagagggcatcctgcacgaggagctgagcacctaccccgacgaggtgttcgagagccccagcgaggccgccctgaaggactgggagaaggcccccgagcaggccgacctgaccggcggcgccctggacagaagcgagctggagagaagccacctgatgctgcccctggagagaggctggagaaagcagaaggagggcgccgccgccccccagcccaaggtgagactgagacaggaggtggtgagcaccgccggccccagaagaggccagagaatcgccgtgcccgtgagaaagctgttcgccagagagaagagaccctacggcctgggcatggtgggcagactgaccaacagaacctacagaaagagaatcgacagcttcgtgaagagacagatcgaggacatggacgaccacagacccttcttcacctactggctgaccttcgtgcacagcctggtgaccatcctggccgtgtgcatctacggcatcgcccccgtgggcttcagccagcacgagaccgtggacagcgtgctgagaaacagaggcgtgtacgagaacgtgaagtacgtgcagcaggagaacttctggatcggccccagcagcgaggccctgatccacctgggcgccaagttcagcccctgcatgagacaggacccccaggtgcacagcttcatcagaagcgccagagagagagagaagcacagcgcctgctgcgtgagaaacgacagaagcggctgcgtgcagaccagcgaggaggagtgcagcagcaccctggccgtgtgggtgaagtggcccatccaccccagcgcccccgagctggccggccacaagagacagttcggcagcgtgtgccaccaggaccccagagtgtgcgacgagcccagcagcgaggacccccacgagtggcccgaggacatcaccaagtggcccatctgcaccaagaacagcgccggcaaccacaccaaccacccccacatggactgcgtgatcaccggcagaccctgctgcatcggcaccaagggcagatgcgagatcaccagcagagagtactgcgacttcatgagaggctacttccacgaggaggccaccctgtgcagccaggtgcactgcatggacgacgtgtgcggcctgctgcccttcctgaaccccgaggtgcccgaccagttctacagactgtggctgagcctgttcctgcacgccggcatcctgcactgcctggtgagcatctgcttccagatgaccgtgctgagagacctggagaagctggccggctggcacagaatcgccatcatctacctgctgagcggcgtgaccggcaacctggccagcgccatcttcctgccctacagagccgaggtgggccccgccggcagccagttcggcatcctggcctgcctgttcgtggagctgttccagagctggcagatcctggccagaccctggagagccttcttcaagctgctggccgtggtgctgttcctgttcaccttcggcctgctgccctggatcgacaacttcgcccacatcagcggcttcatcagcggcctgttcctgagcttcgccttcctgccctacatcagcttcggcaagttcgacctgtacagaaagagatgccagatcatcatcttccaggtggtgttcctgggcctgctggccggcctggtggtgctgttctacgtgtaccccgtgagatgcgagtggtgcgagttcctgacctgcatccccttcaccgacaagttctgcgagaagtacgagctggacgcccagctgcactag

SEQ ID NO: 97230 - DNA, 573 bp, synthetic construct
  misc_feature 1..573: note = Description of Artificial Sequence: Synthetic coding sequence
  source 1..573: mol_type = other DNA
atgagcgaggccagaagagacagcaccagcagcctgcagagaaagaagcccccctggctgaagctggacatccccagcgccgtgcccctgaccgccgaggagcccagcttcctgcagcccctgagaagacaggccttcctgagaagcgtgagcatgcccgccgagaccgcccacatcagcagcccccaccacgagctgagaagacccgtgctgcagagacagaccagcatcacccagaccatcagaagcagcagacaggtgagattcggcagagtgcacaccctgcccctgctgggccccagagccgccagaagagccttcccccagagacagagcctgagctggagcctgctgagaggcaccgccgactggttcggcgtgagcaaggacagcgacagcacccagaagtggcagagaaagagcatcagacactgcagccagagatacggcaagctgaagccccaggtgctgagagagctggacctgcccagccaggacaacgtgagcctgaccagcaccgagacccccccccccctgtacgtgggcccctgccagctgggcatgcagaagtag

SEQ ID NO: 97231 - DNA, 699 bp, synthetic construct
  misc_feature 1..699: note = Description of Artificial Sequence: Synthetic coding sequence
  source 1..699: mol_type = other DNA
tgaagaccctgctgcatcggcaccaagggcagatgcgagatcaccagcagagagtactgcgacttcatgagaggctacttccacgaggaggccaccctgtgcagccaggtgcactgcatggacgacgtgtgcggcctgctgcccttcctgaaccccgagatgaccgtgctgagagacctggagaagctggccggctggcacagaatcgccatcatctacctgctgagcggcgtgaccggcaacctggccagcgccatcttcctgccctacagagccgaggtgggccccgccggcagccagttcggcatcctggcctgcctgttcgtggagctgttccagagctggcagatcctggccagaccctggagagccttcttcaagctgctggccgtggtgctgttcctgttcaccttcggcctgctgccctggatcgacaacttcgcccacatcagcggcttcatcagcggcctgttcctgagcttcgccttcctgccctacatcagcttcggcaagttcgacctgtacagaaagagatgccagatcatcatcttccaggtggtgttcctgggcctgctggccggcctggtggtgctgttctacgtgtaccccgtgagatgcgagtggtgcgagttcctgacctgcatccccttcaccgacaagttctgcgagaagtacgagctggacgcccagctgcactag

SEQ ID NO: 97232 - DNA, 492 bp, synthetic construct
  misc_feature 1..492: note = Description of Artificial Sequence: Synthetic coding sequence
  source 1..492: mol_type = other DNA
atgagcgaggccagaagagacagcaccagcagcctgcagagaaagaagcccccctggctgaagctggacatccccagcgccgtgcccctgaccgccgaggagcccagcttcctgcagcccctgagaagacaggccttcctgagaagcgtgagcatgcccgccgagaccgcccacatcagcagcccccaccacgagctgagaagacccgtgctgcagagacagaccagcatcacccagaccatcagaagaggcaccgccgactggttcggcgtgagcaaggacagcgacagcacccagaagtggcagagaaagagcatcagacactgcagccagagatacggcaagctgaagccccaggtgctgagagagctggacctgcccagccaggacaacgtgagcctgaccagcaccgagacccccccccccctgtacgtgggcccctgccagctgggcatgcagaagatcatcgaccccctggccagaggcagatag

SEQ ID NO: 97233 - DNA, 1740 bp, synthetic construct
  misc_feature 1..1740: note = Description of Artificial Sequence: Synthetic coding sequence
  source 1..1740: mol_type = other DNA
atgagcgaggccagaagagacagcaccagcagcctgcagagaaagaagcccccctggctgaagctggacatccccagcgccgtgcccctgaccgccgaggagcccagcttcctgcagcccctgagaagacaggccttcctgagaagcgtgagcatgcccgccgagaccgcccacatcagcagcccccaccacgagctgagaagacccgtgctgcagagacagaccagcatcacccagaccatcagaagaggcaccgccgactggttcggcgtgagcaaggacagcgacagcacccagaagtggcagagaaagagcatcagacactgcagccagagatacggcaagctgaagccccaggtgctgagagagctggacctgcccagccaggacaacgtgagcctgaccagcaccgagacccccccccccctgtacgtgggcccctgccagctgggcatgcagaagatcatcgaccccctggccagaggcagagccttcagagtggccgacgacaccgccgagggcctgagcgccccccacacccccgtgacccccggcgccgccagcctgtgcagcttcagcagcagcagaagcggcttccacagactgcccagaagaagaaagagagagagcgtggccaagatgagcttcagagccgccgccgccctgatgaagggcagaagcgtgagagacggcaccttcagaagagcccagagaagaagcttcacccccgccagcttcctggaggaggacaccaccgacttccccgacgagctggacaccagcttcttcgccagagagggcatcctgcacgaggagctgagcacctaccccgacgaggtgttcgagagccccagcgaggccgccctgaaggactgggagaaggcccccgagcaggccgacctgaccggcggcgccctggacagaagcgagctggagagaagccacctgatgctgcccctggagagaggctggagaaagcagaaggagggcgccgccgccccccagcccaaggtgagactgagacaggaggtggtgagcaccgccggccccagaagaggccagagaatcgccgtgcccgtgagaaagctgttcgccagagagaagagaccctacggcctgggcatggtgggcagactgaccaacagaacctacagaaagagaatcgacagcttcgtgaagagacagatcgaggacatggacgaccacagacccttcttcacctactggctgaccttcgtgcacagcctggtgaccatcctggccgtgtgcatctacggcatcgcccccgtgggcttcagccagcacgagaccgtggacagcgtgctgagaaacagaggcgtgtacgagaacgtgaagtacgtgcagcaggagaacttctggatcggccccagcagcgtgagaaccggcctgggcgccggccccgccggcgccggccccggcggcgccagaagaggccaggaggcccccgactgcggcagaagcagccccagccccgccggcggcccccacccccccggcagacaggtgttcgccctgcacgcccccggccccgccggcgcccagctgcacagcctgggcgccagagccagagaggccctgagactgctgagagcccagagacaggtgggcctgagagccgacctgggcggcggcgtgctgggcgccttccccagacccggcctgccccccagcagcgccagatgcagcctgttcagaccccagatcgacagcgccgagtag

SEQ ID NO: 97234 - DNA, 2571 bp, synthetic construct
  misc_feature 1..2571: note = Description of Artificial Sequence: Synthetic coding sequence
  source 1..2571: mol_type = other DNA
atggccagcgccgacaagaacggcggcagcgtgagcagcgtgagcagcagcagactgcagagcagaaagccccccaacctgagcatcaccatccccccccccgagaaggagacccaggcccccggcgagcaggacagcatgctgcccgagggcttccagaacagaagactgaagaagagccagcccagaacctgggccgcccacaccaccgcctgcccccccagcttcctgcccaagagaaagaaccccgcctacctgaagagcgtgagcctgcaggagcccagaagcagatggcaggagagcagcgagaagagacccggcttcagaagacaggccagcctgagccagagcatcagaaagggcgccgcccagtggttcggcgtgagcggcgactgggagggccagagacagcagtggcagagaagaagcctgcaccactgcagcatgagatacggcagactgaaggccagctgccagagagacctggagctgcccagccaggaggcccccagcttccagggcaccgagagccccaagccctgcaagatgcccaagatcgtggaccccctggccagaggcagagccttcagacaccccgaggagatggacagaccccacgccccccacccccccctgacccccggcgtgctgagcctgaccagcttcaccagcgtgagaagcggctacagccacctgcccagaagaaagagaatgagcgtggcccacatgagcctgcaggccgccgccgccctgctgaagggcagaagcgtgctggacgccaccggccagagatgcagagtggtgaagagaagcttcgccttccccagcttcctggaggaggacgtggtggacggcgccgacaccttcgacagcagcttcttcagcaaggaggagatgagcagcatgcccgacgacgtgttcgagagcccccccctgagcgccagctacttcagaggcatcccccacagcgccagccccgtgagccccgacggcgtgcagatccccctgaaggagtacggcagagcccccgtgcccggccccagaagaggcaagagaatcgccagcaaggtgaagcacttcgccttcgacagaaagaagagacactacggcctgggcgtggtgggcaactggctgaacagaagctacagaagaagcatcagcagcaccgtgcagagacagctggagagcttcgacagccacagaccctacttcacctactggctgaccttcgtgcacgtgatcatcaccctgctggtgatctgcacctacggcatcgcccccgtgggcttcgcccagcacgtgaccacccagctggtgctgagaaacaagggcgtgtacgagagcgtgaagtacatccagcaggagaacttctgggtgggccccagcagcatcgacctgatccacctgggcgccaagttcagcccctgcatcagaaaggacggccagatcgagcagctggtgctgagagagagagacctggagagagacagcggctgctgcgtgcagaacgaccacagcggctgcatccagacccagagaaaggactgcagcgagaccctggccaccttcgtgaagtggcaggacgacaccggcccccccatggacaagagcgacctgggccagaagagaaccagcggcgccgtgtgccaccaggaccccagaacctgcgaggagcccgccagcagcggcgcccacatctggcccgacgacatcaccaagtggcccatctgcaccgagcaggccagaagcaaccacaccggcttcctgcacatggactgcgagatcaagggcagaccctgctgcatcggcaccaagggcagctgcgagatcaccaccagagagtactgcgagttcatgcacggctacttccacgaggaggccaccctgtgcagccaggtgcactgcctggacaaggtgtgcggcctgctgcccttcctgaaccccgaggtgcccgaccagttctacagactgtggctgagcctgttcctgcacgccggcgtggtgcactgcctggtgagcgtggtgttccagatgaccatcctgagagacctggagaagctggccggctggcacagaatcgccatcatcttcatcctgagcggcatcaccggcaacctggccagcgccatcttcctgccctacagagccgaggtgggccccgccggcagccagttcggcctgctggcctgcctgttcgtggagctgttccagagctggcccctgctggagagaccctggaaggccttcctgaacctgagcgccatcgtgctgttcctgttcatctgcggcctgctgccctggatcgacaacatcgcccacatcttcggcttcctgagcggcctgctgctggccttcgccttcctgccctacatcaccttcggcaccagcgacaagtacagaaagagagccctgatcctggtgagcctgctggccttcgccggcctgttcgccgccctggtgctgtggctgtacatctaccccatcaactggccctggatcgagcacctgacctgcttccccttcaccagcagattctgcgagaagtacgagctggaccaggtgctgcactag

SEQ ID NO: 97235 - DNA, 2484 bp, synthetic construct
  misc_feature 1..2484: note = Description of Artificial Sequence: Synthetic coding sequence
  source 1..2484: mol_type = other DNA
atggccagcgccgacaagaacggcggcagcgtgagcagcgtgagcagcagcagactgcagagcagaaagccccccaacctgagcatcaccatccccccccccgagaaggagacccaggcccccggcgagcaggacagcatgctgcccgagagaaagaaccccgcctacctgaagagcgtgagcctgcaggagcccagaagcagatggcaggagagcagcgagaagagacccggcttcagaagacaggccagcctgagccagagcatcagaaagggcgccgcccagtggttcggcgtgagcggcgactgggagggccagagacagcagtggcagagaagaagcctgcaccactgcagcatgagatacggcagactgaaggccagctgccagagagacctggagctgcccagccaggaggcccccagcttccagggcaccgagagccccaagccctgcaagatgcccaagatcgtggaccccctggccagaggcagagccttcagacaccccgaggagatggacagaccccacgccccccacccccccctgacccccggcgtgctgagcctgaccagcttcaccagcgtgagaagcggctacagccacctgcccagaagaaagagaatgagcgtggcccacatgagcctgcaggccgccgccgccctgctgaagggcagaagcgtgctggacgccaccggccagagatgcagagtggtgaagagaagcttcgccttccccagcttcctggaggaggacgtggtggacggcgccgacaccttcgacagcagcttcttcagcaaggaggagatgagcagcatgcccgacgacgtgttcgagagcccccccctgagcgccagctacttcagaggcatcccccacagcgccagccccgtgagccccgacggcgtgcagatccccctgaaggagtacggcagagcccccgtgcccggccccagaagaggcaagagaatcgccagcaaggtgaagcacttcgccttcgacagaaagaagagacactacggcctgggcgtggtgggcaactggctgaacagaagctacagaagaagcatcagcagcaccgtgcagagacagctggagagcttcgacagccacagaccctacttcacctactggctgaccttcgtgcacgtgatcatcaccctgctggtgatctgcacctacggcatcgcccccgtgggcttcgcccagcacgtgaccacccagctggtgctgagaaacaagggcgtgtacgagagcgtgaagtacatccagcaggagaacttctgggtgggccccagcagcatcgacctgatccacctgggcgccaagttcagcccctgcatcagaaaggacggccagatcgagcagctggtgctgagagagagagacctggagagagacagcggctgctgcgtgcagaacgaccacagcggctgcatccagacccagagaaaggactgcagcgagaccctggccaccttcgtgaagtggcaggacgacaccggcccccccatggacaagagcgacctgggccagaagagaaccagcggcgccgtgtgccaccaggaccccagaacctgcgaggagcccgccagcagcggcgcccacatctggcccgacgacatcaccaagtggcccatctgcaccgagcaggccagaagcaaccacaccggcttcctgcacatggactgcgagatcaagggcagaccctgctgcatcggcaccaagggcagctgcgagatcaccaccagagagtactgcgagttcatgcacggctacttccacgaggaggccaccctgtgcagccaggtgcactgcctggacaaggtgtgcggcctgctgcccttcctgaaccccgaggtgcccgaccagttctacagactgtggctgagcctgttcctgcacgccggcgtggtgcactgcctggtgagcgtggtgttccagatgaccatcctgagagacctggagaagctggccggctggcacagaatcgccatcatcttcatcctgagcggcatcaccggcaacctggccagcgccatcttcctgccctacagagccgaggtgggccccgccggcagccagttcggcctgctggcctgcctgttcgtggagctgttccagagctggcccctgctggagagaccctggaaggccttcctgaacctgagcgccatcgtgctgttcctgttcatctgcggcctgctgccctggatcgacaacatcgcccacatcttcggcttcctgagcggcctgctgctggccttcgccttcctgccctacatcaccttcggcaccagcgacaagtacagaaagagagccctgatcctggtgagcctgctggccttcgccggcctgttcgccgccctggtgctgtggctgtacatctaccccatcaactggccctggatcgagcacctgacctgcttccccttcaccagcagattctgcgagaagtacgagctggaccaggtgctgcactag

SEQ ID NO: 97236 - DNA, 2151 bp, synthetic construct
  misc_feature 1..2151: note = Description of Artificial Sequence: Synthetic coding sequence
  source 1..2151: mol_type = other DNA
cccggcagcagcagaagcagacaccccctgctgctgctgatctggagcctgggcagcagccagggcccccacagacagatcagacccccccccccctgcagacacgccggcacccacgtgcccagccccctgccccacacccaggtgcacagaagaagacaggcctacgcccacctgagcctggtgtgcttcagaagaggcgccgcccagtggttcggcgtgagcggcgactgggagggccagagacagcagtggcagagaagaagcctgcaccactgcagcatgagatacggcagactgaaggccagctgccagagagacctggagctgcccagccaggaggcccccagcttccagggcaccgagagccccaagccctgcaagatgcccaagatcgtggaccccctggccagaggcagagccttcagacaccccgaggagatggacagaccccacgccccccacccccccctgacccccggcgtgctgagcctgaccagcttcaccagcgtgagaagcggctacagccacctgcccagaagaaagagaatgagcgtggcccacatgagcctgcaggccgccgccgccctgctgaagggcagaagcgtgctggacgccaccggccagagatgcagagtggtgaagagaagcttcgccttccccagcttcctggaggaggacgtggtggacggcgccgacaccttcgacagcagcttcttcagcaaggaggagatgagcagcatgcccgacgacgtgttcgagagcccccccctgagcgccagctacttcagaggcatcccccacagcgccagccccgtgagccccgacggcgtgcagatccccctgaaggagtacggcagagcccccgtgcccggccccagaagaggcaagagaatcgccagcaaggtgaagcacttcgccttcgacagaaagaagagacactacggcctgggcgtggtgggcaactggctgaacagaagctacagaagaagcatcagcagcaccgtgcagagacagctggagagcttcgacagccacagaccctacttcacctactggctgaccttcgtgcacgtgatcatcaccctgctggtgatctgcacctacggcatcgcccccgtgggcttcgcccagcacgtgaccacccagctggtgctgagaaacaagggcgtgtacgagagcgtgaagtacatccagcaggagaacttctgggtgggccccagcagcatcgacctgatccacctgggcgccaagttcagcccctgcatcagaaaggacggccagatcgagcagctggtgctgagagagagagacctggagagagacagcggctgctgcgtgcagaacgaccacagcggctgcatccagacccagagaaaggactgcagcgagaccctggccaccttcgtgaagtggcaggacgacaccggcccccccatggacaagagcgacctgggccagaagagaaccagcggcgccgtgtgccaccaggaccccagaacctgcgaggagcccgccagcagcggcgcccacatctggcccgacgacatcaccaagtggcccatctgcaccgagcaggccagaagcaaccacaccggcttcctgcacatggactgcgagatcaagggcagaccctgctgcatcggcaccaagggcagctgcgagatcaccaccagagagtactgcgagttcatgcacggctacttccacgaggaggccaccctgtgcagccaggtgcactgcctggacaaggtgtgcggcctgctgcccttcctgaaccccgaggtgcccgaccagttctacagactgtggctgagcctgttcctgcacgccggcgtggtgcactgcctggtgagcgtggtgttccagatgaccatcctgagagacctggagaagctggccggctggcacagaatcgccatcatcttcatcctgagcggcatcaccggcaacctggccagcgccatcttcctgccctacagagccgaggtgagaatgtggagaatgggccccctgccccacatcggcggccagccctgctgcagctacagcacccacctgggcagcgccagaggcaccagatgccccagctgcaccggcctgcacagcggcggcaccgccaacctgggcgcctactggctggtgagctag

SEQ ID NO: 97237 - DNA, 639 bp, synthetic construct
  misc_feature 1..639: note = Description of Artificial Sequence: Synthetic coding sequence
  source 1..639: mol_type = other DNA
atggcccagaccgacaagcccacctgcatcccccccgagctgcccaagatgctgaaggagttcgccaaggccgccatcagagtgcagccccaggacctgatccagtgggccgccgactacttcgaggccctgagcagaggcgagaccccccccgtgagagagagaagcgagagagtggccctgtgcaacagagccgagctgacccccgagctgctgaagatcctgcacagccaggtggccggcagactgatcatcagagccgaggagctggcccagatgtggaaggtggtgaacctgcccaccgacctgttcaacagcgtgatgaacgtgggcagattcaccgaggagatcgagtggctgaagttcctggccctggcctgcagcgccctgggcgtgaccatcaccaagaccctgaagatcgtgtgcgaggtgctgagctgcgaccacaacggcggcagccccagaatccccttcagcaccttccagttcctgtacacctacatcgccaaggtggacggcgagatcagcgccagccacgtgagcagaatgctgaactacatggagcaggaggtgatcggccccgacggcatcatcaccgtgaacgacttcacccagaaccccagagtgcagctggagtag

SEQ ID NO: 97238 - DNA, 639 bp, synthetic construct; identical to SEQ ID NO: 97237
  misc_feature 1..639: note = Description of Artificial Sequence: Synthetic coding sequence
  source 1..639: mol_type = other DNA

SEQ ID NO: 97239 - DNA, 351 bp, synthetic construct
  misc_feature 1..351: note = Description of Artificial Sequence: Synthetic coding sequence
  source 1..351: mol_type = other DNA
atggcccagaccgacaagcccacctgcatcccccccgagctgcccaagatgctgaaggagttcgccaaggccgccatcagagtgcagccccaggacctgatccagtgggccgccgactacttcgaggccctgagcagaggcgagaccccccccgtgagagagagaagcgagagagtggccctgtgcaacagagccgagctgacccccgagctgctgaagatcctgcacagccaggtggccggcagactgatcatcagagccgaggagctggcccagatgtggaaggtggtgaacctgcccaccgacctgttcaacagcgtgatgaacgtgggcagattcaccgaggagtag

SEQ ID NO: 97240 - DNA, 393 bp, synthetic construct
  misc_feature 1..393: note = Description of Artificial Sequence: Synthetic coding sequence
  source 1..393: mol_type = other DNA
atggcccagaccgacaagcccacctgcatcccccccgagctgcccaagatgctgaaggagttcgccaaggccgccatcagagtgcagccccaggacctgatccagtgggccgccgactacttcgaggccctgagcagaggcgagaccccccccgtgagagagagaagcgagagagtggccctgtgcaacagagccgagctgacccccgagctgctgaagatcctgcacagccaggtggccggcagactgatcatcagagccgaggagctggcccagatgtggaaggtggtgaacctgcccaccgacctgttcaacagcgtgatgaacgtgggcagattcaccgaggagatcgagtggctgaagttcctggccctggcctgcagcgccctgtag

SEQ ID NO: 97241 - DNA, 312 bp, synthetic construct
  misc_feature 1..312: note = Description of Artificial Sequence: Synthetic coding sequence
  source 1..312: mol_type = other DNA
atggcccagaccgacaagcccacctgcatcccccccgagctgcccaagatgctgaaggagttcgccaaggccgccatcagagtgcagccccaggacctgatccagtgggccgccgactacttcgaggccctgagcagaggcgagaccccccccgtgagagagagaagcgagagagtggccctgtgcaacagagccgagctgacccccgagctgctgaagatcctgcacagccaggtggccggcagactgatcatcagagccgaggagctggcccagatgtggaaggtggtgaacctgcccaccgacctgtag

SEQ ID NO: 97242 - DNA, 234 bp, synthetic construct
  misc_feature 1..234: note = Description of Artificial Sequence: Synthetic coding sequence
  source 1..234: mol_type = other DNA
atggcccagaccgacaagcccacctgcatcccccccgagctgcccaagatgctgaaggagttcgccaaggccgccatcagagtgcagccccaggacctgatccagtgggccgccgactacttcgaggccctgagcagaggcgagaccccccccgtgagagagagaagcgagagagtggccctgtgcaacagagccgagctgacccccgagctgctgaagatcctgcacagctag

SEQ ID NO: 97243 - DNA, 693 bp, synthetic construct
  misc_feature 1..693: note = Description of Artificial Sequence: Synthetic coding sequence
  source 1..693: mol_type = other DNA
atgcccctgcccgacaccatgttctgcgcccagcagatccacatcccccccgagctgcccgacatcctgaagcagttcaccaaggccgccatcagaacccagcccgccgacgtgctgagatggagcgccggctacttcagcgccctgagcagaggcgaccccctgcccgtgaaggacagaatggagatgcccaccgccacccagaagaccgacaccggcctgacccagggcctgctgaaggtgctgcacaagcagtgccaccacaagagatacgtggagctgaccgacctggagcagaagtggaagaacctgtgcctgcccaaggagaagttcaaggccctgctgcagctggacccctgcgagaacaagatcaagtggatcaacttcctggccctgggctgcagcatgctgggcggcagcctgaacaccgccctgaagcacctgtgcgagatcctgaccgacgaccccgagggcggccccgccagaatccccttcaagaccttcagctacgtgtacagatacctggccagactggacagcgacgtgagccccctggagaccgagagctacctggccagcctgaaggagaacatcgacgccagaaagaacggcatgatcggcctgagcgacttcttcttccccaagagaaagctgctggagagcatcgagaacagcgaggacgtgggccactag

SEQ ID NO: 97244 - DNA, 693 bp, synthetic construct; identical to SEQ ID NO: 97243
  misc_feature 1..693: note = Description of Artificial Sequence: Synthetic coding sequence
  source 1..693: mol_type = other DNA

SEQ ID NO: 97245 - DNA, 2091 bp, synthetic construct
  misc_feature 1..2091: note = Description of Artificial Sequence: Synthetic coding sequence
  source 1..2091: mol_type = other DNA
atggacgccgacatggactacgagagacccaacgtggagaccatcaagtgcgtggtggtgggcgacaacgccgtgggcaagaccagactgatctgcgccagagcctgcaacaccaccctgacccagtaccagctgctggccacccacgtgcccaccgtgtgggccatcgaccagtacagagtgtgccaggaggtgctggagagaagcagagacgtggtggacgaggtgagcgtgagcctgagactgtgggacaccttcggcgaccaccacaaggacagaagattcgcctacggcagaagcgacgtggtggtgctgtgcttcagcatcgccaaccccaacagcctgaaccacgtgaagagcatgtggtaccccgagatcaagcacttctgccccagaacccccgtgatcctggtgggctgccagctggacctgagatacgccgacctggaggccgtgaacagagccagaagacccctggccagacccatcaagagaggcgacatcctgccccccgagaagggcagagaggtggccaaggagctgggcctgccctactacgagaccagcgtgttcgaccagttcggcatcaaggacgtgttcgacaacgccatcagagccgccctgatcagcagaagacacctgcagttctggaagagccacctgaagaaggtgcagaagcccctgctgcaggcccccttcctgccccccaaggcccccccccccgtgatcaagatccccgagtgccccagcatgggcaccaacgaggccgcctgcctgctggacaaccccctgtgcgccgacgtgctgttcatcctgcaggaccaggagcacatcttcgcccacagaatctacctggccaccagcagcagcaagttctacgacctgttcctgatggagtgcgaggagagccccaacggcagcgagggcgcctgcgagaaggagaagcagagcagagacttccagggcagaatcctgagcgtggaccccgaggaggagagagaggagggcccccccagaatcccccaggccgaccagtggaagagcagcaacaagagcctggtggaggccctgggcctggaggccgagggcgccgtgcccgagacccagaccctgaccggctggagcaagggcttcatcggcatgcacagagagatgcaggtgaaccccatcagcaagagaatgggccccatgaccgtggtgagaatggacgccagcgtgcagcccggccccttcagaaccctgctgcagttcctgtacaccggccagctggacgagaaggagaaggacctggtgggcctggcccagatcgccgaggtgctggagatgttcgacctgagaatgatggtggagaacatcatgaacaaggaggccttcatgaaccaggagatcaccaaggccttccacgtgagaaaggccaacagaatcaaggagtgcctgagcaagggcaccttcagcgacgtgaccttcaagctggacgacggcgccatcagcgcccacaagcccctgctgatctgcagctgcgagtggatggccgccatgttcggcggcagcttcgtggagagcgccaacagcgaggtgtacctgcccaacatcaacaagatcagcatgcaggccgtgctggactacctgtacaccaagcagctgagccccaacctggacctggaccccctggagctgatcgccctggccaacagattctgcctgccccacctggtggccctggccgagcagcacgccgtgcaggagctgaccaaggccgccaccagcggcgtgggcatcgacggcgaggtgctgagctacctggagctggcccagttccacaacgcccaccagctggccgcctggtgcctgcaccacatctgcaccaactacaacagcgtgtgcagcaagttcagaaaggagatcaagagcaagagcgccgacaaccaggagtacttcgagagacacagatggccccccgtgtggtacctgaaggaggaggaccactaccagagagtgaagagagagagagagaaggaggacatcgccctgaacaagcacagaagcagaagaaagtggtgcttctggaacagcagccccgccgtggcctag

SEQ ID NO: 97246 - DNA, 2091 bp, synthetic construct; identical to SEQ ID NO: 97245
  misc_feature 1..2091: note = Description of Artificial Sequence: Synthetic coding sequence
  source 1..2091: mol_type = other DNA

SEQ ID NO: 97247 - DNA, 300 bp, synthetic construct
  misc_feature 1..300: note = Description of Artificial Sequence: Synthetic coding sequence
  source 1..300: mol_type = other DNA
atggacgccgacatggactacgagagacccaacgtggagaccatcaagtgcgtggtggtgggcgacaacgccgtgggcaagaccagactgatctgcgccagagcctgcaacaccaccctgacccagtaccagctgctggccacccacgtgcccaccgtgtgggccatcgaccagtacagagtgtgccaggaggtgctggagagaagcagagacgtggtggacgaggtgagcgtgagcctgagactgtgggacaccttcggcgaccaccacaaggacagaagattcgcctacggcagatag

SEQ ID NO: 97248 - DNA, 2184 bp, synthetic construct
  misc_feature 1..2184: note = Description of Artificial Sequence: Synthetic coding sequence
  source 1..2184: mol_type = other DNA
atggacagcgacatggactacgagagacccaacgtggagaccatcaagtgcgtggtggtgggcgacaacgccgtgggcaagaccagactgatctgcgccagagcctgcaacgccaccctgacccagtaccagctgctggccacccacgtgcccaccgtgtgggccatcgaccagtacagagtgtgccaggaggtgctggagagaagcagagacgtggtggacgacgtgagcgtgagcctgagactgtgggacaccttcggcgaccaccacaaggacagaagattcgcctacggcagaagcgacgtggtggtgctgtgcttcagcatcgccaaccccaacagcctgcaccacgtgaagaccatgtggtaccccgagatcaagcacttctgccccagagcccccgtgatcctggtgggctgccagctggacctgagatacgccgacctggaggccgtgaacagagccagaagacccctggccagacccatcaagcccaacgagatcctgccccccgagaagggcagagaggtggccaaggagctgggcatcccctactacgagaccagcgtggtggcccagttcggcatcaaggacgtgttcgacaacgccatcagagccgccctgatcagcagaagacacctgcagttctggaagagccacctgagaaacgtgcagagacccctgctgcaggcccccttcctgccccccaagccccccccccccatcatcgtggtgcccgacccccccagcagcagcgaggagtgccccgcccacctgctggaggaccccctgtgcgccgacgtgatcctggtgctgcaggagagagtgagaatcttcgcccacaagatctacctgagcaccagcagcagcaagttctacgacctgttcctgatggacctgagcgagggcgagctgggcggccccagcgagcccggcggcacccaccccgaggaccaccagggccacagcgaccagcaccaccaccaccaccaccaccaccacggcagagacttcctgctgagagccgccagcttcgacgtgtgcgagagcgtggacgaggccggcggcagcggccccgccggcctgagagccagcaccagcgacggcatcctgagaggcaacggcaccggctacctgcccggcagaggcagagtgctgagcagctggagcagagccttcgtgagcatccaggaggagatggccgaggaccccctgacctacaagagcagactgatggtggtggtgaagatggacagcagcatccagcccggccccttcagagccgtgctgaagtacctgtacaccggcgagctggacgagaacgagagagacctgatgcacatcgcccacatcgccgagctgctggaggtgttcgacctgagaatgatggtggccaacatcctgaacaacgaggccttcatgaaccaggagatcaccaaggccttccacgtgagaagaaccaacagagtgaaggagtgcctggccaagggcaccttcagcgacgtgaccttcatcctggacgacggcaccatcagcgcccacaagcccctgctgatcagcagctgcgactggatggccgccatgttcggcggccccttcgtggagagcagcaccagagaggtggtgttcccctacaccagcaagagctgcatgagagccgtgctggagtacctgtacaccggcatgttcaccagcagccccgacctggacgacatgaagctgatcatcctggccaacagactgtgcctgccccacctggtggccctgaccgagcagtacaccgtgaccggcctgatggaggccacccagatgatggtggacatcgacggcgacgtgctggtgttcctggagctggcccagttccactgcgcctaccagctggccgactggtgcctgcaccacatctgcaccaactacaacaacgtgtgcagaaagttccccagagacatgaaggccatgagccccgagaaccaggagtacttcgagaagcacagatggccccccgtgtggtacctgaaggaggaggaccactaccagagagccagaaaggagagagagaaggaggactacctgcacctgaagagacagcccaagagaagatggctgttctggaacagccccagcagccccagcagcagcgccgccagcagcagcagccccagcagcagcagcgccgtggtgtag

SEQ ID NO: 97249 - DNA, 2250 bp, synthetic construct
  misc_feature 1..2250: note = Description of Artificial Sequence: Synthetic coding sequence
  source 1..2250: mol_type = other DNA
atgcaggcctggagaaagggccccgacggcccccagaagaccagcagcgacagcatgagcagactgatggacagcgacatggactacgagagacccaacgtggagaccatcaagtgcgtggtggtgggcgacaacgccgtgggcaagaccagactgatctgcgccagagcctgcaacgccaccctgacccagtaccagctgctggccacccacgtgcccaccgtgtgggccatcgaccagtacagagtgtgccaggaggtgctggagagaagcagagacgtggtggacgacgtgagcgtgagcctgagactgtgggacaccttcggcgaccaccacaaggacagaagattcgcctacggcagaagcgacgtggtggtgctgtgcttcagcatcgccaaccccaacagcctgcaccacgtgaagaccatgtggtaccccgagatcaagcacttctgccccagagcccccgtgatcctggtgggctgccagctggacctgagatacgccgacctggaggccgtgaacagagccagaagacccctggccagacccatcaagcccaacgagatcctgccccccgagaagggcagagaggtggccaaggagctgggcatcccctactacgagaccagcgtggtggcccagttcggcatcaaggacgtgttcgacaacgccatcagagccgccctgatcagcagaagacacctgcagttctggaagagccacctgagaaacgtgcagagacccctgctgcaggcccccttcctgccccccaagccccccccccccatcatcgtggtgcccgacccccccagcagcagcgaggagtgccccgcccacctgctggaggaccccctgtgcgccgacgtgatcctggtgctgcaggagagagtgagaatcttcgcccacaagatctacctgagcaccagcagcagcaagttctacgacctgttcctgatggacctgagcgagggcgagctgggcggccccagcgagcccggcggcacccaccccgaggaccaccagggccacagcgaccagcaccaccaccaccaccaccaccaccacggcagagacttcctgctgagagccgccagcttcgacgtgtgcgagagcgtggacgaggccggcggcagcggccccgccggcctgagagccagcaccagcgacggcatcctgagaggcaacggcaccggctacctgcccggcagaggcagagtgctgagcagctggagcagagccttcgtgagcatccaggaggagatggccgaggaccccctgacctacaagagcagactgatggtggtggtgaagatggacagcagcatccagcccggccccttcagagccgtgctgaagtacctgtacaccggcgagctggacgagaacgagagagacctgatgcacatcgcccacatcgccgagctgctggaggtgttcgacctgagaatgatggtggccaacatcctgaacaacgaggccttcatgaaccaggagatcaccaaggccttccacgtgagaagaaccaacagagtgaaggagtgcctggccaagggcaccttcagcgacgtgaccttcatcctggacgacggcaccatcagcgcccacaagcccctgctgatcagcagctgcgactggatggccgccatgttcggcggccccttcgtggagagcagcaccagagaggtggtgttcccctacaccagcaagagctgcatgagagccgtgctggagtacctgtacaccggcatgttcaccagcagccccgacctggacgacatgaagctgatcatcctggccaacagactgtgcctgccccacctggtggccctgaccgagcagtacaccgtgaccggcctgatggaggccacccagatgatggtggacatcgacggcgacgtgctggtgttcctggagctggcccagttccactgcgcctaccagctggccgactggtgcctgcaccacatctgcaccaactacaacaacgtgtgcagaaagttccccagagacatgaaggccatgagccccgagaaccaggagtacttcgagaagcacagatggccccccgtgtggtacctgaaggaggaggaccactaccagagagccagaaaggagagagagaaggaggactacctgcacctgaagagacagcccaagagaagatggctgttctggaacagccccagcagccccagcagcagcgccgccagcagcagcagccccagcagcagcagcgccgtggtgtag

SEQ ID NO: 97250 - DNA, 2205 bp, synthetic construct
  misc_feature 1..2205: note = Description of Artificial Sequence: Synthetic coding sequence
  source 1..2205: mol_type = other DNA
atgaaggccagaagcagactgatggacagcgacatggactacgagagacccaacgtggagaccatcaagtgcgtggtggtgggcgacaacgccgtgggcaagaccagactgatctgcgccagagcctgcaacgccaccctgacccagtaccagctgctggccacccacgtgcccaccgtgtgggccatcgaccagtacagagtgtgccaggaggtgctggagagaagcagagacgtggtggacgacgtgagcgtgagcctgagactgtgggacaccttcggcgaccaccacaaggacagaagattcgcctacggcagaagcgacgtggtggtgctgtgcttcagcatcgccaaccccaacagcctgcaccacgtgaagaccatgtggtaccccgagatcaagcacttctgccccagagcccccgtgatcctggtgggctgccagctggacctgagatacgccgacctggaggccgtgaacagagccagaagacccctggccagacccatcaagcccaacgagatcctgccccccgagaagggcagagaggtggccaaggagctgggcatcccctactacgagaccagcgtggtggcccagttcggcatcaaggacgtgttcgacaacgccatcagagccgccctgatcagcagaagacacctgcagttctggaagagccacctgagaaacgtgcagagacccctgctgcaggcccccttcctgccccccaagccccccccccccatcatcgtggtgcccgacccccccagcagcagcgaggagtgccccgcccacctgctggaggaccccctgtgcgccgacgtgatcctggtgctgcaggagagagtgagaatcttcgcccacaagatctacctgagcaccagcagcagcaagttctacgacctgttcctgatggacctgagcgagggcgagctgggcggccccagcgagcccggcggcacccaccccgaggaccaccagggccacagcgaccagcaccaccaccaccaccaccaccaccacggcagagacttcctgctgagagccgccagcttcgacgtgtgcgagagcgtggacgaggccggcggcagcggccccgccggcctgagagccagcaccagcgacggcatcctgagaggcaacggcaccggctacctgcccggcagaggcagagtgctgagcagctggagcagagccttcgtgagcatccaggaggagatggccgaggaccccctgacctacaagagcagactgatggtggtggtgaagatggacagcagcatccagcccggccccttcagagccgtgctgaagtacctgtacaccggcgagctggacgagaacgagagagacctgatgcacatcgcccacatcgccgagctgctggaggtgttcgacctgagaatgatggtggccaacatcctgaacaacgaggccttcatgaaccaggagatcaccaaggccttccacgtgagaagaaccaacagagtgaaggagtgcctggccaagggcaccttcagcgacgtgaccttcatcctggacgacggcaccatcagcgcccacaagcccctgctgatcagcagctgcgactggatggccgccatgttcggcggccccttcgtggagagcagcaccagagaggtggtgttcccctacaccagcaagagctgcatgagagccgtgctggagtacctgtacaccggcatgttcaccagcagccccgacctggacgacatgaagctgatcatcctggccaacagactgtgcctgccccacctggtggccctgaccgagcagtacaccgtgaccggcctgatggaggccacccagatgatggtggacatcgacggcgacgtgctggtgttcctggagctggcccagttccactgcgcctaccagctggccgactggtgcctgcaccacatctgcaccaactacaacaacgtgtgcagaaagttccccagagacatgaaggccatgagccccgagaaccaggagtacttcgagaagcacagatggccccccgtgtggtacctgaaggaggaggaccactaccagagagccagaaaggagagagagaaggaggactacctgcacctgaagagacagcccaagagaagatggctgttctggaacagccccagcagccccagcagcagcgccgccagcagcagcagccccagcagcagcagcgccgtggtgtag

SEQ ID NO: 97251 - DNA, 1836 bp, synthetic construct
  misc_feature 1..1836: note = Description of Artificial Sequence: Synthetic coding sequence
  source 1..1836: mol_type = other DNA
atgagcatccacatcgtggccctgggcaacgagggcgacaccttccaccaggacaacagacccagcggcctgatcagaacctacctgggcagaagccccctggtgagcggcgacgagagcagcctgctgctgaacgccgccagcaccgtggccagacccgtgttcaccgagtaccaggccagcgccttcggcaacgtgaagctggtggtgcacgactgccccgtgtgggacatcttcgacagcgactggtacaccagcagaaacctgatcggcggcgccgacatcatcgtgatcaagtacaacgtgaacgacaagttcagcttccacgaggtgaaggacaactacatccccgtgatcaagagagccctgaacagcgtgcccgtgatcatcgccgccgtgggcaccagacagaacgaggagctgccctgcacctgccccctgtgcaccagcgacagaggcagctgcgtgagcaccaccgagggcatccagctggccaaggagctgggcgccacctacctggagctgcacagcctggacgacttctacatcggcaagtacttcggcggcgtgctggagtacttcatgatccaggccctgaaccagaagaccagcgagaagatgaagaagagaaagatgagcaacagcttccacggcatcagacccccccagctggagcagcccgagaagatgcccgtgctgaaggccgaggccagccactacaacagcgacctgaacaacctgctgttctgctgccagtgcgtggacgtggtgttctacaaccccaacctgaagaaggtggtggaggcccacaagatcgtgctgtgcgccgtgagccacgtgttcatgctgctgttcaacgtgaagagccccaccgacatccaggacagcagcatcatcagaaccacccaggacctgttcgccatcaacagagacaccgccttccccggcgccagccacgagagcagcggcaacccccccctgagagtgatcgtgaaggacgccctgttctgcagctgcctgagcgacatcctgagattcatctacagcggcgccttccagtgggaggagctggaggaggacatcagaaagaagctgaaggacagcggcgacgtgagcaacgtgatcgagaaggtgaagtgcatcctgaagacccccggcaagatcaactgcctgagaaactgcaagacctaccaggccagaaagcccctgtggttctacaacaccagcctgaagttcttcctgaacaagcccatgctggccgacgtggtgttcgagatccagggcaccaccgtgcccgcccacagagccatcctggtggccagatgcgaggtgatggccgccatgttcaacggcaactacatggaggccaagagcgtgctgatccccgtgtacggcgtgagcaaggagaccttcctgagcttcctggagtacctgtacaccgacagctgctgccccgccggcatcttccaggccatgtgcctgctgatctgcgccgagatgtaccaggtgagcagactgcagcacatctgcgagctgttcatcatcacccagctgcagagcatgcccagcagagagctggccagcatgaacctggacatcgtggacctgctgaagaaggccaagttccaccacagcgactgcctgagcacctggctgctgcacttcatcgccaccaactacctgatcttcagccagaagcccgagttccaggacctgagcgtggaggagagaagcttcgtggagaagcacagatggcccagcaacatgtacctgaagcagctggccgagtacagaaagtacatccacagcagaaagtgcagatgcctggtgatgtag

SEQ ID NO: 97252 - DNA, 354 bp, synthetic construct
  misc_feature 1..354: note = Description of Artificial Sequence: Synthetic coding sequence
  source 1..354: mol_type = other DNA
tgagagatgtaccaggtgagcagactgcagcacatctgcgagctgttcatcatcacccagctgcagagcatgcccagcagagagctggccagcatgaacctggacatcgtggacctgctgaagaaggccaagttccaccacagcgactgcctgagcacctggctgctgcacttcatcgccaccaactacctgatcttcagccagaagcccgagttccaggacctgagcgtggaggagagaagcttcgtggagaagcacagatggcccagcaacatgtacctgaagcagctggccgagtacagaaagtacatccacagcagaaagtgcagatgcctggtgatcaagagacactag

SEQ ID NO: 97253 - DNA, 1692 bp, synthetic construct
  misc_feature 1..1692: note = Description of Artificial Sequence: Synthetic coding sequence
  source 1..1692: mol_type = other DNA
atgttcagcagaaaccacagaagcagagtgaccgtggccagaggcagcgccctggagatggagttcaagagaggcagattcagactgagcctgttcagcgacctgcccgaggacaccgagctgcagagaaagctggaccacgagatcagaatgagagagggcgcctgcaagctgctggccgcctgcagccagagagagcaggccctggaggccaccaagagcctgctggtgtgcaacagcagaatcctgagctacatgggcgagctgcagagaagaaaggaggcccaggtgctgggcaagaccagcagaagacccagcgacagcggcccccccgccgagagaagcccctgcagaggcagagtgtgcatcagcgacctgagaatccccctgatgtggaaggacaccgagtacttcaagaacaagggcgacctgcacagatgggccgtgttcctgctgctgcagctgggcgagcacatccaggacaccgagatgatcctggtggacagaaccctgaccgacatcagcttccagagcaacgtgctgttcgccgaggccggccccgacttcgagctgagactggagctgtacggcgcctgcgtggaggaggagggcgccctgaccggcggccccaagagactggccaccaagctgagcagcagcctgggcagaagcagcggcagaagagtgagagccagcctggacagcgccggcggcagcggcagcagccccatcctgctgcccacccccgtggtgggcggccccagataccacctgctggcccacaccaccctgaccctggccgccgtgcaggacggcttcagaacccacgacctgaccctggccagccacgaggagaaccccgcctggctgcccctgtacggcagcgtgtgctgcagactggccgcccagcccctgtgcatgacccagcccaccgccagcggcaccctgagagtgcagcaggccggcgagatgcagaactgggcccaggtgcacggcgtgctgaagggcaccaacctgttctgctacagacagcccgaggacgccgacaccggcgaggagcccctgctgaccatcgccgtgaacaaggagaccagagtgagagccggcgagctggaccaggccctgggcagacccttcaccctgagcatcagcaaccagtacggcgacgacgaggtgacccacaccctgcagaccgagagcagagaggccctgcagagctggatggaggccctgtggcagctgttcttcgacatgagccagtggaagcagtgctgcgacgagatcatgaagatcgagacccccgcccccagaaagcccccccaggccctggccaagcagggcagcctgtaccacgagatggccatcgagcccctggacgacatcgccgccgtgaccgacatcctgacccagagagagggcgccagactggagaccccccccccctggctggccatgttcaccgaccagcccgccctgcccaacccctgcagccccgccagcgtggcccccgcccccgactggacccaccccctgccctggggcagacccagaaccttcagcctggacgccgtgccccccgaccacagccccagagccagaagcgtggcccccctgcccccccagagaagccccagaaccagaggcctgtgcagcaagggccagcccagaacctggctgcagagccccgtgtag

SEQ ID NO: 97254 - DNA, 1653 bp, synthetic construct
  misc_feature 1..1653: note = Description of Artificial Sequence: Synthetic coding sequence
  source 1..1653: mol_type = other DNA
atgcaggacagactgcacatcctggaggacctgaacatgctgtacatcagacagatggccctgagcctggaggacaccgagctgcagagaaagctggaccacgagatcagaatgagagagggcgcctgcaagctgctggccgcctgcagccagagagagcaggccctggaggccaccaagagcctgctggtgtgcaacagcagaatcctgagctacatgggcgagctgcagagaagaaaggaggcccaggtgctgggcaagaccagcagaagacccagcgacagcggcccccccgccgagagaagcccctgcagaggcagagtgtgcatcagcgacctgagaatccccctgatgtggaaggacaccgagtacttcaagaacaagggcgacctgcacagatgggccgtgttcctgctgctgcagctgggcgagcacatccaggacaccgagatgatcctggtggacagaaccctgaccgacatcagcttccagagcaacgtgctgttcgccgaggccggccccgacttcgagctgagactggagctgtacggcgcctgcgtggaggaggagggcgccctgaccggcggccccaagagactggccaccaagctgagcagcagcctgggcagaagcagcggcagaagagtgagagccagcctggacagcgccggcggcagcggcagcagccccatcctgctgcccacccccgtggtgggcggccccagataccacctgctggcccacaccaccctgaccctggccgccgtgcaggacggcttcagaacccacgacctgaccctggccagccacgaggagaaccccgcctggctgcccctgtacggcagcgtgtgctgcagactggccgcccagcccctgtgcatgacccagcccaccgccagcggcaccctgagagtgcagcaggccggcgagatgcagaactgggcccaggtgcacggcgtgctgaagggcaccaacctgttctgctacagacagcccgaggacgccgacaccggcgaggagcccctgctgaccatcgccgtgaacaaggagaccagagtgagagccggcgagctggaccaggccctgggcagacccttcaccctgagcatcagcaaccagtacggcgacgacgaggtgacccacaccctgcagaccgagagcagagaggccctgcagagctggatggaggccctgtggcagctgttcttcgacatgagccagtggaagcagtgctgcgacgagatcatgaagatcgagacccccgcccccagaaagcccccccaggccctggccaagcagggcagcctgtaccacgagatggccatcgagcccctggacgacatcgccgccgtgaccgacatcctgacccagagagagggcgccagactggagaccccccccccctggctggccatgttcaccgaccagcccgccctgcccaacccctgcagccccgccagcgtggcccccgcccccgactggacccaccccctgccctggggcagacccagaaccttcagcctggacgccgtgccccccgaccacagccccagagccagaagcgtggcccccctgcccccccagagaagccccagaaccagaggcctgtgcagcaagggccagcccagaacctggctgcagagccccgtgtag

SEQ ID NO: 97255 - DNA, 4635 bp, synthetic construct
  misc_feature 1..4635: note = Description of Artificial Sequence: Synthetic coding sequence
  source 1..4635: mol_type = other DNA
atggacagcggccccgtgtaccacggcgacagcagacagctgagcgccagcggcgtgcccgtgaacggcgccagagagcccgccggccccagcctgctgggcaccggcggcccctggagagtggaccagaagcccgactgggaggccgcccccggccccgcccacaccgccagactggaggacgcccacgacctggtggccttcagcgccgtggccgaggccgtgagcagctacggcgccctgagcaccagactgtacgagaccttcaacagagagatgagcagagaggccggcaacaacagcagaggccccagacccggccccgagggctgcagcgccggcagcgaggacctggacaccctgcagaccgccctggccctggccagacacggcatgaagccccccaactgcaactgcgacggccccgagtgccccgactacctggagtggctggagggcaagatcaagagcgtggtgatggagggcggcgaggagagacccagactgcccggccccctgccccccggcgaggccggcctgcccgcccccagcaccagacccctgctgagcagcgaggtgccccagatcagcccccaggagggcctgcccctgagccagagcgccctgagcatcgccaaggagaagaacatcagcctgcagaccgccatcgccatcgaggccctgacccagctgagcagcgccctgccccagcccagccacagcaccccccaggccagctgccccctgcccgaggccctgagcccccccgcccccttcagaagcccccagagctacctgagagcccccagctggcccgtggtgccccccgaggagcacagcagcttcgcccccgacagcagcgccttcccccccgccacccccagaaccgagttccccgaggcctggggcaccgacaccccccccgccacccccagaagcagctggcccatgcccagacccagccccgaccccatggccgagctggagcagctgctgggcagcgccagcgactacatccagagcgtgttcaagagacccgaggccctgcccaccaagcccaaggtgaaggtggaggcccccagcagcagccccgcccccgcccccagccccgtgctgcagagagaggcccccacccccagcagcgagcccgacacccaccagaaggcccagaccgccctgcagcagcacctgcaccacaagagaagcctgttcctggagcaggtgcacgacaccagcttccccgcccccagcgagcccagcgcccccggctggtggcccccccccagcagccccgtgcccagactgcccgacagaccccccaaggagaagaagaagaagctgcccacccccgccggcggccccgtgggcaccgagaaggccgcccccggcatcaagcccagcgtgagaaagcccatccagatcaagaagagcagacccagagaggcccagcccctgttcccccccgtgagacagatcgtgctggagggcctgagaagccccgccagccaggaggtgcaggcccacccccccgcccccctgcccgccagccagggcagcgccgtgcccctgccccccgagcccagcctggccctgttcgcccccagccccagcagagacagcctgctgccccccacccaggagatgagaagccccagccccatgaccgccctgcagcccggcagcaccggccccctgccccccgccgacgacaagctggaggagctgatcagacagttcgaggccgagttcggcgacagcttcggcctgcccggcccccccagcgtgcccatccaggaccccgagaaccagcagacctgcctgcccgcccccgagagccccttcgccaccagaagccccaagcagatcaagatcgagagcagcggcgccgtgaccgtgctgagcaccacctgcttccacagcgaggagggcggccaggaggccacccccaccaaggccgagaaccccctgacccccaccctgagcggcttcctggagagccccctgaagtacctggacacccccaccaagagcctgctggacacccccgccaagagagcccaggccgagttccccacctgcgactgcgtggagcagatcgtggagaaggacgagggcccctactacacccacctgggcagcggccccaccgtggccagcatcagagagctgatggaggagagatacggcgagaagggcaaggccatcagaatcgagaaggtgatctacaccggcaaggagggcaagagcagcagaggctgccccatcgccaagtgggtgatcagaagacacaccctggaggagaagctgctgtgcctggtgagacacagagccggccaccactgccagaacgccgtgatcgtgatcctgatcctggcctgggagggcatccccagaagcctgggcgacaccctgtaccaggagctgaccgacaccctgagaaagtacggcaaccccaccagcagaagatgcggcctgaacgacgacagaacctgcgcctgccagggcaaggaccccaacacctgcggcgccagcttcagcttcggctgcagctggagcatgtacttcaacggctgcaagtacgccagaagcaagacccccagaaagttcagactggccggcgacaaccccaaggaggaggaggtgctgagaaagagcttccaggacctggccaccgaggtggcccccctgtacaagagactggccccccaggcctaccagaaccaggtgaccaacgaggagatcgccatcgactgcagactgggcctgaaggagggcagacccttcgccggcgtgaccgcctgcatggacttctgcgcccacgcccacaaggaccagcacaacctgtacaacggctgcaccgtggtgtgcaccctgaccaaggaggacaacagatgcgtgggcaagatccccgaggacgagcagctgcacgtgctgcccctgtacaagatggccaacaccgacgagttcggcagcgaggagaaccagaacgccaaggtgggcagcggcgccatccaggtgctgaccgccttccccagagaggtgagaagactgcccgagcccgccaagagctgcagacagagacagctggaggccagaaaggccgccgccgagaagaagaagatccagaaggagaagctgagcacccccgagaagatcaagcaggaggccctggagctggccggcatcaccagcgaccccggcctgagcctgaagggcggcctgagccagcagggcctgaagcccagcctgaaggtggagccccagaaccacttcagcagcttcaagtacagcggcaacgccgtggtggagagctacagcgtgctgggcaactgcagacccagcgacccctacagcatgaacagcgtgtacagctaccacagctactacgcccagcccagcctgaccagcgtgaacggcttccacagcaagtacgccctgcccagcttcagctactacggcttccccagcagcaaccccgtgttccccagccagttcctgggccccggcgcctggggccacagcggcagcagcggcagcttcgagaagaagcccgacctgcacgccctgcacaacagcctgagccccgcctacggcggcgccgagttcgccgagctgcccagccaggccgtgcccaccgacgcccaccaccccaccccccaccaccagcagcccgcctaccccggccccaaggagtacctgctgcccaaggcccccctgctgcacagcgtgagcagagaccccagccccttcgcccagagcagcaactgctacaacagaagcatcaagcaggagcccgtggaccccctgacccaggccgagcccgtgcccagagacgccggcaagatgggcaagacccccctgagcgaggtgagccagaacggcggccccagccacctgtggggccagtacagcggcggccccagcatgagccccaagagaaccaacggcgtgggcggcagctggggcgtgttcagcagcggcgagagccccgccatcgtgcccgacaagctgagcagcttcggcgccagctgcctggcccccagccacttcaccgacggccagtggggcctgttccccggcgagggccagcaggccgccagccacagcggcggcagactgagaggcaagccctggagcccctgcaagttcggcaacagcaccagcgccctggccggccccagcctgaccgagaagccctgggccctgggcgccggcgacttcaacagcgccctgaagggcagccccggcttccaggacaagctgtggaaccccatgaagggcgaggagggcagaatccccgccgccggcgccagccagctggtgttctaccagcacaagaacctgaaccagcccaaccacggcctggccctgtgggaggccaagatgaagcagctggccgagagagccagagccagacaggaggaggccgccagactgggcctgggccagcaggaggccaagctgtacggcaagaagagaaagtggggcggcaccgtggtggccgagccccagcagaaggagaagaagggcgtggtgcccaccagacaggccctggccgtgcccaccgacagcgccgtgaccgtgagcagctacgcctacaccaaggtgaccggcccctacagcagatggatctag

SEQ ID NO: 97256 - DNA, 468 bp, synthetic construct
  misc_feature 1..468: note = Description of Artificial Sequence: Synthetic coding sequence
  source 1..468: mol_type = other DNA
atgagacacctgccctacttctgcagaggccaggtggtgagaggcttcggcagaggcagcaagcagctgggcatccccaccgccaacttccccgagcaggtggtggacaacctgcccgccgacatcagcaccggcatctactacggctgggccagcgtgggcagcggcgacgtgcacaagatggtggtgagcatcggctggaacccctactacaagaacaccaagaagagcatggagacccacatcatgcacaccttcaaggaggacttctacggcgagatcctgaacgtggccatcgtgggctacctgagacccgagaagaacttcgacagcctggagagcctgatcagcgccatccagggcgacatcgaggaggccaagaagagactggagctgcccgagcacctgaagatcaaggaggacaacttcttccaggtgagcaagagcaagatcatgaacggccactag

SEQ ID NO: 97257 - DNA, 969 bp, synthetic construct
  misc_feature 1..969: note = Description of Artificial Sequence: Synthetic coding sequence
  source 1..969: mol_type = other DNA
atggccgccagcggcgagccccagagacagtggcaggaggaggtggccgccgtggtggtggtgggcagctgcatgaccgacctggtgagcctgaccagcagactgcccaagaccggcgagaccatccacggccacaagttcttcatcggcttcggcggcaagggcgccaaccagtgcgtgcaggccgccagactgggcgccatgaccagcatggtgtgcaaggtgggcaaggacagcttcggcaacgactacatcgagaacctgaagcagaacgacatcagcaccgagttcacctaccagaccaaggacgccgccaccggcaccgccagcatcatcgtgaacaacgagggccagaacatcatcgtgatcgtggccggcgccaacctgctgctgaacaccgaggacctgagagccgccgccaacgtgatcagcagagccaaggtgatggtgtgccagctggagatcacccccgccaccagcctggaggccctgaccatggccagaagaagcggcgtgaagaccctgttcaaccccgcccccgccatcgccgacctggacccccagttctacaccctgagcgacgtgttctgctgcaacgagagcgaggccgagatcctgaccggcctgaccgtgggcagcgccgccgacgccggcgaggccgccctggtgctgctgaagagaggctgccaggtggtgatcatcaccctgggcgccgagggctgcgtggtgctgagccagaccgagcccgagcccaagcacatccccaccgagaaggtgaaggccgtggacaccaccggcgccggcgacagcttcgtgggcgccctggccttctacctggcctactaccccaacctgagcctggaggacatgctgaacagaagcaacttcatcgccgccgtgagcgtgcaggccgccggcacccagagcagctacccctacaagaaggacctgcccctgaccctgttctag

SEQ ID NO: 97258 - DNA, 861 bp, synthetic construct
  misc_feature 1..861: note = Description of Artificial Sequence: Synthetic coding sequence
  source 1..861: mol_type = other DNA
atggccgccagcggcgagccccagagacagtggcaggaggaggtggccgccgtggtggtggtgggcagctgcatgaccgacctggtgagcctgaccagcagactgcccaagaccggcgagaccatccacggccacaagttcttcatcggcttcggcggcaagggcgccaaccagtgcgtgcaggccgccagactgggcgccatgaccagcatggtgtgcaaggtgggcaaggacagcttcggcaacgactacatcgagaacctgaagcagaacgacatcagcaccgagttcacctaccagaccaaggacgccgccaccggcaccgccagcatcatcgtgaacaacgagggccagaacatcatcgtgatcgtggccggcgccaacctgctgctgaacaccgaggacctgagagccgccgccaacgtgatcagcagagccaaggtgatggtgtgccagctggagatcacccccgccaccagcctggaggccctgaccatggccagaagaagcggcgtgaagaccctgttcaaccccgcccccgccatcgccgacctggacccccagttctacaccctgagcgacgtgttctgctgcaacgagagcgaggccgagatcctgaccggcctgaccgtgggcagcgccgccgacgccggcgaggccgccctggtgctgctgaagagaggctgccaggtggtgatcatcaccctgggcgccgagggctgcgtggtgctgagccagaccgagcccgagcccaagcacatccccaccgagaaggtgaaggccgtggacaccacctgcagacccggcagcagacccaagagcgaggccgccagcgtgaagaagcagaagcactacaagtag

SEQ ID NO: 97259 - DNA, 861 bp, synthetic construct
  misc_feature 1..861: note = Description of Artificial Sequence: Synthetic coding sequence
  source 1..861: mol_type = other DNA
atgagctggctgctgttcctggcccacagagtggccctggccgccctgccctgcagaagaggcagcagaggcttcggcatgttctacgccgtgagaagaggcagaaagaccggcgtgttcctgacctggaacgagtgcagagcccaggtggacagattccccgccgccagattcaagaagttcgccaccgaggacgaggcctgggccttcgtgagaaagagcgccagccccgaggtgagcgagggccacgagaaccagcacggccaggagagcgaggccaaggccagcaagagactgagagagcccctggacggcgacggccacgagagcgccgagccctacgccaagcacatgaagcccagcgtggagcccgccccccccgtgagcagagacaccttcagctacatgggcgacttcgtggtggtgtacaccgacggctgctgcagcagcaacggcagaagaagacccagagccggcatcggcgtgtactggggccccggccaccccctgaacgtgggcatcagactgcccggcagacagaccaaccagagagccgagatccacgccgcctgcaaggccatcgagcaggccaagacccagaacatcaacaagctggtgctgtacaccgacagcatgttcaccatcaacggcatcaccaactgggtgcagggctggaagaagaacggctggaagaccagcgccggcaaggaggtgatcaacaaggaggacttcgtggccctggagagactgacccagggcatggacatccagtggatgcacgtgcccggccacagcggcttcatcggcaacgaggaggccgacagactggccagagagggcgccaagcagagcgaggactag

SEQ ID NO: 97260 - DNA, 1683 bp, synthetic construct
  misc_feature 1..1683: note = Description of Artificial Sequence: Synthetic coding sequence
  source 1..1683: mol_type = other DNA
atggagttcagacaggaggagttcagaaagctggccggcagagccctgggcaagctgcacagactgctggagaagagacaggagggcgccgagaccctggagctgagcgccgacggcagacccgtgaccacccagaccagagacccccccgtggtggactgcacctgcttcggcctgcccagaagatacatcatcgccatcatgagcggcctgggcttctgcatcagcttcggcatcagatgcaacctgggcgtggccatcgtgagcatggtgaacaacagcaccacccacagaggcggccacgtggtggtgcagaaggcccagttcagctgggaccccgagaccgtgggcctgatccacggcagcttcttctggggctacatcgtgacccagatccccggcggcttcatctgccagaagttcgccgccaacagagtgttcggcttcgccatcgtggccaccagcaccctgaacatgctgatccccagcgccgccagagtgcactacggctgcgtgatcttcgtgagaatcctgcagggcctggtggagggcgtgacctaccccgcctgccacggcatctggagcaagtgggccccccccctggagagaagcagactggccaccaccgccttctgcggcagctacgccggcgccgtggtggccatgcccctggccggcgtgctggtgcagtacagcggctggagcagcgtgttctacgtgtacggcagcttcggcatcttctggtacctgttctggctgctggtgagctacgagagccccgccctgcaccccagcatcagcgaggaggagagaaagtacatcgaggacgccatcggcgagagcgccaagctgatgaaccccctgaccaagttcagcaccccctggagaagattcttcaccagcatgcccgtgtacgccatcatcgtggccaacttctgcagaagctggaccttctacctgctgctgatcagccagcccgcctacttcgaggaggtgttcggcttcgagatcagcaaggtgggcctggtgagcgccctgccccacctggtgatgaccatcatcgtgcccatcggcggccagatcgccgacttcctgagaagcagaagaatcatgagcaccaccaacgtgagaaagctgatgaactgcggcggcttcggcatggaggccaccctgctgctggtggtgggctacagccacagcaagggcgtggccatcagcttcctggtgctggccgtgggcttcagcggcttcgccatcagcggcttcaacgtgaaccacctggacatcgcccccagatacgccagcatcctgatgggcatcagcaacggcgtgggcaccctgagcggcatggtgtgccccatcatcgtgggcgccatgaccaagcacaagaccagagaggagtggcagtacgtgttcctgatcgccagcctggtgcactacggcggcgtgatcttctacggcgtgttcgccagcggcgagaagcagccctgggccgagcccgaggagatgagcgaggagaagtgcggcttcgtgggccacgaccagctggccggcagcgacgacagcgagatggaggacgaggccgagccccccggcgccccccccgcccccccccccagctacggcgccacccacagcaccttccagccccccagaccccccccccccgtgagagactactag

SEQ ID NO: 97261 - DNA, 939 bp, synthetic construct
  misc_feature 1..939: note = Description of Artificial Sequence: Synthetic coding sequence
  source 1..939: mol_type = other DNA
atggccgccggcgtggactgcggcgacggcgtgggcgccagacagcacgtgttcctggtgagcgagtacctgaaggacgccagcaagaagatgaagaacggcctgatgttcgtgaagctggtgaacccctgcagcggcgagggcgccatctacctgttcaacatgtgcctgcagcagctgttcgaggtgaaggtgttcaaggagaagcaccacagctggttcatcaaccagagcgtgcagagcggcggcctgctgcacttcgccacccccgtggaccccctgttcctgctgctgcactacctgatcaaggccgacaaggagggcaagttccagcccctggaccaggtggtggtggacaacgtgttccccaactgcatcctgctgctgaagctgcccggcctggagaagctgctgcaccacgtgaccgaggagaagggcaaccccgagatcgacaacaagaagtactacaagtacagcaaggagaagaccctgaagtggctggagaagaaggtgaaccagaccgtggccgccctgaagaccaacaacgtgaacgtgagcagcagagtgcagagcaccgccttcttcagcggcgaccaggccagcaccgacaaggaggaggactacatcagatacgcccacggcctgatcagcgactacatccccaaggagctgagcgacgacctgagcaagtacctgaagctgcccgagcccagcgccagcctgcccaacccccccagcaagaagatcaagctgagcgacgagcccgtggaggccaaggaggactacaccaagttcaacaccaaggacctgaagaccgagaagaagaacagcaagatgaccgccgcccagaaggccctggccaaggtggacaagagcggcatgaagagcatcgacaccttcttcggcgtgaagaacaagaagaagatcggcaaggtgtag

SEQ ID NO: 97262 - DNA, 774 bp, synthetic construct
  misc_feature 1..774: note = Description of Artificial Sequence: Synthetic coding sequence
  source 1..774: mol_type = other DNA
atggccgccggcgtggactgcggcgacggcgtgggcgccagacagcacgtgttcctggtgagcgagtacctgaaggacgccagcaagaagatgaagaacggcctgatgttcgtgaagctggtgaacccctgcagcggcgagggcgccatctacctgttcaacatgtgcctgcagcagctgttcgaggtgaaggtgttcaaggagaagcaccacagctggttcatcaaccagagcgtgcagagcggcggcctgctgcacttcgccacccccgtggaccccctgttcctgctgctgcactacctgatcaaggccgacaaggagggcaagttccagcccctggaccaggtggtggtggacaacgtgttccccaactgcatcctgctgctgaagctgcccggcctggagaagctgctgcaccacgtgaccgaggagaagggcaaccccgagatcgacaacaagaagtactacaagtacagcaaggagaagaccctgaagtggctggagaagaaggtgaaccagaccgtggccgccctgaagaccaacaacgtgaacgtgagcagcagagtgcagagcaccgccttcttcagcggcgaccaggccagcaccgacaaggaggaggactacatcagatacgcccacggcctgatcagcgactacatccccaaggagctgagcgacgacctgagcaagtacctgaagctgcccgagcccagcgccagcctgcccaacccccccagcaagatggccgcccagagacagaagagaggcaagtag

SEQ ID NO: 97263 - DNA, 996 bp, synthetic construct
  misc_feature 1..996: note = Description of Artificial Sequence: Synthetic coding sequence
  source 1..996: mol_type = other DNA
atggccgccggcgtggactgcggcgacggcgtgggcgccagacagcacgtgttcctggtgagcgagtacctgaaggacgccagcaagaagatgaagaacggcctgatgttcgtgaagctggtgaacccctgcagcggcgagggcgccatctacctgttcaacatgtgcctgcagcagctgttcgaggtgaaggtgttcaaggagaagcaccacagctggttcatcaaccagagcgtgcagagcggcggcctgctgcacttcgccacccccgtggaccccctgttcctgctgctgcactacctgatcaaggccgacaaggagggcaagttccagcccctggaccaggtggtggtggacaacgtgttccccaactgcatcctgctgctgaagctgcccggcctggagaagctgctgcaccacgtgaccgaggagaagggcaaccccgagatcgacaacaagaagtactacaagtacagcaaggagaagaccctgaagtggctggagaagaaggtgaaccagaccgtggccgccctgaagaccaacaacgtgaacgtgagcagcagagtgcagagcaccgccttcttcagcggcgaccaggccagcaccgacaaggaggaggactacatcagatacgcccacggcctgatcagcgactacatccccaaggagctgagcgacgacctgagcaagtacctgaagctgcccgagcccagcgccagcctgcccaacccccccagcaagaagatcaagctgagcgacgagcccgtggaggccaaggaggactacaccaagttcaacaccaaggacctgaagaccgagaagaagaacagcaagatgaccgccgcccagaaggccctggccaaggtggacaagagcggcatgaagagcatcgacaccttcttcggcgtgaagaagaagctggagagattcgagaccctgaagatcaagagcagcaagaacatctgcttcctgcacgtgagcgtgtgccccagctag

SEQ ID NO: 97264 - DNA, 495 bp, synthetic construct
  misc_feature 1..495: note = Description of Artificial Sequence: Synthetic coding sequence
  source 1..495: mol_type = other DNA
atggagagcggcgacgaggccgccatcgagagacacagagtgcacctgagaagcgccaccctgagagacgccgtgcccgccaccctgcacctgctgccctgcgaggtggccgtggacggccccgcccccgtgggcagattcttcacccccgccatcagacagggccccgagggcctggaggtgagcttcagaggcagatgcctgagaggcgaggaggtggccgtgccccccggcctggtgggctacgtgatggtgaccgaggagaagaaggtgagcatgggcaagcccgaccccctgagagacagcggcaccgacgaccaggaggaggagcccctggagagagacttcgacagattcatcggcgccaccgccaacttcagcagattcaccctgtggggcctggagaccatccccggccccgacgccaaggtgagaggcgccctgacctggcccagcctggccgccgccatccacgcccaggtgcccgaggactag

SEQ ID NO: 97265 - DNA, 2226 bp, synthetic construct
  misc_feature 1..2226: note = Description of Artificial Sequence: Synthetic coding sequence
  source 1..2226: mol_type = other DNA
atggagagcagagaccacaacaacccccaggagggccccaccagcagcagcggcagaagagccgccgtggaggacaaccacctgctgatcaaggccgtgcagaacgaggacgtggacctggtgcagcagctgctggagggcggcgccaacgtgaacttccaggaggaggagggcggctggacccccctgcacaacgccgtgcagatgagcagagaggacatcgtggagctgctgctgagacacggcgccgaccccgtgctgagaaagaagaacggcgccacccccttcatcctggccgccatcgccggcagcgtgaagctgctgaagctgttcctgagcaagggcgccgacgtgaacgagtgcgacttctacggcttcaccgccttcatggaggccgccgtgtacggcaaggtgaaggccctgaagttcctgtacaagagaggcgccaacgtgaacctgagaagaaagaccaaggaggaccaggagagactgagaaagggcggcgccaccgccctgatggacgccgccgagaagggccacgtggaggtgctgaagatcctgctggacgagatgggcgccgacgtgaacgcctgcgacaacatgggcagaaacgccctgatccacgccctgctgagcagcgacgacagcgacgtggaggccatcacccacctgctgctggaccacggcgccgacgtgaacgtgagaggcgagagaggcaagacccccctgatcctggccgtggagaagaagcacctgggcctggtgcagagactgctggagcaggagcacatcgagatcaacgacaccgacagcgacggcaagaccgccctgctgctggccgtggagctgaagctgaagaagatcgccgagctgctgtgcaagagaggcgccagcaccgactgcggcgacctggtgatgaccgccagaagaaactacgaccacagcctggtgaaggtgctgctgagccacggcgccaaggaggacttccacccccccgccgaggactggaagccccagagcagccactggggcgccgccctgaaggacctgcacagaatctacagacccatgatcggcaagctgaagttcttcatcgacgagaagtacaagatcgccgacaccagcgagggcggcatctacctgggcttctacgagaagcaggaggtggccgtgaagaccttctgcgagggcagccccagagcccagagagaggtgagctgcctgcagagcagcagagagaacagccacctggtgaccttctacggcagcgagagccacagaggccacctgttcgtgtgcgtgaccctgtgcgagcagaccctggaggcctgcctggacgtgcacagaggcgaggacgtggagaacgaggaggacgagttcgccagaaacgtgctgagcagcatcttcaaggccgtgcaggagctgcacctgagctgcggctacacccaccaggacctgcagccccagaacatcctgatcgacagcaagaaggccgcccacctggccgacttcgacaagagcatcaagtgggccggcgacccccaggaggtgaagagagacctggaggacctgggcagactggtgctgtacgtggtgaagaagggcagcatcagcttcgaggacctgaaggcccagagcaacgaggaggtggtgcagctgagccccgacgaggagaccaaggacctgatccacagactgttccaccccggcgagcacgtgagagactgcctgagcgacctgctgggccaccccttcttctggacctgggagagcagatacagaaccctgagaaacgtgggcaacgagagcgacatcaagaccagaaagagcgagagcgagatcctgagactgctgcagcccggccccagcgagcacagcaagagcttcgacaagtggaccaccaagatcaacgagtgcgtgatgaagaagatgaacaagttctacgagaagagaggcaacttctaccagaacaccgtgggcgacctgctgaagttcatcagaaacctgggcgagcacatcgacgaggagaagcacaagaagatgaagctgaagatcggcgaccccagcctgtacttccagaagaccttccccgacctggtgatctacgtgtacaccaagctgcagaacaccgagtacagaaagcacttcccccagacccacagccccaacaagccccagtgcgacggcgccggcggcgccagcggcctggccagccccggctgctag

SEQ ID NO: 97266 - DNA, 2226 bp, synthetic construct; identical to SEQ ID NO: 97265
  misc_feature 1..2226: note = Description of Artificial Sequence: Synthetic coding sequence
  source 1..2226: mol_type = other DNA

SEQ ID NO: 97267 - DNA, 1959 bp, synthetic construct
  misc_feature 1..1959: note = Description of Artificial Sequence: Synthetic coding sequence
  source 1..1959: mol_type = other DNA
atggagagcagagaccacaacaacccccaggagggccccaccagcagcagcggcagaagagccgccgtggaggacaaccacctgctgatcaaggccgtgcagaacgaggacgtggacctggtgcagcagctgctggagggcggcgccaacgtgaacttccaggaggaggagggcggctggacccccctgcacaacgccgtgcagatgagcagagaggacatcgtggagctgctgctgagacacggcgccgaccccgtgctgagaaagaagaacggcgccacccccttcatcctggccgccatcgccggcagcgtgaagctgctgaagctgttcctgagcaagggcgccgacgtgaacgagtgcgacttctacggcttcaccgccttcatggaggccgccgtgtacggcaaggtgaaggccctgaagttcctgtacaagagaggcgccaacgtgaacctgagaagaaagaccaaggaggaccaggagagactgagaaagggcggcgccaccgccctgatggacgccgccgagaagggccacgtggaggtgctgaagatcctgctggacgagatgggcgccgacgtgaacgcctgcgacaacatgggcagaaacgccctgatccacgccctgctgagcagcgacgacagcgacgtggaggccatcacccacctgctgctggaccacggcgccgacgtgaacgtgagaggcgagagaggcaagacccccctgatcctggccgtggagaagaagcacctgggcctggtgcagagactgctggagcaggagcacatcgagatcaacgacaccgacagcgacggcaagaccgccctgctgctggccgtggagctgaagctgaagaagatcgccgagctgctgtgcaagagaggcgccagcaccgactgcggcgacctggtgatgaccgccagaagaaactacgaccacagcctggtgaaggtgctgctgagccacggcgccaaggaggacttccacccccccgccgaggactggaagccccagagcagccactggggcgccgccctgaaggacctgcacagaatctacagacccatgatcggcaagctgaagttcttcatcgacgagaagtacaagatcgccgacaccagcgagggcggcatctacctgggcttctacgagaagcaggaggtggccgtgaagaccttctgcgagggcagccccagagcccagagagaggtgagctgcctgcagagcagcagagagaacagccacctggtgaccttctacggcagcgagagccacagaggccacctgttcgtgtgcgtgaccctgtgcgagcagaccctggaggcctgcctggacgtgcacagaggcgaggacgtggagaacgaggaggacgagttcgccagaaacgtgctgagcagcatcttcaaggccgtgcaggagctgcacctgagctgcggctacacccaccaggacctgcagccccagaacatcctgatcgacagcaagaaggccgcccacctggccgacttcgacaagagcatcaagtgggccggcgacccccaggaggtgaagagagacctggaggacctgggcagactggtgctgtacgtggtgaagaagggcagcatcagcttcgaggacctgaaggcccagagcaacgaggaggtggtgcagctgagccccgacgaggagaccaaggacctgatccacagactgttccaccccggcgagcacgtgagagactgcctgagcgacctgctgggccaccccttcttctggacctgggagagcagatacagaaccctgagaaacgtgggcaacgagagcgacatcaagaccagaaagagcgagagcgagatcctgagactgctgcagcccggccccagcgagcacagcaagagcttcgacaagtggaccaccaagatgagcaagctgagacacagacagatcatcttccccaccacccagaaccagtag

SEQ ID NO: 97268 - DNA, 465 bp, synthetic construct
  misc_feature 1..465: note = Description of Artificial Sequence: Synthetic coding sequence
  source 1..465: mol_type = other DNA
atgatcggcaagctgaagttcttcatcgacgagaagtacaagatcgccgacaccagcgagggcggcatctacctgggcttctacgagaagcaggaggtggccgtgaagaccttctgcgagggcagccccagagcccagagagaggtgagctgcctgcagagcagcagagagaacagccacctggtgaccttctacggcagcgagagccacagaggccacctgttcgtgtgcgtgaccctgtgcgagcagaccctggaggcctgcctggacgtgcacagaggcgaggacgtggagaacgaggaggacgagttcgccagaaacgtgctgagcagcatcttcaaggccgtgcaggagctgcacctgagctgcggctacacccaccaggacctgcagccccagaacatcctgatcggcccctggaccgccggccccctgtgcggcaaggagggcaagcacctgatctag

SEQ ID NO: 97269 - DNA, 465 bp, synthetic construct
  misc_feature 1..465: note = Description of Artificial Sequence: Synthetic coding sequence
  source 1..465: mol_type = other DNA
atggccggccccgtgaaggacagagaggccttccagagactgaacttcctgtaccaggccgcccactgcgtgctggcccaggaccccgagaaccaggccctggccagattctactgctacaccgagagaaccatcgccaagagactggtgctgagaagagaccccagcgtgaagagaaccctgtgcagaggctgcagcagcctgctggtgcccggcctgacctgcacccagagacagagaagatgcagaggccagagatggaccgtgcagacctgcctgacctgccagagaagccagagattcctgaacgaccccggccacctgctgtggggcgacagacccgaggcccagctgggcagccaggccgacagcaagcccctgcagcccctgcccaacaccgcccacagcatcagcgacagactgcccgaggagaagatgcagacccagggcagcagcaaccagtag

SEQ ID NO: 97270 - DNA, 489 bp, synthetic construct
  misc_feature 1..489: note = Description of Artificial Sequence: Synthetic coding sequence
  source 1..489: mol_type = other DNA
atggccggccccgtgaaggacagagaggccttccagagactgaacttcctgtaccaggccgcccactgcgtgctggcccaggaccccgagaaccaggccctggccagattctactgctacaccgagagaaccatcgccaagagactggtgctgagaagacccctgagcagcagcgcccccagagaccccagcgtgaagagaaccctgtgcagaggctgcagcagcctgctggtgcccggcctgacctgcacccagagacagagaagatgcagaggccagagatggaccgtgcagacctgcctgacctgccagagaagccagagattcctgaacgaccccggccacctgctgtggggcgacagacccgaggcccagctgggcagccaggccgacagcaagcccctgcagcccctgcccaacaccgcccacagcatcagcgacagactgcccgaggagaagatgcagaccaagggcagcagcaaccagtag

SEQ ID NO: 97271 - DNA, 534 bp, synthetic construct
  misc_feature 1..534: note = Description of Artificial Sequence: Synthetic coding sequence
  source 1..534: mol_type = other DNA
atggccggccccgtgaaggacagagaggccttccagagactgaacttcctgtaccaggtgagcctgagacagggcccccacggcgacggcgccagaagacccagagtgaccgcccccctgccccaggccgcccactgcgtgctggcccaggaccccgagaaccaggccctggccagattctactgctacaccgagagaaccatcgccaagagactggtgctgagaagagaccccagcgtgaagagaaccctgtgcagaggctgcagcagcctgctggtgcccggcctgacctgcacccagagacagagaagatgcagaggccagagatggaccgtgcagacctgcctgacctgccagagaagccagagattcctgaacgaccccggccacctgctgtggggcgacagacccgaggcccagctgggcagccaggccgacagcaagcccctgcagcccctgcccaacaccgcccacagcatcagcgacagactgcccgaggagaagatgcagacccagggcagcagcaaccagtag

SEQ ID NO: 97272 - DNA, 489 bp, synthetic construct
  misc_feature 1..489: note = Description of Artificial Sequence: Synthetic coding sequence
  source 1..489: mol_type = other DNA
atggccggccccgtgaaggacagagaggccttccagagactgaacttcctgtaccaggccgcccactgcgtgctggcccaggaccccgagaaccaggccctggccagattctactgctacaccgagagaaccatcgccaagagactggtgctgagaagacccctgagcagcagcgcccccagagaccccagcgtgaagagaaccctgtgcagaggctgcagcagcctgctggtgcccggcctgacctgcacccacagacagagaagatgcagaggccagagatggaccgtgcagacctgcctgacctgccagagaagccagagattcctgaacgaccccggccacctgctgtggggcgacagacccgaggcccagctgggcagccaggccgacagcaagcccctgcagcccctgcccaacaccgcccacagcatcagcgacagactgcccgaggagaagatgcagacccagggcagcagcaaccagtag

SEQ ID NO: 97273 - DNA, 534 bp, synthetic construct
  misc_feature 1..534: note = Description of Artificial Sequence: Synthetic coding sequence
  source 1..534: mol_type = other DNA
atggccggccccgtgaaggacagagaggccttccagagactgaacttcctgtaccaggtgagcctgagacagggcccccacggcgacggcgccagaagacccagagtgaccgcccccctgccccaggccgcccactgcgtgctggcccaggaccccgagaaccaggccctggccagattctactgctacaccgagagaaccatcgccaagagactggtgctgagaagagaccccagcgtgaagagaaccctgtgcagaggctgcagcagcctgctggtgcccggcctgacctgcacccagagacagagaagatgcagaggccagagatggaccgtgcagacctgcctgacctgccagagaagccagagattcctgaacgaccccggccacctgctgtggggcgacagacccgaggcccagctgggcagccaggccgacagcaagcccctgcagcccctgcccaacaccgcccacagcatcagcgacagactgcccgaggagaagatgcagaccaagggcagcagcaaccagtag

SEQ ID NO: 97274 - DNA, 465 bp, synthetic construct
  misc_feature 1..465: note = Description of Artificial Sequence: Synthetic coding sequence
  source 1..465: mol_type = other DNA
atggccggccccgtgaaggacagagaggccttccagagactgaacttcctgtaccaggccgcccactgcgtgctggcccaggaccccgagaaccaggccctggccagattctactgctacaccgagagaaccatcgccaagagactggtgctgagaagagaccccagcgtgaagagaaccctgtgcagaggctgcagcagcctgctggtgcccggcctgacctgcacccacagacagagaagatgcagaggccagagatggaccgtgcagacctgcctgacctgccagagaagccagagattcctgaacgaccccggccacctgctgtggggcgacagacccgaggcccagctgggcagccaggccgacagcaagcccctgcagcccctgcccaacaccgcccacagcatcagcgacagactgcccgaggagaagatgcagacccagggcagcagcaaccagtag

SEQ ID NO: 97275 - DNA, 435 bp, synthetic construct
  misc_feature 1..435: note = Description of Artificial Sequence: Synthetic coding sequence
  source 1..435: mol_type = other DNA
atggccggccccgtgaaggacagagaggccttccagagactgaacttcctgtaccaggccgcccactgcgtgctggcccaggaccccgagaaccaggccctggccagattctactgctacaccgagagaaccatcgccaagagactggtgctgagaagagaccccagcgtgaagagaaccctgtgcagaggctgcagcagcctgctggtgcccggcctgacctgcacccagagacagagaagatgcagaggccagagatggaccgtgcagacctgcctgacctgccagagaagccagagattcctgaacgaccccggccacctgctgtggggcgacagacccgaggcccagctgggcagccaggccggcgagagattccagaccaccaccaccctggccaagcacagccccctgcacttcagaccccccagctag

SEQ ID NO: 97276 - DNA, 465 bp, synthetic construct; identical to SEQ ID NO: 97274
  misc_feature 1..465: note = Description of Artificial Sequence: Synthetic coding sequence
  source 1..465: mol_type = other DNA

SEQ ID NO: 97277 - DNA, 465 bp, synthetic construct
  misc_feature 1..465: note = Description of Artificial Sequence: Synthetic coding sequence
  source 1..465: mol_type = other DNA
atggccggccccgtgaaggacagagaggccttccagagactgaacttcctgtaccaggccgcccactgcgtgctggcccaggaccccgagaaccaggccctggccagattctactgctacaccgagagaaccatcgccaagagactggtgctgagaagagaccccagcgtgaagagaaccctgtgcagaggctgcagcagcctgctggtgcccggcctgacctgcacccagagacagagaagatgcagaggccagagatggaccgtgcagacctgcctgacctgccagagaagccagagattcctgaacgaccccggccacctgctgtggggcgacagacccgaggcccagctgggcagccaggccgacagcaagcccctgcagcccctgcccaacaccgcccacagcatcagcgacagactgcccgaggagaagatgcagaccaagggcagcagcaaccagtag

SEQ ID NO: 97278 - DNA, 534 bp, synthetic construct
  misc_feature 1..534: note = Description of Artificial Sequence: Synthetic coding sequence
  source 1..534: mol_type = other DNA
atggccggccccgtgaaggacagagaggccttccagagactgaacttcctgtaccaggtgagcctgagacagggcccccacggcgacggcgccagaagacccagagtgaccgcccccctgccccaggccgcccactgcgtgctggcccaggaccccgagaaccaggccctggccagattctactgctacaccgagagaaccatcgccaagagactggtgctgagaagagaccccagcgtgaagagaaccctgtgcagaggctgcagcagcctgctggtgcccggcctgacctgcacccacagacagagaagatgcagaggccagagatggaccgtgcagacctgcctgacctgccagagaagccagagattcctgaacgaccccggccacctgctgtggggcgacagacccgaggcccagctgggcagccaggccgacagcaagcccctgcagcccctgcccaacaccgcccacagcatcagcgacagactgcccgaggagaagatgcagacccagggcagcagcaaccagtag

SEQ ID NO: 97279 - DNA, 435 bp, synthetic construct
  misc_feature 1..435: note = Description of Artificial Sequence: Synthetic coding sequence
  source 1..435: mol_type = other DNA
atggccggccccgtgaaggacagagaggccttccagagactgaacttcctgtaccaggccgcccactgcgtgctggcccaggaccccgagaaccaggccctggccagattctactgctacaccgagagaaccatcgccaagagactggtgctgagaagagaccccagcgtgaagagaaccctgtgcagaggctgcagcagcctgctggtgcccggcctgacctgcacccacagacagagaagatgcagaggccagagatggaccgtgcagacctgcctgacctgccagagaagccagagattcctgaacgaccccggccacctgctgtggggcgacagacccgaggcccagctgggcagccaggccggcgagagattccagaccaccaccaccctggccaagcacagccccctgcacttcagaccccccagctag

SEQ ID NO: 97280 - DNA, 465 bp, synthetic construct; identical to SEQ ID NO: 97269
  misc_feature 1..465: note = Description of Artificial Sequence: Synthetic coding sequence
  source 1..465: mol_type = other DNA

SEQ ID NO: 97281 - DNA, 489 bp, synthetic construct
  misc_feature 1..489: note = Description of Artificial Sequence: Synthetic coding sequence
  source 1..489: mol_type = other DNA
atggccggccccgtgaaggacagagaggccttccagagactgaacttcctgtaccaggccgcccactgcgtgctggcccaggaccccgagaaccaggccctggccagattctactgctacaccgagagaaccatcgccaagagactggtgctgagaagacccctgagcagcagcgcccccagagaccccagcgtgaagagaaccctgtgcagaggctgcagcagcctgctggtgcccggcctgacctgcacccagagacagagaagatgcagaggccagagatggaccgtgcagacctgcctgacctgccagagaagccagagattcctgaacgaccccggccacctgctgtggggcgacagacccgaggcccagctgggcagccaggccgacagcaagcccctgcagcccctgcccaacaccgcccacagcatcagcgacagactgcccgaggagaagatgcagacccagggcagcagcaaccagtag

SEQ ID NO: 97282 - DNA, 435 bp, synthetic construct; identical to SEQ ID NO: 97279
  misc_feature 1..435: note = Description of Artificial Sequence: Synthetic coding sequence
  source 1..435: mol_type = other DNA

SEQ ID NO: 97283 - DNA, 534 bp, synthetic construct; identical to SEQ ID NO: 97271
  misc_feature 1..534: note = Description of Artificial Sequence: Synthetic coding sequence
  source 1..534: mol_type = other DNA

SEQ ID NO: 97284 - DNA, 489 bp, synthetic construct; identical to SEQ ID NO: 97272
  misc_feature 1..489: note = Description of Artificial Sequence: Synthetic coding sequence
  source 1..489: mol_type = other DNA

SEQ ID NO: 97285 - DNA, 534 bp, synthetic construct; identical to SEQ ID NO: 97271
  misc_feature 1..534: note = Description of Artificial Sequence: Synthetic coding sequence
  source 1..534: mol_type = other DNA

SEQ ID NO: 97286 - DNA, 489 bp, synthetic construct; identical to SEQ ID NO: 97281
  misc_feature 1..489: note = Description of Artificial Sequence: Synthetic coding sequence
  source 1..489: mol_type = other DNA

SEQ ID NO: 97287 - DNA, 465 bp, synthetic construct; identical to SEQ ID NO: 97274
  misc_feature 1..465: note = Description of Artificial Sequence: Synthetic coding sequence
  source 1..465: mol_type = other DNA

SEQ ID NO: 97288 - DNA, 435 bp, synthetic construct; identical to SEQ ID NO: 97275
  misc_feature 1..435: note = Description of Artificial Sequence: Synthetic coding sequence
  source 1..435: mol_type = other DNA

SEQ ID NO: 97289 - DNA, 435 bp, synthetic construct; identical to SEQ ID NO: 97275
  misc_feature 1..435: note = Description of Artificial Sequence: Synthetic coding sequence
  source 1..435: mol_type = other DNA

SEQ ID NO: 97290 - DNA, 435 bp, synthetic construct; identical to SEQ ID NO: 97275
  misc_feature 1..435: note = Description of Artificial Sequence: Synthetic coding sequence
  source 1..435: mol_type = other DNA

SEQ ID NO: 97291 - DNA, 534 bp, synthetic construct; identical to SEQ ID NO: 97278
  misc_feature 1..534: note = Description of Artificial Sequence: Synthetic coding sequence
  source 1..534: mol_type = other DNA

SEQ ID NO: 97292 - DNA, 435 bp, synthetic construct; identical to SEQ ID NO: 97279
  misc_feature 1..435: note = Description of Artificial Sequence: Synthetic coding sequence
  source 1..435: mol_type = other DNA

SEQ ID NO: 97293 - DNA, 465 bp, synthetic construct; identical to SEQ ID NO: 97269
  misc_feature 1..465: note = Description of Artificial Sequence: Synthetic coding sequence
  source 1..465: mol_type = other DNA

SEQ ID NO: 97294 - DNA, 534 bp, synthetic construct; identical to SEQ ID NO: 97278
  misc_feature 1..534: note = Description of Artificial Sequence: Synthetic coding sequence
  source 1..534: mol_type = other DNA

SEQ ID NO: 97295 - DNA, 489 bp, synthetic construct; identical to SEQ ID NO: 97281
  misc_feature 1..489: note = Description of Artificial Sequence: Synthetic coding sequence
  source 1..489: mol_type = other DNA

SEQ ID NO: 97296 - DNA, 489 bp, synthetic construct; identical to SEQ ID NO: 97272
  misc_feature 1..489: note = Description of Artificial Sequence: Synthetic coding sequence
  source 1..489: mol_type = other DNA

SEQ ID NO: 97297 - DNA, 765 bp, synthetic construct
  misc_feature 1..765: note = Description of Artificial Sequence: Synthetic coding sequence
  source 1..765: mol_type = other DNA
atggccgtgttcgccgacctggacctgagagccggcagcgacctgaaggccctgagaggcctggtggagaccgccgcccacagagagctgcccagactgagagcctggcccaccagctgccaccccgaccacagagccaccctgagaatcggctacagcgtggtggccatcaaccacatcgtggacttcaaggagaagaagcaggagatcgagaagcccgtggccgtgagcgagctgttcaccaccctgcccatcgtgcagggcaagagcagacccatcaagatcctgaccagactgaccatcatcgtgagcgaccccagccactgcaacgtgctgagagccaccagcagcagagccagactgtacgacgtggtggccgtgttccccaagaccgagaagctgttccacatcgcctgcacccacctggacgtggacctggtgtgcatcaccgtgaccgagaagctgcccttctacttcaagagaccccccatcaacgtggccatcgacagaggcctggccttcgagctggtgtacagccccgccatcaaggacagcaccatgagaagatacaccatcagcagcgccctgaacctgatgcagatctgcaagggcaagaacgtgatcatcagcagcgccgccgagagacccctggagatcagaggcccctacgacgtggccaacctgggcctgctgttcggcctgagcgagagcgacgccaaggccgccgtgagcaccaactgcagagccgccctgctgcacggctag

SEQ ID NO: 97298 - DNA, 807 bp, synthetic construct
  misc_feature 1..807: note = Description of Artificial Sequence: Synthetic coding sequence
  source 1..807: mol_type = other DNA
atggccgtgttcgccgacctggacctgagagccggcagcgacctgaaggccctgagaggcctggtggagaccgccgcccacctgggctacagcgtggtggccatcaaccacatcgtggacttcaaggagaagaagcaggagatcgagaagcccgtggccgtgagcgagctgttcaccaccctgcccatcgtgcagggcaagagcagacccatcaagatcctgaccagactgaccatcatcgtgagcgaccccagccactgcaacgtgctgagagccaccagcagcagagccagactgtacgacgtggtggccgtgttccccaagaccgagaagctgttccacatcgcctgcacccacctggacgtggacctggtgtgcatcaccgtgaccgagaagctgcccttctacttcaagagaccccccatcaacgtggccatcgacagaggcctggccttcgagctggtgtacagccccgccatcaaggacagcaccatgagaagatacaccatcagcagcgccctgaacctgatgcagatctgcaagggcaagaacgtgatcatcagcagcgccgccgagagacccctggagatcagaggcccctacgacgtggccaacctgggcctgctgttcggcctgagcgagagcgacgccaaggccgccgtgagcaccaactgcagagccgccctgctgcacggcgagaccagaaagaccgccttcggcatcatcagcaccgtgaagaagcccagacccagcgagggcgacgaggactgcctgcccgccagcaagaaggccaagtgcgagggctag

SEQ ID NO: 97299 - DNA, 768 bp, synthetic construct
  misc_feature 1..768: note = Description of Artificial Sequence: Synthetic coding sequence
  source 1..768: mol_type = other DNA
atggccgtgttcgccgacctggacctgagagccggcagcgacctgaaggccctgagaggcctggtggagaccgccgcccacctgggctacagcgtggtggccatcaaccacatcgtggacttcaaggagaagaagcaggagatcgagaagcccgtggccgtgagcgagctgttcaccaccctgcccatcgtgcagggcaagagcagacccatcaagatcctgaccagactgaccatcatcgtgagcgaccccagccactgcaacgtgctgagagccaccagcagcagagccagactgtacgacgtggtggccgtgttccccaagaccgagaagctgttccacatcgcctgcacccacctggacgtggacctggtgtgcatcaccgtgaccgagaagctgcccttctacttcaagagaccccccatcaacgtggccatcgacagaggcctggccttcgagctggtgtacagccccgccatcaaggacagcaccatgagaagatacaccatcagcagcgccctgaacctgatgcagatctgcaagggcaagcccctggagatcagaggcccctacgacgtggccaacctgggcctgctgttcggcctgagcgagagcgacgccaaggccgccgtgagcaccaactgcagagccgccctgctgcacggcgagaccagaaagaccgccttcggcatcatcagcaccgtgaagaagcccagacccagcgagggcgacgaggactgcctgcccgccagcaagaaggccaagtag

SEQ ID NO: 97300 - DNA, 969 bp, synthetic construct
  misc_feature 1..969: note = Description of Artificial Sequence: Synthetic coding sequence
  source 1..969: mol_type = other DNA
atggccgtgttcgccgacctggacctgagagccggcagcgacctgaaggccctgagaggcctggtggagaccgccgcccacctgggctacagcgtggtggccatcaaccacatcgtggacttcaaggagaagaagcaggagatcgagaagcccgtggccgtgagcgagctgttcaccaccctgcccatcgtgcagggcaagagcagacccatcaagatcctgaccagactgaccatcatcgtgagcgaccccagccactgcaacgtgctgagagccaccagcagcagagccagactgtacgacgtggtggccgtgttccccaagaccgagaagctgttccacatcgcctgcacccacctggacgtggacctggtgtgcatcaccgtgaccgagaagctgcccttctacttcaagagaccccccatcaacgtggccatcgacagaggcctggccttcgagctggtgtacagccccgccatcaaggacagcaccatgagaagatacaccatcagcagcgccctgaacctgatgcagatctgcaagggcaagaacgtgatcatcagcagcgccgccgagagacccctggagatcagaggcccctacgacgtggccaacctgggcctgctgttcggcctgagcgagagcgacgccaaggccgccgtgagcaccaactgcagagccgccctgctgcacggcgagaccagaaagaccgccttcggcatcatcagcaccgtgaagaagcccagacccagcgagggcgacgaggactgcctgcccgccagcaagaaggccaagtggagccacagcgtgacccaggccggcgtgcagtggcacaacctgggcagcctgcagcccctgcccctgggcctgaagcccagcagccacctgagcctgcccagaaccagaatccagcagagacagctgctgatcagccaccagagagaccacacccccaagaacagactgtag

SEQ ID NO: 97301 - DNA, 639 bp, synthetic construct
  misc_feature 1..639: note = Description of Artificial Sequence: Synthetic coding sequence
  source 1..639: mol_type = other DNA
gagatcgagaagcccgtggccgtgagcgagctgttcaccaccctgcccatcgtgcagggcaagagcagacccatcaagatcctgaccagactgaccatcatcgtgagcgaccccagccactgcaacgtgctgagagccaccagcagcagagccagactgtacgacgtggtggccgtgttccccaagaccgagaagctgttccacatcgcctgcacccacctggacgtggacctggtgtgcatcaccgtgaccgagaagctgcccttctacttcaagagaccccccatcaacgtggccatcgacagaggcctggccttcgagctggtgtacagccccgccatcaaggacagcaccatgagaagatacaccatcagcagcgccctgaacctgatgcagatctgcaagggcaagcccctggagatcagaggcccctacgacgtggccaacctgggcctgctgttcggcctgagcgagagcgacgccaaggccgccgtgagcaccaactgcagagccgccctgctgcacggcgagaccagaaagaccgccttcggcatcatcagcaccgtgaagaagcccagacccagcgagggcgacgaggactgcctgcccgccagcaagaaggccaagtgcgagggctag

SEQ ID NO: 97302 - DNA, 852 bp, synthetic construct
  misc_feature 1..852: note = Description of Artificial Sequence: Synthetic coding sequence
  source 1..852: mol_type = other DNA
atggccgccgccccccaggcccccggcagaggcagcctgagaaagaccagacccctggtggtgaagaccagcctgaacaacccctacatcatcagatggagcgccctggagagcgaggacatgcacttcatcctgcagaccctggaggacagactgaaggccatcggcctgcagaagatcgaggacaagaagaagaagaacaagacccccttcctgaagaaggagagcagagagaagtgcagcatcgccgtggacatcagcgagaacctgaaggagaagaagaccgacgccaagcagcaggtgagcggctggacccccgcccacgtgagaaagcagctggccatcggcgtgaacgaggtgaccagagccctggagagaagagagctgctgctggtgctggtgtgcaagagcgtgaagcccgccatgatcaccagccacctgatccagctgagcctgagcagaagcgtgcccgcctgccaggtgcccagactgagcgagagaatcgcccccgtgatcggcctgaagtgcgtgctggccctggccttcaagaagaacaccaccgacttcgtggacgaggtgagagccatcatccccagagtgcccagcctgagcgtgccctggctgcaggacagaatcgaggacagcggcgagaacctggagaccgagcccctggagagccaggacagagagctgctggacaccagcttcgaggacctgagcaagcccaagagaaagctggccgacggcagacaggccagcgtgaccctgcagcccctgaagatcaagaagctgatccccaaccccaacaagatcagaaagccccccaagagcaagaaggccacccccaagtag

SEQ ID NO: 97303 - DNA, 504 bp, synthetic construct
  misc_feature 1..504: note = Description of Artificial Sequence: Synthetic coding sequence
  source 1..504: mol_type = other DNA
atggccgccgccccccaggcccccggcagaggcagcctgagaaagaccagacccctggtggtgaagaccagcctgaacaacccctacatcatcagatggagcgccctggagagcgaggacatgcacttcatcctgcagaccctggaggacagactgaaggccatcggcctgcagaagatcgaggacaagaagaagaagaacaagacccccttcctgaagaaggagagcagagagaagtgcagcatcgccgtggacatcagcgagaacctgaaggagaagaagaccgacgccaagcagcaggtgagcggctggacccccgcccacgtgagaaagcagctggccatcggcgtgaacgaggtgaccagagccctggagagaagagagctgctgctggtgctggtgctgaccctgctgcccagactggagtgcagcggcgtgatccccgcccactgcaaccccgccagctgggtgcaggccatcctgctgccccagccccccgagtag

SEQ ID NO: 97304 - DNA, 852 bp, synthetic construct; identical to SEQ ID NO: 97302
  misc_feature 1..852: note = Description of Artificial Sequence: Synthetic coding sequence
  source 1..852: mol_type = other DNA

SEQ ID NO: 97305 - DNA, 852 bp, synthetic construct; identical to SEQ ID NO: 97302
  misc_feature 1..852: note = Description of Artificial Sequence: Synthetic coding sequence
  source 1..852: mol_type = other DNA

SEQ ID NO: 97306 - DNA, 510 bp, synthetic construct
  misc_feature 1..510: note = Description of Artificial Sequence: Synthetic coding sequence
  source 1..510: mol_type = other DNA
atggccgccgccccccaggcccccggcagaggcagcctgagaaagaccagacccctggtggtgaagaccagcctgaacaacccctacatcatcagatggagcgccctggagagcgaggacatgcacttcatcctgcagaccctggaggacagactgaaggccatcggcctgcagaagatcgaggacaagaagaagaagaacaagacccccttcctgaagaaggagagcagagagaagtgcagcatcgccgtggacatcagcgagaacctgaaggagaagaagaccgacgccaagcagcaggtgagcggctggacccccgcccacgtgagaaagcagctggccatcggcgtgaacgaggtgaccagagccctggagagaagagagctgctgctggtgctggtgtgcaagagcgtgaagcccgccatgatcaccagccacctgatccagctgagcctgagcagaagcgtgcccgcctgccaggtgcccagactgagcgagagaatcgcctag

SEQ ID NO: 97307 - DNA, 1092 bp, synthetic construct
  misc_feature 1..1092: note = Description of Artificial Sequence: Synthetic coding sequence
  source 1..1092: mol_type = other DNA
atggccaccctgagaagactgagagaggcccccagacacctgctggtgtgcgagaagagcaacttcggcaaccacaagagcagacacagacacctggtgcagacccactactacaactacagagtgagcttcctgatccccgagtgcggcatcctgagcgaggagctgaagaacctggtgatgaacaccggcccctactacttcgtgaagaacctgcccctgcacgagctgatcacccccgagttcatcagcaccttcatcaagaagggcagctgctacgccctgacctacaacacccacatcgacgaggacaacaccgtggccctgctgcccaacggcaagctgatcctgagcctggacaaggacacctacgaggagaccggcctgcagggccaccccagccagttcagcggcagaaagatcatgaagttcatcgtgagcatcgacctgatggagctgagcctgaacctggacagcaagaagtacgagagaatcagctggagcttcaaggagaagaagcccctgaagttcgacttcctgctggcctggcacaagaccggcagcgaggagagcaccatgatgagctacttcagcaagtaccagatccaggagcaccagcccaaggtggccctgagcaccctgagagacctgcagtgccccgtgctgcagagcagcgagctggagggcacccccgaggtgagctgcagagccctggagctgttcgactggctgggcgccgtgttcagcaacgtggacctgaacaacgagcccaacaacttcatcagcacctactgctgccccgagcccagcaccgtggtggccaaggcctacctgtgcaccatcaccggcttcatcctgcccgagaagatctgcctgctgctggagcacctgtgccactacttcgacgagcccaagctggccccctgggtgaccctgagcgtgcagggcttcgccgacagccccgtgagctgggagaagaacgagcacggcttcagaaagggcggcgagcacctgtacaacttcgtgatcttcaacaaccaggactactggctgcagatggccgtgggcgccaacgaccactgccccccctag

SEQ ID NO: 97308 - DNA, 912 bp, synthetic construct
  misc_feature 1..912: note = Description of Artificial Sequence: Synthetic coding sequence
  source 1..912: mol_type = other DNA
atgaacaccggcccctactacttcgtgaagaacctgcccctgcacgagctgatcacccccgagttcatcagcaccttcatcaagaagggcagctgctacgccctgacctacaacacccacatcgacgaggacaacaccgtggccctgctgcccaacggcaagctgatcctgagcctggacaaggacacctacgaggagaccggcctgcagggccaccccagccagttcagcggcagaaagatcatgaagttcatcgtgagcatcgacctgatggagctgagcctgaacctggacagcaagaagtacgagagaatcagctggagcttcaaggagaagaagcccctgaagttcgacttcctgctggcctggcacaagaccggcagcgaggagagcaccatgatgagctacttcagcaagtaccagatccaggagcaccagcccaaggtggccctgagcaccctgagagacctgcagtgccccgtgctgcagagcagcgagctggagggcacccccgaggtgagctgcagagccctggagctgttcgactggctgggcgccgtgttcagcaacgtggacctgaacaacgagcccaacaacttcatcagcacctactgctgccccgagcccagcaccgtggtggccaaggcctacctgtgcaccatcaccggcttcatcctgcccgagaagatctgcctgctgctggagcacctgtgccactacttcgacgagcccaagctggccccctgggtgaccctgagcgtgcagggcttcgccgacagccccgtgagctgggagaagaacgagcacggcttcagaaagggcggcgagcacctgtacaacttcgtgatcttcaacaaccaggactactggctgcagatggccgtgggcgccaacgaccactgccccccctag

SEQ ID NO: 97309 - DNA, 717 bp, synthetic construct
  misc_feature 1..717: note = Description of Artificial Sequence: Synthetic coding sequence
  source 1..717: mol_type = other DNA
atgagacccgccgccctgagaggcgccctgctgggctgcctgtgcctggccctgctgtgcctgggcggcgccgacaagagactgagagacaaccacgagtggaagaagctgatcatggtgcagcactggcccgagaccgtgtgcgagaagatccagaacgactgcagagacccccccgactactggaccatccacggcctgtggcccgacaagagcgagggctgcaacagaagctggcccttcaacctggaggagatcaagaagaactggatggagatcaccgacagcagcctgcccagccccagcatgggccccgccccccccagatggatgagaagcacccccagaagaagcaccctggccgaggcctggaacagcaccggcagctggaccagcaccggcggctgcgccctgccccccgccgccctgcccagcggcgacctgtgctgcagacccagcctgaccgccggcagcagaggcgtgggcgtggacctgaccgccctgcagcagctgctgcacgtgcactacagcgccaccggcatcatccccgaggagtgcagcgagcccaccaagcccttccagatcatcctgcaccacgaccacaccgagtgggtgcagagcatcggcatgcccatctggaccatcagcagcagcgagagcgccatcggcaagaccagaacccagcccgcctgcgccgtgctgagccacgacagctag

SEQ ID NO: 97310 - DNA, 624 bp, synthetic construct
  misc_feature 1..624: note = Description of Artificial Sequence: Synthetic coding sequence
  source 1..624: mol_type = other DNA
atgagacccgccgccctgagaggcgccctgctgggctgcctgtgcctggccctgctgtgcctgggcggcgccgacaagagactgagagacaaccacgagtggaagaagctgatcatggtgcagcactggcccgagaccgtgtgcgagaagatccagaacgactgcagagacccccccgactactggaccatccacggcctgtggcccgacaagagcgagggctgcaacagaagctggcccttcaacctggaggagatcaagaagaactggatggagatcaccgacagcagcctgcccagccccagcaccgacctgctgcccgagatgagagcctactggcccgacgtgatccacagcttccccaacagaagcagattctgcggcacctgcgccgcccaggtggacgccctgaacagccagaagaagtacttcggcagaagcctggagctgtacagagagctggacctgaacagatgggtgagacccagccccggctgcaccagccagtggggcagcctgctgagccccaagcccgacagctggatccagggcagcggctgcagaccccactgcccccccgccgccagcgcctgcgccctgttcggctactgggaccacagctag

SEQ ID NO: 97311 - DNA, 921 bp, synthetic construct
  misc_feature 1..921: note = Description of Artificial Sequence: Synthetic coding sequence
  source 1..921: mol_type = other DNA
atgagacccgccgccctgagaggcgccctgctgggctgcctgtgcctggccctgctgtgcctgggcggcgccgacaagagactgagagacaaccacgagtggaagaagctgatcatggtgcagcactggcccgagaccgtgtgcgagaagatccagaacgactgcagagacccccccgactactggaccatccacggcctgtggcaggtgagccacaccagcagaagaggcctgctgttcctgttcaagaacatcttcagcctgagcagcagaaacttcagcttctacagcctgcagaccagcatgaagaagcccccccagcccagcctgatcttcctgatcttcagcttcaagcccgacaagagcgagggctgcaacagaagctggcccttcaacctggaggagatcaaggacctgctgcccgagatgagagcctactggcccgacgtgatccacagcttccccaacagaagcagattctggaagcacgagtgggagaagcacggcacctgcgccgcccaggtggacgccctgaacagccagaagaagtacttcggcagaagcctggagctgtacagagagctggacctgaacagcgtgctgctgaagctgggcatcaagcccagcatcaactactaccaggtggccgacttcaaggacgccctggccagagtgtacggcgtgatccccaagatccagtgcctgccccccagccaggacgaggaggtgcagaccatcggccagatcgagctgtgcctgaccaagcaggaccagcagctgcagaactgcaccgagcccggcgagcagcccagccccaagcaggaggtgtggctggccaacggcgccgccgagagcagaggcctgagagtgtgcgaggacggccccgtgttctaccccccccccaagaagaccaagcactag

SEQ ID NO: 97312 - DNA, 771 bp, synthetic construct
  misc_feature 1..771: note = Description of Artificial Sequence: Synthetic coding sequence
  source 1..771: mol_type = other DNA
atgagacccgccgccctgagaggcgccctgctgggctgcctgtgcctggccctgctgtgcctgggcggcgccgacaagagactgagagacaaccacgagtggaagaagctgatcatggtgcagcactggcccgagaccgtgtgcgagaagatccagaacgactgcagagacccccccgactactggaccatccacggcctgtggcccgacaagagcgagggctgcaacagaagctggcccttcaacctggaggagatcaaggacctgctgcccgagatgagagcctactggcccgacgtgatccacagcttccccaacagaagcagattctggaagcacgagtgggagaagcacggcacctgcgccgcccaggtggacgccctgaacagccagaagaagtacttcggcagaagcctggagctgtacagagagctggacctgaacagcgtgctgctgaagctgggcatcaagcccagcatcaactactaccaggtggccgacttcaaggacgccctggccagagtgtacggcgtgatccccaagatccagtgcctgccccccagccaggacgaggaggtgcagaccatcggccagatcgagctgtgcctgaccaagcaggaccagcagctgcagaactgcaccgagcccggcgagcagcccagccccaagcaggaggtgtggctggccaacggcgccgccgagagcagaggcctgagagtgtgcgaggacggccccgtgttctaccccccccccaagaagaccaagcactag

SEQ ID NO: 97313 - DNA, 765 bp, synthetic construct
  misc_feature 1..765: note = Description of Artificial Sequence: Synthetic coding sequence
  source 1..765: mol_type = other DNA
atgagacccgccgccctgagaggcgccctgctgggctgcctgtgcctggccctgctgtgcctgggcggcgccgacaagagactgagagacaaccacgagtggaagaagctgatcatggtgcagcactggcccgagaccgtgtgcgagaagatccagaacgactgcagagacccccccgactactggaccatccacggcctgtggcccgacaagagcgagggctgcaacagaagctggcccttcaacctggaggagatcaaggacctgctgcccgagatgagagcctactggcccgacgtgatccacagcttccccaacagaagcagattctggaagcacgagtgggagaagcacggcacctgcgccgcccaggtggacgccctgaacagccagaagaagtacttcggcagaagcctggagctgtacagagagctggacctgaacagcgtgctgctgaagctgggcatcaagcccagcatcaactactaccaggtggccgacttcaaggacgccctggccagagtgtacggcgtgatccccaagatccagtgcctgccccccagccaggacgaggaggtgcagaccatcggccagatcgagctgtgcctgaccaagcaggaccagcagctgcagaactgcaccgagcccggcgagcagcccagccccaagcaggaggtgtggctggccaacggcgccgccgagagcagaggcctgagagtgtgcgaggacggccccgtgttctaccccccccccaagaagacctag

SEQ ID NO: 97314 - DNA, 771 bp, synthetic construct; identical to SEQ ID NO: 97312
  misc_feature 1..771: note = Description of Artificial Sequence: Synthetic coding sequence
  source 1..771: mol_type = other DNA

SEQ ID NO: 97315 - DNA, 471 bp, synthetic construct
  misc_feature 1..471: note = Description of Artificial Sequence: Synthetic coding sequence
  source 1..471: mol_type = other DNA
atggccctggagaagagcctggtgagactgctgctgctggtgctgatcctgctggtgctgggctgggtgcagcccagcctgggcaaggagagcagagccaagaagttccagagacagcacatggacagcgacagcagccccagcagcagcagcacctactgcaaccagatgatgagaagaagaaacatgacccagggcagatgcaagcccgtgaacaccttcgtgcacgagcccctggtggacgtgcagaacgtgtgcttccaggagaaggtgacctgcaagaacggccagggcaactgctacaagagcaacagcagcatgcacatcaccgactgcagactgaccaacggcagcagataccccaactgcgcctacagaaccagccccaaggagagacacatcatcgtggcctgcgagggcagcccctacgtgcccgtgcacttcgacgccagcgtggaggacagcacctag

SEQ ID NO: 97316 - DNA, 471 bp, synthetic construct; identical to SEQ ID NO: 97315
  misc_feature 1..471: note = Description of Artificial Sequence: Synthetic coding sequence
  source 1..471: mol_type = other DNA

SEQ ID NO: 97317 - DNA, 471 bp, synthetic construct; identical to SEQ ID NO: 97315
  misc_feature 1..471: note = Description of Artificial Sequence: Synthetic coding sequence
  source 1..471: mol_type = other DNA

SEQ ID NO: 97318 - DNA, 471 bp, synthetic construct; identical to SEQ ID NO: 97315
  misc_feature 1..471: note = Description of Artificial Sequence: Synthetic coding sequence
  source 1..471: mol_type = other DNA

SEQ ID NO: 97319 - DNA, 486 bp, synthetic construct
  misc_feature 1..486: note = Description of Artificial Sequence: Synthetic coding sequence
  source 1..486: mol_type = other DNA
atggtgcccaagctgttcaccagccagatctgcctgctgctgctgctgggcctgctggccgtggagggcagcctgcacgtgaagcccccccagttcacctgggcccagtggttcgagacccagcacatcaacatgaccagccagcagtgcaccaacgccatgcaggtgatcaacaactaccagagaagatgcaagaaccagaacaccttcctgctgaccaccttcgccaacgtggtgaacgtgtgcggcaaccccaacatgacctgccccagcaacaagaccagaaagaactgccaccacagcggcagccaggtgcccctgatccactgcaacctgaccacccccagcccccagaacatcagcaactgcagatacgcccagacccccgccaacatgttctacatcgtggcctgcgacaacagagaccagagaagagaccccccccagtaccccgtggtgcccgtgcacctggacagaatcatctag

SEQ ID NO: 97320 - DNA, 483 bp, synthetic construct
  misc_feature 1..483: note = Description of Artificial Sequence: Synthetic coding sequence
  source 1..483: mol_type = other DNA
atggtgcccaagctgttcaccagccagatctgcctgctgctgctgctgggcctgatgggcgtggagggcagcctgcacgccagacccccccagttcaccagagcccagtggttcgccatccagcacatcagcctgaacccccccagatgcaccatcgccatgagagccatcaacaactacagatggagatgcaagaaccagaacaccttcctgagaaccaccttcgccaacgtggtgaacgtgtgcggcaaccagagcatcagatgcccccacaacagaaccctgaacaactgccacagaagcagattcagagtgcccctgctgcactgcgacctgatcaaccccggcgcccagaacatcagcaactgcacctacgccgacagacccggcagaagattctacgtggtggcctgcgacaacagagaccccagagacagccccagataccccgtggtgcccgtgcacctggacaccaccatctag

SEQ ID NO: 97321 - DNA, 444 bp, synthetic construct
  misc_feature 1..444: note = Description of Artificial Sequence: Synthetic coding sequence
  source 1..444: mol_type = other DNA
atggccctgcagagaacccacagcctgctgctgctgctgctgctgaccctgctgggcctgggcctggtgcagcccagctacggccaggacggcatgtaccagagattcctgagacagcacgtgcaccccgaggagaccggcggcagcgacagatactgcaacctgatgatgcagagaagaaagatgaccctgtaccactgcaagagattcaacaccttcatccacgaggacatctggaacatcagaagcatctgcagcaccaccaacatccagtgcaagaacggcaagatgaactgccacgagggcgtggtgaaggtgaccgactgcagagacaccggcagcagcagagcccccaactgcagatacagagccatcgccagcaccagaagagtggtgatcgcctgcgagggcaacccccaggtgcccgtgcacttcgacggctag

SEQ ID NO: 97322 - DNA, 444 bp, synthetic construct; identical to SEQ ID NO: 97321
  misc_feature 1..444: note = Description of Artificial Sequence: Synthetic coding sequence
  source 1..444: mol_type = other DNA

SEQ ID NO: 97323 - DNA, 444 bp, synthetic construct; identical to SEQ ID NO: 97321
  misc_feature 1..444: note = Description of Artificial Sequence: Synthetic coding sequence
  source 1..444: mol_type = other DNA

SEQ ID NO: 97324 - DNA, 465 bp, synthetic construct
  misc_feature 1..465: note = Description of Artificial Sequence: Synthetic coding sequence
  source 1..465: mol_type = other DNA
atggcccccgccagagccggctgctgccccctgctgctgctgctgctgggcctgtgggtggccgaggtgctggtgagagccaagcccaaggacatgaccagcagccagtggttcaagacccagcacgtgcagcccagcccccaggcctgcaacagcgccatgagcatcatcaacaagtacaccgagagatgcaaggacctgaacaccttcctgcacgagcccttcagcagcgtggccatcacctgccagacccccaacatcgcctgcaagaacagctgcaagaactgccaccagagccacggccccatgagcctgaccatgggcgagctgaccagcggcaagtaccccaactgcagatacaaggagaagcacctgaacaccccctacatcgtggcctgcgaccccccccagcagggcgaccccggctaccccctggtgcccgtgcacctggacaaggtggtgtag

SEQ ID NO: 97325 - DNA, 453 bp, synthetic construct
  misc_feature 1..453: note = Description of Artificial Sequence: Synthetic coding sequence
  source 1..453: mol_type = other DNA
atggtgctgtgcttccccctgctgctgctgctgctggtgctgtggggccccgtgtgccccctgcacgcctggcccaagagactgaccaaggcccactggttcgagatccagcacatccagcccagccccctgcagtgcaacagagccatgagcggcatcaacaactacacccagcactgcaagcaccagaacaccttcctgcacgacagcttccagaacgtggccgccgtgtgcgacctgctgagcatcgtgtgcaagaacagaagacacaactgccaccagagcagcaagcccgtgaacatgaccgactgcagactgaccagcggcaagtacccccagtgcagatacagcgccgccgcccagtacaagttcttcatcgtggcctgcgaccccccccagaagagcgaccccccctacaagctggtgcccgtgcacctggacagcatcctgtag

SEQ ID NO: 97326 - DNA, 2271 bp, synthetic construct
  misc_feature 1..2271: note = Description of Artificial Sequence: Synthetic coding sequence
  source 1..2271: mol_type = other DNA
atgcccctgagacccggcagcctggtgcccgagggcgccggcttccccaagatggccgccgacgtgagcgtgacccacagaccccccctgagccccaagagcggcgccgaggtggaggccggcgacgccgccgagagaagagcccccgaggaggagctgccccccctggaccccgaggagatcagaaagagactggagcacaccgagagacagttcagaaacagaagaaagatcctgatcagaggcctgcccggcgacgtgaccaaccaggaggtgcacgacctgctgagcgactacgagctgaagtactgcttcgtggacaagtacaagggcaccgccttcgtgaccctgctgaacggcgagcaggccgaggccgccatcaacgccttccaccagagcagactgagagagagagagctgagcgtgcagctgcagcccaccgacgccctgctgtgcgtggccaacctgccccccagcctgacccagcagcagttcgaggagctggtgagacccttcggcagcctggagagatgcttcctggtgtacagcgagagaaccggccagagcaagggctacggcttcgccgagtacatgaagaaggacagcgccgccagagccaagagcgacctgctgggcaagcccctgggccccagaaccctgtacgtgcactggaccgacgccggccagctgacccccgccctgctgcacagcagatgcctgtgcgtggacagactgccccccggcttcaacgacgtggacgccctgtgcagagccctgagcgccgtgcacagccccaccttctgccagctggcctgcggccaggacggccagctgaagggcttcgccgtgctggagtacgagaccgccgagatggccgaggaggcccagcagcaggccgacggcctgagcctgggcggcagccacctgagagtgagcttctgcgcccccggcccccccggcagaagcatgctggccgccctgatcgccgcccaggccaccgccctgaacagaggcaagggcctgctgcccgagcccaacatcctgcagctgctgaacaacctgggccccagcgccagcctgcagctgctgctgaaccccctgctgcacggcagcgccggcggcaagcagggcctgctgggcgccccccccgccatgcccctgctgaacggccccgccctgagcaccgccctgctgcagctggccctgcagacccagggccagaagaagcccggcatcctgggcgacagccccctgggcgccctgcagcccggcgcccagcccgccaaccccctgctgggcgagctgcccgccggcggcggcctgccccccgagctgccccccagaagaggcaagcccccccccctgctgcccagcgtgctgggccccgccggcggcgacagagaggccctgggcctgggcccccccgccgcccagctgacccccccccccgcccccgtgggcctgagaggcagcggcctgagaggcctgcagaaggacagcggccccctgcccaccccccccggcgtgagcctgctgggcgagccccccaaggactacagaatccccctgaacccctacctgaacctgcacagcctgctgcccgccagcaacctggccggcaaggaggccagaggctggggcggcgccggcagaagcagaagacccgccgagggcccccccaccaacccccccgcccccggcggcggcagcagcagcagcaaggccttccagctgaagagcagactgctgagccccctgagcagcgccagactgccccccgagcccggcctgagcgacagctacagcttcgactaccccagcgacatgggccccagaagactgttcagccaccccagagagcccgccctgggcccccacggccccagcagacacaagatgagccccccccccagcggcttcggcgagagaagcagcggcggcagcggcggcggccccctgagccacttctacagcggcagccccaccagctacttcaccagcggcctgcaggccggcctgaagcagagccacctgagcaaggccatcggcagcagccccctgggcagcggcgagggcctgctgggcctgagccccggccccaacggccacagccacctgctgaagacccccctgggcggccagaagagaagcttcgcccacctgctgcccagccccgagcccagccccgagggcagctacgtgggccagcacagccagggcctgggcggccactacgccgacagctacctgaagagaaagagaatcttctag

SEQ ID NO: 97327 - DNA, 1821 bp, synthetic construct
  misc_feature 1..1821: note = Description of Artificial Sequence: Synthetic coding sequence
  source 1..1821: mol_type = other DNA
atggccgccgacgtgagcgtgacccacagaccccccctgagccccaagagcggcgccgaggtggaggccggcgacgccgccgagagaagagcccccgaggaggagctgccccccctggaccccgaggagatcagaaagagactggagcacaccgagagacagttcagaaacagaagaaagatcctgatcagaggcctgcccggcgacgtgaccaaccaggaggtgcacgacctgctgagcgactacgagctgaagtactgcttcgtggacaagtacaagggcaccgccttcgtgaccctgctgaacggcgagcaggccgaggccgccatcaacgccttccaccagagcagactgagagagagagagctgagcgtgcagctgcagcccaccgacgccctgctgtgcgtggccaacctgccccccagcctgacccagcagcagttcgaggagctggtgagacccttcggcagcctggagagatgcttcctggtgtacagcgagagaaccggccagagcaagggctacggcttcgccgagtacatgaagaaggacagcgccgccagagccaagagcgacctgctgggcaagcccctgggccccagaaccctgtacgtgcactggaccgacgccggccagctgacccccgccctgctgcacagcagatgcctgtgcgtggacagactgccccccggcttcaacgacgtggacgccctgtgcagagccctgagcgccgtgcacagccccaccttctgccagctggcctgcggccaggacggccagctgaagggcttcgccgtgctggagtacgagaccgccgagatggccgaggaggcccagcagcaggccgacggcctgagcctgggcggcagccacctgagagtgagcttctgcgcccccggcccccccggcagaagcatgctggccgccctgatcgccgcccaggccaccgccctgaacagaggcaagggcctgctgcccgagcccaacatcctgcagctgctgaacaacctgggccccagcgccagcctgcagctgctgctgaaccccctgctgcacggcagcgccggcggcaagcagggcctgctgggcgccccccccgccatgcccctgctgaacggccccgccctgagcaccgccctgctgcagctggccctgcagacccagggccagaagaagcccggcatcctgggcgacagccccctgggcgccctgcagcccggcgcccagcccgccaaccccctgctgggcgagctgcccgccggcggcggcctgccccccgagctgccccccagaagaggcaagcccccccccctgctgcccagcgtgctgggccccgccggcggcgacagagaggccctgggcctgggcccccccgccgcccagctgacccccccccccgcccccgtgggcctgagaggcagcggcctgagaggccccctgagccacttctacagcggcagccccaccagctacttcaccagcggcctgcaggccggcctgaagcagagccacctgagcaaggccatcggcagcagccccctgggcagcggcgagggcctgctgggcctgagccccggccccaacggccacagccacctgctgaaggtgagagccggcggcggcgacatgcagggctgggaggcccccgccccccagagacccctgaccagacccgccctgcccagcgtgagcagaccccactgggccgccagaaacgccgccctgcccacctgctgccccagacccagccccgcccagaaggccgccatgtgggccagcacccccagagccagcgccgccaccaccagaacccccacctag

SEQ ID NO: 97328 - DNA, 2076 bp, synthetic construct
  misc_feature 1..2076: note = Description of Artificial Sequence: Synthetic coding sequence
  source 1..2076: mol_type = other DNA
atggccgccgccgccggcgacggcggcggcgagggcggcgccggcctgggcagcgccgccggcctgggccccggccccggcctgagaggccagggccccagcgccgaggcccacgagggcgcccccgaccccatgcccgccgccctgcaccccgaggaggtggccgccagactgcagagaatgcagagagagctgagcaacagaagaaagatcctggtgaagaacctgccccaggacagcaactgccaggaggtgcacgacctgctgaaggactacgacctgaagtactgctacgtggacagaaacaagagaaccgccttcgtgaccctgctgaacggcgagcaggcccagaacgccatccagatgttccaccagtacagcttcagaggcaaggacctgatcgtgcagctgcagcccaccgacgccctgctgtgcatcaccaacgtgcccatcagcttcaccagcgaggagttcgaggagctggtgagagcctacggcaacatcgagagatgcttcctggtgtacagcgaggtgaccggccacagcaagggctacggcttcgtggagtacatgaagaaggacttcgccgccaaggccagactggagctgctgggcagacagctgggcgccagcgccctgttcgcccagtggatggacgtgaacctgctggccagcgagctgatccacagcaagtgcctgtgcatcgacaagctgcccagcgactacagagacagcgaggagctgctgcagatcttcagcagcgtgcacaagcccgtgttctgccagctggcccaggacgagggcagctacgtgggcggcttcgccgtggtggagtacagcaccgccgagcaggccgaggaggtgcagcaggccgccgacggcatgaccatcaagggcagcaaggtgcaggtgagcttctgcgcccccggcgcccccggcagaagcaccctggccgccctgatcgccgcccagagagtgatgcacagcaaccagaagggcctgctgcccgagcccaaccccgtgcagatcatgaagagcctgaacaaccccgccatgctgcaggtgctgctgcagccccagctgtgcggcagagccgtgaagcccgccgtgctgggcaccccccacagcctgccccacctgatgaaccccagcatcagccccgccttcctgcacctgaacaaggcccaccagagcagcgtgatgggcaacaccagcaacctgttcctgcagaacctgagccacatccccctggcccagcagcagctgatgaagttcgagaacatccacaccaacaacaagcccggcctgctgggcgagccccccgccgtggtgctgcagaccgccctgggcatcggcagcgtgctgcccctgaagaaggagctgggccaccaccacggcgaggcccacaagaccagcagcctgatccccacccagaccaccatcaccgccggcatgggcatgctgcccttcttccccaaccagcacatcgccggccaggccggccccggccacagcaacacccaggagaagcagcccgccaccgtgggcatggccgagggcaacttcagcggcagccagccctacctgcagagcttccccaacctggccgccggcagcctgctggtgggccaccacaagcagcagcagagccagcccaagggcaccgagatcagcagcggcgccgccagcaagaaccagaccagcctgctgggcgagccccccaaggagatcagactgagcaagaacccctacctgaacctggccagcgtgctgcccagcgtgtgcctgagcagccccgccagcaagaccaccctgcacaagaccggcatcgccagcagcatcctggacgccatcagccagggcagcgagagccagcacgccctggagaagtgcatcgcctacagcccccccttcggcgactacgcccaggtgagcagcctgagaaacgagaagagaggcagcagctacctgatcagcgcccccgagggcggcagcgtggagtgcgtggaccagcacagccagggcaccggcgcctactacatggagacctacctgaagaagaagagagtgtactag

SEQ ID NO: 97329 - DNA, 2037 bp, synthetic construct
  misc_feature 1..2037: note = Description of Artificial Sequence: Synthetic coding sequence
  source 1..2037: mol_type = other DNA
atggccgccgccgccggcgacggcggcggcgagggcggcgccggcctgggcagcgccgccggcctgggccccggccccggcctgagaggccagggccccagcgccgaggcccacgagggcgcccccgaccccatgcccgccgccctgcaccccgaggaggtggccgccagactgcagagaatgcagagagagctgagcaacagaagaaagatcctggtgaagaacctgccccaggacagcaactgccaggaggtgcacgacctgctgaaggactacgacctgaagtactgctacgtggacagaaacaagagaaccgccttcgtgaccctgctgaacggcgagcaggcccagaacgccatccagatgttccaccagtacagcttcagaggcaaggacctgatcgtgcagctgcagcccaccgacgccctgctgtgcatcaccaacgtgcccatcagcttcaccagcgaggagttcgaggagctggtgagagcctacggcaacatcgagagatgcttcctggtgtacagcgaggtgaccggccacagcaagggctacggcttcgtggagtacatgaagaaggacttcgccgccaaggccagactggagctgctgggcagacagctgggcgccagcgccctgttcgcccagtggatggacgtgaacctgctggccagcgagctgatccacagcaagtgcctgtgcatcgacaagctgcccagcgactacagagacagcgaggagctgctgcagatcttcagcagcgtgcacaagcccgtgttctgccagctggcccaggacgagggcagctacgtgggcggcttcgccgtggtggagtacagcaccgccgagcaggccgaggaggtgcagcaggccgccgacggcatgaccatcaagggcagcaaggtgcaggtgagcttctgcgcccccggcgcccccggcagaagcaccctggccgccctgatcgccgcccagagagtgatgcacagcaaccagaagggcctgctgcccgagcccaaccccgtgcagatcatgaagagcctgaacaaccccgccatgctgcaggtgctgctgcagccccagctgtgcggcagagccgtgaagcccgccgtgctgggcaccccccacagcctgccccacctgatgaaccccagcatcagccccgccttcctgcacctgaacaaggcccaccagaacctgagccacatccccctggcccagcagcagctgatgaagttcgagaacatccacaccaacaacaagcccggcctgctgggcgagccccccgccgtggtgctgcagaccgccctgggcatcggcagcgtgctgcccctgaagaaggagctgggccaccaccacggcgaggcccacaagaccagcagcctgatccccacccagaccaccatcaccgccggcatgggcatgctgcccttcttccccaaccagcacatcgccggccaggccggccccggccacagcaacacccaggagaagcagcccgccaccgtgggcatggccgagggcaacttcagcggcagccagccctacctgcagagcttccccaacctggccgccggcagcctgctggtgggccaccacaagcagcagcagagccagcccaagggcaccgagatcagcagcggcgccgccagcaagaaccagaccagcctgctgggcgagccccccaaggagatcagactgagcaagaacccctacctgaacctggccagcgtgctgcccagcgtgtgcctgagcagccccgccagcaagaccaccctgcacaagaccggcatcgccagcagcatcctggacgccatcagccagggcagcgagagccagcacgccctggagaagtgcatcgcctacagcccccccttcggcgactacgcccaggtgagcagcctgagaaacgagaagagaggcagcagctacctgatcagcgcccccgagggcggcagcgtggagtgcgtggaccagcacagccagggcaccggcgcctactacatggagacctacctgaagaagaagagagtgtactag

SEQ ID NO: 97330 - DNA, 693 bp, synthetic construct
  misc_feature 1..693: note = Description of Artificial Sequence: Synthetic coding sequence
  source 1..693: mol_type = other DNA
atgaccatcaagggcagcaaggtgcaggtgagcttctgcgcccccggcgcccccggcagaagcaccctggccgccctgatcgccgcccagagagtgatgcacagcaaccagaagggcctgctgcccgagcccaaccccgtgcagatcatgaagagcctgaacaaccccgccatgctgcaggtgctgctgcagccccagctgtgcggcagagccgtgaagcccgccgtgctgggcaccccccacagcctgccccacctgatgaaccccagcatcagccccgccttcctgcacctgaacaaggcccaccagaaccagaccagcctgctgggcgagccccccaaggagatcagactgagcaagaacccctacctgaacctggccagcgtgctgcccagcgtgtgcctgagcagccccgccagcaagaccaccctgcacaagaccggcatcgccagcagcatcctggacgccatcagccagggcagcgagagccagcacgccctggagaagtgcatcgcctacagcccccccttcggcgactacgcccaggtgagcagcctgagaaacgagaagagaggcagcagctacctgatcagcgcccccgagggcggcagcgtggagtgcgtggaccagcacagccagggcaccggcgcctactacatggagacctacctgaagaagaagagagtgtactag

SEQ ID NO: 97331 - DNA, 2379 bp, synthetic construct
  misc_feature 1..2379: note = Description of Artificial Sequence: Synthetic coding sequence
  source 1..2379: mol_type = other DNA
atgcacgtgatcaagagagacggcagacaggagagagtgatgttcgacaagatcaccagcagaatccagaagctgtgctacggcctgaacatggacttcgtggaccccgcccagatcaccatgaaggtgatccagggcctgtacagcggcgtgaccaccgtggagctggacaccctggccgccgagaccgccgccaccctgaccaccaagcaccccgactacgccatcctggccgccagaatcgccgtgagcaacctgcacaaggagaccaagaaggtgttcagcgacgtgatggaggacctgtacaactacatcaacccccacaacggcaagcacagccccatggtggccaagagcaccctggacatcgtgctggccaacaaggacagactgaacagcgccatcatctacgacagagacttcagctacaactacttcggcttcaagaccctggagagaagctacctgctgaagatcaacggcaaggtggccgagagaccccagcacatgctgatgagagtgagcgtgggcatccacaaggaggacatcgacgccgccatcgagacctacaacctgctgagcgagagatggttcacccacgccagccccaccctgttcaacgccggcaccaacagaccccagctgagcagctgcttcctgctgagcatgaaggacgacagcatcgagggcatctacgacaccctgaagcagtgcgccctgatcagcaagagcgccggcggcatcggcgtggccgtgagctgcatcagagccaccggcagctacatcgccggcaccaacggcaacagcaacggcctggtgcccatgctgagagtgtacaacaacaccgccagatacgtggaccagggcggcaacaagagacccggcgccttcgccatctacctggagccctggcacctggacatcttcgagttcctggacctgaagaagaacaccggcaaggaggagcagagagccagagacctgttcttcgccctgtggatccccgacctgttcatgaagagagtggagaccaaccaggactggagcctgatgtgccccaacgagtgccccggcctggacgaggtgtggggcgaggagttcgagaagctgtacgccagctacgagaagcagggcagagtgagaaaggtggtgaaggcccagcagctgtggtacgccatcatcgagagccagaccgagaccggcaccccctacatgctgtacaaggacagctgcaacagaaagagcaaccagcagaacctgggcaccatcaagtgcagcaacctgtgcaccgagatcgtggagtacaccagcaaggacgaggtggccgtgtgcaacctggccagcctggccctgaacatgtacgtgaccagcgagcacacctacgacttcaagaagctggccgaggtgaccaaggtggtggtgagaaacctgaacaagatcatcgacatcaactactaccccgtgcccgaggcctgcctgagcaacaagagacacagacccatcggcatcggcgtgcagggcctggccgacgccttcatcctgatgagataccccttcgagagcgccgaggcccagctgctgaacaagcagatcttcgagaccatctactacggcgccctggaggccagctgcgacctggccaaggagcagggcccctacgagacctacgagggcagccccgtgagcaagggcatcctgcagtacgacatgtggaacgtgacccccaccgacctgtgggactggaaggtgctgaaggagaagatcgccaagtacggcatcagaaacagcctgctgatcgcccccatgcccaccgccagcaccgcccagatcctgggcaacaacgagagcatcgagccctacaccagcaacatctacaccagaagagtgctgagcggcgagttccagatcgtgaacccccacctgctgaaggacctgaccgagagaggcctgtggcacgaggagatgaagaaccagatcatcgcctgcaacggcagcatccagagcatccccgagatccccgacgacctgaagcagctgtacaagaccgtgtgggagatcagccagaagaccgtgctgaagatggccgccgagagaggcgccttcatcgaccagagccagagcctgaacatccacatcgccgagcccaactacggcaagctgaccagcatgcacttctacggctggaagcagggcctgaagaccggcatgtactacctgagaaccagacccgccgccaaccccatccagttcaccctgaacaaggagaagctgaaggacaaggagaaggtgagcaaggaggaggaggagaaggagagaaacaccgccgccatggtgtgcagcctggagaacagagacgagtgcctgatgtgcggcagctag

SEQ ID NO: 97332 - DNA, 2088 bp, synthetic construct
  misc_feature 1..2088: note = Description of Artificial Sequence: Synthetic coding sequence
  source 1..2088: mol_type = other DNA
atggaggacctgtacaactacatcaacccccacaacggcaagcacagccccatggtggccaagagcaccctggacatcgtgctggccaacaaggacagactgaacagcgccatcatctacgacagagacttcagctacaactacttcggcttcaagaccctggagagaagctacctgctgaagatcaacggcaaggtggccgagagaccccagcacatgctgatgagagtgagcgtgggcatccacaaggaggacatcgacgccgccatcgagacctacaacctgctgagcgagagatggttcacccacgccagccccaccctgttcaacgccggcaccaacagaccccagctgagcagctgcttcctgctgagcatgaaggacgacagcatcgagggcatctacgacaccctgaagcagtgcgccctgatcagcaagagcgccggcggcatcggcgtggccgtgagctgcatcagagccaccggcagctacatcgccggcaccaacggcaacagcaacggcctggtgcccatgctgagagtgtacaacaacaccgccagatacgtggaccagggcggcaacaagagacccggcgccttcgccatctacctggagccctggcacctggacatcttcgagttcctggacctgaagaagaacaccggcaaggaggagcagagagccagagacctgttcttcgccctgtggatccccgacctgttcatgaagagagtggagaccaaccaggactggagcctgatgtgccccaacgagtgccccggcctggacgaggtgtggggcgaggagttcgagaagctgtacgccagctacgagaagcagggcagagtgagaaaggtggtgaaggcccagcagctgtggtacgccatcatcgagagccagaccgagaccggcaccccctacatgctgtacaaggacagctgcaacagaaagagcaaccagcagaacctgggcaccatcaagtgcagcaacctgtgcaccgagatcgtggagtacaccagcaaggacgaggtggccgtgtgcaacctggccagcctggccctgaacatgtacgtgaccagcgagcacacctacgacttcaagaagctggccgaggtgaccaaggtggtggtgagaaacctgaacaagatcatcgacatcaactactaccccgtgcccgaggcctgcctgagcaacaagagacacagacccatcggcatcggcgtgcagggcctggccgacgccttcatcctgatgagataccccttcgagagcgccgaggcccagctgctgaacaagcagatcttcgagaccatctactacggcgccctggaggccagctgcgacctggccaaggagcagggcccctacgagacctacgagggcagccccgtgagcaagggcatcctgcagtacgacatgtggaacgtgacccccaccgacctgtgggactggaaggtgctgaaggagaagatcgccaagtacggcatcagaaacagcctgctgatcgcccccatgcccaccgccagcaccgcccagatcctgggcaacaacgagagcatcgagccctacaccagcaacatctacaccagaagagtgctgagcggcgagttccagatcgtgaacccccacctgctgaaggacctgaccgagagaggcctgtggcacgaggagatgaagaaccagatcatcgcctgcaacggcagcatccagagcatccccgagatccccgacgacctgaagcagctgtacaagaccgtgtgggagatcagccagaagaccgtgctgaagatggccgccgagagaggcgccttcatcgaccagagccagagcctgaacatccacatcgccgagcccaactacggcaagctgaccagcatgcacttctacggctggaagcagggcctgaagaccggcatgtactacctgagaaccagacccgccgccaaccccatccagttcaccctgaacaaggagaagctgaaggacaaggagaaggtgagcaaggaggaggaggagaaggagagaaacaccgccgccatggtgtgcagcctggagaacagagacgagtgcctgatgtgcggcagctag

SEQ ID NO: 97333 - DNA, 2118 bp, synthetic construct
  misc_feature 1..2118: note = Description of Artificial Sequence: Synthetic coding sequence
  source 1..2118: mol_type = other DNA
gacggcagacaggagagagtgatgttcgacaagatcaccagcagaatccagaagctgtgctacggcctgaacatggacttcgtggaccccgcccagatcaccatgaaggtgatccagggcctgtacagcggcgtgaccaccgtggagctggacaccctggccgccgagaccgccgccaccctgaagaccctggagagaagctacctgctgaagatcaacggcaaggtggccgagagaccccagcacatgctgatgagagtgagcgtgggcatccacaaggaggacatcgacgccgccatcgagacctacaacctgctgagcgagagatggttcacccacgccagccccaccctgttcaacgccggcaccaacagaccccagctgagcagctgcttcctgctgagcatgaaggacgacagcatcgagggcatctacgacaccctgaagcagtgcgccctgatcagcaagagcgccggcggcatcggcgtggccgtgagctgcatcagagccaccggcagctacatcgccggcaccaacggcaacagcaacggcctggtgcccatgctgagagtgtacaacaacaccgccagatacgtggaccagggcggcaacaagagacccggcgccttcgccatctacctggagccctggcacctggacatcttcgagttcctggacctgaagaagaacaccggcaaggaggagcagagagccagagacctgttcttcgccctgtggatccccgacctgttcatgaagagagtggagaccaaccaggactggagcctgatgtgccccaacgagtgccccggcctggacgaggtgtggggcgaggagttcgagaagctgtacgccagctacgagaagcagggcagagtgagaaaggtggtgaaggcccagcagctgtggtacgccatcatcgagagccagaccgagaccggcaccccctacatgctgtacaaggacagctgcaacagaaagagcaaccagcagaacctgggcaccatcaagtgcagcaacctgtgcaccgagatcgtggagtacaccagcaaggacgaggtggccgtgtgcaacctggccagcctggccctgaacatgtacgtgaccagcgagcacacctacgacttcaagaagctggccgaggtgaccaaggtggtggtgagaaacctgaacaagatcatcgacatcaactactaccccgtgcccgaggcctgcctgagcaacaagagacacagacccatcggcatcggcgtgcagggcctggccgacgccttcatcctgatgagataccccttcgagagcgccgaggcccagctgctgaacaagcagatcttcgagaccatctactacggcgccctggaggccagctgcgacctggccaaggagcagggcccctacgagacctacgagggcagccccgtgagcaagggcatcctgcagtacgacatgtggaacgtgacccccaccgacctgtgggactggaaggtgctgaaggagaagatcgccaagtacggcatcagaaacagcctgctgatcgcccccatgcccaccgccagcaccgcccagatcctgggcaacaacgagagcatcgagccctacaccagcaacatctacaccagaagagtgctgagcggcgagttccagatcgtgaacccccacctgctgaaggacctgaccgagagaggcctgtggcacgaggagatgaagaaccagatcatcgcctgcaacggcagcatccagagcatccccgagatccccgacgacctgaagcagctgtacaagaccgtgtgggagatcagccagaagaccgtgctgaagatggccgccgagagaggcgccttcatcgaccagagccagagcctgaacatccacatcgccgagcccaactacggcaagctgaccagcatgcacttctacggctggaagcagggcctgaagaccggcatgtactacctgagaaccagacccgccgccaaccccatccagttcaccctgaacaaggagaagctgaaggacaaggagaaggtgagcaaggaggaggaggagaaggagagaaacaccgccgccatggtgtgcagcctggagaacagagacgagtgcctgatgtgcggcagctag

SEQ ID NO: 97334 - DNA, 1365 bp, synthetic construct
  misc_feature 1..1365: note = Description of Artificial Sequence: Synthetic coding sequence
  source 1..1365: mol_type = other DNA
atgaagagagtggagaccaaccaggactggagcctgatgtgccccaacgagtgccccggcctggacgaggtgtggggcgaggagttcgagaagctgtacgccagctacgagaagcagggcagagtgagaaaggtggtgaaggcccagcagctgtggtacgccatcatcgagagccagaccgagaccggcaccccctacatgctgtacaaggacagctgcaacagaaagagcaaccagcagaacctgggcaccatcaagtgcagcaacctgtgcaccgagatcgtggagtacaccagcaaggacgaggtggccgtgtgcaacctggccagcctggccctgaacatgtacgtgaccagcgagcacacctacgacttcaagaagctggccgaggtgaccaaggtggtggtgagaaacctgaacaagatcatcgacatcaactactaccccgtgcccgaggcctgcctgagcaacaagagacacagacccatcggcatcggcgtgcagggcctggccgacgccttcatcctgatgagataccccttcgagagcgccgaggcccagctgctgaacaagcagatcttcgagaccatctactacggcgccctggaggccagctgcgacctggccaaggagcagggcccctacgagacctacgagggcagccccgtgagcaagggcatcctgcagtacgacatgtggaacgtgacccccaccgacctgtgggactggaaggtgctgaaggagaagatcgccaagtacggcatcagaaacagcctgctgatcgcccccatgcccaccgccagcaccgcccagatcctgggcaacaacgagagcatcgagccctacaccagcaacatctacaccagaagagtgctgagcggcgagttccagatcgtgaacccccacctgctgaaggacctgaccgagagaggcctgtggcacgaggagatgaagaaccagatcatcgcctgcaacggcagcatccagagcatccccgagatccccgacgacctgaagcagctgtacaagaccgtgtgggagatcagccagaagaccgtgctgaagatggccgccgagagaggcgccttcatcgaccagagccagagcctgaacatccacatcgccgagcccaactacggcaagctgaccagcatgcacttctacggctggaagcagggcctgaagaccggcatgtactacctgagaaccagacccgccgccaaccccatccagttcaccctgaacaaggagaagctgaaggacaaggagaaggtgagcaaggaggaggaggagaaggagagaaacaccgccgccatggtgtgcagcctggagaacagagacgagtgcctgatgtgcggcagctag

SEQ ID NO: 97335 - DNA, 1170 bp, synthetic construct
  misc_feature 1..1170: note = Description of Artificial Sequence: Synthetic coding sequence
  source 1..1170: mol_type = other DNA
atgctgagcctgagagtgcccctggcccccatcaccgacccccagcagctgcagctgagccccctgaagggcctgagcctggtggacaaggagaacaccccccccgccctgagcggcaccagagtgctggccagcaagaccgccagaagaatcttccaggagcccaccgagcccaagaccaaggccgccgcccccggcgtggaggacgagcccctgctgagagagaaccccagaagattcgtgatcttccccatcgagtaccacgacatctggcagatgtacaagaaggccgaggccagcttctggaccgccgaggaggtggacctgagcaaggacatccagcactgggagagcctgaagcccgaggagagatacttcatcagccacgtgctggccttcttcgccgccagcgacggcatcgtgaacgagaacctggtggagagattcagccaggaggtgcagatcaccgaggccagatgcttctacggcttccagatcgccatggagaacatccacagcgagatgtacagcctgctgatcgacacctacatcaaggaccccaaggagagagagttcctgttcaacgccatcgagaccatgccctgcgtgaagaagaaggccgactgggccctgagatggatcggcgacaaggaggccacctacggcgagagagtggtggccttcgccgccgtggagggcatcttcttcagcggcagcttcgccagcatcttctggctgaagaagagaggcctgatgcccggcctgaccttcagcaacgagctgatcagcagagacgagggcctgcactgcgacttcgcctgcctgatgttcaagcacctggtgcacaagcccagcgaggagagagtgagagagatcatcatcaacgccgtgagaatcgagcaggagttcctgaccgaggccctgcccgtgaagctgatcggcatgaactgcaccctgatgaagcagtacatcgagttcgtggccgacagactgatgctggagctgggcttcagcaaggtgttcagagtggagaaccccttcgacttcatggagaacatcagcctggagggcaagaccaacttcttcgagaagagagtgggcgagtaccagagaatgggcgtgatgagcagccccaccgagaacagcttcaccctggacgccgacttctag

SEQ ID NO: 97336 - DNA, 1350 bp, synthetic construct
  misc_feature 1..1350: note = Description of Artificial Sequence: Synthetic coding sequence
  source 1..1350: mol_type = other DNA
atgggcagagtgggcggcatggcccagcccatgggcagagccggcgcccccaagcccatgggcagagccggcagcgccagaagaggcagattcaagggctgctggagcgagggcagccccgtgcaccccgtgcccgccgtgctgagctggctgctggccctgctgagatgcgccagcaccatgctgagcctgagagtgcccctggcccccatcaccgacccccagcagctgcagctgagccccctgaagggcctgagcctggtggacaaggagaacaccccccccgccctgagcggcaccagagtgctggccagcaagaccgccagaagaatcttccaggagcccaccgagcccaagaccaaggccgccgcccccggcgtggaggacgagcccctgctgagagagaaccccagaagattcgtgatcttccccatcgagtaccacgacatctggcagatgtacaagaaggccgaggccagcttctggaccgccgaggaggtggacctgagcaaggacatccagcactgggagagcctgaagcccgaggagagatacttcatcagccacgtgctggccttcttcgccgccagcgacggcatcgtgaacgagaacctggtggagagattcagccaggaggtgcagatcaccgaggccagatgcttctacggcttccagatcgccatggagaacatccacagcgagatgtacagcctgctgatcgacacctacatcaaggaccccaaggagagagagttcctgttcaacgccatcgagaccatgccctgcgtgaagaagaaggccgactgggccctgagatggatcggcgacaaggaggccacctacggcgagagagtggtggccttcgccgccgtggagggcatcttcttcagcggcagcttcgccagcatcttctggctgaagaagagaggcctgatgcccggcctgaccttcagcaacgagctgatcagcagagacgagggcctgcactgcgacttcgcctgcctgatgttcaagcacctggtgcacaagcccagcgaggagagagtgagagagatcatcatcaacgccgtgagaatcgagcaggagttcctgaccgaggccctgcccgtgaagctgatcggcatgaactgcaccctgatgaagcagtacatcgagttcgtggccgacagactgatgctggagctgggcttcagcaaggtgttcagagtggagaaccccttcgacttcatggagaacatcagcctggagggcaagaccaacttcttcgagaagagagtgggcgagtaccagagaatgggcgtgatgagcagccccaccgagaacagcttcaccctggacgccgacttctag

SEQ ID NO: 97337 - DNA, 1056 bp, synthetic construct
  misc_feature 1..1056: note = Description of Artificial Sequence: Synthetic coding sequence
  source 1..1056: mol_type = other DNA
atgggcgaccccgagagacccgaggccgccggcctggaccaggacgagagaagcagcagcgacaccaacgagagcgagatcaagagcaacgaggagcccctgctgagaaagagcagcagaagattcgtgatcttccccatccagtaccccgacatctggaagatgtacaagcaggcccaggccagcttctggaccgccgaggaggtggacctgagcaaggacctgccccactggaacaagctgaaggccgacgagaagtacttcatcagccacatcctggccttcttcgccgccagcgacggcatcgtgaacgagaacctggtggagagattcagccaggaggtgcaggtgcccgaggccagatgcttctacggcttccagatcctgatcgagaacgtgcacagcgagatgtacagcctgctgatcgacacctacatcagagaccccaagaagagagagttcctgttcaacgccatcgagaccatgccctacgtgaagaagaaggccgactgggccctgagatggatcgccgacagaaagagcaccttcggcgagagagtggtggccttcgccgccgtggagggcgtgttcttcagcggcagcttcgccgccatcttctggctgaagaagagaggcctgatgcccggcctgaccttcagcaacgagctgatcagcagagacgagggcctgcactgcgacttcgcctgcctgatgttccagtacctggtgaacaagcccagcgaggagagagtgagagagatcatcgtggacgccgtgaagatcgagcaggagttcctgaccgaggccctgcccgtgggcctgatcggcatgaactgcatcctgatgaagcagtacatcgagttcgtggccgacagactgctggtggagctgggcttcagcaaggtgttccaggccgagaaccccttcgacttcatggagaacatcagcctggagggcaagaccaacttcttcgagaagagagtgagcgagtaccagagattcgccgtgatggccgagaccaccgacaacgtgttcaccctggacgccgacttctag

SEQ ID NO: 97338 - DNA, 900 bp, synthetic construct
  misc_feature 1..900: note = Description of Artificial Sequence: Synthetic coding sequence
  source 1..900: mol_type = other DNA
atgggcgaccccgagagacccgaggccgccggcctggaccaggacgaggtggacctgagcaaggacctgccccactggaacaagctgaaggccgacgagaagtacttcatcagccacatcctggccttcttcgccgccagcgacggcatcgtgaacgagaacctggtggagagattcagccaggaggtgcaggtgcccgaggccagatgcttctacggcttccagatcctgatcgagaacgtgcacagcgagatgtacagcctgctgatcgacacctacatcagagaccccaagaagagagagttcctgttcaacgccatcgagaccatgccctacgtgaagaagaaggccgactgggccctgagatggatcgccgacagaaagagcaccttcggcgagagagtggtggccttcgccgccgtggagggcgtgttcttcagcggcagcttcgccgccatcttctggctgaagaagagaggcctgatgcccggcctgaccttcagcaacgagctgatcagcagagacgagggcctgcactgcgacttcgcctgcctgatgttccagtacctggtgaacaagcccagcgaggagagagtgagagagatcatcgtggacgccgtgaagatcgagcaggagttcctgaccgaggccctgcccgtgggcctgatcggcatgaactgcatcctgatgaagcagtacatcgagttcgtggccgacagactgctggtggagctgggcttcagcaaggtgttccaggccgagaaccccttcgacttcatggagaacatcagcctggagggcaagaccaacttcttcgagaagagagtgagcgagtaccagagattcgccgtgatggccgagaccaccgacaacgtgttcaccctggacgccgacttctag

SEQ ID NO: 97339 - DNA, 420 bp, synthetic construct
  misc_feature 1..420: note = Description of Artificial Sequence: Synthetic coding sequence
  source 1..420: mol_type = other DNA
atgggcgaccccgagagacccgaggccgccggcctggaccaggacgagggcctgcactgcgacttcgcctgcctgatgttccagtacctggtgaacaagcccagcgaggagagagtgagagagatcatcgtggacgccgtgaagatcgagcaggagttcctgaccgaggccctgcccgtgggcctgatcggcatgaactgcatcctgatgaagcagtacatcgagttcgtggccgacagactgctggtggagctgggcttcagcaaggtgttccaggccgagaaccccttcgacttcatggagaacatcagcctggagggcaagaccaacttcttcgagaagagagtgagcgagtaccagagattcgccgtgatggccgagaccaccgacaacgtgttcaccctggacgccgacttctag

SEQ ID NO: 97340 - DNA, 201 bp, synthetic construct
  misc_feature 1..201: note = Description of Artificial Sequence: Synthetic coding sequence
  source 1..201: mol_type = other DNA
atgggcgaccccgagagacccgaggccgccggcctggaccaggacgaggtgttccaggccgagaaccccttcgacttcatggagaacatcagcctggagggcaagaccaacttcttcgagaagagagtgagcgagtaccagagattcgccgtgatggccgagaccaccgacaacgtgttcaccctggacgccgacttctag

SEQ ID NO: 97341 - DNA, 132 bp, synthetic construct
  misc_feature 1..132: note = Description of Artificial Sequence: Synthetic coding sequence
  source 1..132: mol_type = other DNA
atgggcgaccccgagagacccgaggccgccggcctggaccaggacgagagaagcagcagcgacaccaacgagagcgagatcaagagcaacgaggagcccctgctgagaaagagcagcagaagaagcttctag

SEQ ID NO: 97342 - DNA, 894 bp, synthetic construct
  misc_feature 1..894: note = Description of Artificial Sequence: Synthetic coding sequence
  source 1..894: mol_type = other DNA
atgtacaagcaggcccaggccagcttctggaccgccgaggaggtggacctgagcaaggacctgccccactggaacaagctgaaggccgacgagaagtacttcatcagccacatcctggccttcttcgccgccagcgacggcatcgtgaacgagaacctggtggagagattcagccaggaggtgcaggtgcccgaggccagatgcttctacggcttccagatcctgatcgagaacgtgcacagcgagatgtacagcctgctgatcgacacctacatcagagaccccaagaagagagagttcctgttcaacgccatcgagaccatgccctacgtgaagaagaaggccgactgggccctgagatggatcgccgacagaaagagcaccttcggcgagagagtggtggccttcgccgccgtggagggcgtgttcttcagcggcagcttcgccgccatcttctggctgaagaagagaggcctgatgcccggcctgaccttcagcaacgagctgatcagcagagacgagggcctgcactgcgacttcgcctgcctgatgttccagtacctggtgaacaagcccagcgaggagagagtgagagagatcatcgtggacgccgtgaagatcgagcaggagttcctgaccgaggccctgcccgtgggcctgatcggcatgaactgcatcctgatgaagcagtacatcgagttcgtggccgacagactgctggtggagctgggcttcagcaaggtgttccaggccgagaaccccttcgacttcatggagaacatcagcctggagggcaagaccaacttcttcgagaagagagtgagcgagtaccagagattcgccgtgatggccgagaccaccgacaacgtgttcaccctggacgccgacttctag

SEQ ID NO: 97343 - DNA, 1824 bp, synthetic construct
  misc_feature 1..1824: note = Description of Artificial Sequence: Synthetic coding sequence
  source 1..1824: mol_type = other DNA
atggaggcccccgccgccggcctgttcctgctgctgctgctgggcacctgggcccccgcccccggcagcgccagcagcgaggccccccccctgatcaacgaggacgtgaagagaaccgtggacctgagcagccacctggccaaggtgaccgccgaggtggtgctggcccacctgggcggcggcagcaccagcagagccaccagcttcctgctggccctggagcccgagctggaggccagactggcccacctgggcgtgcaggtgaagggcgaggacgaggaggagaacaacctggaggtgagagagaccaagatcaagggcaagagcggcagattcttcaccgtgaagctgcccgtggccctggaccccggcgccaagatcagcgtgatcgtggagaccgtgtacacccacgtgctgcacccctaccccacccagatcacccagagcgagaagcagttcgtggtgttcgagggcaaccactacttctacagcccctaccccaccaagacccagaccatgagagtgaagctggccagcagaaacgtggagagctacaccaagctgggcaaccccaccagaagcgaggacctgctggactacggccccttcagagacgtgcccgcctacagccaggacaccttcaaggtgcactacgagaacaacagccccttcctgaccatcaccagcatgaccagagtgatcgaggtgagccactggggcaacatcgccgtggaggagaacgtggacctgaagcacaccggcgccgtgctgaagggccccttcagcagatacgactaccagagacagcccgacagcggcatcagcagcatcagaagcttcaagaccatcctgcccgccgccgcccaggacgtgtactacagagacgagatcggcaacgtgagcaccagccacctgctgatcctggacgacagcgtggagatggagatcagacccagattccccctgttcggcggctggaagacccactacatcgtgggctacaacctgcccagctacgagtacctgtacaacctgggcgaccagtacgccctgaagatgagattcgtggaccacgtgttcgacgagcaggtgatcgacagcctgaccgtgaagatcatcctgcccgagggcgccaagaacatcgagatcgacagcccctacgagatcagcagagcccccgacgagctgcactacacctacctggacaccttcggcagacccgtgatcgtggcctacaagaagaacctggtggagcagcacatccaggacatcgtggtgcactacaccttcaacaaggtgctgatgctgcaggagcccctgctggtggtggccgccttctacatcctgttcttcaccgtgatcatctacgtgagactggacttcagcatcaccaaggaccccgccgccgaggccagaatgaaggtggcctgcatcaccgagcaggtgctgaccctggtgaacaagagaatcggcctgtacagacacttcgacgagaccgtgaacagatacaagcagagcagagacatcagcaccctgaacagcggcaagaagagcctggagaccgagcacaaggccctgaccagcgagatcgccctgctgcagagcagactgaagaccgagggcagcgacctgtgcgacagagtgagcgagatgcagaagctggacgcccaggtgaaggagctggtgctgaagagcgccgtggaggccgagagactggtggccggcaagctgaagaaggacacctacatcgagaacgagaagctgatcagcggcaagagacaggagctggtgaccaagatcgaccacatcctggacgccctgtag

SEQ ID NO: 97344 - DNA, 1308 bp, synthetic construct
  misc_feature 1..1308: note = Description of Artificial Sequence: Synthetic coding sequence
  source 1..1308: mol_type = other DNA
atgagagtgaagctggccagcagaaacgtggagagctacaccaagctgggcaaccccaccagaagcgaggacctgctggactacggccccttcagagacgtgcccgcctacagccaggacaccttcaaggtgcactacgagaacaacagccccttcctgaccatcaccagcatgaccagagtgatcgaggtgagccactggggcaacatcgccgtggaggagaacgtggacctgaagcacaccggcgccgtgctgaagggccccttcagcagatacgactaccagagacagcccgacagcggcatcagcagcatcagaagcttcaagaccatcctgcccgccgccgcccaggacgtgtactacagagacgagatcggcaacgtgagcaccagccacctgctgatcctggacgacagcgtggagatggagatcagacccagattccccctgttcggcggctggaagacccactacatcgtgggctacaacctgcccagctacgagtacctgtacaacctgggcgaccagtacgccctgaagatgagattcgtggaccacgtgttcgacgagcaggtgatcgacagcctgaccgtgaagatcatcctgcccgagggcgccaagaacatcgagatcgacagcccctacgagatcagcagagcccccgacgagctgcactacacctacctggacaccttcggcagacccgtgatcgtggcctacaagaagaacctggtggagcagcacatccaggacatcgtggtgcactacaccttcaacaaggtgctgatgctgcaggagcccctgctggtggtggccgccttctacatcctgttcttcaccgtgatcatctacgtgagactggacttcagcatcaccaaggaccccgccgccgaggccagaatgaaggtggcctgcatcaccgagcaggtgctgaccctggtgaacaagagaatcggcctgtacagacacttcgacgagaccgtgaacagatacaagcagagcagagacatcagcaccctgaacagcggcaagaagagcctggagaccgagcacaaggccctgaccagcgagatcgccctgctgcagagcagactgaagaccgagggcagcgacctgtgcgacagagtgagcgagatgcagaagctggacgcccaggtgaaggagctggtgctgaagagcgccgtggaggccgagagactggtggccggcaagctgaagaaggacacctacatcgagaacgagaagctgatcagcggcaagagacaggagctggtgaccaagatcgaccacatcctggacgccctgtag

SEQ ID NO: 97345 - DNA, 1137 bp, synthetic construct
  misc_feature 1..1137: note = Description of Artificial Sequence: Synthetic coding sequence
  source 1..1137: mol_type = other DNA
atgaccagagtgatcgaggtgagccactggggcaacatcgccgtggaggagaacgtggacctgaagcacaccggcgccgtgctgaagggccccttcagcagatacgactaccagagacagcccgacagcggcatcagcagcatcagaagcttcaagaccatcctgcccgccgccgcccaggacgtgtactacagagacgagatcggcaacgtgagcaccagccacctgctgatcctggacgacagcgtggagatggagatcagacccagattccccctgttcggcggctggaagacccactacatcgtgggctacaacctgcccagctacgagtacctgtacaacctgggcgaccagtacgccctgaagatgagattcgtggaccacgtgttcgacgagcaggtgatcgacagcctgaccgtgaagatcatcctgcccgagggcgccaagaacatcgagatcgacagcccctacgagatcagcagagcccccgacgagctgcactacacctacctggacaccttcggcagacccgtgatcgtggcctacaagaagaacctggtggagcagcacatccaggacatcgtggtgcactacaccttcaacaaggtgctgatgctgcaggagcccctgctggtggtggccgccttctacatcctgttcttcaccgtgatcatctacgtgagactggacttcagcatcaccaaggaccccgccgccgaggccagaatgaaggtggcctgcatcaccgagcaggtgctgaccctggtgaacaagagaatcggcctgtacagacacttcgacgagaccgtgaacagatacaagcagagcagagacatcagcaccctgaacagcggcaagaagagcctggagaccgagcacaaggccctgaccagcgagatcgccctgctgcagagcagactgaagaccgagggcagcgacctgtgcgacagagtgagcgagatgcagaagctggacgcccaggtgaaggagctggtgctgaagagcgccgtggaggccgagagactggtggccggcaagctgaagaaggacacctacatcgagaacgagaagctgatcagcggcaagagacaggagctggtgaccaagatcgaccacatcctggacgccctgtag

SEQ ID NO: 97346 - DNA, 1746 bp, synthetic construct
  misc_feature 1..1746: note = Description of Artificial Sequence: Synthetic coding sequence
  source 1..1746: mol_type = other DNA
atggaggcccccgccgccggcctgttcctgctgctgctgctgggcacctgggcccccgcccccggcagcgccagcagcgaggccccccccctgatcaacgaggacgtgaagagaaccgtggacctgagcagccacctggccaaggtgaccgccgaggtggtgctggcccacctgggcgtgcaggtgaagggcgaggacgaggaggagaacaacctggaggtgagagagaccaagatcaagggcaagagcggcagattcttcaccgtgaagctgcccgtggccctggaccccggcgccaagatcagcgtgatcgtggagaccgtgtacacccacgtgctgcacccctaccccacccagatcacccagagcgagaagcagttcgtggtgttcgagggcaaccactacttctacagcccctaccccaccaagacccagaccatgagagtgaagctggccagcagaaacgtggagagctacaccaagctgggcaaccccaccagaagcgaggacctgctggactacggccccttcagagacgtgcccgcctacagccaggacaccttcaaggtgcactacgagaacaacagccccttcctgaccatcaccagcatgaccagagtgatcgaggtgagccactggggcaacatcgccgtggaggagaacgtggacctgaagcacaccggcgccgtgctgaagggccccttcagcagatacgactaccagagacagcccgacagcggcatcagcagcatcagaagcttcaagaccatcctgcccgccgccgcccaggacgtgtactacagagacgagatcggcaacgtgagcaccagccacctgctgatcctggacgacagcgtggagatggagatcagacccagattccccctgttcggcggctggaagacccactacatcgtgggctacaacctgcccagctacgagtacctgtacaacctgggcgaccagtacgccctgaagatgagattcgtggaccacgtgttcgacgagcaggtgatcgacagcctgaccgtgaagatcatcctgcccgagggcgccaagaacatcgagatcgacagcccctacgagatcagcagagcccccgacgagctgcactacacctacctggacaccttcggcagacccgtgatcgtggcctacaagaagaacctggtggagcagcacatccaggacatcgtggtgcactacaccttcaacaaggtgctgatgctgcaggagcccctgctggtggtggccgccttctacatcctgttcttcaccgtgatcatctacgtgagactggacttcagcatcaccaaggaccccgccgccgaggccagaatgaaggtggcctgcatcaccgagcaggtgctgaccctggtgaacaagagaatcggcctgtacagacacttcgacgagaccgtgaacagatacaagcagagcagagacatcagcaccctgaacagcggcaagaagagcctggagaccgagcacaaggccctgaccagcgagatcgccctgctgcagagcagactgaagaccgagggcagcgacctgtgcgacagagtgagcgagatgcagaagctggacgcccaggtgaaggagctggtgctgaagagcgccgtggaggccgagagactggtggccggcaagctgaagaaggacacctacatcgagaacgagaagctgatcagcggcaagagacaggagctggtgaccaagatcgaccacatcctggacgccctgtag

SEQ ID NO: 97347 - DNA, 1896 bp, synthetic construct
  misc_feature 1..1896: note = Description of Artificial Sequence: Synthetic coding sequence
  source 1..1896: mol_type = other DNA
atggccccccccggcagcagcaccgtgttcctgctggccctgaccatcatcgccagcacctgggccctgacccccacccactacctgaccaagcacgacgtggagagactgaaggccagcctggacagacccttcaccaacctggagagcgccttctacagcatcgtgggcctgagcagcctgggcgcccaggtgcccgacgccaagaaggcctgcacctacatcagaagcaacctggaccccagcaacgtggacagcctgttctacgccgcccaggccagccaggccctgagcggctgcgagatcagcatcagcaacgagaccaaggacctgctgctggccgccgtgagcgaggacagcagcgtgacccagatctaccacgccgtggccgccctgagcggcttcggcctgcccctggccagccaggaggccctgagcgccctgaccgccagactgagcaaggaggagaccgtgctggccaccgtgcaggccctgcagaccgccagccacctgagccagcaggccgacctgagaagcatcgtggaggagatcgaggacctggtggccagactggacgagctgggcggcgtgtacctgcagttcgaggagggcctggagaccaccgccctgttcgtggccgccacctacaagctgatggaccacgtgggcaccgagcccagcatcaaggaggaccaggtgatccagctgatgaacgccatcttcagcaagaagaacttcgagagcctgagcgaggccttcagcgtggccagcgccgccgccgtgctgagccacaacagataccacgtgcccgtggtggtggtgcccgagggcagcgccagcgacacccacgagcaggccatcctgagactgcaggtgaccaacgtgctgagccagcccctgacccaggccaccgtgaagctggagcacgccaagagcgtggccagcagagccaccgtgctgcagaagaccagcttcacccccgtgggcgacgtgttcgagctgaacttcatgaacgtgaagttcagcagcggctactacgacttcctggtggaggtggagggcgacaacagatacatcgccaacaccgtggagctgagagtgaagatcagcaccgaggtgggcatcaccaacgtggacctgagcaccgtggacaaggaccagagcatcgcccccaagaccaccagagtgacctaccccgccaaggccaagggcaccttcatcgccgacagccaccagaacttcgccctgttcttccagctggtggacgtgaacaccggcgccgagctgaccccccaccagaccttcgtgagactgcacaaccagaagaccggccaggaggtggtgttcgtggccgagcccgacaacaagaacgtgtacaagttcgagctggacaccagcgagagaaagatcgagttcgacagcgccagcggcacctacaccctgtacctgatcatcggcgacgccaccctgaagaaccccatcctgtggaacgtggccgacgtggtgatcaagttccccgaggaggaggcccccagcaccgtgctgagccagaacctgttcacccccaagcaggagatccagcacctgttcagagagcccgagaagagaccccccaccgtggtgagcaacaccttcaccgccctgatcctgagccccctgctgctgctgttcgccctgtggatcagaatcggcgccaacgtgagcaacttcaccttcgcccccagcaccatcatcttccacctgggccacgccgccatgctgggcctgatgtacgtgtactggacccagctgaacatgttccagaccctgaagtacctggccatcctgggcagcgtgaccttcctggccggcaacagaatgctggcccagcaggccgtgaagagaaccgcccactag

SEQ ID NO: 97348 - DNA, 1038 bp, synthetic construct
  misc_feature 1..1038: note = Description of Artificial Sequence: Synthetic coding sequence
  source 1..1038: mol_type = other DNA
gtgagcccccagggcagcagcaccgtgttcctgctggccctgaccatcatcgccagcacctgggccctgacccccacccactacctgaccaagcacgacgtggagagactgaaggccagcctggacagacccttcaccaacctggagagcgccttctacagcatcgtgggcctgagcagcctgggcgcccaggtgcccgacgccaagaaggcctgcacctacatcagaagcaacctggaccccagcaacgtggacagcctgttctacgccgcccaggccagccaggccctgagcggctgcgagatcagcatcagcaacgagaccaaggacctgctgctggccgccgtgagcgaggacagcagcgtgacccagatctaccacgccgtggccgccctgagcggcttcggcctgcccctggccagccaggaggccctgagcgccctgaccgccagactgagcaaggaggagaccgtgctggccagagtgtggagcaccgtgctggagagcagaagcctgttcagcaagagaaccgtgcaggccctgcagaccgccagccacctgagccagcaggccgacctgagaagcatcgtggaggagatcgaggacctggtggccagactggacgagctgggcggcgtgtacctgcagttcgaggagggcctggagaccaccgccctgttcgtggccgccacctacaagctgatggaccacgtgggcaccgagcccagcatcaaggaggaccaggtgatccagctgatgaacgccatcttcagcaagaagaacttcgagagcctgagcgaggccttcagcgtggccagcgccgccgccgtgctgagccacaacagataccacgtgcccgtggtggtggtgcccgagggcagcgccagcgacacccacgagcaggccatcctgagactgcaggtgaccaacgtgctgagccagcccctgacccaggccaccgtgaagctggagcacgccaagagcgtggccagcagagccaccgtgctgcagaagaccagcttcacccccgtgggctag

SEQ ID NO: 97349 - DNA, 1848 bp, synthetic construct
  misc_feature 1..1848: note = Description of Artificial Sequence: Synthetic coding sequence
  source 1..1848: mol_type = other DNA
atggccccccccggcagcagcaccgtgttcctgctggccctgaccatcatcgccagcacctgggccctgacccccacccactacctgaccaagcacgacgtggagagactgaaggccagcctggacagacccttcaccaacctggagagcgccttctacagcatcgtgggcctgagcagcctgggcgcccaggtgcccgacgccaagatcagcatcagcaacgagaccaaggacctgctgctggccgccgtgagcgaggacagcagcgtgacccagatctaccacgccgtggccgccctgagcggcttcggcctgcccctggccagccaggaggccctgagcgccctgaccgccagactgagcaaggaggagaccgtgctggccaccgtgcaggccctgcagaccgccagccacctgagccagcaggccgacctgagaagcatcgtggaggagatcgaggacctggtggccagactggacgagctgggcggcgtgtacctgcagttcgaggagggcctggagaccaccgccctgttcgtggccgccacctacaagctgatggaccacgtgggcaccgagcccagcatcaaggaggaccaggtgatccagctgatgaacgccatcttcagcaagaagaacttcgagagcctgagcgaggccttcagcgtggccagcgccgccgccgtgctgagccacaacagataccacgtgcccgtggtggtggtgcccgagggcagcgccagcgacacccacgagcaggccatcctgagactgcaggtgaccaacgtgctgagccagcccctgacccaggccaccgtgaagctggagcacgccaagagcgtggccagcagagccaccgtgctgcagaagaccagcttcacccccgtgggcgacgtgttcgagctgaacttcatgaacgtgaagttcagcagcggctactacgacttcctggtggaggtggagggcgacaacagatacatcgccaacaccgtggagctgagagtgaagatcagcaccgaggtgggcatcaccaacgtggacctgagcaccgtggacaaggaccagagcatcgcccccaagaccaccagagtgacctaccccgccaaggccaagggcaccttcatcgccgacagccaccagaacttcgccctgttcttccagctggtggacgtgaacaccggcgccgagctgaccccccaccagaccttcgtgagactgcacaaccagaagaccggccaggaggtggtgttcgtggccgagcccgacaacaagaacgtgtacaagttcgagctggacaccagcgagagaaagatcgagttcgacagcgccagcggcacctacaccctgtacctgatcatcggcgacgccaccctgaagaaccccatcctgtggaacgtggccgacgtggtgatcaagttccccgaggaggaggcccccagcaccgtgctgagccagaacctgttcacccccaagcaggagatccagcacctgttcagagagcccgagaagagaccccccaccgtggtgagcaacaccttcaccgccctgatcctgagccccctgctgctgctgttcgccctgtggatcagaatcggcgccaacgtgagcaacttcaccttcgcccccagcaccatcatcttccacctgggccacgccgccatgctgggcctgatgtacgtgtactggacccagctgaacatgttccagaccctgaagtacctggccatcctgggcagcgtgaccttcctggccggcaacagaatgctggcccagcaggccgtgaagagaatcgccgccgagcagagcagcagactggccaagtacagaaccctgagaaccgcccactag

SEQ ID NO: 97350 - DNA, 441 bp, synthetic construct
  misc_feature 1..441: note = Description of Artificial Sequence: Synthetic coding sequence
  source 1..441: mol_type = other DNA
ggcacctacaccctgtacctgatcatcggcgacgccaccctgaagaaccccatcctgtggaacgtggccgacgtggtgatcaagttccccgaggaggaggcccccagcaccgtgctgagccagaacctgttcacccccaagcaggagatccagcacctgttcagagagcccgagaagagaccccccaccgtggtgagcaacaccttcaccgccctgatcctgagccccctgctgctgctgttcgccctgtggatcagaatcggcgccaacgtgagcaacttcaccttcgcccccagcaccatcatcttccacctgggccacgccgagcagcacatcagcagcagaagaaagatggagatcctgaagaccgagtgccaggagaaggagagcagaaccatccacagcatgagaagaaagatggagaagaagaacttcatctag

SEQ ID NO: 97351 - DNA, 1038 bp, synthetic construct
  misc_feature 1..1038: note = Description of Artificial Sequence: Synthetic coding sequence
  source 1..1038: mol_type = other DNA
atggccccccccggcagcagcaccgtgttcctgctggccctgaccatcatcgccagcacctgggccctgacccccacccactacctgaccaagcacgacgtggagagactgaaggccagcctggacagacccttcaccaacctggagagcgccttctacagcatcgtgggcctgagcagcctgggcgcccaggtgcccgacgccaagaaggcctgcacctacatcagaagcaacctggaccccagcaacgtggacagcctgttctacgccgcccaggccagccaggccctgagcggctgcgagatcagcatcagcaacgagaccaaggacctgctgctggccgccgtgagcgaggacagcagcgtgacccagatctaccacgccgtggccgccctgagcggcttcggcctgcccctggccagccaggaggccctgagcgccctgaccgccagactgagcaaggaggagaccgtgctggccagagtgtggagcaccgtgctggagagcagaagcctgttcagcaagagaaccgtgcaggccctgcagaccgccagccacctgagccagcaggccgacctgagaagcatcgtggaggagatcgaggacctggtggccagactggacgagctgggcggcgtgtacctgcagttcgaggagggcctggagaccaccgccctgttcgtggccgccacctacaagctgatggaccacgtgggcaccgagcccagcatcaaggaggaccaggtgatccagctgatgaacgccatcttcagcaagaagaacttcgagagcctgagcgaggccttcagcgtggccagcgccgccgccgtgctgagccacaacagataccacgtgcccgtggtggtggtgcccgagggcagcgccagcgacacccacgagcaggccatcctgagactgcaggtgaccaacgtgctgagccagcccctgacccaggccaccgtgaagctggagcacgccaagagcgtggccagcagagccaccgtgctgcagaagaccagcttcacccccgtgggctag

SEQ ID NO: 97352 - DNA, 417 bp, synthetic construct
  misc_feature 1..417: note = Description of Artificial Sequence: Synthetic coding sequence
  source 1..417: mol_type = other DNA
gagctggacaccagcgagagaaagatcgagttcgacagcgccagcggcacctacaccctgtacctgatcatcggcgacgccaccctgaagaaccccatcctgtggaacgtggccgacgtggtgatcaagttccccgaggaggaggcccccagcaccgtgctgagccagaacctgttcacccccaagcaggagatccagtggatcagaatcggcgccaacgtgagcaacttcaccttcgcccccagcaccatcatcttccacctgggccacgccgccatgctgggcctgatgtacgtgtactggacccagctgaacatgttccagaccctgaagtacctggccatcctgggcagcgtgaccttcctggccggcaacagaatgctggcccagcaggccgtgaagagaaccgccgagtag

SEQ ID NO: 97353 - DNA, 417 bp, synthetic construct
  misc_feature 1..417: note = Description of Artificial Sequence: Synthetic coding sequence
  source 1..417: mol_type = other DNA
gagctggacaccagcgagagaaagatcgagttcgacagcgccagcggcacctacaccctgtacctgatcatcggcgacgccaccctgaagaaccccatcctgtggaacgtggccgacgtggtgatcaagttccccgaggaggaggcccccagcaccgtgctgagccagaacctgttcacccccaagcaggagatccagtggatcagaatcggcgccaacgtgagcaacttcaccttcgcccccagcaccatcatcttccacctgggccacgccgccatgctgggcctgatgtacgtgtactggacccagctgaacatgttccagaccctgaagtacctggccatcctgggcagcgtgaccttcctggccggcaacagaatgctggcccagcaggccgtgaagagaaccgcccactag

SEQ ID NO: 97354 - DNA, 504 bp, synthetic construct
  misc_feature 1..504: note = Description of Artificial Sequence: Synthetic coding sequence
  source 1..504: mol_type = other DNA
atgcagagaaccgtgcaggccctgcagaccgccagccacctgagccagcaggccgacctgagaagcatcgtggaggagatcgaggacctggtggccagactggacgagctgggcggcgtgtacctgcagttcgaggagggcctggagaccaccgccctgttcgtggccgccacctacaagctgatggaccacgtgggcaccgagcccagcatcaaggaggaccaggtgatccagctgatgaacgccatcttcagcaagaagaacttcgagagcctgagcgaggccttcagcgtggccagcgccgccgccgtgctgagccacaacagataccacgtgcccgtggtggtggtgcccgagggcagcgccagcgacacccacgagcaggccatcctgagactgcaggtgaccaacgtgctgagccagcccctgacccaggccaccgtgaagctggagcacgccaagagcgtggccagcagagccaccgtgctgcagaagaccagctag

SEQ ID NO: 97355 - DNA, 444 bp, synthetic construct
  misc_feature 1..444: note = Description of Artificial Sequence: Synthetic coding sequence
  source 1..444: mol_type = other DNA
tgaggcacctacaccctgtacctgatcatcggcgacgccaccctgaagaaccccatcctgtggaacgtggccgacgtggtgatcaagttccccgaggaggaggcccccagcaccgtgctgagccagaacctgttcacccccaagcaggagatccagcacctgttcagagagcccgagaagagaccccccaccgtggtgagcaacaccttcaccgccctgatcctgagccccctgctgctgctgttcgccctgtggatcagaatcggcgccaacgtgagcaacttcaccttcgcccccagcaccatcatcttccacctgggccacgccgagcagcacatcagcagcagaagaaagatggagatcctgaagaccgagtgccaggagaaggagagcagaaccatccacagcatgagaagaaagatggagaagaagaacttcatctag

SEQ ID NO: 97356 - DNA, 936 bp, synthetic construct
  misc_feature 1..936: note = Description of Artificial Sequence: Synthetic coding sequence
  source 1..936: mol_type = other DNA
atgcagagacccggccccttcagcaccctgtacggcagagtgctggcccccctgcccggcagagccggcggcgccgccagcggcggcggcggcaacagctgggacctgcccggcagccacgtgagactgcccggcagagcccagagcggcaccagaggcggcgccggcaacaccagcaccagctgcggcgacagcaacagcatctgccccgcccccagcaccatgagcaaggccgaggaggccaagaagctggccggcagagccgccgtggagaaccacgtgagaaacaaccaggtgctgggcatcggcagcggcagcaccatcgtgcacgccgtgcagagaatcgccgagagagtgaagcaggagaacctgaacctggtgtgcatccccaccagcttccaggccagacagctgatcctgcagtacggcctgaccctgagcgacctggacagacaccccgagatcgacctggccatcgacggcgccgacgaggtggacgccgacctgaacctgatcaagggcggcggcggctgcctgacccaggagaagatcgtggccggctacgccagcagattcatcgtgatcgccgacttcagaaaggacagcaagaacctgggcgaccagtggcacaagggcatccccatcgaggtgatccccatggcctacgtgcccgtgagcagagccgtgagccagaagttcggcggcgtggtggagctgagaatggccgtgaacaaggccggccccgtggtgaccgacaacggcaacttcatcctggactggaagttcgacagagtgcacaagtggagcgaggtgaacaccgccatcaagatgatccccggcgtggtggacaccggcctgttcatcaacatggccgagagagtgtacttcggcatgcaggacggcagcgtgaacatgagagagaagcccttctgctag

SEQ ID NO: 97357 - DNA, 534 bp, synthetic construct
  misc_feature 1..534: note = Description of Artificial Sequence: Synthetic coding sequence
  source 1..534: mol_type = other DNA
gccagacagctgatcctgcagtacggcctgaccctgagcgacctggacagacaccccgagatcgacctggccatcgacggcgccgacgaggtggacgccgacctgaacctgatcaagggcggcggcggctgcctgacccaggagaagatcgtggccggctacgccagcagattcatcgtgatcgccgacttcagaaaggacagcaagaacctgggcgaccagtggcacaagggcatccccatcgaggtgatccccatggcctacgtgcccgtgagcagagccgtgagccagaagttcggcggcgtggtggagctgagaatggccgtgaacaaggccggccccgtggtgaccgacaacggcaacttcatcctggactggaagttcgacagagtgcacaagtggagcgaggtgaacaccgccatcaagatgatccccggcgtggtggacaccggcctgttcatcaacatggccgagagagtgtacttcggcatgcaggacggcagcgtgaacatgagagagaagcccttctgctag

SEQ ID NO: 97358 - DNA, 492 bp, synthetic construct
  misc_feature 1..492: note = Description of Artificial Sequence: Synthetic coding sequence
  source 1..492: mol_type = other DNA
atgagaatcgagaagtgctacttctgcagcggccccatctaccccggccacggcatgatgttcgtgagaaacgactgcaaggtgttcagattctgcaagagcaagtgccacaagaacttcaagaagaagagaaaccccagaaaggtgagatggaccaaggccttcagaaaggccgccggcaaggagctgaccgtggacaacagcttcgagttcgagaagagaagaaacgagcccatcaagtaccagagagagctgtggaacaagaccatcgacgccatgaagagagtggaggagatcaagcagaagagacaggccaagttcatcatgaacagactgaagaagaacaaggagctgcagaaggtgcaggacatcaaggaggtgaagcagaacatccacctgatcagagcccccctggccggcaagggcaagcagctggaggagaagatggtgcagcagctgcaggaggacgtggacatggaggacgccccctag

SEQ ID NO: 97359 - DNA, 1161 bp, synthetic construct
  misc_feature 1..1161: note = Description of Artificial Sequence: Synthetic coding sequence
  source 1..1161: mol_type = other DNA
atgtgcagcagcgtggccgccaagctgtggttcctgaccgacagaagaatcagagaggactacccccagaaggagatcctgagagccctgaaggccaagtgctgcgaggaggagctggacttcagagccgtggtgatggacgaggtggtgctgaccatcgagcagggcaacctgggcctgagaatcaacggcgagctgatcaccgcctacccccaggtggtggtggtgagagtgcccaccccctgggtgcagagcgacagcgacatcaccgtgctgagacacctggagaagatgggctgcagactgatgaacagaccccaggccatcctgaactgcgtgaacaagttctggaccttccaggagctggccggccacggcgtgcccctgcccgacaccttcagctacggcggccacgagaacttcgccaagatgatcgacgaggccgaggtgctggagttccccatggtggtgaagaacaccagaggccacagaggcaaggccgtgttcctggccagagacaagcaccacctggccgacctgagccacctgatcagacacgaggccccctacctgttccagaagtacgtgaaggagagccacggcagagacgtgagagtgatcgtggtgggcggcagagtggtgggcaccatgctgagatgcagcaccgacggcagaatgcagagcaactgcagcctgggcggcgtgggcatgatgtgcagcctgagcgagcagggcaagcagctggccatccaggtgagcaacatcctgggcatggacgtgtgcggcatcgacctgctgatgaaggacgacggcagcttctgcgtgtgcgaggccaacgccaacgtgggcttcatcgccttcgacaaggcctgcaacctggacgtggccggcatcatcgccgactacgccgccagcctgctgcccagcggcagactgaccagaagaatgagcctgctgagcgtggtgagcaccgccagcgagaccagcgagcccgagctgggcccccccgccagcaccgccgtggacaacatgagcgccagcagcagcagcgtggacagcgaccccgagagcaccgagagagagctgctgaccaagctgcccggcggcctgttcaacatgaaccagctgctggccaacgagatcaagctgctggtggactag

SEQ ID NO: 97360 - DNA, 1161 bp, synthetic construct; identical to SEQ ID NO: 97359
  misc_feature 1..1161: note = Description of Artificial Sequence: Synthetic coding sequence
  source 1..1161: mol_type = other DNA

SEQ ID NO: 97361 - DNA, 1161 bp, synthetic construct; identical to SEQ ID NO: 97359
  misc_feature 1..1161: note = Description of Artificial Sequence: Synthetic coding sequence
  source 1..1161: mol_type = other DNA

SEQ ID NO: 97362 - DNA, 288 bp, synthetic construct
  misc_feature 1..288: note = Description of Artificial Sequence: Synthetic coding sequence
  source 1..288: mol_type = other DNA
atgtgcagcagcgtggccgccaagctgtggttcctgaccgacagaagaatcagagaggactacccccagaaggagatcctgagagccctgaaggccaagtgctgcgaggaggagctggacttcagagccgtggtgatggacgaggtggtgctgaccatcgagcagggcaacctgggcctgagaatcaacggcgagctgatcaccgcctacccccaggtggtggtggtgagagtgcccaccccctgggtgcagagcgacagcgacatcaccgtgctgagacacctgtag

SEQ ID NO: 97363 - DNA, 345 bp, synthetic construct
  misc_feature 1..345: note = Description of Artificial Sequence: Synthetic coding sequence
  source 1..345: mol_type = other DNA
atgtgcagcagcgtggccgccaagctgtggttcctgaccgacagaagaatcagagaggactacccccagaaggagatcctgagagccctgaaggccaagtgctgcgaggaggagctggacttcagagccgtggtgatggacgaggtggtgctgaccatcgagcagggcaacctgggcctgagaatcaacggcgagctgatcaccgcctacccccaggtggtggtggtgagagtgcccaccccctgggtgcagagcgacagcgacatcaccgtgctgagacacctggagaagatgggctgcagactgatgaacagaccccaggccatcctgaactgcgtgaactag

SEQ ID NO: 97364 - DNA, 645 bp, synthetic construct
  misc_feature 1..645: note = Description of Artificial Sequence: Synthetic coding sequence
  source 1..645: mol_type = other DNA
atgggcagaagacccgccagatgctacagatactgcaagaacaagccctaccccaagagcagattctgcagaggcgtgcccgacgccaagatcagaatcttcgacctgggcagaaagaaggccaaggtggacgagttccccctgtgcggccacatggtgagcgacgagtacgagcagctgagcagcgaggccctggaggccgccagaatctgcgccaacaagtacatggtgaagagctgcggcaaggacggcttccacatcagagtgagactgcaccccttccacgtgatcagaatcaacaagatgctgagctgcgccggcgccgacagactgcagaccggcatgagaggcgccttcggcaagccccagggcaccgtggccagagtgcacatcggccaggtgatcatgagcatcagaaccaagctgcagaacaaggagcacgtgatcgaggccctgagaagagccaagttcaagttccccggcagacagaagatccacatcagcaagaagtggggcttcaccaagttcaacgccgacgagttcgaggacatggtggccgagaagagactgatccccgacggctgcggcgtgaagtacatccccaacagaggccccctggacaagtggagagccctgcacagctag

SEQ ID NO: 97365 - DNA, 645 bp, synthetic construct; identical to SEQ ID NO: 97364
  misc_feature 1..645: note = Description of Artificial Sequence: Synthetic coding sequence
  source 1..645: mol_type = other DNA

SEQ ID NO: 97366 - DNA, 645 bp, synthetic construct; identical to SEQ ID NO: 97364
  misc_feature 1..645: note = Description of Artificial Sequence: Synthetic coding sequence
  source 1..645: mol_type = other DNA

SEQ ID NO: 97367 - DNA, 606 bp, synthetic construct
  misc_feature 1..606: note = Description of Artificial Sequence: Synthetic coding sequence
  source 1..606: mol_type = other DNA
atgggcagaagacccgccagatgctacagatactgcaagaacaagccctaccccaagagcagattctgcagaggcgtgcccgacgccaagatcagaatcttcgacctgggcagaaagaaggccaaggtggacgagttccccctgtgcggccacatggtgagcgacgagtacgagcagctgagcagcgaggccctggaggccgccagaatctgcgccaacaagtacatggtgaagagctgcggcaaggacggcttccacatcagagtgagactgcaccccttccacgtgatcagaatcaacaagatgctgagctgcgccggcgccgacagactgcagaccggcatgagaggcgccttcggcaagccccagggcaccgtggccagagtgcacatcggccaggtgatcatgagcatcagaaccaagctgcagaacaaggagcacgtgatcgaggccctgagaagagccaagttcaagttccccggcagacagaagatccacatcagcaagaagtggggcttcaccaagttcaacgccgacgagttcgaggacatggtggccgagaagagactgatccccgacggctgcggcgtgaagtacatcccctag

SEQ ID NO: 97368 - DNA, 327 bp, synthetic construct
  misc_feature 1..327: note = Description of Artificial Sequence: Synthetic coding sequence
  source 1..327: mol_type = other DNA
cccaagagcagattctgcagaggcgtgcccgacgccaagatcagaatcttcgacctgggcagaaagaaggccaaggtggacgagttccccctgtgcggccacatggtgagcgacgagtacgagcagctgagcagcgaggccctggaggccgccagaatctgcgccaacaagtacatggtgaagagctgcggcaaggacggcttccacatcagagtgagactgcaccccttccacgtgatcagaatcaacaagatgctgagctgcgccggcgccgacagacccaccctgctgtgccagtgctgggagaccagcagaaacaccagctag

SEQ ID NO: 97369 - DNA, 546 bp, synthetic construct
  misc_feature 1..546: note = Description of Artificial Sequence: Synthetic coding sequence
  source 1..546: mol_type = other DNA
atgggcagaagacccgccagatgctacagatactgcaagaacaagccctaccccaagagcagattctgcagaggcgtgcccgacgccaagatcagaatcttcgacctgggcagaaagaaggccaaggtggacgagttccccctgtgcggccacatggtgagcgacgagtacgagcagctgagcagcgaggccctggaggccgccagaatctgcgccaacaagtacatggtgaagagctgcggcaaggacggcttccacatcagagtgagactgcaccccttccacgtgatcagaatcaacaagatgctgagctgcgccggcgccgacagaagcaccagccagagaagcggcgccagccccagcagcatgctgatgaacctgaagacctggtggctgaagagcggcagcagccagatggccgtgggcagcagcaccagccccatcgtggccctgtggaccagcggcggcccctgcacccacgagggcttccagtgcgccgcccccctgctgatcctgaccaacaagttctacttcctgagcacctag

SEQ ID NO: 97370 - DNA, 537 bp, synthetic construct
  misc_feature 1..537: note = Description of Artificial Sequence: Synthetic coding sequence
  source 1..537: mol_type = other DNA
atggcccaggaccagggcgagaaggagaaccccatgagagagctgagaatcagaaagctgtgcctgaacatctgcgtgggcgagagcggcgacagactgaccagagccgccaaggtgctggagcagctgaccggccagacccccgtgttcagcaaggccagatacaccgtgagaagcttcggcatcagaagaaacgagaagatcgccgtgcactgcaccgtgagaggcgccaaggccgaggagatcctggagaagggcctgaaggtgagagagtacgagctgagaaagaacaacttcagcgacaccggcaacttcggcttcggcatccaggagcacatcgacctgggcatcaagtacgaccccagcatcggcatctacggcctggacttctacgtggtgctgggcagacccggcttcagcatcgccgacaagaagagaagaaccggctgcatcggcgccaagcacagaatcagcaaggaggaggccatgagatggttccagcagaagtacgacggcatcatcctgcccggcaagtag

SEQ ID NO: 97371 - DNA, 396 bp, synthetic construct
  misc_feature 1..396: note = Description of Artificial Sequence: Synthetic coding sequence
  source 1..396: mol_type = other DNA
caggaccagggcgagaaggagaaccccatgagagagctgagaatcagaaagctgtgcctgaacatctgcgtgggcgagagcggcgacagactgaccagagccgccaaggtgctggagcagctgaccggccagacccccgtgttcagcaaggccagatacaccgtgagaagcttcggcatcagaagaaacgagaagatcgccgtgcactgcaccgtgagaggcgccaaggccgaggagatcctggagaagggcctgaaggtgagagagtacgagctgagaaagaacaacttcagcgacaccggcaacttcggcttcggcatccaggagcacatcgacctgggcatcaagtacgaccccagcatcggcatctacggcctggacttctacgtggtgtag

SEQ ID NO: 97372 - DNA, 525 bp, synthetic construct
  misc_feature 1..525: note = Description of Artificial Sequence: Synthetic coding sequence
  source 1..525: mol_type = other DNA
caggaccagggcgagaaggagaaccccatgagagagctgagaatcagaaagctgtgcctgaacatctgcgtgggcgagagcggcgacagactgaccagagccgccaaggtgctggagcagctgaccggccagacccccgtgttcagcaaggccagatacaccgtgagaagcttcggcatcagaagaaacgagaagatcgccgtgcactgcaccgtgagaggcgccaaggccgaggagatcctggagaagggcctgaaggtgagagagtacgagctgagaaagaacaacttcagcgacaccggcaacttcggcttcggcatccaggagcacatcgacctgggcatcaagtacgaccccagcatcggcatctacggcctggacttctacgtggtgctgggcagacccggcttcagcatcgccgacaagaagagaagaaccggctgcatcggcgccaagcacagaatcagcaaggaggaggccatgagatggttccagcagaaggtgaagctgatctacctgaagtag

SEQ ID NO: 97373 - DNA, 498 bp, synthetic construct
  misc_feature 1..498: note = Description of Artificial Sequence: Synthetic coding sequence
  source 1..498: mol_type = other DNA
atgccccccaagttcgaccccaacgagatcaaggtggtgtacctgagatgcaccggcggcgaggtgggcgccaccagcgccctggcccccaagatcggccccctgggcctgagccccaagaaggtgggcgacgacatcgccaaggccaccggcgactggaagggcctgagaatcaccgtgaagctgaccatccagaacagacaggcccagatcgaggtggtgcccagcgccagcgccctgatcatcaaggccctgaaggagccccccagagacagaaagaagcagaagaacatcaagcacagcggcaacatcaccttcgacgagatcgtgaacatcgccagacagatgagacacagaagcctggccagagagctgagcggcaccatcaaggagatcctgggcaccgcccagagcgtgggctgcaacgtggacggcagacacccccacgacatcatcgacgacatcaacagcggcgccgtggagtgccccgccagctag

SEQ ID NO: 97374 - DNA, 399 bp, synthetic construct
  misc_feature 1..399: note = Description of Artificial Sequence: Synthetic coding sequence
  source 1..399: mol_type = other DNA
atgccccccaagttcgaccccaacgagatcaaggtggtgtacctgagatgcaccggcggcgaggtgggcgccaccagcgccctggcccccaagatcggccccctgggcctgatcgaggtggtgcccagcgccagcgccctgatcatcaaggccctgaaggagccccccagagacagaaagaagcagaagaacatcaagcacagcggcaacatcaccttcgacgagatcgtgaacatcgccagacagatgagacacagaagcctggccagagagctgagcggcaccatcaaggagatcctgggcaccgcccagagcgtgggctgcaacgtggacggcagacacccccacgacatcatcgacgacatcaacagcggcgccgtggagtgccccgccagctag

SEQ ID NO: 97375 - DNA, 636 bp, synthetic construct
  misc_feature 1..636: note = Description of Artificial Sequence: Synthetic coding sequence
  source 1..636: mol_type = other DNA
atggcccccagcagaaacggcatggtgctgaagccccacttccacaaggactggcagagaagagtggccacctggttcaaccagcccgccagaaagatcagaagaagaaaggccagacaggccaaggccagaagaatcgcccccagacccgccagcggccccatcagacccatcgtgagatgccccaccgtgagataccacaccaaggtgagagccggcagaggcttcagcctggaggagctgagagtggccggcatccacaagaaggtggccagaaccatcggcatcagcgtggaccccagaagaagaaacaagagcaccgagagcctgcaggccaacgtgcagagactgaaggagtacagaagcaagctgatcctgttccccagaaagcccagcgcccccaagaagggcgacagcagcgccgaggagctgaagctggccacccagctgaccggccccgtgatgcccgtgagaaacgtgtacaagaaggagaaggccagagtgatcaccgaggaggagaagaacttcaaggccttcgccagcctgagaatggccagagccaacgccagactgttcggcatcagagccaagagagccaaggaggccgccgagcaggacgtggagaagaagaagtag

SEQ ID NO: 97376 - DNA, 636 bp, synthetic construct; identical to SEQ ID NO: 97375
  misc_feature 1..636: note = Description of Artificial Sequence: Synthetic coding sequence
  source 1..636: mol_type = other DNA

SEQ ID NO: 97377 - DNA, 495 bp, synthetic construct
  misc_feature 1..495: note = Description of Artificial Sequence: Synthetic coding sequence
  source 1..495: mol_type = other DNA
atggcccccagcagaaacggcatggtgctgaagccccacttccacaaggactggcagagaagagtggccacctggttcaaccagcccgccagaaagatcagaagaagaaaggccagacaggccaaggccagaagaatcgcccccagacccgccagcggccccatcagacccatcgtgagatgccccaccgtgagataccacaccaaggtgagagccggcagaggcttcagcctggaggagctgagagtggccggcatccacaagaagggcgacagcagcgccgaggagctgaagctggccacccagctgaccggccccgtgatgcccgtgagaaacgtgtacaagaaggagaaggccagagtgatcaccgaggaggagaagaacttcaaggccttcgccagcctgagaatggccagagccaacgccagactgttcggcatcagagccaagagagccaaggaggccgccgagcaggacgtggagaagaagaagtag

SEQ ID NO: 97378 - DNA, 615 bp, synthetic construct
  misc_feature 1..615: note = Description of Artificial Sequence: Synthetic coding sequence
  source 1..615: mol_type = other DNA
atgggcgcctacaagtacatccaggagctgtggagaaagaagcagagcgacgtgatgagattcctgctgagagtgagatgctggcagtacagacagctgagcgccctgcacagagcccccagacccaccagacccgacaaggccagaagactgggctacaaggccaagcagggctacgtgatctacagaatcagagtgagaagaggcggcagaaagagacccgtgcccaagggcgccacctacggcaagcccgtgcaccacggcgtgaaccagctgaagttcgccagaagcctgcagagcgtggccgaggagagagccggcagacactgcggcgccctgagagtgctgaacagctactgggtgggcgaggacagcacctacaagttcttcgaggtgatcctgatcgaccccttccacaaggccatcagaagaaaccccgacacccagtggatcaccaagcccgtgcacaagcacagagagatgagaggcctgaccagcgccggcagaaagagcagaggcctgggcaagggccacaagttccaccacaccatcggcggcagcagaagagccgcctggagaagaagaaacaccctgcagctgcacagatacagatag

SEQ ID NO: 97379 - DNA, 615 bp, synthetic construct; identical to SEQ ID NO: 97378
  misc_feature 1..615: note = Description of Artificial Sequence: Synthetic coding sequence
  source 1..615: mol_type = other DNA

SEQ ID NO: 97380 - DNA, 528 bp, synthetic construct
  misc_feature 1..528: note = Description of Artificial Sequence: Synthetic coding sequence
  source 1..528: mol_type = other DNA
atgggcgcctacaagtacatccaggagctgtggagaaagaagcagagcgacgtgatgagattcctgctgagagtgagatgctggcagtacagacagctgagcgccctgcacagagcccccagacccaccagacccgacaaggccagaagactgggctacaaggccaagcagggctacgtgatctacagaatcagagtgagaagaggcggcagaaagagacccgtgcccaagggcgccacctacggcaagcccgtgcaccacggcgtgaaccagctgaagttcgccagaagcctgcagagcgtggccgaggtgaacgccggcagacactgcggcgccctgagagtgctgaacagctactgggtgggcgaggacagcacctacaagttcttcgaggtgatcctgatcgaccccttccacaaggccatcagaagaaaccccgacacccagtggatcaccaagcccgtgcacaagcacagagagatgagaggcctgaccagcgccggcagaaagagcagaggcctgggctag

SEQ ID NO: 97381 - DNA, 615 bp, synthetic construct; identical to SEQ ID NO: 97378
  misc_feature 1..615: note = Description of Artificial Sequence: Synthetic coding sequence
  source 1..615: mol_type = other DNA

SEQ ID NO: 97382 - DNA, 615 bp, synthetic construct; identical to SEQ ID NO: 97378
  misc_feature 1..615: note = Description of Artificial Sequence: Synthetic coding sequence
  source 1..615: mol_type = other DNA

SEQ ID NO: 97383 - DNA, 402 bp, synthetic construct
  misc_feature 1..402: note = Description of Artificial Sequence: Synthetic coding sequence
  source 1..402: mol_type = other DNA
atgggcgcctacaagtacatccaggagctgtggagaaagaagcagagcgacgtgatgagattcctgctgagagtgagatgctggcagtacagacagctgagcgccctgcacagagcccccagacccaccagacccgacaaggccagaagactgggctacaaggccaagcagggctacgtgatctacagaatcagagtgagaagaggcggcagaaagagacccgtgcccaagggcgccacctacggcaagcccgtgcaccacggcgtgaaccagctgaagttcgccagaagcctgcagagcgtggccgaggagagagccggcagacactgcggcgccctgagagtgctgaacagctactgggtgggcgaggacagcacctacaagttcttcgaggtgatctag

SEQ ID NO: 97384 - DNA, 525 bp, synthetic construct
  misc_feature 1..525: note = Description of Artificial Sequence: Synthetic coding sequence
  source 1..525: mol_type = other DNA
atgggcgcctacaagtacatccaggagctgtggagaaagaagcagagcgacgtgatgagattcctgctgagagtgagatgctggcagtacagacagctgagcgccctgcacagagcccccagacccaccagacccgacaaggccagaagactgggctacaaggccaagcagggctacgtgatctacagaatcagagtgagaagaggcggcagaaagagacccgtgcccaagggcgccacctacggcaagcccgtgcaccacggcgtgaaccagctgaagttcgccagaagcctgcagagcgtggccgaggagagagccggcagacactgcggcgccctgagagtgctgaacagctactgggtgggcgaggacagcacctacaagttcttcgaggtgatcctgatcgaccccttccacaaggccatcagaagaaaccccgacacccagtggatcaccaagcccgtgcacaagcacagagagatgagaggcctgaccagcgccggcagaaagagcagaggcctgtag

SEQ ID NO: 97385 - DNA, 615 bp, synthetic construct; identical to SEQ ID NO: 97378
  misc_feature 1..615: note = Description of Artificial Sequence: Synthetic coding sequence
  source 1..615: mol_type = other DNA

SEQ ID NO: 97386 - DNA, 180 bp, synthetic construct
  misc_feature 1..180: note = Description of Artificial Sequence: Synthetic coding sequence
  source 1..180: mol_type = other DNA
atgggcgcctacaagtacatccaggagctgtggagaaagaagcagagcgacgtgatgagattcctgctgagagtgagatgctggcagtacagacagctgagcgccctgcacagagcccccagacccaccagacccgacaaggccagaagactgggctacaaggccaagcagggcacctag

SEQ ID NO: 97387 - DNA, 438 bp, synthetic construct
  misc_feature 1..438: note = Description of Artificial Sequence: Synthetic coding sequence
  source 1..438: mol_type = other DNA
atgggcgcctacaagtacatccaggagctgtggagaaagaagcagagcgacgtgatgagattcctgctgagagtgagatgctggcagtacagacagctgagcgccctgcacagagcccccagacccaccagacccgacaaggccagaagactgggctacaaggccaagcagggctacgtgatctacagaatcagagtgagaagaggcggcagaaagagacccgtgcccaagggcgccacctacggcaagcccgtgcaccacggcgtgaaccagctgaagttcgccagaagcctgcagagcgtggccgaggagagagccggcagacactgcggcgccctgagagtgctgaacagctactggatggagagccacagccacagcggcggcagcgccgtgggccagagcagactgaccgccaccagcgtgagcagagtgtag

SEQ ID NO: 97388 - DNA, 495 bp, synthetic construct
  misc_feature 1..495: note = Description of Artificial Sequence: Synthetic coding sequence
  source 1..495: mol_type = other DNA
atgggcgcctacaagtacatccaggagctgtggagaaagaagcagagcgacgtgatgagattcctgctgagagtgagatgctggcagtacagacagctgagcgccctgcacagagcccccagacccaccagacccgacaaggccagaagactgggctacaaggccaagcagggctacgtgatctacagaatcagagtgagaagaggcggcagaaagagacccgtgcccaagggcgccacctacggcaagcccgtgcaccacggcgtgaaccagctgaagttcgccagaagcctgcagagcgtggccgaggagagagccggcagacactgcggcgccctgagagtgcacaagcacagagagatgagaggcctgaccagcgccggcagaaagagcagaggcctgggcaagggccacaagttccaccacaccatcggcggcagcagaagagccgcctggagaagaagaaacaccctgcagctgcacagatacagatag

SEQ ID NO: 97389 - DNA, 441 bp, synthetic construct
  misc_feature 1..441: note = Description of Artificial Sequence: Synthetic coding sequence
  source 1..441: mol_type = other DNA
atgcacatcagaaaggccaccaagtacctgaaggacgtgaccctgcagaagcagtgcgtgcccttcagaagatacaacggcggcgtgggcagatgcgcccaggccaagcagtggggctggacccagggcagatggcccaagaagagcgccgagttcctgctgcacatgctgaagaacgccgagagcaacgccgagctgaagggcctggacgtggacagcctggtgatcgagcacatccaggtgaacaaggcccccaagatgagaagaagaacctacagagcccacggcagaatcaacccctacatgagcagcccctgccacatcgagatgatcctgaccgagaaggagcagatcgtgcccaagcccgaggaggaggtggcccagaagaagaagatcagccagaagaagctgaagaagcagaagctgatggccagagagtag

SEQ ID NO: 97390 - DNA, 555 bp, synthetic construct
  misc_feature 1..555: note = Description of Artificial Sequence: Synthetic coding sequence
  source 1..555: mol_type = other DNA
atggtgagatacagcctggaccccgagaaccccaccaagagctgcaagagcagaggcagcaacctgagagtgcacttcaagaacaccagagagaccgcccaggccatcaagggcatgcacatcagaaaggccaccaagtacctgaaggacgtgaccctgcagaagcagtgcgtgcccttcagaagatacaacggcggcgtgggcagatgcgcccaggccaagcagtggggctggacccagggcagatggcccaagaagagcgccgagttcctgctgcacatgctgaagaacgccgagagcaacgccgagctgaagggcctggacgtggacagcctggtgatcgagcacatccaggtgaacaaggcccccaagatgagaagaagaacctacagagcccacggcagaatcaacccctacatgagcagcccctgccacatcgagatgatcctgaccgagaaggagcagatcgtgcccaagcccgaggaggaggtggcccagaagaagaagatcagccagaagaagctgaagaagcagaagctgatggccagagagtag

SEQ ID NO: 97391 - DNA, 555 bp, synthetic construct; identical to SEQ ID NO: 97390
  misc_feature 1..555: note = Description of Artificial Sequence: Synthetic coding sequence
  source 1..555: mol_type = other DNA

SEQ ID NO: 97392 - DNA, 573 bp, synthetic construct
  misc_feature 1..573: note = Description of Artificial Sequence: Synthetic coding sequence
  source 1..573: mol_type = other DNA
tgaccccagggcgtggacatcagacacaacaaggacagaaaggtgagaagaaaggagcccaagagccaggacatctacctgagactgctggtgaagctgtacagattcctggccagaagaaccaacagcaccttcaaccaggtggtgctgaagagactgttcatgagcagaaccaacagaccccccctgagcctgagcagaatgatcagaaagatgaagctgcccggcagagagaacaagaccgccgtggtggtgggcaccatcaccgacgacgtgagagtgcaggaggtgcccaagctgaaggtgtgcgccctgagagtgaccagcagagccagaagcagaatcctgagagccggcggcaagatcctgaccttcgaccagctggccctggacagccccaagggctgcggcaccgtgctgctgagcggccccagaaagggcagagaggtgtacagacacttcggcaaggcccccggcaccccccacagccacaccaagccctacgtgagaagcaagggcagaaagttcgagagagccagaggcagaagagccagcagaggctacaagaactag

SEQ ID NO: 97393 - DNA, 408 bp, synthetic construct
  misc_feature 1..408: note = Description of Artificial Sequence: Synthetic coding sequence
  source 1..408: mol_type = other DNA
atgggcgtggacatcagacacaacaaggacagaaaggtgagaagaaaggagcccaagagccaggacatctacctgagactgctggtgaagctgtacagattcctggccagaagaaccaacagcaccttcaaccaggtggtgctgaagagactgttcatgagcagaaccaacagaccccccctgagcctgagcagaatgatcagaaagatgaagctgcccggcagagagaacaagaccgccgtggtggtgggcaccatcaccgacgacgtgagagtgcaggaggtgcccaagctgaaggtgagctggagaggcctgggcagacccatcagacccctgctgtactgcgccgtgctgtgctgcgccgtgctgtgctgcctggtgcacccccagagctgccacagatggtag

SEQ ID NO: 97394 - DNA, 567 bp, synthetic construct
  misc_feature 1..567: note = Description of Artificial Sequence: Synthetic coding sequence
  source 1..567: mol_type = other DNA
atgggcgtggacatcagacacaacaaggacagaaaggtgagaagaaaggagcccaagagccaggacatctacctgagactgctggtgaagctgtacagattcctggccagaagaaccaacagcaccttcaaccaggtggtgctgaagagactgttcatgagcagaaccaacagaccccccctgagcctgagcagaatgatcagaaagatgaagctgcccggcagagagaacaagaccgccgtggtggtgggcaccatcaccgacgacgtgagagtgcaggaggtgcccaagctgaaggtgtgcgccctgagagtgaccagcagagccagaagcagaatcctgagagccggcggcaagatcctgaccttcgaccagctggccctggacagccccaagggctgcggcaccgtgctgctgagcggccccagaaagggcagagaggtgtacagacacttcggcaaggcccccggcaccccccacagccacaccaagccctacgtgagaagcaagggcagaaagttcgagagagccagaggcagaagagccagcagaggctacaagaactag

SEQ ID NO: 97395 - DNA, 480 bp, synthetic construct
  misc_feature 1..480: note = Description of Artificial Sequence: Synthetic coding sequence
  source 1..480: mol_type = other DNA
atgctgtacagattcctggccagaagaaccaacagcaccttcaaccaggtggtgctgaagagactgttcatgagcagaaccaacagaccccccctgagcctgagcagaatgatcagaaagatgaagctgcccggcagagagaacaagaccgccgtggtggtgggcaccatcaccgacgacgtgagagtgcaggaggtgcccaagctgaaggtgtgcgccctgagagtgaccagcagagccagaagcagaatcctgagagccggcggcaagatcctgaccttcgaccagctggccctggacagccccaagggctgcggcaccgtgctgctgagcggccccagaaagggcagagaggtgtacagacacttcggcaaggcccccggcaccccccacagccacaccaagccctacgtgagaagcaagggcagaaagttcgagagagccagaggcagaagagccagcagaggctacaagaactag

SEQ ID NO: 97396 - DNA, 795 bp, synthetic construct
  misc_feature 1..795: note = Description of Artificial Sequence: Synthetic coding sequence
  source 1..795: mol_type = other DNA
atgaacatcctgcccaagaagagctggcacgtgagaaacaaggacaacgtggccagagtgagaagagacgaggcccaggccagagaggaggagaaggagagagagagaagagtgctgctggcccagcaggaggccagaaccgagttcctgagaaagaaggccagacaccagaacagcctgcccgagctggaggccgccgaggccggcgcccccggcagcggccccgtggacctgttcagagagctgctggaggagggcaagggcgtgatcagaggcaacaaggagtacgaggaggagaagagacaggagaaggagagacaggagaaggccctgggcatcctgacctacctgggccagagcgccgccgaggcccagacccagcccccctggtaccagctgccccccggcagaggcggccccccccccggccccgcccccgacgagaagatcaagagcagactggaccccctgagagagatgcagaagcacctgggcaagaagagacagcacggcggcgacgagggcagcagaagcagaaaggagaaggagggcagcgagaagcagagacccaaggagccccccagcctggaccagctgagagccgagagactgagaagagaggccgccgagagaagcagagccgaggccctgctggccagagtgcagggcagagccctgcaggagggccagcccgaggaggacgagaccgacgacagaagaagaagatacaacagccagttcaacccccagctggccagaagacccagacagcaggacccccacctgacccactag

SEQ ID NO: 97397 - DNA, 465 bp, synthetic construct
  misc_feature 1..465: note = Description of Artificial Sequence: Synthetic coding sequence
  source 1..465: mol_type = other DNA
atgaaggccagcggcaccctgagagagtacaaggtggtgggcagatgcctgcccacccccaagtgccacaccccccccctgtacagaatgagaatcttcgcccccaaccacgtggtggccaagagcagattctggtacttcgtgagccagctgaagaagatgaagaagagcagcggcgagatcgtgtactgcggccaggtgttcgagaagagccccctgagagtgaagaacttcggcatctggctgagatacgacagcagaagcggcacccacaacatgtacagagagtacagagacctgaccaccgccggcgccgtgacccagtgctacagagacatgggcgccagacacagagccagagcccacagcatccagatcatgaaggtggaggagatcgccgccagcaagtgcagaagacagcacaagcccagattcaccaccaagagacccaacaccttcttctag

SEQ ID NO: 97398 - DNA, 1278 bp, synthetic construct
  misc_feature 1..1278: note = Description of Artificial Sequence: Synthetic coding sequence
  source 1..1278: mol_type = other DNA
atgggcggcggcgacctgaacctgaagaagagctggcacccccagaccctgagaaacgtggagaaggtgtggaaggccgagcagaagcacgaggccgagagaaagaagatcgaggagctgcagagagagctgagagaggagagagccagagaggagatgcagagatacgccgaggacgtgggcgccgtgaagaagaaggaggagaagctggactggatgtaccagggccccggcggcatggtgaacagagacgagtacctgctgggcagacccatcgacaagtacgtgttcgagaagatggaggagaaggaggccggctgcagcagcgagaccggcctgctgcccggcagcatcttcgcccccagcggcgccaacagcctgctggacatggccagcaagatcagagaggaccccctgttcatcatcagaaagaaggaggaggagaagaagagagaggtgctgaacaaccccgtgaagatgaagaagatcaaggagctgctgcagatgagcctggagaagaaggagaagaagaagaagaaggagaagaagaagaagcacaagaagcacaagcacagaagcagcagcagcgacagaagcagcagcgaggacgagcacagcgccggcagaagccagaagaagatggccaacagcagccccgtgctgagcaaggtgcccggctacggcctgcaggtgagaaacagcgacagaaaccagggcctgcagggccccctgaccgccgagcagaagagaggccacggcatgaagaaccacagcagaagcagaagcagcagccacagcccccccagacacgccagcaagaagagcaccagagaggccggcagcagagacagaagaagcagaagcctgggcagaagaagcagaagccccagacccagcaagctgcacaacagcaaggtgaacagaagagagaccggccagaccagaagccccagccccaagaaggaggtgtaccagagaagacacgcccccggctacaccagaaagctgagcgccgaggagctggagagaaagagacaggagatgatggagaacgccaagtggagagaggaggagagactgaacatcctgaagagacacgccaaggacgaggagagagagcagagactggagaagctggacagcagagacggcaagttcatccacagaatgaagctggagagcgccagcaccagcagcctggaggacagagtgaagagaaacatctacagcctgcagagaaccagcgtggccctggagaagaacttcatgaagagatag

SEQ ID NO: 97399 - DNA, 483 bp, synthetic construct
  misc_feature 1..483: note = Description of Artificial Sequence: Synthetic coding sequence
  source 1..483: mol_type = other DNA
atgaccaacaccaagggcaagagaagaggcaccagatacatgttcagcagacccttcagaaagcacggcgtggtgcccctggccacctacatgagaatctacaagaagggcgacatcgtggacatcaagggcatgggcaccgtgcagaagggcatgccccacaagtgctaccacggcaagaccggcagagtgtacaacgtgacccagcacgccgtgggcatcgtggtgaacaagcaggtgaagggcaagatcctggccaagagaatcaacgtgagaatcgagcacatcaagcacagcaagagcagagacagcttcctgaagagagtgaaggagaacgaccagaagaagaaggaggccaaggagaagggcacctgggtgcagctgaagagacagcccgccccccccagagaggcccacttcgtgagaaccaacggcaaggagcccgagctgctggagcccatcccctacgagttcatggcctag

SEQ ID NO: 97400 - DNA, 483 bp, synthetic construct; identical to SEQ ID NO: 97399
  misc_feature 1..483: note = Description of Artificial Sequence: Synthetic coding sequence
  source 1..483: mol_type = other DNA

SEQ ID NO: 97401 - DNA, 483 bp, synthetic construct; identical to SEQ ID NO: 97399
  misc_feature 1..483: note = Description of Artificial Sequence: Synthetic coding sequence
  source 1..483: mol_type = other DNA

SEQ ID NO: 97402 - DNA, 483 bp, synthetic construct; identical to SEQ ID NO: 97399
  misc_feature 1..483: note = Description of Artificial Sequence: Synthetic coding sequence
  source 1..483: mol_type = other DNA

SEQ ID NO: 97403 - DNA, 972 bp, synthetic construct
  misc_feature 1..972: note = Description of Artificial Sequence: Synthetic coding sequence
  source 1..972: mol_type = other DNA
atggccgcccccaagggcagcctgtgggtgagaacccagctgggcctgccccccctgctgctgctgaccatggccctggccggcggcagcggcaccgccagcgccgaggccttcgacagcgtgctgggcgacaccgccagctgccacagagcctgccagctgacctaccccctgcacacctaccccaaggaggaggagctgtacgcctgccagagaggctgcagactgttcagcatctgccagttcgtggacgacggcatcgacctgaacagaaccaagctggagtgcgagagcgcctgcaccgaggcctacagccagagcgacgagcagtacgcctgccacctgggctgccagaaccagctgcccttcgccgagctgagacaggagcagctgatgagcctgatgcccaagatgcacctgctgttccccctgaccctggtgagaagcttctggagcgacatgatggacagcgcccagagcttcatcaccagcagctggaccttctacctgcaggccgacgacggcaagatcgtgatcttccagagcaagcccgagatccagtacgccccccacctggagcaggagcccaccaacctgagagagagcagcctgagcaagatgagctacctgcagatgagaaacagccaggcccacagaaacttcctggaggacggcgagagcgacggcttcctgagatgcctgagcctgaacagcggctggatcctgaccaccaccctggtgctgagcgtgatggtgctgctgtggatctgctgcgccaccgtggccaccgccgtggagcagtacgtgcccagcgagaagctgagcatctacggcgacctggagttcatgaacgagcagaagctgaacagataccccgccagcagcctggtggtggtgagaagcaagaccgaggaccacgaggaggccggccccctgcccaccaaggtgaacctggcccacagcgagatctag

SEQ ID NO: 97404 - DNA, 276 bp, synthetic construct
  misc_feature 1..276: note = Description of Artificial Sequence: Synthetic coding sequence
  source 1..276: mol_type = other DNA
atggccggcagcagaagagagtgcagaagaggcggcagcagcggcgccaagttcagaatcagcctgggcctgcccgtgggcgccgtgatcaactgcgccgacaacaccggcgccaagaacctgtacatcatcagcgtgaagggcatcaagggcagactgaacagactgcccgccgccggcgtgggcgacatggtgatggccaccgtgaagaagggcaagcccgagctgagaaagaaggtgcaccccgccgtggtgatcagacagagaaagagctag

SEQ ID NO: 97405 - DNA, 423 bp, synthetic construct
  misc_feature 1..423: note = Description of Artificial Sequence: Synthetic coding sequence
  source 1..423: mol_type = other DNA
atgagcaagagaggcagaggcggcagcagcggcgccaagttcagaatcagcctgggcctgcccgtgggcgccgtgatcaactgcgccgacaacaccggcgccaagaacctgtacatcatcagcgtgaagggcatcaagggcagactgaacagactgcccgccgccggcgtgggcgacatggtgatggccaccgtgaagaagggcaagcccgagctgagaaagaaggtgcaccccgccgtggtgatcagacagagaaagagctacagaagaaaggacggcgtgttcctgtacttcgaggacaacgccggcgtgatcgtgaacaacaagggcgagatgaagggcagcgccatcaccggccccgtggccaaggagtgcgccgacctgtggcccagaatcgccagcaacgccggcagcatcgcctag

SEQ ID NO: 97406 - DNA, 345 bp, synthetic construct
  misc_feature 1..345: note = Description of Artificial Sequence: Synthetic coding sequence
  source 1..345: mol_type = other DNA
atgagcaagagaggcagaggcggcagcagcggcgccaagttcagaatcagcctgggcctgcccgtgggcgccgtgatcaactgcgccgacaacaccggcgccaagaacctgtacatcatcagcgtgaagggcatcaagggcagactgaacagactgcccgccgccggcgtgggcgacatggtgatggccaccgtgaagaagggcaagcccgagctgagaaagaaggtgctgctgtgccacaccggctggagcgccgtgacccccctgaagctgaccgtgaccctgaactgctggacctggaacccccccgccgtggccttcaagggcctgcagctgcaggtgtag

SEQ ID NO: 97407 - DNA, 423 bp, synthetic construct; identical to SEQ ID NO: 97405
  misc_feature 1..423: note = Description of Artificial Sequence: Synthetic coding sequence
  source 1..423: mol_type = other DNA

SEQ ID NO: 97408 - DNA, 477 bp, synthetic construct
  misc_feature 1..477: note = Description of Artificial Sequence: Synthetic coding sequence
  source 1..477: mol_type = other DNA
tgactggtgggcgccccctgccccagagccagccccgccccccccaaggccgaggccaaggccaaggccctgaaggccaagaaggccgtgctgaagggcgtgcacagccacaagaagaagaagatcagaaccagccccaccttcagaagacccaagaccctgagactgagaagacagcccaagtaccccagaaagagcgcccccagaagaaacaagctggaccactacgccatcatcaagttccccctgaccaccgagagcgccatgaagaagatcgaggacaacaacaccctggtgttcatcgtggacgtgaaggccaacaagcaccagatcaagcaggccgtgaagaagctgtacgacatcgacgtggccaaggtgaacaccctgatcagacccgacggcgagaagaaggcctacgtgagactggcccccgactacgacgccctggacgtggccaacaagatcggcatcatctag

SEQ ID NO: 97409 - DNA, 477 bp, synthetic construct
  misc_feature 1..477: note = Description of Artificial Sequence: Synthetic coding sequence
  source 1..477: mol_type = other DNA
atgagccccggcctggtggtgctgagatgggcccccgccccccccaaggccgaggccaaggccaaggccctgaaggccaagaaggccgtgctgaagggcgtgcacagccacaagaagaagaagatcagaaccagccccaccttcagaagacccaagaccctgagactgagaagacagcccaagtaccccagaaagagcgcccccagaagaaacaagctggaccactacgccatcatcaagttccccctgaccaccgagagcgccatgaagaagatcgaggacaacaacaccctggtgttcatcgtggacgtgaaggccaacaagcaccagatcaagcaggccgtgaagaagctgtacgacatcgacgtggccaaggtgaacaccctgatcagacccgacggcgagaagaaggcctacgtgagactggcccccgactacgacgccctggacgtggccaacaagatcggcatcatctag

SEQ ID NO: 97410 - DNA, 585 bp, synthetic construct
  misc_feature 1..585: note = Description of Artificial Sequence: Synthetic coding sequence
  source 1..585: mol_type = other DNA
atgcaccccctggtgggcgccccctgccccagagcctgcaaggagctggtgcccagcgccctgaccatcttcctgctggtgcacgtgcagcccggctacatcaccagacccagcctgagaagcgtggtgctgagatgggcccccgccccccccaaggccgaggccaaggccaaggccctgaaggccaagaaggccgtgctgaagggcgtgcacagccacaagaagaagaagatcagaaccagccccaccttcagaagacccaagaccctgagactgagaagacagcccaagtaccccagaaagagcgcccccagaagaaacaagctggaccactacgccatcatcaagttccccctgaccaccgagagcgccatgaagaagatcgaggacaacaacaccctggtgttcatcgtggacgtgaaggccaacaagcaccagatcaagcaggccgtgaagaagctgtacgacatcgacgtggccaaggtgaacaccctgatcagacccgacggcgagaagaaggcctacgtgagactggcccccgactacgacgccctggacgtggccaacaagatcggcatcatctag

SEQ ID NO: 97411 - DNA, 471 bp, synthetic construct
  misc_feature 1..471: note = Description of Artificial Sequence: Synthetic coding sequence
  source 1..471: mol_type = other DNA
atggcccccaaggccaagaaggaggcccccgccccccccaaggccgaggccaaggccaaggccctgaaggccaagaaggccgtgctgaagggcgtgcacagccacaagaagaagaagatcagaaccagccccaccttcagaagacccaagaccctgagactgagaagacagcccaagtaccccagaaagagcgcccccagaagaaacaagctggaccactacgccatcatcaagttccccctgaccaccgagagcgccatgaagaagatcgaggacaacaacaccctggtgttcatcgtggacgtgaaggccaacaagcaccagatcaagcaggccgtgaagaagctgtacgacatcgacgtggccaaggtgaacaccctgatcagacccgacggcgagaagaaggcctacgtgagactggcccccgactacgacgccctggacgtggccaacaagatcggcatcatctag

SEQ ID NO: 97412 - DNA, 474 bp, synthetic construct
  misc_feature 1..474: note = Description of Artificial Sequence: Synthetic coding sequence
  source 1..474: mol_type = other DNA
atgaaggtggagctgtgcagcttcagcggctacaagatctaccccggccacggcagaagatacgccagaaccgacggcaaggtgttccagttcctgaacgccaagtgcgagagcgccttcctgagcaagagaaaccccagacagatcaactggaccgtgctgtacagaagaaagcacaagaagggccagagcgaggagatccagaagaagagaaccagaagagccgtgaagttccagagagccatcaccggcgccagcctggccgacatcatggccaagagaaaccagaagcccgaggtgagaaaggcccagagagagcaggccatcagagccgccaaggaggccaagaaggccaagcaggccagcaagaagaccgccatggccgccgccaaggcccccaccaaggccgcccccaagcagaagatcgtgaagcccgtgaaggtgagcgcccccagagtgggcggcaagagatag

SEQ ID NO: 97413 - DNA, 453 bp, synthetic construct
  misc_feature 1..453: note = Description of Artificial Sequence: Synthetic coding sequence
  source 1..453: mol_type = other DNA
atgaaggtggagctgtgcagcttcagcggctacaagatctaccccggccacggcagaagatacgccagaaccgacggcaaggtgttccagttcctgaacgccaagtgcgagagcgccttcctgagcaagagaaaccccagacagatcaactggaccgtgctgtacagaagaaagcacaagaagggccagagcgaggagatccagaagaagagaaccagaagagccgtgaagttccagagagccatcaccggcgccagcctggccgacatcatggccaagagaaaccagaagcccgaggtgagaaaggcccagagagagcaggccatcagagccgccaaggaggccaagaaggccaagcaggccagcaagaagaccgccatggccgccgccaaggtgatcatgggcttcctgtacttcctggagcagtacaacagaaagatcttcttcttctag

SEQ ID NO: 97414 - DNA, 438 bp, synthetic construct
  misc_feature 1..438: note = Description of Artificial Sequence: Synthetic coding sequence
  source 1..438: mol_type = other DNA
atgaagttcaaccccttcgtgaccagcgacagaagcaagaacagaaagagacacttcaacgcccccagccacatcagaagaaagatcatgagcagccccctgagcaaggagctgagacagaagtacaacgtgagaagcatgcccatcagaaaggacgacgaggtgcaggtggtgagaggccactacaagggccagcagatcggcaaggtggtgcaggtgtacagaaagaagtacgtgatctacatcgagagagtgcagagagagaaggccaacggcaccaccgtgcacgtgggcatccaccccagcaaggtggtgatcaccagactgaagctggacaaggacagaaagaagatcctggagagaaaggccaagagcagacaggtgggcaaggagaagggcaagtacaaggaggagaccatcgagaagatgcaggagtag

SEQ ID NO: 97415 - DNA, 411 bp, synthetic construct
  misc_feature 1..411: note = Description of Artificial Sequence: Synthetic coding sequence
  source 1..411: mol_type = other DNA
atgggcaagttcatgaagcccggcaaggtggtgctggtgctggccggcagatacagcggcagaaaggccgtgatcgtgaagaacatcgacgacggcaccagcgacagaccctacagccacgccctggtggccggcatcgacagataccccagaaaggtgaccgccgccatgggcaagaagaagatcgccaagagaagcaagatcaagagcttcgtgaaggtgtacaactacaaccacctgatgcccaccagatacagcgtggacatccccctggacaagaccgtggtgaacaaggacgtgttcagagaccccgccctgaagagaaaggccagaagagaggccaaggtgaagttcgaggagagatacaagaccggcaagaacaagtggttcttccagaagctgagattctag

SEQ ID NO: 97416 - DNA, 447 bp, synthetic construct
  misc_feature 1..447: note = Description of Artificial Sequence: Synthetic coding sequence
  source 1..447: mol_type = other DNA
atgcccagcagactgagaaagaccagaaagctgagaggccacgtgagccacggccacggcagaatcggcaagcacagaaagcaccccggcggcagaggcaacgccggcggcctgcaccaccacagaatcaacttcgacaagtaccaccccggctacttcggcaaggtgggcatgaagcactaccacctgaagagaaaccagagcttctgccccaccgtgaacctggacaagctgtggaccctggtgagcgagcagaccagagtgaacgccgccaagaacaagaccggcgccgcccccatcatcgacgtggtgagaagcggctactacaaggtgctgggcaagggcaagctgcccaagcagcccgtgatcgtgaaggccaagttcttcagcagaagagccgaggagaagatcaagagcgtgggcggcgcctgcgtgctggtggcctag

SEQ ID NO: 97417 - DNA, 327 bp, synthetic construct
  misc_feature 1..327: note = Description of Artificial Sequence: Synthetic coding sequence
  source 1..327: mol_type = other DNA
atgcccagcagactgagaaagaccagaaagctgagaggccacgtgagccacggccacggcagaatcggcaagcacagaaagcaccccggcggcagaggcaacgccggcggcctgcaccaccacagaatcaacttcgacaagtaccaccccggctacttcggcaaggtgggcatgaagcactaccacctgaagagaaaccagagcttctgccccaccgtgaacctggacaagctgtggaccctggtgagcgagcagaccagagtgaacgccgccaagaacaagaccggcgccgcccccatcatcgacgtggtgagaagcgtgagctag

SEQ ID NO: 97418 - DNA, 414 bp, synthetic construct
  misc_feature 1..414: note = Description of Artificial Sequence: Synthetic coding sequence
  source 1..414: mol_type = other DNA
atgagcgcccacctgcagtggatggtggtgagaaactgcagcagcttcctgatcaagagaaacaagcagacctacagcaccgagcccaacaacctgaaggccagaaacagcttcagatacaacggcctgatccacagaaagaccgtgggcgtggagcccgccgccgacggcaagggcgtggtggtggtgatcaagagaagaagcggccagagaaagcccgccaccagctacgtgagaaccaccatcaacaagaacgccagagccaccctgagcagcatcagacacatgatcagaaagaacaagtacagacccgacctgagaatggccgccatcagaagagccagcgccatcctgagaagccagaagcccgtgatggtgaagagaaagagaaccagacccaccaagagcagctag

SEQ ID NO: 97419 - DNA, 210 bp, synthetic construct
  misc_feature 1..210: note = Description of Artificial Sequence: Synthetic coding sequence
  source 1..210: mol_type = other DNA
atgagcgcccacctgcagtggatggtggtgagaaactgcagcagcttcctgatcaagagaaacaagcagacctacagcaccgagcccaacaacctgaaggccagaaacagcttcagatacaacggcctgatccacagaaagaccgtgggcgtggagcccgccgccgacggcaagggcgtggtggtggtgatcaagagaagaagcgagtag

SEQ ID NO: 97420 - DNA, 264 bp, synthetic construct
  misc_feature 1..264: note = Description of Artificial Sequence: Synthetic coding sequence
  source 1..264: mol_type = other DNA
atgagcgcccacctgcagtggatggtggtgagaaactgcagcagcttcctgatcaagagaaacaagcagacctacagcaccgagcccaacaacctgaaggccagaaacagcttcagatacaacggcctgatccacagaaagaccgtgggcgtggagcccgccgccgacggcaagggcgtggtggtggtgatcaagagaagaagcggcgagttctgcctggtgtgggccagagagagacccctgagcagagtgtgggagctgtag

SEQ ID NO: 97421 - DNA, 510 bp, synthetic construct
  misc_feature 1..510: note = Description of Artificial Sequence: Synthetic coding sequence
  source 1..510: mol_type = other DNA
atgagcgcccacctgcagtggatggtggtgagaaactgcagcagcttcctgatcaagagaaacaagcagacctacagcaccgagcccaacaacctgaaggccagaaacagcttcagatacaacggcctgatccacagaaagaccgtgggcgtggagcccgccgccgacggcaagggcgtggtggtggtgatcaagagaagaagcggccagagaaagcccgccaccagctacgtgagaaccaccatcaacaagaacgccagagccaccctgagcagcatcagacacatgatcagaaagaacaagtacagacccgacctgagaatggacatgctggccagcaccggcagcggcctgtgctgcagcgtggccgtgcagccctgggccagcagcagcaccagcctgtgcctgagaaccctgatctgcaacatgagagtggacagaccctactacagcggcctgatgagaagactgaacgtgcagaacctgctggactgcgcccacaagagctag

SEQ ID NO: 97422 - DNA, 510 bp, synthetic construct; identical to SEQ ID NO: 97421
  misc_feature 1..510: note = Description of Artificial Sequence: Synthetic coding sequence
  source 1..510: mol_type = other DNA

SEQ ID NO: 97423 - DNA, 414 bp, synthetic construct; identical to SEQ ID NO: 97418
  misc_feature 1..414: note = Description of Artificial Sequence: Synthetic coding sequence
  source 1..414: mol_type = other DNA

SEQ ID NO: 97424 - DNA, 492 bp, synthetic construct
  misc_feature 1..492: note = Description of Artificial Sequence: Synthetic coding sequence
  source 1..492: mol_type = other DNA
atgagcgcccacctgcagtggatggtggtgagaaactgcagcagcttcctgatcaagagaaacaagcagacctacagcaccgagcccaacaacctgaaggccagaaacagcttcagatacaacggcctgatccacagaaagaccgtgggcgtggagcccgccgccgacggcaagggcgtggtggtggtgatcaagagaagaagcggccagagaaagcccgccaccagctacgtgagaaccaccatcaacaagaacgccagagccaccctgagcagcatcagacacatgatcagaaagaacaagtacagacccgacctgagaatggtgagctggggcctgggcatcagactgggcgagaccggccagtgctgcggcgagggcccccccaccaccggctgcaacatgggctggagaggcatggacagctgcttccagcccaccccccacacccagcactggcccagaggcagactggtggagtgcatgggctag

SEQ ID NO: 97425 - DNA, 480 bp, synthetic construct
  misc_feature 1..480: note = Description of Artificial Sequence: Synthetic coding sequence
  source 1..480: mol_type = other DNA
atggccaagagcaagaaccacaccacccacaaccagagcagaaagtggcacagaaacggcatcaagaagcccagaagccagagatacgagagcctgaagggcgtggaccccaagttcctgagaaacatgagattcgccaagaagcacaacaagaagggcctgaagaagatgcaggccaacaacgccaaggccatgagcgccagagccgaggccatcaaggccctggtgaagcccaaggaggtgaagcccaagatccccaagggcgtgagcagaaagctggacagactggcctacatcgcccaccccaagctgggcaagagagccagagccagaatcgccaagggcctgagactgtgcagacccaaggccaaggccaaggccaaggccaaggaccagaccaaggcccaggccgccgcccccgccagcgtgcccgcccaggcccccaagagaacccaggcccccaccaaggccagcgagtag

SEQ ID NO: 97426 - DNA, 480 bp, synthetic construct; identical to SEQ ID NO: 97425
  misc_feature 1..480: note = Description of Artificial Sequence: Synthetic coding sequence
  source 1..480: mol_type = other DNA

SEQ ID NO: 97427 - DNA, 480 bp, synthetic construct; identical to SEQ ID NO: 97425
  misc_feature 1..480: note = Description of Artificial Sequence: Synthetic coding sequence
  source 1..480: mol_type = other DNA

SEQ ID NO: 97428 - DNA, 480 bp, synthetic construct; identical to SEQ ID NO: 97425
  misc_feature 1..480: note = Description of Artificial Sequence: Synthetic coding sequence
  source 1..480: mol_type = other DNA

SEQ ID NO: 97429 - DNA, 480 bp, synthetic construct; identical to SEQ ID NO: 97425
  misc_feature 1..480: note = Description of Artificial Sequence: Synthetic coding sequence
  source 1..480: mol_type = other DNA

SEQ ID NO: 97430 - DNA, 480 bp, synthetic construct; identical to SEQ ID NO: 97425
  misc_feature 1..480: note = Description of Artificial Sequence: Synthetic coding sequence
  source 1..480: mol_type = other DNA

SEQ ID NO: 97431 - DNA, 648 bp, synthetic construct
  misc_feature 1..648: note = Description of Artificial Sequence: Synthetic coding sequence
  source 1..648: mol_type = other DNA
atgcccttccaccccgtgaccgccgccctgatgtacagaggcatctacaccgtgcccaacctgctgagcgagcagagacccgtggacatccccgaggacgagctggaggagatcagagaggccttcaaggtgttcgacagagacggcaacggcttcatcagcaagcaggagctgggcaccgccatgagaagcctgggctacatgcccaacgaggtggagctggaggtgatcatccagagactggacatggacggcgacggccaggtggacttcgaggagttcgtgaccctgctgggccccaagctgagcaccagcggcatccccgagaagttccacggcaccgacttcgacaccgtgttctggaagtgcgacatgcagaagctgaccgtggacgagctgaagagactgctgtacgacaccttctgcgagcacctgagcatgaaggacatcgagaacatcatcatgaccgaggaggagagccacctgggcaccgccgaggagtgccccgtggacgtggagacctgcagcaaccagcagatcagacagacctgcgtgagaaagagcctgatctgcgccttcgccatcgccttcatcatcagcgtgatgctgatcgccgccaaccaggtgctgagaagcggcatgaagtag

SEQ ID NO: 97432 - DNA, 1056 bp, synthetic construct
  misc_feature 1..1056: note = Description of Artificial Sequence: Synthetic coding sequence
  source 1..1056: mol_type = other DNA
atgacccacatcgtgagagaggtggacagacccggcagcaaggtgaacaagaaggaggtggtggaggccgtgaccatcgtggagaccccccccatggtggtggtgggcatcgtgggctacgtggagacccccagaggcctgagaaccttcaagaccgtgttcgccgagcacatcagcgacgagtgcaagagaagattctacaagaactggcacaagagcaagaagaaggccttcaccaagtactgcaagaagtggcaggacgaggacggcaagaagcagctggagaaggacttcagcagcatgaagaagtactgccaggtgatcagagtgatcgcccacacccagatgagactgctgcccctgagacagaagaaggcccacctgatggagatccaggtgaacggcggcaccgtggccgagaagctggactgggccagagagagactggagcagcaggtgcccgtgaaccaggtgttcggccaggacgagatgatcgacgtgatcggcgtgaccaagggcaagggctacaagggcgtgaccagcagatggcacaccaagaagctgcccagaaagacccacagaggcctgagaaaggtggcctgcatcggcgcctggcaccccgccagagtggccttcagcgtggccagagccggccagaagggctaccaccacagaaccgagatcaacaagaagatctacaagatcggccagggctacctgatcaaggacggcaagctgatcaagaacaacgccagcaccgactacgacctgagcgacaagagcatcaaccccctgggcggcttcgtgcactacggcgaggtgaccaacgacttcgtgatgctgaagggctgcgtggtgggcaccaagaagagagtgctgaccctgagaaagagcctgctggtgcagaccaagagaagagccctggagaagatcgacctgaagttcatcgacaccaccagcaagttcggccacggcagattccagaccatggaggagaagaaggccttcatgggccccctgaagaaggacagaatcgccaaggaggagggcgcctag

SEQ ID NO: 97433 - DNA, 348 bp, synthetic construct
  misc_feature 1..348: note = Description of Artificial Sequence: Synthetic coding sequence
  source 1..348: mol_type = other DNA
atggtggccgccaagaagaccaagaagagcctggagagcatcaacagcagactgcagctggtgatgaagagcggcaagtacgtgctgggctacaagcagaccctgaagatgatcagacagggcaaggccaagctggtgatcctggccaacaactgccccgccctgagaaagagcgagatcgagtactacgccatgctggccaagaccggcgtgcaccactacagcggcaacaacatcgagctgggcaccgcctgcggcaagtactacagagtgtgcaccctggccatcatcgaccccggcgacagcgacatcatcagaagcatgcccgagcagaccggcgagaagtag

SEQ ID NO: 97434 - DNA, 348 bp, synthetic construct; identical to SEQ ID NO: 97433
  misc_feature 1..348: note = Description of Artificial Sequence: Synthetic coding sequence
  source 1..348: mol_type = other DNA

SEQ ID NO: 97435 - DNA, 345 bp, synthetic construct
  misc_feature 1..345: note = Description of Artificial Sequence: Synthetic coding sequence
  source 1..345: mol_type = other DNA
atggtggccgccaagaagaccaagaagagcctggagagcatcaacagcagactgcagctggtgatgaagagcggcaagtacgtgctgggctacaagcagaccctgaagatgatcagacagggcaaggccaagctggtgatcctggccaacaactgccccgccctgagaaagagcgagatcgagtactacgccatgctggccaagaccggcgtgcaccactacagcggcaacaacatcgagctgggcaccgcctgcggcaagtactacagagtgtgcaccctggccatcatcgaccccggcgacagcgacatcatcagaagcatgcccgagcagaccggcgagtag

SEQ ID NO: 97436 - DNA, 285 bp, synthetic construct
  misc_feature 1..285: note = Description of Artificial Sequence: Synthetic coding sequence
  source 1..285: mol_type = other DNA
atgagcggcagactgtggagcaaggccatcttcgccggctacaagagaggcctgagaaaccagagagagcacaccgccctgctgaagatcgagggcgtgtacgccagagacgagaccgagttctacctgggcaagagatgcgcctacgtgtacaaggccaagaacaacaccgtgacccccggcggcaagcccaacaagaccagagtgatctggggcaaggtgaccagagcccacggcaacagcggcatggtgagagccaagttcagaagcaacctgcccgcctag

SEQ ID NO: 97437 - DNA, 333 bp, synthetic construct
  misc_feature 1..333: note = Description of Artificial Sequence: Synthetic coding sequence
  source 1..333: mol_type = other DNA
atgagcggcagactgtggagcaaggccatcttcgccggctacaagagaggcctgagaaaccagagagagcacaccgccctgctgaagatcgagggcgtgtacgccagagacgagaccgagttctacctgggcaagagatgcgcctacgtgtacaaggccaagaacaacaccgtgacccccggcggcaagcccaacaagaccagagtgatctggggcaaggtgaccagagcccacggcaacagcggcatggtgagagccaagttcagaagcaacctgcccgccaaggccatcggccacagaatcagagtgatgctgtaccccagcagaatctag

SEQ ID NO: 97438 - DNA, 333 bp, synthetic construct; identical to SEQ ID NO: 97437
  misc_feature 1..333: note = Description of Artificial Sequence: Synthetic coding sequence
  source 1..333: mol_type = other DNA

SEQ ID NO: 97439 - DNA, 396 bp, synthetic construct
  misc_feature 1..396: note = Description of Artificial Sequence: Synthetic coding sequence
  source 1..396: mol_type = other DNA
tgactgcccttcgccagcagattcctgagcttcagagccgacagcgcccacgccagcatggtgaacgtgcccaagaccagaagaaccttctgcaagaagtgcggcaagcaccagccccacaaggtgacccagtacaagaagggcaaggacagcctgtacgcccagggcaagagaagatacgacagaaagcagagcggctacggcggccagaccaagcccatcttcagaaagaaggccaagaccaccaagaagatcgtgctgagactggagtgcgtggagcccaactgcagaagcaagagaatgctggccatcaagagatgcaagcacttcgagctgggcggcgacaagaagagaaaggtgtacaactacggctggaaggtgcagagcttcagctag

SEQ ID NO: 97440 - DNA, 429 bp, synthetic construct
  misc_feature 1..429: note = Description of Artificial Sequence: Synthetic coding sequence
  source 1..429: mol_type = other DNA
atgatcgcccccaccgacagccacgaggaggtgagaagcggcaccagctacatcctgcccttcgccagcagattcctgagcttcagagccgacagcgcccacgccagcatggtgaacgtgcccaagaccagaagaaccttctgcaagaagtgcggcaagcaccagccccacaaggtgacccagtacaagaagggcaaggacagcctgtacgcccagggcaagagaagatacgacagaaagcagagcggctacggcggccagaccaagcccatcttcagaaagaaggccaagaccaccaagaagatcgtgctgagactggagtgcgtggagcccaactgcagaagcaagagaatgctggccatcaagagatgcaagcacttcgagctgggcggcgacaagaagagaaagggccaggtgatccagttctag

SEQ ID NO: 97441 - DNA, 321 bp, synthetic construct
  misc_feature 1..321: note = Description of Artificial Sequence: Synthetic coding sequence
  source 1..321: mol_type = other DNA
atggtgaacgtgcccaagaccagaagaaccttctgcaagaagtgcggcaagcaccagccccacaaggtgacccagtacaagaagggcaaggacagcctgtacgcccagggcaagagaagatacgacagaaagcagagcggctacggcggccagaccaagcccatcttcagaaagaaggccaagaccaccaagaagatcgtgctgagactggagtgcgtggagcccaactgcagaagcaagagaatgctggccatcaagagatgcaagcacttcgagctgggcggcgacaagaagagaaagggccaggtgatccagttctag

SEQ ID NO: 97442 - DNA, 321 bp, synthetic construct
  misc_feature 1..321: note = Description of Artificial Sequence: Synthetic coding sequence
  source 1..321: mol_type = other DNA
atggtgaacgtgcccaagaccagaagaaccttctgcaagaagtgcggcaagcaccagccccacaaggtgacccagtacaagaagggcaaggacagcctgtacgcccagggcagaagaagatacgacagaaagcagagcggctacggcggccagaccaagcccatcttcagaaagaaggccaagaccaccaagaagatcgtgctgagactggagtgcgtggagcccaactgcagaagcaagagaatgctggccatcaagagatgcaagcacttcgagctgggcggcgacaagaagagaaagggccaggtgatccagttctag

SEQ ID NO: 97443 - DNA, 294 bp, synthetic construct
  misc_feature 1..294: note = Description of Artificial Sequence: Synthetic coding sequence
  source 1..294: mol_type = other DNA
atgaccaagggcaccagcagcttcggcaagagaagaaacaagacccacaccctgtgcagaagatgcggcagcaaggcctaccacctgcagaagagcacctgcggcaagtgcggctaccccgccaagagaaagagaaagtacaactggagcgccaaggccaagagaagaaacaccaccggcaccggcagaatgagacacctgaagatcgtgtacagaagattcagacacggcttcagagagggcaccacccccaagcccaagagagccgccgtggccgccagcagcagcagctag

SEQ ID NO: 97444 - DNA, 207 bp, synthetic construct
  misc_feature 1..207: note = Description of Artificial Sequence: Synthetic coding sequence
  source 1..207: mol_type = other DNA
atggtgaagaagatcgagatcagccagcacgccaagtacacctgcagcttctgcggcaagaccaagatgaagagaagagccgtgggcatctggcactgcggcagctgcatgaagaccgtggccggcggcgcctggacctacaacaccaccagcgccgtgaccgtgaagagcgccatcagaagactgaaggagctgaaggaccagtag

SEQ ID NO: 97445 - DNA, 279 bp, synthetic construct
  misc_feature 1..279: note = Description of Artificial Sequence: Synthetic coding sequence
  source 1..279: mol_type = other DNA
atggccaagagaaccaagaaggtgggcatcgtgggcaagtacggcaccagatacggcgccagcctgagaaagatggtgaagaagatcgagatcagccagcacgccaagtacacctgcagcttctgcggcaagaccaagatgaagagaagagccgtgggcatctggcactgcggcagctgcatgaagaccgtggccggcggcgcctggacctacaacaccaccagcgccgtgaccgtgaagagcgccatcagaagactgaaggagctgaaggaccagtag

SEQ ID NO: 97446 - DNA, 213 bp, synthetic construct
  misc_feature 1..213: note = Description of Artificial Sequence: Synthetic coding sequence
  source 1..213: mol_type = other DNA
atgcccagaaagatcgaggagatcaaggacttcctgctgaccgccagaagaaaggacgccaagagcgtgaagatcaagaagaacaaggacaacgtgaagttcaaggtgagatgcagcagatacctgtacaccctggtgatcaccgacaaggagaaggccgagaagctgaagcagagcctgccccccggcctggccgtgaaggagctgaagtag

SEQ ID NO: 97447 - DNA, 213 bp, synthetic construct; identical to SEQ ID NO: 97446
  misc_feature 1..213: note = Description of Artificial Sequence: Synthetic coding sequence
  source 1..213: mol_type = other DNA

SEQ ID NO: 97448 - DNA, 213 bp, synthetic construct; identical to SEQ ID NO: 97446
  misc_feature 1..213: note = Description of Artificial Sequence: Synthetic coding sequence
  source 1..213: mol_type = other DNA

SEQ ID NO: 97449 - DNA, 156 bp, synthetic construct
  misc_feature 1..156: note = Description of Artificial Sequence: Synthetic coding sequence
  source 1..156: mol_type = other DNA
atgagcagccacaagaccttcaccatcaagagattcctggccaagaagcagaagcagaacagacccatcccccagtggatccagatgaagcccggcagcaagatcagatacaacagcaagagaagacactggagaagaaccaagctgggcctgtag

SEQ ID NO: 97450 - DNA, 156 bp, synthetic construct; identical to SEQ ID NO: 97449
  misc_feature 1..156: note = Description of Artificial Sequence: Synthetic coding sequence
  source 1..156: mol_type = other DNA

SEQ ID NO: 97451 - DNA, 156 bp, synthetic construct; identical to SEQ ID NO: 97449
  misc_feature 1..156: note = Description of Artificial Sequence: Synthetic coding sequence
  source 1..156: mol_type = other DNA

SEQ ID NO: 97452 - DNA, 1284 bp, synthetic construct
  misc_feature 1..1284: note = Description of Artificial Sequence: Synthetic coding sequence
  source 1..1284: mol_type = other DNA
atggcctgcgccagacccctgatcagcgtgtacagcgagaagggcgagagcagcggcaagaacgtgaccctgcccgccgtgttcaaggcccccatcagacccgacatcgtgaacttcgtgcacaccaacctgagaaagaacaacagacagccctacgccgtgagcgagctggccggccaccagaccagcgccgagagctggggcaccggcagagccgtggccagaatccccagagtgagaggcggcggcacccacagaagcggccagggcgccttcggcaacatgtgcagaggcggcagaatgttcgcccccaccaagacctggagaagatggcacagaagagtgaacaccacccagaagagatacgccatctgcagcgccctggccgccagcgccctgcccgccctggtgatgagcaagggccacagaatcgaggaggtgcccgagctgcccctggtggtggaggacaaggtggagggctacaagaagaccaaggaggccgtgctgctgctgaagaagctgaaggcctggaacgacatcaagaaggtgtacgccagccagagaatgagagccggcaagggcaagatgagaaacagaagaagaatccagagaagaggcccctgcatcatctacaacgaggacaacggcatcatcaaggccttcagaaacatccccggcatcaccctgctgaacgtgagcaagctgaacatcctgaagctggcccccggcggccacgtgggcagattctgcatctggaccgagagcgccttcagaaagctggacgagctgtacggcacctggagaaaggccgccagcctgaagagcaactacaacctgcccatgcacaagatgatcaacaccgacctgagcagaatcctgaagagccccgagatccagagagccctgagagcccccagaaagaagatccacagaagagtgctgaagaagaaccccctgaagaacctgagaatcatgctgaagctgaacccctacgccaagaccatgagaagaaacaccatcctgagacaggccagaaaccacaagctgagagtggacaaggccgccgccgccgccgccgccctgcaggccaagagcgacgagaaggccgccgtggccggcaagaagcccgtggtgggcaagaagggcaagaaggccgccgtgggcgtgaagaagcagaagaagcccctggtgggcaagaaggccgccgccaccaagaagcccgcccccgagaagaagcccgccgagaagaagcccaccaccgaggagaagaagcccgccgcctag

SEQ ID NO: 97453 - DNA, 1221 bp, synthetic construct
  misc_feature 1..1221: note = Description of Artificial Sequence: Synthetic coding sequence
  source 1..1221: mol_type = other DNA
atggcctgcgccagacccctgatcagcgtgtacagcgagaagggcgagagcagcggcaagaacgtgaccctgcccgccgtgttcaaggcccccatcagacccgacatcgtgaacttcgtgcacaccaacctgagaaagaacaacagacagccctacgccgtgagcgagctggccggccaccagaccagcgccgagagctggggcaccggcagagccgtggccagaatccccagagtgagaggcggcggcacccacagaagcggccagggcgccttcggcaacatgtgcagaggcggcagaatgttcgcccccaccaagacctggagaagatggcacagaagagtgaacaccacccagaagagatacgccatctgcagcgccctggccgccagcgccctgcccgccctggtgatgagcaagggccacagaatcgaggaggtgcccgagctgcccctggtggtggaggacaaggtggagggctacaagaagaccaaggaggccgtgctgctgctgaagaagctgaaggcctggaacgacatcaagaaggtgtacgccagccagagaatgagagccggcaagggcaagatgagaaacagaagaagaatccagagaagaggcccctgcatcatctacaacgaggacaacggcatcatcaaggccttcagaaacatccccggcatcaccctgctgaacgtgagcaagctgaacatcctgaagctggcccccggcggccacgtgggcagattctgcatctggaccgagagcgccttcagaaagctggacgagctgtacggcacctggagaaaggccgccagcctgaagagcaactacaacctgcccatgcacaagatgatcaacaccgacctgagcagaatcctgaagagccccgagatccagagagccctgagagcccccagaaagaagatccacagaagagtgctgaagaagaaccccctgaagaacctgagaatcatgctgaagctgaacccctacgccaagaccatgagaagaaacaccatcctgagacaggccagaaaccacaagctgagagtggacaaggccgccgccgccgccgccgccctgcaggccaagagcgacgagaaggccgccgtggccggcaagaagcccgtggtgggcaagaagggcaagaaggccgccgtgggcgagaagaagcccgccgagaagaagcccaccaccgaggagaagaagcccgccgcctag

SEQ ID NO: 97454 - DNA, 456 bp, synthetic construct
  misc_feature 1..456: note = Description of Artificial Sequence: Synthetic coding sequence
  source 1..456: mol_type = other DNA
atggcctgcgccagacccctgatcagcgtgtacagcgagaagggcgagagcagcggcaagaacgtgaccctgcccgccgtgttcaaggcccccatcagacccgacatcgtgaacttcgtgcacaccaacctgagaaagaacaacagacagccctacgccgtgagcgagctggccggccaccagaccagcgccgagagctggggcaccggcagagccgtggccagaatccccagagtgagaggcggcggcacccacagaagcggccagggcgccttcggcaacatgtgcagaggcggcagaatgttcgcccccaccaagacctggagaagatggcacagaagagtgaacaccacccagaagctggagaaccacgtggaggccaagcccatctgcaaggaccacgcccccgagcaccacagcagccccggccaggagagccaggcccccggcggctag

SEQ ID NO: 97455 - DNA, 78 bp, synthetic construct
  misc_feature 1..78: note = Description of Artificial Sequence: Synthetic coding sequence
  source 1..78: mol_type = other DNA
atgagagccaagtggagaaagaagagaatgagaagactgaagagaaagagaagaaagatgagacagagaagcaagtag

SEQ ID NO: 97456 - DNA, 78 bp, synthetic construct; identical to SEQ ID NO: 97455
  misc_feature 1..78: note = Description of Artificial Sequence: Synthetic coding sequence
  source 1..78: mol_type = other DNA

SEQ ID NO: 97457 - DNA, 381 bp, synthetic construct
  misc_feature 1..381: note = Description of Artificial Sequence: Synthetic coding sequence
  source 1..381: mol_type = other DNA
atgatcgtgagagtgaccaacagagacatcatctgccagatcgcctacgccagaatcgagggcgacatgatcgtgtgcgccgcctacgcccacgagctgcccaagtacggcgtgaaggtgggcctgaccaactacgccgccgcctactgcaccggcctgctgctggccagaagactgctgaacagattcggcatggacaagatctacgagggccaggtggaggtgaccggcgacgagtacaacgtggagagcatcgacggccagcccggcgccttcacctgctacctggacgccggcctggccagaaccaccaccggcaacaaggtgttcggcgccctgaagggcgccgtggacggcggcctgagcatcccccacagatag

SEQ ID NO: 97458 - DNA, 894 bp, synthetic construct
  misc_feature 1..894: note = Description of Artificial Sequence: Synthetic coding sequence
  source 1..894: mol_type = other DNA
atgggcttcgtgaaggtggtgaagaacaaggcctacttcaagagataccaggtgaagttcagaagaagaagagagggcaagaccgactactacgccagaaagagactggtgatccaggacaagaacaagtacaacacccccaagtacagaatgatcgtgagagtgaccaacagagacatcatctgccagatcgcctacgccagaatcgagggcgacatgatcgtgtgcgccgcctacgcccacgagctgcccaagtacggcgtgaaggtgggcctgaccaactacgccgccgcctactgcaccggcctgctgctggccagaagactgctgaacagattcggcatggacaagatctacgagggccaggtggaggtgaccggcgacgagtacaacgtggagagcatcgacggccagcccggcgccttcacctgctacctggacgccggcctggccagaaccaccaccggcaacaaggtgttcggcgccctgaagggcgccgtggacggcggcctgagcatcccccacagcaccaagagattccccggctacgacagcgagagcaaggagttcaacgccgaggtgcacagaaagcacatcatgggccagaacgtggccgactacatgagatacctgatggaggaggacgaggacgcctacaagaagcagttcagccagtacatcaagaacagcgtgacccccgacatgatggaggagatgtacaagaaggcccacgccgccatcagagagaaccccgtgtacgagaagaagcccaagaaggaggtgaagaagaagagatggaacagacccaagatgagcctggcccagaagaaggacagagtggcccagaagaaggccagcttcctgagagcccaggagagagccgccgagagctag

SEQ ID NO: 97459 - DNA, 744 bp, synthetic construct
  misc_feature 1..744: note = Description of Artificial Sequence: Synthetic coding sequence
  source 1..744: mol_type = other DNA
atgatcgtgagagtgaccaacagagacatcatctgccagatcgcctacgccagaatcgagggcgacatgatcgtgtgcgccgcctacgcccacgagctgcccaagtacggcgtgaaggtgggcctgaccaactacgccgccgcctactgcaccggcctgctgctggccagaagactgctgaacagattcggcatggacaagatctacgagggccaggtggaggtgaccggcgacgagtacaacgtggagagcatcgacggccagcccggcgccttcacctgctacctggacgccggcctggccagaaccaccaccggcaacaaggtgttcggcgccctgaagggcgccgtggacggcggcctgagcatcccccacagcaccaagagattccccggctacgacagcgagagcaaggagttcaacgccgaggtgcacagaaagcacatcatgggccagaacgtggccgactacatgagatacctgatggaggaggacgaggacgcctacaagaagcagttcagccagtacatcaagaacagcgtgacccccgacatgatggaggagatgtacaagaaggcccacgccgccatcagagagaaccccgtgtacgagaagaagcccaagaaggaggtgaagaagaagagatggaacagacccaagatgagcctggcccagaagaaggacagagtggcccagaagaaggccagcttcctgagagcccaggagagagccgccgagagctag

SEQ ID NO: 97460 - DNA, 867 bp, synthetic construct
  misc_feature 1..867: note = Description of Artificial Sequence: Synthetic coding sequence
  source 1..867: mol_type = other DNA
atggccggcgagaaggtggagaagcccgacaccaaggagaagaagcccgaggccaagaaggtggacgccggcggcaaggtgaagaagggcaacctgaaggccaagaagcccaagaagggcaagccccactgcagcagaaaccccgtgctggtgagaggcatcggcagatacagcagaagcgccatgtacagcagaaaggccatgtacaagagaaagtacagcgccgccaagagcaaggtggagaagaagaagaaggagaaggtgctggccaccgtgaccaagcccgtgggcggcgacaagaacggcggcaccagagtggtgaagctgagaaagatgcccagatactaccccaccgaggacgtgcccagaaagctgctgagccacggcaagaagcccttcagccagcacgtgagaaagctgagagccagcatcacccccggcaccatcctgatcatcctgaccggcagacacagaggcaagagagtggtgttcctgaagcagctggccagcggcctgctgctggtgaccggccccctggtgctgaacagagtgcccctgagaagaacccaccagaagttcgtgatcgccaccagcaccaagatcgacatcagcaacgtgaagatccccaagcacctgaccgacgcctacttcaagaagaagaagctgagaaagcccagacaccaggagggcgagatcttcgacaccgagaaggagaagtacgagatcaccgagcagagaaagatcgaccagaaggccgtggacagccagatcctgcccaagatcaaggccatcccccagctgcagggctacctgagaagcgtgttcgccctgaccaacggcatctacccccacaagctggtgttctag

SEQ ID NO: 97461 - DNA, 867 bp, synthetic construct; identical to SEQ ID NO: 97460
  misc_feature 1..867: note = Description of Artificial Sequence: Synthetic coding sequence
  source 1..867: mol_type = other DNA

SEQ ID NO: 97462 - DNA, 318 bp, synthetic construct
  misc_feature 1..318: note = Description of Artificial Sequence: Synthetic coding sequence
  source 1..318: mol_type = other DNA
atggccggcgagaaggtggagaagcccgacaccaaggagaagaagcccgaggccaagaaggtggacgccggcggcaaggtgaagaagggcaacctgaaggccaagaagcccaagaagggcaagccccactgcagcagaaaccccgtgctggtgagaggcatcggcagatacagcagaagcgccatgtacagcagaaaggccatgtacaagagaaagtacagcgccgccaagagcaaggtggagaagaagaagaaggagaaggtgctggccaccgtgaccaagcccgtgggcggcgacaagaacggcggcaccagatag

SEQ ID NO: 97463 - DNA, 219 bp, synthetic construct
  misc_feature 1..219: note = Description of Artificial Sequence: Synthetic coding sequence
  source 1..219: mol_type = other DNA
atggccggcgagaaggtggagaagcccgacaccaaggagaagaagcccgaggccaagaaggtggacgccggcggcaaggtgaagaagggcaacctgaaggccaagaagcccaagaagggcaagccccactgcagcagaaaccccgtgctggtgagaggcatcggcagatacagcagaagcgccatgtacagcagaaaggccatgtacaagagaaagtag

SEQ ID NO: 97464 - DNA, 480 bp, synthetic construct
  misc_feature 1..480: note = Description of Artificial Sequence: Synthetic coding sequence
  source 1..480: mol_type = other DNA
atggccggcgagaaggtggagaagcccgacaccaaggagaagaagcccgaggccaagaaggtggacgccggcggcaaggtgaagaagggcaacctgaaggccaagaagcccaagaagggcaagccccactgcagcagaaaccccgtgctggtgagaggcatcggcagatacagcagaagcgccatgtacagcagaaaggccatgtacaagagaaagtacagcgccgccaagagcaaggtggagaagaagaagaaggagaaggtgctggccaccgtgaccaagcccgtgggcggcgacaagaacggcggcaccagagtggtgaagctgagaaagatgcccagatactaccccaccgaggacgtgcccagaaagctgctgagccacggcaagaagcccttcagccagcacgtgagaaagctgagagccagcatcacccccggcaccatcctgatcatcctgaccggcagacacagaggctag

SEQ ID NO: 97465 - DNA, 345 bp, synthetic construct
  misc_feature 1..345: note = Description of Artificial Sequence: Synthetic coding sequence
  source 1..345: mol_type = other DNA
atggccggcgagaaggtggagaagcccgacaccaaggagaagaagcccgaggccaagaaggtggacgccggcggcaaggtgaagaagggcaacctgaaggccaagaagcccaagaagggcaagccccactgcagcagaaaccccgtgctggtgagaggcatcggcagatacagcagaagcgccatgtacagcagaaaggccatgtacaagagaaagtacagcgccgccaagagcaaggtggagaagaagaagaaggagaaggtgctggccaccgtgaccaagcccgtgggcggcgacaagaacggcggcaccagagtggtgaagctgagaaagatggtgagatag

SEQ ID NO: 97466 - DNA, 345 bp, synthetic construct; identical to SEQ ID NO: 97465
  misc_feature 1..345: note = Description of Artificial Sequence: Synthetic coding sequence
  source 1..345: mol_type = other DNA

SEQ ID NO: 97467 - DNA, 747 bp, synthetic construct
  misc_feature 1..747: note = Description of Artificial Sequence: Synthetic coding sequence
  source 1..747: mol_type = other DNA
atggagggcgtggaggagaagaagaaggaggtgcccgccgtgcccgagaccctgaagaagaagagaagaaacttcgccgagctgaagatcaagagactgagaaagaagttcgcccagaagatgctgagaaaggccagaagaaagctgatctacgagaaggccaagcactaccacaaggagtacagacagatgtacagaaccgagatcagaatggccagaatggccagaaaggccggcaacttctacgtgcccgccgagcccaagctggccttcgtgatcagaatcagaggcatcaacggcgtgagccccaaggtgagaaaggtgctgcagctgctgagactgagacagatcttcaacggcaccttcgtgaagctgaacaaggccagcatcaacatgctgagaatcgtggagccctacatcgcctggggctaccccaacctgaagagcgtgaacgagctgatctacaagagaggctacggcaagatcaacaagaagagaatcgccctgaccgacaacgccctgatcgccagaagcctgggcaagtacggcatcatctgcatggaggacctgatccacgagatctacaccgtgggcaagagattcaaggaggccaacaacttcctgtggcccttcaagctgagcagccccagaggcggcatgaagaagaagaccacccacttcgtggagggcggcgacgccggcaacagagaggaccagatcaacagactgatcagaagaatgaactag

SEQ ID NO: 97468 - DNA, 456 bp, synthetic construct
  misc_feature 1..456: note = Description of Artificial Sequence: Synthetic coding sequence
  source 1..456: mol_type = other DNA
atggcccccctgtaccaggccgccggcaagggcgacgtgcccaccaagagaccccccgtgctgagagccggcgtgaacaccgtgaccaccctggtggagaacaagaaggcccagctggtggtgatcgcccacgacgtggaccccatcgagctggtggtgttcctgcccgccctgtgcagaaagatgggcgtgccctactgcatcatcaagggcaaggccagactgggcagactggtgcacagaaagacctgcaccaccgtggccttcacccaggtgaacagcgaggacaagggcgccctggccaagctggtggaggccatcagaaccaactacaacgacagatacgacgagatcagaagacactggggcggcaacgtgctgggccccaagagcgtggccagaatcgccaagctggagaaggccaaggccaaggagctggccaccaagctgggctag

SEQ ID NO: 97469 - DNA, 801 bp, synthetic construct
  misc_feature 1..801: note = Description of Artificial Sequence: Synthetic coding sequence
  source 1..801: mol_type = other DNA
atgcccaagggcaagaaggccaagggcaagaaggtggcccccgcccccgccgtggtgaagaagcaggaggccaagaaggtggtgaaccccctgttcgagaagagacccaagaacttcggcatcggccaggacatccagcccaagagagacctgaccagattcgtgaagtggcccagatacatcagactgcagagacagagagccatcctgtacaagagactgaaggtgccccccgccatcaaccagttcacccaggccctggacagacagaccgccacccagctgctgaagctggcccacaagtacagacccgagaccaagcaggagaagaagcagagactgctggccagagccgagaagaaggccgccggcaagggcgacgtgcccaccaagagaccccccgtgctgagagccggcgtgaacaccgtgaccaccctggtggagaacaagaaggcccagctggtggtgatcgcccacgacgtggaccccatcgagctggtggtgttcctgcccgccctgtgcagaaagatgggcgtgccctactgcatcatcaagggcaaggccagactgggcagactggtgcacagaaagacctgcaccaccgtggccttcacccaggtgaacagcgaggacaagggcgccctggccaagctggtggaggccatcagaaccaactacaacgacagatacgacgagatcagaagacactggggcggcaacgtgctgggccccaagagcgtggccagaatcgccaagctggagaaggccaaggccaaggagctggccaccaagctgggctag

SEQ ID NO: 97470 - DNA, 576 bp, synthetic construct
  misc_feature 1..576: note = Description of Artificial Sequence: Synthetic coding sequence
  source 1..576: mol_type = other DNA
atgctggtgagactgaacgtgagatgcagctgcagaggcgtggtgctgggcggctgcagaaagctgctggccagcctggtgcagcccaagggcaagaaggccaagggcaagaaggtggcccccgcccccgccgtggtgaagaagcaggaggccaagaaggtggtgaaccccctgttcgagaagagacccaagaacttcggcatcggccaggacatccagcccaagagagacctgaccagattcgtgaagtggcccagatacatcagactgcagagacagagagccatcctgtacaagagactgaaggtgccccccgccatcaaccagttcacccaggccctggacagacagaccgccacccagctgctgaagctggcccacaagtacagacccgagaccaagcaggagaagaagcagagactgctggccagagccgagaagaaggccgccggcaagggcgacgtgcccaccaagagaccccccgtgctgagagccggcgtgaacaccgtgaccaccctggtggagaacaagaaggcccagctggtggtgatcgcccacgacgtggaccccatctag

SEQ ID NO: 97471 - DNA, 774 bp, synthetic construct
  misc_feature 1..774: note = Description of Artificial Sequence: Synthetic coding sequence
  source 1..774: mol_type = other DNA
atgggcagagtgatcagaggccagagaaagggcgccggcagcgtgttcagagcccacgtgaagcacagaaagggcgccgccagactgagagccgtggacttcgccgagagacacggctacatcaagggcatcgtgaaggacatcatccacgaccccggcagaggcgcccccctggccaaggtggtgttcagagacccctacagattcaagaagagaaccgagctgttcatcgccgccgagggcatccacaccggccagttcgtgtactgcggcaagaaggcccagctgaacatcggcaacgtgctgcccgtgggcaccatgcccgagggcaccatcgtgtgctgcctggaggagaagcccggcgacagaggcaagctggccagagccagcggcaactacgccaccgtgatcagccacaaccccgagaccaagaagaccagagtgaagctgcccagcggcagcaagaaggtgatcagcagcgccaacagagccgtggtgggcgtggtggccggcggcggcagaatcgacaagcccatcctgaaggccggcagagcctaccacaagtacaaggccaagagaaactgctggcccagagtgagaggcgtggccatgaaccccgtggagcaccccttcggcggcggcaaccaccagcacatcggcaagcccagcaccatcagaagagacgcccccgccggcagaaaggtgggcctgatcgccgccagaagaaccggcagactgagaggcaccaagaccgtgcaggagaaggagaactag

SEQ ID NO: 97472 - DNA, 774 bp, synthetic construct; identical to SEQ ID NO: 97471
  misc_feature 1..774: note = Description of Artificial Sequence: Synthetic coding sequence
  source 1..774: mol_type = other DNA

SEQ ID NO: 97473 - DNA, 579 bp, synthetic construct
  misc_feature 1..579: note = Description of Artificial Sequence: Synthetic coding sequence
  source 1..579: mol_type = other DNA
atgaagaccatcctgagcaaccagaccgtggacatccccgagaacgtggacatcaccctgaagggcagaaccgtgatcgtgaagggccccagaggcaccctgagaagagacttcaaccacatcaacgtggagctgagcctgctgggcaagaagaagaagagactgagagtggacaagtggtggggcaacagaaaggagctggccaccgtgagaaccatctgcagccacgtgcagaacatgatcaagggcgtgaccctgggcttcagatacaagatgagaagcgtgtacgcccacttccccatcaacgtggtgatccaggagaacggcagcctggtggagatcagaaacttcctgggcgagaagtacatcagaagagtgagaatgagacccggcgtggcctgcagcgtgagccaggcccagaaggacgagctgatcctggagggcaacgacatcgagctggtgagcaacagcgccgccctgatccagcaggccaccaccgtgaagaacaaggacatcagaaagttcctggacggcatctacgtgagcgagaagggcaccgtgcagcaggccgacgagtag

SEQ ID NO: 97474 - DNA, 444 bp, synthetic construct
  misc_feature 1..444: note = Description of Artificial Sequence: Synthetic coding sequence
  source 1..444: mol_type = other DNA
atgaagaccatcctgagcaaccagaccgtggacatccccgagaacgtggacatcaccctgaagggcagaaccgtgatcgtgaagggccccagaggcaccctgagaagagacttcaaccacatcaacgtggagctgagcctgctgggcaagaagaagaagagactgagagtggacaagtggtggggcaacagaaaggagctggccaccgtgagaaccatctgcagccacgtgcagaacatgatcaagggcgtgaccctgggcttcagatacaagatgagaagcgtgtacgcccacttccccatcaacgtggtgatccaggagaacggcagcctggtggagatcagaaacttcctgggcgagaagtacatcagaagagtgagaatgagacccggcgtggcctgcttcaagttcagcggcttcgacagcgccagccacaacagctag

SEQ ID NO: 97475 - DNA, 579 bp, synthetic construct; identical to SEQ ID NO: 97473
  misc_feature 1..579: note = Description of Artificial Sequence: Synthetic coding sequence
  source 1..579: mol_type = other DNA

SEQ ID NO: 97476 - DNA, 501 bp, synthetic construct
  misc_feature 1..501: note = Description of Artificial Sequence: Synthetic coding sequence
  source 1..501: mol_type = other DNA
atgaagaccatcctgagcaaccagaccgtggacatccccgagaacgtggacatcaccctgaagggcagaaccgtgatcgtgaagggccccagaggcaccctgagaagagacttcaaccacatcaacgtggagctgagcctgctgggcaagaagaagaagagactgagagtggacaagtggtggggcaacagaaaggagctggccaccgtgagaaccatctgcagccacgtgcagaacatgatcaagggcgtgaccctgggcttcagatacaagatgagaagcgtgtacgcccacttccccatcaacgtggtgatccaggagaacggcagcctggtggagatcagaaacttcctgggcgagaagtacatcagaagagtgagaatgagacccggcgtggcctgcagcgtgagccaggcccagaaggacgagctgatcctggagggcaacgacatcgagctggtgagcaacagcgccgccctgatccagcaggccaccacctag

SEQ ID NO: 97477 - DNA, 498 bp, synthetic construct
  misc_feature 1..498: note = Description of Artificial Sequence: Synthetic coding sequence
  source 1..498: mol_type = other DNA
atgctgatgcccaagaagaacagaatcgccatctacgagctgctgttcaaggagggcgtgatggtggccaagaaggacgtgcacatgcccaagcaccccgagctggccgacaagaacgtgcccaacctgcacgtgatgaaggccatgcagagcctgaagagcagaggctacgtgaaggagcagttcgcctggagacacttctactggtacctgaccaacgagggcatccagtacctgagagactacctgcacctgccccccgagatcgtgcccgccaccctgagaagaagcagacccgagaccggcagacccagacccaagggcctggagggcgagagacccgccagactgaccagaggcgaggccgacagagacacctacagaagaagcgccgtgccccccggcgccgacaagaaggccgaggccggcgccggcagcgccaccgagttccagttcagaggcggcttcggcagaggcagaggccagcccccccagtag

SEQ ID NO: 97478 - DNA, 477 bp, synthetic construct
  misc_feature 1..477: note = Description of Artificial Sequence: Synthetic coding sequence
  source 1..477: mol_type = other DNA
atggccgacatccagaccgagagagcctaccagaagcagcccaccatcttccagaacaagaagagagtgctgctgggcgagaccggcaaggagaagctgcccagatactacaagaacatcggcctgggcttcaagacccccaaggaggccatcgagggcacctacatcgacaagaagtgccccttcaccggcaacgtgagcatcagaggcagaatcctgagcggcgtggtgaccaagatgaagatgcagagaaccatcgtgatcagaagagactacctgcactacatcagaaagtacaacagattcgagaagagacacaagaacatgagcgtgcacctgagcccctgcttcagagacgtgcagatcggcgacatcgtgaccgtgggcgagtgcagacccctgagcaagaccgtgagattcaacgtgctgaaggtgaccaaggccgccggcaccaagaagcagttccagaagttctag

SEQ ID NO: 97479 - DNA, 423 bp, synthetic construct
  misc_feature 1..423: note = Description of Artificial Sequence: Synthetic coding sequence
  source 1..423: mol_type = other DNA
atgaccagcatgacccagagcctgagagaggtgatcaaggccatgaccaaggccagaaacttcgagagagtgctgggcaagatcaccctggtgagcgccgcccccggcaaggtgatctgcgagatgaaggtggaggaggagcacaccaacgccatcggcaccctgcacggcggcctgaccgccaccctggtggacaacatcagcaccatggccctgctgtgcaccgagagaggcgcccccggcgtgagcgtggacatgaacatcacctacatgagccccgccaagctgggcgaggacatcgtgatcaccgcccacgtgctgaagcagggcaagaccctggccttcaccagcgtggacctgaccaacaaggccaccggcaagctgatcgcccagggcagacacaccaagcacctgggcaactag

SEQ ID NO: 97480 - DNA, 456 bp, synthetic construct
  misc_feature 1..456: note = Description of Artificial Sequence: Synthetic coding sequence
  source 1..456: mol_type = other DNA
atgggcagaatgcacgcccccggcaagggcctgagccagagcgccctgccctacagaagaagcgtgcccacctggctgaagctgaccagcgacgacgtgaaggagcagatctacaagctggccaagaagggcctgacccccagccagatcggcgtgatcctgagagacagccacggcgtggcccaggtgagattcgtgaccggcaacaagatcctgagaatcctgaagagcaagggcctggcccccgacctgcccgaggacctgtaccacctgatcaagaaggccgtggccgtgagaaagcacctggagagaaacagaaaggacaaggacgccaagttcagactgatcctgatcgagagcagaatccacagactggccagatactacaagaccaagagagtgctgccccccaactggaagtacgagagcagcaccgccagcgccctggtggcctag

SEQ ID NO: 97481 - DNA, 456 bp, synthetic construct
  misc_feature 1..456: note = Description of Artificial Sequence: Synthetic coding sequence
  source 1..456: mol_type = other DNA
atggcccccagaaagggcaaggagaagaaggaggagcaggtgatcagcctgggcccccaggtggccgagggcgagaacgtgttcggcgtgtgccacatcttcgccagcttcaacgacaccttcgtgcacgtgaccgacctgagcggcaaggagaccatctgcagagtgaccggcggcatgaaggtgaaggccgacagagacgagagcagcccctacgccgccatgctggccgcccaggacgtggcccagagatgcaaggagctgggcatcaccgccctgcacatcaagctgagagccaccggcggcaacagaaccaagacccccggccccggcgcccagagcgccctgagagccctggccagaagcggcatgaagatcggcagaatcgaggacgtgacccccatccccagcgacagcaccagaagaaagggcggcagaagaggcagaagactgtag

SEQ ID NO: 97482 - DNA, 456 bp, synthetic construct; identical to SEQ ID NO: 97481
  misc_feature 1..456: note = Description of Artificial Sequence: Synthetic coding sequence
  source 1..456: mol_type = other DNA

SEQ ID NO: 97483 - DNA, 456 bp, synthetic construct; identical to SEQ ID NO: 97481
  misc_feature 1..456: note = Description of Artificial Sequence: Synthetic coding sequence
  source 1..456: mol_type = other DNA

SEQ ID NO: 97484 - DNA, 456 bp, synthetic construct; identical to SEQ ID NO: 97481
  misc_feature 1..456: note = Description of Artificial Sequence: Synthetic coding sequence
  source 1..456: mol_type = other DNA

SEQ ID NO: 97485 - DNA, 6912 bp, synthetic construct; identical to SEQ ID NO: 72008
  misc_feature 1..6912: note = Description of Artificial Sequence: Synthetic coding sequence
  source 1..6912: mol_type = other DNA

SEQ ID NO: 97486 - DNA, 438 bp, synthetic construct
  misc_feature 1..438: note = Description of Artificial Sequence: Synthetic coding sequence
  source 1..438: mol_type = other DNA
atggccgaggtggagcagaagaagaagagaaccttcagaaagttcacctacagaggcgtggacctggaccagctgctggacatgagctacgagcagctgatgcagctgtacagcgccagacagagaagaagactgaacagaggcctgagaagaaagcagcacagcctgctgaagagactgagaaaggccaagaaggaggccccccccatggagaagcccgaggtggtgaagacccacctgagagacatgatcatcctgcccgagatggtgggcagcatggtgggcgtgtacaacggcaagaccttcaaccaggtggagatcaagcccgagatgatcggccactacctgggcgagttcagcatcacctacaagcccgtgaagcacggcagacccggcatcggcgccacccacagcagcagattcatccccctgaagtag

SEQ ID NO: 97487 - DNA, 393 bp, synthetic construct
  misc_feature 1..393: note = Description of Artificial Sequence: Synthetic coding sequence
  source 1..393: mol_type = other DNA
atggtgagaatgaacgtgctggccgacgccctgaagagcatcaacaacgccgagaagagaggcaagagacaggtgctgatcagaccctgcagcaaggtgatcgtgagattcctgaccgtgatgatgaagcacggctacatcggcgagttcgagatcatcgacgaccacagagccggcaagatcgtggtgaacctgaccggcagactgaacaagtgcggcgtgatcagccccagattcgacgtgcagctgaaggacctggagaagtggcagaacaacctgctgcccagcagacagttcggcttcatcgtgctgaccaccagcgccggcatcatggaccacgaggaggccagaagaaagcacaccggcggcaagatcctgggcttcttcttctag

SEQ ID NO: 97488 - DNA, 393 bp, synthetic construct; identical to SEQ ID NO: 97487
  misc_feature 1..393: note = Description of Artificial Sequence: Synthetic coding sequence
  source 1..393: mol_type = other DNA

SEQ ID NO: 97489 - DNA, 441 bp, synthetic construct
  misc_feature 1..441: note = Description of Artificial Sequence: Synthetic coding sequence
  source 1..441: mol_type = other DNA
atgcccagcaagggccccctgcagagcgtgcaggtgttcggcagaaagaagaccgccaccgccgtggcccactgcaagagaggcaacggcctgatcaaggtgaacggcagacccctggagatgatcgagcccagaaccctgcagtacaagctgctggagcccgtgctgctgctgggcaaggagagattcgccggcgtggacatcagagtgagagtgaagggcggcggccacgtggcccagatctacgccatcagacagagcatcagcaaggccctggtggcctactaccagaagtacgtggacgaggccagcaagaaggagatcaaggacatcctgatccagtacgacagaaccctgctggtggccgaccccagaagatgcgagagcaagaagttcggcggccccggcgccagagccagataccagaagagctacagatag

SEQ ID NO: 97490 - DNA, 459 bp, synthetic construct
  misc_feature 1..459: note = Description of Artificial Sequence: Synthetic coding sequence
  source 1..459: mol_type = other DNA
atgcccagcaagggccccctgcagagcgtgcaggtgttcggcagaaagaagaccgccaccgccgtggcccactgcaagagaggcaacggcctgatcaaggtgaacggcagacccctggagatgatcgagcccagaaccctgcagtacaagctgctggagcccgtgctgctgctgggcaaggagagattcgccggcgtggacatcagagtgagagtgaagggcggcggccacgtggcccagatctacggcgagagccaggagctgggcgcctggagaagatggctgtgggagggcggcctgcacagcgcccccgtgcccttcaactgcgtgagcttcagccagctgagcgtgagccccagccccaagccctggtggcccatcaccagaaacatgtggatgagactgcccagaagaagaagcaagaccagcagcagcagcatgaccggcccctgctggtag

SEQ ID NO: 97491 - DNA, 408 bp, synthetic construct
  misc_feature 1..408: note = Description of Artificial Sequence: Synthetic coding sequence
  source 1..408: mol_type = other DNA
atgggcagagtgagaaccaagaccgtgaagaaggccgccagagtgatcatcgagaagtactacaccagactgggcaacgacttccacaccaacaagagagtgtgcgaggagatcgccatcatccccagcaagaagctgagaaacaagatcgccggctacgtgacccacctgatgaagagaatccagagaggccccgtgagaggcatcagcatcaagctgcaggaggaggagagagagagaagagacaactacgtgcccgaggtgagcgccctggaccaggagatcatcgaggtggaccccgacaccaaggagatgctgaagctgctggacttcggcagcctgagcaacctgcaggtgacccagcccaccgtgggcatgaacttcaagacccccagaggccccgtgtag

SEQ ID NO: 97492 - DNA, 300 bp, synthetic construct
  misc_feature 1..300: note = Description of Artificial Sequence: Synthetic coding sequence
  source 1..300: mol_type = other DNA
atggacctgatcggcttcggctacgccgccctggtgaccttcggcagcatcttcggctacaagagaagaggcggcgtgcccagcctgatcgccggcctgttcgtgggctgcctggccggctacggcgcctacagagtgagcaacgacaagagagacgtgaaggtgagcctgttcaccgccttcttcctggccaccatcatgggcgtgagattcaagagaagcaagaagatcatgcccgccggcctggtggccggcctgagcctgatgatgatcctgagactggtgctgctgctgctgtag

SEQ ID NO: 97493 - DNA, 459 bp, synthetic construct; identical to SEQ ID NO: 82265
  misc_feature 1..459: note = Description of Artificial Sequence: Synthetic coding sequence
  source 1..459: mol_type = other DNA

SEQ ID NO: 97494 - DNA, 459 bp, synthetic construct; identical to SEQ ID NO: 82265
  misc_feature 1..459: note = Description of Artificial Sequence: Synthetic coding sequence
  source 1..459: mol_type = other DNA

SEQ ID NO: 97495 - DNA, 105 bp, synthetic construct
  misc_feature 1..105: note = Description of Artificial Sequence: Synthetic coding sequence
  source 1..105: mol_type = other DNA
atgagcctggtgatccccgagaagttccagcacatcctgagagtgctgaacaccaacatcgacggcagaagaaagatcgccttcgccatcaccgccatcaagtag

SEQ ID NO: 97496 - DNA, 459 bp, synthetic construct; identical to SEQ ID NO: 82265
  misc_feature 1..459: note = Description of Artificial Sequence: Synthetic coding sequence
  source 1..459: mol_type = other DNA

SEQ ID NO: 97497 - DNA, 459 bp, synthetic construct; identical to SEQ ID NO: 82265
  misc_feature 1..459: note = Description of Artificial Sequence: Synthetic coding sequence
  source 1..459: mol_type = other DNA

SEQ ID NO: 97498 - DNA, 249 bp, synthetic construct
  misc_feature 1..249: note = Description of Artificial Sequence: Synthetic coding sequence
  source 1..249: mol_type = other DNA
atgcagaaccccagacagtacaagatccccgactggttcctgaacagacagaaggacgtgaaggacggcaagtacagccaggtgctggccaacggcctggacaacaagctgagagaggacctggagagactgaagaagatcagagcccacagaggcctgagacacttctggggcctgagagtgagaggccagcacaccaagaccaccggcagaagaggcagaaccgtgggcgtgagcaagaagaagtag

SEQ ID NO: 97499 - DNA, 249 bp, synthetic construct; identical to SEQ ID NO: 97498
  misc_feature 1..249: note = Description of Artificial Sequence: Synthetic coding sequence
  source 1..249: mol_type = other DNA

SEQ ID NO: 97500 - DNA, 249 bp, synthetic construct; identical to SEQ ID NO: 97498
  misc_feature 1..249: note = Description of Artificial Sequence: Synthetic coding sequence
  source 1..249: mol_type = other DNA

SEQ ID NO: 97501 - DNA, 249 bp, synthetic construct; identical to SEQ ID NO: 97498
  misc_feature 1..249: note = Description of Artificial Sequence: Synthetic coding sequence
  source 1..249: mol_type = other DNA

SEQ ID NO: 97502 - DNA, 249 bp, synthetic construct; identical to SEQ ID NO: 97498
  misc_feature 1..249: note = Description of Artificial Sequence: Synthetic coding sequence
  source 1..249: mol_type = other DNA

SEQ ID NO: 97503 - DNA, 648 bp, synthetic construct
  misc_feature 1..648: note = Description of Artificial Sequence: Synthetic coding sequence
  source 1..648: mol_type = other DNA
atgtacagcttcatgggcggcggcctgttctgcgcctgggtgggcaccatcctgctggtggtggccatggccaccgaccactggatgcagtacagactgagcggcagcttcgcccaccagggcctgtggagatactgcctgggcaacaagtgctacctgcagaccgacagcatcggcgagccccccggccagggccccggcagagcctggggcaagagcagagccgacctgggcgcccagggccacctgtacagcagatggagaaccctgagactgaaggagggcaagggcgccacccaggcctactggaacgccaccagagccttcatgatcctgagcgccctgtgcgccatcagcggcatcatcatgggcatcatggccttcgcccaccagcccaccttcagcagaatcagcagacccttcagcgccggcatcatgttcttcagcagcaccctgttcgtggtgctggccctggccatctacaccggcgtgaccgtgagcttcctgggcagaagattcggcgactggagattcagctggagctacatcctgggctgggtggccgtgctgatgaccttcttcgccggcatcttctacatgtgcgcctacagagtgcacgagtgcagaagactgagcacccccagatag

SEQ ID NO: 97504 - DNA, 438 bp, synthetic construct
  misc_feature 1..438: note = Description of Artificial Sequence: Synthetic coding sequence
  source 1..438: mol_type = other DNA
atgcccggcgtgaccgtgaaggacgtgaaccagcaggagttcgtgagagccctggccgccttcctgaagaagagcggcaagctgaaggtgcccgagtgggtggacaccgtgaagctggccaagcacaaggagctggccccctacgacgagaactggttctacaccagagccgccagcaccgccagacacctgtacctgagaggcggcgccggcgtgggcagcatgaccaagatctacggcggcagacagagaaacggcgtgatgcccagccacttcagcagaggcagcaagagcgtggccagaagagtgctgcaggccctggagggcctgaagatggtggagaaggaccaggacggcggcagaaagctgaccccccagggccagagagacctggacagaatcgccggccaggtggccgccgccaacaagaagcactag

SEQ ID NO: 97505 - DNA, 411 bp, synthetic construct
  misc_feature 1..411: note = Description of Artificial Sequence: Synthetic coding sequence
  source 1..411: mol_type = other DNA
atgagcgccgccctgctgagaagaggcctggagctgctggccgccagcgaggcccccagagacccccccggccaggccaagcccagaggcgcccccgtgaagagacccagaaagaccaaggccatccaggcccagaagctgagaaacagcgccaagggcaaggtgcccaagagcgccctggacgagtacagaaagagagagtgcagagaccacctgagagtgaacctgaagttcctgaccagaaccagaagcaccgtggccgagagcgtgagccagcagatcctgagacagaacagaggcagaaaggcctgcgacagacccgtggccaagaccaagaagaagaaggccgagggcaccgtgttcaccgaggaggacttccagaagttccagcaggagtacttcggcagctag

SEQ ID NO: 97506 - DNA, 882 bp, synthetic construct
  misc_feature 1..882: note = Description of Artificial Sequence: Synthetic coding sequence
  source 1..882: mol_type = other DNA
atggccgacgacgccggcgccgccggcggccccggcggccccggcggccccggcatgggcaacagaggcggcttcagaggcggcttcggcagcggcatcagaggcagaggcagaggcagaggcagaggcagaggcagaggcagaggcgccagaggcggcaaggccgaggacaaggagtggatgcccgtgaccaagctgggcagactggtgaaggacatgaagatcaagagcctggaggagatctacctgttcagcctgcccatcaaggagagcgagatcatcgacttcttcctgggcgccagcctgaaggacgaggtgctgaagatcatgcccgtgcagaagcagaccagagccggccagagaaccagattcaaggccttcgtggccatcggcgactacaacggccacgtgggcctgggcgtgaagtgcagcaaggaggtggccaccgccatcagaggcgccatcatcctggccaagctgagcatcgtgcccgtgagaagaggctactggggcaacaagatcggcaagccccacaccgtgccctgcaaggtgaccggcagatgcggcagcgtgctggtgagactgatccccgcccccagaggcaccggcatcgtgagcgcccccgtgcccaagaagctgctgatgatggccggcatcgacgactgctacaccagcgccagaggctgcaccgccaccctgggcaacttcgccaaggccaccttcgacgccatcagcaagacctacagctacctgacccccgacctgtggaaggagaccgtgttcaccaagagcccctaccaggagttcaccgaccacctggtgaagacccacaccagagtgagcgtgcagagaacccaggcccccgccgtggccaccacctag

SEQ ID NO: 97507 - DNA, 708 bp, synthetic construct
  misc_feature 1..708: note = Description of Artificial Sequence: Synthetic coding sequence
  source 1..708: mol_type = other DNA
atggccgacgacgccggcgccgccggcggccccggcggccccggcggccccggcatgggcaacagaggcggcttcagaggcggcttcggcagcggcatcagaggcagaggcagaggcagaggcagaggcagaggcagaggcagaggcgccagaggcggcaaggccgaggacaaggagtggatgcccgtgaccaagctgggcagactggtgaaggacatgaagatcaagagcctggaggagatctacctgttcagcctgcccatcaaggagagcgagatcatcgacttcttcctgggcgccagcctgaaggacgaggtgctgaagatcatgcccgtgcagaagcagaccagagccggccagagaaccagattcaaggtgaccggcagatgcggcagcgtgctggtgagactgatccccgcccccagaggcaccggcatcgtgagcgcccccgtgcccaagaagctgctgatgatggccggcatcgacgactgctacaccagcgccagaggctgcaccgccaccctgggcaacttcgccaaggccaccttcgacgccatcagcaagacctacagctacctgacccccgacctgtggaaggagaccgtgttcaccaagagcccctaccaggagttcaccgaccacctggtgaagacccacaccagagtgagcgtgcagagaacccaggcccccgccgtggccaccacctag

SEQ ID NO: 97508 - DNA, 537 bp, synthetic construct
  misc_feature 1..537: note = Description of Artificial Sequence: Synthetic coding sequence
  source 1..537: mol_type = other DNA
atggccgacgacgccggcgccgccggcggccccggcggccccggcggccccggcatgggcaacagaggcggcttcagaggcggcttcggcagcggcatcagaggcagaggcagaggcagaggcagaggcagaggcagaggcagaggcgccagaggcggcaaggccgaggacaaggagtggatgcccgtgaccaagctgggcagactggtgaaggacatgaagatcaagagcctggaggagatctacctgttcagcctgcccatcaaggagagcgagatcatcgacttcttcctgggcgccagcctgaaggacgaggtgctgaagatcatgcccgtgcagaagcagaccagagccggccagagaaccagattcaaggtgcccggctgccccggcggcggctgcgccggcctggccggcaccctgagcgccctgcacagctgcacctggctgcacccctgcgacttcagaaacggcgagagagagaagagaagcccccaggacctgggctgggccctgctgtggcccctgttcccctag

SEQ ID NO: 97509 - DNA, 588 bp, synthetic construct
  misc_feature 1..588: note = Description of Artificial Sequence: Synthetic coding sequence
  source 1..588: mol_type = other DNA
gtgaccaagctgggcagactggtgaaggacatgaagatcaagagcctggaggagatctacctgttcagcctgcccatcaaggccttcgtggccatcggcgactacaacggccacgtgggcctgggcgtgaagtgcagcaaggaggtggccaccgccatcagaggcgccatcatcctggccaagctgagcatcgtgcccgtgagaagaggctactggggcaacaagatcggcaagccccacaccgtgccctgcaaggtgaccggcagatgcggcagcgtgctggtgagactgatccccgcccccagaggcaccggcatcgtgagcgcccccgtgcccaagaagctgctgatgatggccggcatcgacgactgctacaccagcgccagaggctgcaccgccaccctgggcaacttcgccaaggccaccttcgacgccatcagcaagacctacagctacctgacccccgacctgtggaaggagaccgtgttcaccaagagcccctaccaggagttcaccgaccacctggtgaagacccacaccagagtgagcgtgcagagaacccaggcccccgccgtggccaccacctag

SEQ ID NO: 97510 - DNA, 360 bp, synthetic construct
  misc_feature 1..360: note = Description of Artificial Sequence: Synthetic coding sequence
  source 1..360: mol_type = other DNA
atggccttcaaggacaccggcaagacccccgtggagcccgaggtggccatccacagaatcagaatcaccctgaccagcagaaacgtgaagagcctggagaaggtgtgcgccgacctgatcagaggcgccaaggagaagaacctgaaggtgaagggccccgtgagaatgcccaccaagaccctgagaatcaccaccagaaagaccccctgcggcgagggcagcaagacctgggacagattccagatgagaatccacaagagactgatcgacctgcacagccccagcgagatcgtgaagcagatcaccagcatcagcatcgagcccggcgtggaggtggaggtgaccatcgccgacgcctag

SEQ ID NO: 97511 - DNA, 429 bp, synthetic construct
  misc_feature 1..429: note = Description of Artificial Sequence: Synthetic coding sequence
  source 1..429: mol_type = other DNA
atggccttcaaggacaccggcaagacccccgtggagcccgaggtggccatccacagaatcagaatcaccctgaccagcagaaacgtgaagagcctggagaaggtgtgcgccgacctgatcagaggcgccaaggagaagaacctgaaggtgaagggccccgtgagaatgcccaccaagaccctgagaatcaccaccagaaagaccccctgcggcgagggcagcaagacctgggacagattccagatgagaatccacaagagactgatcgacctgcacagccccagcgagatcgtgaagcagatcaccagcatcagcatcgagcccggcgtggagctgatcgagagcaccgacgccgagcccatggacaccgagggccagcagtacaccctgagaagcgtgttcgagagccccggcacctgccccttctag

SEQ ID NO: 97512 - DNA, 360 bp, synthetic construct; identical to SEQ ID NO: 97510
  misc_feature 1..360: note = Description of Artificial Sequence: Synthetic coding sequence
  source 1..360: mol_type = other DNA

SEQ ID NO: 97513 - DNA, 252 bp, synthetic construct
  misc_feature 1..252: note = Description of Artificial Sequence: Synthetic coding sequence
  source 1..252: mol_type = other DNA
atgcagaacgacgccggcgagttcgtggacctgtacgtgcccagaaagtgcagcgccagcaacagaatcatcggcgccaaggaccacgccagcatccagatgaacgtggccgaggtggacaaggtgaccggcagattcaacggccagttcaagacctacgccatctgcggcgccatcagaagaatgggcgagagcgacgacagcatcctgagactggccaaggccgacggcatcgtgagcaagaacttctag

SEQ ID NO: 97514 - DNA, 294 bp, synthetic construct
  misc_feature 1..294: note = Description of Artificial Sequence: Synthetic coding sequence
  source 1..294: mol_type = other DNA
atgcagaacgacgccggcgagttcgtggacctgtacgtgcccagaaagtgcagcgccagcaacagaatcatcggcgccaaggaccacgccagcatccagatgaacgtggccagactgaccagaagccaggccggcctgatggccagcctgaagctgatgctgagcgccggccccttcgtgggctgggtgagccagatgatccccttcagcgactggcccagaagatggcacagactgaaggagctgctgaccggcgagaaccacagatgcggcatcttcgtgatcaacaagtag

SEQ ID NO: 97515 - DNA, 252 bp, synthetic construct; identical to SEQ ID NO: 97513
  misc_feature 1..252: note = Description of Artificial Sequence: Synthetic coding sequence
  source 1..252: mol_type = other DNA

SEQ ID NO: 97516 - DNA, 201 bp, synthetic construct
  misc_feature 1..201: note = Description of Artificial Sequence: Synthetic coding sequence
  source 1..201: mol_type = other DNA
atgcagaacgacgccggcgagttcgtggacctgtacgtgcccagaaagtgcagcgccagcaacagaatcatcggcgccaaggaccacgccagcatccagatgaacgtggccgaggtgagctgggagcccggcagaagagagggctgcgacatctgcgccggcaaggccggctgccccatcgtggaggagcccctgggctag

SEQ ID NO: 97517 - DNA, 273 bp, synthetic construct
  misc_feature 1..273: note = Description of Artificial Sequence: Synthetic coding sequence
  source 1..273: mol_type = other DNA
atgcagaacgacgccggcgagttcgtggacctgtacgtgcccagaaagtgcagcgccagcaacagaatcatcggcgccaaggaccacgccagcatccagatgaacgtggccgaggtggacaaggtgaccggcagattcaacggccagttcaagacctacgccatctgcggcgccatcagaagaatggtgagcgtgagcctgggcttcgcccaccacttcggcaccagctggaccctgccctgcgccctggagtgcgtgatggtgcccgagtag

SEQ ID NO: 97518 - DNA, 246 bp, synthetic construct
  misc_feature 1..246: note = Description of Artificial Sequence: Synthetic coding sequence
  source 1..246: mol_type = other DNA
atgcagaacgacgccggcgagttcgtggacctgtacgtgcccagaaagtgcagcgccagcaacagaatcatcggcgccaaggaccacgccagcatccagatgaacgtggccgaggtggacaaggtgaccggcagattcaacggccagttcaagacctacgccatctgcggcgccatcagaagaatgggcgagagcgacgacagcatcctgagactggccaaggccgacggcatcgtgagcaagtag

SEQ ID NO: 97519 - DNA, 432 bp, synthetic construct
  misc_feature 1..432: note = Description of Artificial Sequence: Synthetic coding sequence
  source 1..432: mol_type = other DNA
atgggcaagtgcagaggcctgagaaccgccagaaagctgagaagccacagaagagaccagaagtggcacgacaagcagtacaagaaggcccacctgggcaccgccctgaaggccaaccccttcggcggcgccagccacgccaagggcatcgtgctggagaaggtgggcgtggaggccaagcagcccaacagcgccatcagaaagtgcgtgagagtgcagctgatcaagaacggcaagaagatcaccgccttcgtgcccaacgacggctgcctgaacttcatcgaggagaacgacgaggtgctggtggccggcttcggcagaaagggccacgccgtgggcgacatccccggcgtgagattcaaggtggtgaaggtggccaacgtgagcctgctggccctgtacaagggcaagaaggagagacccagaagctag

SEQ ID NO: 97520 - DNA, 393 bp, synthetic construct
  misc_feature 1..393: note = Description of Artificial Sequence: Synthetic coding sequence
  source 1..393: mol_type = other DNA
atgaacgacaccgtgaccatcagaaccagaaagttcatgaccaacagactgctgcagagaaagcagatggtgatcgacgtgctgcaccccggcaaggccaccgtgcccaagaccgagatcagagagaagctggccaagatgtacaagaccacccccgacgtgatcttcgtgttcggcttcagaacccacttcggcggcggcaagaccaccggcttcggcatgatctacgacagcctggactacgccaagaagaacgagcccaagcacagactggccagacacggcctgtacgagaagaagaagaccagcagaaagcagagaaaggagagaaagaacagaatgaagaaggtgagaggcaccgccaaggccaacgtgggcgccggcaagaagtag

SEQ ID NO: 97521 - DNA, 402 bp, synthetic construct
  misc_feature 1..402: note = Description of Artificial Sequence: Synthetic coding sequence
  source 1..402: mol_type = other DNA
atgaacgacaccgtgaccatcagaaccagaaagttcatgaccaacagactgctgcagagaaagcagatggtgatcgacgtgctgcaccccggcaaggccaccgtgcccaagaccgagatcagagagaagctggccaagatgtacaagaccacccccgacgtgatcttcgtgttcggcttcagaacccacttcggcggcggcaagaccaccggcttcggcatgatctacgacagcctggactacgccaagaagaacgagcccaagcacagactggccagacacggcctgtacgagaagaagaagaccagcagaaagcagagaaaggagagaaagaacagaatgaagaaggtgagaggcaccgccaaggccaacgtgggcgccggcaagaagcccaaggagtag

SEQ ID NO: 97522 - DNA, 399 bp, synthetic construct
  misc_feature 1..399: note = Description of Artificial Sequence: Synthetic coding sequence
  source 1..399: mol_type = other DNA
atgaacgacaccgtgaccatcagaaccagaaagttcatgaccaacagactgctgcagagaaagcagatggtgatcgacgtgctgcaccccggcaaggccaccgtgcccaagaccgagatcagagagaagctggccaagatgtacaagaccacccccgacgtgatcttcgtgttcggcttcagaacccacttcggcggcggcaagaccaccggcttcggcatgatctacgacagcctggactacgccaagaagaacgagcccaagcacagactggccagacacggcctgtacgagaagaagaagaccagcagaaagcagagaaaggagagaaagaacagaatgaagaaggtgagaggcaccgccaaggccaacgtgggcgccggcaagaagcagaagtag

SEQ ID NO: 97523 - DNA, 396 bp, synthetic construct
  misc_feature 1..396: note = Description of Artificial Sequence: Synthetic coding sequence
  source 1..396: mol_type = other DNA
atgaacgacaccgtgaccatcagaaccagaaagttcatgaccaacagactgctgcagagaaagcagatggtgatcgacgtgctgcaccccggcaaggccaccgtgcccaagaccgagatcagagagaagctggccaagatgtacaagaccacccccgacgtgatcttcgtgttcggcttcagaacccacttcggcggcggcaagaccaccggcttcggcatgatctacgacagcctggactacgccaagaagaacgagcccaagcacagactggccagacacggcctgtacgagaagaagaagaccagcagaaagcagagaaaggagagaaagaacagaatgaagaaggtgagaggcaccgccaaggccaacgtgggcgccggcaagaagcagtag

SEQ ID NO: 97524 - DNA, 870 bp, synthetic construct
  misc_feature 1..870: note = Description of Artificial Sequence: Synthetic coding sequence
  source 1..870: mol_type = other DNA
atgaacgacaccgtgaccatcagaaccagaaagttcatgaccaacagactgctgcagagaaagcagatggtgatcgacgtgctgcaccccggcaaggccaccgtgcccaagaccgagatcagagagaagctggccaagatgtacaagaccacccccgacgtgatcttcgtgttcggcttcagaacccacttcggcggcggcaagaccaccggcttcggcatgatctacgacagcctggactacgccaagaagaacgagcccaagcacagactggccagacacggcctgtacgagaagaagaagaccagcagaaagcagagaaaggagagaaagaacagaatgaagaaggtgagaggcaccgccaaggccaacgtgggcgccggcaagaagatgagagagctgggcctgggcgtgcaggccctgggcagaatcagccaggaggagagatgcaccgacgtgaagaacagcaaggccagagagagcagaggcgtggtgtggcaggtggaggtgcccggcccctggagcgtgtggacctgcggcagactgagaagaggctgcggcaagtacctgcaggtggccgtgacctggagaaagaccgagaacagagagcagtgctgccaggcctgcctgctggagagagccctggtgagaaacggcgccttcatgagccccgccagccccgcccccgccggcagcccccaccccgtggacggcgacctggtgctgcacctgcccgaggccctgagcgccaccctgaccctgagcccccacatccaggccatcaacaagagcttcggccccttcttcgagatccaccaggagagcagctgcttcagcccccccagctgcctgagcggcctgggccactag

SEQ ID NO: 97525 - DNA, 378 bp, synthetic construct
  misc_feature 1..378: note = Description of Artificial Sequence: Synthetic coding sequence
  source 1..378: mol_type = other DNA
atgccccccaaggacgacaagaagaagaaggacgccggcaagagcgccaagaaggacaaggaccccgtgaacaagagcggcggcaaggccaagaagaagaagtggagcaagggcaaggtgagagacaagctgaacaacctggtgctgttcgacaaggccacctacgacaagctgtgcaaggaggtgcccaactacaagctgatcacccccgccgtggtgagcgagagactgaagatcagaggcagcctggccagagccgccctgcaggagctgctgagcaagggcctgatcaagctggtgagcaagcacagagcccaggtgatctacaccagaaacaccaagggcggcgacgcccccgccgccggcgaggacgcctag

SEQ ID NO: 97526 - DNA, 348 bp, synthetic construct
  misc_feature 1..348: note = Description of Artificial Sequence: Synthetic coding sequence
  source 1..348: mol_type = other DNA
atgaccaagaagagaagaaacaacggcagagccaagaagggcagaggccacgtgcagcccatcagatgcaccaactgcgccagatgcgtgcccaaggacaaggccatcaagaagttcgtgatcagaaacatcgtggaggccgccgccgtgagagacatcagcgaggccagcgtgttcgacgcctacgtgctgcccaagctgtacgtgaagctgcactactgcgtgagctgcgccatccacagcaaggtggtgagaaacagaagcagagaggccagaaaggacagaacccccccccccagattcagacccgccggcgccgcccccagacccccccccaagcccatgtag

SEQ ID NO: 97527 - DNA, 348 bp, synthetic construct; identical to SEQ ID NO: 97526
  misc_feature 1..348: note = Description of Artificial Sequence: Synthetic coding sequence
  source 1..348: mol_type = other DNA

SEQ ID NO: 97528 - DNA, 255 bp, synthetic construct
  misc_feature 1..255: note = Description of Artificial Sequence: Synthetic coding sequence
  source 1..255: mol_type = other DNA
atgcccctggccaaggacctgctgcaccccagccccgaggaggagaagagaaagcacaagaagaagagactggtgcagagccccaacagctacttcatggacgtgaagtgccccggctgctacaagatcaccaccgtgttcagccacgcccagaccgtggtgctgtgcgtgggctgcagcaccgtgctgtgccagcccaccggcggcaaggccagactgaccgagggctgcagcttcagaagaaagcagcactag

SEQ ID NO: 97529 - DNA, 201 bp, synthetic construct
  misc_feature 1..201: note = Description of Artificial Sequence: Synthetic coding sequence
  source 1..201: mol_type = other DNA
atgcccctggccaaggacctgctgcaccccagccccgaggaggagaagagaaagcacaagaagaagagactggtgcagagccccaacagctacttcatggacgtgaagtgccccggcgaggagaccgcctgctgcagcggcgagagcaccggcccccagcagctggagaacgtggtggtgctggccgtgagctacccctag

SEQ ID NO: 97530 - DNA, 255 bp, synthetic construct
  misc_feature 1..255: note = Description of Artificial Sequence: Synthetic coding sequence
  source 1..255: mol_type = other DNA
atgcccctggccagagacctgctgcaccccagcctggaggaggagaagaagaagcacaagaagaagagactggtgcagagccccaacagctacttcatggacgtgaagtgccccggctgctacaagatcaccaccgtgttcagccacgcccagaccgtggtgctgtgcgtgggctgcagcaccgtgctgtgccagcccaccggcggcaaggccagactgaccgagggctgcagcttcagaagaaagcagcactag

SEQ ID NO: 97531 - DNA, 159 bp, synthetic construct
  misc_feature 1..159: note = Description of Artificial Sequence: Synthetic coding sequence
  source 1..159: mol_type = other DNA
atggacgtgaagtgccccggctgctacaagatcaccaccgtgttcagccacgcccagaccgtggtgctgtgcgtgggctgcagcaccgtgctgtgccagcccaccggcggcaaggccagactgaccgagggctgcagcttcagaagaaagcagcactag

SEQ ID NO: 97532 - DNA, 159 bp, synthetic construct; identical to SEQ ID NO: 97531
  misc_feature 1..159: note = Description of Artificial Sequence: Synthetic coding sequence
  source 1..159: mol_type = other DNA

SEQ ID NO: 97533 - DNA, 303 bp, synthetic construct
  misc_feature 1..303: note = Description of Artificial Sequence: Synthetic coding sequence
  source 1..303: mol_type = other DNA
atgtgccagagatgcggcctgaagctgatcgtgatcatctgcttcttcgtgcagctggccagagacctgctgcaccccagcctggaggaggagaagaagaagcacaagaagaagagactggtgcagagccccaacagctacttcatggacgtgaagtgccccggctgctacaagatcaccaccgtgttcagccacgcccagaccgtggtgctgtgcgtgggctgcagcaccgtgctgtgccagcccaccggcggcaaggccagactgaccgagggctgcagcttcagaagaaagcagcactag

SEQ ID NO: 97534 - DNA, 210 bp, synthetic construct
  misc_feature 1..210: note = Description of Artificial Sequence: Synthetic coding sequence
  source 1..210: mol_type = other DNA
atggacaccagcagagtgcagcccatcaagctggccagagtgaccaaggtgctgggcagaaccggcagccagggccagtgcacccaggtgagagtggagttcatggacgacaccagcagaagcatcatcagaaacgtgaagggccccgtgagagagggcgacgtgctgaccctgctggagagcgagagagaggccagaagactgagatag

SEQ ID NO: 97535 - DNA, 366 bp, synthetic construct
  misc_feature 1..366: note = Description of Artificial Sequence: Synthetic coding sequence
  source 1..366: mol_type = other DNA
atggtgcccttcaacgacctgtacagcggccccgacaccttcagcgagttcatcagcgccagccacagcgccgtgcccttcagaggcccccccctgctgctgccccccctgagatggggccccgtgggcgccagaggcatccacggcagacacgagcccatccaccacccccagtgcaagagacccagagccagaggcagaagagcccaccccttcggcgtgagagccagaagccccgaggtggccctgagcctggccgccagatgggtgctggacgtgggcttcgaccacctggccgacggcaacggcctgagccagagcgcccccttcttctgccccccccacgtgaccgagatgctgctgtag

SEQ ID NO: 97536 - DNA, 210 bp, synthetic construct; identical to SEQ ID NO: 97534
  misc_feature 1..210: note = Description of Artificial Sequence: Synthetic coding sequence
  source 1..210: mol_type = other DNA

SEQ ID NO: 97537 - DNA, 171 bp, synthetic construct
  misc_feature 1..171: note = Description of Artificial Sequence: Synthetic coding sequence
  source 1..171: mol_type = other DNA
atgggccaccagcagctgtactggagccaccccagaaagttcggccagggcagcagaagctgcagagtgtgcagcaacagacacggcctgatcagaaagtacggcctgaacatgtgcagacagtgcttcagacagtacgccaaggacatcggcttcatcaagctggactag

SEQ ID NO: 97538 - DNA, 204 bp, synthetic construct
  misc_feature 1..204: note = Description of Artificial Sequence: Synthetic coding sequence
  source 1..204: mol_type = other DNA
atgggccaccagcagctgtactggagccaccccagaaagttcggccagggcagcagaagctgcagagtgtgcagcaacagacacggcctgatcagaaagtacggcctgaacatgtgcagacagtgcttcagacagtacgccaaggacatcggcttcatcaagaaggacctgagctgcctgccctggcactgcctgtggagatag

SEQ ID NO: 97539 - DNA, 780 bp, synthetic construct
  misc_feature 1..780: note = Description of Artificial Sequence: Synthetic coding sequence
  source 1..780: mol_type = other DNA
atggccgtgcagatcagcaagaagagaaagttcgtggccgacggcatcttcaaggccgagctgaacgagttcctgaccagagagctggccgaggacggctacagcggcgtggaggtgagagtgacccccaccagaaccgagatcatcatcctggccaccagaacccagaacgtgctgggcgagaagggcagaagaatcagagagctgaccgccgtggtgcagaagagattcggcttccccgagggcagcgtggagctgaagatcatggtgatggtgaccggctaccccctgctgcccctgaagctgtacgccgagaaggtggccaccagaggcctgtgcgccatcgcccaggccgagagcctgagatacaagctgctgggcggcctggccgtgagaagagcctgctacggcgtgctgagattcatcatggagagcggcgccaagggctgcgaggtggtggtgagcggcaagctgagaggccagagagccaagagcatgaagttcgtggacggcctgatgatccacagcggcgaccccgtgaactactacgtggacaccgccgtgagacacgtgctgctgagacagggcgtgctgggcatcaaggtgaagatcatgctgccctgggaccccaccggcaagatcggccccaagaagcccctgcccgaccacgtgagcatcgtggagcccaaggacgagatcctgcccaccacccccatcagcgagcagaagggcggcaagcccgagccccccgccatgccccagcccgtgcccaccgcctag

SEQ ID NO: 97540 - DNA, 732 bp, synthetic construct
  misc_feature 1..732: note = Description of Artificial Sequence: Synthetic coding sequence
  source 1..732: mol_type = other DNA
atggccgtgcagatcagcaagaagagaaagttcgtggccgacggcatcttcaaggccgagctgaacgagttcctgaccagagagctggccgaggacggctacagcggcgtggaggtgagagtgacccccaccagaaccgagatcatcatcctggccaccagaacccagaacgtgctgggcgagaagggcagaagaatcagagagctgaccgccgtggtgcagaagagattcggcttccccgagggcagcgtggagctgtacgccgagaaggtggccaccagaggcctgtgcgccatcgcccaggccgagagcctgagatacaagctgctgggcggcctggccgtgagaagagcctgctacggcgtgctgagattcatcatggagagcggcgccaagggctgcgaggtggtggtgagcggcaagctgagaggccagagagccaagagcatgaagttcgtggacggcctgatgatccacagcggcgaccccgtgaactactacgtggacaccgccgtgagacacgtgctgctgagacagggcgtgctgggcatcaaggtgaagatcatgctgccctgggaccccaccggcaagatcggccccaagaagcccctgcccgaccacgtgagcatcgtggagcccaaggacgagatcctgcccaccacccccatcagcgagcagaagggcggcaagcccgagccccccgccatgccccagcccgtgcccaccgcctag

SEQ ID NO: 97541 - DNA, 732 bp, synthetic construct; identical to SEQ ID NO: 97540
  misc_feature 1..732: note = Description of Artificial Sequence: Synthetic coding sequence
  source 1..732: mol_type = other DNA

SEQ ID NO: 97542 - DNA, 732 bp, synthetic construct; identical to SEQ ID NO: 97540
  misc_feature 1..732: note = Description of Artificial Sequence: Synthetic coding sequence
  source 1..732: mol_type = other DNA

SEQ ID NO: 97543 - DNA, 795 bp, synthetic construct
  misc_feature 1..795: note = Description of Artificial Sequence: Synthetic coding sequence
  source 1..795: mol_type = other DNA
atggccgtgggcaagaacaagagactgaccaagggcggcaagaagggcgccaagaagaaggtggtggaccccttcagcaagaaggactggtacgacgtgaaggcccccgccatgttcaacatcagaaacatcggcaagaccctggtgaccagaacccagggcaccaagatcgccagcgacggcctgaagggcagagtgttcgaggtgagcctggccgacctgcagaacgacgaggtggccttcagaaagttcaagctgatcaccgaggacgtgcagggcaagaactgcctgaccaacttccacggcatggacctgaccagagacaagatgtgcagcatggtgaagaagtggcagaccatgatcgaggcccacgtggacgtgaagaccaccgacggctacctgctgagactgttctgcgtgggcttcaccaagaagagaaacaaccagatcagaaagaccagctacgcccagcaccagcaggtgagacagatcagaaagaagatgatggagatcatgaccagagaggtgcagaccaacgacctgaaggaggtggtgaacaagctgatccccgacagcatcggcaaggacatcgagaaggcctgccagagcatctaccccctgcacgacgtgttcgtgagaaaggtgaagatgctgaagaagcccaagttcgagctgggcaagctgatggagctgcacggcgagggcagcagcagcggcaaggccaccggcgacgagaccggcgccaaggtggagagagccgacggctacgagccccccgtgcaggagagcgtgtag

SEQ ID NO: 97544 - DNA, 528 bp, synthetic construct
  misc_feature 1..528: note = Description of Artificial Sequence: Synthetic coding sequence
  source 1..528: mol_type = other DNA
atggccgtggccaagaagaaggtggtggaccccttcagcaagaaggactggtacgacgtgaaggcccccgccatgttcaacatcagaaacatcggcaagaccctggtgaccagaacccagggcaccaagatcgccagcgacggcctgaagggcagagtgttcgaggtgagcctggccgacctgcagaacgacgaggtggccttcagaaagttcaagctgatcaccgaggacgtgcagggcaagaactgcctgaccaacttccacggcatggacctgaccagagacaagatgtgcagcatggtgaagaagtggcagaccatgatcgaggcccacgtggacgtgaagaccaccgacggctacctgctgagactgttctgcgtgggcttcaccaagaagagaaacaaccagatcagaaagaccagctacgcccagcaccagcaggtgagacagatcagaaagaagatgatggagatcatgaccagagaggtgcagaccaacgacctgaaggaggtggtgaacaagctgtag

SEQ ID NO: 97545 - DNA, 684 bp, synthetic construct
  misc_feature 1..684: note = Description of Artificial Sequence: Synthetic coding sequence
  source 1..684: mol_type = other DNA
atgttcaacatcagaaacatcggcaagaccctggtgaccagaacccagggcaccaagatcgccagcgacggcctgaagggcagagtgttcgaggtgagcctggccgacctgcagaacgacgaggtggccttcagaaagttcaagctgatcaccgaggacgtgcagggcaagaactgcctgaccaacttccacggcatggacctgaccagagacaagatgtgcagcatggtgaagaagtggcagaccatgatcgaggcccacgtggacgtgaagaccaccgacggctacctgctgagactgttctgcgtgggcttcaccaagaagagaaacaaccagatcagaaagaccagctacgcccagcaccagcaggtgagacagatcagaaagaagatgatggagatcatgaccagagaggtgcagaccaacgacctgaaggaggtggtgaacaagctgatccccgacagcatcggcaaggacatcgagaaggcctgccagagcatctaccccctgcacgacgtgttcgtgagaaaggtgaagatgctgaagaagcccaagttcgagctgggcaagctgatggagctgcacggcgagggcagcagcagcggcaaggccaccggcgacgagaccggcgccaaggtggagagagccgacggctacgagccccccgtgcaggagagcgtgtag

SEQ ID NO: 97546 - DNA, 438 bp, synthetic construct
  misc_feature 1..438: note = Description of Artificial Sequence: Synthetic coding sequence
  source 1..438: mol_type = other DNA
atgatcgaggcccacgtggacgtgaagaccaccgacggctacctgctgagactgttctgcgtgggcttcaccaagaagagaaacaaccagatcagaaagaccagctacgcccagcaccagcaggtgagacagatcagaaagaagatgatggagatcatgaccagagaggtgcagaccaacgacctgaaggaggtggtgaacaagctgatccccgacagcatcggcaaggacatcgagaaggcctgccagagcatctaccccctgcacgacgtgttcgtgagaaaggtgaagatgctgaagaagcccaagttcgagctgggcaagctgatggagctgcacggcgagggcagcagcagcggcaaggccaccggcgacgagaccggcgccaaggtggagagagccgacggctacgagccccccgtgcaggagagcgtgtag

SEQ ID NO: 97547 - DNA, 684 bp, synthetic construct; identical to SEQ ID NO: 97545
  misc_feature 1..684: note = Description of Artificial Sequence: Synthetic coding sequence
  source 1..684: mol_type = other DNA

SEQ ID NO: 97548 - DNA, 627 bp, synthetic construct
  misc_feature 1..627: note = Description of Artificial Sequence: Synthetic coding sequence
  source 1..627: mol_type = other DNA
aagagactgaccaagggcggcaagaagggcgccaagaagaaggtggtggaccccttcagcaagaaggactggtacgacgtgaaggcccccgccatgttcaacatcagaaacatcggcaagaccctggtgaccagaacccagggcaccaagatcgccagcgacggcctgaagggcagagtgttcgagaccatgatcgaggcccacgtggacgtgaagaccaccgacggctacctgctgagactgttctgcgtgggcttcaccaagaagagaaacaaccagatcagaaagaccagctacgcccagcaccagcaggtgagacagatcagaaagaagatgatggagatcatgaccagagaggtgcagaccaacgacctgaaggaggtggtgaacaagctgatccccgacagcatcggcaaggacatcgagaaggcctgccagagcatctaccccctgcacgacgtgttcgtgagaaaggtgaagatgctgaagaagcccaagttcgagctgggcaagctgatggagctgcacggcgagggcagcagcagcggcaaggccaccggcgacgagaccggcgccaaggtggagagagccgacggctacgagccccccgtgcaggagagcgtgtag

SEQ ID NO: 97549 - DNA, 792 bp, synthetic construct
  misc_feature 1..792: note = Description of Artificial Sequence: Synthetic coding sequence
  source 1..792: mol_type = other DNA
atggccagaggccccaagaagcacctgaagagagtggccgcccccaagcactggatgctggacaagctgaccggcgtgttcgcccccagacccagcaccggcccccacaagctgagagagtgcctgcccctgatcatcttcctgagaaacagactgaagtacgccctgaccggcgacgaggtgaagaagatctgcatgcagagattcatcaagatcgacggcaaggtgagaaccgacatcacctaccccgccggcttcatggacgtgatcagcatcgacaagaccggcgagaacttcagactgatctacgacaccaagggcagattcgccgtgcacagaatcacccccgaggaggccaagtacaagctgtgcaaggtgagaaagatcttcgtgggcaccaagggcatcccccacctggtgacccacgacgccagaaccatcagataccccgaccccctgatcaaggtgaacgacaccatccagatcgacctggagaccggcaagatcaccgacttcatcaagttcgacaccggcaacctgtgcatggtgaccggcggcgccaacctgggcagaatcggcgtgatcaccaacagagagagacaccccggcagcttcgacgtggtgcacgtgaaggacgccaacggcaacagcttcgccaccagactgagcaacatcttcgtgatcggcaagggcaacaagccctggatcagcctgcccagaggcaagggcatcagactgaccatcgccgaggagagagacaagagactggccgccaagcagagcagcggctag

SEQ ID NO: 97550 - DNA, 369 bp, synthetic construct
  misc_feature 1..369: note = Description of Artificial Sequence: Synthetic coding sequence
  source 1..369: mol_type = other DNA
atggccagaggccccaagaagcacctgaagagagtggccgcccccaagcactggatgctggacaagctgaccggcgtgttcgcccccagacccagcaccggcccccacaagctgagagagtgcctgcccctgatcatcttcctgagaaacagactgaagtacgccctgaccggcgacgaggtgaagaagatctgcatgcagagattcatcaagatcgacggcaaggtgagaaccgacatcacctaccccgccggcttcatggacgtgatcagcatcgacaagaccggcgagaacttcagactgatctacgacaccaagggcagattcgccgtgcacagaatcacccccgaggaggccaagccctgctag

SEQ ID NO: 97551 - DNA, 792 bp, synthetic construct
  misc_feature 1..792: note = Description of Artificial Sequence: Synthetic coding sequence
  source 1..792: mol_type = other DNA
atggccagaggccccaagaagcacctgaagagagtggccgcccccaagcactggatgctggacaagctgaccggcgtgttcgcccccagacccagcaccggcccccacaagctgagagagtgcctgcccctgatcgtgttcctgagaaacagactgaagtacgccctgaccggcgacgaggtgaagaagatctgcatgcagagattcatcaagatcgacggcaaggtgagagtggacgtgacctaccccgccggcttcatggacgtgatcagcatcgagaagaccggcgagcacttcagactggtgtacgacaccaagggcagattcgccgtgcacagaatcaccgtggaggaggccaagtacaagctgtgcaaggtgagaaagatcaccgtgggcgtgaagggcatcccccacctggtgacccacgacgccagaaccatcagataccccgaccccgtgatcaaggtgaacgacaccgtgcagatcgacctgggcaccggcaagatcatcaacttcatcaagttcgacaccggcaacctgtgcatggtgatcggcggcgccaacctgggcagagtgggcgtgatcaccaacagagagagacaccccggcagcttcgacgtggtgcacgtgaaggacgccaacggcaacagcttcgccaccagactgagcaacatcttcgtgatcggcaacggcaacaagccctggatcagcctgcccagaggcaagggcatcagactgaccgtggccgaggagagagacaagagactggccaccaagcagagcagcggctag

SEQ ID NO: 97552 - DNA, 789 bp, synthetic construct
  misc_feature 1..789: note = Description of Artificial Sequence: Synthetic coding sequence
  source 1..789: mol_type = other DNA
atgctgggcagacccgccaagttcagcaaggccagaggccccaagaagcacctgaagagagtggccgcccccaagcactggatgctggacaagctgaccggcgtgttcgcccccagacccagcaccggcccccacaagctgagagagtgcctgcccctgatcgtgttcctgagaaacagactgaagtacgccctgaccggcgacgaggtgaagaagatctgcatgcagagattcatcaagatcgacggcaaggtgagagtggacgtgacctaccccgccggcttcatggacgtgatcagcatcgagaagaccggcgagcacttcagactggtgtacgacaccaagggcagattcgccgtgcacagaatcaccgtggaggaggccaagtacaagctgtgcaaggtgagaaagatcaccgtgggcgtgaagggcatcccccacctggtgacccacgacgccagaaccatcagataccccgaccccgtgatcaaggtgaacgacaccgtgcagatcgacctgggcaccggcaagatcatcaacttcatcaagttcgacaccggcaacctgtgcatggtgatcggcggcgccaacctgggcagagtgggcgtgatcaccaacagagagagacaccccggcagcttcgacgtggtgcacgtgaaggacgccaacggcaacagcttcgccaccagactgagcaacatcttcgtgatcggcaacggcaacaagccctggatcagcctgcccagaggcaagggcatcagactgaccgtggccgaggagagagactag

SEQ ID NO: 97553 - DNA, 792 bp, synthetic construct
  misc_feature 1..792: note = Description of Artificial Sequence: Synthetic coding sequence
  source 1..792: mol_type = other DNA
atggccagaggccccaagaagcacctgaagagagtggccgcccccaagcactggatgctggacaagctgaccggcgtgttcgcccccagacccagcaccggcccccacaagctgagagagtgcctgcccctgatcgtgttcctgagaaacagactgaagtacgccctgaccggcgacgaggtgaagaagatctgcatgcagcacttcctgaagatcgacggcaaggtgagagtggacatcacctaccccgccggcttcatcgacgtgatcagcatcgagaagaccggcgagcacttcagactggtgtacaacaccaagggctgcttcgccgtgcacagaatcaccgtggaggaggccaagtacaagctgtgcaaggtgagaaagatcaccgtgggcaccaagggcatcccccacctggtgacccacgacgccagaaccatcagataccccgaccccctgatcaaggtgaacgacaccgtgcagatcgacctgggcaccggcaagatcaccagcttcatcaagttcgacaccggcaacgtgtgcatggtgatcgccggcgccaacctgggcagagtgggcgtgatcaccaacagagagagacaccccggcagctgcgacgtggtgcacgtgaaggacgccaacggcaacagcttcgccaccagaatcagcaacatcttcgtgatcggcaacggcaacaagccctggatcagcctgcccagaggcaagggcatcagactgaccatcgccgaggagagagacaagagactggccgccaagcagagcagcggctag

SEQ ID NO: 97554 - DNA, 615 bp, synthetic construct
  misc_feature 1..615: note = Description of Artificial Sequence: Synthetic coding sequence
  source 1..615: mol_type = other DNA
atgaccgagtgggagaccgccgcccccgccgtggccgagacccccgacatcaagctgttcggcaagtggagcaccgacgacgtgcagatcaacgacatcagcctgcaggactacatcgccgtgaaggagaagtacgccaagtacctgccccacagcgccggcagatacgccgccaagagattcagaaaggcccagtgccccatcgtggagagactgaccaacagcatgatgatgcacggcagaaacaacggcaagaagctgatgaccgtgagaatcgtgaagcacgccttcgagatcatccacctgctgaccggcgagaaccccctgcaggtgctggtgaacgccatcatcaacagcggccccagagaggacagcaccagaatcggcagagccggcaccgtgagaagacaggccgtggacgtgagccccctgagaagagtgaaccaggccatctggctgctgtgcaccggcgccagagaggccgccttcagaaacatcaagaccatcgccgagtgcctggccgacgagctgatcaacgccgccaagggcagcagcaacagctacgccatcaagaagaaggacgagctggagagagtggccaagagcaacagatag

SEQ ID NO: 97555 - DNA, 615 bp, synthetic construct; identical to SEQ ID NO: 97554
  misc_feature 1..615: note = Description of Artificial Sequence: Synthetic coding sequence
  source 1..615: mol_type = other DNA

SEQ ID NO: 97556 - DNA, 657 bp, synthetic construct
  misc_feature 1..657: note = Description of Artificial Sequence: Synthetic coding sequence
  source 1..657: mol_type = other DNA
atggccaccgaggtggccgccgacgccctgggcgaggagtggaagggctacgtggtgagaatcagcggcggcaacgacaagcagggcttccccatgaagcagggcgtgctgacccacggcagagtgagactgctgctgagcaagggccacagctgctacagacccagaagaaccggcgagagaaagagaaagagcgtgagaggctgcatcgtggacgccaacctgagcgtgctgaacctggtgatcgtgaagaagggcgagaaggacatccccggcctgaccgacaccaccgtgcccagaagactgggccccaagagagccagcagaatcagaaagctgttcaacctgagcaaggaggacgacgtgagacagtacgtggtgagaaagcccctgaacaaggagggcaagaagcccagaaccaaggcccccaagatccagagactggtgacccccagagtgctgcagcacaagagaagaagaatcgccctgaagaagcagagaaccaagaagaacaaggaggaggccgccgagtacgccaagctgctggccaagagaatgaaggaggccaaggagaagagacaggagcagatcgccaagagaagaagactgagcagcctgagagccagcaccagcaagagcgagagcagccagaagtag

SEQ ID NO: 97557 - DNA, 276 bp, synthetic construct
  misc_feature 1..276: note = Description of Artificial Sequence: Synthetic coding sequence
  source 1..276: mol_type = other DNA
atgaagctgaacatcagcttccccgccaccggctgccagaagctgatcgaggtggacgacgagagaaagctgagaaccttctacgagaagagaatggccaccgaggtggccgccgacgccctgggcgaggagtggaaggtgaaggtggacaagctgctgcaggtgttcaagagcgagaccgtgaacgccatcggcaactggtacctggagtggggcagcgacagcggcttctggctgctgaccttcggcaagctgctgcccaacgccaccctgtag

SEQ ID NO: 97558 - DNA, 657 bp, synthetic construct; identical to SEQ ID NO: 97556
  misc_feature 1..657: note = Description of Artificial Sequence: Synthetic coding sequence
  source 1..657: mol_type = other DNA

SEQ ID NO: 97559 - DNA, 750 bp, synthetic construct
  misc_feature 1..750: note = Description of Artificial Sequence: Synthetic coding sequence
  source 1..750: mol_type = other DNA
atgaagctgaacatcagcttccccgccaccggctgccagaagctgatcgaggtggacgacgagagaaagctgagaaccttctacgagaagagaatggccaccgaggtggccgccgacgccctgggcgaggagtggaagggctacgtggtgagaatcagcggcggcaacgacaagcagggcttccccatgaagcagggcgtgctgacccacggcagagtgagactgctgctgagcaagggccacagctgctacagacccagaagaaccggcgagagaaagagaaagagcgtgagaggctgcatcgtggacgccaacctgagcgtgctgaacctggtgatcgtgaagaagggcgagaaggacatccccggcctgaccgacaccaccgtgcccagaagactgggccccaagagagccagcagaatcagaaagctgttcaacctgagcaaggaggacgacgtgagacagtacgtggtgagaaagcccctgaacaaggagggcaagaagcccagaaccaaggcccccaagatccagagactggtgacccccagagtgctgcagcacaagagaagaagaatcgccctgaagaagcagagaaccaagaagaacaaggaggaggccgccgagtacgccaagctgctggccaagagaatgaaggaggccaaggagaagagacaggagcagatcgccaagagaagaagactgagcagcctgagagccagcaccagcaagagcgagagcagccagaagtag

SEQ ID NO: 97560 - DNA, 585 bp, synthetic construct
  misc_feature 1..585: note = Description of Artificial Sequence: Synthetic coding sequence
  source 1..585: mol_type = other DNA
atgttcagcagcagcgccaagatcgtgaagcccaacggcgagaagcccgacgagttcgagagcggcatcagccaggccctgctggagctggagatgaacagcgacctgaaggcccagctgagagagctgaacatcaccgccgccaaggagatcgaggtgggcggcggcagaaaggccatcatcatcttcgtgcccgtgccccagctgaagagcttccagaagatccaggtgagactggtgagagagctggagaagaagttcagcggcaagcacgtggtgttcatcgcccagagaagaatcctgcccaagcccaccagaaagagcagaaccaagaacaagcagaagagacccagaagcagaaccctgaccgccgtgcacgacgccatcctggaggacctggtgttccccagcgagatcgtgggcaagagaatcagagtgaagctggacggcagcagactgatcaaggtgcacctggacaaggcccagcagaacaacgtggagcacaaggtggagaccttcagcggcgtgtacaagaagctgaccggcaaggacgtgaacttcgagttccccgagttccagctgtag

SEQ ID NO: 97561 - DNA, 585 bp, synthetic construct; identical to SEQ ID NO: 97560
  misc_feature 1..585: note = Description of Artificial Sequence: Synthetic coding sequence
  source 1..585: mol_type = other DNA

SEQ ID NO: 97562 - DNA, 585 bp, synthetic construct; identical to SEQ ID NO: 97560
  misc_feature 1..585: note = Description of Artificial Sequence: Synthetic coding sequence
  source 1..585: mol_type = other DNA

SEQ ID NO: 97563 - DNA, 567 bp, synthetic construct
  misc_feature 1..567: note = Description of Artificial Sequence: Synthetic coding sequence
  source 1..567: mol_type = other DNA
atgggcatcagcagagacaactggcacaagagaagaaagaccggcggcaagagaaagccctaccacaagaagagaaagtacgagctgggcagacccgccgccaacaccaagatcggccccagaagaatccacaccgtgagagtgagaggcggctgcaccagaaagaccagaatcatcgacgtggtgtacaacgccagcaacaacgagctggtgagaaccaagaccctggtgaagaactgcatcgtgctgatcgacagcaccccctacagacagtggtacgagagccactacgccctgcccctgggcagaaagaagggcgccaagctgacccccgaggaggaggagatcctgaacaagaagagaagcaagaagatccagaagaagtacgacgagagaaagaagaacgccaagatcagcagcctgctggaggagcagttccagcagggcaagctgctggcctgcatcgccagcagacccggccagtgcggcagagccgacggctacgtgctggagggcaaggagctggagttctacctgagaaagatcaaggccagaaagggcaagtag

SEQ ID NO: 97564 - DNA, 627 bp, synthetic construct
  misc_feature 1..627: note = Description of Artificial Sequence: Synthetic coding sequence
  source 1..627: mol_type = other DNA
atgggcatcagcagagacaactggcacaagagaagaaagaccggcggcaagagaaagccctaccacaagaagagaaagtacgagctgggcagacccgccgccaacaccaagatcggccccagaagaatccacaccgtgagagtgagaggcggcaacaagaagtacagagccctgagactggacgtgggcaacttcagctggggcagcgagtgctgcaccagaaagaccagaatcatcgacgtggtgtacaacgccagcaacaacgagctggtgagaaccaagaccctggtgaagaactgcatcgtgctgatcgacagcaccccctacagacagtggtacgagagccactacgccctgcccctgggcagaaagaagggcgccaagctgacccccgaggaggaggagatcctgaacaagaagagaagcaagaagatccagaagaagtacgacgagagaaagaagaacgccaagatcagcagcctgctggaggagcagttccagcagggcaagctgctggcctgcatcgccagcagacccggccagtgcggcagagccgacggctacgtgctggagggcaaggagctggagttctacctgagaaagatcaaggccagaaagggcaagtag

SEQ ID NO: 97565 - DNA, 585 bp, synthetic construct
  misc_feature 1..585: note = Description of Artificial Sequence: Synthetic coding sequence
  source 1..585: mol_type = other DNA
atgcccgtggccagaagctgggtgtgcagaaagacctacgtgacccccagaagacccttcgagaagagcagactggaccaggagctgaagctgatcggcgagtacggcctgagaaacaagagagaggtgtggagagtgaagttcaccctggccaagatcagaaaggccgccagagagctgctgaccctggacgagaaggaccccagaagactgttcgagggcaacgccctgctgagaagactggtgagaatcggcgtgctggacgagggcaagatgaagctggactacatcctgggcctgaagatcgaggacttcctggagagaagactgcagacccaggtgttcaagctgggcctggccaagagcatccaccacgccagagtgctgatcagacagagacacatcagagtgagaaagcaggtggtgaacatccccagcttcatcgtgagactggacagccagaagcacatcgacttcagcctgagaagcccctacggcggcggcagacccggcagagtgaagagaaagaacgccaagaagggccagggcggcgccggcgccggcgacgacgaggaggaggactag

SEQ ID NO: 97566 - DNA, 585 bp, synthetic construct; identical to SEQ ID NO: 97565
  misc_feature 1..585: note = Description of Artificial Sequence: Synthetic coding sequence
  source 1..585: mol_type = other DNA

SEQ ID NO: 97567 - DNA, 585 bp, synthetic construct; identical to SEQ ID NO: 97565
  misc_feature 1..585: note = Description of Artificial Sequence: Synthetic coding sequence
  source 1..585: mol_type = other DNA

SEQ ID NO: 97568 - DNA, 420 bp, synthetic construct
  misc_feature 1..420: note = Description of Artificial Sequence: Synthetic coding sequence
  source 1..420: mol_type = other DNA
atgcccgtggccagaagctgggtgtgcagaaagacctacgtgacccccagaagacccttcgagaagagcagactggaccaggagctgaagctgatcggcgagtacggcctgagaaacaagagagaggtgtggagagtgaagttcaccctggccaagatcagaaaggccgccagagagctgctgaccctggacgagaaggaccccagaagactgttcgagggcaacgccctgctgagaagactggtgagaatcggcgtgctggacgagggcaagatgaagctggactacatcctgggcctgaagatcgaggacttcctggagagaagactgcagacccaggtgttcaagctgggcctggccaagagcatccaccacgccagagtgctgatcagacagagacacatcagccccagaagatag

SEQ ID NO: 97569 - DNA, 420 bp, synthetic construct; identical to SEQ ID NO: 97568
  misc_feature 1..420: note = Description of Artificial Sequence: Synthetic coding sequence
  source 1..420: mol_type = other DNA

SEQ ID NO: 97570 - DNA, 471 bp, synthetic construct
  misc_feature 1..471: note = Description of Artificial Sequence: Synthetic coding sequence
  source 1..471: mol_type = other DNA
atgcccgtggccagaagctgggtgtgcagaaagacctacgtgacccccagaagacccttcgagaagagcagactggaccaggagctgaagctgatcggcgagtacggcctgagaaacaagagagaggtgtggagagtgaagttcaccctggccaagatcagaaaggccgccagagagctgctgaccctggacgagaaggaccccagaagactgttcgagggcaacgccctgctgagaagactggtgagaatcggcgtgctggacgagggcaagatgaagctggactacatcctgggcctgaagatcgaggacttcctggagagaagactgcagacccaggtgttcaagctgggcctggccaagagcatccaccacgccagagtgctgatcagacagagacacatcagataccacctgggctgggcccccgagagcagcagcacctgccccagcgacggctgcccccactag

SEQ ID NO: 97571 - DNA, 420 bp, synthetic construct; identical to SEQ ID NO: 97568
  misc_feature 1..420: note = Description of Artificial Sequence: Synthetic coding sequence
  source 1..420: mol_type = other DNA

SEQ ID NO: 97572 - DNA, 2844 bp, synthetic construct
  misc_feature 1..2844: note = Description of Artificial Sequence: Synthetic coding sequence
  source 1..2844: mol_type = other DNA
atggccaccagagtgagaaccgccagcatctgggtgccccccctgcaggagagaaacagcagctgggacagaatcagaaagctgcagggccaggagagcatcctgggccagggcacccccggcctgcagcccctgcccggcacccccagacagaagcagaagagcagaagaatcgagaaggtgctggagtggctgttcatcagccaggagcagcccaagatcaccaagagctggggccccctgagcttcatggacgtgttcgtggacttcacctgggaggagtggcagctgctggaccccgcccagaagtgcctgtacagaagcgtgatgctggagaactacagcaacctggtgagcctgggctaccagcacaccaagcccgacatcatcttcaagctggagcagggcgaggagctgtgcatggtgcaggcccaggtgcccaaccagacctgccccaacaccgtgtggaagatcgacgacctgatggactggcaccaggagaacaaggacaagctgggcagcaccgccaagagcttcgagtgcaccaccttcggcaagctgtgcctgctgagcaccaagtacctgagcagacagaagccccacaagtgcggcacccacggcaagagcctgaagtacatcgacttcaccagcgactacgccagaaacaaccccaacggcttccaggtgcacggcaagagcttcttccacagcaagcacgagcagaccgtgatcggcatcaagtactgcgagagcatcgagagcggcaagaccgtgaacaagaagagccagctgatgtgccagcagatgtacatgggcgagaagcccttcggctgcagctgctgcgagaaggccttcagcagcaagagctacctgctggtgcaccagcagacccacgccgaggagaagccctacggctgcaacgagtgcggcaaggacttcagcagcaagagctacctgatcgtgcaccagagaatccacaccggcgagaagctgcacgagtgcagcgagtgcagaaagaccttcagcttccacagccagctggtgatccaccagagaatccacaccggcgagaacccctacgagtgctgcgagtgcggcaaggtgttcagcagaaaggaccagctggtgagccaccagaagacccacagcggccagaagccctacgtgtgcaacgagtgcggcaaggccttcggcctgaagagccagctgatcatccacgagagaatccacaccggcgagaagccctacgagtgcaacgagtgccagaaggccttcaacaccaagagcaacctgatggtgcaccagagaacccacaccggcgagaagccctacgtgtgcagcgactgcggcaaggccttcaccttcaagagccagctgatcgtgcaccagggcatccacaccggcgtgaagccctacggctgcatccagtgcggcaagggcttcagcctgaagagccagctgatcgtgcaccagagaagccacaccggcatgaagccctacgtgtgcaacgagtgcggcaaggccttcagaagcaagagctacctgatcatccacaccagaacccacaccggcgagaagctgcacgagtgcaacaactgcggcaaggccttcagcttcaagagccagctgatcatccaccagagaatccacaccggcgagaacccctacgagtgccacgagtgcggcaaggccttcagcagaaagtaccagctgatcagccaccagagaacccacgccggcgagaagccctacgagtgcaccgactgcggcaaggccttcggcctgaagagccagctgatcatccaccagagaacccacaccggcgagaagcccttcgagtgcagcgagtgccagaaggccttcaacaccaagagcaacctgatcgtgcaccagagaacccacaccggcgagaagccctacagctgcaacgagtgcggcaaggccttcaccttcaagagccagctgatcgtgcacaagggcgtgcacaccggcgtgaagccctacggctgcagccagtgcgccaagaccttcagcctgaagagccagctgatcgtgcaccagagaagccacaccggcgtgaagccctacggctgcagcgagtgcggcaaggccttcagaagcaagagctacctgatcatccacatgagaacccacaccggcgagaagccccacgagtgcagagagtgcggcaagagcttcagcttcaacagccagctgatcgtgcaccagagaatccacaccggcgagaacccctacgagtgcagcgagtgcggcaaggccttcaacagaaaggaccagctgatcagccaccagagaacccacgccggcgagaagccctacggctgcagcgagtgcggcaaggccttcagcagcaagagctacctgatcatccacatgagaacccacagcggcgagaagccctacgagtgcaacgagtgcggcaaggccttcatctggaagagcctgctgatcgtgcacgagagaacccacgccggcgtgaacccctacaagtgcagccagtgcgagaagagcttcagcggcaagctgagactgctggtgcaccagagaatgcacaccagagagaagccctacgagtgcagcgagtgcggcaaggccttcatcagaaacagccagctgatcgtgcaccagagaacccacagcggcgagaagccctacggctgcaacgagtgcggcaagaccttcagccagaagagcatcctgagcgcccaccagagaacccacaccggcgagaagccctgcaagtgcaccgagtgcggcaaggccttctgctggaagagccagctgatcatgcaccagagaacccacgtggacgacaagcactag

SEQ ID NO: 97573 - DNA, 768 bp, synthetic construct
  misc_feature 1..768: note = Description of Artificial Sequence: Synthetic coding sequence
  source 1..768: mol_type = other DNA
atgcccagagaggacagagccacctggaagagcaactacttcctgaagatcatccagctgctggacgactaccccaagtgcttcatcgtgggcgccgacaacgtgggcagcaagcagatgcagcagatcagaatgagcctgagaggcaaggccgtggtgctgatgggcaagaacaccatgatgagaaaggccatcagaggccacctggagaacaaccccgccctggagaagctgctgccccacatcagaggcaacgtgggcttcgtgttcaccaaggaggacctgaccgagatcagagacatgctgctggccaacaaggtgcccgccgccgccagagccggcgccatcgccccctgcgaggtgaccgtgcccgcccagaacaccggcctgggccccgagaagaccagcttcttccaggccctgggcatcaccaccaagatcagcagaggcaccatcgagatcctgggcgtgagaaacgtggccagcgtgtgcctgcagatcggctaccccaccgtggccagcgtgccccacagcatcatcaacggctacaagagagtgctggccctgagcgtggagaccgactacaccttccccctggccgagaaggtgaaggccttcctggccgaccccagcgccttcgtggccgccgcccccgtggccgccgccaccaccgccgcccccgccgccgccgccgcccccgccaaggtggaggccaaggaggagagcgaggagagcgacgaggacatgggcttcggcctgttcgactag

SEQ ID NO: 97574 - DNA, 954 bp, synthetic construct
  misc_feature 1..954: note = Description of Artificial Sequence: Synthetic coding sequence
  source 1..954: mol_type = other DNA
atgcccagagaggacagagccacctggaagagcaactacttcctgaagatcatccagctgctggacgactaccccaagtgcttcatcgtgggcgccgacaacgtgggcagcaagcagatgcagcagatcagaatgagcctgagaggcaaggccgtggtgctgatgggcaagaacaccatgatgagaaaggccatcagaggccacctggagaacaaccccgccctggagaagctgctgccccacatcagaggcaacgtgggcttcgtgttcaccaaggaggacctgaccgagatcagagacatgctgctggccaacaaggtgcccgccgccgccagagccggcgccatcgccccctgcgaggtgaccgtgcccgcccagaacaccggcctgggccccgagaagaccagcttcttccaggccctgggcatcaccaccaagatcagcagaggcaccatcgagatcctgagcgacgtgcagctgatcaagaccggcgacaaggtgggcgccagcgaggccaccctgctgaacatgctgaacatcagccccttcagcttcggcctggtgatccagcaggtgttcgacaacggcagcatctacaaccccgaggtgctggacatcaccgaggagaccctgcacagcagattcctggagggcgtgagaaacgtggccagcgtgtgcctgcagatcggctaccccaccgtggccagcgtgccccacagcatcatcaacggctacaagagagtgctggccctgagcgtggagaccgactacaccttccccctggccgagaaggtgaaggccttcctggccgaccccagcgccttcgtggccgccgcccccgtggccgccgccaccaccgccgcccccgccgccgccgccgcccccgccaaggtggaggccaaggaggagagcgaggagagcgacgaggacatgggcttcggcctgttcgactag

SEQ ID NO: 97575 - DNA, 954 bp, synthetic construct; identical to SEQ ID NO: 97574
  misc_feature 1..954: note = Description of Artificial Sequence: Synthetic coding sequence
  source 1..954: mol_type = other DNA

SEQ ID NO: 97576 - DNA, 345 bp, synthetic construct
  misc_feature 1..345: note = Description of Artificial Sequence: Synthetic coding sequence
  source 1..345: mol_type = other DNA
atggccagcgtgagcgagctggcctgcatctacagcgccctgatcctgcacgacgacgaggtgaccgtgaccgaggacaagatcaacgccctgatcaaggccgccggcgtgaacgtggagcccttctggcccggcctgttcgccaaggccctggccaacgtgaacatcggcagcctgatctgcaacgtgggcgccggcggccccgcccccgccgccggcgccgcccccgccggcggccccgcccccagcaccgccgccgcccccgccgaggagaagaaggtggaggccaagaaggaggagagcgaggagagcgacgacgacatgggcttcggcctgttcgactag

SEQ ID NO: 97577 - DNA, 270 bp, synthetic construct
  misc_feature 1..270: note = Description of Artificial Sequence: Synthetic coding sequence
  source 1..270: mol_type = other DNA
atggccagcgtgagcgagctggcctgcatctacagcgccctgatcctgcacgacgacgaggtgaccgtgaccgccctggccaacgtgaacatcggcagcctgatctgcaacgtgggcgccggcggccccgcccccgccgccggcgccgcccccgccggcggccccgcccccagcaccgccgccgcccccgccgaggagaagaaggtggaggccaagaaggaggagagcgaggagagcgacgacgacatgggcttcggcctgttcgactag

SEQ ID NO: 97578 - DNA, 2277 bp, synthetic construct
  misc_feature 1..2277: note = Description of Artificial Sequence: Synthetic coding sequence
  source 1..2277: mol_type = other DNA
atggcccccgccatgcagcccgccgagatccagttcgcccagagactggccagcagcgagaagggcatcagagacagagccgtgaagaagctgagacagtacatcagcgtgaagacccagagagagaccggcggcttcagccaggaggagctgctgaagatctggaagggcctgttctactgcatgtgggtgcaggacgagcccctgctgcaggaggagctggccaacaccatcgcccagctggtgcacgccgtgaacaacagcgccgcccagcacctgttcatccagaccttctggcagaccatgaacagagagtggaagggcatcgacagactgagactggacaagtactacatgctgatcagactggtgctgagacagagcttcgaggtgctgaagagaaacggctgggaggagagcagaatcaaggtgttcctggacgtgctgatgaaggaggtgctgtgccccgagagccagagccccaacggcgtgagattccacttcatcgacatctacctggacgagctgagcaaggtgggcggcaaggagctgctggccgaccagaacctgaagttcatcgaccccttctgcaagatcgccgccaagaccaaggaccacaccctggtgcagaccatcgccagaggcgtgttcgaggccatcgtggaccagagccccttcgtgcccgaggagaccatggaggagcagaagaccaaggtgggcgacggcgacctgagcgccgaggagatccccgagaacgaggtgagcctgagaagagccgtgagcaagaagaagaccgccctgggcaagaaccacagcagaaaggacggcctgagcgacgagagaggcagagacgactgcggcaccttcgaggacaccggccccctgctgcagttcgactacaaggccgtggccgacagactgctggagatgaccagcagaaagaacaccccccacttcaacagaaagagactgagcaagctgatcaagaagttccaggacctgagcgagggcagcagcatcagccagctgagcttcgccgaggacatcagcgccgacgaggacgaccagatcctgagccagggcaagcacaagaagaagggcaacaagctgctggagaagaccaacctggagaaggagaagggcagcagagtgttctgcgtggaggaggaggacagcgagagcagcctgcagaagagaagaagaaagaagaagaagaagcaccacctgcagcccgagaaccccggccccggcggcgccgcccccagcctggagcagaacagaggcagagagcccgaggccagcggcctgaaggccctgaaggccagagtggccgagcccggcgccgaggccaccagcagcaccggcgaggagagcggcagcgagcacccccccgccgtgcccatgcacaacaagagaaagagacccagaaagaagagccccagagcccacagagagatgctggagagcgccgtgctgccccccgaggacatgagccagagcggccccagcggcagccacccccagggccccagaggcagccccaccggcggcgcccagctgctgaagagaaagagaaagctgggcgtggtgcccgtgaacggcagcggcctgagcacccccgcctggccccccctgcagcaggagggcccccccaccggccccgccgagggcgccaacagccacaccaccctgccccagagaagaagactgcagaagaagaaggccggccccggcagcctggagctgtgcggcctgcccagccagaagaccgccagcctgaagaagagaaagaagatgagagtgatgagcaacctggtggagcacaacggcgtgctggagagcgaggccggccagccccaggccctgggcagcagcggcacctgcagcagcctgaagaagcagaagctgagagccgagagcgacttcgtgaagttcgacacccccttcctgcccaagcccctgttcttcagaagagccaagagcagcaccgccacccacccccccggccccgccgtgcagctgaacaagacccccagcagcagcaagaaggtgaccttcggcctgaacagaaacatgaccgccgagttcaagaagaccgacaagagcatcctggtgagccccaccggccccagcagagtggccttcgaccccgagcagaagcccctgcacggcgtgctgaagacccccaccagcagccccgccagcagccccctggtggccaagaagcccctgaccaccacccccagaagaagacccagagccatggacttcttctag

SEQ ID NO: 97579 - DNA, 780 bp, synthetic construct
  misc_feature 1..780: note = Description of Artificial Sequence: Synthetic coding sequence
  source 1..780: mol_type = other DNA
atgcccggcgccaactacagagccggcgccggcgccggcgccggcgccagaagacccagaggcgccagagacagagaggaggacggcggcggcctggagcccgccgccgtggccagagacctgctgagaggcaccagcaacatgagcttcgaggagctgctggagctgcagagccaggtgggcaccaagacctacaagcagctggtggccggcaacagccccaagaagcaggccagcagaccccccatccagaacgcctgcgtggccgacaagcacagacccctggagatgagcgccaagatcagagtgcccttcctgagacaggtggtgcccatcagcaagaaggtggccagagaccccagattcgacgacctgagcggcgagtacaaccccgaggtgttcgacaagacctaccagttcctgaacgacatcagagccaaggagaaggagctggtgaagaagcagctgaagaagcacctgagcggcgaggagcacgagaagctgcagcagctgctgcagagaatggagcagcaggagatggcccagcaggagagaaagcagcagcaggagctgcacctggccctgaagcaggagagaagagcccaggcccagcagggccacagaccctacttcctgaagaagagcgagcagagacagctggccctggccgagaagttcaaggagctgaagagaagcaagaagctggagaacttcctgagcagaaagagaagaagaaacgccggcaaggacagaagacacctgcccctgagcaaggagtag

SEQ ID NO: 97580 - DNA, 4233 bp, synthetic construct
  misc_feature 1..4233: note = Description of Artificial Sequence: Synthetic coding sequence
  source 1..4233: mol_type = other DNA
atggacatctacgacacccagaccctgggcgtggtggtgttcggcggcttcatggtggtgagcgccatcggcatcttcctggtgagcaccttcagcatgaaggagaccagctacgaggaggccctggccaaccagagaaaggagatggccaagacccaccaccagaaggtggagaagaagaagaaggagaagaccgtggagaagaagggcaagaccaagaagaaggaggagaagcccaacggcaagatccccgaccacgaccccgcccccaacgtgaccgtgctgctgagagagcccgtgagagcccccgccgtggccgtggcccccacccccgtgcagccccccatcatcgtggcccccgtggccaccgtgcccgccatgccccaggagaagctggccagcagccccaaggacaagaagaagaaggagaagaaggtggccaaggtggagcccgccgtgagcagcgtggtgaacagcatccaggtgctgaccagcaaggccgccatcctggagaccgcccccaaggaggtgcccatggtggtggtgccccccgtgggcgccaagggcaacacccccgccaccggcaccacccagggcaagaaggccgagggcacccagaaccagagcaagaaggccgagggcgcccccaaccagggcagaaaggccgagggcacccccaaccagggcaagaagaccgagggcacccccaaccagggcaagaaggccgagggcacccccaaccagggcaagaaggccgagggcacccccaaccagggcaagaaggccgagggcgcccagaaccagggcaagaaggtggacaccacccccaaccagggcaagaaggtggagggcgcccccacccagggcagaaaggccgagggcgcccagaaccaggccaagaaggtggagggcgcccagaaccagggcaagaaggccgagggcgcccagaaccagggcaagaagggcgagggcgcccagaaccagggcaagaaggccgagggcgcccagaaccagggcaagaaggccgagggcgcccagaaccagggcaagaaggccgagggcgcccagaaccagggcaagaaggccgagggcgcccagaaccagggcaagaaggccgagggcgcccagaaccagggcaagaagagcgagggcgcccagaaccagggcaagaaggtggagggcgcccagaaccagggcaagaaggccgagggcgcccagaaccagggcaagaaggccgagggcgcccagaaccagggcaagaaggccgagggcgcccagaaccagggcaagaaggccgagggcgcccagaaccagggcaagaaggccgagggcgcccagaaccagggcaagaaggccgagggcgcccagaaccagggcaagaaggccgagggcgcccagaaccagggcaagaaggtggagggcgcccagaaccagggcaagaaggccgagggcgcccagaaccagggcaagaaggccgagggcgcccagaaccagggcaagaaggccgagggcgcccagaaccagggccagaagggcgagggcgcccagaaccagggcaagaagaccgagggcgcccagggcaagaaggccgagagaagccccaaccagggcaagaagggcgagggcgcccccatccagggcaagaaggccgacagcgtggccaaccagggcaccaaggtggagggcatcaccaaccagggcaagaaggccgagggcagccccagcgagggcaagaaggccgagggcagccccaaccagggcaagaaggccgacgccgccgccaaccagggcaagaagaccgagagcgccagcgtgcagggcagaaacaccgacgtggcccagagccccgaggcccccaagcaggaggcccccgccaagaagaagagcggcagcaagaagaagggcgagcccggcccccccgacgccgacggccccctgtacctgccctacaagaccctggtgagcaccgtgggcagcatggtgttcaacgagggcgaggcccagagactgatcgagatcctgagcgagaaggccggcatcatccaggacacctggcacaaggccacccagaagggcgaccccgtggccatcctgaagagacagctggaggagaaggagaagctgctggccaccgagcaggaggacgccgccgtggccaagagcaagctgagagagctgaacaaggagatggccgccgagaaggccaaggccgccgccggcgaggccaaggtgaagaagcagctggtggccagagagcaggagatcaccgccgtgcaggccagaatgcaggccagctacagagagcacgtgaaggaggtgcagcagctgcagggcaagatcagaaccctgcaggagcagctggagaacggccccaacacccagctggccagactgcagcaggagaacagcatcctgagagacgccctgaaccaggccaccagccaggtggagagcaagcagaacgccgagctggccaagctgagacaggagctgagcaaggtgagcaaggagctggtggagaagagcgaggccgtgagacaggacgagcagcagagaaaggccctggaggccaaggccgccgccttcgagaagcaggtgctgcagctgcaggccagccacagagagagcgaggaggccctgcagaagagactggacgaggtgagcagagagctgtgccacacccagagcagccacgccagcctgagagccgacgccgagaaggcccaggagcagcagcagcagatggccgagctgcacagcaagctgcagagcagcgaggccgaggtgagaagcaagtgcgaggagctgagcggcctgcacggccagctgcaggaggccagagccgagaacagccagctgaccgagagaatcagaagcatcgaggccctgctggaggccggccaggccagagacgcccaggacgtgcaggccagccaggccgaggccgaccagcagcagaccagactgaaggagctggagagccaggtgagcggcctggagaaggaggccatcgagctgagagaggccgtggagcagcagaaggtgaagaacaacgacctgagagagaagaactggaaggccatggaggccctggccaccgccgagcaggcctgcaaggagaagctgctgagcctgacccaggccaaggaggagagcgagaagcagctgtgcctgatcgaggcccagaccatggaggccctgctggccctgctgcccgagctgagcgtgctggcccagcagaactacaccgagtggctgcaggacctgaaggagaagggccccaccctgctgaagcacccccccgcccccgccgagcccagcagcgacctggccagcaagctgagagaggccgaggagacccagagcaccctgcaggccgagtgcgaccagtacagaagcatcctggccgagaccgagggcatgctgagagacctgcagaagagcgtggaggaggaggagcaggtgtggagagccaaggtgggcgccgccgaggaggagctgcagaagagcagagtgaccgtgaagcacctggaggagatcgtggagaagctgaagggcgagctggagagcagcgaccaggtgagagagcacaccagccacctggaggccgagctggagaagcacatggccgccgccagcgccgagtgccagaactacgccaaggaggtggccggcctgagacagctgctgctggagagccagagccagctggacgccgccaagagcgaggcccagaagcagagcgacgagctggccctggtgagacagcagctgagcgagatgaagagccacgtggaggacggcgacatcgccggcgcccccgccagcagccccgaggccccccccgccgagcaggaccccgtgcagctgaagacccagctggagtggaccgaggccatcctggaggacgagcagacccagagacagaagctgaccgccgagttcgaggaggcccagaccagcgcctgcagactgcaggaggagctggagaagctgagaaccgccggccccctggagagcagcgagaccgaggaggccagccagctgaaggagagactggagaaggagaagaagctgaccagcgacctgggcagagccgccaccagactgcaggagctgctgaagaccacccaggagcagctggccagagagaaggacaccgtgaagaagctgcaggagcagctggagaaggccgaggacggcagcagcagcaaggagggcaccagcgtgtag

SEQ ID NO: 97581 - DNA, 2934 bp, synthetic construct
  misc_feature 1..2934: note = Description of Artificial Sequence: Synthetic coding sequence
  source 1..2934: mol_type = other DNA
atggacatctacgacacccagaccctgggcgtggtggtgttcggcggcttcatggtggtgagcgccatcggcatcttcctggtgagcaccttcagcatgaaggagaccagctacgaggaggccctggccaaccagagaaaggagatggccaagacccaccaccagaaggtggagaagaagaagaaggagaagaccgtggagaagaagggcaagaccaagaagaaggaggagaagcccaacggcaagatccccgaccacgaccccgcccccaacgtgaccgtgctgctgagagagcccgtgagagcccccgccgtggccgtggcccccacccccgtgcagccccccatcatcgtggcccccgtggccaccgtgcccgccatgccccaggagaagctggccagcagccccaaggacaagaagaagaaggagaagaaggtggccaaggtggagcccgccgtgagcagcgtggtgaacagcatccaggtgctgaccagcaaggccgccatcctggagaccgcccccaaggagggcagaaacaccgacgtggcccagagccccgaggcccccaagcaggaggcccccgccaagaagaagagcggcagcaagaagaagggcccccccgacgccgacggccccctgtacctgccctacaagaccctggtgagcaccgtgggcagcatggtgttcaacgagggcgaggcccagagactgatcgagatcctgagcgagaaggccggcatcatccaggacacctggcacaaggccacccagaagggcgaccccgtggccatcctgaagagacagctggaggagaaggagaagctgctggccaccgagcaggaggacgccgccgtggccaagagcaagctgagagagctgaacaaggagatggccgccgagaaggccaaggccgccgccggcgaggccaaggtgaagaagcagctggtggccagagagcaggagatcaccgccgtgcaggccagaatgcaggccagctacagagagcacgtgaaggaggtgcagcagctgcagggcaagatcagaaccctgcaggagcagctggagaacggccccaacacccagctggccagactgcagcaggagaacagcatcctgagagacgccctgaaccaggccaccagccaggtggagagcaagcagaacgccgagctggccaagctgagacaggagctgagcaaggtgagcaaggagctggtggagaagagcgaggccgtgagacaggacgagcagcagagaaaggccctggaggccaaggccgccgccttcgagaagcaggtgctgcagctgcaggccagccacagagagagcgaggaggccctgcagaagagactggacgaggtgagcagagagctgtgccacacccagagcagccacgccagcctgagagccgacgccgagaaggcccaggagcagcagcagcagatggccgagctgcacagcaagctgcagagcagcgaggccgaggtgagaagcaagtgcgaggagctgagcggcctgcacggccagctgcaggaggccagagccgagaacagccagctgaccgagagaatcagaagcatcgaggccctgctggaggccggccaggccagagacgcccaggacgtgcaggccagccaggccgaggccgaccagcagcagaccagactgaaggagctggagagccaggtgagcggcctggagaaggaggccatcgagctgagagaggccgtggagcagcagaaggtgaagaacaacgacctgagagagaagaactggaaggccatggaggccctggccaccgccgagcaggcctgcaaggagaagctgctgagcctgacccaggccaaggaggagagcgagaagcagctgtgcctgatcgaggcccagaccatggaggccctgctggccctgctgcccgagctgagcgtgctggcccagcagaactacaccgagtggctgcaggacctgaaggagaagggccccaccctgctgaagcacccccccgcccccgccgagcccagcagcgacctggccagcaagctgagagaggccgaggagacccagagcaccctgcaggccgagtgcgaccagtacagaagcatcctggccgagaccgagggcatgctgagagacctgcagaagagcgtggaggaggaggagcaggtgtggagagccaaggtgggcgccgccgaggaggagctgcagaagagcagagtgaccgtgaagcacctggaggagatcgtggagaagctgaagggcgagctggagagcagcgaccaggtgagagagcacaccagccacctggaggccgagctggagaagcacatggccgccgccagcgccgagtgccagaactacgccaaggaggtggccggcctgagacagctgctgctggagagccagagccagctggacgccgccaagagcgaggcccagaagcagagcgacgagctggccctggtgagacagcagctgagcgagatgaagagccacgtggaggacggcgacatcgccggcgcccccgccagcagccccgaggccccccccgccgagcaggaccccgtgcagctgaagacccagctggagtggaccgaggccatcctggaggacgagcagacccagagacagaagctgaccgccgagttcgaggaggcccagaccagcgcctgcagactgcaggaggagctggagaagctgagaaccgccggccccctggagagcagcgagaccgaggaggccagccagctgaaggagagactggagaaggagaagaagctgaccagcgacctgggcagagccgccaccagactgcaggagctgctgaagaccacccaggagcagctggccagagagaaggacaccgtgaagaagctgcaggagcagctggagaaggccgaggacggcagcagcagcaaggagggcaccagcgtgtag

SEQ ID NO: 97582 - DNA, 2934 bp, synthetic construct; identical to SEQ ID NO: 97581
  misc_feature 1..2934: note = Description of Artificial Sequence: Synthetic coding sequence
  source 1..2934: mol_type = other DNA

SEQ ID NO: 97583 - DNA, 4233 bp, synthetic construct; identical to SEQ ID NO: 97580
  misc_feature 1..4233: note = Description of Artificial Sequence: Synthetic coding sequence
  source 1..4233: mol_type = other DNA

SEQ ID NO: 97584 - DNA, 903 bp, synthetic construct
  misc_feature 1..903: note = Description of Artificial Sequence: Synthetic coding sequence
  source 1..903: mol_type = other DNA
atggacatctacgacacccagaccctgggcgtggtggtgttcggcggcttcatggtggtgagcgccatcggcatcttcctggtgagcaccttcagcatgaaggagaccagctacgaggaggccctggccaaccagagaaaggagatggccaagacccaccaccagaaggtggagaagaagaagaaggagaagaccgtggagaagaagggcaagaccaagaagaaggaggagaagcccaacggcaagatccccgaccacgaccccgcccccaacgtgaccgtgctgctgagagagcccgtgagagcccccgccgtggccgtggcccccacccccgtgcagccccccatcatcgtggcccccgtggccaccgtgcccgccatgccccaggagaagctggccagcagccccaaggacaagaagaagaaggagaagaaggtggccaaggtggagcccgccgtgagcagcgtggtgaacagcatccaggtgctgaccagcaaggccgccatcctggagaccgcccccaaggaggtgcccatggtggtggtgccccccgtgggcgccaagggcaacacccccgccaccggcaccacccagggcaagaaggccgagggcacccagaaccagagcaagaaggccgagggcgcccccaaccagggcagaaaggccgagggcacccccaaccagggcaagaagaccgagggcacccccaaccagggcaagaaggccgagggcacccccaaccagggcaagaaggccgagggcacccccaaccagggcaagaaggccgagggcgcccagaaccagggcaagaaggtggacaccacccccaaccagggcaagaaggtggagggcgcccccacccagggcagaaaggccgagggcgcccagaaccaggccaagtag

SEQ ID NO: 97585 - DNA, 2256 bp, synthetic construct
  misc_feature 1..2256: note = Description of Artificial Sequence: Synthetic coding sequence
  source 1..2256: mol_type = other DNA
atggtgttcaacgagggcgaggcccagagactgatcgagatcctgagcgagaaggccggcatcatccaggacacctggcacaaggccacccagaagggcgaccccgtggccatcctgaagagacagctggaggagaaggagaagctgctggccaccgagcaggaggacgccgccgtggccaagagcaagctgagagagctgaacaaggagatggccgccgagaaggccaaggccgccgccggcgaggccaaggtgaagaagcagctggtggccagagagcaggagatcaccgccgtgcaggccagaatgcaggccagctacagagagcacgtgaaggaggtgcagcagctgcagggcaagatcagaaccctgcaggagcagctggagaacggccccaacacccagctggccagactgcagcaggagaacagcatcctgagagacgccctgaaccaggccaccagccaggtggagagcaagcagaacgccgagctggccaagctgagacaggagctgagcaaggtgagcaaggagctggtggagaagagcgaggccgtgagacaggacgagcagcagagaaaggccctggaggccaaggccgccgccttcgagaagcaggtgctgcagctgcaggccagccacagagagagcgaggaggccctgcagaagagactggacgaggtgagcagagagctgtgccacacccagagcagccacgccagcctgagagccgacgccgagaaggcccaggagcagcagcagcagatggccgagctgcacagcaagctgcagagcagcgaggccgaggtgagaagcaagtgcgaggagctgagcggcctgcacggccagctgcaggaggccagagccgagaacagccagctgaccgagagaatcagaagcatcgaggccctgctggaggccggccaggccagagacgcccaggacgtgcaggccagccaggccgaggccgaccagcagcagaccagactgaaggagctggagagccaggtgagcggcctggagaaggaggccatcgagctgagagaggccgtggagcagcagaaggtgaagaacaacgacctgagagagaagaactggaaggccatggaggccctggccaccgccgagcaggcctgcaaggagaagctgctgagcctgacccaggccaaggaggagagcgagaagcagctgtgcctgatcgaggcccagaccatggaggccctgctggccctgctgcccgagctgagcgtgctggcccagcagaactacaccgagtggctgcaggacctgaaggagaagggccccaccctgctgaagcacccccccgcccccgccgagcccagcagcgacctggccagcaagctgagagaggccgaggagacccagagcaccctgcaggccgagtgcgaccagtacagaagcatcctggccgagaccgagggcatgctgagagacctgcagaagagcgtggaggaggaggagcaggtgtggagagccaaggtgggcgccgccgaggaggagctgcagaagagcagagtgaccgtgaagcacctggaggagatcgtggagaagctgaagggcgagctggagagcagcgaccaggtgagagagcacaccagccacctggaggccgagctggagaagcacatggccgccgccagcgccgagtgccagaactacgccaaggaggtggccggcctgagacagctgctgctggagagccagagccagctggacgccgccaagagcgaggcccagaagcagagcgacgagctggccctggtgagacagcagctgagcgagatgaagagccacgtggaggacggcgacatcgccggcgcccccgccagcagccccgaggccccccccgccgagcaggaccccgtgcagctgaagacccagctggagtggaccgaggccatcctggaggacgagcagacccagagacagaagctgaccgccgagttcgaggaggcccagaccagcgcctgcagactgcaggaggagctggagaagctgagaaccgccggccccctggagagcagcgagaccgaggaggccagccagctgaaggagagactggagaaggagaagaagctgaccagcgacctgggcagagccgccaccagactgcaggagctgctgaagaccacccaggagcagctggccagagagaaggacaccgtgaagaagctgcaggagcagctggagaaggccgaggacggcagcagcagcaaggagggcaccagcgtgtag

SEQ ID NO: 97586 - DNA, 663 bp, synthetic construct
  misc_feature 1..663: note = Description of Artificial Sequence: Synthetic coding sequence
  source 1..663: mol_type = other DNA
atggccagcggctgcaagatcggccccagcatcctgaacagcgacctggccaacctgggcgccgagtgcctgagaatgctggacagcggcgccgactacctgcacctggacgtgatggacggctacatgcacatgatggtgagcaagcccgagcagtgggtgaagcccatggccgtggccggcgccaaccagtacaccttccacctggaggccaccgagaaccccggcgccctgatcaaggacatcagagagaacggcatgaagagctgcagcgtgacccaggccgaggtgcagtggcacagccagggccccctgcaggtgggcctggccatcaagcccggcaccagcgtggagtacctggccccctgggccaaccagatcgacatggccctggtgatgaccgtggagcccggcttcggcggccagaagttcatggaggacatgatgcccaaggtgcactggctgagaacccagttccccagcctggacatcgaggtggacggcggcgtgggccccgacaccgtgcacaagtgcgccgaggccggcgccaacatgatcgtgagcggcagcgccatcatgagaagcgaggaccccagaagcgtgatcaacctgctgagaaacgtgtgcagcgaggccgcccagaagagaagcctggacagatag

SEQ ID NO: 97587 - DNA, 687 bp, synthetic construct
  misc_feature 1..687: note = Description of Artificial Sequence: Synthetic coding sequence
  source 1..687: mol_type = other DNA
atggccagcggctgcaagatcggccccagcatcctgaacagcgacctggccaacctgggcgccgagtgcctgagaatgctggacagcggcgccgactacctgcacctggacgtgatggacggccacttcgtgcccaacatcaccttcggccaccccgtggtggagagcctgagaaagcagctgggccaggaccccttcttcgacatgcacatgatggtgagcaagcccgagcagtgggtgaagcccatggccgtggccggcgccaaccagtacaccttccacctggaggccaccgagaaccccggcgccctgatcaaggacatcagagagaacggcatgaaggtgggcctggccatcaagcccggcaccagcgtggagtacctggccccctgggccaaccagatcgacatggccctggtgatgaccgtggagcccggcttcggcggccagaagttcatggaggacatgatgcccaaggtgcactggctgagaacccagttccccagcctggacatcgaggtggacggcggcgtgggccccgacaccgtgcacaagtgcgccgaggccggcgccaacatgatcgtgagcggcagcgccatcatgagaagcgaggaccccagaagcgtgatcaacctgctgagaaacgtgtgcagcgaggccgcccagaagagaagcctggacagatag

SEQ ID NO: 97588 - DNA, 537 bp, synthetic construct
  misc_feature 1..537: note = Description of Artificial Sequence: Synthetic coding sequence
  source 1..537: mol_type = other DNA
atgcacatgatggtgagcaagcccgagcagtgggtgaagcccatggccgtggccggcgccaaccagtacaccttccacctggaggccaccgagaaccccggcgccctgatcaaggacatcagagagaacggcatgaagagctgcagcgtgacccaggccgaggtgcagtggcacagccagggccccctgcaggtgggcctggccatcaagcccggcaccagcgtggagtacctggccccctgggccaaccagatcgacatggccctggtgatgaccgtggagcccggcttcggcggccagaagttcatggaggacatgatgcccaaggtgcactggctgagaacccagttccccagcctggacatcgaggtggacggcggcgtgggccccgacaccgtgcacaagtgcgccgaggccggcgccaacatgatcgtgagcggcagcgccatcatgagaagcgaggaccccagaagcgtgatcaacctgctgagaaacgtgtgcagcgaggccgcccagaagagaagcctggacagatag

SEQ ID NO: 97589 - DNA, 537 bp, synthetic construct; identical to SEQ ID NO: 97588
  misc_feature 1..537: note = Description of Artificial Sequence: Synthetic coding sequence
  source 1..537: mol_type = other DNA

SEQ ID NO: 97590 - DNA, 285 bp, synthetic construct
  misc_feature 1..285: note = Description of Artificial Sequence: Synthetic coding sequence
  source 1..285: mol_type = other DNA
atgcacatgatggtgagcaagcccgagcagtgggtgaagcccatggccgtggccggcgccaaccagtacaccttccacctggaggccaccgagaaccccggcgccctgatcaaggacatcagagagaacggcatgaagagctgcagcgtgacccaggccgaggtgcagtggcacagccagggccccctgcaggtgggcctggccatcaagcccggcaccagcgtggagtacctggccccctgggccaaccagatcgacatggccctggtgatgaccgtggagtag

SEQ ID NO: 97591 - DNA, 537 bp, synthetic construct; identical to SEQ ID NO: 97588
  misc_feature 1..537: note = Description of Artificial Sequence: Synthetic coding sequence
  source 1..537: mol_type = other DNA

SEQ ID NO: 97592 - DNA, 600 bp, synthetic construct
  misc_feature 1..600: note = Description of Artificial Sequence: Synthetic coding sequence
  source 1..600: mol_type = other DNA
atggccagcggctgcaagatcggccccagcatcctgaacagcgacctggccaacctgggcgccgagtgcctgagaatgctggacagcggcgccgactacctgcacctggacgtgatggacggccacttcgtgcccaacatcaccttcggccaccccgtggtggagagcctgagaaagcagctgggccaggaccccttcttcgacatgcacatgatggtgagcaagcccgagcagtgggtgaagcccatggccgtggccggcgccaaccagtacaccttccacctggaggccaccgagaaccccggcgccctgatcaaggacatcagagagaacggcatgaaggtgggcctggccatcaagcccggcaccagcgtggagtacctggccccctgggccaaccagatcgacatggccctggtgatgaccgtggagcccggcttcggcggccagaagttcatggaggacatgatgcccaaggccggcgccaacatgatcgtgagcggcagcgccatcatgagaagcgaggaccccagaagcgtgatcaacctgctgagaaacgtgtgcagcgaggccgcccagaagagaagcctggacagatag

SEQ ID NO: 97593 - DNA, 3159 bp, synthetic construct
  misc_feature 1..3159: note = Description of Artificial Sequence: Synthetic coding sequence
  source 1..3159: mol_type = other DNA
atgagagaggccgccgagagaagacagcagctgcagctggagcacgaccaggccctggccgtgctgagcgccaagcagcaggagatcgacctgctgcagaagagcaaggtgagagagctggaggagaagtgcagaacccagagcgagcagttcaacctgctgagcagagacctggagaagttcagacagcacgccggcaagatcgacctgctgggcggcagcgccgtggcccccctggacatcagcaccgcccccagcaagcccttcccccagttcatgaacggcctggccaccagcctgggcaagggccaggagagcgccatcggcggcagcagcgccatcggcgagtacatcagacccctgccccagcccggcgacagacccgagcccctgagcgccaagcccaccttcctgagcagaagcggcagcgccagatgcagaagcgagagcgacatggagaacgagagaaacagcaacaccagcaagcagagatacagcggcaaggtgcacctgtgcgtggccagatacagctacaaccccttcgacggccccaacgagaaccccgaggccgagctgcccctgaccgccggcaagtacctgtacgtgtacggcgacatggacgaggacggcttctacgagggcgagctgctggacggccagagaggcctggtgcccagcaacttcgtggacttcgtgcaggacaacgagagcagactggccagcaccctgggcaacgagcaggaccagaacttcatcaaccacagcggcatcggcctggagggcgagcacatcctggacctgcacagccccacccacatcgacgccggcatcaccgacaacagcgccggcaccctggacgtgaacatcgacgacatcggcgaggacatcgtgccctaccccagaaagatcaccctgatcaagcagctggccaagagcgtgatcgtgggctgggagccccccgccgtgccccccggctggggcaccgtgagcagctacaacgtgctggtggacaaggagaccagaatgaacctgaccctgggcagcagaaccaaggccctgatcgagaagctgaacatggccgcctgcacctacagaatcagcgtgcagtgcgtgaccagcagaggcagcagcgacgagctgcagtgcaccctgctggtgggcaaggacgtggtggtggcccccagccacctgagagtggacaacatcacccagatcagcgcccagctgagctggctgcccaccaacagcaactacagccacgtgatcttcctgaacgaggaggagttcgacatcgtgaaggccgccagatacaagtaccagttcttcaacctgagacccaacatggcctacaaggtgaaggtgctggccaagccccaccagatgccctggcagctgcccctggagcagagagagaagaaggaggccttcgtggagttcagcaccctgcccgccggcccccccgcccccccccaggacgtgaccgtgcaggccggcgtgacccccgccaccatcagagtgagctggagaccccccgtgctgacccccaccggcctgagcaacggcgccaacgtgaccggctacggcgtgtacgccaagggccagagagtggccgaggtgatcttccccaccgccgacagcaccgccgtggagctggtgagactgagaagcctggaggccaagggcgtgaccgtgagaaccctgagcgcccagggcgagagcgtggacagcgccgtggccgccgtgccccccgagctgctggtgccccccaccccccaccccagacccgccccccagagcaagcccctggccagcagcggcgtgcccgagaccaaggacgagcacctgggcccccacgccagaatggacgaggcctgggagcagagcagagcccccggccccgtgcacggccacatgctggagccccccgtgggccccggcagaagaagccccagccccagcagaatcctgccccagccccagggcacccccgtgagcaccaccgtggccaaggccatggccagagaggccgcccagagagtggccgagagcagcagactggagaagagaagcgtgttcctggagagaagcagcgccggccagtacgccgccagcgacgaggaggacgcctacgacagccccgacttcaagagaagaggcgccagcgtggacgacttcctgaagggcagcgagctgggcaagcagccccactgctgccacggcgacgagtaccacaccgagagcagcagaggcagcgacctgagcgacatcatggaggaggacgaggaggagctgtacagcgagatgcagctggaggacggcggcagaagaagacccagcggcaccagccacaacgccctgaagatcctgggcaaccccgccagcgccggcagagtggaccacatgggcagaagattccccagaggcagcgccggcccccagagaagcagacccgtgaccgtgcccagcatcgacgactacggcagagacagactgagccccgacttctacgaggagagcgagaccgaccccggcgccgaggagctgcccgccagaatcttcgtggccctgttcgactacgaccccctgaccatgagccccaaccccgacgccgccgaggaggagctgcccttcaaggagggccagatcatcaaggtgtacggcgacaaggacgccgacggcttctacagaggcgagacctgcgccagactgggcctgatcccctgcaacatggtgagcgagatccaggccgacgacgaggagatgatggaccagctgctgagacagggcttcctgcccctgaacacccccgtggagaagatcgagagaagcagaagaagcggcagaagacacagcgtgagcaccagaagaatggtggccctgtacgactacgaccccagagagagcagccccaacgtggacgtggaggccgagctgaccttctgcaccggcgacatcatcaccgtgttcggcgagatcgacgaggacggcttctactacggcgagctgaacggccagaagggcctggtgcccagcaacttcctggaggaggtgcccgacgacgtggaggtgtacctgagcgacgcccccagccactacagccaggacacccccatgagaagcaaggccaagagaaagaagagcgtgcacttcaccccctag

SEQ ID NO: 97594 - DNA, 1938 bp, synthetic construct
  misc_feature 1..1938: note = Description of Artificial Sequence: Synthetic coding sequence
  source 1..1938: mol_type = other DNA
atgaacggcctggccaccagcctgggcaagggccaggagagcgccatcggcggcagcagcgccatcggcgagtacatcagacccctgccccagcccggcgacagacccgagcccctgagcgccaagcccaccttcctgagcagaagcggcagcgccagatgcagaagcgagagcgacatggagaacgagagaaacagcaacaccagcaagcagagatacagcggcaaggtgcacctgtgcgtggccagatacagctacaaccccttcgacggccccaacgagaaccccgaggccgagctgcccctgaccgccggcaagtacctgtacgtgtacggcgacatggacgaggacggcttctacgagggcgagctgctggacggccagagaggcctggtgcccagcaacttcgtggacttcgtgcaggacaacgagagcagactggccagcaccctgggcaacgagcaggaccagaacttcatcaaccacagcggcatcggcctggagggcgagcacatcctggacctgcacagccccacccacatcgacgccggcatcaccgacaacagcgccggcaccctggacgtgaacatcgacgacatcggcgaggacatcgtgccctaccccagaaagatcaccctgatcaagcagctggccaagagcgtgatcgtgggctgggagccccccgccgtgccccccggctggggcaccgtgagcagctacaacgtgctggtggacaaggagaccagaatgaacctgaccctgggcagcagaaccaaggccctgatcgagaagctgaacatggccgcctgcacctacagaatcagcgtgcagtgcgtgaccagcagaggcagcagcgacgagctgcagtgcaccctgctggtgggcaaggacgtggtggtggcccccagccacctgagagtggacaacatcacccagatcagcgcccagctgagctggctgcccaccaacagcaactacagccacgtgatcttcctgaacgaggaggagttcgacatcgtgaaggccgccagatacaagtaccagttcttcaacctgagacccaacatggcctacaaggtgaaggtgctggccaagccccaccagatgccctggcagctgcccctggagcagagagagaagaaggaggccttcgtggagttcagcaccctgcccgccggcccccccgcccccccccaggacgtgaccgtgcaggccggcgtgacccccgccaccatcagagtgagctggagaccccccgtgctgacccccaccggcctgagcaacggcgccaacgtgaccggctacggcgtgtacgccaagggccagagagtggccgaggtgatcttccccaccgccgacagcaccgccgtggagctggtgagactgagaagcctggaggccaagggcgtgaccgtgagaaccctgagcgcccagggcgagagcgtggacagcgccgtggccgccgtgccccccgagctgctggtgccccccaccccccaccccagacccgccccccagagcaagcccctggccagcagcggcgtgcccgagaccaaggacgagcacctgggcccccacgccagaatggacgaggcctgggagcagagcagagcccccggccccgtgcacggccacatgctggagccccccgtgggccccggcagaagaagccccagccccagcagaatcctgccccagccccagggcacccccgtgagcaccaccgtggccaaggccatggccagagaggccgcccagagagtggccgagagcagcagactggagaagagaagcgtgttcctggagagaagcagcgccggccagtacgccgccagcgacgaggaggacgcctacgacagccccgacttcaagagaagaggcgccagcgtggacgacttcctgaagggcagcgagctgggcaagcagatggccagctag

SEQ ID NO: 97595 - DNA, 1938 bp, synthetic construct
  misc_feature 1..1938: note = Description of Artificial Sequence: Synthetic coding sequence
  source 1..1938: mol_type = other DNA
atgaacggcctggccaccagcctgggcaagggccaggagagcgccatcggcggcagcagcgccatcggcgagtacatcagacccctgccccagcccggcgacagacccgagcccctgagcgccaagcccaccttcctgagcagaagcggcagcgccagatgcagaagcgagagcgacatggagaacgagagaaacagcaacaccagcaagcagagatacagcggcaaggtgcacctgtgcgtggccagatacagctacaaccccttcgacggccccaacgagaaccccgaggccgagctgcccctgaccgccggcaagtacctgtacgtgtacggcgacatggacgaggacggcttctacgagggcgagctgctggacggccagagaggcctggtgcccagcaacttcgtggacttcgtgcaggacaacgagagcagactggccagcaccctgggcaacgagcaggaccagaacttcatcaaccacagcggcatcggcctggagggcgagcacatcctggacctgcacagccccacccacatcgacgccggcatcaccgacaacagcgccggcaccctggacgtgaacatcgacgacatcggcgaggacatcgtgccctaccccagaaagatcaccctgatcaagcagctggccaagagcgtgatcgtgggctgggagccccccgccgtgccccccggctggggcaccgtgagcagctacaacgtgctggtggacaaggagaccagaatgaacctgaccctgggcagcagaaccaaggccctgatcgagaagctgaacatggccgcctgcacctacagaatcagcgtgcagtgcgtgaccagcagaggcagcagcgacgagctgcagtgcaccctgctggtgggcaaggacgtggtggtggcccccagccacctgagagtggacaacatcacccagatcagcgcccagctgagctggctgcccaccaacagcaactacagccacgtgatcttcctgaacgaggaggagttcgacatcgtgaaggccgccagatacaagtaccagttcttcaacctgagacccaacatggcctacaaggtgaaggtgctggccaagccccaccagatgccctggcagctgcccctggagcagagagagaagaaggaggccttcgtggagttcagcaccctgcccgccggcccccccgcccccccccaggacgtgaccgtgcaggccggcgtgacccccgccaccatcagagtgagctggagaccccccgtgctgacccccaccggcctgagcaacggcgccaacgtgaccggctacggcgtgtacgccaagggccagagagtggccgaggtgatcttccccaccgccgacagcaccgccgtggagctggtgagactgagaagcctggaggccaagggcgtgaccgtgagaaccctgagcgcccagggcgagagcgtggacagcgccgtggccgccgtgccccccgagctgctggtgccccccaccccccaccccagacccgccccccagagcaagcccctggccagcagcggcgtgcccgagaccaaggacgagcacctgggcccccacgccagaatggacgaggcctgggagcagagcagagcccccggccccgtgcacggccacatgctggagccccccgtgggccccggcagaagaagccccagccccagcagaatcctgccccagccccagggcacccccgtgagcaccaccgtggccaaggccatggccagagaggccgcccagagagtggccgagagcagcagactggagaagagaagcgtgttcctggagagaagcagcgccggccagtacgccgccagcgacgaggaggacgcctacgacagccccgacttcaagagaagaggcgccagcgtggacgacttcctgaagggcagcgagctgggcaagcagatggtgagctag

SEQ ID NO: 97596 - DNA, 4638 bp, synthetic construct
  misc_feature 1..4638: note = Description of Artificial Sequence: Synthetic coding sequence
  source 1..4638: mol_type = other DNA
atgcagagagagagagaggccgagatcagacagctgctgagatggaaggaggccgagcagagacagctgcagcagctgctgcacagagagagagacggcgtggtgagacaggccagagagctgcagagacagctggccgaggagctggtgaacagaggccactgcagcagacccggcgccagcgaggtgagcgccgcccagtgcagatgcagactgcaggaggtgctggcccagctgagatggcagaccgacggcgagcaggccgccagaatcagatacctgcaggccgccctggaggtggagagacagctgttcctgaagtacatcctggcccacttcagaggccaccccgccctgagcggcagccccgacccccaggccgtgcacagcctggaggagcccctgccccagaccagcagcggcagctgccacgcccccaagcccgcctgccagctgggcagcctggacagcctgagcgccgaggtgggcgtgagaagcagaagcctgggcctggtgagcagcgcctgcagcagcagccccgacggcctgctgagcacccacgccagcagcctggactgcttcgcccccgcctgcagcagaagcctggacagcaccagaagcctgcccaaggccagcaagagcgaggagagacccagcagccccgacaccagcacccccggcagcagaagactgagccccccccccagccccctgccccccccccccccccccagcgcccacagaaagctgagcaaccccagaggcggcgagggcagcgagagccagccctgcgaggtgctgacccccagcccccccggcctgggccaccacgagctgatcaagctgaactggctgctggccaaggccctgtgggtgctggccagaagatgctacaccctgcaggccgagaacaagcagctgagaagagccggctgcccctaccaggccgacgagaaggtgaagagactgaaggtgaagagagccgagctgaccggcctggccagaagactggccgacagagccagaaagctgcaggagaccaacctgagagccgtgagcgcccccatccccggcgagagctgcgccggcctggagctgtgccaggtgttcgccagacagagagccagagacctgagcgagcaggccagcgcccccctggccaaggacaagcagatcgaggagctgagacaggagtgccacctgctgcaggccagagtggccagcggcccctgcagcgacctgcacaccggcagaggcggcccctgcacccagtggctgaacgtgagagacctggacagactgcagagagagagccagagagaggtgctgagactgcagagacagctgatgctgcagcagggcaacggcggcgcctggcccgaggccggcggccagagcgccacctgcgaggaggtgagaagacagatgctggccctggagagagagctggaccagagaagaagagagtgccaggagctgggcgcccaggccgcccccgccagaagaagaggcgaggaggccgagacccagctgcaggccgccctgctgaagaacgcctggctggccgaggagaacggcagactgcaggccaagaccgactgggtgagaaaggtggaggccgagaacagcgaggtgagaggccacctgggcagagcctgccaggagagagacgccagcggcctgatcgccgagcagctgctgcagcaggccgccagaggccaggacagacagcagcagctgcagagagacccccagaaggccctgtgcgacctgcaccccagctggaaggagatccaggccctgcagtgcagacccggccacccccccgagcagccctgggagaccagccagatgcccgagagccaggtgaagggcagcagaagacccaagttccacgccagacccgaggactacgccgtgagccagcccaacagagacatccaggagaagagagaggccagcctggaggagagccccgtggccctgggcgagagcgccagcgtgccccaggtgagcgagaccgtgcccgccagccagcccctgagcaagaagaccagcagccagagcaacagcagcagcgagggcagcatgtgggccaccgtgcccagcagccccaccctggacagagacaccgccagcgaggtggacgacctggagcccgacagcgtgagcctggccctggagatgggcggcagcgccgcccccgccgcccccaagctgaagatcttcatggcccagtacaactacaaccccttcgagggccccaacgaccaccccgagggcgagctgcccctgaccgccggcgactacatctacatcttcggcgacatggacgaggacggcttctacgagggcgagctggaggacggcagaagaggcctggtgcccagcaacttcgtggagcagatccccgacagctacatccccggctgcctgcccgccaagagccccgacctgggccccagccagctgcccgccggccaggacgaggccctggaggaggacagcctgctgagcggcaaggcccagggcgtggtggacagaggcctgtgccagatggtgagagtgggcagcaagaccgaggtggccaccgagatcctggacaccaagaccgaggcctgccagctgggcctgctgcagagcatgggcaagcagggcctgagcagacccctgctgggcaccaagggcgtgctgagaatggcccccatgcagctgcacctgcagaacgtgaccgccaccagcgccaacatcacctgggtgtacagcagccacagacacccccacgtggtgtacctggacgacagagagcacgccctgacccccgccggcgtgagctgctacaccttccagggcctgtgccccggcacccactacagagccagagtggaggtgagactgcccagagacctgctgcaggtgtactggggcaccatgagcagcaccgtgaccttcgacaccctgctggccggccccccctacccccccctggacgtgctggtggagagacacgccagccccggcgtgctggtggtgagctggctgcccgtgaccatcgacagcgccggcagcagcaacggcgtgcaggtgaccggctacgccgtgtacgccgacggcctgaaggtgtgcgaggtggccgacgccaccgccggcagcaccctgctggagttcagccagctgcaggtgcccctgacctggcagaaggtgagcgtgagaaccatgagcctgtgcggcgagagcctggacagcgtgcccgcccagatccccgaggacttcttcatgtgccacagatggcccgagaccccccccttcagctacacctgcggcgaccccagcacctacagagtgaccttccccgtgtgcccccagaagctgagcctggccccccccagcgccaaggccagcccccacaaccccggcagctgcggcgagccccaggccaagttcctggaggccttcttcgaggagccccccagaagacagagccccgtgagcaacctgggcagcgagggcgagtgccccagcagcggcgccggcagccaggcccaggagctggccgaggcctgggagggctgcagaaaggacctgctgttccagaagagcccccagaaccacagaccccccagcgtgagcgaccagcccggcgagaaggagaactgcagccagcacatgggcaccagcaagagccccgcccccggcttcatccacctgagaaccgagtgcggccccagaaaggagccctgccaggagaaggccgccctggagagagtgctgagacagaagcaggacgcccagggcttcacccccccccagctgggcgccagccagcagtacgccagcgacttccacaacgtgctgaaggaggagcaggaggccctgtgcctggacctgtggggcaccgagagaagagaggagagaagagagcccgagccccacagcagacagggccaggccctgggcgtgaagagaggctgccagctgcacgagcccagcagcgccctgtgccccgcccccagcgccaaggtgatcaagatgcccagaggcggcccccagcagctgggcaccggcgccaacacccccgccagagtgttcgtggccctgagcgactacaaccccctggtgatgagcgccaacctgaaggccgccgaggaggagctggtgttccagaagagacagctgctgagagtgtggggcagccaggacacccacgacttctacctgagcgagtgcaacagacaggtgggcaacatccccggcagactggtggccgagatggaggtgggcaccgagcagaccgacagaagatggagaagccccgcccagggcaacctgcccagcgtggcccacctggaggacttccagggcctgaccatcccccagggcagcagcctggtgctgcagggcaacagcaagagactgcccctgtggacccccaagatcatgatcgccgccctggactacgaccccggcgacggccagatgggcggccagggcaagggcagactggccctgagagccggcgacgtggtgatggtgtacggccccatggacgaccagggcttctactacggcgagctgggcggccacagaggcctggtgcccgcccacctgctggaccacatgagcctgcacggccactag

SEQ ID NO: 97597 - DNA, 4920 bp, synthetic construct
  misc_feature 1..4920: note = Description of Artificial Sequence: Synthetic coding sequence
  source 1..4920: mol_type = other DNA
atggccaaggacagccccagccccctgggcgccagccccaagaagcccggctgcagcagccccgccgccgccgtgctggagaaccagagaagagagctggagaagctgagagccgagctggaggccgagagagccggctggagagccgagagaagaagattcgccgccagagagagacagctgagagaggaggccgagagagagagaagacagctggccgacagactgagaagcaagtgggaggcccagagaagcagagagctgagacagctgcaggaggagatgcagagagagagagaggccgagatcagacagctgctgagatggaaggaggccgagcagagacagctgcagcagctgctgcacagagagagagacggcgtggtgagacaggccagagagctgcagagacagctggccgaggagctggtgaacagaggccactgcagcagacccggcgccagcgaggtgagcgccgcccagtgcagatgcagactgcaggaggtgctggcccagctgagatggcagaccgacggcgagcaggccgccagaatcagatacctgcaggccgccctggaggtggagagacagctgttcctgaagtacatcctggcccacttcagaggccaccccgccctgagcggcagccccgacccccaggccgtgcacagcctggaggagcccctgccccagaccagcagcggcagctgccacgcccccaagcccgcctgccagctgggcagcctggacagcctgagcgccgaggtgggcgtgagaagcagaagcctgggcctggtgagcagcgcctgcagcagcagccccgacggcctgctgagcacccacgccagcagcctggactgcttcgcccccgcctgcagcagaagcctggacagcaccagaagcctgcccaaggccagcaagagcgaggagagacccagcagccccgacaccagcacccccggcagcagaagactgagccccccccccagccccctgccccccccccccccccccagcgcccacagaaagctgagcaaccccagaggcggcgagggcagcgagagccagccctgcgaggtgctgacccccagcccccccggcctgggccaccacgagctgatcaagctgaactggctgctggccaaggccctgtgggtgctggccagaagatgctacaccctgcaggccgagaacaagcagctgagaagagccggctgcccctaccaggccgacgagaaggtgaagagactgaaggtgaagagagccgagctgaccggcctggccagaagactggccgacagagccagaaagctgcaggagaccaacctgagagccgtgagcgcccccatccccggcgagagctgcgccggcctggagctgtgccaggtgttcgccagacagagagccagagacctgagcgagcaggccagcgcccccctggccaaggacaagcagatcgaggagctgagacaggagtgccacctgctgcaggccagagtggccagcggcccctgcagcgacctgcacaccggcagaggcggcccctgcacccagtggctgaacgtgagagacctggacagactgcagagagagagccagagagaggtgctgagactgcagagacagctgatgctgcagcagggcaacggcggcgcctggcccgaggccggcggccagagcgccacctgcgaggaggtgagaagacagatgctggccctggagagagagctggaccagagaagaagagagtgccaggagctgggcgcccaggccgcccccgccagaagaagaggcgaggaggccgagacccagctgcaggccgccctgctgaagaacgcctggctggccgaggagaacggcagactgcaggccaagaccgactgggtgagaaaggtggaggccgagaacagcgaggtgagaggccacctgggcagagcctgccaggagagagacgccagcggcctgatcgccgagcagctgctgcagcaggccgccagaggccaggacagacagcagcagctgcagagagacccccagaaggccctgtgcgacctgcaccccagctggaaggagatccaggccctgcagtgcagacccggccacccccccgagcagccctgggagaccagccagatgcccgagagccaggtgaagggcagcagaagacccaagttccacgccagacccgaggactacgccgtgagccagcccaacagagacatccaggagaagagagaggccagcctggaggagagccccgtggccctgggcgagagcgccagcgtgccccaggtgagcgagaccgtgcccgccagccagcccctgagcaagaagaccagcagccagagcaacagcagcagcgagggcagcatgtgggccaccgtgcccagcagccccaccctggacagagacaccgccagcgaggtggacgacctggagcccgacagcgtgagcctggccctggagatgggcggcagcgccgcccccgccgcccccaagctgaagatcttcatggcccagtacaactacaaccccttcgagggccccaacgaccaccccgagggcgagctgcccctgaccgccggcgactacatctacatcttcggcgacatggacgaggacggcttctacgagggcgagctggaggacggcagaagaggcctggtgcccagcaacttcgtggagcagatccccgacagctacatccccggctgcctgcccgccaagagccccgacctgggccccagccagctgcccgccggccaggacgaggccctggaggaggacagcctgctgagcggcaaggcccagggcgtggtggacagaggcctgtgccagatggtgagagtgggcagcaagaccgaggtggccaccgagatcctggacaccaagaccgaggcctgccagctgggcctgctgcagagcatgggcaagcagggcctgagcagacccctgctgggcaccaagggcgtgctgagaatggcccccatgcagctgcacctgcagaacgtgaccgccaccagcgccaacatcacctgggtgtacagcagccacagacacccccacgtggtgtacctggacgacagagagcacgccctgacccccgccggcgtgagctgctacaccttccagggcctgtgccccggcacccactacagagccagagtggaggtgagactgcccagagacctgctgcaggtgtactggggcaccatgagcagcaccgtgaccttcgacaccctgctggccggccccccctacccccccctggacgtgctggtggagagacacgccagccccggcgtgctggtggtgagctggctgcccgtgaccatcgacagcgccggcagcagcaacggcgtgcaggtgaccggctacgccgtgtacgccgacggcctgaaggtgtgcgaggtggccgacgccaccgccggcagcaccctgctggagttcagccagctgcaggtgcccctgacctggcagaaggtgagcgtgagaaccatgagcctgtgcggcgagagcctggacagcgtgcccgcccagatccccgaggacttcttcatgtgccacagatggcccgagaccccccccttcagctacacctgcggcgaccccagcacctacagagtgaccttccccgtgtgcccccagaagctgagcctggccccccccagcgccaaggccagcccccacaaccccggcagctgcggcgagccccaggccaagttcctggaggccttcttcgaggagccccccagaagacagagccccgtgagcaacctgggcagcgagggcgagtgccccagcagcggcgccggcagccaggcccaggagctggccgaggcctgggagggctgcagaaaggacctgctgttccagaagagcccccagaaccacagaccccccagcgtgagcgaccagcccggcgagaaggagaactgcagccagcacatgggcaccagcaagagccccgcccccggcttcatccacctgagaaccgagtgcggccccagaaaggagccctgccaggagaaggccgccctggagagagtgctgagacagaagcaggacgcccagggcttcacccccccccagctgggcgccagccagcagtacgccagcgacttccacaacgtgctgaaggaggagcaggaggccctgtgcctggacctgtggggcaccgagagaagagaggagagaagagagcccgagccccacagcagacagggccaggccctgggcgtgaagagaggctgccagctgcacgagcccagcagcgccctgtgccccgcccccagcgccaaggtgatcaagatgcccagaggcggcccccagcagctgggcaccggcgccaacacccccgccagagtgttcgtggccctgagcgactacaaccccctggtgatgagcgccaacctgaaggccgccgaggaggagctggtgttccagaagagacagctgctgagagtgtggggcagccaggacacccacgacttctacctgagcgagtgcaacagacaggtgggcaacatccccggcagactggtggccgagatggaggtgggcaccgagcagaccgacagaagatggagaagccccgcccagggcaacctgcccagcgtggcccacctggaggacttccagggcctgaccatcccccagggcagcagcctggtgctgcagggcaacagcaagagactgcccctgtggacccccaagatcatgatcgccgccctggactacgaccccggcgacggccagatgggcggccagggcaagggcagactggccctgagagccggcgacgtggtgatggtgtacggccccatggacgaccagggcttctactacggcgagctgggcggccacagaggcctggtgcccgcccacctgctggaccacatgagcctgcacggccactag

SEQ ID NO: 97598 - DNA, 4638 bp, synthetic construct
  misc_feature 1..4638: note = Description of Artificial Sequence: Synthetic coding sequence
  source 1..4638: mol_type = other DNA
atgcagagagagagagaggccgagatcagacagctgctgagatggaaggaggccgagcagagacagctgcagcagctgctgcacagagagagagacggcgtggtgagacaggccagagagctgcagagacagctggccgaggagctggtgaacagaggccactgcagcagacccggcgccagcgaggtgagcgccgcccagtgcagatgcagactgcaggaggtgctggcccagctgagatggcagaccgacggcgagcaggccgccagaatcagatacctgcaggccgccctggaggtggagagacagctgttcctgaagtacatcctggcccacttcagaggccaccccgccctgagcggcagccccgacccccaggccgtgcacagcctggaggagcccctgccccagaccagcagcggcagctgccacgcccccaagcccgcctgccagctgggcagcctggacagcctgagcgccgaggtgggcgtgagaagcagaagcctgggcctggtgagcagcgcctgcagcagcagccccgacggcctgctgagcacccacgccagcagcctggactgcttcgcccccgcctgcagcagaagcctggacagcaccagaagcctgcccaaggccagcaagagcgaggagagacccagcagccccgacaccagcacccccggcagcagaagactgagccccccccccagccccctgccccccccccccccccccagcgcccacagaaagctgagcaaccccagaggcggcgagggcagcgagagccagccctgcgaggtgctgacccccagcccccccggcctgggccaccacgagctgatcaagctgaactggctgctggccaaggccctgtgggtgctggccagaagatgctacaccctgcaggaggagaacaagcagctgagaagagccggctgcccctaccaggccgacgagaaggtgaagagactgaaggtgaagagagccgagctgaccggcctggccagaagactggccgacagagccagagagctgcaggagaccaacctgagagccgtgagcgcccccatccccggcgagagctgcgccggcctggagctgtgccaggtgttcgccagacagagagccagagacctgagcgagcaggccagcgcccccctggccaaggacaagcagatcgaggagctgagacaggagtgccacctgctgcaggccagagtggccagcggcccctgcagcgacctgcacaccggcagaggcggcccctgcacccagtggctgaacgtgagagacctggacagactgcagagagagagccagagagaggtgctgagactgcagagacagctgatgctgcagcagggcaacggcggcgcctggcccgaggccggcggccagagcgccacctgcgaggaggtgagaagacagatgctggccctggagagagagctggaccagagaagaagagagtgccaggagctgggcacccaggccgcccccgccagaagaagaggcgaggaggccgagacccagctgcaggccgccctgctgaagaacgcctggctggccgaggagaacggcagactgcaggccaagaccgactgggtgagaaaggtggaggccgagaacagcgaggtgagaggccacctgggcagagcctgccaggagagagacgccagcggcctgatcgccgagcagctgctgcagcaggccgccagaggccaggacagacagcagcagctgcagagagacccccagaaggccctgtgcgacctgcaccccagctggaaggagatccaggccctgcagtgcagacccggccacccccccgagcagccctgggagaccagccagatgcccgagagccaggtgaagggcagcagaagacccaagttccacgccagacccgaggactacgccgtgagccagcccaacagagacatccaggagaagagagaggccagcctggaggagagccccgtggccctgggcgagagcgccagcgtgccccaggtgagcgagaccgtgcccgccagccagcccctgagcaagaagaccagcagccagagcaacagcagcagcgagggcagcatgtgggccaccgtgcccagcagccccaccctggacagagacaccgccagcgaggtggacgacctggagcccgacagcgtgagcctggccctggagatgggcggcagcgccgcccccgccgcccccaagctgaagatcttcatggcccagtacaactacaaccccttcgagggccccaacgaccaccccgagggcgagctgcccctgaccgccggcgactacatctacatcttcggcgacatggacgaggacggcttctacgagggcgagctggacgacggcagaagaggcctggtgcccagcaacttcgtggagcagatccccgacagctacatccccggctgcctgcccgccaagagccccgacctgggccccagccagctgcccgccggccaggacgaggccctggaggaggacagcctgctgagcggcaaggcccagggcatggtggacagaggcctgtgccagatggtgagagtgggcagcaagaccgaggtggccaccgagatcctggacaccaagaccgaggcctgccagctgggcctgctgcagagcatgggcaagcagggcctgagcagacccctgctgggcaccaagggcgtgctgagaatggcccccatgcagctgcacctgcagaacgtgaccgccaccagcgccaacatcacctgggtgtacagcagccacagacacccccacgtggtgtacctggacgacagagagcacgccctgacccccgccggcgtgagctgctacaccttccagggcctgtgccccggcacccactacagagtgagagtggaggtgagactgccctgggacctgctgcaggtgtactggggcaccatgagcagcaccgtgaccttcgacaccctgctggccggccccccctacccccccctggaggtgctggtggagagacacgccagccccggcgtgctggtggtgagctggctgcccgtgaccatcgacagcgccggcagcagcaacggcgtgcaggtgaccggctacgccgtgtacgccgacggcctgaaggtgtgcgaggtggccgacgccaccgccggcagcaccgtgctggagttcagccagctgcaggtgcccctgacctggcagaaggtgagcgtgagaaccatgagcctgtgcggcgagagcctggacagcgtgcccgcccagatccccgaggacttcttcatgtgccacagatggcccgagaccccccccttcagctacacctgcggcgaccccagcacctacagagtgaccttccccgtgtgcccccagaagctgagcctggccccccccagcgccaaggccagcccccacaaccccggcagctgcggcgagccccaggccaagttcctggaggccttcttcgaggagccccccagaagacagagccccgtgagcaacctgggcagcgagggcgagtgccccagcagcggcgccggcagccaggcccaggagctggccgaggcctgggagggctgcagaaaggacctgctgttccagaagagcccccagaaccacagaccccccagcgtgagcgaccagcccggcgagaaggagaactgctaccagcacatgggcaccagcaagagccccgcccccggcttcatccacctgagaaccgagtgcggccccagaaaggagccctgccaggagaaggccgccctggagagagtgctgagacagaagcaggacgcccagggcttcacccccccccagctgggcgccagccagcagtacgccagcgacttccacaacgtgctgaaggaggagcaggaggccctgtgcctggacctgagaggcaccgagagaagagaggagagaagagagcccgagccccacagcagacagggccaggccctgggcgtgaagagaggctgccagctgcacgagcccagcagcgccctgtgccccgcccccagcgccaaggtgatcaagatgcccagaggcggcccccagcagctgggcaccggcgccaacacccccgccagagtgttcgtggccctgagcgactacaaccccctggtgatgagcgccaacctgaaggccgccgaggaggagctggtgttccagaagagacagctgctgagagtgtggggcagccaggacacccacgacttctacctgagcgagtgcaacagacaggtgggcaacatccccggcagactggtggccgagatggaggtgggcaccgagcagaccgacagaagatggagaagccccgcccagggccacctgcccagcgtggcccacctggaggacttccagggcctgaccatcccccagggcagcagcctggtgctgcagggcaacagcaagagactgcccctgtggacccccaagatcatgatcgccgccctggactacgaccccggcgacggccagatgggcggccagggcaagggcagactggccctgagagccggcgacgtggtgatggtgtacggccccatggacgaccagggcttctactacggcgagctgggcggccacagaggcctggtgcccgcccacctgctggaccacatgagcctgcacggccactag

SEQ ID NO: 97599 - DNA, 4920 bp, synthetic construct
  misc_feature 1..4920: note = Description of Artificial Sequence: Synthetic coding sequence
  source 1..4920: mol_type = other DNA
atggccaaggacagccccagccccctgggcgccagccccaagaagcccggctgcagcagccccgccgccgccgtgctggagaaccagagaagagagctggagaagctgagagccgagctggaggccgagagagccggctggagagccgagagaagaagattcgccgccagagagagacagctgagagaggaggccgagagagagagaagacagctggccgacagactgagaagcaagtgggaggcccagagaagcagagagctgagacagctgcaggaggagatgcagagagagagagaggccgagatcagacagctgctgagatggaaggaggccgagcagagacagctgcagcagctgctgcacagagagagagacggcgtggtgagacaggccagagagctgcagagacagctggccgaggagctggtgaacagaggccactgcagcagacccggcgccagcgaggtgagcgccgcccagtgcagatgcagactgcaggaggtgctggcccagctgagatggcagaccgacggcgagcaggccgccagaatcagatacctgcaggccgccctggaggtggagagacagctgttcctgaagtacatcctggcccacttcagaggccaccccgccctgagcggcagccccgacccccaggccgtgcacagcctggaggagcccctgccccagaccagcagcggcagctgccacgcccccaagcccgcctgccagctgggcagcctggacagcctgagcgccgaggtgggcgtgagaagcagaagcctgggcctggtgagcagcgcctgcagcagcagccccgacggcctgctgagcacccacgccagcagcctggactgcttcgcccccgcctgcagcagaagcctggacagcaccagaagcctgcccaaggccagcaagagcgaggagagacccagcagccccgacaccagcacccccggcagcagaagactgagccccccccccagccccctgccccccccccccccccccagcgcccacagaaagctgagcaaccccagaggcggcgagggcagcgagagccagccctgcgaggtgctgacccccagcccccccggcctgggccaccacgagctgatcaagctgaactggctgctggccaaggccctgtgggtgctggccagaagatgctacaccctgcaggaggagaacaagcagctgagaagagccggctgcccctaccaggccgacgagaaggtgaagagactgaaggtgaagagagccgagctgaccggcctggccagaagactggccgacagagccagagagctgcaggagaccaacctgagagccgtgagcgcccccatccccggcgagagctgcgccggcctggagctgtgccaggtgttcgccagacagagagccagagacctgagcgagcaggccagcgcccccctggccaaggacaagcagatcgaggagctgagacaggagtgccacctgctgcaggccagagtggccagcggcccctgcagcgacctgcacaccggcagaggcggcccctgcacccagtggctgaacgtgagagacctggacagactgcagagagagagccagagagaggtgctgagactgcagagacagctgatgctgcagcagggcaacggcggcgcctggcccgaggccggcggccagagcgccacctgcgaggaggtgagaagacagatgctggccctggagagagagctggaccagagaagaagagagtgccaggagctgggcacccaggccgcccccgccagaagaagaggcgaggaggccgagacccagctgcaggccgccctgctgaagaacgcctggctggccgaggagaacggcagactgcaggccaagaccgactgggtgagaaaggtggaggccgagaacagcgaggtgagaggccacctgggcagagcctgccaggagagagacgccagcggcctgatcgccgagcagctgctgcagcaggccgccagaggccaggacagacagcagcagctgcagagagacccccagaaggccctgtgcgacctgcaccccagctggaaggagatccaggccctgcagtgcagacccggccacccccccgagcagccctgggagaccagccagatgcccgagagccaggtgaagggcagcagaagacccaagttccacgccagacccgaggactacgccgtgagccagcccaacagagacatccaggagaagagagaggccagcctggaggagagccccgtggccctgggcgagagcgccagcgtgccccaggtgagcgagaccgtgcccgccagccagcccctgagcaagaagaccagcagccagagcaacagcagcagcgagggcagcatgtgggccaccgtgcccagcagccccaccctggacagagacaccgccagcgaggtggacgacctggagcccgacagcgtgagcctggccctggagatgggcggcagcgccgcccccgccgcccccaagctgaagatcttcatggcccagtacaactacaaccccttcgagggccccaacgaccaccccgagggcgagctgcccctgaccgccggcgactacatctacatcttcggcgacatggacgaggacggcttctacgagggcgagctggacgacggcagaagaggcctggtgcccagcaacttcgtggagcagatccccgacagctacatccccggctgcctgcccgccaagagccccgacctgggccccagccagctgcccgccggccaggacgaggccctggaggaggacagcctgctgagcggcaaggcccagggcatggtggacagaggcctgtgccagatggtgagagtgggcagcaagaccgaggtggccaccgagatcctggacaccaagaccgaggcctgccagctgggcctgctgcagagcatgggcaagcagggcctgagcagacccctgctgggcaccaagggcgtgctgagaatggcccccatgcagctgcacctgcagaacgtgaccgccaccagcgccaacatcacctgggtgtacagcagccacagacacccccacgtggtgtacctggacgacagagagcacgccctgacccccgccggcgtgagctgctacaccttccagggcctgtgccccggcacccactacagagtgagagtggaggtgagactgccctgggacctgctgcaggtgtactggggcaccatgagcagcaccgtgaccttcgacaccctgctggccggccccccctacccccccctggaggtgctggtggagagacacgccagccccggcgtgctggtggtgagctggctgcccgtgaccatcgacagcgccggcagcagcaacggcgtgcaggtgaccggctacgccgtgtacgccgacggcctgaaggtgtgcgaggtggccgacgccaccgccggcagcaccgtgctggagttcagccagctgcaggtgcccctgacctggcagaaggtgagcgtgagaaccatgagcctgtgcggcgagagcctggacagcgtgcccgcccagatccccgaggacttcttcatgtgccacagatggcccgagaccccccccttcagctacacctgcggcgaccccagcacctacagagtgaccttccccgtgtgcccccagaagctgagcctggccccccccagcgccaaggccagcccccacaaccccggcagctgcggcgagccccaggccaagttcctggaggccttcttcgaggagccccccagaagacagagccccgtgagcaacctgggcagcgagggcgagtgccccagcagcggcgccggcagccaggcccaggagctggccgaggcctgggagggctgcagaaaggacctgctgttccagaagagcccccagaaccacagaccccccagcgtgagcgaccagcccggcgagaaggagaactgctaccagcacatgggcaccagcaagagccccgcccccggcttcatccacctgagaaccgagtgcggccccagaaaggagccctgccaggagaaggccgccctggagagagtgctgagacagaagcaggacgcccagggcttcacccccccccagctgggcgccagccagcagtacgccagcgacttccacaacgtgctgaaggaggagcaggaggccctgtgcctggacctgagaggcaccgagagaagagaggagagaagagagcccgagccccacagcagacagggccaggccctgggcgtgaagagaggctgccagctgcacgagcccagcagcgccctgtgccccgcccccagcgccaaggtgatcaagatgcccagaggcggcccccagcagctgggcaccggcgccaacacccccgccagagtgttcgtggccctgagcgactacaaccccctggtgatgagcgccaacctgaaggccgccgaggaggagctggtgttccagaagagacagctgctgagagtgtggggcagccaggacacccacgacttctacctgagcgagtgcaacagacaggtgggcaacatccccggcagactggtggccgagatggaggtgggcaccgagcagaccgacagaagatggagaagccccgcccagggccacctgcccagcgtggcccacctggaggacttccagggcctgaccatcccccagggcagcagcctggtgctgcagggcaacagcaagagactgcccctgtggacccccaagatcatgatcgccgccctggactacgaccccggcgacggccagatgggcggccagggcaagggcagactggccctgagagccggcgacgtggtgatggtgtacggccccatggacgaccagggcttctactacggcgagctgggcggccacagaggcctggtgcccgcccacctgctggaccacatgagcctgcacggccactag

SEQ ID NO: 97600 - DNA, 4638 bp, synthetic construct
  misc_feature 1..4638: note = Description of Artificial Sequence: Synthetic coding sequence
  source 1..4638: mol_type = other DNA
atgcagagagagagagaggccgagatcagacagctgctgagatggaaggaggccgagcagagacagctgcagcagctgctgcacagagagagagacggcgtggtgagacaggccagagagctgcagagacagctggccgaggagctggtgaacagaggccactgcagcagacccggcgccagcgaggtgagcgccgcccagtgcagatgcagactgcaggaggtgctggcccagctgagatggcagaccgacggcgagcaggccgccagaatcagatacctgcaggccgccctggaggtggagagacagctgttcctgaagtacatcctggcccacttcagaggccaccccgccctgagcggcagccccgacccccaggccgtgcacagcctggaggagcccctgccccagaccagcagcggcagctgccacgcccccaagcccgcctgccagctgggcagcctggacagcctgagcgccgaggtgggcgtgagaagcagaagcctgggcctggtgagcagcgcctgcagcagcagccccgacggcctgctgagcacccacgccagcagcctggactgcttcgcccccgcctgcagcagaagcctggacagcaccagaagcctgcccaaggccagcaagagcgaggagagacccagcagccccgacaccagcacccccggcagcagaagactgagccccccccccagccccctgccccccccccccccccccagcgcccacagaaagctgagcaaccccagaggcggcgagggcagcgagagccagccctgcgaggtgctgacccccagcccccccggcctgggccaccacgagctgatcaagctgaactggctgctggccaaggccctgtgggtgctggccagaagatgctacaccctgcaggaggagaacaagcagctgagaagagccggctgcccctaccaggccgacgagaaggtgaagagactgaaggtgaagagagccgagctgaccggcctggccagaagactggccgacagagccagagagctgcaggagaccaacctgagagccgtgagcgcccccatccccggcgagagctgcgccggcctggagctgtgccaggtgttcgccagacagagagccagagacctgagcgagcaggccagcgcccccctggccaaggacaagcagatcgaggagctgagacaggagtgccacctgctgcaggccagagtggccagcggcccctgcagcgacctgcacaccggcagaggcggcccctgcacccagtggctgaacgtgagagacctggacagactgcagagagagagccagagagaggtgctgagactgcagagacagctgatgctgcagcagggcaacggcggcgcctggcccgaggccggcggccagagcgccacctgcgaggaggtgagaagacagatgctggccctggagagagagctggaccagagaagaagagagtgccaggagctgggcacccaggccgcccccgccagaagaagaggcgaggaggccgagacccagctgcaggccgccctgctgaagaacgcctggctggccgaggagaacggcagactgcaggccaagaccgactgggtgagaaaggtggaggccgagaacagcgaggtgagaggccacctgggcagagcctgccaggagagagacgccagcggcctgatcgccgagcagctgctgcagcaggccgccagaggccaggacagacagcagcagctgcagagagacccccagaaggccctgtgcgacctgcaccccagctggaaggagatccaggccctgcagtgcagacccggccacccccccgagcagccctgggagaccagccagatgcccgagagccaggtgaagggcagcagaagacccaagttccacgccagacccgaggactacgccgtgagccagcccaacagagacatccaggagaagagagaggccagcctggaggagagccccgtggccctgggcgagagcgccagcgtgccccaggtgagcgagaccgtgcccgccagccagcccctgagcaagaagaccagcagccagagcaacagcagcagcgagggcagcatgtgggccaccgtgcccagcagccccaccctggacagagacaccgccagcgaggtggacgacctggagcccgacagcgtgagcctggccctggagatgggcggcagcgccgcccccgccgcccccaagctgaagatcttcatggcccagtacaactacaaccccttcgagggccccaacgaccaccccgagggcgagctgcccctgaccgccggcgactacatctacatcttcggcgacatggacgaggacggcttctacgagggcgagctggacgacggcagaagaggcctggtgcccagcaacttcgtggagcagatccccgacagctacatccccggctgcctgcccgccaagagccccgacctgggccccagccagctgcccgccggccaggacgaggccctggaggaggacagcctgctgagcggcaaggcccagggcatggtggacagaggcctgtgccagatggtgagagtgggcagcaagaccgaggtggccaccgagatcctggacaccaagaccgaggcctgccagctgggcctgctgcagagcatgggcaagcagggcctgagcagacccctgctgggcaccaagggcgtgctgagaatggcccccatgcagctgcacctgcagaacgtgaccgccaccagcgccaacatcacctgggtgtacagcagccacagacacccccacgtggtgtacctggacgacagagagcacgccctgacccccgccggcgtgagctgctacaccttccagggcctgtgccccggcacccactacagagtgagagtggaggtgagactgccctgggacctgctgcaggtgtactggggcaccatgagcagcaccgtgaccttcgacaccctgctggccggccccccctacccccccctggacgtgctggtggagagacacgccagccccggcgtgctggtggtgagctggctgcccgtgaccatcgacagcgccggcagcagcaacggcgtgcaggtgaccggctacgccgtgtacgccgacggcctgaaggtgtgcgaggtggccgacgccaccgccggcagcaccgtgctggagttcagccagctgcaggtgcccctgacctggcagaaggtgagcgtgagaaccatgagcctgtgcggcgagagcctggacagcgtgcccgcccagatccccgaggacttcttcatgtgccacagatggcccgagaccccccccttcagctacacctgcggcgaccccagcacctacagagtgaccttccccgtgtgcccccagaagctgagcctggccccccccagcgccaaggccagcccccacaaccccggcagctgcggcgagccccaggccaagttcctggaggccttcttcgaggagccccccagaagacagagccccgtgagcaacctgggcagcgagggcgagtgccccagcagcggcgccggcagccaggcccaggagctggccgaggcctgggagggctgcagaaaggacctgctgttccagaagagcccccagaaccacagaccccccagcgtgagcgaccagcccggcgagaaggagaactgctaccagcacatgggcaccagcaagagccccgcccccggcttcatccacctgagaaccgagtgcggccccagaaaggagccctgccaggagaaggccgccctggagagagtgctgagacagaagcaggacgcccagggcttcacccccccccagctgggcgccagccagcagtacgccagcgacttccacaacgtgctgaaggaggagcaggaggccctgtgcctggacctgagaggcaccgagagaagagaggagagaagagagcccgagccccacagcagacagggccaggccctgggcgtgaagagaggctgccagctgcacgagcccagcagcgccctgtgccccgcccccagcgccaaggtgatcaagatgcccagaggcggcccccagcagctgggcaccggcgccaacacccccgccagagtgttcgtggccctgagcgactacaaccccctggtgatgagcgccaacctgaaggccgccgaggaggagctggtgttccagaagagacagctgctgagagtgtggggcagccaggacacccacgacttctacctgagcgagtgcaacagacaggtgggcaacatccccggcagactggtggccgagatggaggtgggcaccgagcagaccgacagaagatggagaagccccgcccagggccacctgcccagcgtggcccacctggaggacttccagggcctgatcatcccccagggcagcagcctggtgctgcagggcaacagcaagagactgcccctgtggacccccaagatcatgatcgccgccctggactacgaccccggcgacggccagatgggcggccagggcaagggcagactggccctgagagccggcgacgtggtgatggtgtacggccccatggacgaccagggcttctactacggcgagctgggcggccacagaggcctggtgcccgcccacctgctggaccacatgagcctgcacggccactag

SEQ ID NO: 97601 - DNA, 4920 bp, synthetic construct
  misc_feature 1..4920: note = Description of Artificial Sequence: Synthetic coding sequence
  source 1..4920: mol_type = other DNA
atggccaaggacagccccagccccctgggcgccagccccaagaagcccggctgcagcagccccgccgccgccgtgctggagaaccagagaagagagctggagaagctgagagccgagctggaggccgagagagccggctggagagccgagagaagaagattcgccgccagagagagacagctgagagaggaggccgagagagagagaagacagctggccgacagactgagaagcaagtgggaggcccagagaagcagagagctgagacagctgcaggaggagatgcagagagagagagaggccgagatcagacagctgctgagatggaaggaggccgagcagagacagctgcagcagctgctgcacagagagagagacggcgtggtgagacaggccagagagctgcagagacagctggccgaggagctggtgaacagaggccactgcagcagacccggcgccagcgaggtgagcgccgcccagtgcagatgcagactgcaggaggtgctggcccagctgagatggcagaccgacggcgagcaggccgccagaatcagatacctgcaggccgccctggaggtggagagacagctgttcctgaagtacatcctggcccacttcagaggccaccccgccctgagcggcagccccgacccccaggccgtgcacagcctggaggagcccctgccccagaccagcagcggcagctgccacgcccccaagcccgcctgccagctgggcagcctggacagcctgagcgccgaggtgggcgtgagaagcagaagcctgggcctggtgagcagcgcctgcagcagcagccccgacggcctgctgagcacccacgccagcagcctggactgcttcgcccccgcctgcagcagaagcctggacagcaccagaagcctgcccaaggccagcaagagcgaggagagacccagcagccccgacaccagcacccccggcagcagaagactgagccccccccccagccccctgccccccccccccccccccagcgcccacagaaagctgagcaaccccagaggcggcgagggcagcgagagccagccctgcgaggtgctgacccccagcccccccggcctgggccaccacgagctgatcaagctgaactggctgctggccaaggccctgtgggtgctggccagaagatgctacaccctgcaggaggagaacaagcagctgagaagagccggctgcccctaccaggccgacgagaaggtgaagagactgaaggtgaagagagccgagctgaccggcctggccagaagactggccgacagagccagagagctgcaggagaccaacctgagagccgtgagcgcccccatccccggcgagagctgcgccggcctggagctgtgccaggtgttcgccagacagagagccagagacctgagcgagcaggccagcgcccccctggccaaggacaagcagatcgaggagctgagacaggagtgccacctgctgcaggccagagtggccagcggcccctgcagcgacctgcacaccggcagaggcggcccctgcacccagtggctgaacgtgagagacctggacagactgcagagagagagccagagagaggtgctgagactgcagagacagctgatgctgcagcagggcaacggcggcgcctggcccgaggccggcggccagagcgccacctgcgaggaggtgagaagacagatgctggccctggagagagagctggaccagagaagaagagagtgccaggagctgggcacccaggccgcccccgccagaagaagaggcgaggaggccgagacccagctgcaggccgccctgctgaagaacgcctggctggccgaggagaacggcagactgcaggccaagaccgactgggtgagaaaggtggaggccgagaacagcgaggtgagaggccacctgggcagagcctgccaggagagagacgccagcggcctgatcgccgagcagctgctgcagcaggccgccagaggccaggacagacagcagcagctgcagagagacccccagaaggccctgtgcgacctgcaccccagctggaaggagatccaggccctgcagtgcagacccggccacccccccgagcagccctgggagaccagccagatgcccgagagccaggtgaagggcagcagaagacccaagttccacgccagacccgaggactacgccgtgagccagcccaacagagacatccaggagaagagagaggccagcctggaggagagccccgtggccctgggcgagagcgccagcgtgccccaggtgagcgagaccgtgcccgccagccagcccctgagcaagaagaccagcagccagagcaacagcagcagcgagggcagcatgtgggccaccgtgcccagcagccccaccctggacagagacaccgccagcgaggtggacgacctggagcccgacagcgtgagcctggccctggagatgggcggcagcgccgcccccgccgcccccaagctgaagatcttcatggcccagtacaactacaaccccttcgagggccccaacgaccaccccgagggcgagctgcccctgaccgccggcgactacatctacatcttcggcgacatggacgaggacggcttctacgagggcgagctggacgacggcagaagaggcctggtgcccagcaacttcgtggagcagatccccgacagctacatccccggctgcctgcccgccaagagccccgacctgggccccagccagctgcccgccggccaggacgaggccctggaggaggacagcctgctgagcggcaaggcccagggcatggtggacagaggcctgtgccagatggtgagagtgggcagcaagaccgaggtggccaccgagatcctggacaccaagaccgaggcctgccagctgggcctgctgcagagcatgggcaagcagggcctgagcagacccctgctgggcaccaagggcgtgctgagaatggcccccatgcagctgcacctgcagaacgtgaccgccaccagcgccaacatcacctgggtgtacagcagccacagacacccccacgtggtgtacctggacgacagagagcacgccctgacccccgccggcgtgagctgctacaccttccagggcctgtgccccggcacccactacagagtgagagtggaggtgagactgccctgggacctgctgcaggtgtactggggcaccatgagcagcaccgtgaccttcgacaccctgctggccggccccccctacccccccctggacgtgctggtggagagacacgccagccccggcgtgctggtggtgagctggctgcccgtgaccatcgacagcgccggcagcagcaacggcgtgcaggtgaccggctacgccgtgtacgccgacggcctgaaggtgtgcgaggtggccgacgccaccgccggcagcaccgtgctggagttcagccagctgcaggtgcccctgacctggcagaaggtgagcgtgagaaccatgagcctgtgcggcgagagcctggacagcgtgcccgcccagatccccgaggacttcttcatgtgccacagatggcccgagaccccccccttcagctacacctgcggcgaccccagcacctacagagtgaccttccccgtgtgcccccagaagctgagcctggccccccccagcgccaaggccagcccccacaaccccggcagctgcggcgagccccaggccaagttcctggaggccttcttcgaggagccccccagaagacagagccccgtgagcaacctgggcagcgagggcgagtgccccagcagcggcgccggcagccaggcccaggagctggccgaggcctgggagggctgcagaaaggacctgctgttccagaagagcccccagaaccacagaccccccagcgtgagcgaccagcccggcgagaaggagaactgctaccagcacatgggcaccagcaagagccccgcccccggcttcatccacctgagaaccgagtgcggccccagaaaggagccctgccaggagaaggccgccctggagagagtgctgagacagaagcaggacgcccagggcttcacccccccccagctgggcgccagccagcagtacgccagcgacttccacaacgtgctgaaggaggagcaggaggccctgtgcctggacctgagaggcaccgagagaagagaggagagaagagagcccgagccccacagcagacagggccaggccctgggcgtgaagagaggctgccagctgcacgagcccagcagcgccctgtgccccgcccccagcgccaaggtgatcaagatgcccagaggcggcccccagcagctgggcaccggcgccaacacccccgccagagtgttcgtggccctgagcgactacaaccccctggtgatgagcgccaacctgaaggccgccgaggaggagctggtgttccagaagagacagctgctgagagtgtggggcagccaggacacccacgacttctacctgagcgagtgcaacagacaggtgggcaacatccccggcagactggtggccgagatggaggtgggcaccgagcagaccgacagaagatggagaagccccgcccagggccacctgcccagcgtggcccacctggaggacttccagggcctgatcatcccccagggcagcagcctggtgctgcagggcaacagcaagagactgcccctgtggacccccaagatcatgatcgccgccctggactacgaccccggcgacggccagatgggcggccagggcaagggcagactggccctgagagccggcgacgtggtgatggtgtacggccccatggacgaccagggcttctactacggcgagctgggcggccacagaggcctggtgcccgcccacctgctggaccacatgagcctgcacggccactag

SEQ ID NO: 97602 - DNA, 3402 bp, synthetic construct
  misc_feature 1..3402: note = Description of Artificial Sequence: Synthetic coding sequence
  source 1..3402: mol_type = other DNA
atgcccgtgcaggccccccagtggaccgacttcctgagctgccccatctgcacccagaccttcgacgagaccatcagaaagcccatcagcctgggctgcggccacaccgtgtgcaagatgtgcctgaacaagctgcacagaaaggcctgccccttcgaccagaccaccatcaacaccgacatcgagctgctgcccgtgaacagcgccctgctgcagctggtgggcgcccaggtgcccgagcagcagcccatcaccctgtgcagcggcgtggaggacaccaagcactacgaggaggccaagaagtgcgtggaggagctggccctgtacctgaagcccctgagcagcgccagaggcgtgggcctgaacagcaccacccagagcgtgctgagcagacccatgcagagaaagctggtgaccctggtgcactgccagctggtggaggaggagggcagaatcagagccatgagagccgccagaagcctgggcgagagaaccgtgaccgagctgatcctgcagcaccagaacccccagcagctgagcagcaacctgtgggccgccgtgagagccagaggctgccagttcctgggccccgccatgcaggaggaggccctgaagctggtgctgctggccctggaggacggcagcgccctgagcagaaaggtgctggtgctgttcgtggtgcagagactggagcccagattcccccaggccagcaagaccagcatcggccacgtggtgcagctgctgtacagagccagctgcttcaaggtgaccaagagagacgaggacagcagcctgatgcagctgaaggaggagttcagaacctacgaggccctgagaagagagcacgacagccagatcgtgcagatcgccatggaggccggcctgagaatcgcccccgaccagtggagcagcctgctgtacggcgaccagagccacaagagccacatgcagagcatcatcgacaagctgcagacccccgccagcttcgcccagagcgtgcaggagctgaccatcgccctgcagagaaccggcgaccccgccaacctgaacagactgagaccccacctggagctgctggccaacatcgaccccagccccgacgcccccccccccacctgggagcagctggagaacggcctggtggccgtgagaaccgtggtgcacggcctggtggactacatccagaaccacagcaagaagggcgccgaccagcagcagcccccccagcacagcaagtacaagacctacatgtgcagagacatgaagcagagaggcggctgccccagaggcgccagctgcaccttcgcccacagccaggaggagctggagaagttcagaaagatgaacaagagactggtgcccagaagacccctgagcgccagcctgggccagctgaacgaggtgggcctgcccagcgccgccatcctgcccgacgagggcgccgtggacctgcccagcagaaagccccccgccctgcccaacggcatcgtgagcaccggcaacaccgtgacccagctgatccccagaggcaccgaccccagctacgacagcagcctgaagcccggcaagatcgaccacctgagcagcagcgcccccggcagcccccccgacctgctggagagcgtgcccaagagcatcagcgccctgcccgtgaacccccacagcatcccccccagaggccccgccgacctgccccccatgcccgtgaccaagcccctgcagatggtgcccagaggcagccagctgtaccccgcccagcagaccgacgtgtactaccaggaccccagaggcgccgccccccccttcgagcccgccccctaccagcagggcatgtactacaccccccccccccagtgcgtgagcagattcgtgagacccccccccagcgcccccgagcccgcccccccctacctggaccactaccccccctacctgcaggagagagtggtgaacagccagtacggcacccagccccagcagtacccccccatctaccccagccactacgacggcagaagagtgtaccccgcccccagctacaccagagaggagatcttcagagagagccccatccccatcgagatcccccccgccgccgtgcccagctacgtgcccgagagcagagagagataccagcagatcgagagctactaccccgtggccccccaccccacccagatcagacccagctacctgagagagcccccctacagcagactgcccccccccccccagccccaccccagcctggacgagctgcacagaagaagaaaggagatcatggcccagctggaggagagaaaggtgatcagccccccccccttcgcccccagccccaccctgccccccaccttccaccccgaggagttcctggacgaggacctgaaggtggccggcaagtacaagggcaacgactacagccagtacagcccctggagctgcgacaccatcggcagctacatcggcaccaaggacgccaagcccaaggacgtggtggccgccggcagcgtggagatgatgaacgtggagagcaagggcatgagagaccagagactggacctgcagagaagagccgccgagaccagcgacgacgacctgatccccttcggcgacagacccaccgtgagcagattcggcgccatcagcagaaccagcaagaccatctaccagggcgccggccccatgcaggccatggccccccagggcgcccccaccaagagcatcaacatcagcgactacagcccctacggcacccacggcggctggggcgccagcccctacagcccccaccagaacatccccagccagggccacttcagcgagagagagagaatcagcatgagcgaggtggccagccacggcaagcccctgcccagcgccgagagagagcagctgagactggagctgcagcagctgaaccaccagatcagccagcagacccagctgagaggcctggaggccgtgagcaacagactggtgctgcagagagaggccaacaccctggccggccagagccagcccccccccccccccccccccaagtggcccggcatgatcagcagcgagcagctgagcctggagctgcaccaggtggagagagagatcggcaagagaaccagagagctgagcatggagaaccagtgcagcctggacatgaagagcaagctgaacaccagcaagcaggccgagaacggccagcccgagccccagaacaaggtgcccgccgaggacctgaccctgaccttcagcgacgtgcccaacggcagcgccctgacccaggagaacatcagcctgctgagcaacaagaccagcagcctgaacctgagcgaggaccccgagggcggcggcgacaacaacgacagccagagaagcggcgtgacccccagcagcgccccctag

SEQ ID NO: 97603 - DNA, 3378 bp, synthetic construct
  misc_feature 1..3378: note = Description of Artificial Sequence: Synthetic coding sequence
  source 1..3378: mol_type = other DNA
atgcccgtgcaggccccccagtggaccgacttcctgagctgccccatctgcacccagaccttcgacgagaccatcagaaagcccatcagcctgggctgcggccacaccgtgtgcaagatgtgcctgaacaagctgcacagaaaggcctgccccttcgaccagaccaccatcaacaccgacatcgagctgctgcccgtgaacagcgccctgctgcagctggtgggcgcccaggtgcccgagcagcagcccatcaccctgtgcagcggcgtggaggacaccaagcactacgaggaggccaagaagtgcgtggaggagctggccctgtacctgaagcccctgagcagcgccagaggcgtgggcctgaacagcaccacccagagcgtgctgagcagacccatgcagagaaagctggtgaccctggtgcactgccagctggtggaggaggagggcagaatcagagccatgagagccgccagaagcctgggcgagagaaccgtgaccgagctgatcctgcagcaccagaacccccagcagctgagcagcaacctgtgggccgccgtgagagccagaggctgccagttcctgggccccgccatgcaggaggaggccctgaagctggtgctgctggccctggaggacggcagcgccctgagcagaaaggtgctggtgctgttcgtggtgcagagactggagcccagattcccccaggccagcaagaccagcatcggccacgtggtgcagctgctgtacagagccagctgcttcaaggtgaccaagagagacgaggacagcagcctgatgcagctgaaggaggagttcagaacctacgaggccctgagaagagagcacgacagccagatcgtgcagatcgccatggaggccggcctgagaatcgcccccgaccagtggagcagcctgctgtacggcgaccagagccacaagagccacatgcagagcatcatcgacaagctgcagacccccgccagcttcgcccagagcgtgcaggagctgaccatcgccctgcagagaaccggcgaccccgccaacctgaacagactgagaccccacctggagctgctggccaacatcgaccccagccccgacgcccccccccccacctgggagcagctggagaacggcctggtggccgtgagaaccgtggtgcacggcctggtggactacatccagaaccacagcaagaagggcgccgaccagcagcagcccccccagcacagcaagtacaagacctacatgtgcagagacatgaagcagagaggcggctgccccagaggcgccagctgcaccttcgcccacagccaggaggagctggagaagttcagaaagatgaacaagagactggtgcccagaagacccctgagcgccagcctgggccagctgaacgaggtgggcctgcccagcgccgccatcctgcccgacgagggcgccgtggacctgcccagcagaaagccccccgccctgcccaacggcatcgtgagcaccggcaacaccgtgacccagctgatccccagaggcaccgaccccagctacgacagcagcctgaagcccggcaagatcgaccacctgagcagcagcgcccccggcagcccccccgacctgctggagagcgtgcccaagagcatcagcgccctgcccgtgaacccccacagcatcccccccagaggccccgccgacctgccccccatgcccgtgaccaagcccctgcagatggtgcccagaggcagccagctgtaccccgcccagcagaccgacgtgtactaccaggaccccagaggcgccgccccccccttcgagcccgccccctaccagcagggcatgtactacaccccccccccccagtgcgtgagcagattcgtgagacccccccccagcgcccccgagcccgcccccccctacctggaccactaccccccctacctgcaggagagagtggtgaacagccagtacggcacccagccccagcagtacccccccatctaccccagccactacgacggcagaagagtgtaccccgcccccagctacaccagagaggagatcttcagagagagccccatccccatcgagatcccccccgccgccgtgcccagctacgtgcccgagagcagagagagataccagcagatcgagagctactaccccgtggccccccaccccacccagatcagacccagctacctgagagagcccccctacagcagactgcccccccccccccagccccaccccagcctggacgagctgcacagaagaagaaaggagatcatggcccagctggaggagagaaaggtgatcagccccccccccttcgcccccagccccaccctgccccccaccttccaccccgaggagttcctggacgaggacctgaaggtggccggcaagtacaagggcaacgactacagccagtacagcccctggagctgcgacaccatcggcagctacatcggcaccaaggacgccaagcccaaggacgtggtggccgccggcagcgtggagatgatgaacgtggagagcaagggcatgagagaccagagactggacctgcagagaagagccgccgagaccagcgacgacgacctgatccccttcggcgacagacccaccgtgagcagattcggcgccatcagcagaaccagcaagaccatctaccagggcgccggccccatgcaggccatggccccccagggcgcccccaccaagagcatcaacatcagcgactacagcccctacggcacccacggcggctggggcgccagcccctacagcccccaccagaacatccccagccagggccacttcagcgagagagagagaatcagcatgagcgaggtggccagccacggcaagcccctgcccagcgccgagagagagcagctgagactggagctgcagcagctgaaccaccagatcagccagcagacccagctgagaggcctggagagagaggccaacaccctggccggccagagccagcccccccccccccccccccccaagtggcccggcatgatcagcagcgagcagctgagcctggagctgcaccaggtggagagagagatcggcaagagaaccagagagctgagcatggagaaccagtgcagcctggacatgaagagcaagctgaacaccagcaagcaggccgagaacggccagcccgagccccagaacaaggtgcccgccgaggacctgaccctgaccttcagcagcgacgtgcccaacggcagcgccctgacccaggagaacatcagcctgctgagcaacaagaccagcagcctgaacctgagcgaggaccccgagggcggcggcgacaacaacgacagccagagaagcggcgtgacccccagcagcgccccctag

SEQ ID NO: 97604 - DNA, 3402 bp, synthetic construct; identical to SEQ ID NO: 97602
  misc_feature 1..3402: note = Description of Artificial Sequence: Synthetic coding sequence
  source 1..3402: mol_type = other DNA

SEQ ID NO: 97605 - DNA, 984 bp, synthetic construct
  misc_feature 1..984: note = Description of Artificial Sequence: Synthetic coding sequence
  source 1..984: mol_type = other DNA
atgtgggccacctgctgcaactggttctgcctggacggccagcccgaggaggtgccccccccccagggcgccagaatgcaggcctacagcaaccccggctacagcagcttccccagccccaccggcctggagcccagctgcaagagctgcggcgcccacttcgccaacaccgccagaaagcagacctgcctggactgcaagaagaacttctgcatgacctgcagcagccaggtgggcaacggccccagactgtgcctgctgtgccagagattcagagccaccgccttccagagagaggagctgatgaagatgaaggtgaaggacctgagagactacctgagcctgcacgacatcagcaccgagatgtgcagagagaaggaggagctggtgctgctggtgctgggccagcagcccgtgatcagccaggaggacagaaccagagccagcaccctgagccccgacttccccgagcagcaggccttcctgacccagccccacagcagcatggtgccccccaccagccccaacctgcccagcagcagcgcccaggccaccagcgtgccccccgcccaggtgcaggagaaccagcagagcatcgacagcgaggacagcttcgtgcccggcagaagagccagcctgagcgacctgaccgacctggaggacatcgagggcctgaccgtgagacagctgaaggagatcctggccagaaacttcgtgaactacaagggctgctgcgagaagtgggagctgatggagagagtgaccagactgtacaaggaccagaagggcctgcagcacctgggcggcgccgtgcccagcggcctggaggagaacctgtgcaagatctgcatggacagccccatcgactgcgtgctgctggagtgcggccacatggtgacctgcaccaagtgcggcaagagaatgaacgagtgccccatctgcagacagtacgtgatcagagccgtgcacgtgttcagaagctag

SEQ ID NO: 97606 - DNA, 1092 bp, synthetic construct
  misc_feature 1..1092: note = Description of Artificial Sequence: Synthetic coding sequence
  source 1..1092: mol_type = other DNA
atgtgggccacctgctgcaactggttctgcctggacggccagcccgaggaggtgccccccccccagggcgccagaatgcaggcctacagcaaccccggctacagcagcttccccagccccaccggcctggagcccagctgcaagagctgcggcgcccacttcgccaacaccgccagaaagcagacctgcctggactgcaagaagaacttctgcatgacctgcagcagccaggtgggcaacggccccagactgtgcctgctgtgccagagattcagagccaccgccttccagagagaggagctgatgaagatgaaggtgaaggacctgagagactacctgagcctgcacgacatcagcaccgagatgtgcagagagaaggaggagctggtgctgctggtgctgggccagcagcccgtgatcagccaggaggacagaaccagagccagcaccctgagccccgacttccccgagcagcaggccttcctgacccagccccacagcagcatggtgccccccaccagccccaacctgcccagcagcagcgcccaggccaccagcgtgccccccgcccaggtgcaggagaaccagcaggccaacggccacgtgagccaggaccaggaggagcccgtgtacctggagagcgtggccagagtgcccgccgaggacgagacccagagcatcgacagcgaggacagcttcgtgcccggcagaagagccagcctgagcgacctgaccgacctggaggacatcgagggcctgaccgtgagacagctgaaggagatcctggccagaaacttcgtgaactacaagggctgctgcgagaagtgggagctgatggagagagtgaccagactgtacaaggaccagaagggcctgcagcacctggtgagcggcgccgaggaccagaacggcggcgccgtgcccagcggcctggaggagaacctgtgcaagatctgcatggacagccccatcgactgcgtgctgctggagtgcggccacatggtgacctgcaccaagtgcggcaagagaatgaacgagtgccccatctgcagacagtacgtgatcagagccgtgcacgtgttcagaagctag

SEQ ID NO: 97607 - DNA, 1068 bp, synthetic construct
  misc_feature 1..1068: note = Description of Artificial Sequence: Synthetic coding sequence
  source 1..1068: mol_type = other DNA
atgtgggccacctgctgcaactggttctgcctggacggccagcccgaggaggtgccccccccccagggcgccagaatgcaggcctacagcaaccccggctacagcagcttccccagccccaccggcctggagcccagctgcaagagctgcggcgcccacttcgccaacaccgccagaaagcagacctgcctggactgcaagaagaacttctgcatgacctgcagcagccaggtgggcaacggccccagactgtgcctgctgtgccagagattcagagccaccgccttccagagagaggagctgatgaagatgaaggtgaaggacctgagagactacctgagcctgcacgacatcagcaccgagatgtgcagagagaaggaggagctggtgctgctggtgctgggccagcagcccgtgatcagccaggaggacagaaccagagccagcaccctgagccccgacttccccgagcagcaggccttcctgacccagccccacagcagcatggtgccccccaccagccccaacctgcccagcagcagcgcccaggccaccagcgtgccccccgcccaggtgcaggagaaccagcaggccaacggccacgtgagccaggaccaggaggagcccgtgtacctggagagcgtggccagagtgcccgccgaggacgagacccagagcatcgacagcgaggacagcttcgtgcccggcagaagagccagcctgagcgacctgaccgacctggaggacatcgagggcctgaccgtgagacagctgaaggagatcctggccagaaacttcgtgaactacaagggctgctgcgagaagtgggagctgatggagagagtgaccagactgtacaaggaccagaagggcctgcagcacctgggcggcgccgtgcccagcggcctggaggagaacctgtgcaagatctgcatggacagccccatcgactgcgtgctgctggagtgcggccacatggtgacctgcaccaagtgcggcaagagaatgaacgagtgccccatctgcagacagtacgtgatcagagccgtgcacgtgttcagaagctag

SEQ ID NO: 97608 - DNA, 1092 bp, synthetic construct; identical to SEQ ID NO: 97606
  misc_feature 1..1092: note = Description of Artificial Sequence: Synthetic coding sequence
  source 1..1092: mol_type = other DNA

SEQ ID NO: 97609 - DNA, 816 bp, synthetic construct
  misc_feature 1..816: note = Description of Artificial Sequence: Synthetic coding sequence
  source 1..816: mol_type = other DNA
atgtgggccacctgctgcaactggttctgcctggacggccagcccgaggaggtgccccccccccagggcgccagaatgcaggcctacagcaaccccggctacagcagcttccccagccccaccggcctggagcccagctgcaagagctgcggcgcccacttcgccaacaccgccagaaagcagacctgcctggactgcaagaagaacttctgcatgacctgcagcagccaggtgggcaacggccccagactgtgcctgctgtgccagagattcagagccaccgccttccagagagaggagctgatgaagatgaaggtgaaggacctgagagactacctgagcctgcacgacatcagcaccgagatgtgcagagagaaggaggagctggtgctgctggtgctgggccagcagcccgtgatcagccaggaggacagaaccagagccagcaccctgagccccgacttccccgagcagcaggccttcctgacccagccccacagcagcatggtgccccccaccagccccaacctgcccagcagcagcgcccaggccaccagcgtgccccccgcccaggtgcaggagaaccagcaggccaacggccacgtgagccaggaccaggaggagcccgtgtacctggagagcgtggccagagtgcccgccgaggacgagacccagagcatcgacagcgaggacagcttcgtgcccggcagaagagccagcctgagcgacctgaccgacctggaggacatcgagggcctgaccgtgagacagctgaaggagatcctggccagaaacttcgtgaactacaagggctag

SEQ ID NO: 97610 - DNA, 402 bp, synthetic construct
  misc_feature 1..402: note = Description of Artificial Sequence: Synthetic coding sequence
  source 1..402: mol_type = other DNA
atgtgggccacctgctgcaactggttctgcctggacggccagcccgaggaggtgccccccccccagggcgccagaatgcaggcctacagcaaccccggctacagcagcttccccagccccaccggcctggagcccagctgcaagagctgcggcgcccacttcgccaacaccgccagaaagcagacctgcctggactgcaagaagaacttctgcatgacctgcagcagccaggtgggcaacggccccagactgtgcctgctgtgccagagattcagagccaccgccttccagagagaggagctgatgaagatgaaggtgaaggacctgagagactacctgagcctgcacgacatcagcaccgagatgtgcagagagaaggaggagctggtgctgctggtgtag

SEQ ID NO: 97611 - DNA, 570 bp, synthetic construct
  misc_feature 1..570: note = Description of Artificial Sequence: Synthetic coding sequence
  source 1..570: mol_type = other DNA
atgtgggccacctgctgcaactggttctgcctggacggccagcccgaggaggtgccccccccccagggcgccagaatgcaggcctacagcaaccccggctacagcagcttccccagccccaccggcctggagcccagctgcaagagctgcggcgcccacttcgccaacaccgccagaaagcagacctgcctggactgcaagaagaacttctgcatgacctgcagcagccaggtgggcaacggccccagactgtgcctgctgtgccagagattcagagccaccgccttccagagagaggagctgatgaagatgaaggtgaaggacctgagagactacctgagcctgcacgacatcagcaccgagatgtgcagagagaaggaggagctggtgctgctggtgctgggccagcagcccgtgatcagccaggaggacagaaccagagccagcaccctgagccccgacttccccgagcagcaggccttcctgacccagccccacagcagcatggtgccccccaccagccccaacctgcccagcagcagcgcccaggccaccagcgtgcccccctag

SEQ ID NO: 97612 - DNA, 138 bp, synthetic construct
  misc_feature 1..138: note = Description of Artificial Sequence: Synthetic coding sequence
  source 1..138: mol_type = other DNA
atgtgggccacctgctgcaactggttctgcctggacggccagcccgaggaggtgccccccccccagggcgccagaatgcaggcctacagcaaccccggctacagcagcttccccagccccaccggcctggagccctag

SEQ ID NO: 97613 - DNA, 2124 bp, synthetic construct
  misc_feature 1..2124: note = Description of Artificial Sequence: Synthetic coding sequence
  source 1..2124: mol_type = other DNA
atgagcggcagcagacaggccggcagcggcagcgccggcaccagccccggcagcagcgccgccagcagcgtgaccagcgccagcagcagcctgagcagcagccccagcccccccagcgtggccgtgagcgccgccgccctggtgagcggcggcgtggcccaggccgccggcagcggcggcctgggcggccccgtgagacccgtgctggtggcccccgccgtgagcggcagcggcggcggcgccgtgagcaccggcctgagcagacacagctgcgccgccagacccagcgccggcgtgggcggcagcagcagcagcctgggcagcggcagcagaaagagacccctgctggcccccctgtgcaacggcctgatcaacagctacgaggacaagagcaacgacttcgtgtgccccatctgcttcgacatgatcgaggaggcctacatgaccaagtgcggccacagcttctgctacaagtgcatccaccagagcctggaggacaacaacagatgccccaagtgcaactacgtggtggacaacatcgaccacctgtaccccaacttcctggtgaacgagctgatcctgaagcagaagcagagattcgaggagaagagattcaagctggaccacagcaacggccacagatggcagatcttccaggactggctgggcaccgaccaggacaacctggacctggccaacgtgaacctgatgctggagctgctggtgcagaagaagaagcagctggaggccgagagccacgccgcccagctgcagatcctgatggagttcctgaaggtggccagaagaaacaagagagaggagatgagcggcctgtacagccccgtgagcgaggacagcaccgtgccccagttcgaggcccccagccccagccacagcagcatcatcgacagcaccgagtacagccagccccccggcttcagcggcagcagccagaccaagaagcagccctggtacaacagcaccctggccagcagaagaaagagactgaccgcccacttcgaggacctggagcagtgctacttcagcaccagaatgagcagaatcagcgacgacagcagaaccgccagccagctggacgagttccaggagtgcctgagcaagttcaccagatacaacagcgtgagacccctggccaccctgagctacgccagcgacctgtacaacggcagcagcatcgtgagcagcatcgagttcgacagagactgcgactacttcgccatcgccggcgtgaccaagaagatcaaggtgtacgagtacgacaccgtgatccaggacgccgtggacatccactaccccgagaacgagatgacctgcaacagcaagatcagctgcatcagctggagcagctaccacaagaacctgctggccagcagcgactacgagggcaccgtgatcctgtgggacggcttcaccggccagagaagcaaggtgtaccaggagcacgagaagagatgctggagcgtggacttcaacctgatggaccccaagctgctggccagcggcagcgacgacgccaaggtgaagctgtggagcaccaacctggacaacagcgtggccagcatcgaggccaaggccaacgtgtgctgcgtgaagttcagccccagcagcagataccacctggccttcggctgcgccgaccactgcgtgcactactacgacctgagaaacaccaagcagcccatcatggtgttcaagggccacagaaaggccgtgagctacgccaagttcgtgagcggcgaggagatcgtgagcgccagcaccgacagccagctgaagctgtggaacgtgggcaagccctactgcctgagaagcttcaagggccacatcaacgagaagaacttcgtgggcctggccagcaacggcgactacatcgcctgcggcagcgagaacaacagcctgtacctgtactacaagggcctgagcaagaccctgctgaccttcaagttcgacaccgtgaagagcgtgctggacaaggacagaaaggaggacgacaccaacgagttcgtgagcgccgtgtgctggagagccctgcccgacggcgagagcaacgtgctgatcgccgccaacagccagggcaccatcaaggtgctggagctggtgtag

SEQ ID NO: 97614 - DNA, 1521 bp, synthetic construct
  misc_feature 1..1521: note = Description of Artificial Sequence: Synthetic coding sequence
  source 1..1521: mol_type = other DNA
atggagttcctgaaggtggccagaagaaacaagagagagcagctggagcagatccagaaggagctgagcgtgctggaggaggacatcaagagagtggaggagatgagcggcctgtacagccccgtgagcgaggacagcaccgtgccccagttcgaggcccccagccccagccacagcagcatcatcgacagcaccgagtacagccagccccccggcttcagcggcagcagccaggccggcgtgcagtggagatacctgggcagcctgcagccccccccccccagatacaagagattcagctgcctgaccctgcccagcagctgggactacagaagactgcccccccacctgaccaagaagcagccctggtacaacagcaccctggccagcagaagaaagagactgaccgcccacttcgaggacctggagcagtgctacttcagcaccagaatgagcagaatcagcgacgacagcagaaccgccagccagctggacgagttccaggagtgcctgagcaagttcaccagatacaacagcgtgagacccctggccaccctgagctacgccagcgacctgtacaacggcagcagcatcgtgagcagcatcgagttcgacagagactgcgactacttcgccatcgccggcgtgaccaagaagatcaaggtgtacgagtacgacaccgtgatccaggacgccgtggacatccactaccccgagaacgagatgacctgcaacagcaagatcagctgcatcagctggagcagctaccacaagaacctgctggccagcagcgactacgagggcaccgtgatcctgtgggacggcttcaccggccagagaagcaaggtgtaccaggagcacgagaagagatgctggagcgtggacttcaacctgatggaccccaagctgctggccagcggcagcgacgacgccaaggtgaagctgtggagcaccaacctggacaacagcgtggccagcatcgaggccaaggccaacgtgtgctgcgtgaagttcagccccagcagcagataccacctggccttcggctgcgccgaccactgcgtgcactactacgacctgagaaacaccaagcagcccatcatggtgttcaagggccacagaaaggccgtgagctacgccaagttcgtgagcggcgaggagatcgtgagcgccagcaccgacagccagctgaagctgtggaacgtgggcaagccctactgcctgagaagcttcaagggccacatcaacgagaagaacttcgtgggcctggccagcaacggcgactacatcgcctgcggcagcgagaacaacagcctgtacctgtactacaagggcctgagcaagaccctgctgaccttcaagttcgacaccgtgaagagcgtgctggacaaggacagaaaggaggacgacaccaacgagttcgtgagcgccgtgtgctggagagccctgcccgacggcgagagcaacgtgctgatcgccgccaacagccagggcaccatcaaggtgctggccctgctgtag

SEQ ID NO: 97615 - DNA, 2196 bp, synthetic construct
  misc_feature 1..2196: note = Description of Artificial Sequence: Synthetic coding sequence
  source 1..2196: mol_type = other DNA
atgagcggcagcagacaggccggcagcggcagcgccggcaccagccccggcagcagcgccgccagcagcgtgaccagcgccagcagcagcctgagcagcagccccagcccccccagcgtggccgtgagcgccgccgccctggtgagcggcggcgtggcccaggccgccggcagcggcggcctgggcggccccgtgagacccgtgctggtggcccccgccgtgagcggcagcggcggcggcgccgtgagcaccggcctgagcagacacagctgcgccgccagacccagcgccggcgtgggcggcagcagcagcagcctgggcagcggcagcagaaagagacccctgctggcccccctgtgcaacggcctgatcaacagctacgaggacaagagcaacgacttcgtgtgccccatctgcttcgacatgatcgaggaggcctacatgaccaagtgcggccacagcttctgctacaagtgcatccaccagagcctggaggacaacaacagatgccccaagtgcaactacgtggtggacaacatcgaccacctgtaccccaacttcctggtgaacgagctgatcctgaagcagaagcagagattcgaggagaagagattcaagctggaccacagcgtgagcagcaccaacggccacagatggcagatcttccaggactggctgggcaccgaccaggacaacctggacctggccaacgtgaacctgatgctggagctgctggtgcagaagaagaagcagctggaggccgagagccacgccgcccagctgcagatcctgatggagttcctgaaggtggccagaagaaacaagagagagcagctggagcagatccagaaggagctgagcgtgctggaggaggacatcaagagagtggaggagatgagcggcctgtacagccccgtgagcgaggacagcaccgtgccccagttcgaggcccccagccccagccacagcagcatcatcgacagcaccgagtacagccagccccccggcttcagcggcagcagccagaccaagaagcagccctggtacaacagcaccctggccagcagaagaaagagactgaccgcccacttcgaggacctggagcagtgctacttcagcaccagaatgagcagaatcagcgacgacagcagaaccgccagccagctggacgagttccaggagtgcctgagcaagttcaccagatacaacagcgtgagacccctggccaccctgagctacgccagcgacctgtacaacggcagcagcatcgtgagcagcatcgagttcgacagagactgcgactacttcgccatcgccggcgtgaccaagaagatcaaggtgtacgagtacgacaccgtgatccaggacgccgtggacatccactaccccgagaacgagatgacctgcaacagcaagatcagctgcatcagctggagcagctaccacaagaacctgctggccagcagcgactacgagggcaccgtgatcctgtgggacggcttcaccggccagagaagcaaggtgtaccaggagcacgagaagagatgctggagcgtggacttcaacctgatggaccccaagctgctggccagcggcagcgacgacgccaaggtgaagctgtggagcaccaacctggacaacagcgtggccagcatcgaggccaaggccaacgtgtgctgcgtgaagttcagccccagcagcagataccacctggccttcggctgcgccgaccactgcgtgcactactacgacctgagaaacaccaagcagcccatcatggtgttcaagggccacagaaaggccgtgagctacgccaagttcgtgagcggcgaggagatcgtgagcgccagcaccgacagccagctgaagctgtggaacgtgggcaagccctactgcctgagaagcttcaagggccacatcaacgagaagaacttcgtgggcctggccagcaacggcgactacatcgcctgcggcagcgagaacaacagcctgtacctgtactacaagggcctgagcaagaccctgctgaccttcaagttcgacaccgtgaagagcgtgctggacaaggacagaaaggaggacgacaccaacgagttcgtgagcgccgtgtgctggagagccctgcccgacggcgagagcaacgtgctgatcgccgccaacagccagggcaccatcaaggtgctggagctggtgtag

SEQ ID NO: 97616 - DNA, 774 bp, synthetic construct
  misc_feature 1..774: note = Description of Artificial Sequence: Synthetic coding sequence
  source 1..774: mol_type = other DNA
atgagcggcagcagacaggccggcagcggcagcgccggcaccagccccggcagcagcgccgccagcagcgtgaccagcgccagcagcagcctgagcagcagccccagcccccccagcgtggccgtgagcgccgccgccctggtgagcggcggcgtggcccaggccgccggcagcggcggcctgggcggccccgtgagacccgtgctggtggcccccgccgtgagcggcagcggcggcggcgccgtgagcaccggcctgagcagacacagctgcgccgccagacccagcgccggcgtgggcggcagcagcagcagcctgggcagcggcagcagaaagagacccctgctggcccccctgtgcaacggcctgatcaacagctacgaggacaagagcaacgacttcgtgtgccccatctgcttcgacatgatcgaggaggcctacatgaccaagtgcggccacagcttctgctacaagtgcatccaccagagcctggaggacaacaacagatgccccaagtgcaactacgtggtggacaacatcgaccacctgtaccccaacttcctggtgaacgagctgatcctgaagcagaagcagagattcgaggagaagagattcaagctggaccacagcgtgagcagcaccaacggccacagatggcagatcttccaggactggctgggcaccgaccaggacaacctggacctggccaacgtgaacctgatgctggagctgctggtgcagaagaacaagaagaagaagaagaagaagaagtag

SEQ ID NO: 97617 - DNA, 2325 bp, synthetic construct
  misc_feature 1..2325: note = Description of Artificial Sequence: Synthetic coding sequence
  source 1..2325: mol_type = other DNA
atggcccacgaggccatggagtacgacgtgcaggtgcagctgaaccacgccgagcagcagcccgcccccgccggcatggccagcagccagggcggccccgccctgctgcagcccgtgcccgccgacgtggtgagcagccagggcgtgcccagcatcctgcagcccgcccccgccgaggtgatcagcagccaggccaccccccccctgctgcagcccgccccccagctgagcgtggacctgaccgaggtggaggtgctgggcgaggacaccgtggagaacatcaaccccagaaccagcgagcagcacagacagggcagcgacggcaaccacaccatccccgccagcagcctgcacagcatgaccaacttcatcagcggcctgcagagactgcacggcatgctggagttcctgagacccagcagcagcaaccacagcgtgggccccatgagaaccagaagaagagtgagcgccagcagaagagccagagccggcggcagccagagaaccgacagcgccagactgagagcccccctggacgcctacttccaggtgagcagaacccagcccgacctgcccgccaccacctacgacagcgagaccagaaaccccgtgagcgaggagctgcaggtgagcagcagcagcgacagcgacagcgacagcagcgccgagtacggcggcgtggtggaccaggccgaggagagcggcgccgtgatcctggaggagcagctggccggcgtgagcgccgagcaggaggtgacctgcatcgacggcggcaagaccctgcccaagcagcccagcccccagaagagcgagcccctgctgcccagcgccagcatggacgaggaggagggcgacacctgcaccatctgcctggagcagtggaccaacgccggcgaccacagactgagcgccctgagatgcggccacctgttcggctacagatgcatcagcacctggctgaagggccaggtgagaaagtgcccccagtgcaacaagaaggccagacacagcgacatcgtggtgctgtacgccagaaccctgagagccctggacaccagcgagcaggagagaatgaagagcagcctgctgaaggagcagatgctgagaaagcaggccgagctggagagcgcccagtgcagactgcagctgcaggtgctgaccgacaagtgcaccagactgcagagaagagtgcaggacctgcagaagctgaccagccaccagagccagaacctgcagcagcccagaggcagccaggcctgggtgctgagctgcagccccagcagccagggccagcacaagcacaagtaccacttccagaagaccttcaccgtgagccaggccggcaactgcagaatcatggcctactgcgacgccctgagctgcctggtgatcagccagcccagcccccaggccagcttcctgcccggcttcggcgtgaagatgctgagcaccgccaacatgaagagcagccagtacatccccatgcacggcaagcagatcagaggcctggccttcagcagctacctgagaggcctgctgctgagcgccagcctggacaacaccatcaagctgaccagcctggagaccaacaccgtggtgcagacctacaacgccggcagacccgtgtggagctgctgctggtgcctggacgaggccaactacatctacgccggcctggccaacggcagcatcctggtgtacgacgtgagaaacaccagcagccacgtgcaggagctggtggcccagaaggccagatgccccctggtgagcctgagctacatgcccagagccgccagcgccgccttcccctacggcggcgtgctggccggcaccctggaggacgccagcttctgggagcagaagatggacttcagccactggccccacgtgctgcccctggagcccggcggctgcatcgacttccagaccgagaacagcagcagacactgcctggtgacctacagacccgacaagaaccacaccaccatcagaagcgtgctgatggagatgagctacagactggacgacaccggcaaccccatctgcagctgccagcccgtgcacaccttcttcggcggccccacctgcaagctgctgaccaagaacgccatcttccagagccccgagaacgacggcaacatcctggtgtgcaccggcgacgaggccgccaacagcgccctgctgtgggacgccgccagcggcagcctgctgcaggacctgcagaccgaccagcccgtgctggacatctgccccttcgaggtgaacagaaacagctacctggccaccctgaccgagaagatggtgcacatctacaagtgggagtag

SEQ ID NO: 97618 - DNA, 792 bp, synthetic construct
  misc_feature 1..792: note = Description of Artificial Sequence: Synthetic coding sequence
  source 1..792: mol_type = other DNA
atggcccacgaggccatggagtacgacgtgcaggtgcagctgaaccacgccgagcagcagcccgcccccgccggcatggccagcagccagggcggccccgccctgctgcagcccgtgcccgccgacgtggtgagcagccagggcgtgcccagcatcctgcagcccgcccccgccgaggtgatcagcagccaggccaccccccccctgctgcagcccgccccccagctgagcgtggacctgaccgaggtggaggtgctgggcgaggacaccgtggagaacatcaaccccagaaccagcgagcagcacagacagggcagcgacggcaaccacaccatccccgccagcagcctgcacagcatgcccctggagcccggcggctgcatcgacttccagaccgagaacagcagcagacactgcctggtgacctacagacccgacaagaaccacaccaccatcagaagcgtgctgatggagatgagctacagactggacgacaccggcaaccccatctgcagctgccagcccgtgcacaccttcttcggcggccccacctgcaagctgctgaccaagaacgccatcttccagagccccgagaacgacggcaacatcctggtgtgcaccggcgacgaggccgccaacagcgccctgctgtgggacgccgccagcggcagcctgctgcaggacctgcagaccgaccagcccgtgctggacatctgccccttcgaggtgaacagaaacagctacctggccaccctgaccgagaagatggtgcacatctacaagtgggagtag

SEQ ID NO: 97619 - DNA, 2058 bp, synthetic construct
  misc_feature 1..2058: note = Description of Artificial Sequence: Synthetic coding sequence
  source 1..2058: mol_type = other DNA
atgaaccagagcagaagcagaagcgacggcggcagcgaggagaccctgccccaggaccacaaccaccacgagaacgagagaagatggcagcaggagagactgcacagagaggaggcctactaccagttcatcaacgagctgaacgacgaggactacagactgatgagagaccacaacctgctgggcacccccggcgagatcaccagcgaggagctgcagcagagactggacggcgtgaaggagcagctggccagccagcccgacctgagagacggcaccaactacagagacagcgaggtgcccagagagagcagccacgaggacagcctgctggagtggctgaacaccttcagaagaaccggcaacgccaccagaagcggccagaacggcaaccagacctggagagccgtgagcagaaccaaccccaacaacggcgagttcagattcagcctggagatccacgtgaaccacgagaacagaggcttcgagatccacggcgaggactacaccgacatccccctgagcgacagcaacagagaccacaccgccaacagacagcagagaagcaccagccccgtggccagaagaaccagaagccagaccagcgtgaacttcaacggcagcagcagcaacatccccagaaccagactggccagcagaggccagaaccccgccgagggcagcttcagcaccctgggcagactgagaaacggcatcggcggcgccgccggcatccccagagccaacgccagcagaaccaacttcagcagccacaccaaccagagcggcggcagcgagctgagacagagagagggccagagattcggcgccgcccacgtgtgggagaacggcgccagaagcaacgtgaccgtgagaaacaccaaccagagactggagcccatcagactgagaagcaccagcaacagcagaagcagaagccccatccagagacagagcggcaccgtgtaccacaacagccagagagagagcagacccgtgcagcagaccaccagaagaagcgtgagaagaagaggcagaaccagagtgttcctggagcaggacagagagagagagagaagaggcaccgcctacacccccttcagcaacagcagactggtgagcagaatcaccgtggaggagggcgaggagagcagcagaagcagcaccgccgtgagaagacaccccaccatcaccctggacctgcaggtgagaagaatcagacccggcgagaacagagacagagacagcatcgccaacagaaccagaagcagagtgggcctggccgagaacaccgtgaccatcgagagcaacagcggcggcttcagaagaaccatcagcagactggagagaagcggcatcagaacctacgtgagcaccatcaccgtgcccctgagaagaatcagcgagaacgagctggtggagcccagcagcgtggccctgagaagcatcctgagacagatcatgaccggcttcggcgagctgagcagcctgatggaggccgacagcgagagcgagctgcagagaaacggccagcacctgcccgacatgcacagcgagctgagcaacctgggcaccgacaacaacagaagccagcacagagagggcagcagccaggacagacaggcccagggcgacagcaccgagatgcacggcgagaacgagaccacccagccccacaccagaaacagcgacagcagaggcggcagacagctgagaaaccccaacaacctggtggagaccggcaccctgcccatcctgagactggcccacttcttcctgctgaacgagagcgacgacgacgacagaatcagaggcctgaccaaggagcagatcgacaacctgagcaccagacactacgagcacaacagcatcgacagcgagctgggcaagatctgcagcgtgtgcatcagcgactacgtgaccggcaacaagctgagacagctgccctgcatgcacgagttccacatccactgcatcgacagatggctgagcgagaactgcacctgccccatctgcagacagcccgtgctgggcagcaacatcgccaacaacggctag

SEQ ID NO: 97620 - DNA, 2058 bp, synthetic construct; identical to SEQ ID NO: 97619
  misc_feature 1..2058: note = Description of Artificial Sequence: Synthetic coding sequence
  source 1..2058: mol_type = other DNA

SEQ ID NO: 97621 - DNA, 2058 bp, synthetic construct; identical to SEQ ID NO: 97619
  misc_feature 1..2058: note = Description of Artificial Sequence: Synthetic coding sequence
  source 1..2058: mol_type = other DNA

SEQ ID NO: 97622 - DNA, 990 bp, synthetic construct
  misc_feature 1..990: note = Description of Artificial Sequence: Synthetic coding sequence
  source 1..990: mol_type = other DNA
atgcagctggaggtggacaagatgggcaccaagctgggcgagctgctggtgagcagaatcaccgtggaggagggcgaggagagcagcagaagcagcaccgccgtgagaagacaccccaccatcaccctggacctgcaggtgagaagaatcagacccggcgagaacagagacagagacagcatcgccaacagaaccagaagcagagtgggcctggccgagaacaccgtgaccatcgagagcaacagcggcggcttcagaagaaccatcagcagactggagagaagcggcatcagaacctacgtgagcaccatcaccgtgcccctgagaagaatcagcgagaacgagctggtggagcccagcagcgtggccctgagaagcatcctgagacagatcatgaccggcttcggcgagctgagcagcctgatggaggccgacagcgagagcgagctgcagagaaacggccagcacctgcccgacatgcacagcgagctgagcaacctgggcaccgacaacaacagaagccagcacagagagggcagcagccaggacagacaggcccagggcgacagcaccgagatgcacggcgagaacgagaccacccagccccacaccagaaacagcgacagcagaggcggcagacagctgagaaaccccaacaacctggtggagaccggcaccctgcccatcctgagactggcccacttcttcctgctgaacgagagcgacgacgacgacagaatcagaggcctgaccaaggagcagatcgacaacctgagcaccagacactacgagcacaacagcatcgacagcgagctgggcaagatctgcagcgtgtgcatcagcgactacgtgaccggcaacaagctgagacagctgccctgcatgcacgagttccacatccactgcatcgacagatggctgagcgagaactgcacctgccccatctgcagacagcccgtgctgggcagcaacatcgccaacaacggctag

SEQ ID NO: 97623 - DNA, 1221 bp, synthetic construct
  misc_feature 1..1221: note = Description of Artificial Sequence: Synthetic coding sequence
  source 1..1221: mol_type = other DNA
atgaccacccccgccaacgcccagaacgccagcaagacctgggagctgagcctgtacgagctgcacagaaccccccaggaggccatcatggacggcaccgagatcgccgtgagccccagaagcctgcacagcgagctgatgtgccccatctgcctggacatgctgaagaacaccatgaccaccaaggagtgcctgcacagattctgcagcgactgcatcgtgaccgccctgagaagcggcaacaaggagtgccccacctgcagaaagaagctggtgagcaagagaagcctgagacccgaccccaacttcgacgccctgatcagcaagatctaccccagcagagaggagtacgaggcccaccaggacagagtgctgatcagactgagcagactgcacaaccagcaggccctgagcagcagcatcgaggagggcctgagaatgcaggccatgcacagagcccagagagtgagaagacccatccccggcagcgaccagaccaccaccatgagcggcggcgagggcgagcccggcgagggcgagggcgacggcgaggacgtgagcagcgacagcgcccccgacagcgcccccggccccgcccccaagagacccagaggcggcggcgccggcggcagcagcgtgggcaccggcggcggcggcaccggcggcgtgggcggcggcgccggcagcgaggacagcggcgacagaggcggcaccctgggcggcggcaccctgggcccccccagcccccccggcgcccccagcccccccgagcccggcggcgagatcgagctggtgttcagaccccaccccctgctggtggagaagggcgagtactgccagaccagatacgtgaagaccaccggcaacgccaccgtggaccacctgagcaagtacctggccctgagaatcgccctggagagaagacagcagcaggaggccggcgagcccggcggccccggcggcggcgccagcgacaccggcggccccgacggctgcggcggcgagggcggcggcgccggcggcggcgacggccccgaggagcccgccctgcccagcctggagggcgtgagcgagaagcagtacaccatctacatcgcccccggcggcggcgccttcaccaccctgaacggcagcctgaccctggagctggtgaacgagaagttctggaaggtgagcagacccctggagctgtgctacgcccccaccaaggaccccaagtag

SEQ ID NO: 97624 - DNA, 1221 bp, synthetic construct; identical to SEQ ID NO: 97623
  misc_feature 1..1221: note = Description of Artificial Sequence: Synthetic coding sequence
  source 1..1221: mol_type = other DNA

SEQ ID NO: 97625 - DNA, 1221 bp, synthetic construct; identical to SEQ ID NO: 97623
  misc_feature 1..1221: note = Description of Artificial Sequence: Synthetic coding sequence
  source 1..1221: mol_type = other DNA

SEQ ID NO: 97626 - DNA, 1221 bp, synthetic construct; identical to SEQ ID NO: 97623
  misc_feature 1..1221: note = Description of Artificial Sequence: Synthetic coding sequence
  source 1..1221: mol_type = other DNA

SEQ ID NO: 97627 - DNA, 1221 bp, synthetic construct; identical to SEQ ID NO: 97623
  misc_feature 1..1221: note = Description of Artificial Sequence: Synthetic coding sequence
  source 1..1221: mol_type = other DNA

SEQ ID NO: 97628 - DNA, 1221 bp, synthetic construct; identical to SEQ ID NO: 97623
  misc_feature 1..1221: note = Description of Artificial Sequence: Synthetic coding sequence
  source 1..1221: mol_type = other DNA

SEQ ID NO: 97629 - DNA, 465 bp, synthetic construct
  misc_feature 1..465: note = Description of Artificial Sequence: Synthetic coding sequence
  source 1..465: mol_type = other DNA
atgggcaactgcctgaagagccccaccagcgacgacatcagcctgctgcacgagagccagagcgacagagccagcttcggcgagggcaccgagcccgaccaggagcccccccccccctaccaggagcaggtgcccgtgcccgtgtaccaccccacccccagccagaccagactggccacccagctgaccgaggaggagcagatcagaatcgcccagagaatcggcctgatccagcacctgcccaagggcgtgtacgaccccggcagagacggcagcgagaagaagatcagagagtgcgtgatctgcatgatggacttcgtgtacggcgaccccatcagattcctgccctgcatgcacatctaccacctggactgcatcgacgactggctgatgagaagcttcacctgccccagctgcatggagcccgtggacgccgccctgctgagcagctacgagaccaactag

SEQ ID NO: 97630 - DNA, 1896 bp, synthetic construct
  misc_feature 1..1896: note = Description of Artificial Sequence: Synthetic coding sequence
  source 1..1896: mol_type = other DNA
atgcccagacccgccctgagcgtgaccagcttctgccacagactgggcaagagagagagaaagcagagcttcatgggcaacagcggcaacagctggagccacacccccttccccaagctggagctgggcctgggcccccagcccatggcccccagagagctgcccacctgcagcatctgcctggagagactgagagaccccatcagcctggactgcggccacgacttctgcatcagatgcttcagcacccacagactgcccggctgcgagcccccctgctgccccgagtgcagaaagatctgcaagcagaagagaggcctgagaagcctgggcgagaagatgaagctgctgccccagagacccctgccccccgccctgcaggagacctgccccgtgagagccgagcccctgctgctggtgagaatcaacgccagcggcggcctgatcctgagaatgggcgccatcaacagatgcctgaagcaccccctggccagagacacccccgtgtgcctgctggccgtgctgggcgagcagcacagcggcaagagcttcctgctgaaccacctgctgcagggcctgcccggcctggagagcggcgagggcggcagacccagaggcggcgaggccagcctgcagggctgcagatggggcgccaacggcctggccagaggcatctggatgtggagccaccccttcctgctgggcaaggagggcaagaaggtggccgtgttcctggtggacaccggcgacgccatgagccccgagctgagcagagagaccagaatcaagctgtgcgccctgaccaccatgctgagcagctaccagatcctgagcaccagccaggagctgaaggacaccgacctggactacctggagatgttcgtgcacgtggccgaggtgatgggcaagcactacggcatggtgcccatccagcacctggacctgctggtgagagacagcagccaccccaacaaggccggccagggccacgtgggcaacatcttccagagactgagcggcagataccccaaggtgcaggagctgctgcagggcaagagagccagatgctgcctgctgcccgcccccggcagaagaagaatgaaccagggccacgccagccccggcgacaccgacgacgacttcagacacctgctgggcgcctacgtgagcgacgtgctgagcgccgccccccagcacgccaagagcagatgccagggctactggaacgagggcagagccgtggccagaggcgacagaagactgctgaccggccagcagctggcccaggagatcaagaacctgagcggctggatgggcagaaccggccccggcttcaccagccccgacgagatggccgcccagctgcacgacctgagaaaggtggaggccgccaagagagagttcgaggagtacgtgagacagcaggacgtggccaccaagagaatcttcagcgccctgagagtgctgcccgacaccatgagaaacctgctgagcacccagaaggacgccatcctggccagacacggcgtggccctgctgtgcaagggcagagaccagaccctggaggccctggaggccgagctgcaggccaccgccaaggccttcatggacagctacaccatgagattctgcggccacctggccgccgtgggcggcgccgtgggcgccggcctgatgggcctggccggcggcgtggtgggcgccggcatggccgccgccgccctggccgccgaggccggcatggtggccgccggcgccgccgtgggcgccaccggcgccgccgtggtgggcggcggcgtgggcgccggcctggccgccaccgtgggctgcatggagaaggaggaggacgagagactgctggagggcgacagagagcccctgctgcaggaggagtag

SEQ ID NO: 97631 - DNA, 687 bp, synthetic construct
  misc_feature 1..687: note = Description of Artificial Sequence: Synthetic coding sequence
  source 1..687: mol_type = other DNA
atggccgcccagcagagagactgcggcggcgccgcccagctggccggccccgccgccgaggccgaccccctgggcagattcacctgccccgtgtgcctggaggtgtacgagaagcccgtgcaggtgccctgcggccacgtgttctgcagcgcctgcctgcaggagtgcctgaagcccaagaagcccgtgtgcggcgtgtgcagaagcgccctggcccccggcgtgagagccgtggagctggagagacagatcgagagcaccgagaccagctgccacggctgcagaaagaacttcttcctgagcaagatcagaagccacgtggccacctgcagcaagtaccagaactacatcatggagggcgtgaaggccaccatcaaggacgccagcctgcagcccagaaacgtgcccaacagatacaccttcccctgcccctactgccccgagaagaacttcgaccaggagggcctggtggagcactgcaagctgttccacagcaccgacaccaagagcgtggtgtgccccatctgcgccagcatgccctggggcgaccccaactacagaagcgccaacttcagagagcacatccagagaagacacagattcagctacgacaccttcgtggactacgacgtggacgaggaggacatgatgaaccaggtgctgcagagaagcatcatcgaccagtag

SEQ ID NO: 97632 - DNA, 576 bp, synthetic construct
  misc_feature 1..576: note = Description of Artificial Sequence: Synthetic coding sequence
  source 1..576: mol_type = other DNA
atggccgcccagcagagagactgcggcggcgccgcccagctggccggccccgccgccgaggccgaccccctgggcagattcacctgccccgtgtgcctggaggtgtacgagaagcccgtgcaggtgccctgcggccacgtgttctgcagcgcctgcctgcaggagtgcctgaagcccaagaagcccgtgtgcggcgtgtgcagaagcgccctggcccccggcgtgagagccgtggagctggagagacagatcgagagcaccgagaccagctgccacggctgcagaaagaacttcttcctgagcaagatcagaagccacgtggccacctgcagcaagtaccagaactacatcatggagggcgtgaaggccaccatcaaggacgccagcctgcagcccagaaacgtgcccaacagatacaccttcccctgcccctactgccccgagaagaacttcgaccaggagggcctggtggagcactgcaagctgttccacagcaccgacaccaagagcgtgaccagcgagcagagcccctgcctgctgagcgtgagctgctacagagccagcatcacctactag

SEQ ID NO: 97633 - DNA, 1287 bp, synthetic construct
  misc_feature 1..1287: note = Description of Artificial Sequence: Synthetic coding sequence
  source 1..1287: mol_type = other DNA
atgggccccccccccggcgccggcgtgagctgcagaggcggctgcggcttcagcagactgctggcctggtgcttcctgctggccctgagcccccaggcccccggcagcagaggcgccgaggccgtgtggaccgcctacctgaacgtgagctggagagtgccccacaccggcgtgaacagaaccgtgtgggagctgagcgaggagggcgtgtacggccaggacagccccctggagcccgtggccggcgtgctggtgccccccgacggccccggcgccctgaacgcctgcaacccccacaccaacttcaccgtgcccaccgtgtggggcagcaccgtgcaggtgagctggctggccctgatccagagaggcggcggctgcaccttcgccgacaagatccacctggcctacgagagaggcgccagcggcgccgtgatcttcaacttccccggcaccagaaacgaggtgatccccatgagccaccccggcgccgtggacatcgtggccatcatgatcggcaacctgaagggcaccaagatcctgcagagcatccagagaggcatccaggtgaccatggtgatcgaggtgggcaagaagcacggcccctgggtgaaccactacagcatcttcttcgtgagcgtgagcttcttcatcatcaccgccgccaccgtgggctacttcatcttctacagcgccagaagactgagaaacgccagagcccagagcagaaagcagagacagctgaaggccgacgccaagaaggccatcggcagactgcagctgagaaccctgaagcagggcgacaaggagatcggccccgacggcgacagctgcgccgtgtgcatcgagctgtacaagcccaacgacctggtgagaatcctgacctgcaaccacatcttccacaagacctgcgtggacccctggctgctggagcacagaacctgccccatgtgcaagtgcgacatcctgaaggccctgggcatcgaggtggacgtggaggacggcagcgtgagcctgcaggtgcccgtgagcaacgagatcagcaacagcgccagcagccacgaggaggacaacagaagcgagaccgccagcagcggctacgccagcgtgcagggcaccgacgagccccccctggaggagcacgtgcagagcaccaacgagagcctgcagctggtgaaccacgaggccaacagcgtggccgtggacgtgatcccccacgtggacaaccccaccttcgaggaggacgagacccccaaccaggagaccgccgtgagagagatcaagagctag

SEQ ID NO: 97634 - DNA, 1209 bp, synthetic construct
  misc_feature 1..1209: note = Description of Artificial Sequence: Synthetic coding sequence
  source 1..1209: mol_type = other DNA
atgaaccaggagaacagaagcagcttcttctggctgctggtgatcttcaccttcctgctgaagatcaccgccagcttcagcatgagcgcctacgtgaccgtgacctactacaacgagaccagcaactacaccgccatcgagacctgcgagtgcggcgtgtacggcctggccagccccgtggccaacgccatgggcgtggtgggcatccccaagaacaacaactaccaggcctgcgaccacaacaccgagttcagcaacaccaagaagccctggatcgccctgatcgagagaggcaactgcaccttcagcgagaagatccagaccgccggcagaagaaacgccgacgccgtggtgatctacaacgcccccgagaccggcaaccagaccatccagatggccaacttcggcgccgtggacatcgtggccatcatgatcggcaacctgaagggcaccaagatcctgcagagcatccagagaggcatccaggtgaccatggtgatcgaggtgggcaagaagcacggcccctgggtgaaccactacagcatcttcttcgtgagcgtgagcttcttcatcatcaccgccgccaccgtgggctacttcatcttctacagcgccagaagactgagaaacgccagagcccagagcagaaagcagagacagctgaaggccgacgccaagaaggccatcggcagactgcagctgagaaccctgaagcagggcgacaaggagatcggccccgacggcgacagctgcgccgtgtgcatcgagctgtacaagcccaacgacctggtgagaatcctgacctgcaaccacatcttccacaagacctgcgtggacccctggctgctggagcacagaacctgccccatgtgcaagtgcgacatcctgaaggccctgggcatcgaggtggacgtggaggacggcagcgtgagcctgcaggtgcccgtgagcaacgagatcagcaacagcgccagcagccacgaggaggacaacagaagcgagaccgccagcagcggctacgccagcgtgcagggcaccgacgagccccccctggaggagcacgtgcagagcaccaacgagagcctgcagctggtgaaccacgaggccaacagcgtggccgtggacgtgatcccccacgtggacaaccccaccttcgaggaggacgagacccccaaccaggagaccgccgtgagagagatcaagagctag

SEQ ID NO: 97635 - DNA, 750 bp, synthetic construct
  misc_feature 1..750: note = Description of Artificial Sequence: Synthetic coding sequence
  source 1..750: mol_type = other DNA
atgagcgcctacgtgaccgtgacctactacaacgagaccagcaactacaccgccatcgagacctgcgagtgcggcgtgtacggcctggccagccccgtggccaacgccatgggcgtggtgggcatccccaagaacaacaactaccaggcctgcgaccacaacaccgagttcagcaacaccaagaagccctggatcgccctgatcgagagaggcaactgcaccttcagcgagaagatccagaccgccggcagaagaaacgccgacgccgtggtgatctacaacgcccccgagaccggcaaccagaccatccagatggccaacttcggcgccgtggacatcgtggccatcatgatcggcaacctgaagggcaccaagatcctgcagagcatccagagaggcatccaggtgaccatggtgatcgaggtgggcaagaagcacggcccctgggtgaaccactacagcatcttcttcgtgagcgtgagcttcttcatcatcaccgccgccaccgtgggctacttcatcttctacagcgccagaagactgagaaacgccagagcccagagcagaaagcagagacagctgaaggccgacgccaagaaggccatcggcagactgcagctgagaaccctgaagcagggcgacaaggagatcggccccgacggcgacagctgcgccgtgtgcatcgagctgtacaagcccaacgacctggtgagaatcctgacctgcaaccacatcttccacaagacctag

SEQ ID NO: 97636 - DNA, 633 bp, synthetic construct
  misc_feature 1..633: note = Description of Artificial Sequence: Synthetic coding sequence
  source 1..633: mol_type = other DNA
atggccggcctgggcctgggcagcgccgtgcccgtgtggctggccgaggacgacctgggctgcatcatctgccagggcctgctggactggcccgccaccctgccctgcggccacagcttctgcagacactgcctggaggccctgtggggcgccagagacgccagaagatgggcctgccccacctgcagacagggcgccgcccagcagccccacctgagaaagaacaccctgctgcaggacctggccgacaagtacagaagagccgccagagagatccaggccggcagcgaccccgcccactgcccctgccccggcagcagcagcctgagcagcgccgccgccagacccagaagaagacccgagctgcagagagtggccgtggagaagagcatcaccgaggtggcccaggagctgaccgagctggtggagcacctggtggacatcgtgagaagcctgcagaaccagagacccctgagcgagagcggccccgacaacgagctgagcatcctgggcaaggagaacagctggaagcccagactgcccccccacgcccactgcctgaccagagccaccctgcacagcggcgagctgctgggcctgctgagcggccccagcatccagcccctgacctag

SEQ ID NO: 97637 - DNA, 1299 bp, synthetic construct
  misc_feature 1..1299: note = Description of Artificial Sequence: Synthetic coding sequence
  source 1..1299: mol_type = other DNA
atggccggcctgggcctgggcagcgccgtgcccgtgtggctggccgaggacgacctgggctgcatcatctgccagggcctgctggactggcccgccaccctgccctgcggccacagcttctgcagacactgcctggaggccctgtggggcgccagagacgccagaagatgggcctgccccacctgcagacagggcgccgcccagcagccccacctgagaaagaacaccctgctgcaggacctggccgacaagtacagaagagccgccagagagatccaggccggcagcgaccccgcccactgcccctgccccggcagcagcagcctgagcagcgccgccgccagacccagaagaagacccgagctgcagagagtggccgtggagaagagcatcaccgaggtggcccaggagctgaccgagctggtggagcacctggtggacatcgtgagaagcctgcagaaccagagacccctgagcgagagcggccccgacaacgagctgagcatcctgggcaaggccttcagcagcggcgtggacctgagcatggccagccccaagctggtgaccagcgacaccgccgccggcaagatcagagacatcctgcacgacctggaggagatccaggagaagctgcaggagagcgtgacctggaaggaggcccccgaggcccagatgcagggcgagctgctggaggcccccagcagcagcagctgccccctgcccgaccagagccaccccgccctgagaagagccagcagattcgcccagtgggccatccaccccaccttcaacctgaagagcctgagctgcagcctggaggtgagcaaggacagcagaaccgtgaccgtgagccacagaccccagccctacagatggagctgcgagagattcagcaccagccaggtgctgtgcagccaggccctgagcagcggcaagcactactgggaggtggacaccagaaactgcagccactgggccgtgggcgtggccagctgggagatgagcagagaccaggtgctgggcagaaccatggacagctgctgcgtggagtggaagggcaccagccagctgagcgcctggcacatggtgaaggagaccgtgctgggcagcgacagacccggcgtggtgggcatctggctgaacctggaggagggcaagctggccttctacagcgtggacaaccaggagaagctgctgtacgagtgcaccatcagcgccagcagccccctgtaccccgccttctggctgtacggcctgcaccccggcaactacctgatcatcaagcaggtgaaggtgtag

SEQ ID NO: 97638 - DNA, 255 bp, synthetic construct
  misc_feature 1..255: note = Description of Artificial Sequence: Synthetic coding sequence
  source 1..255: mol_type = other DNA
tgaaaggaggcccccgaggcccagatgcagggcagcctgctgcccagactggagtgcagcggcaccatcaccgccgccagcatcagccaggcccaggagaacagctggaagcccagactgcccccccacgcccactgcctgaccagagccaccctgcacagcggcgagctgctgggcctgctgagcgtgccccccagaggcgagctgatcgccaaggccaagcaggtggagaccctggaccccagagccctgtag

SEQ ID NO: 97639 - DNA, 291 bp, synthetic construct
  misc_feature 1..291: note = Description of Artificial Sequence: Synthetic coding sequence
  source 1..291: mol_type = other DNA
gcccagcagccccacctgagaaagaacaccctgctgcaggacctggccgacaagtacagaagagccgccagagagatccaggccggcagcgaccccgcccactgcccctgccccggcagcagcagcctgagcagcgccgccgccagacccagaagaagacccgagctgcagagagagaacagctggaagcccagactgcccccccacgcccactgcctgaccagagccaccctgcacagcggcgagctgctgggcctgctgagcggccccagcatccagcccctgacctag

SEQ ID NO: 97640 - DNA, 861 bp, synthetic construct
  misc_feature 1..861: note = Description of Artificial Sequence: Synthetic coding sequence
  source 1..861: mol_type = other DNA
atggccggcctgggcctgggcagcgccgtgcccgtgtggctggccgaggacgacctgggctgcatcatctgccagggcctgctggactggcccgccaccctgccctgcggccacagcttctgcagacactgcctggaggccctgtggggcgccagagacgccagaagatgggcctgccccacctgcagacagggcgccgcccagcagccccacctgagaaagaacaccctgctgcaggacctggccgacaagtacagaagagccgccagagagatccaggccggcagcgaccccgcccactgcccctgccccggcagcagcagcctgagcagcgccgccgccagacccagaagaagacccgagctgcagagagtggccgtggagaagagcatcaccgaggtggcccaggagctgaccgagctggtggagcacctggtggacatcgtgagaagcctgcagaaccagagacccctgagcgagagcggccccgacaacgagctgagcatcctgggcaaggccttcagcagcggcgtggacctgagcatggccagccccaagctggtgaccagcgacaccgccgccggcaagatcagagacatcctgcacgacctggaggagatccaggagaagctgcaggagagcgtgacctggaaggaggcccccgaggcccagatgcagggcagcctgctgcccagactggagtgcagcggcaccatcaccgccgccagcatcagccaggcccaggagaacagctggaagcccagactgcccccccacgcccactgcctgaccagagccaccctgcacagcggcgagctgctgggcctgctgagcggccccagcatccagcccctgacctag

SEQ ID NO: 97641 - DNA, 756 bp, synthetic construct
  misc_feature 1..756: note = Description of Artificial Sequence: Synthetic coding sequence
  source 1..756: mol_type = other DNA
atggccagccccaagctggtgaccagcgacaccgccgccggcaagatcagagacatcctgcacgacctggaggagatccaggagaagctgcaggagagcgtgacctggaaggaggcccccgaggcccagatgcagggcgagctgctggaggcccccagcagcagcagctgccccctgcccgaccagagccaccccgccctgagaagagccagcagattcgcccagtgggccatccaccccaccttcaacctgaagagcctgagctgcagcctggaggtgagcaaggacagcagaaccgtgaccgtgagccacagaccccagccctacagatggagctgcgagagattcagcaccagccaggtgctgtgcagccaggccctgagcagcggcaagcactactgggaggtggacaccagaaactgcagccactgggccgtgggcgtggccagctgggagatgagcagagaccaggtgctgggcagaaccatggacagctgctgcgtggagtggaagggcaccagccagctgagcgcctggcacatggtgaaggagaccgtgctgggcagcgacagacccggcgtggtgggcatctggctgaacctggaggagggcaagctggccttctacagcgtggacaaccaggagaagctgctgtacgagtgcaccatcagcgccagcagccccctgtaccccgccttctggctgtacggcctgcaccccggcaactacctgatcatcaagcaggtgaaggtgtag

SEQ ID NO: 97642 - DNA, 1995 bp, synthetic construct
  misc_feature 1..1995: note = Description of Artificial Sequence: Synthetic coding sequence
  source 1..1995: mol_type = other DNA
atggccgccgtgggccccccccagcagcaggtgagaatggcccaccagcaggtgtgggccgccctggaggtggccctgagagtgccctgcctgtacatcatcgacgccatcttcaacagctaccccgacagcagccagagcagattctgcatcgtgctgcagatcttcctgagactgttcggcgtgttcgccagcagcatcgtgctgatcctgagccagagaagcctgttcaagttctacacctacagcagcgccttcctgctggccgccaccagcgtgctggtgaactactacgccagcctgcacatcgacttctacggcgcctacaacaccagcgccttcggcatcgagctgctgcccagaaagggccccagcctgtggatggccctgatcgtgctgcagctgaccttcggcatcggctacgtgaccctgctgcagatccacagcatctacagccagctgatcatcctggacctgctggtgcccgtgatcggcctgatcaccgagctgcccctgcacatcagagagaccctgctgttcaccagcagcctgatcctgaccctgaacaccgtgttcgtgctggccgtgaagctgaagtggttctactacagcaccagatacgtgtacctgctggtgagacacatgtacagaatctacggcctgcagctgctgatggaggacacctggaagagaatcagattccccgacatcctgagagtgttctggctgaccagagtgaccgcccaggccaccgtgctgatgtacatcctgagaatggccaacgagaccgacagcttcttcatcagctgggacgacttctgggacctgatctgcaacctgatcatcagcggctgcgacagcaccctgaccgtgctgggcatgagcgccgtgatcagcagcgtggcccactacctgggcctgggcatcctggccttcatcggcagcaccgaggaggacgacagaagactgggcttcgtggcccccgtgctgttcttcatcctggccctgcagaccggcctgagcggcctgagacccgaggagagactgatcagactgagcagaaacatgtgcctgctgctgaccgccgtgctgcacttcatccacggcatgaccgaccccgtgctgatgagcctgagcgccagccacgtgagcagcttcagaagacacttccccgtgctgttcgtgagcgcctgcctgttcatcctgcccgtgctgctgagctacgtgctgtggcaccactacgccctgaacacctggctgttcgccgtgaccgccttctgcgtggagctgtgcctgaaggtgatcgtgagcctgaccgtgtacaccctgttcatgatcgacggctactacaacgtgctgtgggagaagctggacgactacgtgtactacgtgagaagcaccggcagcatcatcgagttcatcttcggcgtggtgatgttcggcaacggcgcctacaccatgatgttcgagagcggcagcaagatcagagccttcatgatgtgcctgcacgcctacttcaacatctacctgcaggccaagaacggctggaagaccttcatgaacagaagaaccgccgtgaagaagatcaacagcctgcccgagatcaagggcagcagactgcaggagatcaacgacgtgtgcgccatctgctaccacgagttcaccaccagcgccagaatcaccccctgcaaccactacttccacgccctgtgcctgagaaagtggctgtacatccaggacacctgccccatgtgccaccagaaggtgtacatcgaggacgacatcaaggacaacagcaacgtgagcaacaacaacggcttcatcccccccaacgagacccccgaggaggccgtgagagaggccgccgccgagagcgacagagagctgaacgaggacgacagcaccgactgcgacgacgacgtgcagagagagagaaacggcgtgatccagcacaccggcgccgccgccgaggagttcaacgacgacaccgactag

SEQ ID NO: 97643 - DNA, 1425 bp, synthetic construct
  misc_feature 1..1425: note = Description of Artificial Sequence: Synthetic coding sequence
  source 1..1425: mol_type = other DNA
atgagcagcgaggacagagaggcccaggaggacgagctgctggccctggccagcatctacgacggcgacgagttcagaaaggccgagagcgtgcagggcggcgagaccagaatctacctggacctgccccagaacttcaagatcttcgtgagcggcaacagcaacgagtgcctgcagaacagcggcttcgagtacaccatctgcttcctgccccccctggtgctgaacttcgagctgccccccgactaccccagcagcagcccccccagcttcaccctgagcggcaagtggctgagccccacccagctgagcgccctgtgcaagcacctggacaacctgtgggaggagcacagaggcagcgtggtgctgttcgcctggatgcagttcctgaaggaggagaccctggcctacctgaacatcgtgagccccttcgagctgaagatcggcagccagaagaaggtgcagagaagaaccgcccaggccagccccaacaccgagctggacttcggcggcgccgccggcagcgacgtggaccaggaggagatcgtggacgagagagccgtgcaggacgtggagagcctgagcaacctgatccaggagatcctggacttcgaccaggcccagcagatcaagtgcttcaacagcaagctgttcctgtgcagcatctgcttctgcgagaagctgggcagcgagtgcatgtacttcctggagtgcagacacgtgtactgcaaggcctgcctgaaggactacttcgagatccagatcagagacggccaggtgcagtgcctgaactgccccgagcccaagtgccccagcgtggccacccccggccaggtgaaggagctggtggaggccgagctgttcgccagatacgacagactgctgctgcagagcagcctggacctgatggccgacgtggtgtactgccccagaccctgctgccagctgcccgtgatgcaggagcccggctgcaccatgggcatctgcagcagctgcaacttcgccttctgcaccctgtgcagactgacctaccacggcgtgagcccctgcaaggtgaccgccgagaagctgatggacctgagaaacgagtacctgcaggccgacgaggccaacaagagactgctggaccagagatacggcaagagagtgatccagaaggccctggaggagatggagagcaaggagtggctggagaagaacagcaagagctgcccctgctgcggcacccccatcgagaagctggacggctgcaacaagatgacctgcaccggctgcatgcagtacttctgctggatctgcatgggcagcctgagcagagccaacccctacaagcacttcaacgaccccggcagcccctgcttcaacagactgttctacgccgtggacgtggacgacgacatctgggaggacgaggtggaggactag

SEQ ID NO: 97644 - DNA, 1425 bp, synthetic construct; identical to SEQ ID NO: 97643
  misc_feature 1..1425: note = Description of Artificial Sequence: Synthetic coding sequence
  source 1..1425: mol_type = other DNA

SEQ ID NO: 97645 - DNA, 1047 bp, synthetic construct
  misc_feature 1..1047: note = Description of Artificial Sequence: Synthetic coding sequence
  source 1..1047: mol_type = other DNA
atgcagttcctgaaggaggagaccctggcctacctgaacatcgtgagccccttcgagctgaagatcggcagccagaagaaggtgcagagaagaaccgcccaggccagccccaacaccgagctggacttcggcggcgccgccggcagcgacgtggaccaggaggagatcgtggacgagagagccgtgcaggacgtggagagcctgagcaacctgatccaggagatcctggacttcgaccaggcccagcagatcaagtgcttcaacagcaagctgttcctgtgcagcatctgcttctgcgagaagctgggcagcgagtgcatgtacttcctggagtgcagacacgtgtactgcaaggcctgcctgaaggactacttcgagatccagatcagagacggccaggtgcagtgcctgaactgccccgagcccaagtgccccagcgtggccacccccggccaggtgaaggagctggtggaggccgagctgttcgccagatacgacagactgctgctgcagagcagcctggacctgatggccgacgtggtgtactgccccagaccctgctgccagctgcccgtgatgcaggagcccggctgcaccatgggcatctgcagcagctgcaacttcgccttctgcaccctgtgcagactgacctaccacggcgtgagcccctgcaaggtgaccgccgagaagctgatggacctgagaaacgagtacctgcaggccgacgaggccaacaagagactgctggaccagagatacggcaagagagtgatccagaaggccctggaggagatggagagcaaggagtggctggagaagaacagcaagagctgcccctgctgcggcacccccatcgagaagctggacggctgcaacaagatgacctgcaccggctgcatgcagtacttctgctggatctgcatgggcagcctgagcagagccaacccctacaagcacttcaacgaccccggcagcccctgcttcaacagactgttctacgccgtggacgtggacgacgacatctgggaggacgaggtggaggactag

SEQ ID NO: 97646 - DNA, 897 bp, synthetic construct
  misc_feature 1..897: note = Description of Artificial Sequence: Synthetic coding sequence
  source 1..897: mol_type = other DNA
atgagcagcgaggacagagaggcccaggaggacgagctgctggccctggccagcatctacgacggcgacgagttcagaaaggccgagagcgtgcagggcggcgagaccagaatctacctggacctgccccagaacttcaagatcttcgtgagcggcaacagcaacgagtgcctgcagaacagcggcttcgagtacaccatctgcttcctgccccccctggtgctgaacttcgagctgccccccgactaccccagcagcagcccccccagcttcaccctgagcggcaagtggctgagccccacccaggtgaaggagctggtggaggccgagctgttcgccagatacgacagactgctgctgcagagcagcctggacctgatggccgacgtggtgtactgccccagaccctgctgccagctgcccgtgatgcaggagcccggctgcaccatgggcatctgcagcagctgcaacttcgccttctgcaccctgtgcagactgacctaccacggcgtgagcccctgcaaggtgaccgccgagaagctgatggacctgagaaacgagtacctgcaggccgacgaggccaacaagagactgctggaccagagatacggcaagagagtgatccagaaggccctggaggagatggagagcaaggagtggctggagaagaacagcaagagctgcccctgctgcggcacccccatcgagaagctggacggctgcaacaagatgacctgcaccggctgcatgcagtacttctgctggatctgcatgggcagcctgagcagagccaacccctacaagcacttcaacgaccccggcagcccctgcttcaacagactgttctacgccgtggacgtggacgacgacatctgggaggacgaggtggaggactag

SEQ ID NO: 97647 - DNA, 1425 bp, synthetic construct; identical to SEQ ID NO: 97643
  misc_feature 1..1425: note = Description of Artificial Sequence: Synthetic coding sequence
  source 1..1425: mol_type = other DNA

SEQ ID NO: 97648 - DNA, 1425 bp, synthetic construct; identical to SEQ ID NO: 97643
  misc_feature 1..1425: note = Description of Artificial Sequence: Synthetic coding sequence
  source 1..1425: mol_type = other DNA

SEQ ID NO: 97649 - DNA, 48 bp, synthetic construct
  misc_feature 1..48: note = Description of Artificial Sequence: Synthetic coding sequence
  source 1..48: mol_type = other DNA
atgagcagcgaggacagagaggcccaggaggacgagctgctggcctag

SEQ ID NO: 97650 - DNA, 399 bp, synthetic construct
  misc_feature 1..399: note = Description of Artificial Sequence: Synthetic coding sequence
  source 1..399: mol_type = other DNA
atgagcagcgaggacagagaggcccaggaggacgagctgctggccctggccagcatctacgacggcgacgagttcagaaaggccgagagcgtgcagggcggcgagaccagaatctacctggacctgccccagaacttcaagatcttcgtgagcggcaacagcaacgagtgcctgcagaacagcggcttcgagtacaccatctgcttcctgccccccctggtgctgaacttcgagctgccccccgactaccccagcagcagcccccccagcttcaccctgagcggcaagtggctgagccccacccagctgagcgccctgtgcaagcacctggacaacctgtgggaggagcacagaggcagcgtggtgctgttcgcctggatgcagttcctgaaggagtag

SEQ ID NO: 97651 - DNA, 516 bp, synthetic construct
  misc_feature 1..516: note = Description of Artificial Sequence: Synthetic coding sequence
  source 1..516: mol_type = other DNA
atgagcagcgaggacagagaggcccaggaggacgagctgctggccctggccagcatctacgacggcgacgagttcagaaaggccgagagcgtgcagggcggcgagaccagaatctacctggacctgccccagaacttcaagatcttcgtgagcggcaacagcaacgagtgcctgcagaacagcggcttcgagtacaccatctgcttcctgccccccctggtgctgaacttcgagctgccccccgactaccccagcagcagcccccccagcttcaccctgagcggcaagtggctgagccccacccagctgagcgccctgtgcaagcacctggacaacctgtgggaggagcacagaggcagcgtggtgctgttcgcctggatgcagttcctgaaggaggagaccctggcctacctgaacatcgtgagccccttcgagctgaagatcggcagccagaagaaggtgcagagaagaaccgcccaggccagccccaacaccgagctggacttcggcggctag

SEQ ID NO: 97652 - DNA, 558 bp, synthetic construct
  misc_feature 1..558: note = Description of Artificial Sequence: Synthetic coding sequence
  source 1..558: mol_type = other DNA
atgagcagcgaggacagagaggcccaggaggacgagctgctggccctggccagcatctacgacggcgacgagttcagaaaggccgagagcgtgcagggcggcgagaccagaatctacctggacctgccccagaacttcaagatcttcgtgagcggcaacagcaacgagtgcctgcagaacagcggcttcgagtacaccatctgcttcctgccccccctggtgctgaacttcgagctgccccccgactaccccagcagcagcccccccagcttcaccctgagcggcaagtggctgagccccacccagctgagcgccctgtgcaagcacctggacaacctgtgggaggagcacagaggcagcgtggtgctgttcgcctggatgcagttcctgaaggaggagaccctggcctacctgaacatcgtgagccccttcgagctgaagatcggcagccagaagaaggtgcagagaagaaccgcccaggccagccccaacaccgagctggacttcggcggcgccgccggcagcgacgtggaccaggaggagatcgtggacgagtag

SEQ ID NO: 97653 - DNA, 186 bp, synthetic construct
  misc_feature 1..186: note = Description of Artificial Sequence: Synthetic coding sequence
  source 1..186: mol_type = other DNA
atgagcagcgaggacagagaggcccaggaggacgagctgctggccctggccagcatctacgacggcgacgagttcagaaaggccgagagcgtgcagggcggcgagaccagaatctacctggacctgccccagaacttcaagatcttcgtgagcggcaacagcaacgagtgcctgcagaacagctag

SEQ ID NO: 97654 - DNA, 837 bp, synthetic construct
  misc_feature 1..837: note = Description of Artificial Sequence: Synthetic coding sequence
  source 1..837: mol_type = other DNA
atgagcagcgaggacagagaggcccaggaggacgagctgctggccctggccagcatctacgacggcgacgagttcagaaaggccgagagcgtgcagggcggcgagaccagaatctacctggacctgccccagaacttcaagatcttcgtgagcggcaacagcaacgagtgcctgcagaacagcggcttcgagtacaccatctgcttcctgccccccctggtgctgaacttcgagctgccccccgactaccccagcagcagcccccccagcttcaccctgagcggcaagtggctgagccccacccagctgagcgccctgtgcaagcacctggacaacctgtgggaggagcacagaggcagcgtggtgctgttcgcctggatgcagttcctgaaggaggagaccctggcctacctgaacatcgtgagccccttcgagctgaagatcggcagccagaagaaggtgcagagaagaaccgcccaggccagccccaacaccgagctggacttcggcggcgccgccggcagcgacgtggaccaggaggagatcgtggacgagagagccgtgcaggacgtggagagcctgagcaacctgatccaggagatcctggacttcgaccaggcccagcagatcaagtgcttcaacagcaagctgttcctgtgcagcatctgcttctgcgagaagctgggcagcgagtgcatgtacttcctggagtgcagacacgtgtactgcaaggcctgcctgaaggactacttcgagatccagatcagagacggccaggtgcagtgcctgaactgccccgagcccaagtgccccagcgtggccacccccggccagtag

SEQ ID NO: 97655 - DNA, 300 bp, synthetic construct
  misc_feature 1..300: note = Description of Artificial Sequence: Synthetic coding sequence
  source 1..300: mol_type = other DNA
atgagcagcgaggacagagaggcccaggaggacgagctgctggccctggccagcatctacgacggcgacgagttcagaaaggccgagagcgtgcagggcggcgagaccagaatctacctggacctgccccagaacttcaagatcttcgtgagcggcaacagcaacgagtgcctgcagaacagcggcttcgagtacaccatctgcttcctgccccccctggtgctgaacttcgagctgccccccgactaccccagcagcagcccccccagcttcaccctgagcggcaagtggctgagctag

SEQ ID NO: 97656 - DNA, 516 bp, synthetic construct
  misc_feature 1..516: note = Description of Artificial Sequence: Synthetic coding sequence
  source 1..516: mol_type = other DNA
atgagcagcgaggacagagaggcccaggaggacgagctgctggccctggccagcatctacgacggcgacgagttcagaaaggccgagagcgtgcagggcggcgagaccagaatctacctggacctgccccagaacttcaagatcttcgtgagcgagaagctgatggacctgagaaacgagtacctgcaggccgacgaggccaacaagagactgctggaccagagatacggcaagagagtgatccagaaggccctggaggagatggagagcaaggagtggctggagaagaacagcaagagctgcccctgctgcggcacccccatcgagaagctggacggctgcaacaagatgacctgcaccggctgcatgcagtacttctgctggatctgcatgggcagcctgagcagagccaacccctacaagcacttcaacgaccccggcagcccctgcttcaacagactgttctacgccgtggacgtggacgacgacatctgggaggacgaggtggaggactag

SEQ ID NO: 97657 - DNA, 1077 bp, synthetic construct
  misc_feature 1..1077: note = Description of Artificial Sequence: Synthetic coding sequence
  source 1..1077: mol_type = other DNA
atggccggctgcggcgagatcgaccacagcatcaacatgctgcccaccaacagaaaggccaacgagagctgcagcaacaccgcccccagcctgaccgtgcccgagtgcgccatctgcctgcagacctgcgtgcaccccgtgagcctgccctgcaagcacgtgttctgctacctgtgcgtgaagggcgccagctggctgggcaagagatgcgccctgtgcagacaggagatccccgaggacttcctggacaagcccaccctgctgagccccgaggagctgaaggccgccagcagaggcaacggcgagtacgcctggtactacgagggcagaaacggctggtggcagtacgacgagagaaccagcagagagctggaggacgccttcagcaagggcaagaagaacaccgagatgctgatcgccggcttcctgtacgtggccgacctggagaacatggtgcagtacagaagaaacgagcacggcagaagaagaaagatcaagagagacatcatcgacatccccaagaagggcgtggccggcctgagactggactgcgacgccaacaccgtgaacctggccagagagagcagcgccgacggcgccgacagcgtgagcgcccagagcggcgccagcgtgcagcccctggtgagcagcgtgagacccctgaccagcgtggacggccagctgaccagccccgccacccccagccccgacgccagcaccagcctggaggacagcttcgcccacctgcagctgagcggcgacaacaccgccgagagaagccacagaggcgagggcgaggaggaccacgagagccccagcagcggcagagtgcccgcccccgacaccagcatcgaggagaccgagagcgacgccagcagcgacagcgaggacgtgagcgccgtggtggcccagcacagcctgacccagcagagactgctggtgagcaacgccaaccagaccgtgcccgacagaagcgacagaagcggcaccgacagaagcgtggccggcggcggcaccgtgagcgtgagcgtgagaagcagaagacccgacggccagtgcaccgtgaccgaggtgtag

SEQ ID NO: 97658 - DNA, 1077 bp, synthetic construct; identical to SEQ ID NO: 97657
  misc_feature 1..1077: note = Description of Artificial Sequence: Synthetic coding sequence
  source 1..1077: mol_type = other DNA

SEQ ID NO: 97659 - DNA, 1080 bp, synthetic construct
  misc_feature 1..1080: note = Description of Artificial Sequence: Synthetic coding sequence
  source 1..1080: mol_type = other DNA
atgatggccggctgcggcgagatcgaccacagcatcaacatgctgcccaccaacagaaaggccaacgagagctgcagcaacaccgcccccagcctgaccgtgcccgagtgcgccatctgcctgcagacctgcgtgcaccccgtgagcctgccctgcaagcacgtgttctgctacctgtgcgtgaagggcgccagctggctgggcaagagatgcgccctgtgcagacaggagatccccgaggacttcctggacaagcccaccctgctgagccccgaggagctgaaggccgccagcagaggcaacggcgagtacgcctggtactacgagggcagaaacggctggtggcagtacgacgagagaaccagcagagagctggaggacgccttcagcaagggcaagaagaacaccgagatgctgatcgccggcttcctgtacgtggccgacctggagaacatggtgcagtacagaagaaacgagcacggcagaagaagaaagatcaagagagacatcatcgacatccccaagaagggcgtggccggcctgagactggactgcgacgccaacaccgtgaacctggccagagagagcagcgccgacggcgccgacagcgtgagcgcccagagcggcgccagcgtgcagcccctggtgagcagcgtgagacccctgaccagcgtggacggccagctgaccagccccgccacccccagccccgacgccagcaccagcctggaggacagcttcgcccacctgcagctgagcggcgacaacaccgccgagagaagccacagaggcgagggcgaggaggaccacgagagccccagcagcggcagagtgcccgcccccgacaccagcatcgaggagaccgagagcgacgccagcagcgacagcgaggacgtgagcgccgtggtggcccagcacagcctgacccagcagagactgctggtgagcaacgccaaccagaccgtgcccgacagaagcgacagaagcggcaccgacagaagcgtggccggcggcggcaccgtgagcgtgagcgtgagaagcagaagacccgacggccagtgcaccgtgaccgaggtgtag

SEQ ID NO: 97660 - DNA, 1716 bp, synthetic construct
  misc_feature 1..1716: note = Description of Artificial Sequence: Synthetic coding sequence
  source 1..1716: mol_type = other DNA
atggccctgcccaaggacgccatccccagcctgagcgagtgccagtgcggcatctgcatggagatcctggtggagcccgtgaccctgccctgcaaccacaccctgtgcaagccctgcttccagagcaccgtggagaaggccagcctgtgctgccccttctgcagaagaagagtgagcagctggaccagataccacaccagaagaaacagcctggtgaacgtggagctgtggaccatcatccagaagcactaccccagagagtgcaagctgagagccagcggccaggagagcgaggaggtggccgacgactaccagcccgtgagactgctgagcaagcccggcgagctgagaagagagtacgaggaggagatcagcaaggtggccgccgagagaagagccagcgaggaggaggagaacaaggccagcgaggagtacatccagagactgctggccgaggaggaggaggaggagaagagacaggccgagaagagaagaagagccatggaggagcagctgaagagcgacgaggagctggccagaaagctgagcatcgacatcaacaacttctgcgagggcagcatcagcgccagccccctgaacagcagaaagagcgaccccgtgacccccaagagcgagaagaagagcaagaacaagcagagaaacaccggcgacatccagaagtacctgacccccaagagccagttcggcagcgccagccacagcgaggccgtgcaggaggtgagaaaggacagcgtgagcaaggacatcgacagcagcgacagaaagagccccaccggccaggacaccgagatcgaggacatgcccaccctgagcccccagatcagcctgggcgtgggcgagcagggcgccgacagcagcatcgagagccccatgccctggctgtgcgcctgcggcgccgagtggtaccacgagggcaacgtgaagaccagacccagcaaccacggcaaggagctgtgcgtgctgagccacgagagacccaagaccagagtgccctacagcaaggagaccgccgtgatgccctgcggcagaaccgagagcggctgcgcccccaccagcggcgtgacccagaccaacggcaacaacaccggcgagaccgagaacgaggagagctgcctgctgatcagcaaggagatcagcaagagaaagaaccaggagagcagcttcgaggccgtgaaggacccctgcttcagcgccaagagaagaaaggtgagccccgagagcagccccgaccaggaggagaccgagatcaacttcacccagaagctgatcgacctggagcacctgctgttcgagagacacaagcaggaggagcaggacagactgctggccctgcagctgcagaaggaggtggacaaggagcagatggtgcccaacagacagaagggcagccccgacgagtaccacctgagagccaccagcagcccccccgacaaggtgctgaacggccagagaaagaaccccaaggacggcaacttcaagagacagacccacaccaagcaccccacccccgagagaggcagcagagacaagaacagacaggtgagcctgaagatgcagctgaagcagagcgtgaacagaagaaagatgcccaacagcaccagagaccactgcaaggtgagcaagagcgcccacagcctgcagcccagcatcagccagaagagcgtgttccagatgttccagagatgcaccaagtag

SEQ ID NO: 97661 - DNA, 1716 bp, synthetic construct; identical to SEQ ID NO: 97660
  misc_feature 1..1716: note = Description of Artificial Sequence: Synthetic coding sequence
  source 1..1716: mol_type = other DNA

SEQ ID NO: 97662 - DNA, 4872 bp, synthetic construct
  misc_feature 1..4872: note = Description of Artificial Sequence: Synthetic coding sequence
  source 1..4872: mol_type = other DNA
atggccgccgaggccagcaagaccggccccagcagaagcagctaccagagaatgggcagaaagagccagccctggggcgccgccgagatccagtgcaccagatgcggcagaagagtgagcagaagcagcggccaccactgcgagctgcagtgcggccacgccttctgcgagctgtgcctgctgatgaccgaggagtgcaccaccatcatctgccccgactgcgaggtggccaccgccgtgaacaccagacagagatactaccccatggccggctacatcaaggaggacagcatcatggagaagctgcagcccaagaccatcaagaactgcagccaggacttcaagaagaccgccgaccagctgaccaccggcctggagagaagcgccagcaccgacaagaccctgctgaacagcagcgccgtgatgctggacaccaacaccgccgaggagatcgacgaggccctgaacaccgcccaccacagcttcgagcagctgagcatcgccggcaaggccctggagcacatgcagaagcagaccatcgaggagagagagagagtgatcgaggtggtggagaagcagttcgaccagctgctggccttcttcgacagcagaaagaagaacctgtgcgaggagttcgccagaaccaccgacgactacctgagcaacctgatcaaggccaagagctacatcgaggagaagaagaacaacctgaacgccgccatgaacatcgccagagccctgcagctgagccccagcctgagaacctactgcgacctgaaccagatcatcagaaccctgcagctgaccagcgacagcgagctggcccaggtgagcagcccccagctgagaaacccccccagactgagcgtgaactgcagcgagatcatctgcatgttcaacaacatgggcaagatcgagttcagagacagcaccaagtgctacccccaggagaacgagatcagacagaacgtgcagaagaagtacaacaacaagaaggagctgagctgctacgacacctacccccccctggagaagaagaaggtggacatgagcgtgctgaccagcgaggccccccccccccccctgcagcccgagaccaacgacgtgcacctggaggccaagaacttccagccccagaaggacgtggccaccgccagccccaagaccatcgccgtgctgccccagatgggcagcagccccgacgtgatcatcgaggagatcatcgaggacaacgtggagagcagcgccgagctggtgttcgtgagccacgtgatcgacccctgccacttctacatcagaaagtacagccagatcaaggacgccaaggtgctggagaagaaggtgaacgagttctgcaacagaagcagccacctggaccccagcgacatcctggagctgggcgccagaatcttcgtgagcagcatcaagaacggcatgtggtgcagaggcaccatcaccgagctgatccccatcgagggcagaaacaccagaaagccctgcagccccaccagactgttcgtgcacgaggtggccctgatccagatcttcatggtggacttcggcaacagcgaggtgctgatcgtgaccggcgtggtggacacccacgtgagacccgagcacagcgccaagcagcacatcgccctgaacgacctgtgcctggtgctgagaaagagcgagccctacaccgagggcctgctgaaggacatccagcccctggcccagccctgcagcctgaaggacatcgtgccccagaacagcaacgagggctgggaggaggaggccaaggtggagttcctgaagatggtgaacaacaaggccgtgagcatgaaggtgttcagagaggaggacggcgtgctgatcgtggacctgcagaagcccccccccaacaagatcagcagcgacatgcccgtgagcctgagagacgccctggtgttcatggagctggccaagttcaagagccagagcctgagaagccacttcgagaagaacaccaccctgcactaccacccccccatcctgcccaaggagatgaccgacgtgagcgtgaccgtgtgccacatcaacagccccggcgacttctacctgcagctgatcgagggcctggacatcctgttcctgctgaagaccatcgaggagttctacaagagcgaggacggcgagaacctggagatcctgtgccccgtgcaggaccaggcctgcgtggccaagttcgaggacggcatctggtacagagccaaggtgatcggcctgcccggccaccaggaggtggaggtgaagtacgtggacttcggcaacaccgccaagatcaccatcaaggacgtgagaaagatcaaggacgagttcctgaacgcccccgagaaggccatcaagtgcaagctggcctacatcgagccctacaagagaaccatgcagtggagcaaggaggccaaggagaagttcgaggagaaggcccaggacaagttcatgacctgcagcgtgatcaagatcctggaggacaacgtgctgctggtggagctgttcgacagcctgggcgcccccgagatgaccaccaccagcatcaacgaccagctggtgaaggagggcctggccagctacgagatcggctacatcctgaaggacaacagccagaagcacatcgaggtgtgggaccccagccccgaggagatcatcagcaacgaggtgcacaacctgaaccccgtgagcgccaagagcctgcccaacgagaacttccagagcctgtacaacaaggagctgcccgtgcacatctgcaacgtgatcagccccgagaagatctacgtgcagtggctgctgaccgagaacctgctgaacagcctggaggagaagatgatcgccgcctacgagaacagcaagtgggagcccgtgaagtgggagaacgacatgcactgcgccgtgaagatccaggacaagaaccagtggagaagaggccagatcatcagaatggtgaccgacaccctggtggaggtgctgctgtacgacgtgggcgtggagctggtggtgaacgtggactgcctgagaaagctggaggagaacctgaagaccatgggcagactgagcctggagtgcagcctggtggacatcagacccgccggcggcagcgacaagtggaccgccaccgcctgcgactgcctgagcctgtacctgaccggcgccgtggccaccatcatcctgcaggtggacagcgaggagaacaacaccacctggcccctgcccgtgaagatcttctgcagagacgagaagggcgagagagtggacgtgagcaagtacctgatcaagaagggcctggccctgagagagagaagaatcaacaacctggacaacagccacagcctgagcgagaagagcctggaggtgcccctggagcaggaggacagcgtggtgaccaactgcatcaagaccaacttcgaccccgacaagaagaccgccgacatcatcagcgagcagaaggtgagcgagttccaggagaagatcctggagcccagaaccaccagaggctacaagccccccgccatccccaacatgaacgtgttcgaggccaccgtgagctgcgtgggcgacgacggcaccatcttcgtggtgcccaagctgagcgagttcgagctgatcaagatgaccaacgagatccagagcaacctgaagtgcctgggcctgctggagccctacttctggaagaagggcgaggcctgcgccgtgagaggcagcgacaccctgtggtacagaggcaaggtgatggaggtggtgggcggcgccgtgagagtgcagtacctggaccacggcttcaccgagaagatcccccagtgccacctgtaccccatcctgctgtaccccgacatcccccagttctgcatcccctgccagctgcacaacaccacccccgtgggcaacgtgtggcagcccgacgccatcgaggtgctgcagcagctgctgagcaagagacaggtggacatccacatcatggagctgcccaagaacccctgggagaagctgagcatccacctgtacttcgacggcatgagcctgagctacttcatggcctactacaagtactgcaccagcgagcacaccgaggagatgctgaaggagaagcccagaagcgaccacgacaagaagtacgaggaggagcagtgggagatcagattcgaggagctgctgagcgccgagaccgacacccccctgctgcccccctacctgagcagcagcctgcccagccccggcgagctgtacgccgtgcaggtgaagcacgtggtgagccccaacgaggtgtacatctgcctggacagcatcgagaccagcaaccagagcaaccagcacagcgacaccgacgacagcggcgtgagcggcgagagcgagagcgagagcctggacgaggccctgcagagagtgaacaagaaggtggaggccctgccccccctgaccgacttcagaaccgagatgccctgcctggccgagtacgacgacggcctgtggtacagagccaagatcgtggccatcaaggagttcaaccccctgagcatcctggtgcagttcgtggactacggcagcaccgccaagctgaccctgaacagactgtgccagatccccagccacctgatgagataccccgccagagccatcaaggtgctgctggccggcttcaagccccccctgagagacctgggcgagaccagaatcccctactgccccaagtggagcatggaggccctgtgggccatgatcgactgcctgcagggcaagcagctgtacgccgtgagcatggcccccgcccccgagcagatcgtgaccctgtacgacgacgagcagcaccccgtgcacatgcccctggtggagatgggcctggccgacaaggacgagtag

SEQ ID NO: 97663 - DNA, 1350 bp, synthetic construct
  misc_feature 1..1350: note = Description of Artificial Sequence: Synthetic coding sequence
  source 1..1350: mol_type = other DNA
atggccgccgaggccagcaagaccggccccagcagaagcagctaccagagaatgggcagaaagagccagccctggggcgccgccgagatccagtgcaccagatgcggcagaagagtgagcagaagcagcggccaccactgcgagctgcagtgcggccacgccttctgcgagctgtgcctgctgatgaccgaggagtgcaccaccatcatctgccccgactgcgaggtggccaccgccgtgaacaccagacagagatactaccccatggccggctacatcaaggaggacagcatcatggagaagctgcagcccaagaccatcaagaactgcagccaggacttcaagaagaccgccgaccagctgaccaccggcctggagagaagcgccagcaccgacaagaccctgctgaacagcagcgccgtgatgctggacaccaacaccgccgaggagatcgacgaggccctgaacaccgcccaccacagcttcgagcagctgagcatcgccggcaaggccctggagcacatgcagaagcagaccatcgaggagagagagagagtgatcgaggtggtggagaagcagttcgaccagctgctggccttcttcgacagcagaaagaagaacctgtgcgaggagttcgccagaaccaccgacgactacctgagcaacctgatcaaggccaagagctacatcgaggagaagaagaacaacctgaacgccgccatgaacatcgccagagccctgcagctgagccccagcctgagaacctactgcgacctgaaccagatcatcagaaccctgcagctgaccagcgacagcgagctggcccaggtgagcagcccccagctgagaaacccccccagactgagcgtgaactgcagcgagatcatctgcatgttcaacaacatgggcaagatcgagttcagagacagcaccaagtgctacccccaggagaacgagatcagacagaacgtgcagaagaagtacaacaacaagaaggagctgagctgctacgacacctacccccccctggagaagaagaaggtggacatgagcgtgctgaccagcgaggccccccccccccccctgcagcccgagaccaacgacgtgcacctggaggccaagaacttccagccccagaaggacgtggccaccgccagccccaagaccatcgccgtgctgccccagatgggcagcagccccgacgtgatcatcgaggagatcatcgaggacaacgtggagacctgcggcaccgacgacctgggcgagacccccagataccccaagaagcccctgcagaagaacagcagcgtgcccttcggcagcaaggccgacaccgtgaccaccgtgtag

SEQ ID NO: 97664 - DNA, 4746 bp, synthetic construct
  misc_feature 1..4746: note = Description of Artificial Sequence: Synthetic coding sequence
  source 1..4746: mol_type = other DNA
atggccgccgaggccagcaagaccggccccagcagaagcagctaccagagaatgggcagaaagagccagccctggggcgccgccgagatccagtgcaccagatgcggcagaagagtgagcagaagcagcggccaccactgcgagctgcagtgcggccacgccttctgcgagctgtgcctgctgatgaccgaggagtgcaccaccatcatctgccccgactgcgaggtggccaccgccgtgaacaccagacagagatactaccccatggccggctacatcaaggaggacagcatcatggagaagctgcagcccaagaccatcaagaactgcagccaggacttcaagaagaccgccgaccagctgaccaccggcctggagagaagcgccagcaccgacaagaccctgctgaacagcagcgccgtgatgctggacaccaacaccgccgaggagatcgacgaggccctgaacaccgcccaccacagcttcgagcagctgagcatcgccggcaaggccctggagcacatgcagaagcagaccatcgaggagagagagagagtgatcgaggtggtggagaagcagttcgaccagctgctggccttcttcgacagcagaaagaagaacctgtgcgaggagttcgccagaaccaccgacgactacctgagcaacctgatcaaggccaagagctacatcgaggagaagaagaacaacctgaacgccgccatgaacatcgccagagccctgcagctgagccccagcctgagaacctactgcgacctgaaccagatcatcagaaccctgcagctgaccagcgacagcgagctggcccaggtgagcagcccccagctgagaaacccccccagactgagcgtgaactgcagcgagatcatctgcatgttcaacaacatgggcaagatcgagttcagagacagcaccaagtgctacccccaggagaacgagatcagacagaacgtgcagaagaagtacaacaacaagaaggagctgagctgctacgacacctacccccccctggagaagaagaaggtggacatgagcgtgctgaccagcgaggccccccccccccccctgcagcccgagaccaacgacgtgcacctggaggccaagaacttccagccccagaaggacgtggccaccgccagccccaagaccatcgccgtgctgccccagatgggcagcagccccgacgtgatcatcgaggagatcatcgaggacaacgtggagagcagcgccgagctggtgttcgtgagccacgtgatcgacccctgccacttctacatcagaaagtacagccagatcaaggacgccaaggtgctggagaagaaggtgaacgagttctgcaacagaagcagccacctggaccccagcgacatcctggagctgggcgccagaatcttcgtgagcagcatcaagaacggcatgtggtgcagaggcaccatcaccgagctgatccccatcgagggcagaaacaccagaaagccctgcagccccaccagactgttcgtgcacgaggtggccctgatccagatcttcatggtggacttcggcaacagcgaggtgctgatcgtgaccggcgtggtggacacccacgtgagacccgagcacagcgccaagcagcacatcgccctgaacgacctgtgcctggtgctgagaaagagcgagccctacaccgagggcctgctgaaggacatccagcccctggcccagccctgcagcctgaaggacatcgtgccccagaacagcaacgagggctgggaggaggaggccaaggtggagttcctgaagatggtgaacaacaaggccgtgagcatgaaggtgttcagagaggaggacggcgtgctgatcgtggacctgcagaagcccccccccaacaagatcagcagcgacatgcccgtgagcctgagagacgccctggtgttcatggagctggccaagttcaagagccagagcctgagaagccacttcgagaagaacaccaccctgcactaccacccccccatcctgcccaaggagatgaccgacgtgagcgtgaccgtgtgccacatcaacagccccggcgacttctacctgcagctgatcgagggcctggacatcctgttcctgctgaagaccatcgaggagttctacaagagcgaggacggcgagaacctggagatcctgtgccccgtgcaggaccaggcctgcgtggccaagttcgaggacggcatctggtacagagccaaggtgatcggcctgcccggccaccaggaggtggaggtgaagtacgtggacttcggcaacaccgccaagatcaccatcaaggacgtgagaaagatcaaggacgagttcctgaacgcccccgagaaggccatcaagtgcaagctggcctacatcgagccctacaagagaaccatgcagtggagcaaggaggccaaggagaagttcgaggagaaggcccaggacaagttcatgacctgcagcgtgatcaagatcctggaggacaacgtgctgctggtggagctgttcgacagcctgggcgcccccgagatgaccaccaccagcatcaacgaccagctggtgaaggagggcctggccagctacgagatcggctacatcctgaaggacaacagccagaagcacatcgaggtgtgggaccccagccccgaggagatcatcagcaacgaggtgcacaacctgaaccccgtgagcgccaagagcctgcccaacgagaacttccagagcctgtacaacaaggagctgcccgtgcacatctgcaacgtgatcagccccgagaagatctacgtgcagtggctgctgaccgagaacctgctgaacagcctggaggagaagatgatcgccgcctacgagaacagcaagtgggagcccgtgaagtgggagaacgacatgcactgcgccgtgaagatccaggacaagaaccagtggagaagaggccagatcatcagaatggtgaccgacaccctggtggaggtgctgctgtacgacgtgggcgtggagctggtggtgaacgtggactgcctgagaaagctggaggagaacctgaagaccatgggcagactgagcctggagtgcagcctggtggacatcagacccgccggcggcagcgacaagtggaccgccaccgcctgcgactgcctgagcctgtacctgaccggcgccgtggccaccatcatcctgcaggtggacagcgaggagaacaacaccacctggcccctgcccgtgaagatcttctgcagagacgagaagggcgagagagtggacgtgagcaagtacctgatcaagaagggcctggccctgagagagagaagaatcaacaacctggacaacagccacagcctgagcgagaagagcctggaggtgcccctggagcaggaggacagcgtggtgaccaactgcatcaagaccaacttcgaccccgacaagaagaccgccgacatcatcagcgagcagaaggtgagcgagttccaggagaagatcctggagcccagaaccaccagaggctacaagccccccgccatccccaacatgaacgtgttcgaggccaccgtgagctgcgtgggcgacgacggcaccatcttcgtggtgcccaagctgagcgagttcgagctgatcaagatgaccaacgagatccagagcaacctgaagtgcctgggcctgctggagccctacttctggaagaagggcgaggcctgcgccgtgagaggcagcgacaccctgtggtacagaggcaaggtgatggaggtggtgggcggcgccgtgagagtgcagtacctggaccacggcttcaccgagaagatcccccagtgccacctgtaccccatcctgctgtaccccgacatcccccagttctgcatcccctgccagctgcacaacaccacccccgtgggcaacgtgtggcagcccgacgccatcgaggtgctgcagcagctgctgagcaagagacaggtggacatccacatcatgaagcccagaagcgaccacgacaagaagtacgaggaggagcagtgggagatcagattcgaggagctgctgagcgccgagaccgacacccccctgctgcccccctacctgagcagcagcctgcccagccccggcgagctgtacgccgtgcaggtgaagcacgtggtgagccccaacgaggtgtacatctgcctggacagcatcgagaccagcaaccagagcaaccagcacagcgacaccgacgacagcggcgtgagcggcgagagcgagagcgagagcctggacgaggccctgcagagagtgaacaagaaggtggaggccctgccccccctgaccgacttcagaaccgagatgccctgcctggccgagtacgacgacggcctgtggtacagagccaagatcgtggccatcaaggagttcaaccccctgagcatcctggtgcagttcgtggactacggcagcaccgccaagctgaccctgaacagactgtgccagatccccagccacctgatgagataccccgccagagccatcaaggtgctgctggccggcttcaagccccccctgagagacctgggcgagaccagaatcccctactgccccaagtggagcatggaggccctgtgggccatgatcgactgcctgcagggcaagcagctgtacgccgtgagcatggcccccgcccccgagcagatcgtgaccctgtacgacgacgagcagcaccccgtgcacatgcccctggtggagatgggcctggccgacaaggacgagtag

SEQ ID NO: 97665 - DNA, 3207 bp, synthetic construct
  misc_feature 1..3207: note = Description of Artificial Sequence: Synthetic coding sequence
  source 1..3207: mol_type = other DNA
atgctggacaccaacaccgccgaggagatcgacgaggccctgaacaccgcccaccacagcttcgagcagctgagcatcgccggcaaggccctggagcacatgcagaagcagaccatcgaggagagagagagagtgatcgaggtggtggagaagcagttcgaccagctgctggccttcttcgacagcagaaagaagaacctgtgcgaggagttcgccagaaccaccgacgactacctgagcaacctgatcaaggccaagagctacatcgaggagaagaagaacaacctgaacgccgccatgaacatcgccagagccctgcagctgagccccagcctgagaacctactgcgacctgaaccagatcatcagaaccctgcagctgaccagcgacagcgagctggcccaggtgagcagcccccagctgagaaacccccccagactgagcgtgaactgcagcgagatcatctgcatgttcaacaacatgggcaagatcgagttcagagacagcaccaagtgctacccccaggagaacgagatcagacagaacgtgcagaagaagtacaacaacaagaaggagctgagctgctacgacacctacccccccctggagaagaagaaggtggacatgagcgtgctgaccagcgaggccccccccccccccctgcagcccgagaccaacgacgtgcacctggaggccaagaacttccagccccagaaggacgtggccaccgccagccccaagaccatcgccgtgctgccccagatgggcagcagccccgacgtgatcatcgaggagatcatcgaggacaacgtggagagcagcgccgagctggtgttcgtgagccacgtgatcgacccctgccacttctacatcagaaagtacagccagatcaaggacgccaaggtgctggagaagaaggtgaacgagttctgcaacagaagcagccacctggaccccagcgacatcctggagctgggcgccagaatcttcgtgagcagcatcaagaacggcatgtggtgcagaggcaccatcaccgagctgatccccatcgagggcagaaacaccagaaagccctgcagccccaccagactgttcgtgcacgaggtggccctgatccagatcttcatggtggacttcggcaacagcgaggtgctgatcgtgaccggcgtggtggacacccacgtgagacccgagcacagcgccaagcagcacatcgccctgaacgacctgtgcctggtgctgagaaagagcgagccctacaccgagggcctgctgaaggacatccagcccctggcccagccctgcagcctgaaggacatcgtgccccagaacagcaacgagggctgggaggaggaggccaaggtggagttcctgaagatggtgaacaacaaggccgtgagcatgaaggtgttcagagaggaggacggcgtgctgatcgtggacctgcagaagcccccccccaacaagatcagcagcgacatgcccgtgagcctgagagacgccctggtgttcatggagctggccaagttcaagagccagagcctgagaagccacttcgagaagaacaccaccctgcactaccacccccccatcctgcccaaggagatgaccgacgtgagcgtgaccgtgtgccacatcaacagccccggcgacttctacctgcagctgatcgagggcctggacatcctgttcctgctgaagaccatcgaggagttctacaagagcgaggacggcgagaacctggagatcctgtgccccgtgcaggaccaggcctgcgtggccaagttcgaggacggcatctggtacagagccaaggtgatcggcctgcccggccaccaggaggtggaggtgaagtacgtggacttcggcaacaccgccaagatcaccatcaaggacgtgagaaagatcaaggacgagttcctgaacgcccccgagaaggccatcaagtgcaagctggcctacatcgagccctacaagagaaccatgcagtggagcaaggaggccaaggagaagttcgaggagaaggcccaggacaagttcatgacctgcagcgtgatcaagatcctggaggacaacgtgctgctggtggagctgttcgacagcctgggcgcccccgagatgaccaccaccagcatcaacgaccagctggtgaaggagggcctggccagctacgagatcggctacatcctgaaggacaacagccagaagcacatcgaggtgtgggaccccagccccgaggagatcatcagcaacgaggtgcacaacctgaaccccgtgagcgccaagagcctgcccaacgagaacttccagagcctgtacaacaaggagctgcccgtgcacatctgcaacgtgatcagccccgagaagatctacgtgcagtggctgctgaccgagaacctgctgaacagcctggaggagaagatgatcgccgcctacgagaacagcaagtgggagcccgtgaagtgggagaacgacatgcactgcgccgtgaagatccaggacaagaaccagtggagaagaggccagatcatcagaatggtgaccgacaccctggtggaggtgctgctgtacgacgtgggcgtggagctggtggtgaacgtggactgcctgagaaagctggaggagaacctgaagaccatgggcagactgagcctggagtgcagcctggtggacatcagacccgccggcggcagcgacaagtggaccgccaccgcctgcgactgcctgagcctgtacctgaccggcgccgtggccaccatcatcctgcaggtggacagcgaggagaacaacaccacctggcccctgcccgtgaagatcttctgcagagacgagaagggcgagagagtggacgtgagcaagtacctgatcaagaagggcctggccctgagagagagaagaatcaacaacctggacaacagccacagcctgagcgagaagagcctggaggtgcccctggagcaggaggacagcgtggtgaccaactgcatcaagaccaacttcgaccccgacaagaagaccgccgacatcatcagcgagcagaaggtgagcgagttccaggagaagatcctggagcccagaaccaccagaggctacaagccccccgccatccccaacatgaacgtgttcgaggccaccgtgagctgcgtgggcgacgacggcaccatcttcgtggtgcccaagctgagcgagttcgagctgatcaagtag

SEQ ID NO: 97666 - DNA, 462 bp, synthetic construct
  misc_feature 1..462: note = Description of Artificial Sequence: Synthetic coding sequence
  source 1..462: mol_type = other DNA
atggccagctacttcgacgagcacgactgcgagcccagcgaccccgagcaggagaccagaaccaacatgctgctggagctggccagaagcctgttcaacagaatggacttcgaggacctgggcctggtggtggactgggaccaccacctgcccccccccgccgccaagaccgtggtggagaacctgcccagaaccgtgatcagaggcagccaggccgagctgaagtgccccgtgtgcctgctggagttcgaggaggaggagaccgccatcgagatgccctgccaccacctgttccacagcagctgcatcctgccctggctgagcaagaccaacagctgccccctgtgcagatacgagctgcccaccgacgacgacacctacgaggagcacagaagagacaaggccagaaagcagcagcagcagcacagactggagaacctgcacggcgccatgtacacctag

SEQ ID NO: 97667 - DNA, 684 bp, synthetic construct
  misc_feature 1..684: note = Description of Artificial Sequence: Synthetic coding sequence
  source 1..684: mol_type = other DNA
atggcctgcaccaagaccctgcagcagagccagcccatcagcgccggcgccaccaccaccaccaccgccgtggcccccgccggcggccacagcggcagcaccgagtgcgacctggagtgcctggtgtgcagagagccctacagctgccccagactgcccaagctgctggcctgccagcacgccttctgcgccatctgcctgaagctgctgctgtgcgtgcaggacaacacctggagcatcacctgccccctgtgcagaaaggtgaccgccgtgcccggcggcctgatctgcagcctgagagaccacgaggccgtggtgggccagctggcccagccctgcaccgaggtgagcctgtgcccccagggcctggtggaccccgccgacctggccgccggccaccccagcctggtgggcgaggacggccaggacgaggtgagcgccaaccacgtggccgccagaagactggccgcccacctgctgctgctggccctgctgatcatcctgatcggccccttcatctaccccggcgtgctgagatgggtgctgaccttcatcatcgccctggccctgctgatgagcaccctgttctgctgcctgcccagcaccagaggcagctgctggcccagcagcagaaccctgttctgcagagagcagaagcacagccacatcagcagcatcgcctag

SEQ ID NO: 97668 - DNA, 795 bp, synthetic construct
  misc_feature 1..795: note = Description of Artificial Sequence: Synthetic coding sequence
  source 1..795: mol_type = other DNA
atgagccaggccgtgcagaccaacggcacccagcccctgagcaagacctgggagctgagcctgtacgagctgcagagaaccccccaggaggccatcaccgacggcctggagatcgtggtgagccccagaagcctgcacagcgagctgatgtgccccatctgcctggacatgctgaagaacaccatgaccaccaaggagtgcctgcacagattctgcgccgactgcatcatcaccgccctgagaagcggcctgcagagaggcaagaagcagcagatcgagaacggcagcggcgccgaggacaacggcgacagcagccactgcagcaacgccagcacccacagcaaccaggaggccggccccagcaacaagagaaccaagaccagcgacgacagcggcctggagctggacaacaacaacgccgccatggccatcgaccccgtgatggacggcgccagcgagatcgagctggtgttcagaccccaccccaccctgatggagaaggacgacagcgcccagaccagatacatcaagaccagcggcaacgccaccgtggaccacctgagcaagtacctggccgtgagactggccctggaggagctgagaagcaagggcgagagcaaccagatgaacctggacaccgccagcgagaagcagtacaccatctacatcgccaccgccagcggccagttcaccgtgctgaacggcagcttcagcctggagctggtgagcgagaagtactggaaggtgaacaagcccatggagctgtactacgcccccaccaaggagcacaagtag

SEQ ID NO: 97669 - DNA, 1011 bp, synthetic construct
  misc_feature 1..1011: note = Description of Artificial Sequence: Synthetic coding sequence
  source 1..1011: mol_type = other DNA
atgagccaggccgtgcagaccaacggcacccagcccctgagcaagacctgggagctgagcctgtacgagctgcagagaaccccccaggaggccatcaccgacggcctggagatcgtggtgagccccagaagcctgcacagcgagctgatgtgccccatctgcctggacatgctgaagaacaccatgaccaccaaggagtgcctgcacagattctgcgccgactgcatcatcaccgccctgagaagcggcaacaaggagtgccccacctgcagaaagaagctggtgagcaagagaagcctgagacccgaccccaacttcgacgccctgatcagcaagatctaccccagcagagacgagtacgaggcccaccaggagagagtgctggccagaatcaacaagcacaacaaccagcaggccctgagccacagcatcgaggagggcctgaagatccaggccatgaacagactgcagagaggcaagaagcagcagatcgagaacggcagcggcgccgaggacaacggcgacagcagccactgcagcaacgccagcacccacagcaaccaggaggccggccccagcaacaagagaaccaagaccagcgacgacagcggcctggagctggacaacaacaacgccgccatggccatcgaccccgtgatggacggcgccagcgagatcgagctggtgttcagaccccaccccaccctgatggagaaggacgacagcgcccagaccagatacatcaagaccagcggcaacgccaccgtggaccacctgagcaagtacctggccgtgagactggccctggaggagctgagaagcaagggcgagagcaaccagatgaacctggacaccgccagcgagaagcagtacaccatctacatcgccaccgccagcggccagttcaccgtgctgaacggcagcttcagcctggagctggtgagcgagaagtactggaaggtgaacaagcccatggagctgtactacgcccccaccaaggagcacaagtag

SEQ ID NO: 97670 - DNA, 741 bp, synthetic construct
  misc_feature 1..741: note = Description of Artificial Sequence: Synthetic coding sequence
  source 1..741: mol_type = other DNA
atgagccaggccgtgcagaccaacggcacccagcccctgagcaagacctgggagctgagcctgtacgagctgcagagaaccccccaggaggccatcaccgacggcctggagatcgtggtgagccccagaagcctgcacagcgagctgatgtgccccatctgcctggacatgctgaagaacaccatgaccaccaaggagtgcctgcacagattctgcgccgactgcatcatcaccgccctgagaagcggcaacaaggagtgccccacctgcagaaagaagctggtgagcaagagaagcctgagacccgaccccaacttcgacgccctgatcagcaagatctaccccagcagagacgagtacgaggcccaccaggagagagtgctggccagaatcaacaagcacaacaaccagcaggccctgagccacagcatcgaggagggcctgaagatccaggccatgaacagactgcagagaggcaagaagcagcagatcgagaacggcagcggcgccgaggacaacggcgacagcagccactgcagcaacgccagcacccacagcaaccaggaggccggccccagcaacaagagaaccaagaccagcgacgacagcggcctggagctggacaacaacaacgccgccatggccatcgaccccgtgatggacggcgccagcgagatcgagctggtgttcagaccccaccccaccctgatggagaaggacgacagcgcccagaccagatag

SEQ ID NO: 97671 - DNA, 822 bp, synthetic construct
  misc_feature 1..822: note = Description of Artificial Sequence: Synthetic coding sequence
  source 1..822: mol_type = other DNA
atggccaactgggtgttctgcaacagatgcttccagcccccccacagaaccagctgcttcagcctgaccaactgcggccacgtgtactgcgacgcctgcctgggcaagggcaagaagaacgagtgcctgatctgcaaggccccctgcagaaccgtgctgctgagcaagcacaccgacgccgacatccaggccttcttcatgagcatcgacagcctgtgcaagaagtacagcagagagaccagccagtacctgagactgagcagaggctgctgcagactgaagctgtgccccgccaccagcagcaaggaggtgcccagaggcagcacccacggcagccaggccgccgccagagacccccaggagcactgggtgagcaccaccagagcccccagacccggctgcagaagaagccagagccagcccgaggcccagggcaacaccatccaggacgccccccaccccctgaccctgctgcaccccagcagaaccctgatccacaccaagagcccctggggccagaagctgctggagttcatcaagcacgtgtgctaccacagacaccagagccacagaccctgcgcccccggctggttctgccaggtgctgcagagacccggcgccgtgagcggcgagaagacccagcagaccagacccgccccccccgccacctgcctgctgtgcctgagctgcctgagcggcttcagacacggcccctggagaagccaggccctgcccagcgacctggtggcccccctgttcgtgagctacaccgtggaggtgagcatcaccaacgccggctggagcttccccgccgccgtgtag

SEQ ID NO: 97672 - DNA, 699 bp, synthetic construct
  misc_feature 1..699: note = Description of Artificial Sequence: Synthetic coding sequence
  source 1..699: mol_type = other DNA
atggccaactgggtgttctgcaacagatgcttccagcccccccacagaaccagctgcttcagcctgaccaactgcggccacgtgtactgcgacgcctgcctgggcaagggcaagaagaacgagtgcctgatctgcaaggccccctgcagaaccgtgctgctgagcaagcacaccgacgccgacatccaggccttcttcatgagcatcgacagcctgtgcaagaagtacagcagagagaccagccagatcctggagttccaggagaagcacagaaagagactgctggccttctacagagagaagatcagcagactggaggagagcctgagaaagagcgtgctgcagatcgagcagctgcagagcatgagaagcagccagcagaccgccttcagcaccatcaagagcagcgtgagcaccaagccccacggctgcctgctgcccccccacagcagcgcccccgacagactggagagcatggaggtggacctgagccccagccccatcagaaagagcgagatcgccgccggccccgccagaatcagcatgatcagccccccccaggacggcagaatggccccctgcgccagaagagtgtgccacttccagagattcaccatgttcctgcacagaagactgagcagcctggccgccccccccagcgtgcagttctggaaggccagaggcacccaccagctgtag

SEQ ID NO: 97673 - DNA, 894 bp, synthetic construct
  misc_feature 1..894: note = Description of Artificial Sequence: Synthetic coding sequence
  source 1..894: mol_type = other DNA
atggccaactgggtgttctgcaacagatgcttccagcccccccacagaaccagctgcttcagcctgaccaactgcggccacgtgtactgcgacgcctgcctgggcaagggcaagaagaacgagtgcctgatctgcaaggccccctgcagaaccgtgctgctgagcaagcacaccgacgccgacatccaggccttcttcatgagcatcgacagcctgtgcaagaagtacagcagagagaccagccagatcctggagttccaggagaagcacagaaagagactgctggccttctacagagagaagatcagcagactggaggagagcctgagaaagagcgtgctgcagatcgagcagctgcagagcatgagaagcagccagcagaccgccttcagcaccatcaagagcagcgtgagcaccaagccccacggctgcctgctgcccccccacagcagcgcccccgacagactggagagcatggaggtggacctgagccccagccccatcagaaagagcgagatcgccgccggccccgccagaatcagcatgatcagccccccccaggacggcagaatgggcccccacctgaccgccagcttctgcttcatcccctggctgaccctgagcaagccccccgtgcccggcgagtgcgtgatcagcagaggcagcccctgcttctgcatcgacgtgtgcccccactggctgctgctgctggccttcagcagcggcagacacggcgagctgaccaacagcaagaccctgcccatctacgccgaggtgcagagagccgtgctgttccccttccagcaggccgagggcaccctggacaccttcagaacccccgccgtgagcgtggtgttccccctgtgccagttcgagagaaagaagagcttctag

SEQ ID NO: 97674 - DNA, 3192 bp, synthetic construct
  misc_feature 1..3192: note = Description of Artificial Sequence: Synthetic coding sequence
  source 1..3192: mol_type = other DNA
atggagtgccccagctgccagcacgtgagcaaggaggagacccccaagttctgcagccagtgcggcgagagactgccccccgccgcccccatcgccgacagcgagaacaacaacagcaccatggccagcgccagcgagggcgagatggagtgcggccaggagctgaaggaggagggcggcccctgcctgttccccggcagcgacagctggcaggagaaccccgaggagccctgcagcaaggccagctggaccgtgcaggagagcaagaagaagaagagaaagaagaagaagaagggcaacaagagcgccagcagcgagctggccagcctgcccctgagccccgccagcccctgccacctgaccctgctgagcaacccctggccccaggacaccgccctgccccacagccaggcccagcagagcggccccaccggccagcccagccagccccccggcaccgccaccacccccctggagggcgacggcctgagcgcccccaccgaggtgggcgacagccccctgcaggcccaggccctgggcgaggccggcgtggccaccggcagcgaggcccagagcagcccccagttccaggaccacaccgagggcgaggaccaggacgccagcatccccagcggcggcagaggcctgagccaggagggcaccggcccccccaccagcgccggcgagggccacagcagaaccgaggacgccgcccaggagctgctgctgcccgagagcaagggcggcagcagcgagcccggcaccgagctgcagaccaccgagcagcaggccggcgccagcgccagcatggccgtggacgccgtggccgagcccgccaacgccgtgaagggcgccggcaaggagatgaaggagaagacccagagaatgaagcagccccccgccaccaccccccccttcaagacccactgccaggaggccgagaccaagaccaaggacgagatggccgccgccgaggagaaggtgggcaagaacgagcagggcgagcccgaggacctgaagaagcccgagggcaagaacagaagcgccgccgccgtgaagaacgagaaggagcagaagaaccaggaggccgacgtgcaggaggtgaaggccagcaccctgagccccggcggcggcgtgaccgtgttcttccacgccatcatcagcctgcacttccccttcaaccccgacctgcacaaggtgttcatcagaggcggcgaggagttcggcgagagcaagtgggacagcaacatctgcgagctgcactacaccagagacctgggccacgacagagtgctggtggagggcatcgtgtgcatcagcaagaagcacctggacaagtacatcccctacaagtacgtgatctacaacggcgagagcttcgagtacgagttcatctacaagcaccagcagaagaagggcgagtacgtgaacagatgcctgttcatcaagagcagcctgctgggcagcggcgactggcaccagtactacgacatcgtgtacatgaagccccacggcagactgcagaaggtgatgaaccacatcaccgacggccccagaaaggacctggtgaagggcaagcagatcgccgccgccctgatgctggacagcaccttcagcatcctgcagacctgggacaccatcaacctgaacagcttcttcacccagttcgagcagttctgcttcgtgctgcagcagcccatgatctacgagggccaggcccagctgtggaccgacctgcagtacagagagaaggaggtgaagagatacctgtggcagcacctgaagaagcacgtggtgcccctgcccgacggcaagagcaccgacttcctgcccgtggactgccccgtgagaagcaagctgaagaccggcctgatcgtgctgttcgtggtggagaagatcgagctgctgctggagggcagcctggactggctgtgccacctgctgaccagcgacgccagcagccccgacgagttccacagagacctgagccacatcctgggcatcccccagagctggagactgtacctggtgaacctgtgccagagatgcatggacaccagaacctacacctggctgggcgccctgcccgtgctgcactgctgcatggagctggcccccagacacaaggacgcctggagacagcccgaggacacctgggccgccctggagggcctgagcttcagccccttcagagagcagatgctggacaccagcagcctgctgcagttcatgagagagaagcagcacctgctgagcatcgacgagcccctgttcagaagctggttcagcctgctgcccctgagccacctggtgatgtacatggagaacttcatcgagcacctgggcagattccccgcccacatcctggactgcctgagcggcatctactacagactgcccggcctggagcaggtgctgaacacccaggacgtgcaggacgtgcagaacgtgcagaacatcctggagatgctgctgagactgctggacacctacagagacaagatccccgaggaggccctgagccccagctacctgaccgtgtgcctgaagctgcacgaggccatctgcagcagcaccaagctgctgaagttctacgagctgcccgccctgagcgccgagatcgtgtgcagaatgatcagactgctgagcctggtggacagcgccggccagagagacgagaccggcaacaacagcgtgcagaccgtgttccagggcaccctggccgccaccaagagatggctgagagaggtgttcaccaagaacatgctgaccagcagcggcgccagcttcacctacgtgaaggagatcgaggtgtggagaagactggtggagatccagttccccgccgagcacggctggaaggagagcctgctgggcgacatggagtggagactgaccaaggaggagcccctgagccagatcaccgcctactgcaacagctgctgggacaccaagggcctggaggacagcgtggccaagaccttcgagaagtgcatcatcgaggccgtgagcagcgcctgccaggtgaacaacctgagcagctgggagaccgacagcggcagccagctgtgcagcgccatgacccagctgagagccatgaagcaccccctgggcctgagcagcagcgccaacagcgagatcggcaagtgggcccccagcagcctggccaagggcaacggcgccgagatctag

SEQ ID NO: 97675 - DNA, 9843 bp, synthetic construct
  misc_feature 1..9843: note = Description of Artificial Sequence: Synthetic coding sequence
  source 1..9843: mol_type = other DNA
atggtgtgcgacggcgactgggagcactgctacctgcccagcgccttcagccagcacaaggtgttcgtgaccccccaggcccccctggaggccatccaggcctacctggccggccactacagagtgcccaagcagaccctgagcgccgccgccgtgttcaacgacagactgtgcgtgggcatcgtggccagcgagagagccggcgtgggcaagagcctgtacgtgaagagactgcacgacaagatgaagatgcagctgaacgtgaagaacgtgcccctgaagaccatcagactgatcgacccccaggtggacgagagcagagtgctgggcgccctgctgcccttcctggacgcccagtaccagaaggtgcccgtgctgttccacctggacgtgaccagcagcgtgcagaccggcatctgggtgttcctgttcaagctgctgatcctgcagtacctgatggacatcaacggcaagatgtggctgagaaacccctgccacctgtacatcgtggagatcctggagagaagaaccagcgtgcccagcagaagcagcagcgccctgagaaccagagtgccccagttcagcttcctggacatcttccccaaggtgacctgcagaccccccaaggaggtgatcgacatggagctgagcgccctgagaagcgacaccgagcccggcatggacctgtgggagttctgcagcgagaccttccagagaccctaccagtacctgagaagattcaaccagaaccaggacctggacaccttccagtaccaggagggcagcgtggagggcacccccgaggagtgcctgcagcacttcctgttccactgcggcgtgatcaaccccagctggagcgagctgagaaacttcgccagattcctgaactaccagctgagagactgcgaggccagcctgttctgcaaccccagcttcatcggcgacaccctgagaggcttcaagaagttcgtggtgaccttcatgatcttcatggccagagacttcgccacccccagcctgcacaccagcgaccagagccccggcaagcacatggtgaccatggacggcgtgagagaggaggacctggcccccttcagcctgagaaagagatgggagagcgagccccacccctacgtgttcttcaacgacgaccacaccaccatgaccttcatcggcttccacctgcagcccaacatcaacggcagcgtggacgccatcagccacctgaccggcaaggtgatcaagagagacgtgatgaccagagacctgtaccagggcctgctgctgcagagagtgcccttcaacgtggacttcgacaagctgcccagacacaagaagctggagagactgtgcctgaccctgggcatcccccaggccaccgaccccgacaagacctacgagctgaccaccgacaacatgctgaagatcctggccatcgagatgagattcagatgcggcatccccgtgatcatcatgggcgagaccggctgcggcaagaccagactgatcaagttcctgagcgacctgagaagaggcggcaccaacgccgacaccatcaagctggtgaaggtgcacggcggcaccaccgccgacatgatctacagcagagtgagagaggccgagaacgtggccttcgccaacaaggaccagcaccagctggacaccatcctgttcttcgacgaggccaacaccaccgaggccatcagctgcatcaaggaggtgctgtgcgaccacatggtggacggccagcccctggccgaggacagcggcctgcacatcatcgccgcctgcaacccctacagaaagcacagcgaggagatgatctgcagactggagagcgccggcctgggctacagagtgagcatggaggagaccgccgacagactgggcagcatccccctgagacagctggtgtacagagtgcacgccctgccccccagcctgatccccctggtgtgggacttcggccagctgagcgacgtggccgagaagctgtacatccagcagatcgtgcagagactggtggagagcatcagcctggacgagaacggcaccagagtgatcaccgaggtgctgtgcgccagccagggcttcatgagaaagaccgaggacgagtgcagcttcgtgagcctgagagacgtggagagatgcgtgaaggtgttcagatggttccacgagcacagcgccatgctgctggcccagctgaacgccttcctgagcaagagcagcgtgagcaagaaccacaccgagagagaccccgtgctgtggagcctgatgctggccatcggcgtgtgctaccacgccagcctggagaagaaggacagctacagaaaggccatcgccagattcttccccaagccctacgacgacagcagactgctgctggacgagatcaccagagcccaggacctgttcctggacggcgtgcccctgagaaagaccatcgccaagaacctggccctgaaggagaacgtgttcatgatggtggtgtgcatcgagctgaagatccccctgttcctggtgggcaagcccggcagcagcaagagcctggccaagaccatcgtggccgacgccatgcagggccccgccgcctacagcgacctgttcagaagcctgaagcaggtgcacctggtgagcttccagtgcagcccccacagcaccccccagggcatcatcagcaccttcagacagtgcgccagattccagcagggcaaggacctgcagcagtacgtgagcgtggtggtgctggacgaggtgggcctggccgaggacagccccaagatgcccctgaagaccctgcaccccctgctggaggacggctgcatcgaggacgaccccgccccccacaagaaggtgggcttcgtgggcatcagcaactgggccctggaccccgccaagatgaacagaggcatcttcgtgagcagaggcagccccaacgagaccgagctgatcgagagcgccaagggcatctgcagcagcgacatcctggtgcaggacagagtgcagggctacttcgccagcttcgccaaggcctacgagaccgtgtgcaagagacaggacaaggagttcttcggcctgagagactactacagcctgatcaagatggtgttcgccgccgccaaggccagcaacagaaagcccagcccccaggacatcgcccaggccgtgctgagaaacttcagcggcaaggacgacatccaggccctggacatcttcctggccaacctgcccgaggccaagtgcagcgaggaggtgagccccatgcagctgatcaagcagaacatcttcggccccagccagaaggtgcccggcggcgagcaggaggacgccgagagcagatacctgctggtgctgaccaagaactacgtggccctgcagatcctgcagcagaccttcttcgagggcgaccagcagcccgagatcatcttcggcagcggcttccccaaggaccaggagtacacccagctgtgcagaaacatcaacagagtgaagatctgcatggagaccggcaagatggtgctgctgctgaacctgcagaacctgtacgagagcctgtacgacgccctgaaccagtactacgtgcacctgggcggccagaagtacgtggacctgggcctgggcacccacagagtgaagtgcagagtgcaccccaacttcagactgatcgtgatcgaggagaaggacgtggtgtacaagcacttccccatccccctgatcaacagactggagaagcactacctggacatcaacaccgtgctggagaagtggcagaagagcatcgtggaggagctgtgcgcctgggtggagaagttcatcaacgtgaaggcccaccacttccagaagagacacaagtacagccccagcgacgtgttcatcggctaccacagcgacgcctgcgccagcgtggtgctgcaggtgatcgagagacagggccccagagccctgaccgaggagctgcaccagaaggtgagcgaggaggccaagagcatcctgctgaactgcgccacccccgacgccgtggtgagactgagcgcctacagcctgggcggcttcgccgccgagtggctgagccaggagtacttccacagacagagacacaacagcttcgccgacttcctgcaggcccacctgcacaccgccgacctggagagacacgccatcttcaccgagatcaccaccttcagcagactgctgaccagccacgactgcgagatcctggagagcgaggtgaccggcagagcccccaagcccaccctgctgtggctgcagcagttcgacaccgagtacagcttcctgaaggaggtgagaaactgcctgaccaacaccgccaagtgcaagatcctgatcttccagaccgacttcgaggacggcatcagaagcgcccagctgatcgccagcgccaagtacagcgtgatcaacgagatcaacaagatcagagagaacgaggacagaatcttcgtgtacttcatcaccaagctgagcagagtgggcagaggcaccgcctacgtgggcttccacggcggcctgtggcagagcgtgcacatcgacgacctgagaagaagcaccctgatggtgagcgacgtgaccagactgcagcacgtgaccatcagccagctgttcgcccccggcgacctgcccgagctgggcctggagcacagagccgaggacggccacgaggaggccatggagaccgaggccagcaccagcggcgaggtggccgaggtggccgaggaggccatggagaccgagagcagcgagaaggtgggcaaggagaccagcgagctgggcggcagcgacgtgagcatcctggacaccaccagactgctgagaagctgcgtgcagagcgccgtgggcatgctgagagaccagaacgagagctgcaccagaaacatgagaagagtggtgctgctgctgggcctgctgaacgaggacgacgcctgccacgccagcttcctgagagtgagcaagatgagactgagcgtgttcctgaagaagcaggaggagagccagttccaccccctggagtggctggccagagaggcctgcaaccaggacgccctgcaggaggccggcaccttcagacacaccctgtggaagagagtgcagggcgccgtgacccccctgctggccagcatgatcagcttcatcgacagagacggcaacctggagctgctgaccagacccgacacccccccctgggccagagacctgtggatgttcatcttcagcgacaccatgctgctgaacatccccctggtgatgaacaacgagagacacaagggcgagatggcctacatcgtggtgcagaaccacatgaacctgagcgagaacgccagcaacaacgtgcccttcagctggaagatcaaggactacctggaggagctgtgggtgcaggcccagtacatcaccgacgccgagggcctgcccaagaagttcgtggacatcttccagcagacccccctgggcagattcctggcccagctgcacggcgagccccagcaggagctgctgcagtgctacctgaaggacttcatcctgctgaccatgagagtgagcaccgaggaggagctgaagttcctgcagatggccctgtggagctgcaccagaaagctgaaggccgccagcgaggcccccgaggaggaggtgagcctgccctgggtgcacctggcctaccagagattcagaagcagactgcagaacttcagcagaatcctgaccatctacccccaggtgctgcacagcctgatggaggccagatggaaccacgagctggccggctgcgagatgaccctggacgccttcgccgccatggcctgcaccgagatgctgaccagaaacaccctgaagcccagcccccaggcctggctgcagctggtgaagaacctgagcatgcccctggagctgatctgcagcgacgagcacatgcagggcagcggcagcctggcccaggccgtgatcagagaggtgagagcccagtggagcagaatcttcagcaccgccctgttcgtggagcacgtgctgctgggcaccgagagcagagtgcccgagctgcagggcctggtgaccgagcacgtgttcctgctggacaagtgcctgagagagaacagcgacgtgaagacccacggccccttcgaggccgtgatgagaaccctgtgcgagtgcaaggagaccgccagcaagaccctgagcagattcggcatccagccctgcagcatctgcctgggcgacgccaaggaccccgtgtgcctgccctgcgaccacgtgcactgcctgagatgcctgagagcctggttcgccagcgagcagatgatctgcccctactgcctgaccgccctgcccgacgagttcagccccgccgtgagccaggcccacagagaggccatcgagaagcacgccagattcagacagatgtgcaacagcttcttcgtggacctggtgagcaccatctgcttcaaggacaacgccccccccgagaaggaggtgatcgagagcctgctgagcctgctgttcgtgcagaagggcagactgagagacgccgcccagagacactgcgagcacaccaagagcctgagccccttcaacgacgtggtggacaagacccccgtgatcagaagcgtgatcctgaagctgctgctgaagtacagcttccacgacgtgaaggactacatccaggagtacctgaccctgctgaagaagaaggccttcatcaccgaggacaagaccgagctgtacatgctgttcatcaactgcctggaggacagcatcctggagaagaccagcgcctacagcagaaacgacgagctgaaccacctggaggaggagggcagattcctgaaggcctacagccccgccagcagaggcagagagcccgccaacgaggccagcgtggagtacctgcaggaggtggccagaatcagactgtgcctggacagagccgccgacttcctgagcgagcccgagggcggccccgagatggccaaggagaagcagtgctacctgcagcaggtgaagcagttctgcatcagagtggagaacgactggcacagagtgtacctggtgagaaagctgagcagccagagaggcatggagttcgtgcagggcctgagcaagcccggcagaccccaccagtgggtgttccccaaggacgtggtgaagcagcagggcctgagacaggaccaccccggccagatggacagatacctggtgtacggcgacgagtacaaggccctgagagacgccgtggccaaggccgtgctggagtgcaagcccctgggcatcaagaccgccctgaaggcctgcaagaccccccagagccagcagagcgcctacttcctgctgaccctgttcagagaggtggccatcctgtacagaagccacaacgccagcctgcaccccacccccgagcagtgcgaggccgtgagcaagttcatcggcgagtgcaagatcctgagcccccccgacatcagcagattcgccaccagcctggtggacaacagcgtgcccctgctgagagccggccccagcgacagcaacctggacggcaccgtgaccgagatggccatccacgccgccgccgtgctgctgtgcggccagaacgagctgctggagcccctgaagaacctggccttcagccccgccaccatggcccacgccttcctgcccaccatgcccgaggacctgctggcccaggccagaagatggaagggcctggagagagtgcactggtacacctgccccaacggccacccctgcagcgtgggcgagtgcggcagacccatggagcagagcatctgcatcgactgccacgcccccatcggcggcatcgaccacaagcccagagacggcttccacctggtgaaggacaaggccgacagaacccagaccggccacgtgctgggcaacccccagagaagagacgtggtgacctgcgacagaggcctgccccccgtggtgttcctgctgatcagactgctgacccacctggccctgctgctgggcgccagccagagcagccaggccctgatcaacatcatcaagccccccgtgagagaccccaagggcttcctgcagcagcacatcctgaaggacctggagcagctggccaagatgctgggccacagcgccgacgagaccatcggcgtggtgcacctggtgctgagaagactgctgcaggagcagcaccagctgagcagcagaagactgctgaacttcgacaccgagctgagcaccaaggagatgagaaacaactgggagaaggagatcgccgccgtgatcagccccgagctggagcacctggacaagaccctgcccaccatgaacaacctgatcagccaggacaagagaatcagcagcaaccccgtggccaagatcatctacggcgaccccgtgaccttcctgccccacctgcccagaaagagcgtggtgcactgcagcaagatctggagctgcagaaagagaatcaccgtggagtacctgcagcacatcgtggagcagaagaacggcaaggagagagtgcccatcctgtggcacttcctgcagaaggaggccgagctgagactggtgaagttcctgcccgagatcctggccctgcagagagacctggtgaagcagttccagaacgtgcagcaggtggagtacagcagcatcagaggcttcctgagcaagcacagcagcgacggcctgagacagctgctgcacaacagaatcaccgtgttcctgagcacctggaacaagctgagaagaagcctggagaccaacggcgagatcaacctgcccaaggactactgcagcaccgacctggacctggacaccgagttcgagatcctgctgcccagaagaagaggcctgggcctgtgcgccaccgccctggtgagctacctgatcagactgcacaacgagatcgtgtacgccgtggagaagctgagcaaggagaacaacagctacagcgtggacgccgccgaggtgaccgagctgcacgtgatcagctacgaggtggagagagacctgacccccctgatcctgagcaactgccagtaccaggtggaggagggcagagagaccgtgcaggagttcgacctggagaagatccagagacagatcgtgagcagattcctgcagggcaagcccagactgagcctgaagggcatccccaccctggtgtacagacacgactggaactacgagcacctgttcatggacatcaagaacaagatggcccaggacagcctgcccagcagcgtgatcagcgccatcagcggccagctgcagagctacagcgacgcctgcgaggtgctgagcgtggtggaggtgaccctgggcttcctgagcaccgccggcggcgaccccaacatgcagctgaacgtgtacacccaggacatcctgcagatgggcgaccagaccatccacgtgctgaaggccctgaacagatgccagctgaagcacaccatcgccctgtggcagttcctgagcgcccacaagagcgagcagctgctgagactgcacaaggagcccttcggcgagatcagcagcagatacaaggccgacctgagccccgagaacgccaagctgctgagcaccttcctgaaccagaccggcctggacgccttcctgctggagctgcacgagatgatcatcctgaagctgaagaacccccagacccagaccgaggagagattcagaccccagtggagcctgagagacaccctggtgagctacatgcagaccaaggagagcgagatcctgcccgagatggccagccagttccccgaggagatcctgctggccagctgcgtgagcgtgtggaagaccgccgccgtgctgaagtggaacagagagatgagatag

SEQ ID NO: 97676 - DNA, 4653 bp, synthetic construct
  misc_feature 1..4653: note = Description of Artificial Sequence: Synthetic coding sequence
  source 1..4653: mol_type = other DNA
atggagtgccccagctgccagcacgtgagcaaggaggagacccccaagttctgcagccagtgcggcgagagactgccccccgccgcccccatcgccgacagcgagaacaacaacagcaccatggccagcgccagcgagggcgagatggagtgcggccaggagctgaaggaggagggcggcccctgcctgttccccggcagcgacagctggcaggagaaccccgaggagccctgcagcaaggccagctggaccgtgcaggagagcaagaagaagaagagaaagaagaagaagaagggcaacaagagcgccagcagcgagctggccagcctgcccctgagccccgccagcccctgccacctgaccctgctgagcaacccctggccccaggacaccgccctgccccacagccaggcccagcagagcggccccaccggccagcccagccagccccccggcaccgccaccacccccctggagggcgacggcctgagcgcccccaccgaggtgggcgacagccccctgcaggcccaggccctgggcgaggccggcgtggccaccggcagcgaggcccagagcagcccccagttccaggaccacaccgagggcgaggaccaggacgccagcatccccagcggcggcagaggcctgagccaggagggcaccggcccccccaccagcgccggcgagggccacagcagaaccgaggacgccgcccaggagctgctgctgcccgagagcaagggcggcagcagcgagcccggcaccgagctgcagaccaccgagcagcaggccggcgccagcgccagcatggccgtggacgccgtggccgagcccgccaacgccgtgaagggcgccggcaaggagatgaaggagaagacccagagaatgaagcagccccccgccaccaccccccccttcaagacccactgccaggaggccgagaccaagaccaaggacgagatggccgccgccgaggagaaggtgggcaagaacgagcagggcgagcccgaggacctgaagaagcccgagggcaagaacagaagcgccgccgccgtgaagaacgagaaggagcagaagaaccaggaggccgacgtgcaggaggtgaaggccagcaccctgagccccggcggcggcgtgaccgtgttcttccacgccatcatcagcctgcacttccccttcaaccccgacctgcacaaggtgttcatcagaggcggcgaggagttcggcgagagcaagtgggacagcaacatctgcgagctgcactacaccagagacctgggccacgacagagtgctggtggagggcatcgtgtgcatcagcaagaagcacctggacaagtacatcccctacaagtacgtgatctacaacggcgagagcttcgagtacgagttcatctacaagcaccagcagaagaagggcgagtacgtgaacagatgcctgttcatcaagagcagcctgctgggcagcggcgactggcaccagtactacgacatcgtgtacatgaagccccacggcagactgcagaaggtgatgaaccacatcaccgacggccccagaaaggacctggtgaagggcaagcagatcgccgccgccctgatgctggacagcaccttcagcatcctgcagacctgggacaccatcaacctgaacagcttcttcacccagttcgagcagttctgcttcgtgctgcagcagcccatgatctacgagggccaggcccagctgtggaccgacctgcagtacagagagaaggaggtgaagagatacctgtggcagcacctgaagaagcacgtggtgcccctgcccgacggcaagagcaccgacttcctgcccgtggactgccccgtgagaagcaagctgaagaccggcctgatcgtgctgttcgtggtggagaagatcgagctgctgctggagggcagcctggactggctgtgccacctgctgaccagcgacgccagcagccccgacgagttccacagagacctgagccacatcctgggcatcccccagagctggagactgtacctggtgaacctgtgccagagatgcatggacaccagaacctacacctggctgggcgccctgcccgtgctgcactgctgcatggagctggcccccagacacaaggacgcctggagacagcccgaggacacctgggccgccctggagggcctgagcttcagccccttcagagagcagatgctggacaccagcagcctgctgcagttcatgagagagaagcagcacctgctgagcatcgacgagcccctgttcagaagctggttcagcctgctgcccctgagccacctggtgatgtacatggagaacttcatcgagcacctgggcagattccccgcccacatcctggactgcctgagcggcatctactacagactgcccggcctggagcaggtgctgaacacccaggacgtgcaggacgtgcagaacgtgcagaacatcctggagatgctgctgagactgctggacacctacagagacaagatccccgaggaggccctgagccccagctacctgaccgtgtgcctgaagctgcacgaggccatctgcagcagcaccaagctgctgaagttctacgagctgcccgccctgagcgccgagatcgtgtgcagaatgatcagactgctgagcctggtggacagcgccggccagagagacgagaccggcaacaacagcgtgcagaccgtgttccagggcaccctggccgccaccaagagatggctgagagaggtgttcaccaagaacatgctgaccagcagcggcgccagcttcacctacgtgaaggagatcgaggtgtggagaagactggtggagatccagttccccgccgagcacggctggaaggagagcctgctgggcgacatggagtggagactgaccaaggaggagcccctgagccagatcaccgcctactgcaacagctgctgggacaccaagggcctggaggacagcgtggccaagaccttcgagaagtgcatcatcgaggccgtgagcagcgcctgccagagccagaccagcatcctgcagggcttcagctacagcgacctgagaaagttcggcatcgtgctgagcgccgtgatcaccaagagctggcccagaaccgccgacaacttcaacgacatcctgaagcacctgctgaccctggccgacgtgaagcacgtgttcagactgtgcggcaccgacgagaagatcctggccaacgtgaccgaggacgccaagagactgatcgccgtggccgacagcgtgctgaccaaggtggtgggcgacctgctgagcggcaccatcctggtgggccagctggagctgatcatcaagcacaagaaccagttcctggacatctggcagctgagagagaagagcctgagcccccaggacgagcagtgcgccgtggaggaggccctggactggagaagagaggagctgctgctgctgaagaaggagaagagatgcgtggacagcctgctgaagatgtgcggcaacgtgaagcacctgatccaggtggacttcggcgtgctggccgtgagacacagccaggacctgagcagcaagagactgaacgacaccgtgaccgtgagactgagcaccagcagcaacagccagagagccacccactaccacctgagcagccaggtgcaggagatggccggcaagatcgacctgctgagagacagccacatcttccagctgttctggagagaggccgccgagcccctgagcgagcccaaggaggaccaggaggccgccgagctgctgagcgagcccgaggaggagagcgagagacacatcctggagctggaggaggtgtacgactacctgtaccagcccagctacagaaagttcatcaagctgcaccaggacctgaagagcggcgaggtgaccctggccgagatcgacgtgatcttcaaggacttcgtgaacaagtacaccgacctggacagcgagctgaagatcatgtgcaccgtggaccaccaggaccagagagactggatcaaggacagagtggagcagatcaaggagtaccaccacctgcaccaggccgtgcacgccgccaaggtgatcctgcaggtgaaggagagcctgggcctgaacggcgacttcagcgtgctgaacaccctgctgaacttcaccgacaacttcgacgacttcagaagagagaccctggaccagatcaaccaggagctgatccaggccaagaagctgctgcaggacatcagcgaggccagatgcaagggcctgcaggccctgagcctgagaaaggagttcatctgctgggtgagagaggccctgggcggcatcaacgagctgaaggtgttcgtggacctggccagcatcagcgccggcgagaacgacatcgacgtggacagagtggcctgcttccacgacgccgtgcagggctacgccagcctgctgttcaagctggaccccagcgtggacttcagcgccttcatgaagcacctgaagaagctgtggaaggccctggacaaggaccagtacctgcccagaaagctggtgagcctgatcctgagcctgatgcagatcctgctgaacagagccctgctgagcaacgtgagagccgtgaccgtggagatggtggcccacctgtgcggcagattcgtgcacagcagattccagtag

SEQ ID NO: 97677 - DNA, 15771 bp, synthetic construct
  misc_feature 1..15771: note = Description of Artificial Sequence: Synthetic coding sequence
  source 1..15771: mol_type = other DNA
atggagtgccccagctgccagcacgtgagcaaggaggagacccccaagttctgcagccagtgcggcgagagactgccccccgccgcccccatcgccgacagcgagaacaacaacagcaccatggccagcgccagcgagggcgagatggagtgcggccaggagctgaaggaggagggcggcccctgcctgttccccggcagcgacagctggcaggagaaccccgaggagccctgcagcaaggccagctggaccgtgcaggagggcgccaccagcgaggtgctggtggacgccgccgtggacctgatcagcgacgagtgggaggccgccaacgccatccccagcaagagaagaaagcaggacgccgcccccctggaggccgccagcgtgcccagcgccgactgcgagcagagcaagaagaagaagagaaagaagaagaagaagggcaacaagagcgccagcagcgagctggccagcctgcccctgagccccgccagcccctgccacctgaccctgctgagcaacccctggccccaggacaccgccctgccccacagccaggcccagcagagcggccccaccggccagcccagccagccccccggcaccgccaccacccccctggagggcgacggcctgagcgcccccaccgaggtgggcgacagccccctgcaggcccaggccctgggcgaggccggcgtggccaccggcagcgaggcccagagcagcccccagttccaggaccacaccgagggcgaggaccaggacgccagcatccccagcggcggcagaggcctgagccaggagggcaccggcccccccaccagcgccggcgagggccacagcagaaccgaggacgccgcccaggagctgctgctgcccgagagcaagggcggcagcagcgagcccggcaccgagctgcagaccaccgagcagcaggccggcgccagcgccagcatggccgtggacgccgtggccgagcccgccaacgccgtgaagggcgccggcaaggagatgaaggagaagacccagagaatgaagcagccccccgccaccaccccccccttcaagacccactgccaggaggccgagaccaagaccaaggacgagatggccgccgccgaggagaaggtgggcaagaacgagcagggcgagcccgaggacctgaagaagcccgagggcaagaacagaagcgccgccgccgtgaagaacgagaaggagcagaagaaccaggaggccgacgtgcaggaggtgaaggccagcaccctgagccccggcggcggcgtgaccgtgttcttccacgccatcatcagcctgcacttccccttcaaccccgacctgcacaaggtgttcatcagaggcggcgaggagttcggcgagagcaagtgggacagcaacatctgcgagctgcactacaccagagacctgggccacgacagagtgctggtggagggcatcgtgtgcatcagcaagaagcacctggacaagtacatcccctacaagtacgtgatctacaacggcgagagcttcgagtacgagttcatctacaagcaccagcagaagaagggcgagtacgtgaacagatgcctgttcatcaagagcagcctgctgggcagcggcgactggcaccagtactacgacatcgtgtacatgaagccccacggcagactgcagaaggtgatgaaccacatcaccgacggccccagaaaggacctggtgaagggcaagcagatcgccgccgccctgatgctggacagcaccttcagcatcctgcagacctgggacaccatcaacctgaacagcttcttcacccagttcgagcagttctgcttcgtgctgcagcagcccatgatctacgagggccaggcccagctgtggaccgacctgcagtacagagagaaggaggtgaagagatacctgtggcagcacctgaagaagcacgtggtgcccctgcccgacggcaagagcaccgacttcctgcccgtggactgccccgtgagaagcaagctgaagaccggcctgatcgtgctgttcgtggtggagaagatcgagctgctgctggagggcagcctggactggctgtgccacctgctgaccagcgacgccagcagccccgacgagttccacagagacctgagccacatcctgggcatcccccagagctggagactgtacctggtgaacctgtgccagagatgcatggacaccagaacctacacctggctgggcgccctgcccgtgctgcactgctgcatggagctggcccccagacacaaggacgcctggagacagcccgaggacacctgggccgccctggagggcctgagcttcagccccttcagagagcagatgctggacaccagcagcctgctgcagttcatgagagagaagcagcacctgctgagcatcgacgagcccctgttcagaagctggttcagcctgctgcccctgagccacctggtgatgtacatggagaacttcatcgagcacctgggcagattccccgcccacatcctggactgcctgagcggcatctactacagactgcccggcctggagcaggtgctgaacacccaggacgtgcaggacgtgcagaacgtgcagaacatcctggagatgctgctgagactgctggacacctacagagacaagatccccgaggaggccctgagccccagctacctgaccgtgtgcctgaagctgcacgaggccatctgcagcagcaccaagctgctgaagttctacgagctgcccgccctgagcgccgagatcgtgtgcagaatgatcagactgctgagcctggtggacagcgccggccagagagacgagaccggcaacaacagcgtgcagaccgtgttccagggcaccctggccgccaccaagagatggctgagagaggtgttcaccaagaacatgctgaccagcagcggcgccagcttcacctacgtgaaggagatcgaggtgtggagaagactggtggagatccagttccccgccgagcacggctggaaggagagcctgctgggcgacatggagtggagactgaccaaggaggagcccctgagccagatcaccgcctactgcaacagctgctgggacaccaagggcctggaggacagcgtggccaagaccttcgagaagtgcatcatcgaggccgtgagcagcgcctgccagagccagaccagcatcctgcagggcttcagctacagcgacctgagaaagttcggcatcgtgctgagcgccgtgatcaccaagagctggcccagaaccgccgacaacttcaacgacatcctgaagcacctgctgaccctggccgacgtgaagcacgtgttcagactgtgcggcaccgacgagaagatcctggccaacgtgaccgaggacgccaagagactgatcgccgtggccgacagcgtgctgaccaaggtggtgggcgacctgctgagcggcaccatcctggtgggccagctggagctgatcatcaagcacaagaaccagttcctggacatctggcagctgagagagaagagcctgagcccccaggacgagcagtgcgccgtggaggaggccctggactggagaagagaggagctgctgctgctgaagaaggagaagagatgcgtggacagcctgctgaagatgtgcggcaacgtgaagcacctgatccaggtggacttcggcgtgctggccgtgagacacagccaggacctgagcagcaagagactgaacgacaccgtgaccgtgagactgagcaccagcagcaacagccagagagccacccactaccacctgagcagccaggtgcaggagatggccggcaagatcgacctgctgagagacagccacatcttccagctgttctggagagaggccgccgagcccctgagcgagcccaaggaggaccaggaggccgccgagctgctgagcgagcccgaggaggagagcgagagacacatcctggagctggaggaggtgtacgactacctgtaccagcccagctacagaaagttcatcaagctgcaccaggacctgaagagcggcgaggtgaccctggccgagatcgacgtgatcttcaaggacttcgtgaacaagtacaccgacctggacagcgagctgaagatcatgtgcaccgtggaccaccaggaccagagagactggatcaaggacagagtggagcagatcaaggagtaccaccacctgcaccaggccgtgcacgccgccaaggtgatcctgcaggtgaaggagagcctgggcctgaacggcgacttcagcgtgctgaacaccctgctgaacttcaccgacaacttcgacgacttcagaagagagaccctggaccagatcaaccaggagctgatccaggccaagaagctgctgcaggacatcagcgaggccagatgcaagggcctgcaggccctgagcctgagaaaggagttcatctgctgggtgagagaggccctgggcggcatcaacgagctgaaggtgttcgtggacctggccagcatcagcgccggcgagaacgacatcgacgtggacagagtggcctgcttccacgacgccgtgcagggctacgccagcctgctgttcaagctggaccccagcgtggacttcagcgccttcatgaagcacctgaagaagctgtggaaggccctggacaaggaccagtacctgcccagaaagctgtgcgacagcgccagaaacctggagtggctgaagaccgtgaacgagagccacggcagcgtggagagaagcagcctgaccctggccaccgccatcaaccagagaggcatctacgtgatccaggcccccaagggcggccagaagatcagccccgacaccgtgctgcacctgatcctgcccgagagccccggcagccacgaggagagcagagagtacagcctggaggaggtgaaggagctgctgaacaagctgatgctgatgagcggcaagaaggacagaaacaacaccgaggtggagagattcagcgaggtgttctgcagcgtgcagagactgagccaggccttcatcgacctgcacagcgccggcaacatgctgttcagaacctggatcgccatggcctactgcagccccaagcagggcgtgagcctgcagatggacttcggcctggacctggtgaccgagctgaaggagggcggcgacgtgaccgagctgctggccgccctgtgcagacagatggagcacttcctggacagctggaagagattcgtgacccagaagagaatggagcacttctacctgaacttctacaccgccgagcagctggtgtacctgagcaccgagctgagaaagcagccccccagcgacgccgccctgaccatgctgagcttcatcaagagcaactgcaccctgagagacgtgctgagagccagcgtgggctgcggcagcgaggccgccagatacagaatgagaagagtgatggaggagctgcccctgatgctgctgagcgagttcagcctggtggacaagctgagaatcatcatggagcagagcatgagatgcctgcccgccttcctgcccgactgcctggacctggagaccctgggccactgcctggcccacctggccggcatgggcggcagccccgtggagagatgcctgcccagaggcctgcaggtgggccagcccaacctggtggtgtgcggccacagcgaggtgctgcccgccgccctggccgtgtacatgcagacccccagccagcccctgcccacctacgacgaggtgctgctgtgcacccccgccaccaccttcgaggaggtggccctgctgctgagaagatgcctgaccctgggcagcctgggccacaaggtgtacagcctgctgttcgccgaccagctgagctacgaggtggccagacaggccgaggagctgttccacaacctgtgcacccagcagcacagagaggactaccagctggtgatggtgtgcgacggcgactgggagcactgctacctgcccagcgccttcagccagcacaaggtgttcgtgaccccccaggcccccctggaggccatccaggcctacctggccggccactacagagtgcccaagcagaccctgagcgccgccgccgtgttcaacgacagactgtgcgtgggcatcgtggccagcgagagagccggcgtgggcaagagcctgtacgtgaagagactgcacgacaagatgaagatgcagctgaacgtgaagaacgtgcccctgaagaccatcagactgatcgacccccaggtggacgagagcagagtgctgggcgccctgctgcccttcctggacgcccagtaccagaaggtgcccgtgctgttccacctggacgtgaccagcagcgtgcagaccggcatctgggtgttcctgttcaagctgctgatcctgcagtacctgatggacatcaacggcaagatgtggctgagaaacccctgccacctgtacatcgtggagatcctggagagaagaaccagcgtgcccagcagaagcagcagcgccctgagaaccagagtgccccagttcagcttcctggacatcttccccaaggtgacctgcagaccccccaaggaggtgatcgacatggagctgagcgccctgagaagcgacaccgagcccggcatggacctgtgggagttctgcagcgagaccttccagagaccctaccagtacctgagaagattcaaccagaaccaggacctggacaccttccagtaccaggagggcagcgtggagggcacccccgaggagtgcctgcagcacttcctgttccactgcggcgtgatcaaccccagctggagcgagctgagaaacttcgccagattcctgaactaccagctgagagactgcgaggccagcctgttctgcaaccccagcttcatcggcgacaccctgagaggcttcaagaagttcgtggtgaccttcatgatcttcatggccagagacttcgccacccccagcctgcacaccagcgaccagagccccggcaagcacatggtgaccatggacggcgtgagagaggaggacctggcccccttcagcctgagaaagagatgggagagcgagccccacccctacgtgttcttcaacgacgaccacaccaccatgaccttcatcggcttccacctgcagcccaacatcaacggcagcgtggacgccatcagccacctgaccggcaaggtgatcaagagagacgtgatgaccagagacctgtaccagggcctgctgctgcagagagtgcccttcaacgtggacttcgacaagctgcccagacacaagaagctggagagactgtgcctgaccctgggcatcccccaggccaccgaccccgacaagacctacgagctgaccaccgacaacatgctgaagatcctggccatcgagatgagattcagatgcggcatccccgtgatcatcatgggcgagaccggctgcggcaagaccagactgatcaagttcctgagcgacctgagaagaggcggcaccaacgccgacaccatcaagctggtgaaggtgcacggcggcaccaccgccgacatgatctacagcagagtgagagaggccgagaacgtggccttcgccaacaaggaccagcaccagctggacaccatcctgttcttcgacgaggccaacaccaccgaggccatcagctgcatcaaggaggtgctgtgcgaccacatggtggacggccagcccctggccgaggacagcggcctgcacatcatcgccgcctgcaacccctacagaaagcacagcgaggagatgatctgcagactggagagcgccggcctgggctacagagtgagcatggaggagaccgccgacagactgggcagcatccccctgagacagctggtgtacagagtgcacgccctgccccccagcctgatccccctggtgtgggacttcggccagctgagcgacgtggccgagaagctgtacatccagcagatcgtgcagagactggtggagagcatcagcctggacgagaacggcaccagagtgatcaccgaggtgctgtgcgccagccagggcttcatgagaaagaccgaggacgagtgcagcttcgtgagcctgagagacgtggagagatgcgtgaaggtgttcagatggttccacgagcacagcgccatgctgctggcccagctgaacgccttcctgagcaagagcagcgtgagcaagaaccacaccgagagagaccccgtgctgtggagcctgatgctggccatcggcgtgtgctaccacgccagcctggagaagaaggacagctacagaaaggccatcgccagattcttccccaagccctacgacgacagcagactgctgctggacgagatcaccagagcccaggacctgttcctggacggcgtgcccctgagaaagaccatcgccaagaacctggccctgaaggagaacgtgttcatgatggtggtgtgcatcgagctgaagatccccctgttcctggtgggcaagcccggcagcagcaagagcctggccaagaccatcgtggccgacgccatgcagggccccgccgcctacagcgacctgttcagaagcctgaagcaggtgcacctggtgagcttccagtgcagcccccacagcaccccccagggcatcatcagcaccttcagacagtgcgccagattccagcagggcaaggacctgcagcagtacgtgagcgtggtggtgctggacgaggtgggcctggccgaggacagccccaagatgcccctgaagaccctgcaccccctgctggaggacggctgcatcgaggacgaccccgccccccacaagaaggtgggcttcgtgggcatcagcaactgggccctggaccccgccaagatgaacagaggcatcttcgtgagcagaggcagccccaacgagaccgagctgatcgagagcgccaagggcatctgcagcagcgacatcctggtgcaggacagagtgcagggctacttcgccagcttcgccaaggcctacgagaccgtgtgcaagagacaggacaaggagttcttcggcctgagagactactacagcctgatcaagatggtgttcgccgccgccaaggccagcaacagaaagcccagcccccaggacatcgcccaggccgtgctgagaaacttcagcggcaaggacgacatccaggccctggacatcttcctggccaacctgcccgaggccaagtgcagcgaggaggtgagccccatgcagctgatcaagcagaacatcttcggccccagccagaaggtgcccggcggcgagcaggaggacgccgagagcagatacctgctggtgctgaccaagaactacgtggccctgcagatcctgcagcagaccttcttcgagggcgaccagcagcccgagatcatcttcggcagcggcttccccaaggaccaggagtacacccagctgtgcagaaacatcaacagagtgaagatctgcatggagaccggcaagatggtgctgctgctgaacctgcagaacctgtacgagagcctgtacgacgccctgaaccagtactacgtgcacctgggcggccagaagtacgtggacctgggcctgggcacccacagagtgaagtgcagagtgcaccccaacttcagactgatcgtgatcgaggagaaggacgtggtgtacaagcacttccccatccccctgatcaacagactggagaagcactacctggacatcaacaccgtgctggagaagtggcagaagagcatcgtggaggagctgtgcgcctgggtggagaagttcatcaacgtgaaggcccaccacttccagaagagacacaagtacagccccagcgacgtgttcatcggctaccacagcgacgcctgcgccagcgtggtgctgcaggtgatcgagagacagggccccagagccctgaccgaggagctgcaccagaaggtgagcgaggaggccaagagcatcctgctgaactgcgccacccccgacgccgtggtgagactgagcgcctacagcctgggcggcttcgccgccgagtggctgagccaggagtacttccacagacagagacacaacagcttcgccgacttcctgcaggcccacctgcacaccgccgacctggagagacacgccatcttcaccgagatcaccaccttcagcagactgctgaccagccacgactgcgagatcctggagagcgaggtgaccggcagagcccccaagcccaccctgctgtggctgcagcagttcgacaccgagtacagcttcctgaaggaggtgagaaactgcctgaccaacaccgccaagtgcaagatcctgatcttccagaccgacttcgaggacggcatcagaagcgcccagctgatcgccagcgccaagtacagcgtgatcaacgagatcaacaagatcagagagaacgaggacagaatcttcgtgtacttcatcaccaagctgagcagagtgggcagaggcaccgcctacgtgggcttccacggcggcctgtggcagagcgtgcacatcgacgacctgagaagaagcaccctgatggtgagcgacgtgaccagactgcagcacgtgaccatcagccagctgttcgcccccggcgacctgcccgagctgggcctggagcacagagccgaggacggccacgaggaggccatggagaccgaggccagcaccagcggcgaggtggccgaggtggccgaggaggccatggagaccgagagcagcgagaaggtgggcaaggagaccagcgagctgggcggcagcgacgtgagcatcctggacaccaccagactgctgagaagctgcgtgcagagcgccgtgggcatgctgagagaccagaacgagagctgcaccagaaacatgagaagagtggtgctgctgctgggcctgctgaacgaggacgacgcctgccacgccagcttcctgagagtgagcaagatgagactgagcgtgttcctgaagaagcaggaggagagccagttccaccccctggagtggctggccagagaggcctgcaaccaggacgccctgcaggaggccggcaccttcagacacaccctgtggaagagagtgcagggcgccgtgacccccctgctggccagcatgatcagcttcatcgacagagacggcaacctggagctgctgaccagacccgacacccccccctgggccagagacctgtggatgttcatcttcagcgacaccatgctgctgaacatccccctggtgatgaacaacgagagacacaagggcgagatggcctacatcgtggtgcagaaccacatgaacctgagcgagaacgccagcaacaacgtgcccttcagctggaagatcaaggactacctggaggagctgtgggtgcaggcccagtacatcaccgacgccgagggcctgcccaagaagttcgtggacatcttccagcagacccccctgggcagattcctggcccagctgcacggcgagccccagcaggagctgctgcagtgctacctgaaggacttcatcctgctgaccatgagagtgagcaccgaggaggagctgaagttcctgcagatggccctgtggagctgcaccagaaagctgaaggccgccagcgaggcccccgaggaggaggtgagcctgccctgggtgcacctggcctaccagagattcagaagcagactgcagaacttcagcagaatcctgaccatctacccccaggtgctgcacagcctgatggaggccagatggaaccacgagctggccggctgcgagatgaccctggacgccttcgccgccatggcctgcaccgagatgctgaccagaaacaccctgaagcccagcccccaggcctggctgcagctggtgaagaacctgagcatgcccctggagctgatctgcagcgacgagcacatgcagggcagcggcagcctggcccaggccgtgatcagagaggtgagagcccagtggagcagaatcttcagcaccgccctgttcgtggagcacgtgctgctgggcaccgagagcagagtgcccgagctgcagggcctggtgaccgagcacgtgttcctgctggacaagtgcctgagagagaacagcgacgtgaagacccacggccccttcgaggccgtgatgagaaccctgtgcgagtgcaaggagaccgccagcaagaccctgagcagattcggcatccagccctgcagcatctgcctgggcgacgccaaggaccccgtgtgcctgccctgcgaccacgtgcactgcctgagatgcctgagagcctggttcgccagcgagcagatgatctgcccctactgcctgaccgccctgcccgacgagttcagccccgccgtgagccaggcccacagagaggccatcgagaagcacgccagattcagacagatgtgcaacagcttcttcgtggacctggtgagcaccatctgcttcaaggacaacgccccccccgagaaggaggtgatcgagagcctgctgagcctgctgttcgtgcagaagggcagactgagagacgccgcccagagacactgcgagcacaccaagagcctgagccccttcaacgacgtggtggacaagacccccgtgatcagaagcgtgatcctgaagctgctgctgaagtacagcttccacgacgtgaaggactacatccaggagtacctgaccctgctgaagaagaaggccttcatcaccgaggacaagaccgagctgtacatgctgttcatcaactgcctggaggacagcatcctggagaagaccagcgcctacagcagaaacgacgagctgaaccacctggaggaggagggcagattcctgaaggcctacagccccgccagcagaggcagagagcccgccaacgaggccagcgtggagtacctgcaggaggtggccagaatcagactgtgcctggacagagccgccgacttcctgagcgagcccgagggcggccccgagatggccaaggagaagcagtgctacctgcagcaggtgaagcagttctgcatcagagtggagaacgactggcacagagtgtacctggtgagaaagctgagcagccagagaggcatggagttcgtgcagggcctgagcaagcccggcagaccccaccagtgggtgttccccaaggacgtggtgaagcagcagggcctgagacaggaccaccccggccagatggacagatacctggtgtacggcgacgagtacaaggccctgagagacgccgtggccaaggccgtgctggagtgcaagcccctgggcatcaagaccgccctgaaggcctgcaagaccccccagagccagcagagcgcctacttcctgctgaccctgttcagagaggtggccatcctgtacagaagccacaacgccagcctgcaccccacccccgagcagtgcgaggccgtgagcaagttcatcggcgagtgcaagatcctgagcccccccgacatcagcagattcgccaccagcctggtggacaacagcgtgcccctgctgagagccggccccagcgacagcaacctggacggcaccgtgaccgagatggccatccacgccgccgccgtgctgctgtgcggccagaacgagctgctggagcccctgaagaacctggccttcagccccgccaccatggcccacgccttcctgcccaccatgcccgaggacctgctggcccaggccagaagatggaagggcctggagagagtgcactggtacacctgccccaacggccacccctgcagcgtgggcgagtgcggcagacccatggagcagagcatctgcatcgactgccacgcccccatcggcggcatcgaccacaagcccagagacggcttccacctggtgaaggacaaggccgacagaacccagaccggccacgtgctgggcaacccccagagaagagacgtggtgacctgcgacagaggcctgccccccgtggtgttcctgctgatcagactgctgacccacctggccctgctgctgggcgccagccagagcagccaggccctgatcaacatcatcaagccccccgtgagagaccccaagggcttcctgcagcagcacatcctgaaggacctggagcagctggccaagatgctgggccacagcgccgacgagaccatcggcgtggtgcacctggtgctgagaagactgctgcaggagcagcaccagctgagcagcagaagactgctgaacttcgacaccgagctgagcaccaaggagatgagaaacaactgggagaaggagatcgccgccgtgatcagccccgagctggagcacctggacaagaccctgcccaccatgaacaacctgatcagccaggacaagagaatcagcagcaaccccgtggccaagatcatctacggcgaccccgtgaccttcctgccccacctgcccagaaagagcgtggtgcactgcagcaagatctggagctgcagaaagagaatcaccgtggagtacctgcagcacatcgtggagcagaagaacggcaaggagagagtgcccatcctgtggcacttcctgcagaaggaggccgagctgagactggtgaagttcctgcccgagatcctggccctgcagagagacctggtgaagcagttccagaacgtgcagcaggtggagtacagcagcatcagaggcttcctgagcaagcacagcagcgacggcctgagacagctgctgcacaacagaatcaccgtgttcctgagcacctggaacaagctgagaagaagcctggagaccaacggcgagatcaacctgcccaaggactactgcagcaccgacctggacctggacaccgagttcgagatcctgctgcccagaagaagaggcctgggcctgtgcgccaccgccctggtgagctacctgatcagactgcacaacgagatcgtgtacgccgtggagaagctgagcaaggagaacaacagctacagcgtggacgccgccgaggtgaccgagctgcacgtgatcagctacgaggtggagagagacctgacccccctgatcctgagcaactgccagtaccaggtggaggagggcagagagaccgtgcaggagttcgacctggagaagatccagagacagatcgtgagcagattcctgcagggcaagcccagactgagcctgaagggcatccccaccctggtgtacagacacgactggaactacgagcacctgttcatggacatcaagaacaagatggcccaggacagcctgcccagcagcgtgatcagcgccatcagcggccagctgcagagctacagcgacgcctgcgaggtgctgagcgtggtggaggtgaccctgggcttcctgagcaccgccggcggcgaccccaacatgcagctgaacgtgtacacccaggacatcctgcagatgggcgaccagaccatccacgtgctgaaggccctgaacagatgccagctgaagcacaccatcgccctgtggcagttcctgagcgcccacaagagcgagcagctgctgagactgcacaaggagcccttcggcgagatcagcagcagatacaaggccgacctgagccccgagaacgccaagctgctgagcaccttcctgaaccagaccggcctggacgccttcctgctggagctgcacgagatgatcatcctgaagctgaagaacccccagacccagaccgaggagagattcagaccccagtggagcctgagagacaccctggtgagctacatgcagaccaaggagagcgagatcctgcccgagatggccagccagttccccgaggagatcctgctggccagctgcgtgagcgtgtggaagaccgccgccgtgctgaagtggaacagagagatgagatag

SEQ ID NO: 97678 - DNA, 15624 bp, synthetic construct
  misc_feature 1..15624: note = Description of Artificial Sequence: Synthetic coding sequence
  source 1..15624: mol_type = other DNA
atggagtgccccagctgccagcacgtgagcaaggaggagacccccaagttctgcagccagtgcggcgagagactgccccccgccgcccccatcgccgacagcgagaacaacaacagcaccatggccagcgccagcgagggcgagatggagtgcggccaggagctgaaggaggagggcggcccctgcctgttccccggcagcgacagctggcaggagaaccccgaggagccctgcagcaaggccagctggaccgtgcaggagagcaagaagaagaagagaaagaagaagaagaagggcaacaagagcgccagcagcgagctggccagcctgcccctgagccccgccagcccctgccacctgaccctgctgagcaacccctggccccaggacaccgccctgccccacagccaggcccagcagagcggccccaccggccagcccagccagccccccggcaccgccaccacccccctggagggcgacggcctgagcgcccccaccgaggtgggcgacagccccctgcaggcccaggccctgggcgaggccggcgtggccaccggcagcgaggcccagagcagcccccagttccaggaccacaccgagggcgaggaccaggacgccagcatccccagcggcggcagaggcctgagccaggagggcaccggcccccccaccagcgccggcgagggccacagcagaaccgaggacgccgcccaggagctgctgctgcccgagagcaagggcggcagcagcgagcccggcaccgagctgcagaccaccgagcagcaggccggcgccagcgccagcatggccgtggacgccgtggccgagcccgccaacgccgtgaagggcgccggcaaggagatgaaggagaagacccagagaatgaagcagccccccgccaccaccccccccttcaagacccactgccaggaggccgagaccaagaccaaggacgagatggccgccgccgaggagaaggtgggcaagaacgagcagggcgagcccgaggacctgaagaagcccgagggcaagaacagaagcgccgccgccgtgaagaacgagaaggagcagaagaaccaggaggccgacgtgcaggaggtgaaggccagcaccctgagccccggcggcggcgtgaccgtgttcttccacgccatcatcagcctgcacttccccttcaaccccgacctgcacaaggtgttcatcagaggcggcgaggagttcggcgagagcaagtgggacagcaacatctgcgagctgcactacaccagagacctgggccacgacagagtgctggtggagggcatcgtgtgcatcagcaagaagcacctggacaagtacatcccctacaagtacgtgatctacaacggcgagagcttcgagtacgagttcatctacaagcaccagcagaagaagggcgagtacgtgaacagatgcctgttcatcaagagcagcctgctgggcagcggcgactggcaccagtactacgacatcgtgtacatgaagccccacggcagactgcagaaggtgatgaaccacatcaccgacggccccagaaaggacctggtgaagggcaagcagatcgccgccgccctgatgctggacagcaccttcagcatcctgcagacctgggacaccatcaacctgaacagcttcttcacccagttcgagcagttctgcttcgtgctgcagcagcccatgatctacgagggccaggcccagctgtggaccgacctgcagtacagagagaaggaggtgaagagatacctgtggcagcacctgaagaagcacgtggtgcccctgcccgacggcaagagcaccgacttcctgcccgtggactgccccgtgagaagcaagctgaagaccggcctgatcgtgctgttcgtggtggagaagatcgagctgctgctggagggcagcctggactggctgtgccacctgctgaccagcgacgccagcagccccgacgagttccacagagacctgagccacatcctgggcatcccccagagctggagactgtacctggtgaacctgtgccagagatgcatggacaccagaacctacacctggctgggcgccctgcccgtgctgcactgctgcatggagctggcccccagacacaaggacgcctggagacagcccgaggacacctgggccgccctggagggcctgagcttcagccccttcagagagcagatgctggacaccagcagcctgctgcagttcatgagagagaagcagcacctgctgagcatcgacgagcccctgttcagaagctggttcagcctgctgcccctgagccacctggtgatgtacatggagaacttcatcgagcacctgggcagattccccgcccacatcctggactgcctgagcggcatctactacagactgcccggcctggagcaggtgctgaacacccaggacgtgcaggacgtgcagaacgtgcagaacatcctggagatgctgctgagactgctggacacctacagagacaagatccccgaggaggccctgagccccagctacctgaccgtgtgcctgaagctgcacgaggccatctgcagcagcaccaagctgctgaagttctacgagctgcccgccctgagcgccgagatcgtgtgcagaatgatcagactgctgagcctggtggacagcgccggccagagagacgagaccggcaacaacagcgtgcagaccgtgttccagggcaccctggccgccaccaagagatggctgagagaggtgttcaccaagaacatgctgaccagcagcggcgccagcttcacctacgtgaaggagatcgaggtgtggagaagactggtggagatccagttccccgccgagcacggctggaaggagagcctgctgggcgacatggagtggagactgaccaaggaggagcccctgagccagatcaccgcctactgcaacagctgctgggacaccaagggcctggaggacagcgtggccaagaccttcgagaagtgcatcatcgaggccgtgagcagcgcctgccagagccagaccagcatcctgcagggcttcagctacagcgacctgagaaagttcggcatcgtgctgagcgccgtgatcaccaagagctggcccagaaccgccgacaacttcaacgacatcctgaagcacctgctgaccctggccgacgtgaagcacgtgttcagactgtgcggcaccgacgagaagatcctggccaacgtgaccgaggacgccaagagactgatcgccgtggccgacagcgtgctgaccaaggtggtgggcgacctgctgagcggcaccatcctggtgggccagctggagctgatcatcaagcacaagaaccagttcctggacatctggcagctgagagagaagagcctgagcccccaggacgagcagtgcgccgtggaggaggccctggactggagaagagaggagctgctgctgctgaagaaggagaagagatgcgtggacagcctgctgaagatgtgcggcaacgtgaagcacctgatccaggtggacttcggcgtgctggccgtgagacacagccaggacctgagcagcaagagactgaacgacaccgtgaccgtgagactgagcaccagcagcaacagccagagagccacccactaccacctgagcagccaggtgcaggagatggccggcaagatcgacctgctgagagacagccacatcttccagctgttctggagagaggccgccgagcccctgagcgagcccaaggaggaccaggaggccgccgagctgctgagcgagcccgaggaggagagcgagagacacatcctggagctggaggaggtgtacgactacctgtaccagcccagctacagaaagttcatcaagctgcaccaggacctgaagagcggcgaggtgaccctggccgagatcgacgtgatcttcaaggacttcgtgaacaagtacaccgacctggacagcgagctgaagatcatgtgcaccgtggaccaccaggaccagagagactggatcaaggacagagtggagcagatcaaggagtaccaccacctgcaccaggccgtgcacgccgccaaggtgatcctgcaggtgaaggagagcctgggcctgaacggcgacttcagcgtgctgaacaccctgctgaacttcaccgacaacttcgacgacttcagaagagagaccctggaccagatcaaccaggagctgatccaggccaagaagctgctgcaggacatcagcgaggccagatgcaagggcctgcaggccctgagcctgagaaaggagttcatctgctgggtgagagaggccctgggcggcatcaacgagctgaaggtgttcgtggacctggccagcatcagcgccggcgagaacgacatcgacgtggacagagtggcctgcttccacgacgccgtgcagggctacgccagcctgctgttcaagctggaccccagcgtggacttcagcgccttcatgaagcacctgaagaagctgtggaaggccctggacaaggaccagtacctgcccagaaagctgtgcgacagcgccagaaacctggagtggctgaagaccgtgaacgagagccacggcagcgtggagagaagcagcctgaccctggccaccgccatcaaccagagaggcatctacgtgatccaggcccccaagggcggccagaagatcagccccgacaccgtgctgcacctgatcctgcccgagagccccggcagccacgaggagagcagagagtacagcctggaggaggtgaaggagctgctgaacaagctgatgctgatgagcggcaagaaggacagaaacaacaccgaggtggagagattcagcgaggtgttctgcagcgtgcagagactgagccaggccttcatcgacctgcacagcgccggcaacatgctgttcagaacctggatcgccatggcctactgcagccccaagcagggcgtgagcctgcagatggacttcggcctggacctggtgaccgagctgaaggagggcggcgacgtgaccgagctgctggccgccctgtgcagacagatggagcacttcctggacagctggaagagattcgtgacccagaagagaatggagcacttctacctgaacttctacaccgccgagcagctggtgtacctgagcaccgagctgagaaagcagccccccagcgacgccgccctgaccatgctgagcttcatcaagagcaactgcaccctgagagacgtgctgagagccagcgtgggctgcggcagcgaggccgccagatacagaatgagaagagtgatggaggagctgcccctgatgctgctgagcgagttcagcctggtggacaagctgagaatcatcatggagcagagcatgagatgcctgcccgccttcctgcccgactgcctggacctggagaccctgggccactgcctggcccacctggccggcatgggcggcagccccgtggagagatgcctgcccagaggcctgcaggtgggccagcccaacctggtggtgtgcggccacagcgaggtgctgcccgccgccctggccgtgtacatgcagacccccagccagcccctgcccacctacgacgaggtgctgctgtgcacccccgccaccaccttcgaggaggtggccctgctgctgagaagatgcctgaccctgggcagcctgggccacaaggtgtacagcctgctgttcgccgaccagctgagctacgaggtggccagacaggccgaggagctgttccacaacctgtgcacccagcagcacagagaggactaccagctggtgatggtgtgcgacggcgactgggagcactgctacctgcccagcgccttcagccagcacaaggtgttcgtgaccccccaggcccccctggaggccatccaggcctacctggccggccactacagagtgcccaagcagaccctgagcgccgccgccgtgttcaacgacagactgtgcgtgggcatcgtggccagcgagagagccggcgtgggcaagagcctgtacgtgaagagactgcacgacaagatgaagatgcagctgaacgtgaagaacgtgcccctgaagaccatcagactgatcgacccccaggtggacgagagcagagtgctgggcgccctgctgcccttcctggacgcccagtaccagaaggtgcccgtgctgttccacctggacgtgaccagcagcgtgcagaccggcatctgggtgttcctgttcaagctgctgatcctgcagtacctgatggacatcaacggcaagatgtggctgagaaacccctgccacctgtacatcgtggagatcctggagagaagaaccagcgtgcccagcagaagcagcagcgccctgagaaccagagtgccccagttcagcttcctggacatcttccccaaggtgacctgcagaccccccaaggaggtgatcgacatggagctgagcgccctgagaagcgacaccgagcccggcatggacctgtgggagttctgcagcgagaccttccagagaccctaccagtacctgagaagattcaaccagaaccaggacctggacaccttccagtaccaggagggcagcgtggagggcacccccgaggagtgcctgcagcacttcctgttccactgcggcgtgatcaaccccagctggagcgagctgagaaacttcgccagattcctgaactaccagctgagagactgcgaggccagcctgttctgcaaccccagcttcatcggcgacaccctgagaggcttcaagaagttcgtggtgaccttcatgatcttcatggccagagacttcgccacccccagcctgcacaccagcgaccagagccccggcaagcacatggtgaccatggacggcgtgagagaggaggacctggcccccttcagcctgagaaagagatgggagagcgagccccacccctacgtgttcttcaacgacgaccacaccaccatgaccttcatcggcttccacctgcagcccaacatcaacggcagcgtggacgccatcagccacctgaccggcaaggtgatcaagagagacgtgatgaccagagacctgtaccagggcctgctgctgcagagagtgcccttcaacgtggacttcgacaagctgcccagacacaagaagctggagagactgtgcctgaccctgggcatcccccaggccaccgaccccgacaagacctacgagctgaccaccgacaacatgctgaagatcctggccatcgagatgagattcagatgcggcatccccgtgatcatcatgggcgagaccggctgcggcaagaccagactgatcaagttcctgagcgacctgagaagaggcggcaccaacgccgacaccatcaagctggtgaaggtgcacggcggcaccaccgccgacatgatctacagcagagtgagagaggccgagaacgtggccttcgccaacaaggaccagcaccagctggacaccatcctgttcttcgacgaggccaacaccaccgaggccatcagctgcatcaaggaggtgctgtgcgaccacatggtggacggccagcccctggccgaggacagcggcctgcacatcatcgccgcctgcaacccctacagaaagcacagcgaggagatgatctgcagactggagagcgccggcctgggctacagagtgagcatggaggagaccgccgacagactgggcagcatccccctgagacagctggtgtacagagtgcacgccctgccccccagcctgatccccctggtgtgggacttcggccagctgagcgacgtggccgagaagctgtacatccagcagatcgtgcagagactggtggagagcatcagcctggacgagaacggcaccagagtgatcaccgaggtgctgtgcgccagccagggcttcatgagaaagaccgaggacgagtgcagcttcgtgagcctgagagacgtggagagatgcgtgaaggtgttcagatggttccacgagcacagcgccatgctgctggcccagctgaacgccttcctgagcaagagcagcgtgagcaagaaccacaccgagagagaccccgtgctgtggagcctgatgctggccatcggcgtgtgctaccacgccagcctggagaagaaggacagctacagaaaggccatcgccagattcttccccaagccctacgacgacagcagactgctgctggacgagatcaccagagcccaggacctgttcctggacggcgtgcccctgagaaagaccatcgccaagaacctggccctgaaggagaacgtgttcatgatggtggtgtgcatcgagctgaagatccccctgttcctggtgggcaagcccggcagcagcaagagcctggccaagaccatcgtggccgacgccatgcagggccccgccgcctacagcgacctgttcagaagcctgaagcaggtgcacctggtgagcttccagtgcagcccccacagcaccccccagggcatcatcagcaccttcagacagtgcgccagattccagcagggcaaggacctgcagcagtacgtgagcgtggtggtgctggacgaggtgggcctggccgaggacagccccaagatgcccctgaagaccctgcaccccctgctggaggacggctgcatcgaggacgaccccgccccccacaagaaggtgggcttcgtgggcatcagcaactgggccctggaccccgccaagatgaacagaggcatcttcgtgagcagaggcagccccaacgagaccgagctgatcgagagcgccaagggcatctgcagcagcgacatcctggtgcaggacagagtgcagggctacttcgccagcttcgccaaggcctacgagaccgtgtgcaagagacaggacaaggagttcttcggcctgagagactactacagcctgatcaagatggtgttcgccgccgccaaggccagcaacagaaagcccagcccccaggacatcgcccaggccgtgctgagaaacttcagcggcaaggacgacatccaggccctggacatcttcctggccaacctgcccgaggccaagtgcagcgaggaggtgagccccatgcagctgatcaagcagaacatcttcggccccagccagaaggtgcccggcggcgagcaggaggacgccgagagcagatacctgctggtgctgaccaagaactacgtggccctgcagatcctgcagcagaccttcttcgagggcgaccagcagcccgagatcatcttcggcagcggcttccccaaggaccaggagtacacccagctgtgcagaaacatcaacagagtgaagatctgcatggagaccggcaagatggtgctgctgctgaacctgcagaacctgtacgagagcctgtacgacgccctgaaccagtactacgtgcacctgggcggccagaagtacgtggacctgggcctgggcacccacagagtgaagtgcagagtgcaccccaacttcagactgatcgtgatcgaggagaaggacgtggtgtacaagcacttccccatccccctgatcaacagactggagaagcactacctggacatcaacaccgtgctggagaagtggcagaagagcatcgtggaggagctgtgcgcctgggtggagaagttcatcaacgtgaaggcccaccacttccagaagagacacaagtacagccccagcgacgtgttcatcggctaccacagcgacgcctgcgccagcgtggtgctgcaggtgatcgagagacagggccccagagccctgaccgaggagctgcaccagaaggtgagcgaggaggccaagagcatcctgctgaactgcgccacccccgacgccgtggtgagactgagcgcctacagcctgggcggcttcgccgccgagtggctgagccaggagtacttccacagacagagacacaacagcttcgccgacttcctgcaggcccacctgcacaccgccgacctggagagacacgccatcttcaccgagatcaccaccttcagcagactgctgaccagccacgactgcgagatcctggagagcgaggtgaccggcagagcccccaagcccaccctgctgtggctgcagcagttcgacaccgagtacagcttcctgaaggaggtgagaaactgcctgaccaacaccgccaagtgcaagatcctgatcttccagaccgacttcgaggacggcatcagaagcgcccagctgatcgccagcgccaagtacagcgtgatcaacgagatcaacaagatcagagagaacgaggacagaatcttcgtgtacttcatcaccaagctgagcagagtgggcagaggcaccgcctacgtgggcttccacggcggcctgtggcagagcgtgcacatcgacgacctgagaagaagcaccctgatggtgagcgacgtgaccagactgcagcacgtgaccatcagccagctgttcgcccccggcgacctgcccgagctgggcctggagcacagagccgaggacggccacgaggaggccatggagaccgaggccagcaccagcggcgaggtggccgaggtggccgaggaggccatggagaccgagagcagcgagaaggtgggcaaggagaccagcgagctgggcggcagcgacgtgagcatcctggacaccaccagactgctgagaagctgcgtgcagagcgccgtgggcatgctgagagaccagaacgagagctgcaccagaaacatgagaagagtggtgctgctgctgggcctgctgaacgaggacgacgcctgccacgccagcttcctgagagtgagcaagatgagactgagcgtgttcctgaagaagcaggaggagagccagttccaccccctggagtggctggccagagaggcctgcaaccaggacgccctgcaggaggccggcaccttcagacacaccctgtggaagagagtgcagggcgccgtgacccccctgctggccagcatgatcagcttcatcgacagagacggcaacctggagctgctgaccagacccgacacccccccctgggccagagacctgtggatgttcatcttcagcgacaccatgctgctgaacatccccctggtgatgaacaacgagagacacaagggcgagatggcctacatcgtggtgcagaaccacatgaacctgagcgagaacgccagcaacaacgtgcccttcagctggaagatcaaggactacctggaggagctgtgggtgcaggcccagtacatcaccgacgccgagggcctgcccaagaagttcgtggacatcttccagcagacccccctgggcagattcctggcccagctgcacggcgagccccagcaggagctgctgcagtgctacctgaaggacttcatcctgctgaccatgagagtgagcaccgaggaggagctgaagttcctgcagatggccctgtggagctgcaccagaaagctgaaggccgccagcgaggcccccgaggaggaggtgagcctgccctgggtgcacctggcctaccagagattcagaagcagactgcagaacttcagcagaatcctgaccatctacccccaggtgctgcacagcctgatggaggccagatggaaccacgagctggccggctgcgagatgaccctggacgccttcgccgccatggcctgcaccgagatgctgaccagaaacaccctgaagcccagcccccaggcctggctgcagctggtgaagaacctgagcatgcccctggagctgatctgcagcgacgagcacatgcagggcagcggcagcctggcccaggccgtgatcagagaggtgagagcccagtggagcagaatcttcagcaccgccctgttcgtggagcacgtgctgctgggcaccgagagcagagtgcccgagctgcagggcctggtgaccgagcacgtgttcctgctggacaagtgcctgagagagaacagcgacgtgaagacccacggccccttcgaggccgtgatgagaaccctgtgcgagtgcaaggagaccgccagcaagaccctgagcagattcggcatccagccctgcagcatctgcctgggcgacgccaaggaccccgtgtgcctgccctgcgaccacgtgcactgcctgagatgcctgagagcctggttcgccagcgagcagatgatctgcccctactgcctgaccgccctgcccgacgagttcagccccgccgtgagccaggcccacagagaggccatcgagaagcacgccagattcagacagatgtgcaacagcttcttcgtggacctggtgagcaccatctgcttcaaggacaacgccccccccgagaaggaggtgatcgagagcctgctgagcctgctgttcgtgcagaagggcagactgagagacgccgcccagagacactgcgagcacaccaagagcctgagccccttcaacgacgtggtggacaagacccccgtgatcagaagcgtgatcctgaagctgctgctgaagtacagcttccacgacgtgaaggactacatccaggagtacctgaccctgctgaagaagaaggccttcatcaccgaggacaagaccgagctgtacatgctgttcatcaactgcctggaggacagcatcctggagaagaccagcgcctacagcagaaacgacgagctgaaccacctggaggaggagggcagattcctgaaggcctacagccccgccagcagaggcagagagcccgccaacgaggccagcgtggagtacctgcaggaggtggccagaatcagactgtgcctggacagagccgccgacttcctgagcgagcccgagggcggccccgagatggccaaggagaagcagtgctacctgcagcaggtgaagcagttctgcatcagagtggagaacgactggcacagagtgtacctggtgagaaagctgagcagccagagaggcatggagttcgtgcagggcctgagcaagcccggcagaccccaccagtgggtgttccccaaggacgtggtgaagcagcagggcctgagacaggaccaccccggccagatggacagatacctggtgtacggcgacgagtacaaggccctgagagacgccgtggccaaggccgtgctggagtgcaagcccctgggcatcaagaccgccctgaaggcctgcaagaccccccagagccagcagagcgcctacttcctgctgaccctgttcagagaggtggccatcctgtacagaagccacaacgccagcctgcaccccacccccgagcagtgcgaggccgtgagcaagttcatcggcgagtgcaagatcctgagcccccccgacatcagcagattcgccaccagcctggtggacaacagcgtgcccctgctgagagccggccccagcgacagcaacctggacggcaccgtgaccgagatggccatccacgccgccgccgtgctgctgtgcggccagaacgagctgctggagcccctgaagaacctggccttcagccccgccaccatggcccacgccttcctgcccaccatgcccgaggacctgctggcccaggccagaagatggaagggcctggagagagtgcactggtacacctgccccaacggccacccctgcagcgtgggcgagtgcggcagacccatggagcagagcatctgcatcgactgccacgcccccatcggcggcatcgaccacaagcccagagacggcttccacctggtgaaggacaaggccgacagaacccagaccggccacgtgctgggcaacccccagagaagagacgtggtgacctgcgacagaggcctgccccccgtggtgttcctgctgatcagactgctgacccacctggccctgctgctgggcgccagccagagcagccaggccctgatcaacatcatcaagccccccgtgagagaccccaagggcttcctgcagcagcacatcctgaaggacctggagcagctggccaagatgctgggccacagcgccgacgagaccatcggcgtggtgcacctggtgctgagaagactgctgcaggagcagcaccagctgagcagcagaagactgctgaacttcgacaccgagctgagcaccaaggagatgagaaacaactgggagaaggagatcgccgccgtgatcagccccgagctggagcacctggacaagaccctgcccaccatgaacaacctgatcagccaggacaagagaatcagcagcaaccccgtggccaagatcatctacggcgaccccgtgaccttcctgccccacctgcccagaaagagcgtggtgcactgcagcaagatctggagctgcagaaagagaatcaccgtggagtacctgcagcacatcgtggagcagaagaacggcaaggagagagtgcccatcctgtggcacttcctgcagaaggaggccgagctgagactggtgaagttcctgcccgagatcctggccctgcagagagacctggtgaagcagttccagaacgtgcagcaggtggagtacagcagcatcagaggcttcctgagcaagcacagcagcgacggcctgagacagctgctgcacaacagaatcaccgtgttcctgagcacctggaacaagctgagaagaagcctggagaccaacggcgagatcaacctgcccaaggactactgcagcaccgacctggacctggacaccgagttcgagatcctgctgcccagaagaagaggcctgggcctgtgcgccaccgccctggtgagctacctgatcagactgcacaacgagatcgtgtacgccgtggagaagctgagcaaggagaacaacagctacagcgtggacgccgccgaggtgaccgagctgcacgtgatcagctacgaggtggagagagacctgacccccctgatcctgagcaactgccagtaccaggtggaggagggcagagagaccgtgcaggagttcgacctggagaagatccagagacagatcgtgagcagattcctgcagggcaagcccagactgagcctgaagggcatccccaccctggtgtacagacacgactggaactacgagcacctgttcatggacatcaagaacaagatggcccaggacagcctgcccagcagcgtgatcagcgccatcagcggccagctgcagagctacagcgacgcctgcgaggtgctgagcgtggtggaggtgaccctgggcttcctgagcaccgccggcggcgaccccaacatgcagctgaacgtgtacacccaggacatcctgcagatgggcgaccagaccatccacgtgctgaaggccctgaacagatgccagctgaagcacaccatcgccctgtggcagttcctgagcgcccacaagagcgagcagctgctgagactgcacaaggagcccttcggcgagatcagcagcagatacaaggccgacctgagccccgagaacgccaagctgctgagcaccttcctgaaccagaccggcctggacgccttcctgctggagctgcacgagatgatcatcctgaagctgaagaacccccagacccagaccgaggagagattcagaccccagtggagcctgagagacaccctggtgagctacatgcagaccaaggagagcgagatcctgcccgagatggccagccagttccccgaggagatcctgctggccagctgcgtgagcgtgtggaagaccgccgccgtgctgaagtggaacagagagatgagatag

SEQ ID NO: 97679 - DNA, 2772 bp, synthetic construct
  misc_feature 1..2772: note = Description of Artificial Sequence: Synthetic coding sequence
  source 1..2772: mol_type = other DNA
atggaggagggcaacaacaacgaggaggtgatccacctgaacaacttccactgccacagaggccaggagtggatcaacctgagagacggccccatcaccatcagcgacagcagcgacgaggagagaatccccatgctggtgacccccgccccccagcagcacgaggaggaggacctggacgacgacgtgatcctgaccgagaccaacaagccccagagaagcagacccaacctgatcaagcccgccgcccagtggcaggacctgaagagactgggcgaggagagacccaagaagagcagagccgccttcgagagcgacaagagcagctacttcagcgtgtgcaacaaccccctgttcgacagcggcgcccaggacgacagcgaggacgactacggcgagttcctggacctgggcccccccggcatcagcgagttcaccaagcccagcggccagaccgagagagagcccaagcccggccccagccacaaccaggccgccaacgacatcgtgaaccccagaagcgagcagaaggtgatcatcctggaggagggcagcctgctgtacaccgagagcgaccccctggagacccagaaccagagcagcgaggacagcgagaccgagctgctgagcaacctgggcgagagcgccgccctggccgacgaccaggccatcgaggaggactgctggctggaccacccctacttccagagcctgaaccagcagcccagagagatcaccaaccaggtggtgccccaggagagacagcccgaggccgagctgggcagactgctgttccagcacgagttccccggccccgccttccccagacccgagccccagcagggcggcatcagcggccccagcagcccccagcccgcccaccccctgggcgagttcgaggaccagcagctggccagcgacgacgaggagcccggccccgccttccccatgcaggagagccaggagcccaacctggagaacatctggggccaggaggccgccgaggtggaccaggagctggtggagctgctggtgaaggagaccgaggccagattccccgacgtggccaacggcttcatcgaggagatcatccacttcaagaactactacgacctgaacgtgctgtgcaacttcctgctggagaaccccgactaccccaagagagaggacagaatcatcatcaaccccagcagcagcctgctggccagccaggacgagaccaagctgcccaagatcgacttcttcgactacagcaagctgacccccctggaccagagatgcttcatccaggccgccgacctgctgatggccgacttcaaggtgctgagcagccaggacatcaagtgggccctgcacgagctgaagggccactacgccatcaccagaaaggccctgagcgacgccatcaagaagtggcaggagctgagccccgagaccagcggcaagagaaagaagagaaagcagatgaaccagtacagctacatcgacttcaagttcgagcagggcgacatcaagatcgagaagagaatgttcttcctggagaacaagagaagacactgcagaagctacgacagaagagccctgctgcccgccgtgcagcaggagcaggagttctacgagcagaagatcaaggagatggccgagcacgaggacttcctgctggccctgcagatgaacgaggagcagtaccagaaggacggccagctgatcgagtgcagatgctgctacggcgagttccccttcgaggagctgacccagtgcgccgacgcccacctgttctgcaaggagtgcctgatcagatacgcccaggaggccgtgttcggcagcggcaagctggagctgagctgcatggagggcagctgcacctgcagcttccccaccagcgagctggagaaggtgctgccccagaccatcctgtacaagtactacgagagaaaggccgaggaggaggtggccgccgcctacgccgacgagctggtgagatgccccagctgcagcttccccgccctgctggacagcgacgtgaagagattcagctgccccaacccccactgcagaaaggagacctgcagaaagtgccagggcctgtggaaggagcacaacggcctgacctgcgaggagctggccgagaaggacgacatcaagtacagaaccagcatcgaggagaagatgaccgccgccagaatcagaaagtgccacaagtgcggcaccggcctgatcaagagcgagggctgcaacagaatgagctgcagatgcggcgcccagatgtgctacctgtgcagagtgagcatcaacggctacgaccacttctgccagcaccccagaagccccggcgccccctgccaggagtgcagcagatgcagcctgtggaccgaccccaccgaggacgacgagaagctgatcgaggagatccagaaggaggccgaggaggagcagaagagaaagaacggcgagaacaccttcaagagaatcggcccccccctggagaagcccgtggagaaggtgcagagagtggaggccctgcccagacccgtgccccagaacctgccccagccccagatgcccccctacgccttcgcccacccccccttccccctgccccccgtgagacccgtgttcaacaacttccccctgaacatgggccccatccccgccccctacgtgccccccctgcccaacgtgagagtgaactacgacttcggccccatccacatgcccctggagcacaacctgcccatgcacttcggcccccagcccagacacagattctag

SEQ ID NO: 97680 - DNA, 63 bp, synthetic construct
  misc_feature 1..63: note = Description of Artificial Sequence: Synthetic coding sequence
  source 1..63: mol_type = other DNA
atggaggagggcaacaacaacgaggaggtgatccacctgaacaacttccactgccacagatag

SEQ ID NO: 97681 - DNA, 2601 bp, synthetic construct
  misc_feature 1..2601: note = Description of Artificial Sequence: Synthetic coding sequence
  source 1..2601: mol_type = other DNA
atggaggagggcaacaacaacgaggaggtgatccacctgaacaacttccactgccacagaggccaggagtggatcaacctgagagacggccccatcaccatcagcgacagcagcgacgaggagagaatccccatgctggtgacccccgccccccagcagcacgaggaggaggacctggacgacgacgtgatcctgaccgaggacgacagcgaggacgactacggcgagttcctggacctgggcccccccggcatcagcgagttcaccaagcccagcggccagaccgagagagagcccaagcccggccccagccacaaccaggccgccaacgacatcgtgaaccccagaagcgagcagaaggtgatcatcctggaggagggcagcctgctgtacaccgagagcgaccccctggagacccagaaccagagcagcgaggacagcgagaccgagctgctgagcaacctgggcgagagcgccgccctggccgacgaccaggccatcgaggaggactgctggctggaccacccctacttccagagcctgaaccagcagcccagagagatcaccaaccaggtggtgccccaggagagacagcccgaggccgagctgggcagactgctgttccagcacgagttccccggccccgccttccccagacccgagccccagcagggcggcatcagcggccccagcagcccccagcccgcccaccccctgggcgagttcgaggaccagcagctggccagcgacgacgaggagcccggccccgccttccccatgcaggagagccaggagcccaacctggagaacatctggggccaggaggccgccgaggtggaccaggagctggtggagctgctggtgaaggagaccgaggccagattccccgacgtggccaacggcttcatcgaggagatcatccacttcaagaactactacgacctgaacgtgctgtgcaacttcctgctggagaaccccgactaccccaagagagaggacagaatcatcatcaaccccagcagcagcctgctggccagccaggacgagaccaagctgcccaagatcgacttcttcgactacagcaagctgacccccctggaccagagatgcttcatccaggccgccgacctgctgatggccgacttcaaggtgctgagcagccaggacatcaagtgggccctgcacgagctgaagggccactacgccatcaccagaaaggccctgagcgacgccatcaagaagtggcaggagctgagccccgagaccagcggcaagagaaagaagagaaagcagatgaaccagtacagctacatcgacttcaagttcgagcagggcgacatcaagatcgagaagagaatgttcttcctggagaacaagagaagacactgcagaagctacgacagaagagccctgctgcccgccgtgcagcaggagcaggagttctacgagcagaagatcaaggagatggccgagcacgaggacttcctgctggccctgcagatgaacgaggagcagtaccagaaggacggccagctgatcgagtgcagatgctgctacggcgagttccccttcgaggagctgacccagtgcgccgacgcccacctgttctgcaaggagtgcctgatcagatacgcccaggaggccgtgttcggcagcggcaagctggagctgagctgcatggagggcagctgcacctgcagcttccccaccagcgagctggagaaggtgctgccccagaccatcctgtacaagtactacgagagaaaggccgaggaggaggtggccgccgcctacgccgacgagctggtgagatgccccagctgcagcttccccgccctgctggacagcgacgtgaagagattcagctgccccaacccccactgcagaaaggagacctgcagaaagtgccagggcctgtggaaggagcacaacggcctgacctgcgaggagctggccgagaaggacgacatcaagtacagaaccagcatcgaggagaagatgaccgccgccagaatcagaaagtgccacaagtgcggcaccggcctgatcaagagcgagggctgcaacagaatgagctgcagatgcggcgcccagatgtgctacctgtgcagagtgagcatcaacggctacgaccacttctgccagcaccccagaagccccggcgccccctgccaggagtgcagcagatgcagcctgtggaccgaccccaccgaggacgacgagaagctgatcgaggagatccagaaggaggccgaggaggagcagaagagaaagaacggcgagaacaccttcaagagaatcggcccccccctggagaagcccgtggagaaggtgcagagagtggaggccctgcccagacccgtgccccagaacctgccccagccccagatgcccccctacgccttcgcccacccccccttccccctgccccccgtgagacccgtgttcaacaacttccccctgaacatgggccccatccccgccccctacgtgccccccctgcccaacgtgagagtgaactacgacttcggccccatccacatgcccctggagcacaacctgcccatgcacttcggcccccagcccagacacagattctag

SEQ ID NO: 97682 - DNA, 2037 bp, synthetic construct
  misc_feature 1..2037: note = Description of Artificial Sequence: Synthetic coding sequence
  source 1..2037: mol_type = other DNA
atggaggagggcaacaacaacgaggaggtgatccacctgaacaacttccactgccacagaggccaggagtggatcaacctgagagacggccccatcaccatcagcgacagcagcgacgaggagagaatccccatgctggtgacccccgccccccagcagcacgaggaggaggacctggacgacgacgtgatcctgaccgagaccaacaagccccagagaagcagacccaacctgatcaagcccgccgcccagtggcaggaggccgccgaggtggaccaggagctggtggagctgctggtgaaggagaccgaggccagattccccgacgtggccaacggcttcatcgaggagatcatccacttcaagaactactacgacctgaacgtgctgtgcaacttcctgctggagaaccccgactaccccaagagagaggacagaatcatcatcaaccccagcagcagcctgctggccagccaggacgagaccaagctgcccaagatcgacttcttcgactacagcaagctgacccccctggaccagagatgcttcatccaggccgccgacctgctgatggccgacttcaaggtgctgagcagccaggacatcaagtgggccctgcacgagctgaagggccactacgccatcaccagaaaggccctgagcgacgccatcaagaagtggcaggagctgagccccgagaccagcggcaagagaaagaagagaaagcagatgaaccagtacagctacatcgacttcaagttcgagcagggcgacatcaagatcgagaagagaatgttcttcctggagaacaagagaagacactgcagaagctacgacagaagagccctgctgcccgccgtgcagcaggagcaggagttctacgagcagaagatcaaggagatggccgagcacgaggacttcctgctggccctgcagatgaacgaggagcagtaccagaaggacggccagctgatcgagtgcagatgctgctacggcgagttccccttcgaggagctgacccagtgcgccgacgcccacctgttctgcaaggagtgcctgatcagatacgcccaggaggccgtgttcggcagcggcaagctggagctgagctgcatggagggcagctgcacctgcagcttccccaccagcgagctggagaaggtgctgccccagaccatcctgtacaagtactacgagagaaaggccgaggaggaggtggccgccgcctacgccgacgagctggtgagatgccccagctgcagcttccccgccctgctggacagcgacgtgaagagattcagctgccccaacccccactgcagaaaggagacctgcagaaagtgccagggcctgtggaaggagcacaacggcctgacctgcgaggagctggccgagaaggacgacatcaagtacagaaccagcatcgaggagaagatgaccgccgccagaatcagaaagtgccacaagtgcggcaccggcctgatcaagagcgagggctgcaacagaatgagctgcagatgcggcgcccagatgtgctacctgtgcagagtgagcatcaacggctacgaccacttctgccagcaccccagaagccccggcgccccctgccaggagtgcagcagatgcagcctgtggaccgaccccaccgaggacgacgagaagctgatcgaggagatccagaaggaggccgaggaggagcagaagagaaagaacggcgagaacaccttcaagagaatcggcccccccctggagaagcccgtggagaaggtgcagagagtggaggccctgcccagacccgtgccccagaacctgccccagccccagatgcccccctacgccttcgcccacccccccttccccctgccccccgtgagacccgtgttcaacaacttccccctgaacatgggccccatccccgccccctacgtgccccccctgcccaacgtgagagtgaactacgacttcggccccatccacatgcccctggagcacaacctgcccatgcacttcggcccccagcccagacacagattctag

SEQ ID NO: 97683 - DNA, 447 bp, synthetic construct
  misc_feature 1..447: note = Description of Artificial Sequence: Synthetic coding sequence
  source 1..447: mol_type = other DNA
atgagcagcgacttcccccactacaacttcagaatgcccaacatcggcttccagaacctgcccctgaacatctacatcgtggtgttcggcaccgccatcttcgtgttcatcctgagcctgctgttctgctgctacctgatcagactgagacaccaggcccacaaggagttctacgcctacaagcaggtgatcctgaaggagaaggtgaaggagctgaacctgcacgagctgtgcgccgtgtgcctggaggacttcaagcccagagacgagctgggcatctgcccctgcaagcacgccttccacagaaagtgcctgatcaagtggctggaggtgagaaaggtgtgccccctgtgcaacatgcccgtgctgcagctggcccagctgcacagcaagcaggacagaggccccccccagggccccctgcccggcgccgagaacatcgtgtag

SEQ ID NO: 97684 - DNA, 447 bp, synthetic construct; identical to SEQ ID NO: 97683
  misc_feature 1..447: note = Description of Artificial Sequence: Synthetic coding sequence
  source 1..447: mol_type = other DNA

SEQ ID NO: 97685 - DNA, 510 bp, synthetic construct
  misc_feature 1..510: note = Description of Artificial Sequence: Synthetic coding sequence
  source 1..510: mol_type = other DNA
atgctgaacaagagcggcgagagcagataccccgccctgttccccgtgctgggcggcagcagcatgagcagcgacttcccccactacaacttcagaatgcccaacatcggcttccagaacctgcccctgaacatctacatcgtggtgttcggcaccgccatcttcgtgttcatcctgagcctgctgttctgctgctacctgatcagactgagacaccaggcccacaaggagttctacgcctacaagcaggtgatcctgaaggagaaggtgaaggagctgaacctgcacgagctgtgcgccgtgtgcctggaggacttcaagcccagagacgagctgggcatctgcccctgcaagcacgccttccacagaaagtgcctgatcaagtggctggaggtgagaaaggtgtgccccctgtgcaacatgcccgtgctgcagctggcccagctgcacagcaagcaggacagaggccccccccagggccccctgcccggcgccgagaacatcgtgtag

SEQ ID NO: 97686 - DNA, 510 bp, synthetic construct; identical to SEQ ID NO: 97685
  misc_feature 1..510: note = Description of Artificial Sequence: Synthetic coding sequence
  source 1..510: mol_type = other DNA

SEQ ID NO: 97687 - DNA, 1302 bp, synthetic construct
  misc_feature 1..1302: note = Description of Artificial Sequence: Synthetic coding sequence
  source 1..1302: mol_type = other DNA
atggaggccgtgtacctggtggtgaacggcctgggcctggtgctggacgtgctgaccctggtgctggacctgaacttcctgctggtgagcagcctgctggccagcctggcctggctgctggccttcgtgtacaacctgccccacaccgtgctgaccagcctgctgcacctgggcagaggcgtgctgctgagcctgctggccctgatcgaggccgtggtgagattcacctgcggcggcctgcaggccctgtgcaccctgctgtacagctgctgcagcggcctggagagcctgaagctgctgggccacctggccagccacggcgccctgagaagcagagagatcctgcacagaggcgtgctgaacgtggtgagcagcggccacgccctgctgagacaggcctgcgacatctgcgccatcgccatgagcctggtggcctacgtgatcaacagcctggtgaacatctgcctgatcggcacccagaacctgttcagcctggtgctggccctgtgggacgccgtgaccggccccctgtggagaatgaccgacgtggtggccgccttcctggcccacatcagcagcagcgccgtggccatggccatcctgctgtggaccccctgccagctggccctggagctgctggccagcgccgccagactgctggccagcttcgtgctggtgaacctgaccggcctggtgctgctggcctgcgtgctggccgtgaccgtgaccgtgctgcaccccgacttcaccctgagactggccacccaggccctgagccagctgcacgccagacccagctaccacagactgagagaggacgtgatgagactgagcagactggccctgggcagcgaggcctggagaagagtgtggagcagaagcctgcagctggccagctggcccaacagaggcggcgcccccggcgccccccagggcgaccccatgagagtgttcagcgtgagaaccagaagacaggacaccctgcccgaggccggcagaagaagcgaggccgaggaggaggaggccagaaccatcagagtgacccccgtgagaggcagagagagactgaacgaggaggagccccccggcggccaggacccctggaagctgctgaaggagcaggaggagagaaagaagtgcgtgatctgccaggaccagagcaagaccgtgctgctgctgccctgcagacacctgtgcctgtgccaggcctgcaccgagatcctgatgagacaccccgtgtaccacagaaactgccccctgtgcagaagaggcatcctgcagaccctgaacgtgtacctgtag

SEQ ID NO: 97688 - DNA, 3219 bp, synthetic construct
  misc_feature 1..3219: note = Description of Artificial Sequence: Synthetic coding sequence
  source 1..3219: mol_type = other DNA
atgcccggcgaggaggaggagagagccttcctggtggccagagaggagctggccagcgccctgagaagagacagcggccaggccttcagcctggagcagctgagacccctgctggccagcagcctgcccctggccgccagatacctgcagctggacgccgccagactggtgagatgcaacgcccacggcgagcccagaaactacctgaacaccctgagcaccgccctgaacatcctggagaagtacggcagaaacctgctgagcccccagagacccagatactggagaggcgtgaagttcaacaaccccgtgttcagaagcaccgtggacgccgtgcagggcggcagagacgtgctgagactgtacggctacaccgaggagcagcccgacggcctgagcttccccgagggccaggaggagcccgacgagcaccaggtggccaccgtgaccctggaggtgctgctgctgagaaccgagctgagcctgctgctgcagaacacccaccccagacagcaggccctggagcagctgctggaggacaaggtggaggacgacatgctgcagctgagcgagttcgaccccctgctgagagagatcgcccccggccccctgaccacccccagcgtgcccggcagcacccccggcccctgcttcctgtgcggcagcgcccccggcaccctgcactgccccagctgcaagcaggccctgtgccccgcctgcgaccacctgttccacggccaccccagcagagcccaccacctgagacagaccctgcccggcgtgctgcagggcacccacctgagccccagcctgcccgccagcgcccagcccagaccccagagcaccagcctgctggccctgggcgacagcagcctgagcagccccaaccccgccagcgcccacctgccctggcactgcgccgcctgcgccatgctgaacgagccctgggccgtgctgtgcgtggcctgcgacagacccagaggctgcaagggcctgggcctgggcaccgagggcccccagggcaccggcggcctggagcccgacctggccagaggcagatgggcctgccagagctgcaccttcgagaacgaggccgccgccgtgctgtgcagcatctgcgagagacccagactggcccagccccccagcctggtggtggacagcagagacgccggcatctgcctgcagcccctgcagcagggcgacgccctgctggccagcgcccagagccaggtgtggtactgcatccactgcaccttctgcaacagcagccccggctgggtgtgcgtgatgtgcaacagaaccagcagccccatccccgcccagcacgcccccagaccctacgccagcagcctggagaagggcccccccaagcccggcccccccagaagactgagcgcccccctgcccagcagctgcggcgaccccgagaagcagagacaggacaagatgagagaggagggcctgcagctggtgagcatgatcagagagggcgaggccgccggcgcctgccccgaggagatcttcagcgccctgcagtacagcggcaccgaggtgcccctgcagtggctgagaagcgagctgccctacgtgctggagatggtggccgagctggccggccagcaggaccccggcctgggcgccttcagctgccaggaggccagaagagcctggctggacagacacggcaacctggacgaggccgtggaggagtgcgtgagaaccagaagaagaaaggtgcaggagctgcagagcctgggcttcggccccgaggagggcagcctgcaggccctgttccagcacggcggcgacgtgagcagagccctgaccgagctgcagagacagagactggagcccttcagacagagactgtgggacagcggccccgagcccacccccagctgggacggccccgacaagcagagcctggtgagaagactgctggccgtgtacgccctgcccagctggggcagagccgagctggccctgagcctgctgcaggagacccccagaaactacgagctgggcgacgtggtggaggccgtgagacacagccaggacagagccttcctgagaagactgctggcccaggagtgcgccgtgtgcggctgggccctgccccacaacagaatgcaggccctgaccagctgcgagtgcaccatctgccccgactgcttcagacagcacttcaccatcgccctgaaggagaagcacatcaccgacatggtgtgccccgcctgcggcagacccgacctgaccgacgacacccagctgctgagctacttcagcaccctggacatccagctgagagagagcctggagcccgacgcctacgccctgttccacaagaagctgaccgagggcgtgctgatgagagaccccaagttcctgtggtgcgcccagtgcagcttcggcttcatctacgagagagagcagctggaggccacctgcccccagtgccaccagaccttctgcgtgagatgcaagagacagtgggaggagcagcacagaggcagaagctgcgaggacttccagaactggaagagaatgaacgaccccgagtaccaggcccagggcctggccatgtacctgcaggagaacggcatcgactgccccaagtgcaagttcagctacgccctggccagaggcggctgcatgcacttccactgcacccagtgcagacaccagttctgcagcggctgctacaacgccttctacgccaagaacaagtgccccgagcccaactgcagagtgaagaagagcctgcacggccaccaccccagagactgcctgttctacctgagagactggaccgccctgagactgcagaagctgctgcaggacaacaacgtgatgttcaacaccgagccccccgccggcgccagagccgtgcccggcggcggctgcagagtgatcgagcagaaggaggtgcccaacggcctgagagacgaggcctgcggcaaggagacccccgccggctacgccggcctgtgccaggcccactacaaggagtacctggtgagcctgatcaacgcccacagcctggaccccgccaccctgtacgaggtggaggagctggagaccgccaccgagagatacctgcacgtgagaccccagcccctggccggcgaggacccccccgcctaccaggccagactgctgcagaagctgaccgaggaggtgcccctgggccagagcatccccagaagaagaaagtag

SEQ ID NO: 97689 - DNA, 1518 bp, synthetic construct
  misc_feature 1..1518: note = Description of Artificial Sequence: Synthetic coding sequence
  source 1..1518: mol_type = other DNA
atgcccggcgaggaggaggagagagccttcctggtggccagagaggagctggccagcgccctgagaagagacagcggccaggccttcagcctggagcagctgagacccctgctggccagcagcctgcccctggccgccagatacctgcagctggacgccgccagactggtgagatgcaacgcccacggcgagcccagaaactacctgaacaccctgcccacccccagctgggacggccccgacaagcagagcctggtgagaagactgctggccgtgtacgccctgcccagctggggcagagccgagctggccctgagcctgctgcaggagacccccagaaactacgagctgggcgacgtggtggaggccgtgagacacagccaggacagagccttcctgagaagactgctggcccaggagtgcgccgtgtgcggctgggccctgccccacaacagaatgcaggccctgaccagctgcgagtgcaccatctgccccgactgcttcagacagcacttcaccatcgccctgaaggagaagcacatcaccgacatggtgtgccccgcctgcggcagacccgacctgaccgacgacacccagctgctgagctacttcagcaccctggacatccagctgagagagagcctggagcccgacgcctacgccctgttccacaagaagctgaccgagggcgtgctgatgagagaccccaagttcctgtggtgcgcccagtgcagcttcggcttcatctacgagagagagcagctggaggccacctgcccccagtgccaccagaccttctgcgtgagatgcaagagacagtgcgaggacttccagaactggaagagaatgaacgaccccgagtaccaggcccagggcctggccatgtacctgcaggagaacggcatcgactgccccaagtgcaagttcagctacgccctggccagaggcggctgcatgcacttccactgcacccagtgcagacaccagttctgcagcggctgctacaacgccttctacgccaagaacaagtgccccgagcccaactgcagagtgaagaagagcctgcacggccaccaccccagagactgcctgttctacctgagagactggaccgccctgagactgcagaagctgctgcaggacaacaacgtgatgttcaacaccgagccccccgccggcgccagagccgtgcccggcggcggctgcagagtgatcgagcagaaggaggtgcccaacggcctgagagacgaggcctgcggcaaggagacccccgccggctacgccggcctgtgccaggcccactacaaggagtacctggtgagcctgatcaacgcccacagcctggaccccgccaccctgtacgaggtggaggagctggagaccgccaccgagagatacctgcacgtgagaccccagcccctggccggcgaggacccccccgcctaccaggccagactgctgcagaagctgaccgaggaggtgcccctgggccagagcatccccagaagaagaaagtag

SEQ ID NO: 97690 - DNA, 2766 bp, synthetic construct
  misc_feature 1..2766: note = Description of Artificial Sequence: Synthetic coding sequence
  source 1..2766: mol_type = other DNA
atggacctgtgcaccagagccggcgagcccagcctgacccagaacacccaccccagacagcaggccctggagcagctgctggaggacaaggtggaggacgacatgctgcagctgagcgagttcgaccccctgctgagagagatcgcccccggccccctgaccacccccagcgtgcccggcagcacccccggcccctgcttcctgtgcggcagcgcccccggcaccctgcactgccccagctgcaagcaggccctgtgccccgcctgcgaccacctgttccacggccaccccagcagagcccaccacctgagacagaccctgcccggcgtgctgcagggcacccacctgagccccagcctgcccgccagcgcccagcccagaccccagagcaccagcctgctggccctgggcgacagcagcctgagcagccccaaccccgccagcgcccacctgccctggcactgcgccgcctgcgccatgctgaacgagccctgggccgtgctgtgcgtggcctgcgacagacccagaggctgcaagggcctgggcctgggcaccgagggcccccagggcaccggcggcctggagcccgacctggccagaggcagatgggcctgccagagctgcaccttcgagaacgaggccgccgccgtgctgtgcagcatctgcgagagacccagactggcccagccccccagcctggtggtggacagcagagacgccggcatctgcctgcagcccctgcagcagggcgacgccctgctggccagcgcccagagccaggtgtggtactgcatccactgcaccttctgcaacagcagccccggctgggtgtgcgtgatgtgcaacagaaccagcagccccatccccgcccagcacgcccccagaccctacgccagcagcctggagaagggcccccccaagcccggcccccccagaagactgagcgcccccctgcccagcagctgcggcgaccccgagaagcagagacaggacaagatgagagaggagggcctgcagctggtgagcatgatcagagagggcgaggccgccggcgcctgccccgaggagatcttcagcgccctgcagtacagcggcaccgaggtgcccctgcagtggctgagaagcgagctgccctacgtgctggagatggtggccgagctggccggccagcaggaccccggcctgggcgccttcagctgccaggaggccagaagagcctggctggacagacacggcaacctggacgaggccgtggaggagtgcgtgagaaccagaagaagaaaggtgcaggagctgcagagcctgggcttcggccccgaggagggcagcctgcaggccctgttccagcacggcggcgacgtgagcagagccctgaccgagctgcagagacagagactggagcccttcagacagagactgtgggacagcggccccgagcccacccccagctgggacggccccgacaagcagagcctggtgagaagactgctggccgtgtacgccctgcccagctggggcagagccgagctggccctgagcctgctgcaggagacccccagaaactacgagctgggcgacgtggtggaggccgtgagacacagccaggacagagccttcctgagaagactgctggcccaggagtgcgccgtgtgcggctgggccctgccccacaacagaatgcaggccctgaccagctgcgagtgcaccatctgccccgactgcttcagacagcacttcaccatcgccctgaaggagaagcacatcaccgacatggtgtgccccgcctgcggcagacccgacctgaccgacgacacccagctgctgagctacttcagcaccctggacatccagctgagagagagcctggagcccgacgcctacgccctgttccacaagaagctgaccgagggcgtgctgatgagagaccccaagttcctgtggtgcgcccagtgcagcttcggcttcatctacgagagagagcagctggaggccacctgcccccagtgccaccagaccttctgcgtgagatgcaagagacagtgggaggagcagcacagaggcagaagctgcgaggacttccagaactggaagagaatgaacgaccccgagtaccaggcccagggcctggccatgtacctgcaggagaacggcatcgactgccccaagtgcaagttcagctacgccctggccagaggcggctgcatgcacttccactgcacccagtgcagacaccagttctgcagcggctgctacaacgccttctacgccaagaacaagtgccccgagcccaactgcagagtgaagaagagcctgcacggccaccaccccagagactgcctgttctacctgagagactggaccgccctgagactgcagaagctgctgcaggacaacaacgtgatgttcaacaccgagccccccgccggcgccagagccgtgcccggcggcggctgcagagtgatcgagcagaaggaggtgcccaacggcctgagagacgaggcctgcggcaaggagacccccgccggctacgccggcctgtgccaggcccactacaaggagtacctggtgagcctgatcaacgcccacagcctggaccccgccaccctgtacgaggtggaggagctggagaccgccaccgagagatacctgcacgtgagaccccagcccctggccggcgaggacccccccgcctaccaggccagactgctgcagaagctgaccgaggaggtgcccctgggccagagcatccccagaagaagaaagtag

SEQ ID NO: 97691 - DNA, 513 bp, synthetic construct
  misc_feature 1..513: note = Description of Artificial Sequence: Synthetic coding sequence
  source 1..513: mol_type = other DNA
atgcccggcgaggaggaggagagagccttcctggtggccagagaggagctggccagcgccctgagaagagacagcggccaggccttcagcctggagcagctgagacccctgctggccagcagcctgcccctggccgccagatacctgcagctggacgccgccagactggtgagatgcaacgcccacggcgagcccagaaactacctgaacaccctgagcaccgccctgaacatcctggagaagtacggcagaaacctgctgagcccccagagacccagatactggagaggcgtgaagttcaacaaccccgtgttcagaagcaccgtggacgccgtgcagggcggcagagacgtgctgagactgtacggctacaccgaggagcagcccgacggcctgagcttccccgagggccaggaggagcccgacgagcaccaggtggccaccgtgaccctggaggtgctgctgctgagaaccgagctgagcctgctgctgcagaacacccaccccagatag

SEQ ID NO: 97692 - DNA, 171 bp, synthetic construct
  misc_feature 1..171: note = Description of Artificial Sequence: Synthetic coding sequence
  source 1..171: mol_type = other DNA
atgcccggcgaggaggaggagagagccttcctggtggccagagaggagctggccagcgccctgagaagagacagcggccaggccttcagcctggagcagctgagacccctgctggccagcagcctgcccctggccgccagatacctgcagctggacgccgccagactgtag

SEQ ID NO: 97693 - DNA, 1122 bp, synthetic construct
  misc_feature 1..1122: note = Description of Artificial Sequence: Synthetic coding sequence
  source 1..1122: mol_type = other DNA
atgagaaaggccggcgccaccagcatgtgggccagctgctgcggcctgctgaacgaggtgatgggcaccggcgccgtgagaggccagcagagcgccttcgccggcgccaccggccccttcagattcacccccaaccccgagttcagcacctacccccccgccgccaccgagggccccaacatcgtgtgcaaggcctgcggcctgagcttcagcgtgttcagaaagaagcacgtgtgctgcgactgcaagaaggacttctgcagcgtgtgcagcgtgctgcaggagaacctgagaagatgcagcacctgccacctgctgcaggagaccgccttccagagaccccagctgatgagactgaaggtgaaggacctgagacagtacctgatcctgagaaacatccccatcgacacctgcagagagaaggaggacctggtggacctggtgctgtgccaccacggcctgggcagcgaggacgacatggacaccagcagcctgaacagcagcagaagccagaccagcagcttcttcaccagaagcttcttcagcaactacaccgcccccagcgccaccatgagcagcttccagggcgagctgatggacggcgaccagaccagcagaagcggcgtgcccgcccaggtgcagagcgagatcaccagcgccaacaccgaggacgacgacgacgacgacgacgaggacgacgacgacgaggaggagaacgccgaggacagaaaccccggcctgagcaaggagagagtgagagccagcctgagcgacctgagcagcctggacgacgtggagggcatgagcgtgagacagctgaaggagatcctggccagaaacttcgtgaactacagcggctgctgcgagaagtgggagctggtggagaaggtgaacagactgtacaaggagaacgaggagaaccagaagagctacggcgagagactgcagctgcaggacgaggaggacgacagcctgtgcagaatctgcatggacgccgtgatcgactgcgtgctgctggagtgcggccacatggtgacctgcaccaagtgcggcaagagaatgagcgagtgccccatctgcagacagtacgtggtgagagccgtgcacgtgttcaagagctag

SEQ ID NO: 97694 - DNA, 1119 bp, synthetic construct
  misc_feature 1..1119: note = Description of Artificial Sequence: Synthetic coding sequence
  source 1..1119: mol_type = other DNA
atgaaggccggcgccaccagcatgtgggccagctgctgcggcctgctgaacgaggtgatgggcaccggcgccgtgagaggccagcagagcgccttcgccggcgccaccggccccttcagattcacccccaaccccgagttcagcacctacccccccgccgccaccgagggccccaacatcgtgtgcaaggcctgcggcctgagcttcagcgtgttcagaaagaagcacgtgtgctgcgactgcaagaaggacttctgcagcgtgtgcagcgtgctgcaggagaacctgagaagatgcagcacctgccacctgctgcaggagaccgccttccagagaccccagctgatgagactgaaggtgaaggacctgagacagtacctgatcctgagaaacatccccatcgacacctgcagagagaaggaggacctggtggacctggtgctgtgccaccacggcctgggcagcgaggacgacatggacaccagcagcctgaacagcagcagaagccagaccagcagcttcttcaccagaagcttcttcagcaactacaccgcccccagcgccaccatgagcagcttccagggcgagctgatggacggcgaccagaccagcagaagcggcgtgcccgcccaggtgcagagcgagatcaccagcgccaacaccgaggacgacgacgacgacgacgacgaggacgacgacgacgaggaggagaacgccgaggacagaaaccccggcctgagcaaggagagagtgagagccagcctgagcgacctgagcagcctggacgacgtggagggcatgagcgtgagacagctgaaggagatcctggccagaaacttcgtgaactacagcggctgctgcgagaagtgggagctggtggagaaggtgaacagactgtacaaggagaacgaggagaaccagaagagctacggcgagagactgcagctgcaggacgaggaggacgacagcctgtgcagaatctgcatggacgccgtgatcgactgcgtgctgctggagtgcggccacatggtgacctgcaccaagtgcggcaagagaatgagcgagtgccccatctgcagacagtacgtggtgagagccgtgcacgtgttcaagagctag

SEQ ID NO: 97695 - DNA, 1122 bp, synthetic construct; identical to SEQ ID NO: 97693
  misc_feature 1..1122: note = Description of Artificial Sequence: Synthetic coding sequence
  source 1..1122: mol_type = other DNA

SEQ ID NO: 97696 - DNA, 1548 bp, synthetic construct
  misc_feature 1..1548: note = Description of Artificial Sequence: Synthetic coding sequence
  source 1..1548: mol_type = other DNA
atggcctgcaagatcagccccggcgccaacagcgccagcctgcccggccaccccaacaaggtgatctgcgagagagtgagactgcagagcctgttccccctgctgcccagcgaccagaacaccaccgtgcaggaggacgcccacttcaaggccttcttccagagcgaggacagccccagccccaagagacagagactgagccacagcgtgttcgactacaccagcgccagccccgcccccagcccccccatgagaccctgggagatgaccagcaacagacagccccccagcgtgagacccagccagcaccacttcagcggcgagagatgcaacacccccgccagaaacagaagaagcccccccgtgagaagacagagaggcagaagagacagactgagcagacacaacagcatcagccaggacgagaactaccaccacctgccctacgcccagcagcaggccatcgaggagcccagagccttccacccccccaacgtgagccccagactgctgcaccccgccgcccaccccccccagcagaacgccgtgatggtggacatccacgaccagctgcaccagggcaccgtgcccgtgagctacaccgtgaccaccgtggccccccacggcatccccctgtgcaccggccagcacatccccgcctgcagcacccagcaggtgcccggctgcagcgtggtgttcagcggccagcacctgcccgtgtgcagcgtgcccccccccatgctgcaggcctgcagcgtgcagcacctgcccgtgccctacgccgccttcccccccctgatcagcagcgaccccttcctgatccaccccccccacctgagcccccaccaccccccccacctgcccccccccggccagttcgtgcccttccagacccagcagagcagaagccccctgcagagaatcgagaacgaggtggagctgctgggcgagcacctgcccgtgggcggcttcacctacccccccagcgcccacccccccaccctgccccccagcgcccccctgcagttcctgacccacgaccccctgcaccaggaggtgagcttcggcgtgccctacccccccttcatgcccagaagactgaccggcagaagcagatacagaagccagcagcccatccccccccccccctaccaccccagcctgctgccctacgtgctgagcatgctgcccgtgccccccgccgtgggccccaccttcagcttcgagctggacgtggaggacggcgaggtggagaactacgaggccctgctgaacctggccgagagactgggcgaggccaagcccagaggcctgaccaaggccgacatcgagcagctgcccagctacagattcaaccccaacaaccaccagagcgagcagaccctgtgcgtggtgtgcatgtgcgacttcgagagcagacagctgctgagagtgctgccctgcaaccacgagttccacgccaagtgcgtggacaagtggctgaaggccaacagaacctgccccatctgcagagccgacgccagcgaggtgcacagagacagcgagtag

SEQ ID NO: 97697 - DNA, 1299 bp, synthetic construct
  misc_feature 1..1299: note = Description of Artificial Sequence: Synthetic coding sequence
  source 1..1299: mol_type = other DNA
atgagaccctgggagatgaccagcaacagacagccccccagcgtgagacccagccagcaccacttcagcggcgagagatgcaacacccccgccagaaacagaagaagcccccccgtgagaagacagagaggcagaagagacagactgagcagacacaacagcatcagccaggacgagaactaccaccacctgccctacgcccagcagcaggccatcgaggagcccagagccttccacccccccaacgtgagccccagactgctgcaccccgccgcccaccccccccagcagaacgccgtgatggtggacatccacgaccagctgcaccagggcaccgtgcccgtgagctacaccgtgaccaccgtggccccccacggcatccccctgtgcaccggccagcacatccccgcctgcagcacccagcaggtgcccggctgcagcgtggtgttcagcggccagcacctgcccgtgtgcagcgtgcccccccccatgctgcaggcctgcagcgtgcagcacctgcccgtgccctacgccgccttcccccccctgatcagcagcgaccccttcctgatccaccccccccacctgagcccccaccaccccccccacctgcccccccccggccagttcgtgcccttccagacccagcagagcagaagccccctgcagagaatcgagaacgaggtggagctgctgggcgagcacctgcccgtgggcggcttcacctacccccccagcgcccacccccccaccctgccccccagcgcccccctgcagttcctgacccacgaccccctgcaccaggaggtgagcttcggcgtgccctacccccccttcatgcccagaagactgaccggcagaagcagatacagaagccagcagcccatccccccccccccctaccaccccagcctgctgccctacgtgctgagcatgctgcccgtgccccccgccgtgggccccaccttcagcttcgagctggacgtggaggacggcgaggtggagaactacgaggccctgctgaacctggccgagagactgggcgaggccaagcccagaggcctgaccaaggccgacatcgagcagctgcccagctacagattcaaccccaacaaccaccagagcgagcagaccctgtgcgtggtgtgcatgtgcgacttcgagagcagacagctgctgagagtgctgccctgcaaccacgagttccacgccaagtgcgtggacaagtggctgaaggccaacagaacctgccccatctgcagagccgacgccagcgaggtgcacagagacagcgagtag

SEQ ID NO: 97698 - DNA, 1398 bp, synthetic construct
  misc_feature 1..1398: note = Description of Artificial Sequence: Synthetic coding sequence
  source 1..1398: mol_type = other DNA
atggcctgcaagagcgaggacagccccagccccaagagacagagactgagccacagcgtgttcgactacaccagcgccagccccgcccccagcccccccatgagaccctgggagatgaccagcaacagacagccccccagcgtgagacccagccagcaccacttcagcggcgagagatgcaacacccccgccagaaacagaagaagcccccccgtgagaagacagagaggcagaagagacagactgagcagacacaacagcatcagccaggacgagaactaccaccacctgccctacgcccagcagcaggccatcgaggagcccagagccttccacccccccaacgtgagccccagactgctgcaccccgccgcccaccccccccagcagaacgccgtgatggtggacatccacgaccagctgcaccagggcaccgtgcccgtgagctacaccgtgaccaccgtggccccccacggcatccccctgtgcaccggccagcacatccccgcctgcagcacccagcaggtgcccggctgcagcgtggtgttcagcggccagcacctgcccgtgtgcagcgtgcccccccccatgctgcaggcctgcagcgtgcagcacctgcccgtgccctacgccgccttcccccccctgatcagcagcgaccccttcctgatccaccccccccacctgagcccccaccaccccccccacctgcccccccccggccagttcgtgcccttccagacccagcagagcagaagccccctgcagagaatcgagaacgaggtggagctgctgggcgagcacctgcccgtgggcggcttcacctacccccccagcgcccacccccccaccctgccccccagcgcccccctgcagttcctgacccacgaccccctgcaccaggaggtgagcttcggcgtgccctacccccccttcatgcccagaagactgaccggcagaagcagatacagaagccagcagcccatccccccccccccctaccaccccagcctgctgccctacgtgctgagcatgctgcccgtgccccccgccgtgggccccaccttcagcttcgagctggacgtggaggacggcgaggtggagaactacgaggccctgctgaacctggccgagagactgggcgaggccaagcccagaggcctgaccaaggccgacatcgagcagctgcccagctacagattcaaccccaacaaccaccagagcgagcagaccctgtgcgtggtgtgcatgtgcgacttcgagagcagacagctgctgagagtgctgccctgcaaccacgagttccacgccaagtgcgtggacaagtggctgaaggccaacagaacctgccccatctgcagagccgacgccagcgaggtgcacagagacagcgagtag

SEQ ID NO: 97699 - DNA, 1299 bp, synthetic construct; identical to SEQ ID NO: 97697
  misc_feature 1..1299: note = Description of Artificial Sequence: Synthetic coding sequence
  source 1..1299: mol_type = other DNA

SEQ ID NO: 97700 - DNA, 1320 bp, synthetic construct
  misc_feature 1..1320: note = Description of Artificial Sequence: Synthetic coding sequence
  source 1..1320: mol_type = other DNA
atgcagcacacctgcacccagcagaagaaggtgacctacaagcacatcgccagattcagccccagaaacagactgtgccaggccgacgccgtgttcaacaacaacctggccggcttccagctgcagagcccccccgtgagaagacagagaggcagaagagacagactgagcagacacaacagcatcagccaggacgagaactaccaccacctgccctacgcccagcagcaggccatcgaggagcccagagccttccacccccccaacgtgagccccagactgctgcaccccgccgcccaccccccccagcagaacgccgtgatggtggacatccacgaccagctgcaccagggcaccgtgcccgtgagctacaccgtgaccaccgtggccccccacggcatccccctgtgcaccggccagcacatccccgcctgcagcacccagcaggtgcccggctgcagcgtggtgttcagcggccagcacctgcccgtgtgcagcgtgcccccccccatgctgcaggcctgcagcgtgcagcacctgcccgtgccctacgccgccttcccccccctgatcagcagcgaccccttcctgatccaccccccccacctgagcccccaccaccccccccacctgcccccccccggccagttcgtgcccttccagacccagcagagcagaagccccctgcagagaatcgagaacgaggtggagctgctgggcgagcacctgcccgtgggcggcttcacctacccccccagcgcccacccccccaccctgccccccagcgcccccctgcagttcctgacccacgaccccctgcaccaggaggtgagcttcggcgtgccctacccccccttcatgcccagaagactgaccggcagaagcagatacagaagccagcagcccatccccccccccccctaccaccccagcctgctgccctacgtgctgagcatgctgcccgtgccccccgccgtgggccccaccttcagcttcgagctggacgtggaggacggcgaggtggagaactacgaggccctgctgaacctggccgagagactgggcgaggccaagcccagaggcctgaccaaggccgacatcgagcagctgcccagctacagattcaaccccaacaaccaccagagcgagcagaccctgtgcgtggtgtgcatgtgcgacttcgagagcagacagctgctgagagtgctgccctgcaaccacgagttccacgccaagtgcgtggacaagtggctgaaggccaacagaacctgccccatctgcagagccgacgccagcgaggtgcacagagacagcgagtag

SEQ ID NO: 97701 - DNA, 999 bp, synthetic construct
  misc_feature 1..999: note = Description of Artificial Sequence: Synthetic coding sequence
  source 1..999: mol_type = other DNA
atggtggacatccacgaccagctgcaccagggcaccgtgcccgtgagctacaccgtgaccaccgtggccccccacggcatccccctgtgcaccggccagcacatccccgcctgcagcacccagcaggtgcccggctgcagcgtggtgttcagcggccagcacctgcccgtgtgcagcgtgcccccccccatgctgcaggcctgcagcgtgcagcacctgcccgtgccctacgccgccttcccccccctgatcagcagcgaccccttcctgatccaccccccccacctgagcccccaccaccccccccacctgcccccccccggccagttcgtgcccttccagacccagcagagcagaagccccctgcagagaatcgagaacgaggtggagctgctgggcgagcacctgcccgtgggcggcttcacctacccccccagcgcccacccccccaccctgccccccagcgcccccctgcagttcctgacccacgaccccctgcaccaggaggtgagcttcggcgtgccctacccccccttcatgcccagaagactgaccggcagaagcagatacagaagccagcagcccatccccccccccccctaccaccccagcctgctgccctacgtgctgagcatgctgcccgtgccccccgccgtgggccccaccttcagcttcgagctggacgtggaggacggcgaggtggagaactacgaggccctgctgaacctggccgagagactgggcgaggccaagcccagaggcctgaccaaggccgacatcgagcagctgcccagctacagattcaaccccaacaaccaccagagcgagcagaccctgtgcgtggtgtgcatgtgcgacttcgagagcagacagctgctgagagtgctgccctgcaaccacgagttccacgccaagtgcgtggacaagtggctgaaggccaacagaacctgccccatctgcagagccgacgccagcgaggtgcacagagacagcgagtag

SEQ ID NO: 97702 - DNA, 1320 bp, synthetic construct; identical to SEQ ID NO: 97700
  misc_feature 1..1320: note = Description of Artificial Sequence: Synthetic coding sequence
  source 1..1320: mol_type = other DNA

SEQ ID NO: 97703 - DNA, 1299 bp, synthetic construct; identical to SEQ ID NO: 97697
  misc_feature 1..1299: note = Description of Artificial Sequence: Synthetic coding sequence
  source 1..1299: mol_type = other DNA

SEQ ID NO: 97704 - DNA, 1263 bp, synthetic construct
  misc_feature 1..1263: note = Description of Artificial Sequence: Synthetic coding sequence
  source 1..1263: mol_type = other DNA
atgtggtggagagacctgaccagactgagactgtggctgaagagagaggccatccccggcgagggcagaaaggccgccaaggtgaacgccggcgtgggcgagaagggcatctacaccgccagcagcagaggcggcccccccagcgccagaagcaaggccgtgaccgtggtggccgagggcgccgccagcagaagctggctgagcatggacgcccccgagctgggccccggcctggtggagagactggagcagctggccacctgccccctgtgcggcggcagcttcgaggaccccgtgctgctggcctgcgagcacagcttctgcagagcctgcctggccagaagatggggcaccccccccgccaccggcaccgaggccagccccaccgcctgcccctgctgcggcctgccctgccccagaagaagcctgagaagcaacgtgagactggccgtggaggtgagaatcagcagagagctgagagagaagctggccgagcccggcgccagagccggcagaagaagaggcggcagaatccccaccatgggctgcctggacctgcccggcgaggacatgagaaagacctggagaagattcgaggtgcccaccagcaagagcagcaacagcgaggacgacctgcccgaggactaccccgtggtgaagaagatgctgcacagactgaccgccgacctgaccctggaccccggcaccgcccacagaagactgctgatcagcgccgacagaagaagcgtgcagctggccccccccggcacccccgccccccccgacggccccaagagattcgaccagctgcccgccgtgctgggcgcccagggcttcggcgccggcagacactgctgggaggtggagaccgccgacgccgccagctgcagagacagcagcggcgaggacgccgacgacgaggagagccactacgccgtgggcgccgccggcgagagcgtgcagagaaagggctgcgtgagactgtgccccgccggcgccgtgtgggccgtggagggcagaggcggcagactgtgggccctgaccgcccccgagcccaccctgctgggcggcgtggagcccccccccagaagaatcagagtggacctggactgggagagaggcagagtggccttctacgacggcagaagcctggacctgctgtacgccttccaggcccccggccccctgggcgagagaatcttccccctgttctgcacctgcgaccccagagcccccctgagaatcgtgcccgccgagagctag

SEQ ID NO: 97705 - DNA, 756 bp, synthetic construct
  misc_feature 1..756: note = Description of Artificial Sequence: Synthetic coding sequence
  source 1..756: mol_type = other DNA
atgtggtggagagacctgaccagactgagactgtggctgaagagagaggccatccccggcgagggcagaaaggccgccaaggtgaacgccggcgtgggcgagaagggcatctacaccgccagcagcagaggcggcccccccagcgccagaagcaaggccgtgaccgtggtggccgagggcgccgccagcagaagctggctgagcatggacgcccccgagctgggccccggcctggtggagagactggagcagctggccacctgccccctgtgcggcggcagcttcgaggaccccgtgctgctggcctgcgagcacagcttctgcagagcctgcctggccagaagatggggcaccccccccgccaccggcaccgaggccagccccaccgcctgcccctgctgcggcctgccctgccccagaagaagcctgagaagcaacgtgagactggccgtggaggtgagaatcagcagagagctgctgttcggcggcggcatcccccacagcttcctgggcacccacagccacgcccactgcagaagcatcaacagcaacccccacttcagacccaagatcatgagaccccacctggtgagcaccttccccagaccctgcagcaagcccaaccccttcctgcccagcggcagccagaacctgctgagccccaccgccaccaccgtgctgcccgacttcagccacagcaaccacagcagacccgccatgggcaacagacccagccccagcgtgctggtgaagtag

SEQ ID NO: 97706 - DNA, 1065 bp, synthetic construct
  misc_feature 1..1065: note = Description of Artificial Sequence: Synthetic coding sequence
  source 1..1065: mol_type = other DNA
atgtggtggagagacctgaccagactgagactgtggctgaagagagaggccatccccggcgagggcagaaaggccgccaaggtgaacgccggcgtgggcgagaagggcatctacaccgccagcagcagaggcggcccccccagcgccagaagcaaggccgtgaccgtggtggccgagggcgccgccagcagaagctggctgagcatggacgcccccgagctgggccccggcctggtggagagactggagcagctggccacctgccccctgtgcggcggcagcttcgaggaccccgtgctgctggcctgcgagcacagcttctgcagagcctgcctggccagaagatggggcaccccccccgccaccggcaccgaggccagccccaccgcctgcccctgctgcggcctgccctgccccagaagaagcctgagaagcaacgtgagactggccgtggaggtgagaatcagcagagagctgagagagaagctggccgagcccggcgccagagccggcagaagaagaggcggcagaatccccaccatgggctgcctggacctgcccggcgaggacatgagaaagacctggagaagattcgaggtgcccacccccaagagcagcaacagcgaggacgacctgcccgaggactaccccgtggtgaagaagatgctgcacagactgaccgccgacctgaccctggaccccggcaccgcccacagaagactgctgatcagcaccgacagaagaagcgtgcagctggccccccccggcacccccgccccccccgacggccccaagagattcgaccagctgcccgccgtgctgggcgcccagggcttcggcgccggcagacactgctgggaggtggagaccgccgacgccgccagctgcagagacagcagcggcgaggacgaggacgacgaggagagccactacgccgtgggcgccgccggcgagagcgtgcagagaaagggctgcgcccccggccccctgggcgagagaatcttccccctgttctgcacctgcgaccccagagcccccctgagaatcgtgcccgccgagagctag

SEQ ID NO: 97707 - DNA, 1065 bp, synthetic construct
  misc_feature 1..1065: note = Description of Artificial Sequence: Synthetic coding sequence
  source 1..1065: mol_type = other DNA
atgtggtggagagacctgaccagactgagactgtggctgaagagagaggccatccccggcgagggcagaaaggccgccaaggtgaacgccggcgtgggcgagaagggcatctacaccgccagcagcagaggcggcccccccagcgccagaagcaaggccgtgaccgtggtggccgagggcgccgccagcagaagctggctgagcatggacgcccccgagctgggccccggcctggtggagagactggagcagctggccacctgccccctgtgcggcggcagcttcgaggaccccgtgctgctggcctgcgagcacagcttctgcagagcctgcctggccagaagatggggcaccccccccgccaccggcaccgaggccagccccaccgcctgcccctgctgcggcctgccctgccccagaagaagcctgagaagcaacgtgagactggccgtggaggtgagaatcagcagagagctgagagagaagctggccgagcccggcgccagagccggcagaagaagaggcggcagaatccccaccatgggctgcctggacctgcccggcgaggacatgagaaagacctggagaagattcgaggtgcccaccagcaagagcagcaacagcgaggacgacctgcccgaggactaccccgtggtgaagaagatgctgcacagactgaccgccgacctgaccctggaccccggcaccgcccacagaagactgctgatcagcgccgacagaagaagcgtgcagctggccccccccggcacccccgccccccccgacggccccaagagattcgaccagctgcccgccgtgctgggcgcccagggcttcggcgccggcagacactgctgggaggtggagaccgccgacgccgccagctgcagagacagcagcggcgaggacgccgacgacgaggagagccactacgccgtgggcgccgccggcgagagcgtgcagagaaagggctgcgcccccggccccctgggcgagagaatcttccccctgttctgcacctgcgaccccagagcccccctgagaatcgtgcccgccgagagctag

SEQ ID NO: 97708 - DNA, 1263 bp, synthetic construct
  misc_feature 1..1263: note = Description of Artificial Sequence: Synthetic coding sequence
  source 1..1263: mol_type = other DNA
atgtggtggagagacctgaccagactgagactgtggctgaagagagaggccatccccggcgagggcagaaaggccgccaaggtgaacgccggcgtgggcgagaagggcatctacaccgccagcagcagaggcggcccccccagcgccagaagcaaggccgtgaccgtggtggccgagggcgccgccagcagaagctggctgagcatggacgcccccgagctgggccccggcctggtggagagactggagcagctggccacctgccccctgtgcggcggcagcttcgaggaccccgtgctgctggcctgcgagcacagcttctgcagagcctgcctggccagaagatggggcaccccccccgccaccggcaccgaggccagccccaccgcctgcccctgctgcggcctgccctgccccagaagaagcctgagaagcaacgtgagactggccgtggaggtgagaatcagcagagagctgagagagaagctggccgagcccggcgccagagccggcagaagaagaggcggcagaatccccaccatgggctgcctggacctgcccggcgaggacatgagaaagacctggagaagattcgaggtgcccacccccaagagcagcaacagcgaggacgacctgcccgaggactaccccgtggtgaagaagatgctgcacagactgaccgccgacctgaccctggaccccggcaccgcccacagaagactgctgatcagcaccgacagaagaagcgtgcagctggccccccccggcacccccgccccccccgacggccccaagagattcgaccagctgcccgccgtgctgggcgcccagggcttcggcgccggcagacactgctgggaggtggagaccgccgacgccgccagctgcagagacagcagcggcgaggacgaggacgacgaggagagccactacgccgtgggcgccgccggcgagagcgtgcagagaaagggctgcgtgagactgtgccccgccggcgccgtgtgggccgtggagggcagaggcggcagactgtgggccctgaccgcccccgagcccaccctgctgggcggcgtggagcccccccccagaagaatcagagtggacctggactgggagagaggcagagtggccttctacgacggcagaagcctggacctgctgtacgccttccaggcccccggccccctgggcgagagaatcttccccctgttctgcacctgcgaccccagagcccccctgagaatcgtgcccgccgagagctag

SEQ ID NO: 97709 - DNA, 1065 bp, synthetic construct
  misc_feature 1..1065: note = Description of Artificial Sequence: Synthetic coding sequence
  source 1..1065: mol_type = other DNA
atgtggtggagagacctgaccagactgagactgtggctgaagagagaggccatccccggcgagggcagaaaggccgccaaggtgaacgccggcgtgggcgagaagggcatctacaccgccagcagcagaggcggcccccccagcgccagaagcaaggccgtgaccgtggtggccgagggcgccgccagcagaagctggctgagcatggacgcccccgagctgggccccggcctggtggagagactggagcagctggccacctgccccctgtgcggcggcagcttcgaggaccccgtgctgctggcctgcgagcacagcttctgcagagcctgcctggccagaagatggggcaccccccccgccaccggcaccgaggccagccccaccgcctgcccctgctgcggcctgccctgccccagaagaagcctgagaagcaacgtgagactggccgtggaggtgagaatcagcagagagctgagagagaagctggccgagcccggcgccagagccggcagaagaagaggcggcagaatccccaccatgggctgcctggacctgcccggcgaggacatgagaaagacctggagaagattcgaggtgcccaccagcaagagcagcaacagcgaggacgacctgcccgaggactaccccgtggtgaagaagatgctgcacagactgaccgccgacctgaccctggaccccggcaccgcccacagaagactgctgatcagcgccgacagaagaagcgtgcagctggccccccccggcacccccgccccccccgacggccccaagagattcaaccagctgcccgccgtgctgggcgcccagggcttcggcgccggcagacactgctgggaggtggagaccgccgacgccgccagctgcagagacagcagcggcgaggacgccgacgacgaggagagccactacgccgtgggcgccgccggcgagagcgtgcagagaaagggctgcgcccccggccccctgggcgagagaatcttccccctgttctgcacctgcgaccccagagcccccctgagaatcgtgcccgccgagagctag

SEQ ID NO: 97710 - DNA, 1263 bp, synthetic construct
  misc_feature 1..1263: note = Description of Artificial Sequence: Synthetic coding sequence
  source 1..1263: mol_type = other DNA
atgtggtggagagacctgaccagactgagactgtggctgaagagagaggccatccccggcgagggcagaaaggccgccaaggtgaacgccggcgtgggcgagaagggcatctacaccgccagcagcagaggcggcccccccagcgccagaagcaaggccgtgaccgtggtggccgagggcgccgccagcagaagctggctgagcatggacgcccccgagctgggccccggcctggtggagagactggagcagctggccacctgccccctgtgcggcggcagcttcgaggaccccgtgctgctggcctgcgagcacagcttctgcagagcctgcctggccagaagatggggcaccccccccgccaccggcaccgaggccagccccaccgcctgcccctgctgcggcctgccctgccccagaagaagcctgagaagcaacgtgagactggccgtggaggtgagaatcagcagagagctgagagagaagctggccgagcccggcgccagagccggcagaagaagaggcggcagaatccccaccatgggctgcctggacctgcccggcgaggacatgagaaagacctggagaagattcgaggtgcccaccagcaagagcagcaacagcgaggacgacctgcccgaggactaccccgtggtgaagaagatgctgcacagactgaccgccgacctgaccctggaccccggcaccgcccacagaagactgctgatcagcgccgacagaagaagcgtgcagctggccccccccggcacccccgccccccccgacggccccaagagattcgaccagctgcccgccgtgctgggcgcccagggcttcggcgccggcagacactgctgggaggtggagaccgccgacgccgccagctgcagagacagcagcggcgaggacgccgacgacgaggagagccactacgccgtgggcgccgccggcgagagcgtgcagagaaagggctgcgtgagactgtgccccgccggcgccgtgtgggccgtgggcggcagaggcggcagactgtgggccctgaccgcccccgagcccaccctgctgggcggcgtggagcccccccccagaagaatcagagtggacctggactgggagagaggcagagtggccttctacgacggcagaagcctggacctgctgtacgccttccaggcccccggccccctgggcgagagaatcttccccctgttctgcacctgcgaccccagagcccccctgagaatcgtgcccgccgagagctag

SEQ ID NO: 97711 - DNA, 1263 bp, synthetic construct; identical to SEQ ID NO: 97704
  misc_feature 1..1263: note = Description of Artificial Sequence: Synthetic coding sequence
  source 1..1263: mol_type = other DNA

SEQ ID NO: 97712 - DNA, 1263 bp, synthetic construct; identical to SEQ ID NO: 97704
  misc_feature 1..1263: note = Description of Artificial Sequence: Synthetic coding sequence
  source 1..1263: mol_type = other DNA

SEQ ID NO: 97713 - DNA, 1065 bp, synthetic construct; identical to SEQ ID NO: 97707
  misc_feature 1..1065: note = Description of Artificial Sequence: Synthetic coding sequence
  source 1..1065: mol_type = other DNA

SEQ ID NO: 97714 - DNA, 1065 bp, synthetic construct; identical to SEQ ID NO: 97707
  misc_feature 1..1065: note = Description of Artificial Sequence: Synthetic coding sequence
  source 1..1065: mol_type = other DNA

SEQ ID NO: 97715 - DNA, 1065 bp, synthetic construct; identical to SEQ ID NO: 97707
  misc_feature 1..1065: note = Description of Artificial Sequence: Synthetic coding sequence
  source 1..1065: mol_type = other DNA

SEQ ID NO: 97716 - DNA, 1263 bp, synthetic construct
  misc_feature 1..1263: note = Description of Artificial Sequence: Synthetic coding sequence
  source 1..1263: mol_type = other DNA
atgtggtggagagacctgaccagactgagactgtggctgaagagagaggccatccccggcgagggcagaaaggccgccaaggtgaacgccggcgtgggcgagaagggcatctacaccgccagcagcagaggcggcccccccagcgccagaagcaaggccgtgaccgtggtggccgagggcgccgccagcagaagctggctgagcatggacgcccccgagctgggccccggcctggtggagagactggagcagctggccacctgccccctgtgcggcggcagcttcgaggaccccgtgctgctggcctgcgagcacagcttctgcagagcctgcctggccagaagatggggcaccccccccgccaccggcaccgaggccagccccaccgcctgcccctgctgcggcctgccctgccccagaagaagcctgagaagcaacgtgagactggccgtggaggtgagaatcagcagagagctgagagagaagctggccgagcccggcgccagagccggcagaagaagaggcggcagaatccccaccatgggctgcctggacctgcccggcgaggacatgagaaagacctggagaagattcgaggtgcccaccagcaagagcagcaacagcgaggacgacctgcccgaggactaccccgtggtgaagaagatgctgcacagactgaccgccgacctgaccctggaccccggcaccgcccacagaagactgctgatcagcgccgacagaagaagcgtgcagctggccccccccggcacccccgccccccccgacggccccaagagattcaaccagctgcccgccgtgctgggcgcccagggcttcggcgccggcagacactgctgggaggtggagaccgccgacgccgccagctgcagagacagcagcggcgaggacgccgacgacgaggagagccactacgccgtgggcgccgccggcgagagcgtgcagagaaagggctgcgtgagactgtgccccgccggcgccgtgtgggccgtggagggcagaggcggcagactgtgggccctgaccgcccccgagcccaccctgctgggcggcgtggagcccccccccagaagaatcagagtggacctggactgggagagaggcagagtggccttctacgacggcagaagcctggacctgctgtacgccttccaggcccccggccccctgggcgagagaatcttccccctgttctgcacctgcgaccccagagcccccctgagaatcgtgcccgccgagagctag

SEQ ID NO: 97717 - DNA, 1263 bp, synthetic construct; identical to SEQ ID NO: 97704
  misc_feature 1..1263: note = Description of Artificial Sequence: Synthetic coding sequence
  source 1..1263: mol_type = other DNA

SEQ ID NO: 97718 - DNA, 1065 bp, synthetic construct; identical to SEQ ID NO: 97707
  misc_feature 1..1065: note = Description of Artificial Sequence: Synthetic coding sequence
  source 1..1065: mol_type = other DNA

SEQ ID NO: 97719 - DNA, 1263 bp, synthetic construct; identical to SEQ ID NO: 97704
  misc_feature 1..1263: note = Description of Artificial Sequence: Synthetic coding sequence
  source 1..1263: mol_type = other DNA

SEQ ID NO: 97720 - DNA, 1065 bp, synthetic construct; identical to SEQ ID NO: 97707
  misc_feature 1..1065: note = Description of Artificial Sequence: Synthetic coding sequence
  source 1..1065: mol_type = other DNA

SEQ ID NO: 97721 - DNA, 756 bp, synthetic construct; identical to SEQ ID NO: 97705
  misc_feature 1..756: note = Description of Artificial Sequence: Synthetic coding sequence
  source 1..756: mol_type = other DNA

SEQ ID NO: 97722 - DNA, 756 bp, synthetic construct; identical to SEQ ID NO: 97705
  misc_feature 1..756: note = Description of Artificial Sequence: Synthetic coding sequence
  source 1..756: mol_type = other DNA

SEQ ID NO: 97723 - DNA, 756 bp, synthetic construct; identical to SEQ ID NO: 97705
  misc_feature 1..756: note = Description of Artificial Sequence: Synthetic coding sequence
  source 1..756: mol_type = other DNA

SEQ ID NO: 97724 - DNA, 756 bp, synthetic construct; identical to SEQ ID NO: 97705
  misc_feature 1..756: note = Description of Artificial Sequence: Synthetic coding sequence
  source 1..756: mol_type = other DNA

SEQ ID NO: 97725 - DNA, 756 bp, synthetic construct; identical to SEQ ID NO: 97705
  misc_feature 1..756: note = Description of Artificial Sequence: Synthetic coding sequence
  source 1..756: mol_type = other DNA

SEQ ID NO: 97726 - DNA, 756 bp, synthetic construct
  misc_feature 1..756: note = Description of Artificial Sequence: Synthetic coding sequence
  source 1..756: mol_type = other DNA
atgtggtggagagacctgaccagactgagactgtggctgaagagagaggccatccccggcgagggcagaaaggccgccaaggtgaacgccggcgtgggcgagaagggcatctacaccgccagcagcagaggcggcccccccagcgccagaagcaaggccgtgaccgtggtggccgagggcgccgccagcagaagctggctgagcatggacgcccccgagctgggccccggcctggtggagagactggagcagctggccacctgccccctgtgcggcggcagcttcgaggaccccgtgctgctggcctgcgagcacagcttctgcagagcctgcctggccagaagatggggcaccccccccgccaccggcaccgaggccagccccaccgcctgcccctgctgcggcctgccctgccccagaagaagcctgagaagcaacgtgagactggccgtggaggtgagaatcagcagagagctgctgttcggcggcggcatcccccacagcttcctgggcacccacagccacgcccactgcagaagcatcaacagcaacccccacttcagacccaagatcatgagaccccacctggtgagcaccttccccagaccctgcagcaagcccaaccccttcctgcccagcggcagccagaacctgctgagccccaccgccgccaccgtgctgcccgacttcagccacagcaaccacagcagacccgccatgggcaacagacccagccccagcgtgctggtgaagtag

SEQ ID NO: 97727 - DNA, 756 bp, synthetic construct
  misc_feature 1..756: note = Description of Artificial Sequence: Synthetic coding sequence
  source 1..756: mol_type = other DNA
atgtggtggagagacctgaccagactgagactgtggctgaagagagaggccatccccggcgagggcagaaaggccgccaaggtgaacgccggcgtgggcgagaagggcatctacaccgccagcagcagaggcggcccccccagcgccagaagcaaggccgtgaccgtggtggccgagggcgccgccagcagaagctggctgagcatggacgcccccgagctgggccccggcctggtggagagactggagcagctggccacctgccccctgtgcggcggcagcttcgaggaccccgtgctgctggcctgcgagcacagcttctgcagagcctgcctggccagaagatggggcaccccccccgccaccggcaccgaggccagccccaccgcctgcccctgctgcggcctgccctgccccagaagaagcctgagaagcaacgtgagactggccgtggaggtgagaatcagcagagagctgctgttcggcagaggcatcccccacagcttcctgggcacccacagccacgcccactgcagaagcatcaacagcaacccccacttcagacccaagatcatgagaccccacctggtgagcaccttcccccacccctgcagcaagcccaaccccttcctgcccagcggcagccagaacctgctgagccccaccgccaccaccgtgctgcccgacttcagccacagcaaccacagcagacccgccatgggcaacagacccagccccagcgtgctggtgaagtag

SEQ ID NO: 97728 - DNA, 573 bp, synthetic construct
  misc_feature 1..573: note = Description of Artificial Sequence: Synthetic coding sequence
  source 1..573: mol_type = other DNA
atgagcaccagaaagagaagaggcggcgccatcaacagcagacaggcccagaagagaaccagagaggccaccagcacccccgagatcagcctggaggccgagcccatcgagctggtggagaccgccggcgacgagatcgtggacctgacctgcgagagcctggagcccgtggtggtggacctgacccacaacgacagcgtggtgatcgtggacgagagaagaagacccagaagaaacgccagaagactgccccaggaccacgccgacagctgcgtggtgagcagcgacgacgaggagctgagcagagacagagacgtgtacgtgaccacccacacccccagaaacgccagagacgagggcgccaccggcctgagacccagcggcaccgtgagctgccccatctgcatggacggctacagcgagatcgtgcagaacggcagactgatcgtgagcaccgagtgcggccacgtgttctgcagccagtgcctgagagacagcctgaagaacgccaacacctgccccacctgcagaaagaagatcaaccacaagagataccaccccatctacatctag

SEQ ID NO: 97729 - DNA, 18 bp, synthetic construct
  misc_feature 1..18: note = Description of Artificial Sequence: Synthetic coding sequence
  source 1..18: mol_type = other DNA
atgagcaccagaaagtag

SEQ ID NO: 97730 - DNA, 573 bp, synthetic construct; identical to SEQ ID NO: 97728
  misc_feature 1..573: note = Description of Artificial Sequence: Synthetic coding sequence
  source 1..573: mol_type = other DNA

SEQ ID NO: 97731 - DNA, 573 bp, synthetic construct; identical to SEQ ID NO: 97728
  misc_feature 1..573: note = Description of Artificial Sequence: Synthetic coding sequence
  source 1..573: mol_type = other DNA

SEQ ID NO: 97732 - DNA, 165 bp, synthetic construct
  misc_feature 1..165: note = Description of Artificial Sequence: Synthetic coding sequence
  source 1..165: mol_type = other DNA
atgagcaccagaaagagaagaggcggcgccatcaacagcagacaggcccagaagagaaccagagaggccaccagcacccccgagatcagcctggaggccgagcccatcgagctggtggagaccgccggcgacgagatcgtggacctgacctgcgagagcctgtag

SEQ ID NO: 97733 - DNA, 345 bp, synthetic construct
  misc_feature 1..345: note = Description of Artificial Sequence: Synthetic coding sequence
  source 1..345: mol_type = other DNA
atgagcaccagaaagagaagaggcggcgccatcaacagcagacaggcccagaagagaaccagagaggccaccagcacccccgagatcagcctggaggccgagcccatcgagctggtggagaccgccggcgacgagatcgtggacctgacctgcgagagcctggagcccgtggtggtggacctgacccacaacgacagcgtggtggtgagcgtgggcgtgccccaggtgctgagcgtggtgcccagcgcctggaccgacacccagagaagctgcagaatggacgtgagcagcttcccccagaacgccgccatgagcagcgtggccagcgccagcgtgatcccctag

SEQ ID NO: 97734 - DNA, 573 bp, synthetic construct
  misc_feature 1..573: note = Description of Artificial Sequence: Synthetic coding sequence
  source 1..573: mol_type = other DNA
atgagcaccagaaagagaagaggcggcgccatcaacagcagacaggcccagaagagaaccagagaggccaccagcacccccgagatcagcctggaggccgagcccatcgagctggtggagaccgccggcgacgagatcgtggacctgacctgcgagagcctggagcccgtggtggtggacctgacccacaacgacagcgtggtggtgagcgacgagagaagaagacccagaagaaacgccagaagactgccccaggaccacgccgacagctgcgtggtgagcagcgacgacgaggagctgagcagagacagagacgtgtacgtgaccacccacacccccagaaacgccagagacgagggcgccaccggcctgagacccagcggcaccgtgagctgccccatctgcatggacggctacagcgagatcgtgcagaacggcagactgatcgtgagcaccgagtgcggccacgtgttctgcagccagtgcctgagagacagcctgaagaacgccaacacctgccccacctgcagaaagaagatcaaccacaagagataccaccccatctacatctag

SEQ ID NO: 97735 - DNA, 342 bp, synthetic construct
  misc_feature 1..342: note = Description of Artificial Sequence: Synthetic coding sequence
  source 1..342: mol_type = other DNA
atgagcaccagaaagagaagaggcggcgccatcaacagcagacaggcccagaagagaaccagagaggccaccagcacccccgagatcagcctggaggccgagcccatcgagctggtggagaccgccggcgacgagatcgtggacctgacctgcgagagcctggagcccgtggtggtggacctgacccacaacgacagcgtggtgatcgtggacggcccccaggtgctgagcgtggtgcccagcgcctggaccgacacccagagaagctgcagaatggacgtgagcagcttcccccagaacgccgccatgagcagcgtggccagcgccagcgtgatcccctag

SEQ ID NO: 97736 - DNA, 2352 bp, synthetic construct
  misc_feature 1..2352: note = Description of Artificial Sequence: Synthetic coding sequence
  source 1..2352: mol_type = other DNA
atgagcggcggccaccagctgcagctggccgccctgtggccctggctgctgatggccaccctgcaggccggcttcggcagaaccggcctggtgctggccgccgccgtggagagcgagagaagcgccgagcagaaggccatcatcagagtgatccccctgaagatggaccccaccggcaagctgaacctgaccctggagggcgtgttcgccggcgtggccgagatcacccccgccgagggcaagctgatgcagagccaccccctgtacctgtgcaacgccagcgacgacgacaacctggagcccggcttcatcagcatcgtgaagctggagagccccagaagagcccccagaccctgcctgagcctggccagcaaggccagaatggccggcgagagaggcgccagcgccgtgctgttcgacatcaccgaggacagagccgccgccgagcagctgcagcagcccctgggcctgacctggcccgtggtgctgatctggggcaacgacgccgagaagctgatggagttcgtgtacaagaaccagaaggcccacgtgagaatcgagctgaaggagccccccgcctggcccgactacgacgtgtggatcctgatgaccgtggtgggcaccatcttcgtgatcatcctggccagcgtgctgagaatcagatgcagacccagacacagcagacccgaccccctgcagcagagaaccgcctgggccatcagccagctggccaccagaagataccaggccagctgcagacaggccagaggcgagtggcccgacagcggcagcagctgcagcagcgcccccgtgtgcgccatctgcctggaggagttcagcgagggccaggagctgagagtgatcagctgcctgcacgagttccacagaaactgcgtggacccctggctgcaccagcacagaacctgccccctgtgcatgttcaacatcaccgagggcgacagcttcagccagagcctgggccccagcagaagctaccaggagcccggcagaagactgcacctgatcagacagcaccccggccacgcccactaccacctgcccgccgcctacctgctgggccccagcagaagcgccgtggccagaccccccagacccggccccttcctgcccagccaggagcccggcatgggccccagacaccacagattccccagagccgcccaccccagagcccccggcgagcagcagagactggccggcgcccagcacccctacgcccagggctggggcctgagccacctgcagagcaccagccagcaccccgccgcctgccccgtgcccctgagaagagccagaccccccgacagcagcggcagcggcgagagctactgcaccgagagaagcggctacctggccgacggccccgccagcgacagcagcagcggcccctgccacggcagcagcagcgacagcgtggtgaactgcaccgacatcagcctgcagggcgtgcacggcagcagcagcaccttctgcagcagcctgagcagcgacttcgaccccctggtgtactgcagccccaagggcgacccccagagagtggacatgcagcccagcgtgaccagcagacccagaagcctggacagcgtggtgcccaccggcgagacccaggtgagcagccacgtgcactaccacagacacagacaccaccactacaagaagagattccagtggcacggcagaaagcccggccccgagaccggcgtgccccagagcagaccccccatccccagaacccagccccagcccgagccccccagccccgaccagcaggtgaccagaagcaacagcgccgcccccagcggcagactgagcaacccccagtgccccagagccctgcccgagcccgcccccggccccgtggacgccagcagcatctgccccagcaccagcagcctgttcaacctgcagaagagcagcctgagcgccagacacccccagagaaagagaagaggcggccccagcgagcccacccccggcagcagaccccaggacgccaccgtgcaccccgcctgccagatcttcccccactacacccccagcgtggcctacccctggagccccgaggcccaccccctgatctgcggcccccccggcctggacaagagactgctgcccgagacccccggcccctgctacagcaacagccagcccgtgtggctgtgcctgacccccagacagcccctggagccccacccccccggcgagggccccagcgagtggagcagcgacaccgccgagggcagaccctgcccctacccccactgccaggtgctgagcgcccagcccggcagcgaggaggagctggaggagctgtgcgagcaggccgtgtag

SEQ ID NO: 97737 - DNA, 2229 bp, synthetic construct
  misc_feature 1..2229: note = Description of Artificial Sequence: Synthetic coding sequence
  source 1..2229: mol_type = other DNA
atgagcggcggccaccagctgcagctggccgccctgtggccctggctgctgatggccaccctgcaggccggcttcggcagaaccggcctggtgctggccgccgccgtggagagcgagagaagcgccgagcagaaggccatcatcagagtgatccccctgaagatggaccccaccggcaagctgaacctgaccctggagggcgtgttcgccggcgtggccgagatcacccccgccgagggcaagctgatgcaggccagaatggccggcgagagaggcgccagcgccgtgctgttcgacatcaccgaggacagagccgccgccgagcagctgcagcagcccctgggcctgacctggcccgtggtgctgatctggggcaacgacgccgagaagctgatggagttcgtgtacaagaaccagaaggcccacgtgagaatcgagctgaaggagccccccgcctggcccgactacgacgtgtggatcctgatgaccgtggtgggcaccatcttcgtgatcatcctggccagcgtgctgagaatcagatgcagacccagacacagcagacccgaccccctgcagcagagaaccgcctgggccatcagccagctggccaccagaagataccaggccagctgcagacaggccagaggcgagtggcccgacagcggcagcagctgcagcagcgcccccgtgtgcgccatctgcctggaggagttcagcgagggccaggagctgagagtgatcagctgcctgcacgagttccacagaaactgcgtggacccctggctgcaccagcacagaacctgccccctgtgcatgttcaacatcaccgagggcgacagcttcagccagagcctgggccccagcagaagctaccaggagcccggcagaagactgcacctgatcagacagcaccccggccacgcccactaccacctgcccgccgcctacctgctgggccccagcagaagcgccgtggccagaccccccagacccggccccttcctgcccagccaggagcccggcatgggccccagacaccacagattccccagagccgcccaccccagagcccccggcgagcagcagagactggccggcgcccagcacccctacgcccagggctggggcctgagccacctgcagagcaccagccagcaccccgccgcctgccccgtgcccctgagaagagccagaccccccgacagcagcggcagcggcgagagctactgcaccgagagaagcggctacctggccgacggccccgccagcgacagcagcagcggcccctgccacggcagcagcagcgacagcgtggtgaactgcaccgacatcagcctgcagggcgtgcacggcagcagcagcaccttctgcagcagcctgagcagcgacttcgaccccctggtgtactgcagccccaagggcgacccccagagagtggacatgcagcccagcgtgaccagcagacccagaagcctggacagcgtggtgcccaccggcgagacccaggtgagcagccacgtgcactaccacagacacagacaccaccactacaagaagagattccagtggcacggcagaaagcccggccccgagaccggcgtgccccagagcagaccccccatccccagaacccagccccagcccgagccccccagccccgaccagcaggtgaccagaagcaacagcgccgcccccagcggcagactgagcaacccccagtgccccagagccctgcccgagcccgcccccggccccgtggacgccagcagcatctgccccagcaccagcagcctgttcaacctgcagaagagcagcctgagcgccagacacccccagagaaagagaagaggcggccccagcgagcccacccccggcagcagaccccaggacgccaccgtgcaccccgcctgccagatcttcccccactacacccccagcgtggcctacccctggagccccgaggcccaccccctgatctgcggcccccccggcctggacaagagactgctgcccgagacccccggcccctgctacagcaacagccagcccgtgtggctgtgcctgacccccagacagcccctggagccccacccccccggcgagggccccagcgagtggagcagcgacaccgccgagggcagaccctgcccctacccccactgccaggtgctgagcgcccagcccggcagcgaggaggagctggaggagctgtgcgagcaggccgtgtag

SEQ ID NO: 97738 - DNA, 543 bp, synthetic construct
  misc_feature 1..543: note = Description of Artificial Sequence: Synthetic coding sequence
  source 1..543: mol_type = other DNA
atggccgccgccgaggaggaggacggcggccccgagggccccaacagagagagaggcggcgccggcgccaccttcgagtgcaacatctgcctggagaccgccagagaggccgtggtgagcgtgtgcggccacctgtactgctggccctgcctgcaccagtggctggagaccagacccgagagacaggagtgccccgtgtgcaaggccggcatcagcagagagaaggtggtgcccctgtacggcagaggcagccagaagccccaggaccccagactgaagaccccccccagaccccagggccagagacccgcccccgagagcagaggcggcttccagcccttcggcgacaccggcggcttccacttcagcttcggcgtgggcgccttccccttcggcttcttcaccaccgtgttcaacgcccacgagcccttcagaagaggcaccggcgtggacctgggccagggccaccccgccagcagctggcaggacagcctgttcctgttcctggccatcttcttcttcttctggctgctgagcatctag

SEQ ID NO: 97739 - DNA, 543 bp, synthetic construct; identical to SEQ ID NO: 97738
  misc_feature 1..543: note = Description of Artificial Sequence: Synthetic coding sequence
  source 1..543: mol_type = other DNA

SEQ ID NO: 97740 - DNA, 549 bp, synthetic construct
  misc_feature 1..549: note = Description of Artificial Sequence: Synthetic coding sequence
  source 1..549: mol_type = other DNA
atggccgccgccgaggaggaggacggcggccccgagggccccaacagagagagaggcggcgccggcgccaccttcgagtgcaacatctgcctggagaccgccagagaggccgtggtgagcgtgtgcggccacctgtactgctggccctgcctgcaccagtggctggagaccagacccgagagacaggagtgccccgtgtgcaaggccggcatcagcagagagaaggtggtgcccctgtacggcagaggcagccagaagccccaggaccccagactgaagaccccccccagaccccagggccagagacccgcccccgagagcagaggcggcttccagcccttcggcgacaccggcggcttccacttcagcttcggcgtgggcgccttccccttcggcttcttcaccaccgtgttcaacgcccacgagcccttcagaagaggcaccggccccttcagcaccagccccgccttcttccactacctgatcggcaacaccagcagagagttcagaggcagaatctacaacttctggctgcccagaaacctgtag

SEQ ID NO: 97741 - DNA, 543 bp, synthetic construct; identical to SEQ ID NO: 97738
  misc_feature 1..543: note = Description of Artificial Sequence: Synthetic coding sequence
  source 1..543: mol_type = other DNA

SEQ ID NO: 97742 - DNA, 543 bp, synthetic construct; identical to SEQ ID NO: 97738
  misc_feature 1..543: note = Description of Artificial Sequence: Synthetic coding sequence
  source 1..543: mol_type = other DNA

SEQ ID NO: 97743 - DNA, 543 bp, synthetic construct; identical to SEQ ID NO: 97738
  misc_feature 1..543: note = Description of Artificial Sequence: Synthetic coding sequence
  source 1..543: mol_type = other DNA

SEQ ID NO: 97744 - DNA, 543 bp, synthetic construct; identical to SEQ ID NO: 97738
  misc_feature 1..543: note = Description of Artificial Sequence: Synthetic coding sequence
  source 1..543: mol_type = other DNA

SEQ ID NO: 97745 - DNA, 543 bp, synthetic construct; identical to SEQ ID NO: 97738
  misc_feature 1..543: note = Description of Artificial Sequence: Synthetic coding sequence
  source 1..543: mol_type = other DNA

SEQ ID NO: 97746 - DNA, 549 bp, synthetic construct; identical to SEQ ID NO: 97740
  misc_feature 1..549: note = Description of Artificial Sequence: Synthetic coding sequence
  source 1..549: mol_type = other DNA

SEQ ID NO: 97747 - DNA, 549 bp, synthetic construct; identical to SEQ ID NO: 97740
  misc_feature 1..549: note = Description of Artificial Sequence: Synthetic coding sequence
  source 1..549: mol_type = other DNA

SEQ ID NO: 97748 - DNA, 549 bp, synthetic construct; identical to SEQ ID NO: 97740
  misc_feature 1..549: note = Description of Artificial Sequence: Synthetic coding sequence
  source 1..549: mol_type = other DNA

SEQ ID NO: 97749 - DNA, 549 bp, synthetic construct; identical to SEQ ID NO: 97740
  misc_feature 1..549: note = Description of Artificial Sequence: Synthetic coding sequence
  source 1..549: mol_type = other DNA

SEQ ID NO: 97750 - DNA, 549 bp, synthetic construct; identical to SEQ ID NO: 97740
  misc_feature 1..549: note = Description of Artificial Sequence: Synthetic coding sequence
  source 1..549: mol_type = other DNA

SEQ ID NO: 97751 - DNA, 549 bp, synthetic construct; identical to SEQ ID NO: 97740
  misc_feature 1..549: note = Description of Artificial Sequence: Synthetic coding sequence
  source 1..549: mol_type = other DNA

SEQ ID NO: 97752 - DNA, 342 bp, synthetic construct
  misc_feature 1..342: note = Description of Artificial Sequence: Synthetic coding sequence
  source 1..342: mol_type = other DNA
atggccgacgtggaggacggcgaggagacctgcgccctggccagccacagcggcagcagcggcagcaagagcggcggcgacaagatgttcagcctgaagaagtggaacgccgtggccatgtggagctgggacgtggagtgcgacacctgcgccatctgcagagtgcaggtgatggacgcctgcctgagatgccaggccgagaacaagcaggaggactgcgtggtggtgtggggcgagtgcaaccacagcttccacaactgctgcatgagcctgtgggtgaagcagaacaacagatgccccctgtgccagcaggactgggtggtgcagagaatcggcaagtag

SEQ ID NO: 97753 - DNA, 273 bp, synthetic construct
  misc_feature 1..273: note = Description of Artificial Sequence: Synthetic coding sequence
  source 1..273: mol_type = other DNA
atggccgacgtggaggacggcgaggagacctgcgccctggccagccacagcggcagcagcggcagcaagagcggcggcgacaagatgttcagcctgaagaagtggaacgccgtggccatgtggagctgggacgtggagtgcgacacctgcgccatctgcagagtgcagatgcccgtgctggacgtgaagctgaagaccaacaagagaaccgtgctgtggagcggcgagaacgtgatcatccccagcaccaccgccgcctgcccctgcggctag

SEQ ID NO: 97754 - DNA, 294 bp, synthetic construct
  misc_feature 1..294: note = Description of Artificial Sequence: Synthetic coding sequence
  source 1..294: mol_type = other DNA
atggccgacgtggaggacggcgaggagacctgcgccctggccagccacagcggcagcagcggcagcaagagcggcggcgacaagatgttcagcctgaagaagtggaacgccgtggccatgtggagctgggacgtggagtgcgacacctgcgccatctgcagagtgcaggtgatggtggtgtggggcgagtgcaaccacagcttccacaactgctgcatgagcctgtgggtgaagcagaacaacagatgccccctgtgccagcaggactgggtggtgcagagaatcggcaagtag

SEQ ID NO: 97755 - DNA, 1875 bp, synthetic construct
  misc_feature 1..1875: note = Description of Artificial Sequence: Synthetic coding sequence
  source 1..1875: mol_type = other DNA
atggagaacagcgacagcaacgacaagggcagcggcgaccagagcgccgcccagagaagaagccagatggacagactggacagagaggaggccttctaccagttcgtgaacaacctgagcgaggaggactacagactgatgagagacaacaacctgctgggcacccccggcgagagcaccgaggaggagctgctgagaagactgcagcagatcaaggagggcccccccccccagaacagcgacgagaacagaggcggcgacagcagcgacgacgtgagcaacggcgacagcatcatcgactggctgaacagcgtgagacagaccggcaacaccaccagaagcggccagagaggcaaccagagctggagagccgtgagcagaaccaaccccaacagcggcgacttcagattcagcctggagatcaacgtgaacagaaacaacggcagccagaacagcgagaacgagaacgagcccagcgccagaagaagcagcggcgagaacgtggagaacaacagccagagacaggtggagaaccccagaagcgagagcaccagcgccagacccagcagaagcgagagaaacagcaccgaggccctgaccgaggtgccccccaccagaggccagagaagagccagaagcagaagccccgaccacagaagaaccagagccagagccgagagaagcagaagccccctgcaccccatgagcgagatccccagaagaagccaccacagcatcagcagccagaccttcgagcaccccctggtgaacgagaccgagggcagcagcagaaccagacaccacgtgaccctgagacagcagatcagcggccccgagctgctgagcagaggcctgttcgccgccagcggcaccagaaacgccagccagggcgccggcagcagcgacaccgccgccagcggcgagagcaccggcagcggccagagaccccccaccatcgtgctggacctgcaggtgagaagagtgagacccggcgagtacagacagagagacagcatcgccagcagaaccagaagcagaagccagacccccaacaacaccgtgacctacgagagcgagagaggcggcttcagaagaaccttcagcagaagcgagagagccggcgtgagaacctacgtgagcaccatcagaatccccatcagaagaatcctgaacaccggcctgagcgagaccaccagcgtggccatccagaccatgctgagacagatcatgaccggcttcggcgagctgagctacttcatgtacagcgacagcgacagcgagcccaccggcagcgtgagcaacagaaacatggagagagccgagagcagaagcggcagaggcggcagcggcggcggcagcagcagcggcagcagcagcagcagcagcagcagcagcagcagcagcagcagcagcagcagcagcagcagccccagcagcagcagcggcggcgagagcagcgagaccagcagcgacctgttcgagggcagcaacgagggcagcagcagcagcggcagcagcggcgccagaagagagggcagacacagagcccccgtgaccttcgacgagagcggcagcctgcccttcctgagcctggcccagttcttcctgctgaacgaggacgacgacgaccagcccagaggcctgaccaaggagcagatcgacaacctggccatgagaagcttcggcgagaacgacgccctgaagacctgcagcgtgtgcatcaccgagtacaccgagggcaacaagctgagaaagctgccctgcagccacgagtaccacgtgcactgcatcgacagatggctgagcgagaacagcacctgccccatctgcagaagagccgtgctggccagcggcaacagagagagcgtggtgtag

SEQ ID NO: 97756 - DNA, 1875 bp, synthetic construct; identical to SEQ ID NO: 97755
  misc_feature 1..1875: note = Description of Artificial Sequence: Synthetic coding sequence
  source 1..1875: mol_type = other DNA

SEQ ID NO: 97757 - DNA, 954 bp, synthetic construct
  misc_feature 1..954: note = Description of Artificial Sequence: Synthetic coding sequence
  source 1..954: mol_type = other DNA
tgactgcccgcccccgccgccgccctgcccggcgcccccccccccccccccggcgtgagaggctaccccgccagagccagaggcctgcagggcgccagcggcggcgccagattccccagcagcctgagcctgcccgtgcccggcaagggcggctgggtggtgagcagagccaagttccccgccctggacagctgcgagatcaccaccgcccaccccagactgtgcttcgccgtgagcccccccttcagctgcagcctgcccctgcccagcctgttcccccacagccccctgctgggcagacccaagagacaggccaagcccgccgccgacgagggcttctgggactgcagcgtgtgcaccttcagaaacagcgccgaggccttcaagtgcagcatctgcgacgtgagaaagggcaccagcaccagaaagcccagaatcaacagccagctggtggcccagcaggtggcccagcagtacgccaccccccccccccccaagaaggagaagaaggagaaggtggagaagcaggacaaggagaagcccgagaaggacaaggagatcagccccagcgtgaccaagaagaacaccaacaagaagaccaagcccaagagcgacatcctgaaggacccccccagcgaggccaacagcatccagagcgccaacgccaccaccaagaccagcgagaccaaccacaccagcagacccagactgaagaacgtggacagaagcaccgcccagcagctggccgtgaccgtgggcaacgtgaccgtgatcatcaccgacttcaaggagaagaccagaagcagcagcaccagcagcagcaccgtgaccagcagcgccggcagcgagcagcagaaccagagcagcagcggcagcgagagcaccgacaagggcagcagcagaagcagcacccccaagggcgacatgagcgccgtgaacgacgagagcttctag

SEQ ID NO: 97758 - DNA, 456 bp, synthetic construct
  misc_feature 1..456: note = Description of Artificial Sequence: Synthetic coding sequence
  source 1..456: mol_type = other DNA
atggacagcgccgcctgcgccgccgccgccacccccgtgcccgccctggccctggccctggcccccgacctggcccaggcccccctggccctgcccggcctgctgagccccagctgcctgctgagcagcggccaggaggtgaacggcagcgagagaggcacctgcctgtggagaccctggctgagcagcaccaacgacagccccagacagatgagaaagctggtggacctggccgccggcggcgccaccgccgccgaggtgaccaaggccgagagcaagttccaccaccccgtgagactgttctggcccaagagcagaagcttcgactacctgtacagcgccggcgagatcctgctgcagaacttccccgtgcaggccaccatcaacctgtacgaggacagcgacagcgaggaggaggaggaggacgaggagcaggaggacgaggaggagaagtag

SEQ ID NO: 97759 - DNA, 315 bp, synthetic construct
  misc_feature 1..315: note = Description of Artificial Sequence: Synthetic coding sequence
  source 1..315: mol_type = other DNA
atggacagcgccgcctgcgccgccgccgccacccccgtgcccgccctggccctggccctggcccccgacctggcccaggcccccctggccctgcccggcctgctgagccccagctgcctgctgagcagcggccaggaggtgaacggcagcgagagactgttctggcccaagagcagaagcttcgactacctgtacagcgccggcgagatcctgctgcagaacttccccgtgcaggccaccatcaacctgtacgaggacagcgacagcgaggaggaggaggaggacgaggagcaggaggacgaggaggagaagtag

SEQ ID NO: 97760 - DNA, 213 bp, synthetic construct
  misc_feature 1..213: note = Description of Artificial Sequence: Synthetic coding sequence
  source 1..213: mol_type = other DNA
atgcccgacggccccggcatgaccgccgccagcggcaagctgtaccagttcagacaccccgtgagactgttctggcccaagagcaagtgctacgactacctgtaccaggaggccgaggccctgctgaagaacttccccatccaggccaccatcagcttctacgaggacagcgacagcgaggacgagatcgaggacctgacctgcgagaactag

SEQ ID NO: 97761 - DNA, 387 bp, synthetic construct
  misc_feature 1..387: note = Description of Artificial Sequence: Synthetic coding sequence
  source 1..387: mol_type = other DNA
atggagaacgccggcggcgccgagggcaccgagagcggcgccgccgcctgcgccgccaccgacggccccaccagaagagccggcgccgacagcggctacgccggcttctggagaccctgggtggacgccggcggcaagaaggaggaggagacccccaaccacgccgccgaggccatgcccgacggccccggcatgaccgccgccagcggcaagctgtaccagttcagacaccccgtgagactgttctggcccaagagcaagtgctacgactacctgtaccaggaggccgaggccctgctgaagaacttccccatccaggccaccatcagcttctacgaggacagcgacagcgaggacgagatcgaggacctgacctgcgagaactag

SEQ ID NO: 97762 - DNA, 444 bp, synthetic construct
  misc_feature 1..444: note = Description of Artificial Sequence: Synthetic coding sequence
  source 1..444: mol_type = other DNA
atggccgccgccgccgacagcttcagcggcggccccgccggcgtgagactgcccagaagcccccccctgaaggtgctggccgagcagctgagaagagacgccgagggcggccccggcgcctggagactgagcagagccgccgccggcagaggccccctggacctggccgccgtgtggatgcagggcagagtggtgatggccgacagaggcgaggccagactgagagaccccagcggcgacttcagcgtgagaggcctggagagagtgcccagaggcagaccctgcctggtgcccggcaagtacgtgatggtgatgggcgtggtgcaggcctgcagccccgagccctgcctgcaggccgtgaagatgaccgacctgagcgacaaccccatccacgagagcatgtgggagctggaggtggaggacctgcacagaaacatcccctag

SEQ ID NO: 97763 - DNA, 255 bp, synthetic construct
  misc_feature 1..255: note = Description of Artificial Sequence: Synthetic coding sequence
  source 1..255: mol_type = other DNA
atgaagcagacccaggtgggcagcctgttcagcctgggcatcagaaaccccgagcccggccccgtgagcggcaccgccgtgcccagacagctggcctggaagagcggcaagtacgtgatggtgatgggcgtggtgcaggcctgcagccccgagccctgcctgcaggccgtgaagatgaccgacctgagcgacaaccccatccacgagagcatgtgggagctggaggtggaggacctgcacagaaacatcccctag

SEQ ID NO: 97764 - DNA, 1431 bp, synthetic construct
  misc_feature 1..1431: note = Description of Artificial Sequence: Synthetic coding sequence
  source 1..1431: mol_type = other DNA
atggccaacagcgccaaggccgaggagtacgagaagatgagcctggagcaggccaaggccagcgtgaacagcgagaccgagagcagcttcaacatcaacgagaacaccaccgccagcggcaccggcctgagcgagaagaccagcgtgtgcagacaggtggacatcgccagaaagagaaaggagttcgaggacgacctggtgaaggagagcagcagctgcggcaaggacacccccagcaagaagagaaagctggaccccgagatcgtgcccgaggagaaggactgcggcgacgccgagggcaacagcaagaagagaaagagagagaccgaggacgtgcccaaggacaagagcagcaccggcgacggcacccagaacaagagaaagatcgccctggaggacgtgcccgagaagcagaagaacctggaggagggccacagcagcaccgtggccgcccactacaacgagctgcaggaggtgggcctggagaagagaagccagagcagaatcttctacctgagaaacttcaacaactggatgaagagcgtgctgatcggcgagttcctggagaaggtgagacagaagaagaagagagacatcaccgtgctggacctgggctgcggcaagggcggcgacctgctgaagtggaagaagggcagaatcaacaagctggtgtgcaccgacatcgccgacgtgagcgtgaagcagtgccagcagagatacgaggacatgaagaacagaagagacagcgagtacatcttcagcgccgagttcatcaccgccgacagcagcaaggagctgctgatcgacaagttcagagacccccagatgtgcttcgacatctgcagctgccagttcgtgtgccactacagcttcgagagctacgagcaggccgacatgatgctgagaaacgcctgcgagagactgagccccggcggctacttcatcggcaccacccccaacagcttcgagctgatcagaagactggaggccagcgagaccgagagcttcggcaacgagatctacaccgtgaagttccagaagaagggcgactaccccctgttcggctgcaagtacgacttcaacctggagggcgtggtggacgtgcccgagttcctggtgtacttccccctgctgaacgagatggccaagaagtacaacatgaagctggtgtacaagaagaccttcctggagttctacgaggagaagatcaagaacaacgagaacaagatgctgctgaagagaatgcaggccctggagccctaccccgccaacgagagcagcaagctggtgagcgagaaggtggacgactacgagcacgccgccaagtacatgaagaacagccaggtgagactgcccctgggcaccctgagcaagagcgagtgggaggccaccagcatctacctggtgttcgccttcgagaagcagcagtag

SEQ ID NO: 97765 - DNA, 1431 bp, synthetic construct; identical to SEQ ID NO: 97764
  misc_feature 1..1431: note = Description of Artificial Sequence: Synthetic coding sequence
  source 1..1431: mol_type = other DNA

SEQ ID NO: 97766 - DNA, 705 bp, synthetic construct
  misc_feature 1..705: note = Description of Artificial Sequence: Synthetic coding sequence
  source 1..705: mol_type = other DNA
atgaagaacagaagagacagcgagtacatcttcagcgccgagttcatcaccgccgacagcagcaaggagctgctgatcgacaagttcagagacccccagatgtgcttcgacatctgcagctgccagttcgtgtgccactacagcttcgagagctacgagcaggccgacatgatgctgagaaacgcctgcgagagactgagccccggcggctacttcatcggcaccacccccaacagcttcgagctgatcagaagactggaggccagcgagaccgagagcttcggcaacgagatctacaccgtgaagttccagaagaagggcgactaccccctgttcggctgcaagtacgacttcaacctggagggcgtggtggacgtgcccgagttcctggtgtacttccccctgctgaacgagatggccaagaagtacaacatgaagctggtgtacaagaagaccttcctggagttctacgaggagaagatcaagaacaacgagaacaagatgctgctgaagagaatgcaggccctggagccctaccccgccaacgagagcagcaagctggtgagcgagaaggtggacgactacgagcacgccgccaagtacatgaagaacagccaggtgagactgcccctgggcaccctgagcaagagcgagtgggaggccaccagcatctacctggtgttcgccttcgagaagcagcagtag

SEQ ID NO: 97767 - DNA, 1431 bp, synthetic construct; identical to SEQ ID NO: 97764
  misc_feature 1..1431: note = Description of Artificial Sequence: Synthetic coding sequence
  source 1..1431: mol_type = other DNA

SEQ ID NO: 97768 - DNA, 390 bp, synthetic construct
  misc_feature 1..390: note = Description of Artificial Sequence: Synthetic coding sequence
  source 1..390: mol_type = other DNA
atgaagagcgtgctgatcggcgagttcctggagaaggtgagacagaagaagaagagagacatcaccgtgctggacctgggctgcggcaagggcggcgacctgctgaagtggaagaagggcagaatcaacaagctggtgtgcaccgacatcgccgacgtgagcgtgaagcagtgccagcagagatacgaggacatgaagaacagaagagacagcgagtacatcttcagcgccgagttcatcaccgccgacagcagcaaggagctgctgatcgacaagttcagagacccccagatgtgcttcgacatctgcagctgccagttcgtgtgccactacagcttcgagagctacgagcaggccgacatgatgctgagaaacgcctgcggcacctag

SEQ ID NO: 97769 - DNA, 468 bp, synthetic construct
  misc_feature 1..468: note = Description of Artificial Sequence: Synthetic coding sequence
  source 1..468: mol_type = other DNA
atggcccccagaacctggtgccccgccggcatcttcggcctgttctgccccctgaccctggcctgcagcagcctgaccatcgccctgaccgactgccagcccatcatcctggtgagccccaccctgagcctgtggatggtggtgagaagcgtgtggatcatgcaggccagcctgctgggcgagcccgaggaggtggccctgggccccatgggcgtggtggccgccaccctggaggtggtgggcaccagagccatgggcgtggccggcatcatgaccgtggacctggagggcatggacatggacatggacgtgcccgagaccatcatggccgagaccagagtggtgatgaccgccacccaggaggagatcaccgagaccatcatgaccaccgagatgagacacgcccacaacatcggcgagacctggatcagcgccctgagcgagcccgtgtgccacaccctgagctag

SEQ ID NO: 97770 - DNA, 474 bp, synthetic construct
  misc_feature 1..474: note = Description of Artificial Sequence: Synthetic coding sequence
  source 1..474: mol_type = other DNA
atgagcagcgaggagggcaagctgttcgtgggcggcctgaacttcaacaccgacgagcaggccctggaggaccacttcagcagcttcggccccatcagcgaggtggtggtggtgaaggacagagagacccagagaagcagaggcttcggcttcatcaccttcaccaaccccgagcacgccagcgtggccatgagagccatgaacggcgagagcctggacggcagacagatcagagtggaccacgccggcaagagcgccagaggcaccagaggcggcggcttcggcgcccacggcagaggcagaagctacagcagaggcggcggcgaccagggctacggcagcggcagatactacgacagcagacccggcggctacggctacggctacggcagaagcagagactacaacggcagaaaccagggcggctacgacagatacagcggcggcaactacagagacaactacgacaactag

SEQ ID NO: 97771 - DNA, 474 bp, synthetic construct; identical to SEQ ID NO: 97770
  misc_feature 1..474: note = Description of Artificial Sequence: Synthetic coding sequence
  source 1..474: mol_type = other DNA

SEQ ID NO: 97772 - DNA, 510 bp, synthetic construct
  misc_feature 1..510: note = Description of Artificial Sequence: Synthetic coding sequence
  source 1..510: mol_type = other DNA
atggcccccagaacctggtgccccgccggcatcttcggcctgttctgccccctgaccctggcctgcagcagcctgaccatcgccctgaccgactgccagcccatcatcctggtgagccccaccctgagcctgtggatggtggtgagaagcgtgtggatcatgcaggccagcctgctgggcgagcccgaggaggtggccctgggccccatgggcgtggtggccgccaccctggaggtggtgggcaccagagccatgggcgtggccggcatcatgaccgtggacctggagggcatggacatggacatggacgtgcccgagaccatcatggccgagaccagagtggtgatgaccgccacccaggaggagatcaccgagaccatcatgaccaccgagatgagacacgcccacaacatcgacacccagggcatcatcagcgaccccggcagcagcttccagatggccgtgttcatcaaggtgttcggcgccgcccccaagcacctgatcctgtag

SEQ ID NO: 97773 - DNA, 2559 bp, synthetic construct
  misc_feature 1..2559: note = Description of Artificial Sequence: Synthetic coding sequence
  source 1..2559: mol_type = other DNA
atggagtacgagagaagaggcggcagaggcgacagaaccggcagatacggcgccaccgacagaagccaggacgacggcggcgagaacagaagcagagaccacgactacagagacatggactacagaagctaccccagagagtacggcagccaggagggcaagcacgactacgacgacagcagcgaggagcagagcgccgagatcagaggccagctgcagagccacggcgtgcaggccagagaggtgagactgatgagaaacaagagcagcggccagagcagaggcttcgccttcgtggagttcagccacctgcaggacgccaccagatggatggaggccaaccagcacagcctgaacatcctgggccagaaggtgagcatgcactacagcgaccccaagcccaagatcaacgaggactggctgtgcaacaagtgcggcgtgcagaacttcaagagaagagagaagtgcttcaagtgcggcgtgcccaagagcgaggccgagcagaagctgcccctgggcaccagactggaccagcagaccctgcccctgggcggcagagagctgagccagggcctgctgcccctgccccagccctaccaggcccagggcgtgctggccagccaggccctgagccagggcagcgagcccagcagcgagaacgccaacgacaccatcatcctgagaaacctgaacccccacagcaccatggacagcatcctgggcgccctggccccctacgccgtgctgagcagcagcaacgtgagagtgatcaaggacaagcagacccagctgaacagaggcttcgccttcatccagctgagcaccatcgaggccgcccagctgctgcagatcctgcaggccctgcacccccccctgaccatcgacggcaagaccatcaacgtggagttcgccaagggcagcaagagagacatggccagcaacgagggcagcagaatcagcgccgccagcgtggccagcaccgccatcgccgccgcccagtgggccatcagccaggccagccagggcggcgagggcacctgggccaccagcgaggagccccccgtggactacagctactaccagcaggacgagggctacggcaacagccagggcaccgagagcagcctgtacgcccacggctacctgaagggcaccaagggccccggcatcaccggcaccaagggcgaccccaccggcgccggccccgaggccagcctggagcccggcgccgacagcgtgagcatgcaggccttcagcagagcccagcccggcgccgcccccggcatctaccagcagagcgccgaggccagcagcagccagggcaccgccgccaacagccagagctacaccatcatgagccccgccgtgctgaagagcgagctgcagagccccacccaccccagcagcgccctgccccccgccaccagccccaccgcccaggagagctacagccagtaccccgtgcccgacgtgagcacctaccagtacgacgagaccagcggctactactacgacccccagaccggcctgtactacgaccccaacagccagtactactacaacgcccagagccagcagtacctgtactgggacggcgagagaagaacctacgtgcccgccctggagcagagcgccgacggccacaaggagaccggcgcccccagcaaggagggcaaggagaagaaggagaagcacaagaccaagaccgcccagcagatcgccaaggacatggagagatgggccagaagcctgaacaagcagaaggagaacttcaagaacagcttccagcccatcagcagcctgagagacgacgagagaagagagagcgccaccgccgacgccggctacgccatcctggagaagaagggcgccctggccgagagacagcacaccagcatggacctgcccaagctggccagcgacgacagacccagcccccccagaggcctggtggccgcctacagcggcgagagcgacagcgaggaggagcaggagagaggcggccccgagagagaggagaagctgaccgactggcagaagctggcctgcctgctgtgcagaagacagttccccagcaaggaggccctgatcagacaccagcagctgagcggcctgcacaagcagaacctggagatccacagaagagcccacctgagcgagaacgagctggaggccctggagaagaacgacatggagcagatgaagtacagagacagagccgccgagagaagagagaagtacggcatccccgagccccccgagcccaagagaagaaagtacggcggcatcagcaccgccagcgtggacttcgagcagcccaccagagacggcctgggcagcgacaacatcggcagcagaatgctgcaggccatgggctggaaggagggcagcggcctgggcagaaagaagcagggcatcgtgacccccatcgaggcccagaccagagtgagaggcagcggcctgggcgccagaggcagcagctacggcgtgaccagcaccgagagctacaaggagaccctgcacaagaccatggtgaccagattcaacgaggcccagtag

SEQ ID NO: 97774 - DNA, 2562 bp, synthetic construct
  misc_feature 1..2562: note = Description of Artificial Sequence: Synthetic coding sequence
  source 1..2562: mol_type = other DNA
atggagtacgagagaagaggcggcagaggcgacagaaccggcagatacggcgccaccgacagaagccaggacgacggcggcgagaacagaagcagagaccacgactacagagacatggactacagaagctaccccagagagtacggcagccaggagggcaagcacgactacgacgacagcagcgaggagcagagcgccgagatcagaggccagctgcagagccacggcgtgcaggccagagaggtgagactgatgagaaacaagagcagcggccagagcagaggcttcgccttcgtggagttcagccacctgcaggacgccaccagatggatggaggccaaccagcacagcctgaacatcctgggccagaaggtgagcatgcactacagcgaccccaagcccaagatcaacgaggactggctgtgcaacaagtgcggcgtgcagaacttcaagagaagagagaagtgcttcaagtgcggcgtgcccaagagcgaggccgagcagaagctgcccctgggcaccagactggaccagcagaccctgcccctgggcggcagagagctgagccagggcctgctgcccctgccccagccctaccaggcccagggcgtgctggccagccaggccctgagccagggcagcgagcccagcagcgagaacgccaacgacaccatcatcctgagaaacctgaacccccacagcaccatggacagcatcctgggcgccctggccccctacgccgtgctgagcagcagcaacgtgagagtgatcaaggacaagcagacccagctgaacagaggcttcgccttcatccagctgagcaccatcgtggaggccgcccagctgctgcagatcctgcaggccctgcacccccccctgaccatcgacggcaagaccatcaacgtggagttcgccaagggcagcaagagagacatggccagcaacgagggcagcagaatcagcgccgccagcgtggccagcaccgccatcgccgccgcccagtgggccatcagccaggccagccagggcggcgagggcacctgggccaccagcgaggagccccccgtggactacagctactaccagcaggacgagggctacggcaacagccagggcaccgagagcagcctgtacgcccacggctacctgaagggcaccaagggccccggcatcaccggcaccaagggcgaccccaccggcgccggccccgaggccagcctggagcccggcgccgacagcgtgagcatgcaggccttcagcagagcccagcccggcgccgcccccggcatctaccagcagagcgccgaggccagcagcagccagggcaccgccgccaacagccagagctacaccatcatgagccccgccgtgctgaagagcgagctgcagagccccacccaccccagcagcgccctgccccccgccaccagccccaccgcccaggagagctacagccagtaccccgtgcccgacgtgagcacctaccagtacgacgagaccagcggctactactacgacccccagaccggcctgtactacgaccccaacagccagtactactacaacgcccagagccagcagtacctgtactgggacggcgagagaagaacctacgtgcccgccctggagcagagcgccgacggccacaaggagaccggcgcccccagcaaggagggcaaggagaagaaggagaagcacaagaccaagaccgcccagcagatcgccaaggacatggagagatgggccagaagcctgaacaagcagaaggagaacttcaagaacagcttccagcccatcagcagcctgagagacgacgagagaagagagagcgccaccgccgacgccggctacgccatcctggagaagaagggcgccctggccgagagacagcacaccagcatggacctgcccaagctggccagcgacgacagacccagcccccccagaggcctggtggccgcctacagcggcgagagcgacagcgaggaggagcaggagagaggcggccccgagagagaggagaagctgaccgactggcagaagctggcctgcctgctgtgcagaagacagttccccagcaaggaggccctgatcagacaccagcagctgagcggcctgcacaagcagaacctggagatccacagaagagcccacctgagcgagaacgagctggaggccctggagaagaacgacatggagcagatgaagtacagagacagagccgccgagagaagagagaagtacggcatccccgagccccccgagcccaagagaagaaagtacggcggcatcagcaccgccagcgtggacttcgagcagcccaccagagacggcctgggcagcgacaacatcggcagcagaatgctgcaggccatgggctggaaggagggcagcggcctgggcagaaagaagcagggcatcgtgacccccatcgaggcccagaccagagtgagaggcagcggcctgggcgccagaggcagcagctacggcgtgaccagcaccgagagctacaaggagaccctgcacaagaccatggtgaccagattcaacgaggcccagtag

SEQ ID NO: 97775 - DNA, 2793 bp, synthetic construct
  misc_feature 1..2793: note = Description of Artificial Sequence: Synthetic coding sequence
  source 1..2793: mol_type = other DNA
atggagtacgagagaagaggcggcagaggcgacagaaccggcagatacggcgccaccgacagaagccaggacgacggcggcgagaacagaagcagagaccacgactacagagacatggactacagaagctaccccagagagtacggcagccaggagggcaagcacgactacgacgacagcagcgaggagcagagcgccgaggacagctacgaggccagccccggcagcgagacccagagaagaagaagaagaagacacagacacagccccaccggcccccccggcttccccagagacggcgactacagagaccaggactacagaaccgagcagggcgaggaggaggaggaggaggaggacgaggaggaggaggagaaggccagcaacatcgtgatgctgagaatgctgccccaggccgccaccgaggacgacatcagaggccagctgcagagccacggcgtgcaggccagagaggtgagactgatgagaaacaagagcagcggccagagcagaggcttcgccttcgtggagttcagccacctgcaggacgccaccagatggatggaggccaaccagcacagcctgaacatcctgggccagaaggtgagcatgcactacagcgaccccaagcccaagatcaacgaggactggctgtgcaacaagtgcggcgtgcagaacttcaagagaagagagaagtgcttcaagtgcggcgtgcccaagagcgaggccgagcagaagctgcccctgggcaccagactggaccagcagaccctgcccctgggcggcagagagctgagccagggcctgctgcccctgccccagccctaccaggcccagggcgtgctggccagccaggccctgagccagggcagcgagcccagcagcgagaacgccaacgacaccatcatcctgagaaacctgaacccccacagcaccatggacagcatcctgggcgccctggccccctacgccgtgctgagcagcagcaacgtgagagtgatcaaggacaagcagacccagctgaacagaggcttcgccttcatccagctgagcaccatcgtggaggccgcccagctgctgcagatcctgcaggccctgcacccccccctgaccatcgacggcaagaccatcaacgtggagttcgccaagggcagcaagagagacatggccagcaacgagggcagcagaatcagcgccgccagcgtggccagcaccgccatcgccgccgcccagtgggccatcagccaggccagccagggcggcgagggcacctgggccaccagcgaggagccccccgtggactacagctactaccagcaggacgagggctacggcaacagccagggcaccgagagcagcctgtacgcccacggctacctgaagggcaccaagggccccggcatcaccggcaccaagggcgaccccaccggcgccggccccgaggccagcctggagcccggcgccgacagcgtgagcatgcaggccttcagcagagcccagcccggcgccgcccccggcatctaccagcagagcgccgaggccagcagcagccagggcaccgccgccaacagccagagctacaccatcatgagccccgccgtgctgaagagcgagctgcagagccccacccaccccagcagcgccctgccccccgccaccagccccaccgcccaggagagctacagccagtaccccgtgcccgacgtgagcacctaccagtacgacgagaccagcggctactactacgacccccagaccggcctgtactacgaccccaacagccagtactactacaacgcccagagccagcagtacctgtactgggacggcgagagaagaacctacgtgcccgccctggagcagagcgccgacggccacaaggagaccggcgcccccagcaaggagggcaaggagaagaaggagaagcacaagaccaagaccgcccagcagatcgccaaggacatggagagatgggccagaagcctgaacaagcagaaggagaacttcaagaacagcttccagcccatcagcagcctgagagacgacgagagaagagagagcgccaccgccgacgccggctacgccatcctggagaagaagggcgccctggccgagagacagcacaccagcatggacctgcccaagctggccagcgacgacagacccagcccccccagaggcctggtggccgcctacagcggcgagagcgacagcgaggaggagcaggagagaggcggccccgagagagaggagaagctgaccgactggcagaagctggcctgcctgctgtgcagaagacagttccccagcaaggaggccctgatcagacaccagcagctgagcggcctgcacaagcagaacctggagatccacagaagagcccacctgagcgagaacgagctggaggccctggagaagaacgacatggagcagatgaagtacagagacagagccgccgagagaagagagaagtacggcatccccgagccccccgagcccaagagaagaaagtacggcggcatcagcaccgccagcgtggacttcgagcagcccaccagagacggcctgggcagcgacaacatcggcagcagaatgctgcaggccatgggctggaaggagggcagcggcctgggcagaaagaagcagggcatcgtgacccccatcgaggcccagaccagagtgagaggcagcggcctgggcgccagaggcagcagctacggcgtgaccagcaccgagagctacaaggagaccctgcacaagaccatggtgaccagattcaacgaggcccagtag

SEQ ID NO: 97776 - DNA, 2010 bp, synthetic construct
  misc_feature 1..2010: note = Description of Artificial Sequence: Synthetic coding sequence
  source 1..2010: mol_type = other DNA
atgaagatcttcgtgggcaacgtggacggcgccgacaccacccccgaggagctggccgccctgttcgccccctacggcaccgtgatgagctgcgccgtgatgaagcagttcgccttcgtgcacatgagagagaacgccggcgccctgagagccatcgaggccctgcacggccacgagctgagacccggcagagccctggtggtggagatgagcagacccagacccctgaacacctggaagatcttcgtgggcaacgtgagcgccgcctgcaccagccaggagctgagaagcctgttcgagagaagaggcagagtgatcgagtgcgacgtggtgaaggactacgccttcgtgcacatggagaaggaggccgacgccaaggccgccatcgcccagctgaacggcaaggaggtgaagggcaagagaatcaacgtggagctgagcaccaagggccagaagaagggccccggcctggccgtgcagagcggcgacaagaccaagaagcccggcgccggcgacaccgccttccccggcaccggcggcttcagcgccaccttcgactaccagcaggccttcggcaacagcaccggcggcttcgacggccaggccagacagcccaccccccccttcttcggcagagacagaagccccctgagaagaagcccccccagagccagctacgtggcccccctgaccgcccagcccgccacctacagagcccagcccagcgtgagcctgggcgccgcctacagagcccagcccagcgccagcctgggcgtgggctacagaacccagcccatgaccgcccaggccgccagctacagagcccagcccagcgtgagcctgggcgccccctacagaggccagctggccagccccagcagccagagcgccgccgccagcagcctgggcccctacggcggcgcccagcccagcgccagcgccctgagcagctacggcggccaggccgccgccgccagcagcctgaacagctacggcgcccagggcagcagcctggccagctacggcaaccagcccagcagctacggcgcccaggccgccagcagctacggcgtgagagccgccgccagcagctacaacacccagggcgccgccagcagcctgggcagctacggcgcccaggccgccagctacggcgcccagagcgccgccagcagcctggcctacggcgcccaggccgccagctacaacgcccagcccagcgccagctacaacgcccagagcgccccctacgccgcccagcaggccgccagctacagcagccagcccgccgcctacgtggcccagcccgccaccgccgccgcctacgccagccagcccgccgcctacgccgcccaggccaccacccccatggccggcagctacggcgcccagcccgtggtgcagacccagctgaacagctacggcgcccaggccagcatgggcctgagcggcagctacggcgcccagagcgccgccgccgccaccggcagctacggcgccgccgccgcctacggcgcccagcccagcgccaccctggccgccccctacagaacccagagcagcgccagcctggccgccagctacgccgcccagcagcacccccaggccgccgccagctacagaggccagcccggcaacgcctacgacggcgccggccagcccagcgccgcctacctgagcatgagccagggcgccgtggccaacgccaacagcaccccccccccctacgagagaaccagactgagcccccccagagccagctacgacgacccctacaagaaggccgtggccatgagcaagagatacggcagcgacagaagactggccgagctgagcgactacagaagactgagcgagagccagctgagcttcagaagaagccccaccaagagcagcctggactacagaagactgcccgacgcccacagcgactacgccagatacagcggcagctacaacgactacctgagagccgcccagatgcacagcggctaccagagaagaatgtag

SEQ ID NO: 97777 - DNA, 471 bp, synthetic construct
  misc_feature 1..471: note = Description of Artificial Sequence: Synthetic coding sequence
  source 1..471: mol_type = other DNA
atgaagatcttcgtgggcaacgtggacggcgccgacaccacccccgaggagctggccgccctgttcgccccctacggcaccgtgatgagctgcgccgtgatgaagcagttcgccttcgtgcacatgagagagaacgccggcgccctgagagccatcgaggccctgcacggccacgagctgagacccggcagagccctggtggtggagatgagcagacccagacccctgaacacctggaagatcttcgtgggcaacgtgagcgccgcctgcaccagccaggagctgagaagcctgttcgagagaagaggcagagtgatcgagtgcgacgtggtgaaggactacgccttcgtgcacatggagaaggaggccgacgccaaggccgccatcgcccagctgaacggcaaggaggtgaagggcaagagaatcaacgtggagctgagcaccaagggcatggtgcccaccggcgtgtag

SEQ ID NO: 97778 - DNA, 360 bp, synthetic construct
  misc_feature 1..360: note = Description of Artificial Sequence: Synthetic coding sequence
  source 1..360: mol_type = other DNA
atgaagatcttcgtgggcaacgtggacggcgccgacaccacccccgaggagctggccgccctgttcgccccctacggcaccgtgatgagctgcgccgtgatgaagcagttcgccttcgtgcacatgagagagaacgccggcgccctgagagccatcgaggccctgcacggccacgagctgagacccggcagagccctggtggtggagatgagcagacccagacccctgaacacctggaagatcttcgtgggcaacgtgagcgccgcctgcaccagccaggagctgagaagcctgttcgagagaagaggcagagtgatcgagtgcgacgtggtgaagggcatggtgcccaccggcgtgtag

SEQ ID NO: 97779 - DNA, 2934 bp, synthetic construct
  misc_feature 1..2934: note = Description of Artificial Sequence: Synthetic coding sequence
  source 1..2934: mol_type = other DNA
atgagaaccgccggcagagaccccgtgcccagaagaagccccagatggagaagagccgtgcccctgtgcgagaccagcgccggcagaagagtgacccagctgagaggcgacgacctgagaagacccgccaccatgaagggcaaggagagaagccccgtgaaggccaagagaagcagaggcggcgaggacagcaccagcagaggcgagagaagcaagaagctgggcggcagcggcggcagcaacggcagcagcagcggcaagaccgacagcggcggcggcagcagaagaagcctgcacctggacaagagcagcagcagaggcggcagcagagagtacgacaccggcggcggcagcagcagcagcagactgcacagctacagcagccccagcaccaagaacagcagcggcggcggcgagagcagaagcagcagcagaggcggcggcggcgagagcagaagcagcggcgccgccagcagcgcccccggcggcggcgacggcgccgagtacaagaccctgaagatcagcgagctgggcagccagctgagcgacgaggccgtggaggacggcctgttccacgagttcaagagattcggcgacgtgagcgtgaagatcagccacctgagcggcagcggcagcggcgacgagagagtggccttcgtgaacttcagaagacccgaggacgccagagccgccaagcacgccagaggcagactggtgctgtacgacagacccctgaagatcgaggccgtgtacgtgagcagaagaagaagcagaagccccctggacaaggacacctacccccccagcgccagcgtggtgggcgccagcgtgggcggccacagacacccccccggcggcggcggcggccagagaagcctgagccccggcggcgccgccctgggctacagagactacagactgcagcagctggccctgggcagactgcccccccccccccccccccccctgcccagagacctggagagagagagagactaccccttctacgagagagtgagacccgcctacagcctggagcccagagtgggcgccggcgccggcgccgcccccttcagagaggtggacgagatcagccccgaggacgaccagagagccaacagaaccctgttcctgggcaacctggacatcaccgtgaccgagagcgacctgagaagagccttcgacagattcggcgtgatcaccgaggtggacatcaagagacccagcagaggccagaccagcacctacggcttcctgaagttcgagaacctggacatgagccacagagccaagctggccatgagcggcaagatcatcatcagaaaccccatcaagatcggctacggcaaggccacccccaccaccagactgtgggtgggcggcctgggcccctgggtgcccctggccgccctggccagagagttcgacagattcggcaccatcagaaccatcgactacagaaagggcgacagctgggcctacatccagtacgagagcctggacgccgcccacgccgcctggacccacatgagaggcttccccctgggcggccccgacagaagactgagagtggacttcgccgacaccgagcacagataccagcagcagtacctgcagcccctgcccctgacccactacgagctggtgaccgacgccttcggccacagagcccccgaccccctgagaggcgccagagacagaaccccccccctgctgtacagagacagagacagagacctgtaccccgacagcgactgggtgcccccccccccccccgtgagagagagaagcaccagaaccgccgccaccagcgtgcccgcctacgagcccctggacagcctggacagaagaagagacggctggagcctggacagagacagaggcgacagagacctgcccagcagcagagaccagcccagaaagagaagactgcccgaggagagcggcggcagacacctggacagaagccccgagagcgacagacccagaaagagacactgcgcccccagccccgacagaagccccgagctgagcagcagcagagacagatacaacagcgacaacgacagaagcagcagactgctgctggagagacccagccccatcagagacagaagaggcagcctggagaagagccagggcgacaagagagacagaaagaacagcgccagcgccgagagagacagaaagcacagaaccaccgcccccaccgagggcaagagccccctgaagaaggaggacagaagcgacggcagcgcccccagcaccagcaccgccagcagcaagctgaagagccccagccagaagcaggacggcggcaccgcccccgtggccagcgccagccccaagctgtgcctggcctggcagggcatgctgctgctgaagaacagcaacttccccagcaacatgcacctgctgcagggcgacctgcaggtggccagcagcctgctggtggagggcagcaccggcggcaaggtggcccagctgaagatcacccagagactgagactggaccagcccaagctggacgaggtgaccagaagaatcaaggtggccggccccaacggctacgccatcctgctggccgtgcccggcagcagcgacagcagaagcagcagcagcagcgccgccagcgacaccgccaccagcacccagagacccctgagaaacctggtgagctacctgaagcagaagcaggccgccggcgtgatcagcctgcccgtgggcggcaacaaggacaaggagaacaccggcgtgctgcacgccttccccccctgcgagttcagccagcagttcctggacagccccgccaaggccctggccaagagcgaggaggactacctggtgatgatcatcgtgagaggcttcggcttccagatcggcgtgagatacgagaacaagaagagagagaacctggccctgaccctgctgtag

SEQ ID NO: 97780 - DNA, 2673 bp, synthetic construct
  misc_feature 1..2673: note = Description of Artificial Sequence: Synthetic coding sequence
  source 1..2673: mol_type = other DNA
atgaagagacagagcgagagagacagcagccccagcggcagaggcagcagcagcagcgccaagagacccagagagagagagagagaggccgaggccggcggcagaagagccgcccacaaggccagcggcggcgccaagcaccccgtgcccgccagagccagagacaagcccagaggcagcggcagcggcggcggcggccacagagacggcagaggcaccggcgacgccaaccacagagccagcagcggcagaagcagcggcagcggcgccggcggcggcggcagaggcggcaaggccagcggcgaccccggcgccagcggcatgagccccagagccagccccctgcccccccccccccccccccccggcgccgagcccgcctgccccggcagcagcgccgccgcccccgagtacaagaccctgctgatcagcagcctgagccccgccctgcccgccgagcacctggaggacagactgttccaccagttcaagagattcggcgagatcagcctgagactgagccacacccccgagctgggcagagtggcctacgtgaacttcagacacccccaggacgccagagaggccagacagcacgccctggccagacagctgctgctgtacgacagacccctgaaggtggagcccgtgtacctgagaggcggcggcggcagcagcagaagaagcagcagcagcagcgccgccgccagcacccccccccccggcccccccgcccccgccgaccccctgggctacctgcccctgcacggcggctaccagtacaagcagagaagcctgagccccgtggccgccccccccctgagagagcccagagccagacacgccgccgccgccttcgccctggacgccgccgccgccgccgccgtgggcctgagcagagagagagccctggactactacggcctgtacgacgacagaggcagaccctacggctaccccgccgtgtgcgaggaggacctgatgcccgaggacgaccagagagccaccagaaacctgttcatcggcaacctggaccacagcgtgagcgaggtggagctgagaagagccttcgagaagtacggcatcatcgaggaggtggtgatcaagagacccgccagaggccagggcggcgcctacgccttcctgaagttccagaacctggacatggcccacagagccaaggtggccatgagcggcagagtgatcggcagaaaccccatcaagatcggctacggcaaggccaaccccaccaccagactgtgggtgggcggcctgggccccaacaccagcctggccgccctggccagagagttcgacagattcggcagcatcagaaccatcgaccacgtgaagggcgacagcttcgcctacatccagtacgagagcctggacgccgcccaggccgcctgcgccaagatgagaggcttccccctgggcggccccgacagaagactgagagtggacttcgccaaggccgaggagaccagatacccccagcagtaccagcccagccccctgcccgtgcactacgagctgctgaccgacggctacaccagacacagaaacctggacgccgacctggtgagagacagaacccccccccacctgctgtacagcgacagagacagaaccttcctggagggcgactggaccagccccagcaagagcagcgacagaagaaacagcctggagggctacagcagaagcgtgagaagcagaagcggcgagagatggggcgccgacggcgacagaggcctgcccaagccctgggaggagagaagaaagagaagaagcctgagcagcgacagaggcagaaccacccacagcccctacgaggagagaagcagaaccaagggcagcggccagcagagcgagagaggcagcgacagaacccccgagagaagcagaaaggagaaccacagcagcgagggcaccaaggagagcagcagcaacagcctgagcaacagcagacacggcgccgaggagagaggccaccaccaccaccaccacgaggccgccgacagcagccacggcaagaaggccagagacagcgagagaaaccacagaaccaccgaggccgagcccaagcccctggaggagcccaagcacgagaccaagaagctgaagaacctgagcgagtacgcccagaccctgcagctgggctggaacggcctgctggtgctgaagaacagctgcttccccaccagcatgcacatcctggagggcgaccagggcgtgatcagcagcctgctgaaggaccacaccagcggcagcaagctgacccagctgaagatcgcccagagactgagactggaccagcccaagctggacgaggtgaccagaagaatcaagcagggcagccccaacggctacgccgtgctgctggccacccaggccacccccagcggcctgggcaccgagggcatgcccaccgtggagcccggcctgcagagaagactgctgagaaacctggtgagctacctgaagcagaagcaggccgccggcgtgatcagcctgcccgtgggcggcagcaagggcagagacggcaccggcatgctgtacgccttccccccctgcgacttcagccagcagtacctgcagagcgccctgagaaccctgggcaagctggaggaggagcacatggtgatcgtgatcgtgagagacaccgcctag

SEQ ID NO: 97781 - DNA, 765 bp, synthetic construct
  misc_feature 1..765: note = Description of Artificial Sequence: Synthetic coding sequence
  source 1..765: mol_type = other DNA
atggagaccgtggtgtgccccccctgggaggagagaagaaagagaagaagcctgagcagcgacagaggcagaaccacccacagcccctacgaggagagaagcagaaccaagggcagcggccagcagagcgagagaggcagcgacagaacccccgagagaagcagaaaggagaaccacagcagcgagggcaccaaggagagcagcagcaacagcctgagcaacagcagacacggcgccgaggagagaggccaccaccaccaccaccacgaggccgccgacagcagccacggcaagaaggccagagacagcgagagaaaccacagaaccaccgaggccgagcccaagcccctggaggagcccaagcacgagaccaagaagctgaagaacctgagcgagtacgcccagaccctgcagctgggctggaacggcctgctggtgctgaagaacagctgcttccccaccagcatgcacatcctggagggcgaccagggcgtgatcagcagcctgctgaaggaccacaccagcggcagcaagctgacccagctgaagatcgcccagagactgagactggaccagcccaagctggacgaggtgaccagaagaatcaagcagggcagccccaacggctacgccgtgctgctggccacccaggccacccccagcggcctgggcaccgagggcatgcccaccgtggagcccggcctgcagagaagactgctgagaaacctggtgagctacctgaagcagaagcaggccgccggctag

SEQ ID NO: 97782 - DNA, 636 bp, synthetic construct
  misc_feature 1..636: note = Description of Artificial Sequence: Synthetic coding sequence
  source 1..636: mol_type = other DNA
atgaagagacagagcgagagaaaccacagaaccaccgaggccgagcccaagcccctggaggagcccaagcacgagaccaagaagctgaagaacctgagcgagtacgcccagaccctgcagctgggctggaacggcctgctggtgctgaagaacagctgcttccccaccagcatgcacatcctggagggcgaccagggcgtgatcagcagcctgctgaaggaccacaccagcggcagcaagctgacccagctgaagatcgcccagagactgagactggaccagcccaagctggacgaggtgaccagaagaatcaagcagggcagccccaacggctacgccgtgctgctggccacccaggccacccccagcggcctgggcaccgagggcatgcccaccgtggagcccggcctgcagagaagactgctgagaaacctggtgagctacctgaagcagaagcaggccgccggcgtgatcagcctgcccgtgggcggcagcaagggcagagacggcaccggcatgctgtacgccttccccccctgcgacttcagccagcagtacctgcagagcgccctgagaaccctgggcaagctggaggaggagcacatggtgatcgtgatcgtgagagacaccgcctag

SEQ ID NO: 97783 - DNA, 1692 bp, synthetic construct
  misc_feature 1..1692: note = Description of Artificial Sequence: Synthetic coding sequence
  source 1..1692: mol_type = other DNA
atgcccgaggacgaccagagagccaccagaaacctgttcatcggcaacctggaccacagcgtgagcgaggtggagctgagaagagccttcgagaagtacggcatcatcgaggaggtggtgatcaagagacccgccagaggccagggcggcgcctacgccttcctgaagttccagaacctggacatggcccacagagccaaggtggccatgagcggcagagtgatcggcagaaaccccatcaagatcggctacggcaaggccaaccccaccaccagactgtgggtgggcggcctgggccccaacaccagcctggccgccctggccagagagttcgacagattcggcagcatcagaaccatcgaccacgtgaagggcgacagcttcgcctacatccagtacgagagcctggacgccgcccaggccgcctgcgccaagatgagaggcttccccctgggcggccccgacagaagactgagagtggacttcgccaaggccgaggagaccagatacccccagcagtaccagcccagccccctgcccgtgcactacgagctgctgaccgacggctacaccagacacagaaacctggacgccgacctggtgagagacagaacccccccccacctgctgtacagcgacagagacagaaccttcctggagggcgactggaccagccccagcaagagcagcgacagaagaaacagcctggagggctacagcagaagcgtgagaagcagaagcggcgagagatggggcgccgacggcgacagaggcctgcccaagccctgggaggagagaagaaagagaagaagcctgagcagcgacagaggcagaaccacccacagcccctacgaggagagaagcagaaccaagggcagcggccagcagagcgagagaggcagcgacagaacccccgagagaagcagaaaggagaaccacagcagcgagggcaccaaggagagcagcagcaacagcctgagcaacagcagacacggcgccgaggagagaggccaccaccaccaccaccacgaggccgccgacagcagccacggcaagaaggccagagacagcgagagaaaccacagaaccaccgaggccgagcccaagcccctggaggagcccaagcacgagaccaagaagctgaagaacctgagcgagtacgcccagaccctgcagctgggctggaacggcctgctggtgctgaagaacagctgcttccccaccagcatgcacatcctggagggcgaccagggcgtgatcagcagcctgctgaaggaccacaccagcggcagcaagctgacccagctgaagatcgcccagagactgagactggaccagcccaagctggacgaggtgaccagaagaatcaagcagggcagccccaacggctacgccgtgctgctggccacccaggccacccccagcggcctgggcaccgagggcatgcccaccgtggagcccggcctgcagagaagactgctgagaaacctggtgagctacctgaagcagaagcaggccgccggcgtgatcagcctgcccgtgggcggcagcaagggcagagacggcaccggcatgctgtacgccttccccccctgcgacttcagccagcagtacctgcagagcgccctgagaaccctgggcaagctggaggaggagcacatggtgatcgtgatcgtgagagacaccgcctag

SEQ ID NO: 97784 - DNA, 732 bp, synthetic construct
  misc_feature 1..732: note = Description of Artificial Sequence: Synthetic coding sequence
  source 1..732: mol_type = other DNA
atgggcagagtgggcagagccggcagaagccagagaaccaagcagagcaccgtgctggcccccgtgatcgacctgaagagaggcggcagcagcgacgacagacagatcgtggacacccccccccacgtggccgccggcctgaaggaccccgtgcccagcggcttcagcgccggcgaggtgctgatccccctggccgacgagtacgaccccatgttccccaacgactacgagaaggtggtgaagagacagagagaggagagacagagacagagagagctggagagacagaaggagatcgaggagagagagaagagaagaaaggacagacacgaggccagcggcttcgccagaagacccgaccccgacagcgacgaggacgaggactacgagagagagagaagaaagagaagcatgggcggcgccgccatcgccccccccaccagcctggtggagaaggacaaggagctgcccagagacttcccctacgaggaggacagcagacccagaagccagagcagcaaggccgccatccccccccccgtgtacgaggagcaggacagacccagaagccccaccggccccagcaacagcttcctggccaacatgggcggcaccgtggcccacaagatcatgcagaagtacggcttcagagagggccagggcctgggcaagcacgagcagggcctgagcaccgccctgagcgtggagaagaccagcaagagaggcggctag

SEQ ID NO: 97785 - DNA, 1206 bp, synthetic construct
  misc_feature 1..1206: note = Description of Artificial Sequence: Synthetic coding sequence
  source 1..1206: mol_type = other DNA
atgagcctgtacgacgacctgggcgtggagaccagcgacagcaagaccgagggctggagcaagaacttcaagctgctgcagagccagctgcaggtgaagaaggccgccctgacccaggccaagagccagagaaccaagcagagcaccgtgctggcccccgtgatcgacctgaagagaggcggcagcagcgacgacagacagatcgtggacacccccccccacgtggccgccggcctgaaggaccccgtgcccagcggcttcagcgccggcgaggtgctgatccccctggccgacgagtacgaccccatgttccccaacgactacgagaaggtggtgaagagacagagagaggagagacagagacagagagagctggagagacagaaggagatcgaggagagagagaagagaagaaaggacagacacgaggccagcggcttcgccagaagacccgaccccgacagcgacgaggacgaggactacgagagagagagaagaaagagaagcatgggcggcgccgccatcgccccccccaccagcctggtggagaaggacaaggagctgcccagagacttcccctacgaggaggacagcagacccagaagccagagcagcaaggccgccatccccccccccgtgtacgaggagcaggacagacccagaagccccaccggccccagcaacagcttcctggccaacatgggcggcaccgtggcccacaagatcatgcagaagtacggcttcagagagggccagggcctgggcaagcacgagcagggcctgagcaccgccctgagcgtggagaagaccagcaagagaggcggcaagatcatcgtgggcgacgccaccgagaaggacgccagcaagaagagcgacagcaaccccctgaccgagatcctgaagtgccccaccaaggtggtgctgctgagaaacatggtgggcgccggcgaggtggacgaggacctggaggtggagaccaaggaggagtgcgagaagtacggcaaggtgggcaagtgcgtgatcttcgagatccccggcgcccccgacgacgaggccgtgagaatcttcctggagttcgagagagtggagagcgccatcaaggccgtggtggacctgaacggcagatacttcggcggcagagtggtgaaggcctgcttctacaacctggacaagttcagagtgctggacctggccgagcaggtgtag

SEQ ID NO: 97786 - DNA, 639 bp, synthetic construct
  misc_feature 1..639: note = Description of Artificial Sequence: Synthetic coding sequence
  source 1..639: mol_type = other DNA
atgagcctgtacgacgacctgggcgtggagaccagcgacagcaagaccgagggctggagcaagaacttcaagctgctgcagagccagctgcaggtgaagaaggccgccctgacccaggccaagagccagagaaccaagcagagcaccgtgctggcccccgtgatcgacctgaagagaggcggcagcagcgacgacagacagatcgtggacacccccccccacgtggccgccggcctgaaggaccccgtgcccagcggcttcagcgccggcgaggtgctgatccccctggccgacgagtacgaccccatgttccccaacgactacgagaaggtggtgaagagacagagagaggagagacagagacagagagagctggagagacagaaggagatcgaggagagagagaagagaagaaaggacagacacgaggccagcggcttcgccagaagacccgaccccgacagcgacgaggacgaggactacgagagagagagaagaaagagaagcatgggcggcgccgccatcgccccccccaccagcctggtggagaaggacaaggagctgcccagagacttcccctacgaggaggacagcagacccagaagccagagcagcaaggccgccatcccccccccctag

SEQ ID NO: 97787 - DNA, 666 bp, synthetic construct
  misc_feature 1..666: note = Description of Artificial Sequence: Synthetic coding sequence
  source 1..666: mol_type = other DNA
atgagcctgtacgacgacctgggcgtggagaccagcgacagcaagaccgagggctggagcaagaacttcaagctgctgcagagccagctgcaggtgaagaaggccgccctgacccaggccaagagccagagaaccaagcagagcaccgtgctggcccccgtgatcgacctgaagagaggcggcagcagcgacgacagacagatcgtggacacccccccccacgtggccgccggcctgaaggaccccgtgcccagcggcttcagcgccggcgaggtgctgatccccctggccgacgagtacgaccccatgttccccaacgactacgagaaggtggtgaagagacagagagaggagagacagagacagagagagctggagagacagaaggagatcgaggagagagagaagagaaaggacagacacgaggccagcggcttcgccagaagacccgaccccgacagcgacgaggacgaggactacgagagagagagaagaaagagaagcatgggcggcgccgccatcgccccccccaccagcctggtggagaaggacaaggagctgcccagagacttcccctacgaggaggacagcagacccagaagccagagcagcaaggccgccatccccccccccgtgtacgaggagcaggacagacccagaagctag

SEQ ID NO: 97788 - DNA, 732 bp, synthetic construct; identical to SEQ ID NO: 97784
  misc_feature 1..732: note = Description of Artificial Sequence: Synthetic coding sequence
  source 1..732: mol_type = other DNA

SEQ ID NO: 97789 - DNA, 1206 bp, synthetic construct; identical to SEQ ID NO: 97785
  misc_feature 1..1206: note = Description of Artificial Sequence: Synthetic coding sequence
  source 1..1206: mol_type = other DNA

SEQ ID NO: 97790 - DNA, 678 bp, synthetic construct
  misc_feature 1..678: note = Description of Artificial Sequence: Synthetic coding sequence
  source 1..678: mol_type = other DNA
tgacccctggccgacgagtacgaccccatgttccccaacgactacgagaaggtggtgaagagacagagagaggagagacagagacagagagagctggagagacagaaggagatcgaggagagagagaagagaagaaaggacagacacgaggccagcggcttcgccagaagacccgaccccgacagcgacgaggacgaggactacgagagagagagaagaaagagaagcatgggcggcgccgccatcgccccccccaccagcctggtggagaaggacaaggagctgcccagagacttcccctacgaggaggacagcagacccagaagccagagcagcaaggccgccatccccccccccgtgtacgaggagcaggacagacccagaagccccaccggccccagcaacagcttcctggccaacatgggcggcaccgtggcccacaagatcatgcagaagtacggcttcagagagggccagggcctgggcaagcacgagcagggcctgagcaccgccctgagcgtggagaagaccagcaagagaggcggcaagatcatcgtgggcgacgccaccgagaagggcgtgagccccggcaagagagtgaccagaggcaagggcctggcccccagcatcagcgacatggccagcctggacccccacgtgagcgccggcggccagtag

SEQ ID NO: 97791 - DNA, 3684 bp, synthetic construct
  misc_feature 1..3684: note = Description of Artificial Sequence: Synthetic coding sequence
  source 1..3684: mol_type = other DNA
atggtgctggccgccgccatgagccaggacgccgaccccagcggccccgagcagcccgacagagtggcctgcagcgtgcccggcgccagagccagccccgcccccagcggccccagaggcatgcagcagccccccccccccccccagccccccccccccccccaggccggcctgccccagatcatccagaacgccgccaagctgctggacaagaaccccttcagcgtgagcaaccccaaccccctgctgcccagccccgccagcctgcagctggcccagctgcaggcccagctgaccctgcacagactgaagctggcccagaccgccgtgaccaacaacaccgccgccgccaccgtgctgaaccaggtgctgagcaaggtggccatgagccagcccctgttcaaccagctgagacaccccagcgtgatcaccggcccccacggccacgccggcgtgccccagcacgccgccgccatccccagcaccagattccccagcaacgccatcgccttcagcccccccagccagaccagaggccccggccccagcatgaacctgcccaaccagccccccagcgccatggtgatgcaccccttcaccggcgtgatgccccagacccccggccagcccgccgtgatcctgggcatcggcaagaccggccccgcccccgccaccgccggcttctacgagtacggcaaggccagcagcggccagacctacggccccgagaccgacggccagcccggcttcctgcccagcagcgccagcaccagcggcagcgtgacctacgagggccactacagccacaccggccaggacggccaggccgccttcagcaaggacttctacggccccaacagccagggcagccacgtggccagcggcttccccgccgagcaggccggcggcctgaagagcgaggtgggccccctgctgcagggcaccaacagccagtgggagagcccccacggcttcagcggccagagcaagcccgacctgaccgccggccccatgtggccccccccccacaaccagccctacgagctgtacgaccccgaggagcccaccagcgacagaaccccccccagcttcggcggcagactgaacaacagcaagcagggcttcatcggcgccggcagaagagccaaggaggaccaggccctgctgagcgtgagacccctgcaggcccacgagctgaacgacttccacggcgtggcccccctgcacctgccccacatctgcagcatctgcgacaagaaggtgttcgacctgaaggactgggagctgcacgtgaagggcaagctgcacgcccagaagtgcctggtgttcagcgagaacgccggcatcagatgcatcctgggcagcgccgagggcaccctgtgcgccagccccaacagcaccgccgtgtacaaccccgccggcaacgaggactacgccagcaacctgggcaccagctacgtgcccatccccgccagaagcttcacccagagcagccccaccttccccctggccagcgtgggcaccaccttcgcccagagaaagggcgccggcagagtggtgcacatctgcaacctgcccgagggcagctgcaccgagaacgacgtgatcaacctgggcctgcccttcggcaaggtgaccaactacatcctgatgaagagcaccaaccaggccttcctggagatggcctacaccgaggccgcccaggccatggtgcagtactaccaggagaagagcgccgtgatcaacggcgagaagctgctgatcagaatgagcaagagatacaaggagctgcagctgaagaagcccggcaaggccgtggccgccatcatccaggacatccacagccagagagagagagacatgttcagagaggccgacagatacggccccgagagacccagaagcagaagccccgtgagcagaagcctgagccccagaagccacacccccagcttcaccagctgcagcagcagccacagcccccccggccccagcagagccgactggggcaacggcagagacagctgggagcacagcccctacgccagaagagaggaggagagagaccccgccccctggagagacaacggcgacgacaagagagacagaatggacccctgggcccacgacagaaagcaccaccccagacagctggacaaggccgagctggacgagagacccgagggcggcagaccccacagagagaagtaccccagaagcggcagccccaacctgccccacagcgtgagcagctacaagagcagagaggacggctactacagaaaggagcccaaggccaagtgggacaagtacctgaagcagcagcaggacgcccccggcagaagcagaagaaaggacgaggccagactgagagagagcagacacccccaccccgacgacagcggcaaggaggacggcctgggccccaaggtgaccagagcccccgagggcgccaaggccaagcagaacgagaagaacaagaccaagagaaccgacagagaccaggagggcgccgacgacagaaaggagaacaccatggccgagaacgaggccggcaaggaggagcaggagggcatggaggagagcccccagagcgtgggcagacaggagaaggaggccgagttcagcgaccccgagaacaccagaaccaagaaggagcaggactgggagagcgagagcgaggccgagggcgagagctggtaccccaccaacatggaggagctggtgaccgtggacgaggtgggcgaggaggaggacttcatcgtggagcccgacatccccgagctggaggagatcgtgcccatcgaccagaaggacaagatctgccccgagacctgcctgtgcgtgaccaccaccctggacctggacctggcccaggacttccccaaggagggcgtgaaggccgtgggcaacggcgccgccgagatcagcctgaagagccccagagagctgcccagcgccagcaccagctgccccagcgacatggacgtggagatgcccggcctgaacctggacgccgagagaaagcccgccgagagcgagaccggcctgagcctggaggacagcgactgctacgagaaggaggccaagggcgtggagagcagcgacgtgcaccccgcccccaccgtgcagcagatgagcagccccaagcccgccgaggagagagccagacagcccagccccttcgtggacgactgcaagaccagaggcacccccgaggacggcgcctgcgagggcagccccctggaggagaaggccagcccccccatcgagaccgacctgcagaaccaggcctgccaggaggtgctgacccccgagaacagcagatacgtggagatgaagagcctggaggtgagaagccccgagtacaccgaggtggagctgaagcagcccctgagcctgcccagctgggagcccgaggacgtgttcagcgagctgagcatccccctgggcgtggagttcgtggtgcccagaaccggcttctactgcaagctgtgcggcctgttctacaccagcgaggagaccgccaagatgagccactgcagaagcgccgtgcactacagaaacctgcagaagtacctgagccagctggccgaggagggcctgaaggagaccgagggcgccgacagccccagacccgaggacagcggcatcgtgcccagattcgagagaaagaagctgtag

SEQ ID NO: 97792 - DNA, 3378 bp, synthetic construct
  misc_feature 1..3378: note = Description of Artificial Sequence: Synthetic coding sequence
  source 1..3378: mol_type = other DNA
atggtgctggccgccgccatgagccaggacgccgaccccagcggccccgagcagcccgacagagtggcctgcagcgtgcccggcgccagagccagccccgcccccagcggccccagaggcatgcagcagccccccccccccccccagccccccccccccccccaggccggcctgccccagatcatccagaacgccgccaagctgctggacaagaaccccttcagcgtgagcaaccccaaccccctgctgcccagccccgccagcctgcagctggcccagctgcaggcccagctgaccctgcacagactgaagctggcccagaccgccgtgaccaacaacaccgccgccgccaccgtgctgaaccaggtgctgagcaaggtggccatgagccagcccctgttcaaccagctgagacaccccagcgtgatcaccggcccccacggccacgccggcgtgccccagcacgccgccgccatccccagcaccagattccccagcaacgccatcgccttcagcccccccagccagaccagaggccccggccccagcatgaacctgcccaaccagccccccagcgccatggtgatgcaccccttcaccggcgtgatgccccagacccccggccagcccgccgtgatcctgggcatcggcaagaccggccccgcccccgccaccgccggcttctacgagtacggcaaggccagcagcggccagacctacggccccgagaccgacggccagcccggcttcctgcccagcagcgccagcaccagcggcagcgtgacctacgagggccactacagccacaccggccaggacggccaggccgccttcagcaaggacttctacggccccaacagccagggcagccacgtggccagcggcttccccgccgagcaggccggcggcctgaagagcgaggtgggccccctgctgcagggcaccaacagccagtgggagagcccccacggcttcagcggccagagcaagcccgacctgaccgccggccccatgtggccccccccccacaaccagccctacgagctgtacgaccccgaggagcccaccagcgacagaaccccccccagcttcggcggcagactgaacaacagcaagcagggcttcatcggcgccggcagaagagccaaggaggaccaggccctgctgagcgtgagacccctgcaggcccacgagctgaacgacttccacggcgtggcccccctgcacctgccccacatctgcagcatctgcgacaagaaggtgttcgacctgaaggactgggagctgcacgtgaagggcaagctgcacgcccagaagtgcctggtgttcagcgagaacgccggcatcagatgcatcctgggcagcgccgagggcaccctgtgcgccagccccaacagcaccgccgtgtacaaccccgccggcaacgaggactacgccagcaacctgggcaccagctacgtgcccatccccgccagaagcttcacccagagcagccccaccttccccctggccagcgtgggcaccaccttcgcccagagaaagggcgccggcagagtggtgcacatctgcaacctgcccgagggcagctgcaccgagaacgacgtgatcaacctgggcctgcccttcggcaaggtgaccaactacatcctgatgaagagcaccaaccaggccttcctggagatggcctacaccgaggccgcccaggccatggtgcagtactaccaggagaagagcgccgtgatcaacggcgagaagctgctgatcagaatgagcaagagatacaaggagctgcagctgaagaagcccggcaaggccgtggccgccatcatccaggacatccacagccagagagagagagacatgttcagagaggccgacagatacggccccgagagacccagaagcagaagccccgtgagcagaagcctgagccccagaagccacacccccagcttcaccagctgcagcagcagccacagcccccccggccccagcagagccgactggggcaacggcagagacagctgggagcacagcccctacgccagaagagaggaggagagagaccccgccccctggagagacaacggcgacgacaagagagacagaatggacccctgggcccacgacagaaagcaccaccccagacagctggacaaggccgagctggacgagagacccgagggcggcagaccccacagagagaagtaccccagaagcggcagccccaacctgccccacagcgtgagcagctacaagagcagagaggacggctactacagaaaggagcccaaggccaagtgggacaagtacctgaagcagcagcaggacgcccccggcagaagcagaagaaaggacgaggccagactgagagagagcagacacccccaccccgacgacagcggcaaggaggacggcctgggccccaaggtgaccagagcccccgagggcgccaaggccaagcagaacgagaagaacaagaccaagagaaccgacagagaccaggagggcgccgacgacagaaaggagaacaccatggccgagaacgaggccggcaaggaggagcaggagggcatggaggagagcccccagagcgtgggcagacaggagaaggaggccgagttcagcgaccccgagaacaccagaaccaagaaggagcaggactgggagagcgagagcgaggccgagggcgagagctggtaccccaccaacatggaggagctggtgaccgtggacgaggtgggcgaggaggaggacttcatcgtggagcccgacatccccgagctggaggagatcgtgcccatcgaccagaaggacaagatctgccccgagacctgcctgtgcgtgaccaccaccctggacctggacctggcccaggacttccccaaggagggcgtgaaggccgtgggcaacggcgccgccgagatcagcctgaagagccccagagagctgcccagcgccagcaccagctgccccagcgacatggacgtggagatgcccggcctgaacctggacgccgagagaaagcccgccgagagcgagaccggcctgagcctggaggacagcgactgctacgagaaggaggccaagggcgtggagagcagcgacgtgcaccccgcccccaccgtgcagcagatgagcagccccaagcccgccgaggagagagccagacagcccagccccttcgtggacgactgcaagaccagaggcacccccgaggacggcgcctgcgagggcagccccctggaggagaaggccagcccccccatcgagaccgacctgcagaaccaggcctgccagggcagcgacagcgacaccagactggtgagcggctacagcctgacccccctggagaagacccccggcacctggaagtag

SEQ ID NO: 97793 - DNA, 1263 bp, synthetic construct
  misc_feature 1..1263: note = Description of Artificial Sequence: Synthetic coding sequence
  source 1..1263: mol_type = other DNA
atggccaccagcctgggcagcaacacctacaacagacagaactgggaggacgccgacttccccatcctgtgccagacctgcctgggcgagaacccctacatcagaatgaccaaggagaagtacggcaaggagtgcaagatctgcgccagacccttcaccgtgttcagatggtgccccggcgtgagaatgagattcaagaagaccgaggtgtgccagacctgcagcaagctgaagaacgtgtgccagacctgcctgctggacctggagtacggcctgcccatccaggtgagagacgccggcctgagcttcaaggacgacatgcccaagagcgacgtgaacaaggagtactacacccagaacatggagagagagatcagcaacagcgacggcaccagacccgtgggcatgctgggcaaggccaccagcaccagcgacatgctgctgaagctggccagaaccaccccctactacaagagaaacagaccccacatctgcagcttctgggtgaagggcgagtgcaagagaggcgaggagtgcccctacagacacgagaagcccaccgaccccgacgaccccctggccgaccagaacatcaaggacagatactacggcatcaacgaccccgtggccgacaagctgctgaagagagccagcaccatgcccagactggacccccccgaggacaagaccatcaccaccctgtacgtgggcggcctgggcgacaccatcaccgagaccgacctgagaaaccacttctaccagttcggcgagatcagaaccatcaccgtggtgcagagacagcagtgcgccttcatccagttcgccaccagacaggccgccgaggtggccgccgagaagagcttcaacaagctgatcgtgaacggcagaagactgaacgtgaagtggggcagaagccaggccgccagaggcaaggagaaggagaaggacggcaccaccgacagcggcatcaagctggagcccgtgcccggcctgcccggcgccctgccccccccccccgccgccgaggaggaggccagcgccaactacttcaacctgccccccagcggcccccccgccgtggtgaacatcgccctgccccccccccccggcatcgcccccccccccccccccggcttcggcccccacatgttccaccccatgggcccccccccccccttcatgagagcccccggccccatccactaccccagccaggacccccagagaatgggcgcccacgccggcaagcacagcagcccctag

SEQ ID NO: 97794 - DNA, 1116 bp, synthetic construct
  misc_feature 1..1116: note = Description of Artificial Sequence: Synthetic coding sequence
  source 1..1116: mol_type = other DNA
atggccaccagcctgggcagcaacacctacaacagacagaactgggaggacgccgacttccccatcctgtgccagacctgcctgggcgagaacccctacatcagaatgaccaaggagaagtacggcctgcccatccaggtgagagacgccggcctgagcttcaaggacgacatgcccaagagcgacgtgaacaaggagtactacacccagaacatggagagagagatcagcaacagcgacggcaccagacccgtgggcatgctgggcaaggccaccagcaccagcgacatgctgctgaagctggccagaaccaccccctactacaagagaaacagaccccacatctgcagcttctgggtgaagggcgagtgcaagagaggcgaggagtgcccctacagacacgagaagcccaccgaccccgacgaccccctggccgaccagaacatcaaggacagatactacggcatcaacgaccccgtggccgacaagctgctgaagagagccagcaccatgcccagactggacccccccgaggacaagaccatcaccaccctgtacgtgggcggcctgggcgacaccatcaccgagaccgacctgagaaaccacttctaccagttcggcgagatcagaaccatcaccgtggtgcagagacagcagtgcgccttcatccagttcgccaccagacaggccgccgaggtggccgccgagaagagcttcaacaagctgatcgtgaacggcagaagactgaacgtgaagtggggcagaagccaggccgccagaggcaaggagaaggagaaggacggcaccaccgacagcggcatcaagctggagcccgtgcccggcctgcccggcgccctgccccccccccccgccgccgaggaggaggccagcgccaactacttcaacctgccccccagcggcccccccgccgtggtgaacatcgccctgccccccccccccggcatcgcccccccccccccccccggcttcggcccccacatgttccaccccatgggcccccccccccccttcatgagagcccccggccccatccactaccccagccaggacccccagagaatgggcgcccacgccggcaagcacagcagcccctag

SEQ ID NO: 97795 - DNA, 1116 bp, synthetic construct
  misc_feature 1..1116: note = Description of Artificial Sequence: Synthetic coding sequence
  source 1..1116: mol_type = other DNA
atggccaccagcctgggcagcaacacctacaacagacagaactgggaggacgccgacttccccatcctgtgccagacctgcctgggcgagaacccctacatcagaatggagagagagaagagcggcctgcccatccaggtgagagacgccggcctgagcttcaaggacgacatgcccaagagcgacgtgaacaaggagtactacacccagaacatggagagagagatcagcaacagcgacggcaccagacccgtgggcatgctgggcaaggccaccagcaccagcgacatgctgctgaagctggccagaaccaccccctactacaagagaaacagaccccacatctgcagcttctgggtgaagggcgagtgcaagagaggcgaggagtgcccctacagacacgagaagcccaccgaccccgacgaccccctggccgaccagaacatcaaggacagatactacggcatcaacgaccccgtggccgacaagctgctgaagagagccagcaccatgcccagactggacccccccgaggacaagaccatcaccaccctgtacgtgggcggcctgggcgacaccatcaccgagaccgacctgagaaaccacttctaccagttcggcgagatcagaaccatcaccgtggtgcagagacagcagtgcgccttcatccagttcgccaccagacaggccgccgaggtggccgccgagaagagcttcaacaagctgatcgtgaacggcagaagactgaacgtgaagtggggcagaagccaggccgccagaggcaaggagaaggagaaggacggcaccaccgacagcggcatcaagctggagcccgtgcccggcctgcccggcgccctgccccccccccccgccgccgaggaggaggccagcgccaactacttcaacctgccccccagcggcccccccgccgtggtgaacatcgccctgccccccccccccggcatcgcccccccccccccccccggcttcggcccccacatgttccaccccatgggcccccccccccccttcatgagagcccccggccccatccactaccccagccaggacccccagagaatgggcgcccacgccggcaagcacagcagcccctag

SEQ ID NO: 97796 - DNA, 2532 bp, synthetic construct
  misc_feature 1..2532: note = Description of Artificial Sequence: Synthetic coding sequence
  source 1..2532: mol_type = other DNA
atgagcttccccccccacctgaacagaccccccatgggcatccccgccctgccccccggcatcccccccccccagttccccggcttccccccccccgtgccccccggcacccccatgatccccgtgcccatgagcatcatggcccccgcccccaccgtgctggtgcccaccgtgagcatggtgggcaagcacctgggcgccagaaaggaccaccccggcctgaaggccaaggagaacgacgagaactgcggccccaccaccaccgtgttcgtgggcaacatcagcgagaaggccagcgacatgctgatcagacagctgctggccaagtgcggcctggtgctgagctggaagagagtgcagggcgccagcggcaagctgcaggccttcggcttctgcgagtacaaggagcccgagagcaccctgagagccctgagactgctgcacgacctgcagatcggcgagaagaagctgctggtgaaggtggacgccaagaccaaggcccagctggacgagtggaaggccaagaagaaggccagcaacggcaacgccagacccgagaccgtgaccaacgacgacgaggaggccctggacgaggagaccaagagaagagaccagatgatcaagggcgccatcgaggtgctgatcagagagtacagcagcgagctgaacgcccccagccaggagagcgacagccaccccagaaagaagaagaaggagaagaaggaggacatcttcagaagattccccgtggcccccctgatcccctaccccctgatcaccaaggaggacatcaacgccatcgagatggaggaggacaagagagacctgatcagcagagagatcagcaagttcagagacacccacaagaagctggaggaggagaagggcaagaaggagaaggagagacaggagatcgagaaggagagaagagagagagagagagagagagagagagagagagagagaagagagagagagagagagagagagagagagagagagagagagaaggagaaggagagagagagagagagagagagagacagagacagagacagaaccaaggagagagacagagacagagacagagagagagacagagacagagacagagagagaagcagcgacagaaacaaggacagaagcagaagcagagagaagagcagagacagagagagagagagagagagagagagagagagagagagagagagagagagagagagagagagagagagagagagagagagagagagagagagagagagagagagagagaaggacaagaagagagacagagaggaggacgaggaggacgcctacgagagaagaaagctggagagaaagctgagagagaaggaggccgcctaccaggagagactgaagaactgggagatcagagagagaaagaagaccagagagtacgagaaggaggccgagagagaggaggagagaagaagagagatggccaaggaggccaagagactgaaggagttcctggaggactacgacgacgacagagacgaccccaagtactacagaggcagcgccctgcagaagagactgagagacagagagaaggagatggaggccgacgagagagacagaaagagagagaaggaggagctggaggagatcagacagagactgctggccgagggccaccccgaccccgacgccgagctgcagagaatggagcaggaggccgagagaagaagacagccccagatcaagcaggagcccgagagcgaggaggaggaggaggagaagcaggagaaggaggagaagagagaggagcccatggaggaggaggaggagcccgagcagaagccctgcctgaagcccaccctgagacccatcagcagcgcccccagcgtgagcagcgccagcggcaacgccacccccaacacccccggcgacgagagcccctgcggcatcatcatcccccacgagaacagccccgaccagcagcagcccgaggagcacagacccaagatcggcctgagcctgaagctgggcgccagcaacagccccggccagcccaacagcgtgaagagaaagaagctgcccgtggacagcgtgttcaacaagttcgaggacgaggacagcgacgacgtgcccagaaagagaaagctggtgcccctggactacggcgaggacgacaagaacgccaccaagggcaccgtgaacaccgaggagaagagaaagcacatcaagagcctgatcgagaagatccccaccgccaagcccgagctgttcgcctaccccctggactggagcatcgtggacagcatcctgatggagagaagaatcagaccctggatcaacaagaagatcatcgagtacatcggcgaggaggaggccaccctggtggacttcgtgtgcagcaaggtgatggcccacagcagcccccagagcatcctggacgacgtggccatggtgctggacgaggaggccgaggtgttcatcgtgaagatgtggagactgctgatctacgagaccgaggccaagaagatcggcctggtgaagtag

SEQ ID NO: 97797 - DNA, 384 bp, synthetic construct
  misc_feature 1..384: note = Description of Artificial Sequence: Synthetic coding sequence
  source 1..384: mol_type = other DNA
atgagcttccccccccacctgaacagaccccccatgggcatccccgccctgccccccggcatcccccccccccagttccccggcttccccccccccgtgccccccggcacccccatgatccccgtgcccatgagcatcatggcccccgcccccaccgtgctggtgcccaccgtgagcatggtgggcaagcacctgggcgccagaaaggaccaccccggcctgaaggccaaggagaacgacgagaactgcggccccaccaccaccgtgttcgtgggcaacatcagcgagaaggccagcgacatgctgatcagacagctgctggccaagtgcggcctggtgctgagctggaagagagtgcagggcgccagcggcaagctgcagtag

SEQ ID NO: 97798 - DNA, 903 bp, synthetic construct
  misc_feature 1..903: note = Description of Artificial Sequence: Synthetic coding sequence
  source 1..903: mol_type = other DNA
atgagcttccccccccacctgaacagaccccccatgggcatccccgccctgccccccggcatcccccccccccagttccccggcttccccccccccgtgccccccggcacccccatgatccccgtgcccatgagcatcatggcccccgcccccaccgtgctggtgcccaccgtgagcatggtgggcaagcacctgggcgccagaaaggaccaccccggcctgaaggccaaggagaacgacgagaactgcggccccaccaccaccgtgttcgtgggcaacatcagcgagaaggccagcgacatgctgatcagacagctgctggccaagtgcggcctggtgctgagctggaagagagtgcagggcgccagcggcaagctgcaggccttcggcttctgcgagtacaaggagcccgagagcaccctgagagccctgagactgctgcacgacctgcagatcggcgagaagaagctgctggtgaaggtggacgccaagaccaaggcccagctggacgagtggaaggccaagaagaaggccagcaacggcaacgccagacccgagaccgtgaccaacgacgacgaggaggccctggacgaggagaccaagagaagagaccagatgatcaagggcgccatcgaggtgctgatcagagagtacagcagcgagctgaacgcccccagccaggagagcgacagccaccccagaaagaagaagaaggagaagaaggaggacatcttcagaagattccccgtggcccccctgatcccctaccccctgatcaccaaggaggacatcaacgccatcgagatggaggaggacaagagagacctgatcagcagagagatcagcaagttcagagacacccacaaggtggtgttcctgagcttccacctgatccccatctag

SEQ ID NO: 97799 - DNA, 885 bp, synthetic construct
  misc_feature 1..885: note = Description of Artificial Sequence: Synthetic coding sequence
  source 1..885: mol_type = other DNA
atgagcttccccccccacctgaacagaccccccatgggcatccccgccctgccccccggcatcccccccccccagttccccggcttccccccccccgtgccccccggcacccccatgatccccgtgcccatgagcatcatggcccccgcccccaccgtgctggtgcccaccgtgagcatggtgggcaagcacctgggcgccagaaaggaccaccccggcctgaaggccaaggagaacgacgagaactgcggccccaccaccaccgtgttcgtgggcaacatcagcgagaaggccagcgacatgctgatcagacagctgctggccaagtgcggcctggtgctgagctggaagagagtgcagggcgccagcggcaagctgcaggccttcggcttctgcgagtacaaggagcccgagagcaccctgagagccctgagactgctgcacgacctgcagatcggcgagaagaagctgctggtgaaggtggacgccaagaccaaggcccagctggacgagtggaaggccaagaagaaggccagcaacggcaacgccagacccgagaccgtgaccaacgacgacgaggaggccctggacgaggagaccaagagaagagaccagatgatcaagggcgccatcgaggtgctgatcagagagtacagcagcgagctgaacgcccccagccaggagagcgacagccaccccagaaagaagaagaaggagaagaaggaggacatcttcagaagattccccgtggcccccctgatcccctaccccctgatcaccaaggaggacatcaacgccatcgagatggaggaggacaagagagacctgatcagcagagagatcagcaagttcagagacacccacaagagaagctacggcgactag

SEQ ID NO: 97800 - DNA, 2532 bp, synthetic construct; identical to SEQ ID NO: 97796
  misc_feature 1..2532: note = Description of Artificial Sequence: Synthetic coding sequence
  source 1..2532: mol_type = other DNA

SEQ ID NO: 97801 - DNA, 732 bp, synthetic construct
  misc_feature 1..732: note = Description of Artificial Sequence: Synthetic coding sequence
  source 1..732: mol_type = other DNA
atgagcttccccccccacctgaacagaccccccatgggcatccccgccctgccccccggcatcccccccccccagttccccggcttccccccccccgtgccccccggcacccccatgatccccgtgcccatgagcatcatggcccccgcccccaccgtgctggtgcccaccgtgagcatggtgggcaagcacctgggcgccagaaaggaccaccccggcctgaaggccaaggagaacgacgagaactgcggccccaccaccaccgtgttcgtgggcaacatcagcgagaaggccagcgacatgctgatcagacagctgctggccaagtgcggcctggtgctgagctggaagagagtgcagggcgccagcggcaagctgcaggccttcggcttctgcgagtacaaggagcccgagagcaccctgagagccctgagactgctgcacgacctgcagatcggcgagaagaagctgctggtgaaggtggacgccaagaccaaggcccagctggacgagtggaaggccaagaagaaggccagcaacggcaacgccagacccgagaccgtgaccaacgacgacgaggaggccctggacgaggagaccaagagaagagaccagatgatcaagggcgccatcgaggtgctgatcagagagtacagcagcgagctgaacgcccccagccaggagagcgacagccaccccagaaagaagaagaaggagaagaaggaggactag

SEQ ID NO: 97802 - DNA, 885 bp, synthetic construct; identical to SEQ ID NO: 97799
  misc_feature 1..885: note = Description of Artificial Sequence: Synthetic coding sequence
  source 1..885: mol_type = other DNA

SEQ ID NO: 97803 - DNA, 1350 bp, synthetic construct
  misc_feature 1..1350: note = Description of Artificial Sequence: Synthetic coding sequence
  source 1..1350: mol_type = other DNA
atgctgcccgccgccaccgccagcctgctgggccccctgctgaccgcctgcgccctgctgcccttcgcccagggccagacccccaactacaccagacccgtgttcctgtgcggcggcgacgtgaagggcgagagcggctacgtggccagcgagggcttccccaacctgtacccccccaacaaggagtgcatctggaccatcaccgtgcccgagggccagaccgtgagcctgagcttcagagtgttcgacctggagctgcaccccgcctgcagatacgacgccctggaggtgttcgccggcagcggcaccagcggccagagactgggcagattctgcggcaccttcagacccgcccccctggtggcccccggcaaccaggtgaccctgagaatgaccaccgacgagggcaccggcggcagaggcttcctgctgtggtacagcggcagagccaccagcggcaccgagcaccagttctgcggcggcagactggagaaggcccagggcaccctgaccacccccaactggcccgagagcgactacccccccggcatcagctgcagctggcacatcatcgccccccccgaccaggtgatcgccctgaccttcgagaagttcgacctggagcccgacacctactgcagatacgacagcgtgagcgtgttcaacggcgccgtgagcgacgacagcagaagactgggcaagttctgcggcgacgccgtgcccggcagcatcagcagcgagggcaacgagctgctggtgcagttcgtgagcgacctgagcgtgaccgccgacggcttcagcgccagctacaagaccctgcccagaggcaccgccaaggagggccagggccccggccccaagagaggcaccgagcccaaggtgaagctgccccccaagagccagccccccgagaagaccgaggagagccccagcgcccccgacgcccccacctgccccaagcagtgcagaagaaccggcaccctgcagagcaacttctgcgccagcagcctggtggtgaccgccaccgtgaagagcatggtgagagagcccggcgagggcctggccgtgaccgtgagcctgatcggcgcctacaagaccggcggcctggacctgcccagcccccccaccggcgccagcctgaagttctacgtgccctgcaagcagtgcccccccatgaagaagggcgtgagctacctgctgatgggccaggtggaggagaacagaggccccgtgctgccccccgagagcttcgtggtgctgcacagacccaaccaggaccagatcctgaccaacctgagcaagagaaagtgccccagccagcccgtgagagccgccgccagccaggactag

SEQ ID NO: 97804 - DNA, 1857 bp, synthetic construct
  misc_feature 1..1857: note = Description of Artificial Sequence: Synthetic coding sequence
  source 1..1857: mol_type = other DNA
atggccggcctgaccctgttcgtgggcagactgccccccagcgccagaagcgagcagctggaggagctgttcagccaggtgggccccgtgaagcagtgcttcgtggtgaccgagaagggcagaaccgtggccgtggactgggccgtggccaaggacaagtacaaggacacccagagcgtgagcgccatcggcgaggagaagagccacgagagcaagcaccaggagagcgtgaagaagaagggcagagaggaggaggacatggaggaggaggagaacgacgacgacgacgacgacgacgacgaggaggacggcgtgttcgacgacgaggacgaggaggaggagaacatcgagagcaaggtgaccaagcccgtgcagatccagaagagagccgtgaagagacccgcccccgccaagagcagcgaccacagcgaggaggacagcgacctggaggagagcgacagcatcgacgacggcgaggagctggcccagagcgacaccagcaccgaggagcaggaggacaaggccgtgcaggtgagcaacaagaagaagagaaagctgcccagcgacgtgaacgagggcaagaccgtgttcatcagaaacctgagcttcgacagcgaggaggaggagctgggcgagctgctgcagcagttcggcgagctgaagtacgtgagaatcgtgctgcaccccgacaccgagcacagcaagggctgcgccttcgcccagttcatgacccaggaggccgcccagaagtgcctgctggccgccagccccgagaacgaggccggcggcctgaagctggacggcagacagctgaaggtggacctggccgtgaccagagacgaggccgccaagctgcagaccaccaaggtgaagaagcccaccggcaccagaaacctgtacctggccagagagggcctgatcagagccggcaccaaggccgccgagggcgtgagcgccgccgacatggccaagagagagagattcgagctgctgaagcaccagaagctgaaggaccagaacatcttcgtgagcagaaccagactgtgcctgcacaacctgcccaaggccgtggacgacaagcagctgagaaagctgctgctgagcgccaccagcggcgagaagggcgtgagaatcaaggagtgcagagtgatgagagacctgaagggcgtgcacggcaacatgaagggccagagcctgggctacgccttcgccgagttccaggagcacgagcacgccctgaaggccctgagactgatcaacaacaaccccgagatcttcggccccctgaagagacccatcgtggagttcagcctggaggacagaagaaagctgaagatgaaggagctgagaatccagagaagcctgcagaagatgagaagcaagcccgccaccggcgagccccagaagggccagcccgagcccgccaaggaccagcagcagaaggccgcccagcaccacaccgaggagcagagcaaggtgccccccgagcagaagagaaaggccggcagcaccagctggaccggcttccagaccaaggccgaggtggagcaggtggagctgcccgacggcaagaagagaagaaaggtgctggccctgcccagccacagaggccccaagatcagactgagagacaagggcaaggtgaagcccgtgcaccccaagaagcccaagccccagatcaaccagtggaagcaggagaagcagcagctgagcagcgagcaggtgagcagaaagaaggccaagggcaacaagaccgagaccagattcaaccagctggtggagcagtacaagcagaagctgctgggccccagcaagggcgcccccctggccaagagaagcaagtggttcgacagctag

SEQ ID NO: 97805 - DNA, 720 bp, synthetic construct
  misc_feature 1..720: note = Description of Artificial Sequence: Synthetic coding sequence
  source 1..720: mol_type = other DNA
atgctgctgcagcccgccccctgcgcccccagcgccggcttccccagacccctggccgcccccggcgccatgcacggcagccagaaggacaccaccttcaccaagatcttcgtgggcggcctgccctaccacaccaccgacgccagcctgagaaagtacttcgagggcttcggcgacatcgaggaggccgtggtgatcaccgacagacagaccggcaagagcagaggctacggcttcgtgaccatggccgacagagccgccgccgagagagcctgcaaggaccccaaccccatcatcgacggcagaaaggccaacgtgaacctggcctacctgggcgccaagcccagaagcctgcagaccggcttcgccatcggcgtgcagcagctgcaccccaccctgatccagagaacctacggcctgaccccccactacatctacccccccgccatcgtgcagcccagcgtggtgatccccgccgcccccgtgcccagcctgagcagcccctacatcgagtacacccccgccagccccgcctacgcccagtacccccccgccacctacgaccagtacccctacgccgccagccccgccaccgccgccagcttcgtgggctacagctaccccgccgccgtgccccaggccctgagcgccgccgcccccgccggcaccaccttcgtgcagtaccaggccccccagctgcagcccgacagaatgcagtag

SEQ ID NO: 97806 - DNA, 477 bp, synthetic construct
  misc_feature 1..477: note = Description of Artificial Sequence: Synthetic coding sequence
  source 1..477: mol_type = other DNA
atggccgacagagccgccgccgagagagcctgcaaggaccccaaccccatcatcgacggcagaaaggccaacgtgaacctggcctacctgggcgccaagcccagaagcctgcagaccggcttcgccatcggcgtgcagcagctgcaccccaccctgatccagagaacctacggcctgaccccccactacatctacccccccgccatcgtgcagcccagcgtggtgatccccgccgcccccgtgcccagcctgagcagcccctacatcgagtacacccccgccagccccgcctacgcccagtacccccccgccacctacgaccagtacccctacgccgccagccccgccaccgccgccagcttcgtgggctacagctaccccgccgccgtgccccaggccctgagcgccgccgcccccgccggcaccaccttcgtgcagtaccaggccccccagctgcagcccgacagaatgcagtag

SEQ ID NO: 97807 - DNA, 366 bp, synthetic construct
  misc_feature 1..366: note = Description of Artificial Sequence: Synthetic coding sequence
  source 1..366: mol_type = other DNA
atgctgctgcagcccgccccctgcgcccccagcgccggcttccccagacccctggccgcccccggcgccatgcacggcagccagaaggacaccaccttcaccaagatcttcgtgggcggcctgccctaccacaccaccgacgccagcctgagaaagtacttcgagggcttcggcgacatcgaggaggccgtggtgatcaccgacagacagaccggcaagagcagaggctacggcttcgtgaccatggccgacagagccgccgccgagagagcctgcaaggaccccaaccccatcatcgacggcagaaaggccaacgtgaacctggcctacctgggcgccaagcccagaagcctgcagaccggctag

SEQ ID NO: 97808 - DNA, 1095 bp, synthetic construct
  misc_feature 1..1095: note = Description of Artificial Sequence: Synthetic coding sequence
  source 1..1095: mol_type = other DNA
atggtgaagctgttcatcggcaacctgcccagagaggccaccgagcaggagatcagaagcctgttcgagcagtacggcaaggtgctggagtgcgacatcatcaagaactacggcttcgtgcacatcgaggacaagaccgccgccgaggacgccatcagaaacctgcaccactacaagctgcacggcgtgaacatcaacgtggaggccagcaagaacaagagcaagaccagcaccaagctgcacgtgggcaacatcagccccacctgcaccaacaaggagctgagagccaagttcgaggagtacggccccgtgatcgagtgcgacatcgtgaaggactacgccttcgtgcacatggagagagccgaggacgccgtggaggccatcagaggcctggacaacaccgagttccagggcaagagaatgcacgtgcagctgagcaccagcagactgagaaccgcccccggcatgggcgaccagagcggctgctacagatgcggcaaggagggccactggagcaaggagtgccccatcgacagaagcggcagagtggccgacctgaccgagcagtacaacgagcagtacggcgccgtgagaaccccctacaccatgagctacggcgacagcctgtactacaacaacgcctacggcgccctggacgcctactacaagagatgcagagccgccagaagctacgaggccgtggccgccgccgccgccagcgtgtacaactacgccgagcagaccctgagccagctgccccaggtgcagaacaccgccatggccagccacctgaccagcaccagcctggacccctacgacagacacctgctgcccaccagcggcgccgccgccaccgccgccgccgccgccgccgccgccgccgccgtgaccgccgccagcaccagctactacggcagagacagaagccccctgagaagagccaccgcccccgtgcccaccgtgggcgagggctacggctacggccacgagagcgagctgagccaggccagcgccgccgccagaaacagcctgtacgacatggccagatacgagagagagcagtacgccgacagagccagatacagcgccttctag

SEQ ID NO: 97809 - DNA, 1095 bp, synthetic construct; identical to SEQ ID NO: 97808
  misc_feature 1..1095: note = Description of Artificial Sequence: Synthetic coding sequence
  source 1..1095: mol_type = other DNA

SEQ ID NO: 97810 - DNA, 1095 bp, synthetic construct; identical to SEQ ID NO: 97808
  misc_feature 1..1095: note = Description of Artificial Sequence: Synthetic coding sequence
  source 1..1095: mol_type = other DNA

SEQ ID NO: 97811 - DNA, 534 bp, synthetic construct
  misc_feature 1..534: note = Description of Artificial Sequence: Synthetic coding sequence
  source 1..534: mol_type = other DNA
atggtgaagctgttcatcggcaacctgcccagagaggccaccgagcaggagatcagaagcctgttcgagcagtacggcaaggtgctggagtgcgacatcatcaagaactacggcttcgtgcacatcgaggacaagaccgccgccgaggacgccatcagaaacctgcaccactacaagctgcacggcgtgaacatcaacgtggaggccagcaagaacaagagcaagaccagcaccaagctgcacgtgggcaacatcagccccacctgcaccaacaaggagctgagagccaagttcgaggagtacggccccgtgatcgagtgcgacatcgtgaaggactacgccttcgtgcacatggagagagccgaggacgccgtggaggccatcagaggcctggacaacaccgagttccagggcgagccccccagcctgggcagaggcctgaacaccagactgtgcgccgagaacggctggatcagcaagagaagaggcctggtgaagatcaccgccgtgggctggctggtgatgaagaagtag

SEQ ID NO: 97812 - DNA, 534 bp, synthetic construct; identical to SEQ ID NO: 97811
  misc_feature 1..534: note = Description of Artificial Sequence: Synthetic coding sequence
  source 1..534: mol_type = other DNA

SEQ ID NO: 97813 - DNA, 522 bp, synthetic construct
  misc_feature 1..522: note = Description of Artificial Sequence: Synthetic coding sequence
  source 1..522: mol_type = other DNA
atggtgaagctgttcatcggcaacctgcccagagaggccaccgagcaggagatcagaagcctgttcgagcagtacggcaaggtgctggagtgcgacatcatcaagaactacggcttcgtgcacatcgaggacaagaccgccgccgaggacgccatcagaaacctgcaccactacaagctgcacggcgtgaacatcaacgtggaggccagcaagaacaagagcaagaccagcaccaagctgcacgtgggcaacatcagccccacctgcaccaacaaggagctgagagccaagttcgaggagtacggccccgtgatcgagtgcgacatcgtgaaggactacgccttcgtgcacatggagagagccgaggacgccgtggaggccatcagaggcctggacaacaccgagttccagggcaagatcacccccgtgaccgagggctactgctgctgcaacaagggccacacctacatcttcaagaactgcaacctgatcctggagagcagaaagagcagaagatgctag

SEQ ID NO: 97814 - DNA, 432 bp, synthetic construct
  misc_feature 1..432: note = Description of Artificial Sequence: Synthetic coding sequence
  source 1..432: mol_type = other DNA
atggtgaagctgttcatcggcaacctgcccagagaggccaccgagcaggagatcagaagcctgttcgagcagtacggcaaggtgctggagtgcgacatcatcaagaactacggcttcgtgcacatcgaggacaagaccgccgccgaggacgccatcagaaacctgcaccactacaagctgcacggcgtgaacatcaacgtggaggccagcaagaacaagagcaagaccagcaccaagctgcacgtgggcaacatcagccccacctgcaccaacaaggagctgagagccaagttcgaggagtacggccccgtgatcgagtgcgacatcgtgaaggactacgccttcgtgcacatggagagagccgaggacgccgtggaggccatcagaggcctggacaacaccgagttccagggcggcatgtgcgtgggctag

SEQ ID NO: 97815 - DNA, 1443 bp, synthetic construct
  misc_feature 1..1443: note = Description of Artificial Sequence: Synthetic coding sequence
  source 1..1443: mol_type = other DNA
atggccggcgccggccccgcccccggcctgcccggcgccggcggccccgtggtgcccggccccggcgccggcatccccggcaagagcggcgaggagagactgaaggagatggaggccgagatggccctgttcgagcaggaggtgctgggcgcccccgtgcccggcatccccaccgccgtgcccgccgtgcccaccgtgcccaccgtgcccaccgtggaggccatgcaggtgcccgccgcccccgtgatcagacccatcatcgccaccaacacctaccagcaggtgcagcagaccctggaggccagagccgccgccgccgccaccgtggtgccccccatggtgggcggcccccccttcgtgggccccgtgggcttcggccccggcgacagaagccacctggacagccccgaggccagagaggccatgttcctgagaagagccgccgtggccccccagagagcccccatcctgagacccgccttcgtgccccacgtgctgcagagagccgacagcgccctgagcagcgccgccgccggccccagacccatggccctgagacccccccaccaggccctggtgggcccccccctgcccggcccccccggcccccccatgatgctgccccccatggccagagcccccggcccccccctgggcagcatggccgccctgagaccccccctggaggagcccgccgcccccagagagctgggcctgggcctgggcctgggcctgaaggagaaggaggaggccgtggtggccgccgccgccggcctggaggaggccagcgccgccgtggccgtgggcgccggcggcgcccccgccggccccgccgtgatcggccccagcctgcccctggccctggccatgcccctgcccgagcccgagcccctgcccctgcccctggaggtggtgagaggcctgctgccccccctgagaatccccgagctgctgagcctgagacccagacccagaccccccagacccgagcccccccccggcctgatggccctggaggtgcccgagcccctgggcgaggacaagaagaagggcaagcccgagaagctgaagagatgcatcagaaccgccgccggcagcagctgggaggaccccagcctgctggagtgggacgccgacgacttcagaatcttctgcggcgacctgggcaacgaggtgaacgacgacatcctggccagagccttcagcagattccccagcttcctgaaggccaaggtgatcagagacaagagaaccggcaagaccaagggctacggcttcgtgagcttcaaggaccccagcgactacgtgagagccatgagagagatgaacggcaagtacgtgggcagcagacccatcaagctgagaaagagcatgtggaaggacagaaacctggacgtggtgagaaagaagcagaaggagaagaagaagctgggcctgagatag

SEQ ID NO: 97816 - DNA, 1356 bp, synthetic construct
  misc_feature 1..1356: note = Description of Artificial Sequence: Synthetic coding sequence
  source 1..1356: mol_type = other DNA
atggccggcgccggccccgcccccggcctgcccggcgccggcggccccgtggtgcccggccccggcgccggcatccccggcaagagcggcgaggagagactgaaggagatggaggccgagatggccctgttcgagcaggaggtgctgggcgcccccgtgcccggcatccccaccgccgtgcccgccgtgcccaccgtgcccaccgtgcccaccgtggaggccatgcaggtgcccgccgcccccgtgatcagacccatcatcgccaccaacacctaccagcaggtgcagcagaccctggaggccagagccgccgccgccgccaccgtggtgccccccatggtgggcggcccccccttcgtgggccccgtgggcttcggccccggcgacagaagccacctggacagccccgaggccagagaggccatgttcctgagaagagccgccgccggccccagacccatggccctgagacccccccaccaggccctggtgggcccccccctgcccggcccccccggcccccccatgatgctgccccccatggccagagcccccggcccccccctgggcagcatggccgccctgagaccccccctggaggagcccgccgcccccagagagctgggcctgggcctgggcctgggcctgaaggagaaggaggaggccgtggtggccgccgccgccggcctggaggaggccagcgccgccgtggccgtgggcgccggcggcgcccccgccggccccgccgtgatcggccccagcctgcccctggccctggccatgcccctgcccgagcccgagcccctgcccctgcccctggaggtggtgagaggcctgctgccccccctgagaatccccgagctgctgagcctgagacccagacccagaccccccagacccgagcccccccccggcctgatggccctggaggtgcccgagcccctgggcgaggacaagaagaagggcaagcccgagaagctgaagagatgcatcagaaccgccgccggcagcagctgggaggaccccagcctgctggagtgggacgccgacgacttcagaatcttctgcggcgacctgggcaacgaggtgaacgacgacatcctggccagagccttcagcagattccccagcttcctgaaggccaaggtgatcagagacaagagaaccggcaagaccaagggctacggcttcgtgagcttcaaggaccccagcgactacgtgagagccatgagagagatgaacggcaagtacgtgggcagcagacccatcaagctgagaaagagcatgtggaaggacagaaacctggacgtggtgagaaagaagcagaaggagaagaagaagctgggcctgagatag

SEQ ID NO: 97817 - DNA, 801 bp, synthetic construct
  misc_feature 1..801: note = Description of Artificial Sequence: Synthetic coding sequence
  source 1..801: mol_type = other DNA
atgggcgccgccgccgccgaggccgacagaaccctgttcgtgggcaacctggagaccaaggtgaccgaggagctgctgttcgagctgttccaccaggccggccccgtgatcaaggtgaagatccccaaggacaaggacggcaagcccaagcagttcgccttcgtgaacttcaagcacgaggtgagcgtgccctacgccatgaacctgctgaacggcatcaagctgtacggcagacccatcaagatccagttcagaagcggcagcagccacgccccccaggacgtgagcctgagctacccccagcaccacgtgggcaacagcagccccaccagcaccagccccagcagatacgagagaaccatggacaacatgaccagcagcgcccagatcatccagagaagcttcagcagccccgagaacttccagagacaggccgtgatgaacagcgccctgagacagatgagctacggcggcaagttcggcagcagccccctggaccagagcggcttcagccccagcgtgcagagccacagccacagcttcaaccagagcagcagcagccagtggagacagggcacccccagcagccagagaaaggtgagaatgaacagctacccctacctggccgacagacactacagcagagagcagagatacaccgaccacggcagcgaccaccactacagaggcaagagagacgacttcttctacgaggacagaaaccacgacgactggagccacgactacgacaacagaagagacagcagcagagacggcaagtggagaagcagcagacactag

SEQ ID NO: 97818 - DNA, 525 bp, synthetic construct
  misc_feature 1..525: note = Description of Artificial Sequence: Synthetic coding sequence
  source 1..525: mol_type = other DNA
atggccgacgtgctggacctgcacgaggccggcggcgaggacttcgccatggacgaggacggcgacgagagcatccacaagctgaaggagaaggccaagaagagaaagggcagaggcttcggcagcgaggagggcagcagagccagaatgagagaggactacgacagcgtggagcaggacggcgacgagcccggcccccagagaagcgtggagggctggatcctgttcgtgaccggcgtgcacgaggaggccaccgaggaggacatccacgacaagttcgccgagtacggcgagatcaagaacatccacctgaacctggacagaagaaccggctacctgaagggctacaccctggtggagtacgagacctacaaggaggcccaggccgccatggagggcctgaacggccaggacctgatgggccagcccatcagcgtggactggtgcttcgtgagaggcccccccaagggcaagagaagaggcggcagaagaagaagcagaagccccgacagaagaagaagatag

SEQ ID NO: 97819 - DNA, 522 bp, synthetic construct
  misc_feature 1..522: note = Description of Artificial Sequence: Synthetic coding sequence
  source 1..522: mol_type = other DNA
atggccgacgtgctggacctgcacgaggccggcggcgaggacttcgccatggacgaggacggcgacgagagcatccacaagctgaaggagaaggccaagaagagaaagggcagaggcttcggcagcgagggcagcagagccagaatgagagaggactacgacagcgtggagcaggacggcgacgagcccggcccccagagaagcgtggagggctggatcctgttcgtgaccggcgtgcacgaggaggccaccgaggaggacatccacgacaagttcgccgagtacggcgagatcaagaacatccacctgaacctggacagaagaaccggctacctgaagggctacaccctggtggagtacgagacctacaaggaggcccaggccgccatggagggcctgaacggccaggacctgatgggccagcccatcagcgtggactggtgcttcgtgagaggcccccccaagggcaagagaagaggcggcagaagaagaagcagaagccccgacagaagaagaagatag

SEQ ID NO: 97820 - DNA, 1179 bp, synthetic construct
  misc_feature 1..1179: note = Description of Artificial Sequence: Synthetic coding sequence
  source 1..1179: mol_type = other DNA
atggtggaggccgacagacccggcaagctgttcatcggcggcctgaacctggagaccgacgagaaggccctggaggccgagttcggcaagtacggcagaatcgtggaggtgctgctgatgaaggacagagagaccaacaagagcagaggcttcgccttcgtgaccttcgagagccccgccgacgccaaggccgccgccagagacatgaacggcaagagcctggacggcaaggccatcaaggtggcccaggccaccaagcccgccttcgagagcagcagaagaggcccccccccccccagaagcagaggcagacccagattcctgagaggcaccagaggcggcggcggcggccccagaagaagccccagcagaggcggccccgacgacgacggcggctacaccgccgacttcgacctgagacccagcagagcccccatgcccatgaagagaggccccccccccagaagagtgggccccccccccaagagagccgcccccagcggccccgccagaagcagcggcggcggcatgagaggcagagccctggccgtgagaggcagagacggctacagcggcccccccagaagagagcccctgccccccagaagagacccctacctgggccccagagacgagggctacagcagcagagacggctacagcagcagagactacagagagcccagaggcttcgcccccagccccggcgagtacacccacagagactacggccacagcagcgtgagagacgactgccccctgagaggctacagcgacagagacggctacggcggcagagacagagactacggcgaccacctgagcagaggcagccacagagagcccttcgagagctacggcgagctgagaggcgccgcccccggcagaggcaccccccccagctacggcggcggcggcagatacgaggagtacagaggctacagccccgacgcctacagcggcggcagagacagctacagcagcagctacggcagaagcgacagatacagcagaggcagacacagagtgggcagacccgacagaggcctgagcctgagcatggagagaggctgccccccccagagagacagctacagcagaagcggctgcagagtgcccagaggcggcggcagactgggcggcagactggagagaggcggcggcagaagcagatactag

SEQ ID NO: 97821 - DNA, 1491 bp, synthetic construct
  misc_feature 1..1491: note = Description of Artificial Sequence: Synthetic coding sequence
  source 1..1491: mol_type = other DNA
atggtggaggccgaccaccccggcaagctgttcatcggcggcctgaacagagagaccaacgagaagatgctgaaggccgtgttcggcaagcacggccccatcagcgaggtgctgctgatcaaggacagaaccagcaagagcagaggcttcgccttcatcaccttcgagaaccccgccgacgccaagaacgccgccaaggacatgaacggcaagagcctgcacggcaaggccatcaaggtggagcaggccaagaagcccagcttccagagcggcggcagaagaagaccccccgccagcagcagaaacagaagccccagcggcagcctgagaagcgccagaggcagcagaggcggcaccagaggctggctgcccagccacgagggccacctggacgacggcggctacacccccgacctgaagatgagctacagcagaggcctgatccccgtgaagagaggccccagcagcagaagcggcggccccccccccaagaagagcgcccccagcgccgtggccagaagcaacagctggatgggcagccagggccccatgagccagagaagagagaactacggcgtgccccccagaagagccaccatcagcagctggagaaacgacagaatgagcaccagacacgacggctacgccaccaacgacggcaaccaccccagctgccaggagaccagagactacgccccccccagcagaggctacgcctacagagacaacggccacagcaacagagacgagcacagcagcagaggctacagaaaccacagaagcagcagagagaccagagactacgccccccccagcagaggccacgcctacagagactacggccacagcagaagagacgagagctacagcagaggctacagaaacagaagaagcagcagagagaccagagagtacgccccccccagcagaggccacggctacagagactacggccacagcagaagacacgagagctacagcagaggctacagaaaccaccccagcagcagagagaccagagactacgcccccccccacagagactacgcctacagagactacggccacagcagctgggacgagcacagcagcagaggctacagctaccacgacggctacggcgaggccctgggcagagaccacagcgagcacctgagcggcagcagctacagagacgccctgcagagatacggcaccagccacggcgccccccccgccagaggccccagaatgagctacggcggcagcacctgccacgcctacagcaacaccagagacagatacggcagaagctgggagagctacagcagctgcggcgacttccactactgcgacagagagcacgtgtgcagaaaggaccagagaaacccccccagcctgggcagagtgctgcccgaccccagagaggcctgcggcagcagcagctacgtggccagcatcgtggacggcggcgagagcagaagcgagaagggcgacagcagcagatactag

SEQ ID NO: 97822 - DNA, 1491 bp, synthetic construct; identical to SEQ ID NO: 97821
  misc_feature 1..1491: note = Description of Artificial Sequence: Synthetic coding sequence
  source 1..1491: mol_type = other DNA

SEQ ID NO: 97823 - DNA, 870 bp, synthetic construct
  misc_feature 1..870: note = Description of Artificial Sequence: Synthetic coding sequence
  source 1..870: mol_type = other DNA
atgagcaccagacacgacggctacgccaccaacgacggcaaccaccccagctgccaggagaccagagactacgccccccccagcagaggctacgcctacagagacaacggccacagcaacagagacgagcacagcagcagaggctacagaaaccacagaagcagcagagagaccagagactacgccccccccagcagaggccacgcctacagagactacggccacagcagaagagacgagagctacagcagaggctacagaaacagaagaagcagcagagagaccagagagtacgccccccccagcagaggccacggctacagagactacggccacagcagaagacacgagagctacagcagaggctacagaaaccaccccagcagcagagagaccagagactacgcccccccccacagagactacgcctacagagactacggccacagcagctgggacgagcacagcagcagaggctacagctaccacgacggctacggcgaggccctgggcagagaccacagcgagcacctgagcggcagcagctacagagacgccctgcagagatacggcaccagccacggcgccccccccgccagaggccccagaatgagctacggcggcagcacctgccacgcctacagcaacaccagagacagatacggcagaagctgggagagctacagcagctgcggcgacttccactactgcgacagagagcacgtgtgcagaaaggaccagagaaacccccccagcctgggcagagtgctgcccgaccccagagaggcctgcggcagcagcagctacgtggccagcatcgtggacggcggcgagagcagaagcgagaagggcgacagcagcagatactag

SEQ ID NO: 97824 - DNA, 1266 bp, synthetic construct
  misc_feature 1..1266: note = Description of Artificial Sequence: Synthetic coding sequence
  source 1..1266: mol_type = other DNA
atgggcaagagactggaccagccccagatgtacccccagtacacctactactacccccactacctgcagaccaagcagagctacgcccccgccccccaccccatggccccccccagccccagcaccaacagcagcagcaacaacagcagcaacaacagcagcggcgagcagctgagcaagaccaacctgtacatcagaggcctgccccccggcaccaccgaccaggacctgatcaagctgtgccagccctacggcaagatcgtgagcaccaaggccatcctggacaagaacaccaaccagtgcaagggctacggcttcgtggacttcgacagccccgccgccgcccagaaggccgtggccagcctgaaggccaacggcgtgcaggcccagatggccaagcagcaggagcaggaccccaccaacctgtacatcagcaacctgcccatcagcatggacgagcaggagctggagaacatgctgaagcccttcggccacgtgatcagcaccagaatcctgagagacgccaacggcgtgagcagaggcgtgggcttcgccagaatggagagcaccgagaagtgcgaggtggtgatccagcacttcaacggcaagtacctgaagaccccccccggcatccccgcccccagcgagcccctgctgtgcaagttcgccgacggcggccagaagaagagacagaaccagagcaagtacacccagaacggcagaccctggcccagagagggcgaggccggcatggccctgacctacgaccccaccgccgccatccagaacggcttctacagcagcccctacagcatcgccaccaacagaatgatcccccagaccagcatcacccccttcatcgccgccagccccgtgagcacctaccaggtgcagagcaccagctggatgccccaccccccctacgtgatgcagcccaccggcgccgtgatcacccccaccatggaccaccccatgagcatgcagcccgccaacatgatgggccccctgacccagcagatgaaccacctgagcctgggcaccaccggcacctacatgaccgccgccgcccccatgcagggcacctacatcccccagtacacccccgtgccccccaccgccgtgagcatcgagggcgtggtggccgacaccagcccccagaccgtggcccccagcagccaggacaccagcggccagcagcagcagatcgccgtggacaccagcaacgagcacgcccccgcctacagctaccagcagagcaagccctag

SEQ ID NO: 97825 - DNA, 1263 bp, synthetic construct
  misc_feature 1..1263: note = Description of Artificial Sequence: Synthetic coding sequence
  source 1..1263: mol_type = other DNA
atgggcaagagactggaccagccccagatgtacccccagtacacctactactacccccactacctgcagaccaagcagagctacgcccccgccccccaccccatggccccccccagccccagcaccaacagcagcagcaacaacagcagcaacaacagcagcggcgagcagctgagcaagaccaacctgtacatcagaggcctgccccccggcaccaccgaccaggacctgatcaagctgtgccagccctacggcaagatcgtgagcaccaaggccatcctggacaagaacaccaaccagtgcaagggctacggcttcgtggacttcgacagccccgccgccgcccagaaggccgtggccagcctgaaggccaacggcgtgcaggcccagatggccaagcagcaggagcaggaccccaccaacctgtacatcagcaacctgcccatcagcatggacgagcaggagctggagaacatgctgaagcccttcggccacgtgatcagcaccagaatcctgagagacgccaacggcgtgagcagaggcgtgggcttcgccagaatggagagcaccgagaagtgcgaggtggtgatccagcacttcaacggcaagtacctgaagaccccccccggcatccccgcccccagcgagcccctgctgtgcaagttcgccgacggcggccagaagaagagacagaaccagagcaagtacacccagaacggcagaccctggcccagagagggcgaggccggcatggccctgacctacgaccccaccgccgccatccagaacggcttctacagcagcccctacagcatcgccaccaacagaatgatcccccagaccagcatcacccccttcatcgccgccagccccgtgagcacctaccaggtgcagagcaccagctggatgccccaccccccctacgtgatgcagcccaccggcgccgtgatcacccccaccatggaccaccccatgagcatgcagcccgccaacatgatgggccccctgacccagcagatgaaccacctgagcctgggcaccaccggcacctacatgaccgccgccgcccccatgcagggcacctacatcccccagtacacccccgtgccccccaccgccgtgagcatcgagggcgtggtggccgacaccagcccccagaccgtggcccccagcagccaggacaccagcggccagcagcagcagatcgccgtggacaccagcaacgagcacgcccccgcctacagctaccagcagagcaagtag

SEQ ID NO: 97826 - DNA, 1260 bp, synthetic construct
  misc_feature 1..1260: note = Description of Artificial Sequence: Synthetic coding sequence
  source 1..1260: mol_type = other DNA
atgggcaagagactggaccagccccagatgtacccccagtacacctactactacccccactacctgcagaccaagagctacgcccccgccccccaccccatggccccccccagccccagcaccaacagcagcagcaacaacagcagcaacaacagcagcggcgagcagctgagcaagaccaacctgtacatcagaggcctgccccccggcaccaccgaccaggacctgatcaagctgtgccagccctacggcaagatcgtgagcaccaaggccatcctggacaagaacaccaaccagtgcaagggctacggcttcgtggacttcgacagccccgccgccgcccagaaggccgtggccagcctgaaggccaacggcgtgcaggcccagatggccaagcagcaggagcaggaccccaccaacctgtacatcagcaacctgcccatcagcatggacgagcaggagctggagaacatgctgaagcccttcggccacgtgatcagcaccagaatcctgagagacgccaacggcgtgagcagaggcgtgggcttcgccagaatggagagcaccgagaagtgcgaggtggtgatccagcacttcaacggcaagtacctgaagaccccccccggcatccccgcccccagcgagcccctgctgtgcaagttcgccgacggcggccagaagaagagacagaaccagagcaagtacacccagaacggcagaccctggcccagagagggcgaggccggcatggccctgacctacgaccccaccgccgccatccagaacggcttctacagcagcccctacagcatcgccaccaacagaatgatcccccagaccagcatcacccccttcatcgccgccagccccgtgagcacctaccagggcgccgtgatcacccccaccatggaccaccccatgagcatgcagcccgccaacatgatgggccccctgacccagcagatgaaccacctgagcctgggcaccaccggcaccatccagagccaggacagaatcatgatcctgcaccagctgctgtgccagtacatgaccgccgccgcccccatgcagggcacctacatcccccagtacacccccgtgccccccaccgccgtgagcatcgagggcgtggtggccgacaccagcccccagaccgtggcccccagcagccaggacaccagcggccagcagcagcagatcgccgtggacaccagcaacgagcacgcccccgcctacagctaccagcagagcaagccctag

SEQ ID NO: 97827 - DNA, 1314 bp, synthetic construct
  misc_feature 1..1314: note = Description of Artificial Sequence: Synthetic coding sequence
  source 1..1314: mol_type = other DNA
atgggcaagagactggaccagccccagatgtacccccagtacacctactactacccccactacctgcagaccaagcagagctacgcccccgccccccaccccatggccccccccagccccagcaccaacagcagcagcaacaacagcagcaacaacagcagcggcgagcagctgagcaagaccaacctgtacatcagaggcctgccccccggcaccaccgaccaggacctgatcaagctgtgccagccctacggcaagatcgtgagcaccaaggccatcctggacaagaacaccaaccagtgcaagggctacggcttcgtggacttcgacagccccgccgccgcccagaaggccgtggccagcctgaaggccaacggcgtgcaggcccagatggccaagcagcaggagcaggaccccaccaacctgtacatcagcaacctgcccatcagcatggacgagcaggagctggagaacatgctgaagcccttcggccacgtgatcagcaccagaatcctgagagacgccaacggcgtgagcagaggcgtgggcttcgccagaatggagagcaccgagaagtgcgaggtggtgatccagcacttcaacggcaagtacctgaagaccccccccggcatccccgcccccagcgagcccctgctgtgcaagttcgccgacggcggccagaagaagagacagaaccagagcaagtacacccagaacggcagaccctggcccagagagggcgaggccggcatggccctgacctacgaccccaccgccgccatccagaacggcttctacagcagcccctacagcatcgccaccaacagaatgatcccccagaccagcatcacccccttcatcgccgccagccccgtgagcacctaccaggtgcagagcaccagctggatgccccaccccccctacgtgatgcagcccaccggcgccgtgatcacccccaccatggaccaccccatgagcatgcagcccgccaacatgatgggccccctgacccagcagatgaaccacctgagcctgggcaccaccggcaccatccagagccaggacagaatcatgatcctgcaccagctgctgtgccagtacatgaccgccgccgcccccatgcagggcacctacatcccccagtacacccccgtgccccccaccgccgtgagcatcgagggcgtggtggccgacaccagcccccagaccgtggcccccagcagccaggacaccagcggccagcagcagcagatcgccgtggacaccagcaacgagcacgcccccgcctacagctaccagcagagcaagccctag

SEQ ID NO: 97828 - DNA, 1305 bp, synthetic construct
  misc_feature 1..1305: note = Description of Artificial Sequence: Synthetic coding sequence
  source 1..1305: mol_type = other DNA
atgggcaagagactggaccagccccagatgtacccccagtacacctactactacccccactacctgcagaccaagcagagctacgcccccgccccccaccccatggccccccccagccccagcaccaacagcagcagcaacaacagcagcaacaacagcagcggcgagcagctgagcaagaccaacctgtacatcagaggcctgccccccggcaccaccgaccaggacctgatcaagctgtgccagccctacggcaagatcgtgagcaccaaggccatcctggacaagaacaccaaccagtgcaagggctacggcttcgtggacttcgacagccccgccgccgcccagaaggccgtggccagcctgaaggccaacggcgtgcaggcccagatggccaagcagcaggagcaggaccccaccaacctgtacatcagcaacctgcccatcagcatggacgagcaggagctggagaacatgctgaagcccttcggccacgtgatcagcaccagaatcctgagagacgccaacggcgtgagcagaggcgtgggcttcgccagaatggagagcaccgagaagtgcgaggtggtgatccagcacttcaacggcaagtacctgaagaccccccccggcatccccgcccccagcgagcccctgctgtgcaagttcgccgacggcggccagaagaagagacagaaccagagcaagtacacccagaacggcagaccctggcccagagagggcgaggtgctgagaggcagaaccgtgcccagacagaacagagaggccggcatggccctgacctacgaccccaccgccgccatccagaacggcttctacagcagcccctacagcatcgccaccaacagaatgatcccccagaccagcatcacccccttcatcgccgccagccccgtgagcacctaccaggtgcagagcaccagctggatgccccaccccccctacgtgatgcagcccaccggcgccgtgatcacccccaccatggaccaccccatgagcatgcagcccgccaacatgatgggccccctgacccagcagatgaaccacctgagcctgggcaccaccggcacctacatgaccgccgccgcccccatgcagggcacctacatcccccagtacacccccgtgccccccaccgccgtgagcatcgagggcgtggtggccgacaccagcccccagaccgtggcccccagcagccaggacaccagcggccagcagcagcagatcgccgtggacaccagcaacgagcacgcccccgcctacagctaccagcagagcaagccctag

SEQ ID NO: 97829 - DNA, 1311 bp, synthetic construct
  misc_feature 1..1311: note = Description of Artificial Sequence: Synthetic coding sequence
  source 1..1311: mol_type = other DNA
atgggcaagagactggaccagccccagatgtacccccagtacacctactactacccccactacctgcagaccaagagctacgcccccgccccccaccccatggccccccccagccccagcaccaacagcagcagcaacaacagcagcaacaacagcagcggcgagcagctgagcaagaccaacctgtacatcagaggcctgccccccggcaccaccgaccaggacctgatcaagctgtgccagccctacggcaagatcgtgagcaccaaggccatcctggacaagaacaccaaccagtgcaagggctacggcttcgtggacttcgacagccccgccgccgcccagaaggccgtggccagcctgaaggccaacggcgtgcaggcccagatggccaagcagcaggagcaggaccccaccaacctgtacatcagcaacctgcccatcagcatggacgagcaggagctggagaacatgctgaagcccttcggccacgtgatcagcaccagaatcctgagagacgccaacggcgtgagcagaggcgtgggcttcgccagaatggagagcaccgagaagtgcgaggtggtgatccagcacttcaacggcaagtacctgaagaccccccccggcatccccgcccccagcgagcccctgctgtgcaagttcgccgacggcggccagaagaagagacagaaccagagcaagtacacccagaacggcagaccctggcccagagagggcgaggccggcatggccctgacctacgaccccaccgccgccatccagaacggcttctacagcagcccctacagcatcgccaccaacagaatgatcccccagaccagcatcacccccttcatcgccgccagccccgtgagcacctaccaggtgcagagcaccagctggatgccccaccccccctacgtgatgcagcccaccggcgccgtgatcacccccaccatggaccaccccatgagcatgcagcccgccaacatgatgggccccctgacccagcagatgaaccacctgagcctgggcaccaccggcaccatccagagccaggacagaatcatgatcctgcaccagctgctgtgccagtacatgaccgccgccgcccccatgcagggcacctacatcccccagtacacccccgtgccccccaccgccgtgagcatcgagggcgtggtggccgacaccagcccccagaccgtggcccccagcagccaggacaccagcggccagcagcagcagatcgccgtggacaccagcaacgagcacgcccccgcctacagctaccagcagagcaagccctag

SEQ ID NO: 97830 - DNA, 1302 bp, synthetic construct
  misc_feature 1..1302: note = Description of Artificial Sequence: Synthetic coding sequence
  source 1..1302: mol_type = other DNA
atgggcaagagactggaccagccccagatgtacccccagtacacctactactacccccactacctgcagaccaagcagagctacgcccccgccccccaccccatggccccccccagccccagcaccaacagcagcagcaacaacagcagcaacaacagcagcggcgagcagctgagcaagaccaacctgtacatcagaggcctgccccccggcaccaccgaccaggacctgatcaagctgtgccagccctacggcaagatcgtgagcaccaaggccatcctggacaagaacaccaaccagtgcaagggctacggcttcgtggacttcgacagccccgccgccgcccagaaggccgtggccagcctgaaggccaacggcgtgcaggcccagatggccaagcagcaggagcaggaccccaccaacctgtacatcagcaacctgcccatcagcatggacgagcaggagctggagaacatgctgaagcccttcggccacgtgatcagcaccagaatcctgagagacgccaacggcgtgagcagaggcgtgggcttcgccagaatggagagcaccgagaagtgcgaggtggtgatccagcacttcaacggcaagtacctgaagaccccccccggcatccccgcccccagcgagcccctgctgtgcaagttcgccgacggcggccagaagaagagacagaaccagagcaagtacacccagaacggcagaccctggcccagagagggcgaggtgctgagaggcagaaccgtgcccagacagaacagagaggccggcatggccctgacctacgaccccaccgccgccatccagaacggcttctacagcagcccctacagcatcgccaccaacagaatgatcccccagaccagcatcacccccttcatcgccgccagccccgtgagcacctaccaggtgcagagcaccagctggatgccccaccccccctacgtgatgcagcccaccggcgccgtgatcacccccaccatggaccaccccatgagcatgcagcccgccaacatgatgggccccctgacccagcagatgaaccacctgagcctgggcaccaccggcacctacatgaccgccgccgcccccatgcagggcacctacatcccccagtacacccccgtgccccccaccgccgtgagcatcgagggcgtggtggccgacaccagcccccagaccgtggcccccagcagccaggacaccagcggccagcagcagcagatcgccgtggacaccagcaacgagcacgcccccgcctacagctaccagcagagcaagtag

SEQ ID NO: 97831 - DNA, 615 bp, synthetic construct
  misc_feature 1..615: note = Description of Artificial Sequence: Synthetic coding sequence
  source 1..615: mol_type = other DNA
atgaacaacggcggcaaggccgagaaggagaacacccccagcgaggccaacctgcaggaggaggaggtgagaaccctgttcgtgagcggcctgcccctggacatcaagcccagagagctgtacctgctgttcagacccttcaagggctacgagggcagcctgatcaagctgaccagcaagcagcccgtgggcttcgtgagcttcgacagcagaagcgaggccgaggccgccaagaacgccctgaacggcatcagattcgaccccgagatcccccagaccctgagactggagttcgccaaggccaacaccaagatggccaagaacaagctggtgggcacccccaaccccagcacccccctgcccaacaccgtgccccagttcatcgccagagagccctacgagctgaccgtgcccgccctgtaccccagcagccccgaggtgtgggccccctaccccctgtaccccgccgagctggcccccgccctgcccccccccgccttcacctaccccgccagcctgcacgcccagctgtgcgagggccagaccgtgagaagaagccaccccctgagcgcccccagccccgacagcgccagcctggcctggttccccgtgtag

SEQ ID NO: 97832 - DNA, 591 bp, synthetic construct
  misc_feature 1..591: note = Description of Artificial Sequence: Synthetic coding sequence
  source 1..591: mol_type = other DNA
atgaacaacggcggcaaggccgagaaggagaacacccccagcgaggccaacctgcaggaggaggaggtgagaaccctgttcgtgagcggcctgcccctggacatcaagcccagagagctgtacctgctgttcagacccttcaagggctacgagggcagcctgatcaagctgaccagcaagcagcccgtgggcttcgtgagcttcgacagcagaagcgaggccgaggccgccaagaacgccctgaacggcatcagattcgaccccgagatcccccagaccctgagactggagttcgccaaggccaacaccaagatggccaagaacaagctggtgggcacccccaaccccagcacccccctgcccaacaccgtgccccagttcatcgccagagagccctacgagctgaccgtgcccgccctgtaccccagcagccccgaggtgtgggccccctaccccctgtaccccgccgagctggcccccgccctgcccccccccgccttcacctaccccgccagcctgcacgcccagatgagatggctgccccccagcgaggccaccagccagggctggaagagcagacagttctgctag

SEQ ID NO: 97833 - DNA, 660 bp, synthetic construct
  misc_feature 1..660: note = Description of Artificial Sequence: Synthetic coding sequence
  source 1..660: mol_type = other DNA
atgaacaacggcggcaaggccgagaaggagaacacccccagcgaggccaacctgcaggaggaggaggtgagaaccctgttcgtgagcggcctgcccctggacatcaagcccagagagctgtacctgctgttcagacccttcaagggctacgagggcagcctgatcaagctgaccagcaagcagcccgtgggcttcgtgagcttcgacagcagaagcgaggccgaggccgccaagaacgccctgaacggcatcagattcgaccccgagatcccccagaccctgagactggagttcgccaaggccaacaccaagatggccaagaacaagctggtgggcacccccaaccccagcacccccctgcccaacaccgtgccccagttcatcgccagagagccctacgagctgaccgtgcccgccctgtaccccagcagccccgaggtgtgggccccctaccccctgtaccccgccgagctggcccccgccctgcccccccccgccttcacctaccccgccagcctgcacgcccagtgcttcagccccgaggccaagcccaacacccccgtgttctgccccctgctgcagcagatcagattcgtgagcggcaacgtgttcgtgacctaccagcccaccgccgaccagcagagagagctgccctgctag

SEQ ID NO: 97834 - DNA, 591 bp, synthetic construct; identical to SEQ ID NO: 97832
  misc_feature 1..591: note = Description of Artificial Sequence: Synthetic coding sequence
  source 1..591: mol_type = other DNA

SEQ ID NO: 97835 - DNA, 462 bp, synthetic construct
  misc_feature 1..462: note = Description of Artificial Sequence: Synthetic coding sequence
  source 1..462: mol_type = other DNA
atgaacaacggcggcaaggccgagaaggagaacacccccagcgaggccaacctgcaggaggaggaggtgagaaccctgttcgtgagcggcctgcccctggacatcaagcccagagagctgtacctgctgttcagacccttcaagggctacgagggcagcctgatcaagctgaccagcaagcagcccgtgggcttcgtgagcttcgacagcagaagcgaggccgaggccgccaagaacgccctgaacggcatcagattcgaccccgagatcccccagaccctgagactggagttcgccaaggccaacaccaagatggccaagaacaagctggtgggcacccccaaccccagcacccccctgcccaacaccgtgccccagttcatcgccagagagcccctgatgagatggctgccccccagcgaggccaccagccagggctggaagagcagacagttctgctag

SEQ ID NO: 97836 - DNA, 1257 bp, synthetic construct
  misc_feature 1..1257: note = Description of Artificial Sequence: Synthetic coding sequence
  source 1..1257: mol_type = other DNA
atgctggccagccagggcgtgctgctgcacccctacggcgtgcccatgatcgtgcccgccgccccctacctgcccggcctgatccagggcaaccaggaggccgccgccgcccccgacaccatggcccagccctacgccagcgcccagttcgcccccccccagaacggcatccccgccgagtacaccgccccccacccccaccccgcccccgagtacaccggccagaccaccgtgcccgagcacaccctgaacctgtacccccccgcccagacccacagcgagcagagccccgccgacaccagcgcccagaccgtgagcggcaccgccacccagaccgacgacgccgcccccaccgacggccagccccagacccagcccagcgagaacaccgagaacaagagccagcccaagagactgcacgtgagcaacatccccttcagattcagagaccccgacctgagacagatgttcggccagttcggcaagatcctggacgtggagatcatcttcaacgagagaggcagcaagggcttcggcttcgtgaccttcgagaacagcgccgacgccgacagagccagagagaagctgcacggcaccgtggtggagggcagaaagatcgaggtgaacaacgccaccgccagagtgatgaccaacaagaagaccgtgaacccctacaccaacggctggaagctgaaccccgtggtgggcgccgtgtacagccccgagttctacgccggcaccgtgctgctgtgccaggccaaccaggagggcagcagcatgtacagcgcccccagcagcctggtgtacaccagcgccatgcccggcttcccctaccccgccgccaccgccgccgccgcctacagaggcgcccacctgagaggcagaggcagaaccgtgtacaacaccttcagagccgccgccccccccccccccatccccgcctacggcggcgtggtgtaccaggagcccgtgtacggcaacaagctgctgcagggcggctacgccgcctacagatacgcccagcccacccccgccaccgccgccgcctacagcgacagctacggcagagtgtacgccgccgacccctaccaccacgccctggcccccgcccccacctacggcgtgggcgccatgaacgccttcgcccccctgaccgacgccaagaccagaagccacgccgacgacgtgggcctggtgctgagcagcctgcaggccagcatctacagaggcggctacaacagattcgccccctactag

SEQ ID NO: 97837 - DNA, 1209 bp, synthetic construct
  misc_feature 1..1209: note = Description of Artificial Sequence: Synthetic coding sequence
  source 1..1209: mol_type = other DNA
atgatcgtgcccgccgccccctacctgcccggcctgatccagggcaaccaggaggccgccgccgcccccgacaccatggcccagccctacgccagcgcccagttcgcccccccccagaacggcatccccgccgagtacaccgccccccacccccaccccgcccccgagtacaccggccagaccaccgtgcccgagcacaccctgaacctgtacccccccgcccagacccacagcgagcagagccccgccgacaccagcgcccagaccgtgagcggcaccgccacccagaccgacgacgccgcccccaccgacggccagccccagacccagcccagcgagaacaccgagaacaagagccagcccaagagactgcacgtgagcaacatccccttcagattcagagaccccgacctgagacagatgttcggccagttcggcaagatcctggacgtggagatcatcttcaacgagagaggcagcaagggcttcggcttcgtgaccttcgagaacagcgccgacgccgacagagccagagagaagctgcacggcaccgtggtggagggcagaaagatcgaggtgaacaacgccaccgccagagtgatgaccaacaagaagaccgtgaacccctacaccaacggctggaagctgaaccccgtggtgggcgccgtgtacagccccgagttctacgccggcaccgtgctgctgtgccaggccaaccaggagggcagcagcatgtacagcgcccccagcagcctggtgtacaccagcgccatgcccggcttcccctaccccgccgccaccgccgccgccgcctacagaggcgcccacctgagaggcagaggcagaaccgtgtacaacaccttcagagccgccgccccccccccccccatccccgcctacggcggcgtggtgtaccaggacggcttctacggcgccgacatctacggcggctacgccgcctacagatacgcccagcccacccccgccaccgccgccgcctacagcgacagctacggcagagtgtacgccgccgacccctaccaccacgccctggcccccgcccccacctacggcgtgggcgccatgaacgccttcgcccccctgaccgacgccaagaccagaagccacgccgacgacgtgggcctggtgctgagcagcctgcaggccagcatctacagaggcggctacaacagattcgccccctactag

SEQ ID NO: 97838 - DNA, 1176 bp, synthetic construct
  misc_feature 1..1176: note = Description of Artificial Sequence: Synthetic coding sequence
  source 1..1176: mol_type = other DNA
atgctggccagccagggcgtgctgctgcacccctacggcgtgcccatgatcgtgcccgccgccccctacctgcccggcctgatccagggcaaccaggaggccgccgccgcccccgacaccatggcccagccctacgccagcgcccagttcgcccccccccagaacggcatccccgccgagtacaccgccccccacccccaccccgcccccgagtacaccggccagaccaccgtgcccgagcacaccctgaacctgtacccccccgcccagacccacagcgagcagagccccgccgacaccagcgcccagaccgtgagcggcaccgccacccagaccgacgacgccgcccccaccgacggccagccccagacccagcccagcgagaacaccgagaacaagagccagcccaagagactgcacgtgagcaacatccccttcagattcagagaccccgacctgagacagatgttcggccagttcggcaagatcctggacgtggagatcatcttcaacgagagaggcagcaagggcttcggcttcgtgaccttcgagaacagcgccgacgccgacagagccagagagaagctgcacggcaccgtggtggagggcagaaagatcgaggtgaacaacgccaccgccagagtgatgaccaacaagaagaccgtgaacccctacaccaacggctggaagctgaaccccgtggtgggcgccgtgtacagccccgagttctacgccgtgcccggcttcccctaccccgccgccaccgccgccgccgcctacagaggcgcccacctgagaggcagaggcagaaccgtgtacaacaccttcagagccgccgccccccccccccccatccccgcctacggcggcgtggtgtaccaggagcccgtgtacggcaacaagctgctgcagggcggctacgccgcctacagatacgcccagcccacccccgccaccgccgccgcctacagcgacagctacggcagagtgtacgccgccgacccctaccaccacgccctggcccccgcccccacctacggcgtgggcgccatgaacgccttcgcccccctgaccgacgccaagaccagaagccacgccgacgacgtgggcctggtgctgagcagcctgcaggccagcatctacagaggcggctacaacagattcgccccctactag

SEQ ID NO: 97839 - DNA, 1188 bp, synthetic construct
  misc_feature 1..1188: note = Description of Artificial Sequence: Synthetic coding sequence
  source 1..1188: mol_type = other DNA
atgctggccagccagggcgtgctgctgcacccctacggcgtgcccatgatcgtgcccgccgccccctacctgcccggcctgatccagggcaaccaggaggccgccgccgcccccgacaccatggcccagccctacgccagcgcccagttcgcccccccccagaacggcatccccgccgagtacaccgccccccacccccaccccgcccccgagtacaccggccagaccaccgtgcccgagcacaccctgaacctgtacccccccgcccagacccacagcgagcagagccccgccgacaccagcgcccagaccgtgagcggcaccgccacccagaccgacgacgccgcccccaccgacggccagccccagacccagcccagcgagaacaccgagaacaagagccagcccaagagactgcacgtgagcaacatccccttcagattcagagaccccgacctgagacagatgttcggccagttcggcaagatcctggacgtggagatcatcttcaacgagagaggcagcaagggcttcggcttcgtgaccttcgagaacagcgccgacgccgacagagccagagagaagctgcacggcaccgtggtggagggcagaaagatcgaggtgaacaacgccaccgccagagtgatgaccaacaagaagaccgtgaacccctacaccaacggctggaagctgaaccccgtggtgggcgccgtgtacagccccgagttctacgccggcaccgtgctgctgtgccaggccaaccaggagggcagcagcatgtacagcgcccccagcagcctggtgtacaccagcgccatgcccggcttcccctaccccgccgccaccgccgccgccgcctacagaggcgcccacctgagaggcagaggcagaaccgtgtacaacaccttcagagccgccgccccccccccccccatccccgcctacggcggcgtggtgtaccaggagcccgtgtacggcaacaagctgctgcagggcggctacgccgcctacagatacgcccagcccacccccgccaccgccgccgcctacagcgacagaaaccagttcgtgttcgtggccgccgacgagatcagctgcaacaccagcgccgtgaccgacgagttcatgctgcccacccccaccaccacccacctgctgcagcccccccccaccgccctggtgccctag

SEQ ID NO: 97840 - DNA, 1179 bp, synthetic construct
  misc_feature 1..1179: note = Description of Artificial Sequence: Synthetic coding sequence
  source 1..1179: mol_type = other DNA
atgctggccagccagggcgtgctgctgcacccctacggcgtgcccatgatcgtgcccgccgccccctacctgcccggcctgatccagggcaaccaggaggccgccgccgcccccgacaccatggcccagccctacgccagcgcccagttcgcccccccccagaacggcatccccgccgagtacaccgccccccacccccaccccgcccccgagtacaccggccagaccaccgtgcccgagcacaccctgaacctgtacccccccgcccagacccacagcgagcagagccccgccgacaccagcgcccagaccgtgagcggcaccgccacccagaccgacgacgccgcccccaccgacggccagccccagacccagcccagcgagaacaccgagaacaagagccagcccaagagactgcacgtgagcaacatccccttcagattcagagaccccgacctgagacagatgttcggccagttcggcaagatcctggacgtggagatcatcttcaacgagagaggcagcaagggcttcggcttcgtgaccttcgagaacagcgccgacgccgacagagccagagagaagctgcacggcaccgtggtggagggcagaaagatcgaggtgaacaacgccaccgccagagtgatgaccaacaagaagaccgtgaacccctacaccaacggctggaagctgaaccccgtggtgggcgccgtgtacagccccgagttctacgccggcaccgtgctgctgtgccaggccaaccaggagggcagcagcatgtacagcgcccccagcagcctggtgtacaccagcgccatgcccggcttcccctaccccgccgccaccgccgccgccgcctacagaggcgcccacctgagaggcagaggcagaaccgtgtacaacaccttcagagccgccgccccccccccccccatccccgcctacggcggcgtggtgtaccaggagcccgtgtacggcaacaagctgctgcagggcggctacgccgcctacagatacgcccagcccacccccgccaccgccgccgcctacagcgacagctacggcagagtgtacgccgccgacccctaccaccacgccctggcccccgcccccacctacggcgtgggcgccatggccagcatctacagaggcggctacaacagattcgccccctactag

SEQ ID NO: 97841 - DNA, 1194 bp, synthetic construct
  misc_feature 1..1194: note = Description of Artificial Sequence: Synthetic coding sequence
  source 1..1194: mol_type = other DNA
atgaactgcgagagagagcagctgagaggcaaccaggaggccgccgccgcccccgacaccatggcccagccctacgccagcgcccagttcgcccccccccagaacggcatccccgccgagtacaccgccccccacccccaccccgcccccgagtacaccggccagaccaccgtgcccgagcacaccctgaacctgtacccccccgcccagacccacagcgagcagagccccgccgacaccagcgcccagaccgtgagcggcaccgccacccagaccgacgacgccgcccccaccgacggccagccccagacccagcccagcgagaacaccgagaacaagagccagcccaagagactgcacgtgagcaacatccccttcagattcagagaccccgacctgagacagatgttcggccagttcggcaagatcctggacgtggagatcatcttcaacgagagaggcagcaagggcttcggcttcgtgaccttcgagaacagcgccgacgccgacagagccagagagaagctgcacggcaccgtggtggagggcagaaagatcgaggtgaacaacgccaccgccagagtgatgaccaacaagaagaccgtgaacccctacaccaacggctggaagctgaaccccgtggtgggcgccgtgtacagccccgagttctacgccggcaccgtgctgctgtgccaggccaaccaggagggcagcagcatgtacagcgcccccagcagcctggtgtacaccagcgccatgcccggcttcccctaccccgccgccaccgccgccgccgcctacagaggcgcccacctgagaggcagaggcagaaccgtgtacaacaccttcagagccgccgccccccccccccccatccccgcctacggcggcgtggtgtaccaggacggcttctacggcgccgacatctacggcggctacgccgcctacagatacgcccagcccacccccgccaccgccgccgcctacagcgacagctacggcagagtgtacgccgccgacccctaccaccacgccctggcccccgcccccacctacggcgtgggcgccatgaacgccttcgcccccctgaccgacgccaagaccagaagccacgccgacgacgtgggcctggtgctgagcagcctgcaggccagcatctacagaggcggctacaacagattcgccccctactag

SEQ ID NO: 97842 - DNA, 1401 bp, synthetic construct
  misc_feature 1..1401: note = Description of Artificial Sequence: Synthetic coding sequence
  source 1..1401: mol_type = other DNA
atggagaccggccagagaacccacgccagcggcacctacagcttcctggacagaacccagcacagcgacatcaaggccgactgcaacacctgcgtggagatcgaggacagaaaggtgagcagacagcagatgaactgcgagagagagcagctgagaggcaaccaggaggccgccgccgcccccgacaccatggcccagccctacgccagcgcccagttcgcccccccccagaacggcatccccgccgagtacaccgccccccacccccaccccgcccccgagtacaccggccagaccaccgtgcccgagcacaccctgaacctgtacccccccgcccagacccacagcgagcagagccccgccgacaccagcgcccagaccgtgagcggcaccgccacccagaccgacgacgccgcccccaccgacggccagccccagacccagcccagcgagaacaccgagaacaagagccagcccaagagactgcacgtgagcaacatccccttcagattcagagaccccgacctgagacagatgttcggccagttcggcaagatcctggacgtggagatcatcttcaacgagagaggcagcaagggcttcggcttcgtgaccttcgagaacagcgccgacgccgacagagccagagagaagctgcacggcaccgtggtggagggcagaaagatcgaggtgaacaacgccaccgccagagtgatgaccaacaagaagaccgtgaacccctacaccaacggctggaagctgaaccccgtggtgggcgccgtgtacagccccgagttctacgccggcaccgtgctgctgtgccaggccaaccaggagggcagcagcatgtacagcgcccccagcagcctggtgtacaccagcgccatgcccggcttcccctaccccgccgccaccgccgccgccgcctacagaggcgcccacctgagaggcagaggcagaaccgtgtacaacaccttcagagccgccgccccccccccccccatccccgcctacggcggcgtggtgtaccaggacggcttctacggcgccgacatctacggcggctacgccgcctacagatacgcccagcccacccccgccaccgccgccgcctacagcgacagaaaccagttcgtgttcgtggccgccgacgagatcagctgcaacaccagcgccgtgaccgacgagttcatgctgcccacccccaccaccacccacctgctgcagcccccccccaccgccctggtgccctgccccaaggtgcccgcccccgcccagaccagcgaggagctgagctgcaccctgcccggcctgtgctgccaggccgccgagaacctgaccgccagcccccccctgctgcagttcatgttcaaggtgatcgtggcccaggagagaaagtag

SEQ ID NO: 97843 - DNA, 1194 bp, synthetic construct; identical to SEQ ID NO: 97841
  misc_feature 1..1194: note = Description of Artificial Sequence: Synthetic coding sequence
  source 1..1194: mol_type = other DNA

SEQ ID NO: 97844 - DNA, 792 bp, synthetic construct
  misc_feature 1..792: note = Description of Artificial Sequence: Synthetic coding sequence
  source 1..792: mol_type = other DNA
atgaactgcgagagagagcagctgagaggcaaccaggaggccgccgccgcccccgacaccatggcccagccctacgccagcgcccagttcgcccccccccagaacggcatccccgccgagtacaccgccccccacccccaccccgcccccgagtacaccggccagaccaccgtgcccgagcacaccctgaacctgtacccccccgcccagacccacagcgagcagagccccgccgacaccagcgcccagaccgtgagcggcaccgccacccagaccgacgacgccgcccccaccgacggccagccccagacccagcccagcgagaacaccgagaacaagagccagcccaagagactgcacgtgagcaacatccccttcagattcagagaccccgacctgagacagatgttcggccagttcggcaagatcctggacgtggagatcatcttcaacgagagaggcagcaagggcttcggcttcgtgaccttcgagaacagcgccgacgccgacagagccagagagaagctgcacggcaccgtggtggagggcagaaagatcgaggtgaacaacgccaccgccagagtgatgaccaacaagaagaccgtgaacccctacaccaacggctggaagctgaaccccgtggtgggcgccgtgtacagccccgagttctacgccggcaccgtgctgctgtgccaggccaaccaggagggcagcagcatgtacagcgcccccagcagcctggtgtacaccagcgccatgcccggcttcccctaccccgccgccaccgcctag

SEQ ID NO: 97845 - DNA, 1113 bp, synthetic construct
  misc_feature 1..1113: note = Description of Artificial Sequence: Synthetic coding sequence
  source 1..1113: mol_type = other DNA
atgaactgcgagagagagcagctgagaggcaaccaggaggccgccgccgcccccgacaccatggcccagccctacgccagcgcccagttcgcccccccccagaacggcatccccgccgagtacaccgccccccacccccaccccgcccccgagtacaccggccagaccaccgtgcccgagcacaccctgaacctgtacccccccgcccagacccacagcgagcagagccccgccgacaccagcgcccagaccgtgagcggcaccgccacccagaccgacgacgccgcccccaccgacggccagccccagacccagcccagcgagaacaccgagaacaagagccagcccaagagactgcacgtgagcaacatccccttcagattcagagaccccgacctgagacagatgttcggccagttcggcaagatcctggacgtggagatcatcttcaacgagagaggcagcaagggcttcggcttcgtgaccttcgagaacagcgccgacgccgacagagccagagagaagctgcacggcaccgtggtggagggcagaaagatcgaggtgaacaacgccaccgccagagtgatgaccaacaagaagaccgtgaacccctacaccaacggctggaagctgaaccccgtggtgggcgccgtgtacagccccgagttctacgccgtgcccggcttcccctaccccgccgccaccgccgccgccgcctacagaggcgcccacctgagaggcagaggcagaaccgtgtacaacaccttcagagccgccgccccccccccccccatccccgcctacggcggcgtggtgtaccaggacggcttctacggcgccgacatctacggcggctacgccgcctacagatacgcccagcccacccccgccaccgccgccgcctacagcgacagctacggcagagtgtacgccgccgacccctaccaccacgccctggcccccgcccccacctacggcgtgggcgccatgaacgccttcgcccccctgaccgacgccaagaccagaagccacgccgacgacgtgggcctggtgctgagcagcctgcaggccagcatctacagaggcggctacaacagattcgccccctactag

SEQ ID NO: 97846 - DNA, 1725 bp, synthetic construct
  misc_feature 1..1725: note = Description of Artificial Sequence: Synthetic coding sequence
  source 1..1725: mol_type = other DNA
atggcccacaacaagatcccccccagatggctgaactgccccagaagaggccagcccgtggccggcagattcctgcccctgaagaccatgctgggccccagatacgacagccaggtggccgaggagaacagattccaccccagcatgctgagcaactacctgaagagcctgaaggtgaagatgggcctgctggtggacctgaccaacaccagcagattctacgacagaaacgacatcgagaaggagggcatcaagtacatcaagctgcagtgcaagggccacggcgagtgccccaccaccgagaacaccgagaccttcatcagactgtgcgagagattcaacgagagaaacccccccgagctgatcggcgtgcactgcacccacggcttcaacagaaccggcttcctgatctgcgccttcctggtggagaagatggactggagcatcgaggccgccgtggccaccttcgcccaggccagaccccccggcatctacaagggcgactacctgaaggagctgttcagaagatacggcgacatcgaggaggccccccccccccccctgctgcccgactggtgcttcgaggacgacgaggacgaggacgaggacgaggacggcaagaaggagagcgagcccggcagcagcgccagcttcggcaagagaagaaaggagagactgaagctgggcgccatcttcctggagggcgtgaccgtgaagggcgtgacccaggtgaccacccagcccaagctgggcgaggtgcagcagaagtgccaccagttctgcggctgggagggcagcggcttccccggcgcccagcccgtgagcatggacaagcagaacatcaagctgctggacctgaagccctacaaggtgagctggaaggccgacggcaccagatacatgatgctgatcgacggcaccaacgaggtgttcatgatcgacagagacaacagcgtgttccacgtgagcaacctggagttccccttcagaaaggacctgagaatgcacctgagcaacaccctgctggacggcgagatgatcatcgacagagtgaacggccaggccgtgcccagatacctgatctacgacatcatcaagttcaacagccagcccgtgggcgactgcgacttcaacgtgagactgcagtgcatcgagagagagatcatcagccccagacacgagaagatgaagaccggcctgatcgacaagacccaggagcccttcagcgtgagaaacaagcccttcttcgacatctgcaccagcagaaagaagtacaagcccggcagatgcgacgacatcctgaagtggaagccccccagcctgaacagcgtggacttcagactgaagatcaccagaatgggcggcgagggcctgctgccccagaacgtgggcctgctgtacgtgggcggctacgagagacccttcgcccagatcaaggtgaccaaggagctgaagcagtacgacaacaagatcatcgagtgcaagttcgagaacaacagctgggtgttcatgagacagagaaccgacaagagcttccccaacgcctacaacaccgccatggccgtgtgcaacagcatcagcaaccccgtgaccaaggagatgctgttcgagttcatcgacagatgcaccgccgccagccagggccagaagagaaagcaccacctggaccccgacaccgagctgatgcccccccccccccccaagagacccagacccctgacctag

SEQ ID NO: 97847 - DNA, 1626 bp, synthetic construct
  misc_feature 1..1626: note = Description of Artificial Sequence: Synthetic coding sequence
  source 1..1626: mol_type = other DNA
atggcccacaacaagatcccccccagatggctgaactgccccagaagaggccagcccgtggccggcagattcctgcccctgaagaccatgctgggccccagatacgacagccaggtggccgaggagaacagattccaccccagcatgctgagcaactacctgaagagcctgaaggtgaagatgggcctgctggtggacctgaccaacaccagcagattctacgacagaaacgacatcgagaaggagggcatcaagtacatcaagctgcagtgcaagggccacggcgagtgccccaccaccgagaacaccgagaccttcatcagactgtgcgagagattcaacgagagaaacccccccgagctgatcggcgtgcactgcacccacggcttcaacagaaccggcttcctgatctgcgccttcctggtggagaagatggactggagcatcgaggccgccgtggccaccttcgcccaggccagaccccccggcatctacaagggcgactacctgaaggagctgttcagaagatacggcgacatcgaggaggccccccccccccccctgctgcccgactggtgcttcgaggacgacgaggacgaggacgaggacgaggacggcaagaaggagagcgagcccggcagcagcgccagcttcggcaagagaagaaaggagagactgaagctgggcgccatcttcctggagggcgtgaccgtgaagggcgtgacccaggtgaccacccagcccaagctgggcgaggtgcagcagaagtgccaccagttctgcggctgggagggcagcggcttccccggcgcccagcccgtgagcatggacaagcagaacatcaagctgctggacctgaagccctacaaggtgagctggaaggccgacggcaccagatacatgatgctgatcgacggcaccaacgaggtgttcatgatcgacagagacaacagcgtgttccacgtgagcaacctggagttccccttcagaaaggacctgagaatgcacctgagcaacaccctgctggacggcgagatgatcatcgacagagtgaacggccaggccgtgcccagatacctgatctacgacatcatcaagttcaacagccagcccgtgggcgactgcgacttcaacgtgagactgcagtgcatcgagagagagatcatcagccccagacacgagaagatgaagaccggcctgatcgacaagacccaggagcccttcagcgtgagaaacaagcccttcttcgacatctgcaccagcagaaagctgctggagggcaacttcgccaaggaggtgagccacgagatggacggcctgatcttccagcccaccggcaagtacaagcccggcagatgcgacgacatcctgaagtggaagccccccagcctgaacagcgtggacttcagactgaagatcaccagaatgggcggcgagggcctgctgccccagaacgtgggcctgctgtacgtgggcggctacgagagacccttcgcccagatcaaggtgtgcctgttcatcttcagcgtgctgttcctggacgtgctgctgagcagaatccaccagaacctggccaacaacaaccagcacatcaagatcagctgcagcagcaccctgggcggctag

SEQ ID NO: 97848 - DNA, 1794 bp, synthetic construct
  misc_feature 1..1794: note = Description of Artificial Sequence: Synthetic coding sequence
  source 1..1794: mol_type = other DNA
atggcccacaacaagatcccccccagatggctgaactgccccagaagaggccagcccgtggccggcagattcctgcccctgaagaccatgctgggccccagatacgacagccaggtggccgaggagaacagattccaccccagcatgctgagcaactacctgaagagcctgaaggtgaagatgggcctgctggtggacctgaccaacaccagcagattctacgacagaaacgacatcgagaaggagggcatcaagtacatcaagctgcagtgcaagggccacggcgagtgccccaccaccgagaacaccgagaccttcatcagactgtgcgagagattcaacgagagaaacccccccgagctgatcggcgtgcactgcacccacggcttcaacagaaccggcttcctgatctgcgccttcctggtggagaagatggactggagcatcgaggccgccgtggccaccttcgcccaggccagaccccccggcatctacaagggcgactacctgaaggagctgttcagaagatacggcgacatcgaggaggccccccccccccccctgctgcccgactggtgcttcgaggacgacgaggacgaggacgaggacgaggacggcaagaaggagagcgagcccggcagcagcgccagcttcggcaagagaagaaaggagagactgaagctgggcgccatcttcctggagggcgtgaccgtgaagggcgtgacccaggtgaccacccagcccaagctgggcgaggtgcagcagaagtgccaccagttctgcggctgggagggcagcggcttccccggcgcccagcccgtgagcatggacaagcagaacatcaagctgctggacctgaagccctacaaggtgagctggaaggccgacggcaccagatacatgatgctgatcgacggcaccaacgaggtgttcatgatcgacagagacaacagcgtgttccacgtgagcaacctggagttccccttcagaaaggacctgagaatgcacctgagcaacaccctgctggacggcgagatgatcatcgacagagtgaacggccaggccgtgcccagatacctgatctacgacatcatcaagttcaacagccagcccgtgggcgactgcgacttcaacgtgagactgcagtgcatcgagagagagatcatcagccccagacacgagaagatgaagaccggcctgatcgacaagacccaggagcccttcagcgtgagaaacaagcccttcttcgacatctgcaccagcagaaagctgctggagggcaacttcgccaaggaggtgagccacgagatggacggcctgatcttccagcccaccggcaagtacaagcccggcagatgcgacgacatcctgaagtggaagccccccagcctgaacagcgtggacttcagactgaagatcaccagaatgggcggcgagggcctgctgccccagaacgtgggcctgctgtacgtgggcggctacgagagacccttcgcccagatcaaggtgaccaaggagctgaagcagtacgacaacaagatcatcgagtgcaagttcgagaacaacagctgggtgttcatgagacagagaaccgacaagagcttccccaacgcctacaacaccgccatggccgtgtgcaacagcatcagcaaccccgtgaccaaggagatgctgttcgagttcatcgacagatgcaccgccgccagccagggccagaagagaaagcaccacctggaccccgacaccgagctgatgcccccccccccccccaagagacccagacccctgacctag

SEQ ID NO: 97849 - DNA, 1707 bp, synthetic construct
  misc_feature 1..1707: note = Description of Artificial Sequence: Synthetic coding sequence
  source 1..1707: mol_type = other DNA
atgctgggccccagatacgacagccaggtggccgaggagaacagattccaccccagcatgctgagcaactacctgaagagcctgaaggtgaagatgggcctgctggtggacctgaccaacaccagcagattctacgacagaaacgacatcgagaaggagggcatcaagtacatcaagctgcagtgcaagggccacggcgagtgccccaccaccgagaacaccgagaccttcatcagactgtgcgagagattcaacgagagaaacccccccgagctgatcggcgtgcactgcacccacggcttcaacagaaccggcttcctgatctgcgccttcctggtggagaagatggactggagcatcgaggccgccgtggccaccttcgcccaggccagaccccccggcatctacaagggcgactacctgaaggagctgttcagaagatacggcgacatcgaggaggccccccccccccccctgctgcccgactggtgcttcgaggacgacgaggacgaggacgaggacgaggacggcaagaaggagagcgagcccggcagcagcgccagcttcggcaagagaagaaaggagagactgaagctgggcgccatcttcctggagggcgtgaccgtgaagggcgtgacccaggtgaccacccagcccaagctgggcgaggtgcagcagaagtgccaccagttctgcggctgggagggcagcggcttccccggcgcccagcccgtgagcatggacaagcagaacatcaagctgctggacctgaagccctacaaggtgagctggaaggccgacggcaccagatacatgatgctgatcgacggcaccaacgaggtgttcatgatcgacagagacaacagcgtgttccacgtgagcaacctggagttccccttcagaaaggacctgagaatgcacctgagcaacaccctgctggacggcgagatgatcatcgacagagtgaacggccaggccgtgcccagatacctgatctacgacatcatcaagttcaacagccagcccgtgggcgactgcgacttcaacgtgagactgcagtgcatcgagagagagatcatcagccccagacacgagaagatgaagaccggcctgatcgacaagacccaggagcccttcagcgtgagaaacaagcccttcttcgacatctgcaccagcagaaagctgctggagggcaacttcgccaaggaggtgagccacgagatggacggcctgatcttccagcccaccggcaagtacaagcccggcagatgcgacgacatcctgaagtggaagccccccagcctgaacagcgtggacttcagactgaagatcaccagaatgggcggcgagggcctgctgccccagaacgtgggcctgctgtacgtgggcggctacgagagacccttcgcccagatcaaggtgaccaaggagctgaagcagtacgacaacaagatcatcgagtgcaagttcgagaacaacagctgggtgttcatgagacagagaaccgacaagagcttccccaacgcctacaacaccgccatggccgtgtgcaacagcatcagcaaccccgtgaccaaggagatgctgttcgagttcatcgacagatgcaccgccgccagccagggccagaagagaaagcaccacctggaccccgacaccgagctgatgcccccccccccccccaagagacccagacccctgacctag

SEQ ID NO: 97850 - DNA, 1545 bp, synthetic construct
  misc_feature 1..1545: note = Description of Artificial Sequence: Synthetic coding sequence
  source 1..1545: mol_type = other DNA
atgggcctgctggtggacctgaccaacaccagcagattctacgacagaaacgacatcgagaaggagggcatcaagtacatcaagctgcagtgcaagggccacggcgagtgccccaccaccgagaacaccgagaccttcatcagactgtgcgagagattcaacgagagaaacccccccgagctgatcggcgtgcactgcacccacggcttcaacagaaccggcttcctgatctgcgccttcctggtggagaagatggactggagcatcgaggccgccgtggccaccttcgcccaggccagaccccccggcatctacaagggcgactacctgaaggagctgttcagaagatacggcgacatcgaggaggccccccccccccccctgctgcccgactggtgcttcgaggacgacgaggacgaggacgaggacgaggacggcaagaaggagagcgagcccggcagcagcgccagcttcggcaagagaagaaaggagagactgaagctgggcgccatcttcctggagggcgtgaccgtgaagggcgtgacccaggtgaccacccagcccaagctgggcgaggtgcagcagaagtgccaccagttctgcggctgggagggcagcggcttccccggcgcccagcccgtgagcatggacaagcagaacatcaagctgctggacctgaagccctacaaggtgagctggaaggccgacggcaccagatacatgatgctgatcgacggcaccaacgaggtgttcatgatcgacagagacaacagcgtgttccacgtgagcaacctggagttccccttcagaaaggacctgagaatgcacctgagcaacaccctgctggacggcgagatgatcatcgacagagtgaacggccaggccgtgcccagatacctgatctacgacatcatcaagttcaacagccagcccgtgggcgactgcgacttcaacgtgagactgcagtgcatcgagagagagatcatcagccccagacacgagaagatgaagaccggcctgatcgacaagacccaggagcccttcagcgtgagaaacaagcccttcttcgacatctgcaccagcagaaagaagtacaagcccggcagatgcgacgacatcctgaagtggaagccccccagcctgaacagcgtggacttcagactgaagatcaccagaatgggcggcgagggcctgctgccccagaacgtgggcctgctgtacgtgggcggctacgagagacccttcgcccagatcaaggtgaccaaggagctgaagcagtacgacaacaagatcatcgagtgcaagttcgagaacaacagctgggtgttcatgagacagagaaccgacaagagcttccccaacgcctacaacaccgccatggccgtgtgcaacagcatcagcaaccccgtgaccaaggagatgctgttcgagttcatcgacagatgcaccgccgccagccagggccagaagagaaagcaccacctggaccccgacaccgagctgatgcccccccccccccccaagagacccagacccctgacctag

SEQ ID NO: 97851 - DNA, 1263 bp, synthetic construct
  misc_feature 1..1263: note = Description of Artificial Sequence: Synthetic coding sequence
  source 1..1263: mol_type = other DNA
atggccgccctggtgagacccgccagattcgtggtgagacccctgctgcaggtggtgcaggcctgggacctggacgccagaagatgggtgagagccctgagaagaagccccgtgaaggtggtgttccccagcggcgaggtggtggagcagaagagagcccccggcaagcagcccagaaaggcccccagcgaggccagcgcccaggagcagagagagaagcagcccctggaggagagcgccagcagagcccccagcacctgggaggagagcggcctgagatacgacaaggcctaccccggcgacagaagactgagcagcgtgatgaccatcgtgaagagcagacccttcagagagaagcagggcaagatcctgctggagggcagaagactgatcagcgacgccctgaaggccggcgccgtgcccaagatgttcttcttcagcagactggagtacctgaaggagctgcccgtggacaagctgaagggcgtgagcctgatcaaggtgaagttcgaggacatcaaggactggagcgacctggtgaccccccagggcatcatgggcatcttcgccaagcccgaccacgtgaagatgacctaccccaagacccagctgcagcacagcctgcccctgctgctgatctgcgacaacctgagagaccccggcaacctgggcaccatcctgagaagcgccgccggcgccggctgcagcaaggtgctgctgaccaagggctgcgtggacgcctgggagcccaaggtgctgagagccggcatgggcgcccacttcagaatgcccatcatcaacaacctggagtgggagaccgtgcccaactacctgccccccgacaccagagtgtacgtggccgacaactgcggcctgtacgcccaggccgagatgagcaacaaggccagcgaccacggctgggtgtgcgaccagagagtgatgaagttccacaagtacgaggaggaggaggacgtggagaccggcgccagccaggactggctgccccacgtggaggtgcagagctacgacagcgactggaccgaggcccccgccgccgtggtgatcggcggcgagacctacggcgtgagcctggagagcctgcagctggccgagagcaccggcggcaagagactgctgatccccgtggtgcccggcgtggacagcctgaacagcgccatggccgccagcatcctgctgttcgagggcaagagacagctgagaggcagagccgaggacctgagcagagacagaagctaccactag

SEQ ID NO: 97852 - DNA, 4182 bp, synthetic construct
  misc_feature 1..4182: note = Description of Artificial Sequence: Synthetic coding sequence
  source 1..4182: mol_type = other DNA
atgctgagcagacccaagcccggcgagagcgaggtggacctgctgcacttccagagccagttcctggccgccggcgccgcccccgccgtgcagctggtgaagaagggcaacagaggcggcggcgacgccaacagcgacagaccccccctgcaggaccacagagacgtggtgatgctggacaacctgcccgacctgccccccgccctggtgcccagcccccccaagagagccagacccagccccggccactgcctgcccgaggacgaggaccccgaggagagactgagaagacacgaccagcacatcaccgccgtgctgaccaagatcatcgagagagacaccagcagcgtggccgtgaacctgcccgtgcccagcggcgtggccttccccgccgtgttcctgagaagcagagacacccagggcaagagcgccaccagcggcaagagaagcatcttcgcccaggagatcgccgccagaagaatcgccgaggccaagggccccagcgtgggcgaggtggtgcccaacgtgggcccccccgagggcgccgtgacctgcgagacccccacccccagaaaccagggctgccagctgcccggcagcagccacagcttccagggccccaacctggtgaccggcaagggcctgagagaccaggaggccgagcaggaggcccagaccatccacgaggagaacatcgccagactgcaggccatggcccccgaggagatcctgcaggagcagcagagactgctggcccagctggaccccagcctggtggccttcctgagaagccacagccacacccaggagcagaccggcgagaccgccagcgaggagcagagacccggcggccccagcgccaacgtgaccaaggaggagcccctgatgagcgccttcgccagcgagcccagaaagagagacaagctggagcccgaggcccccgccctggccctgcccgtgaccccccagaaggagtggctgcacatggacaccgtggagctggagaagctgcactggacccaggacctgccccccgtgagaagacagcagacccaggagagaatgcaggccagattcagcctgcagggcgagctgctggcccccgacgtggacctgcccacccacctgggcctgcaccaccacggcgaggaggccgagagagccggctacagcctgcaggagctgttccacctgaccagaagccaggtgagccagcagagagccctggccctgcacgtgctggcccaggtgatcagcagagcccaggccggcgagttcggcgacagactggccggcagcgtgctgagcctgctgctggacgccggcttcctgttcctgctgagattcagcctggacgacagagtggacggcgtgatcgccaccgccatcagagccctgagagccctgctggtggcccccggcgacgaggagctgctggacagcaccttcagctggtaccacggcgccctgaccttccccctgatgcccagccaggaggacaaggaggacgaggacgaggacgaggagtgccccgccggcaaggccaagagaaagagccccgaggaggagagcagacccccccccgacctggccagacacgacgtgatcaagggcctgctggccaccagcctgctgcccagactgagatacgtgctggaggtgacctaccccggccccgccgtggtgctggacatcctggccgtgctgatcagactggccagacacagcctggagagcgccaccagagtgctggagtgccccagactgatcgagaccatcgtgagagagttcctgcccaccagctggagccccgtgggcgccggccccacccccagcctgtacaaggtgccctgcgccaccgccatgaagctgctgagagtgctggccagcgccggcagaaacatcgccgccagactgctgagcagcttcgacctgagaagcagactgtgcagaatcatcgccgaggccccccaggagctggccctgccccccgaggaggccgagatgctgagcaccgaggccctgagactgtgggccgtggccgccagctacggccagggcggctacctgtacagagagctgtaccccgtgctgatgagagccctgcaggtggtgcccagagagctgagcacccaccccccccagcccctgagcatgcagagaatcgccagcctgctgaccctgctgacccagctgaccctggccgccggcagcacccccgccgagaccatcagcgacagcgccgaggccagcctgagcgccacccccagcctggtgacctggacccaggtgagcggcctgcagcccctggtggagccctgcctgagacagaccctgaagctgctgagcagacccgagatgtggagagccgtgggccccgtgcccgtggcctgcctgctgttcctgggcgcctactaccaggcctggagccagcagcccagcagctgccccgaggactggctgcaggacatgcagagactgagcgaggagctgctgctgcccctgctgagccagcccaccctgggcagcctgtgggacagcctgagacactgcagcctgctgtgcaaccccctgagctgcgtgcccgccctggaggccccccccagcctggtgagcctgggctgcagcggcggctgccccagactgagcctggccggcagcgccagccccttccccttcctgaccgccctgctgagcctgctgaacaccctggcccagatccacaagggcctgtgcggccagctggccgccatcctggccgcccccggcctgcagaactacttcctgcagtgcgtggcccccggcgccgccccccacctgacccccttcagcgcctgggccctgagacacgagtaccacctgcagtacctggccctggccctggcccagaaggccgccgccctgcagcccctgcccgccacccacgccgccctgtaccacggcatggccctggccctgctgagcagactgctgcccggcagcgagtacctgacccacgagctgctgctgagctgcgtgttcagactggagttcctgcccgagagaaccagcggcggccccgaggccgccgacttcagcgaccagctgagcctgggcagcagcagagtgcccagatgcggccagggcaccctgctggcccaggcctgccaggacctgcccagcatcagaaactgctacctgacccactgcagccccgccagagccagcctgctggccagccaggccctgcacagaggcgagctgcagagagtgcccaccctgctgctgcccatgcccaccgagcccctgctgcccaccgactggcccttcctgcccctgatcagactgtaccacagagccagcgacacccccagcggcctgagccccaccgacaccatgggcaccgccatgagagtgctgcagtgggtgctggtgctggagagctggagaccccaggccctgtgggccgtgccccccgccgccagactggccagactgatgtgcgtgttcctggtggacagcgagctgttcagagagagccccgtgcagcacctggtggccgccctgctggcccagctgtgccagccccaggtgctgcccaacctgaacctggactgcagactgcccggcctgaccagcttccccgacctgtacgccaacttcctggaccacttcgaggccgtgagcttcggcgaccacctgttcggcgccctggtgctgctgcccctgcagagaagattcagcgtgaccctgagactggccctgttcggcgagcacgtgggcgccctgagagccctgagcctgcccctgacccagctgcccgtgagcctggagtgctacaccgtgccccccgaggacaacctggccctgctgcagctgtacttcagaaccctggtgaccggcgccctgagacccagatggtgccccgtgctgtacgccgtggccgtggcccacgtgaacagcttcatcttcagccaggacccccagagcagcgacgaggtgaaggccgccagaagaagcatgctgcagaagacctggctgctggccgacgagggcctgagacagcacctgctgcactacaagctgcccaacagcaccctgcccgagggcttcgagctgtacagccagctgccccccctgagacagcactacctgcagagactgaccagcaccgtgctgcagaacggcgtgagcgagacctag

SEQ ID NO: 97853 - DNA, 1839 bp, synthetic construct
  misc_feature 1..1839: note = Description of Artificial Sequence: Synthetic coding sequence
  source 1..1839: mol_type = other DNA
atggccgacttcgccggccccagcagcgccggcagaaaggccggcgcccccagatgcagcagaaaggccgccggcaccaagcagaccagcaccctgaagcaggaggacgccagcaagagaaaggccgagctggaggccgccgtgagaaagaagatcgagttcgagagaaaggccctgcacatcgtggagcagctgctggaggagaacatcaccgaggagttcctgatggagtgcggcagattcatcacccccgcccactacagcgacgtggtggacgagagaagcatcgtgaagctgtgcggctaccccctgtgccagaagaagctgggcatcgtgcccaagcagaagtacaagatcagcaccaagaccaacaaggtgtacgacatcaccgagagaaagagcttctgcagcaacttctgctaccaggccagcaagttcttcgaggcccagatccccaagacccccgtgtgggtgagagaggaggagagacaccccgacttccagctgctgaaggaggagcagagcggccacagcggcgaggaggtgcagctgtgcagcaaggccatcaagaccagcgacatcgacaaccccagccacttcgagaagcagtacgagagcagcagcagcagcacccacagcgacagcagcagcgacaacgagcaggacttcgtgagcagcatcctgcccggcaacagacccaacagcaccaacatcagaccccagctgcaccagaagagcatcatgaagaagaaggccggccacaaggccaacagcaagcacaaggacaaggagcagaccgtggtggacgtgaccgagcagctgggcgactgcaagctggacagccaggagaaggacgccacctgcgagctgcccctgcagaaggtgaacacccagagcagcagcaacagcaccctgcccgagagactgaaggccagcgagaacagcgagagcgagtacagcagaagcgagatcaccctggtgggcatcagcaagaagagcgccgagcacttcaagagaaagttcgccaagagcaaccaggtgagcagaagcgtgagcagcagcgtgcaggtgtgccccgaggtgggcaagagaaacctgctgaaggtgctgaaggagaccctgatcgagtggaagaccgaggagaccctgagattcctgtacggccagaactacgccagcgtgtgcctgaagcccgaggccagcctggtgaaggaggagctggacgaggacgacatcatcagcgaccccgacagccacttccccgcctggagagagagccagaacagcctggacgagagcctgcccttcagaggcagcggcaccgccatcaagcccctgcccagctacgagaacctgaagaaggagaccgagaagctgaacctgagaatcagagagttctacagaggcagatacgtgctgggcgaggagaccaccaagagccaggacagcgaggagcacgacagcaccttccccctgatcgacagcagcagccagaaccagatcagaaagagaatcgtgctggagaagctgagcaaggtgctgcccggcctgctggtgcccctgcagatcaccctgggcgacatctacacccagctgaagaacctggtgagaaccttcagactgaccaacagaaacatcatccacaagcccgccgagtggaccctgatcgccatggtgctgctgagcctgctgacccccatcctgggcatccagaagcacagccaggagggcatggtgttcaccagattcctggacaccctgctggaggagctgcacctgaagaacgaggacctggagagcctgaccatcatcttcagaaccagctgcctgcccgagtag

SEQ ID NO: 97854 - DNA, 1755 bp, synthetic construct
  misc_feature 1..1755: note = Description of Artificial Sequence: Synthetic coding sequence
  source 1..1755: mol_type = other DNA
atggccgacttcgccggccccagcagcgccggcagaaaggccggcgcccccagatgcagcagaaaggccgccggcaccaagcagaccagcaccctgaagcaggaggacgccagcaagagaaaggccgagctggaggccgccgtgagaaagaagatcgagttcgagagaaaggccctgcacatcgtggagcagctgctggaggagaacatcaccgaggagttcctgatggagtgcggcagattcatcacccccgcccactacagcgacgtggtggacgagagaagcatcgtgaagctgtgcggctaccccctgtgccagaagaagctgggcatcgtgcccaagcagaagtacaagatcagcaccaagaccaacaaggtgtacgacatcaccgagagaaagagcttctgcagcaacttctgctaccaggccagcaagttcttcgaggcccagatccccaagacccccgtgtgggtgagagaggaggagagacaccccgacttccagctgctgaaggaggagcagagcggccacagcggcgaggaggtgcagctgtgcagcaaggccatcaagaccagcgacatcgacaaccccagccacttcgagaagcagtacgagagcagcagcagcagcacccacagcgacagcagcagcgacaacgagcaggacttcgtgagcagcatcctgcccggcaacagacccaacagcaccaacatcagaccccagctgcaccagaagagcatcatgaagaagaaggccggccacaaggccaacagcaagcacaaggacaaggagcagaccgtggtggacgtgaccgagcagctgggcgactgcaagctggacagccaggagaaggacgccacctgcgagctgcccctgcagaaggtgaacacccagagcagcagcaacagcaccctgcccgagagactgaaggccagcgagaacagcgagagcgagtacagcagaagcgagatcaccctggtgggcatcagcaagaagagcgccgagcacttcaagagaaagttcgccaagagcaaccaggtgagcagaagcgtgagcagcagcgtgcaggtgtgccccgaggtgggcaagagaaacctgctgaaggtgctgaaggagaccctgatcgagtggaagaccgaggagaccctgagattcctgtacggccagaactacgccagcgtgtgcctgaagcccgaggccagcctggtgaaggaggagctggacgaggacgacatcatcagcgaccccgacagccacttccccgcctggagagagagccagaacagcctggacgagagcctgcccttcagaggcagcggcaccgccatcaagcccctgcccagctacgagaacctgaagaaggagaccgagaagctgaacctgagaatcagagagttctacagaggcagatacgtgctgggcgaggagaccaccaagagccaggacagcgaggagcacgacagcaccttccccctgatcgacagcagcagccagaaccagatcagaaagagaatcgtgctggagaagctgagcaaggtgctgcccggcctgctggtgcccctgcagatcaccctgggcgacatctacacccagctgaagaacctggtgagaaccttcagactgaccaacagaaacatcatccacaagcccgccgagtggaccctgatcgccatggtgctgctgagcttcctgctgaacgtgaagaccagaatcaagaccttcatgatgatctacttccacctgatgaacagctag

SEQ ID NO: 97855 - DNA, 1998 bp, synthetic construct
  misc_feature 1..1998: note = Description of Artificial Sequence: Synthetic coding sequence
  source 1..1998: mol_type = other DNA
atgaccagcgccaacaaggccatcgagctgcagctgcaggtgaagcagaacgccgaggagctgcaggacttcatgagagacctggagaactgggagaaggacatcaagcagaaggacatggagctgagaagacagaacggcgtgcccgaggagaacctgccccccatcagaaacggcaacttcagaaagaagaagaagggcaaggccaaggagagcagcaagaagaccagagaggagaacaccaagaacagaatcaagagctacgactacgaggcctgggccaagctggacgtggacagaatcctggacgagctggacaaggacgacagcacccacgagagcctgagccaggagagcgagagcgaggaggacggcatccacgtggacagccagaaggccctggtgctgaaggagaagggcaacaagtacttcaagcagggcaagtacgacgaggccatcgactgctacaccaagggcatggacgccgacccctacaaccccgtgctgcccaccaacagagccagcgcctacttcagactgaagaagttcgccgtggccgagagcgactgcaacctggccgtggccctgaacagaagctacaccaaggcctacagcagaagaggcgccgccagattcgccctgcagaagctggaggaggccaagaaggactacgagagagtgctggagctggagcccaacaacttcgaggccaccaacgagctgagaaagatcagccaggccctggccagcaaggagaacagctaccccaaggaggccgacatcgtgatcaagagcaccgagggcgagagaaagcagatcgaggcccagcagaacaagcagcaggccatcagcgagaaggacagaggcaacggcttcttcaaggagggcaagtacgagagagccatcgagtgctacaccagaggcatcgccgccgacggcgccaacgccctgctgcccgccaacagagccatggcctacctgaagatccagaagtacgaggaggccgagaaggactgcacccaggccatcctgctggacggcagctacagcaaggccttcgccagaagaggcaccgccagaaccttcctgggcaagctgaacgaggccaagcaggacttcgagaccgtgctgctgctggagcccggcaacaagcaggccgtgaccgagctgagcaagatcaagaaggagctgatcgagaagggccactgggacgacgtgttcctggacagcacccagagacagaacgtggtgaagcccatcgacaaccccccccaccccggcagcaccaagcccctgaagaaggtgatcatcgaggagaccggcaacctgatccagaccatcgacgtgcccgacagcaccaccgccgccgcccccgagaacaaccccatcaacctggccaacgtgatcgccgccaccggcaccaccagcaagaagaacagcagccaggacgacctgttccccaccagcgacacccccagagccaaggtgctgaagatcgaggaggtgagcgacaccagcagcctgcagccccaggccagcctgaagcaggacgtgtgccagagctacagcgagaagatgcccatcgagatcgagcagaagcccgcccagttcgccaccaccgtgctgccccccatccccgccaacagcttccagctggagagcgacttcagacagctgaagagcagccccgacatgctgtaccagtacctgaagcagatcgagcccagcctgtaccccaagctgttccagaagaacctggaccccgacgtgttcaaccagatcgtgaagatcctgcacgacttctacatcgagaaggagaagcccctgctgatcttcgagatcctgcagagactgagcgagctgaagagattcgacatggccgtgatgttcatgagcgagaccgagaagaagatcgccagagccctgttcaaccacatcgacaagagcggcctgaaggacagcagcgtggaggagctgaagaagagatacggcggctag

SEQ ID NO: 97856 - DNA, 1896 bp, synthetic construct
  misc_feature 1..1896: note = Description of Artificial Sequence: Synthetic coding sequence
  source 1..1896: mol_type = other DNA
atgaccagcgccaacaaggccatcgagctgcagctgcaggtgaagcagaacgccgaggagctgcaggacttcatgagagacctggagaactgggagaaggacatcaagcagaaggacatggagctgagaagacagaacggcgtgcccgaggagaacctgccccccatcagaaacggcaacttcagaaagaagaagaagggcaaggccaaggagagcagcaagaagaccagagaggagaacaccaagaacagaatcaagagctacgactacgaggcctgggccaagctggacgtggacagaatcctggacgagctggacaaggacgacagcacccacgagagcctgagccaggagagcgagagcgaggaggacggcatccacgtggacagccagaaggccctggtgctgaaggagaagggcaacaagtacttcaagcagggcaagtacgacgaggccatcgactgctacaccaagggcatggacgccgacccctacaaccccgtgctgcccaccaacagagccagcgcctacttcagactgaagaagttcgccgtggccgagagcgactgcaacctggccgtggccctgaacagaagctacaccaaggcctacagcagaagaggcgccgccagattcgccctgcagaagctggaggaggccaagaaggactacgagagagtgctggagctggagcccaacaacttcgaggccaccaacgagctgagaaagatcagccaggccctggccagcaaggagaacagctaccccaaggaggccgacatcgtgatcaagagcaccgagggcgagagaaagcagatcgaggcccagcagaacaagcagcaggccatcagcgagaaggacagaggcaacggcttcttcaaggagggcaagtacgagagagccatcgagtgctacaccagaggcatcgccgccgacggcgccaacgccctgctgcccgccaacagagccatggcctacctgaagatccagaagtacgaggaggccgagaaggactgcacccaggccatcctgctggacggcagctacagcaaggccttcgccagaagaggcaccgccagaaccttcctgggcaagctgaacgaggccaagcaggacttcgagaccgtgctgctgctggagcccggcaacaagcaggccgtgaccgagctgagcaagatcaagaagaagcccctgaagaaggtgatcatcgaggagaccggcaacctgatccagaccatcgacgtgcccgacagcaccaccgccgccgcccccgagaacaaccccatcaacctggccaacgtgatcgccgccaccggcaccaccagcaagaagaacagcagccaggacgacctgttccccaccagcgacacccccagagccaaggtgctgaagatcgaggaggtgagcgacaccagcagcctgcagccccaggccagcctgaagcaggacgtgtgccagagctacagcgagaagatgcccatcgagatcgagcagaagcccgcccagttcgccaccaccgtgctgccccccatccccgccaacagcttccagctggagagcgacttcagacagctgaagagcagccccgacatgctgtaccagtacctgaagcagatcgagcccagcctgtaccccaagctgttccagaagaacctggaccccgacgtgttcaaccagatcgtgaagatcctgcacgacttctacatcgagaaggagaagcccctgctgatcttcgagatcctgcagagactgagcgagctgaagagattcgacatggccgtgatgttcatgagcgagaccgagaagaagatcgccagagccctgttcaaccacatcgacaagagcggcctgaaggacagcagcgtggaggagctgaagaagagatacggcggctag

SEQ ID NO: 97857 - DNA, 1521 bp, synthetic construct
  misc_feature 1..1521: note = Description of Artificial Sequence: Synthetic coding sequence
  source 1..1521: mol_type = other DNA
atggacgccgacccctacaaccccgtgctgcccaccaacagagccagcgcctacttcagactgaagaagttcgccgtggccgagagcgactgcaacctggccgtggccctgaacagaagctacaccaaggcctacagcagaagaggcgccgccagattcgccctgcagaagctggaggaggccaagaaggactacgagagagtgctggagctggagcccaacaacttcgaggccaccaacgagctgagaaagatcagccaggccctggccagcaaggagaacagctaccccaaggaggccgacatcgtgatcaagagcaccgagggcgagagaaagcagatcgaggcccagcagaacaagcagcaggccatcagcgagaaggacagaggcaacggcttcttcaaggagggcaagtacgagagagccatcgagtgctacaccagaggcatcgccgccgacggcgccaacgccctgctgcccgccaacagagccatggcctacctgaagatccagaagtacgaggaggccgagaaggactgcacccaggccatcctgctggacggcagctacagcaaggccttcgccagaagaggcaccgccagaaccttcctgggcaagctgaacgaggccaagcaggacttcgagaccgtgctgctgctggagcccggcaacaagcaggccgtgaccgagctgagcaagatcaagaaggagctgatcgagaagggccactgggacgacgtgttcctggacagcacccagagacagaacgtggtgaagcccatcgacaaccccccccaccccggcagcaccaagcccctgaagaaggtgatcatcgaggagaccggcaacctgatccagaccatcgacgtgcccgacagcaccaccgccgccgcccccgagaacaaccccatcaacctggccaacgtgatcgccgccaccggcaccaccagcaagaagaacagcagccaggacgacctgttccccaccagcgacacccccagagccaaggtgctgaagatcgaggaggtgagcgacaccagcagcctgcagccccaggccagcctgaagcaggacgtgtgccagagctacagcgagaagatgcccatcgagatcgagcagaagcccgcccagttcgccaccaccgtgctgccccccatccccgccaacagcttccagctggagagcgacttcagacagctgaagagcagccccgacatgctgtaccagtacctgaagcagatcgagcccagcctgtaccccaagctgttccagaagaacctggaccccgacgtgttcaaccagatcgtgaagatcctgcacgacttctacatcgagaaggagaagcccctgctgatcttcgagatcctgcagagactgagcgagctgaagagattcgacatggccgtgatgttcatgagcgagaccgagaagaagatcgccagagccctgttcaaccacatcgacaagagcggcctgaaggacagcagcgtggaggagctgaagaagagatacggcggctag

SEQ ID NO: 97858 - DNA, 4821 bp, synthetic construct
  misc_feature 1..4821: note = Description of Artificial Sequence: Synthetic coding sequence
  source 1..4821: mol_type = other DNA
atgatcgccgagcccgcccacttctacctgttcggcctgatctgcctgtgcagcggcagcagactgagacaggaggacttcccccccagaatcgtggagcaccccagcgacctgatcgtgagcaagggcgagcccgccaccctgaactgcaaggccgagggcagacccacccccaccatcgagtggtacaagggcggcgagagagtggagaccgacaaggacgaccccagaagccacagaatgctgctgcccagcggcagcctgttcttcctgagaatcgtgcacggcagaaagagcagacccgacgagggcgtgtacgtgtgcgtggccagaaactacctgggcgaggccgtgagccacaacgccagcctggaggtggccatcctgagagacgacttcagacagaaccccagcgacgtgatggtggccgtgggcgagcccgccgtgatggagtgccagccccccagaggccaccccgagcccaccatcagctggaagaaggacggcagccccctggacgacaaggacgagagaatcaccatcagaggcggcaagctgatgatcacctacaccagaaagagcgacgccggcaagtacgtgtgcgtgggcaccaacatggtgggcgagagagagagcgaggtggccgagctgaccgtgctggagagacccagcttcgtgaagagacccagcaacctggccgtgaccgtggacgacagcgccgagttcaagtgcgaggccagaggcgaccccgtgcccaccgtgagatggagaaaggacgacggcgagctgcccaagagcagatacgagatcagagacgaccacaccctgaagatcagaaaggtgaccgccggcgacatgggcagctacacctgcgtggccgagaacatggtgggcaaggccgaggccagcgccaccctgaccgtgcaggcccccagcgagcccccccacttcgtggtgaagcccagagaccaggtggtggccctgggcagaaccgtgaccttccagtgcgaggccaccggcaacccccagcccgccatcttctggagaagagagggcagccagaacctgctgttcagctaccagcccccccagagcagcagcagattcagcgtgagccagaccggcgacctgaccatcaccaacgtgcagagaagcgacgtgggctactacatctgccagaccctgaacgtggccggcagcatcatcaccaaggcctacctggaggtgaccgacgtgatcgccgacagacccccccccgtgatcagacagggccccgtgaaccagaccgtggccgtggacggcaccttcgtgctgagctgcgtggccaccggcagccccgtgcccaccatcctgtggagaaaggacggcgtgctggtgagcacccaggacagcagaatcaagcagctggagaacggcgtgctgcagatcagatacgccaagctgggcgacaccggcagatacacctgcatcgccagcacccccagcggcgaggccacctggagcgcctacatcgaggtgcaggagttcggcgtgcccgtgcagccccccagacccaccgaccccaacctgatccccagcgcccccagcaagcccgaggtgaccgacgtgagcagaaacaccgtgaccctgagctggcagcccaacctgaacagcggcgccacccccaccagctacatcatcgaggccttcagccacgccagcggcagcagctggcagaccgtggccgagaacgtgaagaccgagaccagcgccatcaagggcctgaagcccaacgccatctacctgttcctggtgagagccgccaacgcctacggcatcagcgaccccagccagatcagcgaccccgtgaagacccaggacgtgctgcccaccagccagggcgtggaccacaagcaggtgcagagagagctgggcaacgccgtgctgcacctgcacaaccccaccgtgctgagcagcagcagcatcgaggtgcactggaccgtggaccagcagagccagtacatccagggctacaagatcctgtacagacccagcggcgccaaccacggcgagagcgactggctggtgttcgaggtgagaacccccgccaagaacagcgtggtgatccccgacctgagaaagggcgtgaactacgagatcaaggccagacccttcttcaacgagttccagggcgccgacagcgagatcaagttcgccaagaccctggaggaggcccccagcgcccccccccagggcgtgaccgtgagcaagaacgacggcaacggcaccgccatcctggtgagctggcagcccccccccgaggacacccagaacggcatggtgcaggagtacaaggtgtggtgcctgggcaacgagaccagataccacatcaacaagaccgtggacggcagcaccttcagcgtggtgatccccttcctggtgcccggcatcagatacagcgtggaggtggccgccagcaccggcgccggcagcggcgtgaagagcgagccccagttcatccagctggacgcccacggcaaccccgtgagccccgaggaccaggtgagcctggcccagcagatcagcgacgtggtgaagcagcccgccttcatcgccggcatcggcgccgcctgctggatcatcctgatggtgttcagcatctggctgtacagacacagaaagaagagaaacggcctgaccagcacctacgccggcatcagaaaggtgacctaccagagaggcggcgaggccgtgagcagcggcggcagacccggcctgctgaacatcagcgagcccgccgcccagccctggctggccgacacctggcccaacaccggcaacaaccacaacgactgcagcatcagctgctgcaccgccggcaacggcaacagcgacagcaacctgaccacctacagcagacccgccgactgcatcgccaactacaacaaccagctggacaacaagcagaccaacctgatgctgcccgagagcaccgtgtacggcgacgtggacctgagcaacaagatcaacgagatgaagaccttcaacagccccaacctgaaggacggcagattcgtgaaccccagcggccagcccaccccctacgccaccacccagctgatccagagcaacctgagcaacaacatgaacaacggcagcggcgacagcggcgagaagcactggaagcccctgggccagcagaagcaggaggtggcccccgtgcagtacaacatcgtggagcagaacaagctgaacaaggactacagagccaacgacaccgtgccccccaccatcccctacaaccagagctacgaccagaacaccggcggcagctacaacagcagcgacagaggcagcagcaccagcggcagccagggccacaagaagggcgccagaacccccaaggtgcccaagcagggcggcatgaactgggccgacctgctgccccccccccccgcccacccccccccccacagcaacagcgaggagtacaacatcagcgtggacgagagctacgaccaggagatgccctgccccgtgccccccgccagaatgtacctgcagcaggacgagctggaggaggaggaggacgagagaggccccaccccccccgtgagaggcgccgccagcagccccgccgccgtgagctacagccaccagagcaccgccaccctgacccccagcccccaggaggagctgcagcccatgctgcaggactgccccgaggagaccggccacatgcagcaccagcccgacagaagaagacagcccgtgagccccccccccccccccagacccatcagccccccccacacctacggctacatcagcggccccctggtgagcgacatggacaccgacgcccccgaggaggaggaggacgaggccgacatggaggtggccaagatgcagaccagaagactgctgctgagaggcctggagcagacccccgccagcagcgtgggcgacctggagagcagcgtgaccggcagcatgatcaacggctggggcagcgccagcgaggaggacaacatcagcagcggcagaagcagcgtgagcagcagcgacggcagcttcttcaccgacgccgacttcgcccaggccgtggccgccgccgccgagtacgccggcctgaaggtggccagaagacagatgcaggacgccgccggcagaagacacttccacgccagccagtgccccagacccaccagccccgtgagcaccgacagcaacatgagcgccgccgtgatgcagaagaccagacccgccaagaagctgaagcaccagcccggccacctgagaagagagacctacaccgacgacctgccccccccccccgtgcccccccccgccatcaagagccccaccgcccagagcaagacccagctggaggtgagacccgtggtggtgcccaagctgcccagcatggacgccagaaccgacagaagcagcgacagaaagggcagcagctacaagggcagagaggtgctggacggcagacaggtggtggacatgagaaccaaccccggcgaccccagagaggcccaggagcagcagaacgacggcaagggcagaggcaacaaggccgccaagagagacctgccccccgccaagacccacctgatccaggaggacatcctgccctactgcagacccaccttccccaccagcaacaaccccagagaccccagcagcagcagcagcatgagcagcagaggcagcggcagcagacagagagagcaggccaacgtgggcagaagaaacatcgccgagatgcaggtgctgggcggctacgagagaggcgaggacaacaacgaggagctggaggagaccgagagctag

SEQ ID NO: 97859 - DNA, 4968 bp, synthetic construct
  misc_feature 1..4968: note = Description of Artificial Sequence: Synthetic coding sequence
  source 1..4968: mol_type = other DNA
atgaagtggaagcacgtgcccttcctggtgatgatcagcctgctgagcctgagccccaaccacctgttcctggcccagctgatccccgaccccgaggacgtggagagaggcaacgaccacggcacccccatccccaccagcgacaacgacgacaacagcctgggctacaccggcagcagactgagacaggaggacttcccccccagaatcgtggagcaccccagcgacctgatcgtgagcaagggcgagcccgccaccctgaactgcaaggccgagggcagacccacccccaccatcgagtggtacaagggcggcgagagagtggagaccgacaaggacgaccccagaagccacagaatgctgctgcccagcggcagcctgttcttcctgagaatcgtgcacggcagaaagagcagacccgacgagggcgtgtacgtgtgcgtggccagaaactacctgggcgaggccgtgagccacaacgccagcctggaggtggccatcctgagagacgacttcagacagaaccccagcgacgtgatggtggccgtgggcgagcccgccgtgatggagtgccagccccccagaggccaccccgagcccaccatcagctggaagaaggacggcagccccctggacgacaaggacgagagaatcaccatcagaggcggcaagctgatgatcacctacaccagaaagagcgacgccggcaagtacgtgtgcgtgggcaccaacatggtgggcgagagagagagcgaggtggccgagctgaccgtgctggagagacccagcttcgtgaagagacccagcaacctggccgtgaccgtggacgacagcgccgagttcaagtgcgaggccagaggcgaccccgtgcccaccgtgagatggagaaaggacgacggcgagctgcccaagagcagatacgagatcagagacgaccacaccctgaagatcagaaaggtgaccgccggcgacatgggcagctacacctgcgtggccgagaacatggtgggcaaggccgaggccagcgccaccctgaccgtgcaggagcccccccacttcgtggtgaagcccagagaccaggtggtggccctgggcagaaccgtgaccttccagtgcgaggccaccggcaacccccagcccgccatcttctggagaagagagggcagccagaacctgctgttcagctaccagcccccccagagcagcagcagattcagcgtgagccagaccggcgacctgaccatcaccaacgtgcagagaagcgacgtgggctactacatctgccagaccctgaacgtggccggcagcatcatcaccaaggcctacctggaggtgaccgacgtgatcgccgacagacccccccccgtgatcagacagggccccgtgaaccagaccgtggccgtggacggcaccttcgtgctgagctgcgtggccaccggcagccccgtgcccaccatcctgtggagaaaggacggcgtgctggtgagcacccaggacagcagaatcaagcagctggagaacggcgtgctgcagatcagatacgccaagctgggcgacaccggcagatacacctgcatcgccagcacccccagcggcgaggccacctggagcgcctacatcgaggtgcagggcaaggtgaacgagttcggcgtgcccgtgcagccccccagacccaccgaccccaacctgatccccagcgcccccagcaagcccgaggtgaccgacgtgagcagaaacaccgtgaccctgagctggcagcccaacctgaacagcggcgccacccccaccagctacatcatcgaggccttcagccacgccagcggcagcagctggcagaccgtggccgagaacgtgaagaccgagaccagcgccatcaagggcctgaagcccaacgccatctacctgttcctggtgagagccgccaacgcctacggcatcagcgaccccagccagatcagcgaccccgtgaagacccaggacgtgctgcccaccagccagggcgtggaccacaagcaggtgcagagagagctgggcaacgccgtgctgcacctgcacaaccccaccgtgctgagcagcagcagcatcgaggtgcactggaccgtggaccagcagagccagtacatccagggctacaagatcctgtacagacccagcggcgccaaccacggcgagagcgactggctggtgttcgaggtgagaacccccgccaagaacagcgtggtgatccccgacctgagaaagggcgtgaactacgagatcaaggccagacccttcttcaacgagttccagggcgccgacagcgagatcaagttcgccaagaccctggaggaggcccccagcgcccccccccagggcgtgaccgtgagcaagaacgacggcaacggcaccgccatcctggtgagctggcagcccccccccgaggacacccagaacggcatggtgcaggagtacaaggtgtggtgcctgggcaacgagaccagataccacatcaacaagaccgtggacggcagcaccttcagcgtggtgatccccttcctggtgcccggcatcagatacagcgtggaggtggccgccagcaccggcgccggcagcggcgtgaagagcgagccccagttcatccagctggacgcccacggcaaccccgtgagccccgaggaccaggtgagcctggcccagcagatcagcgacgtggtgaagcagcccgccttcatcgccggcatcggcgccgcctgctggatcatcctgatggtgttcagcatctggctgtacagacacagaaagaagagaaacggcctgaccagcacctacgccggcatcagaaaggtgcccagcttcaccttcacccccaccgtgacctaccagagaggcggcgaggccgtgagcagcggcggcagacccggcctgctgaacatcagcgagcccgccgcccagccctggctggccgacacctggcccaacaccggcaacaaccacaacgactgcagcatcagctgctgcaccgccggcaacggcaacagcgacagcaacctgaccacctacagcagacccgccgactgcatcgccaactacaacaaccagctggacaacaagcagaccaacctgatgctgcccgagagcaccgtgtacggcgacgtggacctgagcaacaagatcaacgagatgaagaccttcaacagccccaacctgaaggacggcagattcgtgaaccccagcggccagcccaccccctacgccaccacccagctgatccagagcaacctgagcaacaacatgaacaacggcagcggcgacagcggcgagaagcactggaagcccctgggccagcagaagcaggaggtggcccccgtgcagtacaacatcgtggagcagaacaagctgaacaaggactacagagccaacgacaccgtgccccccaccatcccctacaaccagagctacgaccagaacaccggcggcagctacaacagcagcgacagaggcagcagcaccagcggcagccagggccacaagaagggcgccagaacccccaaggtgcccaagcagggcggcatgaactgggccgacctgctgccccccccccccgcccacccccccccccacagcaacagcgaggagtacaacatcagcgtggacgagagctacgaccaggagatgccctgccccgtgccccccgccagaatgtacctgcagcaggacgagctggaggaggaggaggacgagagaggccccaccccccccgtgagaggcgccgccagcagccccgccgccgtgagctacagccaccagagcaccgccaccctgacccccagcccccaggaggagctgcagcccatgctgcaggactgccccgaggagaccggccacatgcagcaccagcccgacagaagaagacagcccgtgagccccccccccccccccagacccatcagccccccccacacctacggctacatcagcggccccctggtgagcgacatggacaccgacgcccccgaggaggaggaggacgaggccgacatggaggtggccaagatgcagaccagaagactgctgctgagaggcctggagcagacccccgccagcagcgtgggcgacctggagagcagcgtgaccggcagcatgatcaacggctggggcagcgccagcgaggaggacaacatcagcagcggcagaagcagcgtgagcagcagcgacggcagcttcttcaccgacgccgacttcgcccaggccgtggccgccgccgccgagtacgccggcctgaaggtggccagaagacagatgcaggacgccgccggcagaagacacttccacgccagccagtgccccagacccaccagccccgtgagcaccgacagcaacatgagcgccgccgtgatgcagaagaccagacccgccaagaagctgaagcaccagcccggccacctgagaagagagacctacaccgacgacctgccccccccccccgtgcccccccccgccatcaagagccccaccgcccagagcaagacccagctggaggtgagacccgtggtggtgcccaagctgcccagcatggacgccagaaccgacagaagcagcgacagaaagggcagcagctacaagggcagagaggtgctggacggcagacaggtggtggacatgagaaccaaccccggcgaccccagagaggcccaggagcagcagaacgacggcaagggcagaggcaacaaggccgccaagagagacctgccccccgccaagacccacctgatccaggaggacatcctgccctactgcagacccaccttccccaccagcaacaaccccagagaccccagcagcagcagcagcatgagcagcagaggcagcggcagcagacagagagagcaggccaacgtgggcagaagaaacatcgccgagatgcaggtgctgggcggctacgagagaggcgaggacaacaacgaggagctggaggagcccagcagctag

SEQ ID NO: 97860 - DNA, 4839 bp, synthetic construct
  misc_feature 1..4839: note = Description of Artificial Sequence: Synthetic coding sequence
  source 1..4839: mol_type = other DNA
atgatcgccgagcccgcccacttctacctgttcggcctgatctgcctgtgcagcggcagcagactgagacaggaggacttcccccccagaatcgtggagcaccccagcgacctgatcgtgagcaagggcgagcccgccaccctgaactgcaaggccgagggcagacccacccccaccatcgagtggtacaagggcggcgagagagtggagaccgacaaggacgaccccagaagccacagaatgctgctgcccagcggcagcctgttcttcctgagaatcgtgcacggcagaaagagcagacccgacgagggcgtgtacgtgtgcgtggccagaaactacctgggcgaggccgtgagccacaacgccagcctggaggtggccatcctgagagacgacttcagacagaaccccagcgacgtgatggtggccgtgggcgagcccgccgtgatggagtgccagccccccagaggccaccccgagcccaccatcagctggaagaaggacggcagccccctggacgacaaggacgagagaatcaccatcagaggcggcaagctgatgatcacctacaccagaaagagcgacgccggcaagtacgtgtgcgtgggcaccaacatggtgggcgagagagagagcgaggtggccgagctgaccgtgctggagagacccagcttcgtgaagagacccagcaacctggccgtgaccgtggacgacagcgccgagttcaagtgcgaggccagaggcgaccccgtgcccaccgtgagatggagaaaggacgacggcgagctgcccaagagcagatacgagatcagagacgaccacaccctgaagatcagaaaggtgaccgccggcgacatgggcagctacacctgcgtggccgagaacatggtgggcaaggccgaggccagcgccaccctgaccgtgcaggagcccccccacttcgtggtgaagcccagagaccaggtggtggccctgggcagaaccgtgaccttccagtgcgaggccaccggcaacccccagcccgccatcttctggagaagagagggcagccagaacctgctgttcagctaccagcccccccagagcagcagcagattcagcgtgagccagaccggcgacctgaccatcaccaacgtgcagagaagcgacgtgggctactacatctgccagaccctgaacgtggccggcagcatcatcaccaaggcctacctggaggtgaccgacgtgatcgccgacagacccccccccgtgatcagacagggccccgtgaaccagaccgtggccgtggacggcaccttcgtgctgagctgcgtggccaccggcagccccgtgcccaccatcctgtggagaaaggacggcgtgctggtgagcacccaggacagcagaatcaagcagctggagaacggcgtgctgcagatcagatacgccaagctgggcgacaccggcagatacacctgcatcgccagcacccccagcggcgaggccacctggagcgcctacatcgaggtgcaggagttcggcgtgcccgtgcagccccccagacccaccgaccccaacctgatccccagcgcccccagcaagcccgaggtgaccgacgtgagcagaaacaccgtgaccctgagctggcagcccaacctgaacagcggcgccacccccaccagctacatcatcgaggccttcagccacgccagcggcagcagctggcagaccgtggccgagaacgtgaagaccgagaccagcgccatcaagggcctgaagcccaacgccatctacctgttcctggtgagagccgccaacgcctacggcatcagcgaccccagccagatcagcgaccccgtgaagacccaggacgtgctgcccaccagccagggcgtggaccacaagcaggtgcagagagagctgggcaacgccgtgctgcacctgcacaaccccaccgtgctgagcagcagcagcatcgaggtgcactggaccgtggaccagcagagccagtacatccagggctacaagatcctgtacagacccagcggcgccaaccacggcgagagcgactggctggtgttcgaggtgagaacccccgccaagaacagcgtggtgatccccgacctgagaaagggcgtgaactacgagatcaaggccagacccttcttcaacgagttccagggcgccgacagcgagatcaagttcgccaagaccctggaggaggcccccagcgcccccccccagggcgtgaccgtgagcaagaacgacggcaacggcaccgccatcctggtgagctggcagcccccccccgaggacacccagaacggcatggtgcaggagtacaaggtgtggtgcctgggcaacgagaccagataccacatcaacaagaccgtggacggcagcaccttcagcgtggtgatccccttcctggtgcccggcatcagatacagcgtggaggtggccgccagcaccggcgccggcagcggcgtgaagagcgagccccagttcatccagctggacgcccacggcaaccccgtgagccccgaggaccaggtgagcctggcccagcagatcagcgacgtggtgaagcagcccgccttcatcgccggcatcggcgccgcctgctggatcatcctgatggtgttcagcatctggctgtacagacacagaaagaagagaaacggcctgaccagcacctacgccggcatcagaaaggtgcccagcttcaccttcacccccaccgtgacctaccagagaggcggcgaggccgtgagcagcggcggcagacccggcctgctgaacatcagcgagcccgccgcccagccctggctggccgacacctggcccaacaccggcaacaaccacaacgactgcagcatcagctgctgcaccgccggcaacggcaacagcgacagcaacctgaccacctacagcagacccgccgactgcatcgccaactacaacaaccagctggacaacaagcagaccaacctgatgctgcccgagagcaccgtgtacggcgacgtggacctgagcaacaagatcaacgagatgaagaccttcaacagccccaacctgaaggacggcagattcgtgaaccccagcggccagcccaccccctacgccaccacccagctgatccagagcaacctgagcaacaacatgaacaacggcagcggcgacagcggcgagaagcactggaagcccctgggccagcagaagcaggaggtggcccccgtgcagtacaacatcgtggagcagaacaagctgaacaaggactacagagccaacgacaccgtgccccccaccatcccctacaaccagagctacgaccagaacaccggcggcagctacaacagcagcgacagaggcagcagcaccagcggcagccagggccacaagaagggcgccagaacccccaaggtgcccaagcagggcggcatgaactgggccgacctgctgccccccccccccgcccacccccccccccacagcaacagcgaggagtacaacatcagcgtggacgagagctacgaccaggagatgccctgccccgtgccccccgccagaatgtacctgcagcaggacgagctggaggaggaggaggacgagagaggccccaccccccccgtgagaggcgccgccagcagccccgccgccgtgagctacagccaccagagcaccgccaccctgacccccagcccccaggaggagctgcagcccatgctgcaggactgccccgaggagaccggccacatgcagcaccagcccgacagaagaagacagcccgtgagccccccccccccccccagacccatcagccccccccacacctacggctacatcagcggccccctggtgagcgacatggacaccgacgcccccgaggaggaggaggacgaggccgacatggaggtggccaagatgcagaccagaagactgctgctgagaggcctggagcagacccccgccagcagcgtgggcgacctggagagcagcgtgaccggcagcatgatcaacggctggggcagcgccagcgaggaggacaacatcagcagcggcagaagcagcgtgagcagcagcgacggcagcttcttcaccgacgccgacttcgcccaggccgtggccgccgccgccgagtacgccggcctgaaggtggccagaagacagatgcaggacgccgccggcagaagacacttccacgccagccagtgccccagacccaccagccccgtgagcaccgacagcaacatgagcgccgccgtgatgcagaagaccagacccgccaagaagctgaagcaccagcccggccacctgagaagagagacctacaccgacgacctgccccccccccccgtgcccccccccgccatcaagagccccaccgcccagagcaagacccagctggaggtgagacccgtggtggtgcccaagctgcccagcatggacgccagaaccgacagaagcagcgacagaaagggcagcagctacaagggcagagaggtgctggacggcagacaggtggtggacatgagaaccaaccccggcgaccccagagaggcccaggagcagcagaacgacggcaagggcagaggcaacaaggccgccaagagagacctgccccccgccaagacccacctgatccaggaggacatcctgccctactgcagacccaccttccccaccagcaacaaccccagagaccccagcagcagcagcagcatgagcagcagaggcagcggcagcagacagagagagcaggccaacgtgggcagaagaaacatcgccgagatgcaggtgctgggcggctacgagagaggcgaggacaacaacgaggagctggaggagaccgagagctag

SEQ ID NO: 97861 - DNA, 4956 bp, synthetic construct
  misc_feature 1..4956: note = Description of Artificial Sequence: Synthetic coding sequence
  source 1..4956: mol_type = other DNA
atgaagtggaagcacgtgcccttcctggtgatgatcagcctgctgagcctgagccccaaccacctgttcctggcccagctgatccccgaccccgaggacgtggagagaggcaacgaccacggcacccccatccccaccagcgacaacgacgacaacagcctgggctacaccggcagcagactgagacaggaggacttcccccccagaatcgtggagcaccccagcgacctgatcgtgagcaagggcgagcccgccaccctgaactgcaaggccgagggcagacccacccccaccatcgagtggtacaagggcggcgagagagtggagaccgacaaggacgaccccagaagccacagaatgctgctgcccagcggcagcctgttcttcctgagaatcgtgcacggcagaaagagcagacccgacgagggcgtgtacgtgtgcgtggccagaaactacctgggcgaggccgtgagccacaacgccagcctggaggtggccatcctgagagacgacttcagacagaaccccagcgacgtgatggtggccgtgggcgagcccgccgtgatggagtgccagccccccagaggccaccccgagcccaccatcagctggaagaaggacggcagccccctggacgacaaggacgagagaatcaccatcagaggcggcaagctgatgatcacctacaccagaaagagcgacgccggcaagtacgtgtgcgtgggcaccaacatggtgggcgagagagagagcgaggtggccgagctgaccgtgctggagagacccagcttcgtgaagagacccagcaacctggccgtgaccgtggacgacagcgccgagttcaagtgcgaggccagaggcgaccccgtgcccaccgtgagatggagaaaggacgacggcgagctgcccaagagcagatacgagatcagagacgaccacaccctgaagatcagaaaggtgaccgccggcgacatgggcagctacacctgcgtggccgagaacatggtgggcaaggccgaggccagcgccaccctgaccgtgcaggagcccccccacttcgtggtgaagcccagagaccaggtggtggccctgggcagaaccgtgaccttccagtgcgaggccaccggcaacccccagcccgccatcttctggagaagagagggcagccagaacctgctgttcagctaccagcccccccagagcagcagcagattcagcgtgagccagaccggcgacctgaccatcaccaacgtgcagagaagcgacgtgggctactacatctgccagaccctgaacgtggccggcagcatcatcaccaaggcctacctggaggtgaccgacgtgatcgccgacagacccccccccgtgatcagacagggccccgtgaaccagaccgtggccgtggacggcaccttcgtgctgagctgcgtggccaccggcagccccgtgcccaccatcctgtggagaaaggacggcgtgctggtgagcacccaggacagcagaatcaagcagctggagaacggcgtgctgcagatcagatacgccaagctgggcgacaccggcagatacacctgcatcgccagcacccccagcggcgaggccacctggagcgcctacatcgaggtgcaggagttcggcgtgcccgtgcagccccccagacccaccgaccccaacctgatccccagcgcccccagcaagcccgaggtgaccgacgtgagcagaaacaccgtgaccctgagctggcagcccaacctgaacagcggcgccacccccaccagctacatcatcgaggccttcagccacgccagcggcagcagctggcagaccgtggccgagaacgtgaagaccgagaccagcgccatcaagggcctgaagcccaacgccatctacctgttcctggtgagagccgccaacgcctacggcatcagcgaccccagccagatcagcgaccccgtgaagacccaggacgtgctgcccaccagccagggcgtggaccacaagcaggtgcagagagagctgggcaacgccgtgctgcacctgcacaaccccaccgtgctgagcagcagcagcatcgaggtgcactggaccgtggaccagcagagccagtacatccagggctacaagatcctgtacagacccagcggcgccaaccacggcgagagcgactggctggtgttcgaggtgagaacccccgccaagaacagcgtggtgatccccgacctgagaaagggcgtgaactacgagatcaaggccagacccttcttcaacgagttccagggcgccgacagcgagatcaagttcgccaagaccctggaggaggcccccagcgcccccccccagggcgtgaccgtgagcaagaacgacggcaacggcaccgccatcctggtgagctggcagcccccccccgaggacacccagaacggcatggtgcaggagtacaaggtgtggtgcctgggcaacgagaccagataccacatcaacaagaccgtggacggcagcaccttcagcgtggtgatccccttcctggtgcccggcatcagatacagcgtggaggtggccgccagcaccggcgccggcagcggcgtgaagagcgagccccagttcatccagctggacgcccacggcaaccccgtgagccccgaggaccaggtgagcctggcccagcagatcagcgacgtggtgaagcagcccgccttcatcgccggcatcggcgccgcctgctggatcatcctgatggtgttcagcatctggctgtacagacacagaaagaagagaaacggcctgaccagcacctacgccggcatcagaaaggtgcccagcttcaccttcacccccaccgtgacctaccagagaggcggcgaggccgtgagcagcggcggcagacccggcctgctgaacatcagcgagcccgccgcccagccctggctggccgacacctggcccaacaccggcaacaaccacaacgactgcagcatcagctgctgcaccgccggcaacggcaacagcgacagcaacctgaccacctacagcagacccgccgactgcatcgccaactacaacaaccagctggacaacaagcagaccaacctgatgctgcccgagagcaccgtgtacggcgacgtggacctgagcaacaagatcaacgagatgaagaccttcaacagccccaacctgaaggacggcagattcgtgaaccccagcggccagcccaccccctacgccaccacccagctgatccagagcaacctgagcaacaacatgaacaacggcagcggcgacagcggcgagaagcactggaagcccctgggccagcagaagcaggaggtggcccccgtgcagtacaacatcgtggagcagaacaagctgaacaaggactacagagccaacgacaccgtgccccccaccatcccctacaaccagagctacgaccagaacaccggcggcagctacaacagcagcgacagaggcagcagcaccagcggcagccagggccacaagaagggcgccagaacccccaaggtgcccaagcagggcggcatgaactgggccgacctgctgccccccccccccgcccacccccccccccacagcaacagcgaggagtacaacatcagcgtggacgagagctacgaccaggagatgccctgccccgtgccccccgccagaatgtacctgcagcaggacgagctggaggaggaggaggacgagagaggccccaccccccccgtgagaggcgccgccagcagccccgccgccgtgagctacagccaccagagcaccgccaccctgacccccagcccccaggaggagctgcagcccatgctgcaggactgccccgaggagaccggccacatgcagcaccagcccgacagaagaagacagcccgtgagccccccccccccccccagacccatcagccccccccacacctacggctacatcagcggccccctggtgagcgacatggacaccgacgcccccgaggaggaggaggacgaggccgacatggaggtggccaagatgcagaccagaagactgctgctgagaggcctggagcagacccccgccagcagcgtgggcgacctggagagcagcgtgaccggcagcatgatcaacggctggggcagcgccagcgaggaggacaacatcagcagcggcagaagcagcgtgagcagcagcgacggcagcttcttcaccgacgccgacttcgcccaggccgtggccgccgccgccgagtacgccggcctgaaggtggccagaagacagatgcaggacgccgccggcagaagacacttccacgccagccagtgccccagacccaccagccccgtgagcaccgacagcaacatgagcgccgccgtgatgcagaagaccagacccgccaagaagctgaagcaccagcccggccacctgagaagagagacctacaccgacgacctgccccccccccccgtgcccccccccgccatcaagagccccaccgcccagagcaagacccagctggaggtgagacccgtggtggtgcccaagctgcccagcatggacgccagaaccgacagaagcagcgacagaaagggcagcagctacaagggcagagaggtgctggacggcagacaggtggtggacatgagaaccaaccccggcgaccccagagaggcccaggagcagcagaacgacggcaagggcagaggcaacaaggccgccaagagagacctgccccccgccaagacccacctgatccaggaggacatcctgccctactgcagacccaccttccccaccagcaacaaccccagagaccccagcagcagcagcagcatgagcagcagaggcagcggcagcagacagagagagcaggccaacgtgggcagaagaaacatcgccgagatgcaggtgctgggcggctacgagagaggcgaggacaacaacgaggagctggaggagaccgagagctag

SEQ ID NO: 97862 - DNA, 4656 bp, synthetic construct
  misc_feature 1..4656: note = Description of Artificial Sequence: Synthetic coding sequence
  source 1..4656: mol_type = other DNA
atgatcgccgagcccgcccacttctacctgttcggcctgatctgcctgtgcagcggcagcagactgagacaggaggacttcccccccagaatcgtggagcaccccagcgacctgatcgtgagcaagggcgagcccgccaccctgaactgcaaggccgagggcagacccacccccaccatcgagtggtacaagggcggcgagagagtggagaccgacaaggacgaccccagaagccacagaatgctgctgcccagcggcagcctgttcttcctgagaatcgtgcacggcagaaagagcagacccgacgagggcgtgtacgtgtgcgtggccagaaactacctgggcgaggccgtgagccacaacgccagcctggaggtggccatcctgagagacgacttcagacagaaccccagcgacgtgatggtggccgtgggcgagcccgccgtgatggagtgccagccccccagaggccaccccgagcccaccatcagctggaagaaggacggcagccccctggacgacaaggacgagagaatcaccatcagaggcggcaagctgatgatcacctacaccagaaagagcgacgccggcaagtacgtgtgcgtgggcaccaacatggtgggcgagagagagagcgaggtggccgagctgaccgtgctggagagacccagcttcgtgaagagacccagcaacctggccgtgaccgtggacgacagcgccgagttcaagtgcgaggccagaggcgaccccgtgcccaccgtgagatggagaaaggacgacggcgagctgcccaagagcagatacgagatcagagacgaccacaccctgaagatcagaaaggtgaccgccggcgacatgggcagctacacctgcgtggccgagaacatggtgggcaaggccgaggccagcgccaccctgaccgtgcaggtgggcagcgagcccccccacttcgtggtgaagcccagagaccaggtggtggccctgggcagaaccgtgaccttccagtgcgaggccaccggcaacccccagcccgccatcttctggagaagagagggcagccagaacctgctgttcagctaccagcccccccagagcagcagcagattcagcgtgagccagaccggcgacctgaccatcaccaacgtgcagagaagcgacgtgggctactacatctgccagaccctgaacgtggccggcagcatcatcaccaaggcctacctggaggtgaccgacgtgatcgccgacagacccccccccgtgatcagacagggccccgtgaaccagaccgtggccgtggacggcaccttcgtgctgagctgcgtggccaccggcagccccgtgcccaccatcctgtggagaaaggacggcgtgctggtgagcacccaggacagcagaatcaagcagctggagaacggcgtgctgcagatcagatacgccaagctgggcgacaccggcagatacacctgcatcgccagcacccccagcggcgaggccacctggagcgcctacatcgaggtgcaggagttcggcgtgcccgtgcagccccccagacccaccgaccccaacctgatccccagcgcccccagcaagcccgaggtgaccgacgtgagcagaaacaccgtgaccctgagctggcagcccaacctgaacagcggcgccacccccaccagctacatcatcgaggccttcagccacgccagcggcagcagctggcagaccgtggccgagaacgtgaagaccgagaccagcgccatcaagggcctgaagcccaacgccatctacctgttcctggtgagagccgccaacgcctacggcatcagcgaccccagccagatcagcgaccccgtgaagacccaggacgtgctgcccaccagccagggcgtggaccacaagcaggtgcagagagagctgggcaacgccgtgctgcacctgcacaaccccaccgtgctgagcagcagcagcatcgaggtgcactggaccgtggaccagcagagccagtacatccagggctacaagatcctgtacagacccagcggcgccaaccacggcgagagcgactggctggtgttcgaggtgagaacccccgccaagaacagcgtggtgatccccgacctgagaaagggcgtgaactacgagatcaaggccagacccttcttcaacgagttccagggcgccgacagcgagatcaagttcgccaagaccctggaggaggcccccagcgcccccccccagggcgtgaccgtgagcaagaacgacggcaacggcaccgccatcctggtgagctggcagcccccccccgaggacacccagaacggcatggtgcaggagtacaaggtgtggtgcctgggcaacgagaccagataccacatcaacaagaccgtggacggcagcaccttcagcgtggtgatccccttcctggtgcccggcatcagatacagcgtggaggtggccgccagcaccggcgccggcagcggcgtgaagagcgagccccagttcatccagctggacgcccacggcaaccccgtgagccccgaggaccaggtgagcctggcccagcagatcagcgacgtggtgaagcagcccgccttcatcgccggcatcggcgccgcctgctggatcatcctgatggtgttcagcatctggctgtacagacacagaaagaagagaaacggcctgaccagcacctacgccggcatcagaaaggtgacctaccagagaggcggcgaggccgtgagcagcggcggcagacccggcctgctgaacatcagcgagcccgccgcccagccctggctggccgacacctggcccaacaccggcaacaaccacaacgactgcagcatcagctgctgcaccgccggcaacggcaacagcgacagcaacctgaccacctacagcagacccggccagcccaccccctacgccaccacccagctgatccagagcaacctgagcaacaacatgaacaacggcagcggcgacagcggcgagaagcactggaagcccctgggccagcagaagcaggaggtggcccccgtgcagtacaacatcgtggagcagaacaagctgaacaaggactacagagccaacgacaccgtgccccccaccatcccctacaaccagagctacgaccagaacaccggcggcagctacaacagcagcgacagaggcagcagcaccagcggcagccagggccacaagaagggcgccagaacccccaaggtgcccaagcagggcggcatgaactgggccgacctgctgccccccccccccgcccacccccccccccacagcaacagcgaggagtacaacatcagcgtggacgagagctacgaccaggagatgccctgccccgtgccccccgccagaatgtacctgcagcaggacgagctggaggaggaggaggacgagagaggccccaccccccccgtgagaggcgccgccagcagccccgccgccgtgagctacagccaccagagcaccgccaccctgacccccagcccccaggaggagctgcagcccatgctgcaggactgccccgaggagaccggccacatgcagcaccagcccgacagaagaagacagcccgtgagccccccccccccccccagacccatcagccccccccacacctacggctacatcagcggccccctggtgagcgacatggacaccgacgcccccgaggaggaggaggacgaggccgacatggaggtggccaagatgcagaccagaagactgctgctgagaggcctggagcagacccccgccagcagcgtgggcgacctggagagcagcgtgaccggcagcatgatcaacggctggggcagcgccagcgaggaggacaacatcagcagcggcagaagcagcgtgagcagcagcgacggcagcttcttcaccgacgccgacttcgcccaggccgtggccgccgccgccgagtacgccggcctgaaggtggccagaagacagatgcaggacgccgccggcagaagacacttccacgccagccagtgccccagacccaccagccccgtgagcaccgacagcaacatgagcgccgccgtgatgcagaagaccagacccgccaagaagctgaagcaccagcccggccacctgagaagagagacctacaccgacgacctgccccccccccccgtgcccccccccgccatcaagagccccaccgcccagagcaagacccagctggaggtgagacccgtggtggtgcccaagctgcccagcatggacgccagaaccgacagaagcagcgacagaaagggcagcagctacaagggcagagaggtgctggacggcagacaggtggtggacatgagaaccaaccccggcgaccccagagaggcccaggagcagcagaacgacggcaagggcagaggcaacaaggccgccaagagagacctgccccccgccaagacccacctgatccaggaggacatcctgccctactgcagacccaccttccccaccagcaacaaccccagagaccccagcagcagcagcagcatgagcagcagaggcagcggcagcagacagagagagcaggccaacgtgggcagaagaaacatcgccgagatgcaggtgctgggcggctacgagagaggcgaggacaacaacgaggagctggaggagaccgagagctag

SEQ ID NO: 97863 - DNA, 4821 bp, synthetic construct
  misc_feature 1..4821: note = Description of Artificial Sequence: Synthetic coding sequence
  source 1..4821: mol_type = other DNA
atgatcgccgagcccgcccacttctacctgttcggcctgatctgcctgtgcagcggcagcagactgagacaggaggacttcccccccagaatcgtggagcaccccagcgacctgatcgtgagcaagggcgagcccgccaccctgaactgcaaggccgagggcagacccacccccaccatcgagtggtacaagggcggcgagagagtggagaccgacaaggacgaccccagaagccacagaatgctgctgcccagcggcagcctgttcttcctgagaatcgtgcacggcagaaagagcagacccgacgagggcgtgtacgtgtgcgtggccagaaactacctgggcgaggccgtgagccacaacgccagcctggaggtggccatcctgagagacgacttcagacagaaccccagcgacgtgatggtggccgtgggcgagcccgccgtgatggagtgccagccccccagaggccaccccgagcccaccatcagctggaagaaggacggcagccccctggacgacaaggacgagagaatcaccatcagaggcggcaagctgatgatcacctacaccagaaagagcgacgccggcaagtacgtgtgcgtgggcaccaacatggtgggcgagagagagagcgaggtggccgagctgaccgtgctggagagacccagcttcgtgaagagacccagcaacctggccgtgaccgtggacgacagcgccgagttcaagtgcgaggccagaggcgaccccgtgcccaccgtgagatggagaaaggacgacggcgagctgcccaagagcagatacgagatcagagacgaccacaccctgaagatcagaaaggtgaccgccggcgacatgggcagctacacctgcgtggccgagaacatggtgggcaaggccgaggccagcgccaccctgaccgtgcaggtgggcagcgagcccccccacttcgtggtgaagcccagagaccaggtggtggccctgggcagaaccgtgaccttccagtgcgaggccaccggcaacccccagcccgccatcttctggagaagagagggcagccagaacctgctgttcagctaccagcccccccagagcagcagcagattcagcgtgagccagaccggcgacctgaccatcaccaacgtgcagagaagcgacgtgggctactacatctgccagaccctgaacgtggccggcagcatcatcaccaaggcctacctggaggtgaccgacgtgatcgccgacagacccccccccgtgatcagacagggccccgtgaaccagaccgtggccgtggacggcaccttcgtgctgagctgcgtggccaccggcagccccgtgcccaccatcctgtggagaaaggacggcgtgctggtgagcacccaggacagcagaatcaagcagctggagaacggcgtgctgcagatcagatacgccaagctgggcgacaccggcagatacacctgcatcgccagcacccccagcggcgaggccacctggagcgcctacatcgaggtgcaggagttcggcgtgcccgtgcagccccccagacccaccgaccccaacctgatccccagcgcccccagcaagcccgaggtgaccgacgtgagcagaaacaccgtgaccctgagctggcagcccaacctgaacagcggcgccacccccaccagctacatcatcgaggccttcagccacgccagcggcagcagctggcagaccgtggccgagaacgtgaagaccgagaccagcgccatcaagggcctgaagcccaacgccatctacctgttcctggtgagagccgccaacgcctacggcatcagcgaccccagccagatcagcgaccccgtgaagacccaggacgtgctgcccaccagccagggcgtggaccacaagcaggtgcagagagagctgggcaacgccgtgctgcacctgcacaaccccaccgtgctgagcagcagcagcatcgaggtgcactggaccgtggaccagcagagccagtacatccagggctacaagatcctgtacagacccagcggcgccaaccacggcgagagcgactggctggtgttcgaggtgagaacccccgccaagaacagcgtggtgatccccgacctgagaaagggcgtgaactacgagatcaaggccagacccttcttcaacgagttccagggcgccgacagcgagatcaagttcgccaagaccctggaggaggcccccagcgcccccccccagggcgtgaccgtgagcaagaacgacggcaacggcaccgccatcctggtgagctggcagcccccccccgaggacacccagaacggcatggtgcaggagtacaaggtgtggtgcctgggcaacgagaccagataccacatcaacaagaccgtggacggcagcaccttcagcgtggtgatccccttcctggtgcccggcatcagatacagcgtggaggtggccgccagcaccggcgccggcagcggcgtgaagagcgagccccagttcatccagctggacgcccacggcaaccccgtgagccccgaggaccaggtgagcctggcccagcagatcagcgacgtggtgaagcagcccgccttcatcgccggcatcggcgccgcctgctggatcatcctgatggtgttcagcatctggctgtacagacacagaaagaagagaaacggcctgaccagcacctacgccggcatcagaaaggtgacctaccagagaggcggcgaggccgtgagcagcggcggcagacccggcctgctgaacatcagcgagcccgccgcccagccctggctggccgacacctggcccaacaccggcaacaaccacaacgactgcagcatcagctgctgcaccgccggcaacggcaacagcgacagcaacctgaccacctacagcagacccgccgactgcatcgccaactacaacaaccagctggacaacaagcagaccaacctgatgctgcccgagagcaccgtgtacggcgacgtggacctgagcaacaagatcaacgagatgaagaccttcaacagccccaacctgaaggacggcagattcgtgaaccccagcggccagcccaccccctacgccaccacccagctgatccagagcaacctgagcaacaacatgaacaacggcagcggcgacagcggcgagaagcactggaagcccctgggccagcagaagcaggaggtggcccccgtgcagtacaacatcgtggagcagaacaagctgaacaaggactacagagccaacgacaccgtgccccccaccatcccctacaaccagagctacgaccagaacaccggcggcagctacaacagcagcgacagaggcagcagcaccagcggcagccagggccacaagaagggcgccagaacccccaaggtgcccaagcagggcggcatgaactgggccgacctgctgccccccccccccgcccacccccccccccacagcaacagcgaggagtacaacatcagcgtggacgagagctacgaccaggagatgccctgccccgtgccccccgccagaatgtacctgcagcaggacgagctggaggaggaggaggacgagagaggccccaccccccccgtgagaggcgccgccagcagccccgccgccgtgagctacagccaccagagcaccgccaccctgacccccagcccccaggaggagctgcagcccatgctgcaggactgccccgaggagaccggccacatgcagcaccagcccgacagaagaagacagcccgtgagccccccccccccccccagacccatcagccccccccacacctacggctacatcagcggccccctggtgagcgacatggacaccgacgcccccgaggaggaggaggacgaggccgacatggaggtggccaagatgcagaccagaagactgctgctgagaggcctggagcagacccccgccagcagcgtgggcgacctggagagcagcgtgaccggcagcatgatcaacggctggggcagcgccagcgaggaggacaacatcagcagcggcagaagcagcgtgagcagcagcgacggcagcttcttcaccgacgccgacttcgcccaggccgtggccgccgccgccgagtacgccggcctgaaggtggccagaagacagatgcaggacgccgccggcagaagacacttccacgccagccagtgccccagacccaccagccccgtgagcaccgacagcaacatgagcgccgccgtgatgcagaagaccagacccgccaagaagctgaagcaccagcccggccacctgagaagagagacctacaccgacgacctgccccccccccccgtgcccccccccgccatcaagagccccaccgcccagagcaagacccagctggaggtgagacccgtggtggtgcccaagctgcccagcatggacgccagaaccgacagaagcagcgacagaaagggcagcagctacaagggcagagaggtgctggacggcagacaggtggtggacatgagaaccaaccccggcgaccccagagaggcccaggagcagcagaacgacggcaagggcagaggcaacaaggccgccaagagagacctgccccccgccaagacccacctgatccaggaggacatcctgccctactgcagacccaccttccccaccagcaacaaccccagagaccccagcagcagcagcagcatgagcagcagaggcagcggcagcagacagagagagcaggccaacgtgggcagaagaaacatcgccgagatgcaggtgctgggcggctacgagagaggcgaggacaacaacgaggagctggaggagaccgagagctag

SEQ ID NO: 97864 - DNA, 3213 bp, synthetic construct
  misc_feature 1..3213: note = Description of Artificial Sequence: Synthetic coding sequence
  source 1..3213: mol_type = other DNA
atggccagaagacacgagagagtgaccagaagaatgtggacctgggcccccggcctgctgatgatgaccgtggtgttctggggccaccagggcaacggccagggccagggcagcagactgagacaggaggacttcccccccagaatcgtggagcaccccagcgacgtgatcgtgagcaagggcgagcccaccaccctgaactgcaaggccgagggcagacccacccccaccatcgagtggtacaaggacggcgagagagtggagaccgacaaggacgaccccagaagccacagaatgctgctgcccagcggcagcctgttcttcctgagaatcgtgcacggcagaagaagcaagcccgacgagggcagctacgtgtgcgtggccagaaactacctgggcgaggccgtgagcagaaacgccagcctggaggtggccctgctgagagacgacttcagacagaaccccaccgacgtggtggtggccgccggcgagcccgccatcctggagtgccagccccccagaggccaccccgagcccaccatctactggaagaaggacaaggtgagaatcgacgacaaggaggagagaatcagcatcagaggcggcaagctgatgatcagcaacaccagaaagagcgacgccggcatgtacacctgcgtgggcaccaacatggtgggcgagagagacagcgaccccgccgagctgaccgtgttcgagagacccaccttcctgagaagacccatcaaccaggtggtgctggaggaggaggccgtggagttcagatgccaggtgcagggcgacccccagcccaccgtgagatggaagaaggacgacgccgacctgcccagaggcagatacgacatcaaggacgactacaccctgagaatcaagaagaccatgagcaccgacgagggcacctacatgtgcatcgccgagaacagagtgggcaagatggaggccagcgccaccctgaccgtgagaggcggcgtgatcgcccccccccagttcgtggtgagacccagagaccagatcgtggcccagggcagaaccgtgaccttcccctgcgagaccaagggcaacccccagcccgccgtgttctggcagaaggagggcagccagaacctgctgttccccaaccagccccagcagcccaacagcagatgcagcgtgagccccaccggcgacctgaccatcaccaacatccagagaagcgacgccggctactacatctgccaggccctgaccgtggccggcagcatcctggccaaggcccagctggaggtgaccgacgtgctgaccgacagacccccccccatcatcctgcagggccccgccaaccagaccctggccgtggacggcaccgccctgctgaagtgcaaggccaccggcgaccccctgcccgtgatcagctggctgaaggagggcttcaccttccccggcagagaccccagagccaccatccaggagcagggcaccctgcagatcaagaacctgagaatcagcgacaccggcacctacacctgcgtggccaccagcagcagcggcgagaccagctggagcgccgtgctggacgtgaccgagagcggcgccaccatcagcaagaactacgacctgagcgacctgcccggcccccccagcaagccccaggtgaccgacgtgaccaagaacagcgtgaccctgagctggcagcccggcacccccggcaccctgcccgccagcgcctacatcatcgaggccttcagccagagcgtgagcaacagctggcagaccgtggccaaccacgtgaagaccaccctgtacaccgtgagaggcctgagacccaacaccatctacctgttcatggtgagagccatcaacccccagggcctgagcgaccccagccccatgagcgaccccgtgagaacccaggacatcagcccccccgcccagggcgtggaccacagacaggtgcagaaggagctgggcgacgtgctggtgagactgcacaaccccgtggtgctgacccccaccaccgtgcaggtgacctggaccgtggacagacagccccagttcatccagggctacagagtgatgtacagacagaccagcggcctgcaggccaccagcagctggcagaacctggacgccaaggtgcccaccgagagaagcgccgtgctggtgaacctgaagaagggcgtgacctacgagatcaaggtgagaccctacttcaacgagttccagggcatggacagcgagagcaagaccgtgagaaccaccgaggaggcccccagcgcccccccccagagcgtgaccgtgctgaccgtgggcagctacaacagcaccagcatcagcgtgagctgggacccccccccccccgaccaccagaacggcatcatccaggagtacaagatctggtgcctgggcaacgagaccagattccacatcaacaagaccgtggacgccgccatcagaagcgtgatcatcggcggcctgttccccggcatccagtacagagtggaggtggccgccagcaccagcgccggcgtgggcgtgaagagcgagccccagcccatcatcatcggcagaagaaacgaggtggtgatcaccgagaacaacaacagcatcaccgagcagatcaccgacgtggtgaagcagcccgccttcatcgccggcatcggcggcgcctgctgggtgatcctgatgggcttcagcatctggctgtactggagaagaaagaagagaaagggcctgagcaactacgccgtgaccttccagagaggcgacggcggcctgatgagcaacggcagcagacccggcctgctgaacgccggcgaccccagctacccctggctggccgacagctggcccgccaccagcctgcccgtgaacaacagcaacagcggccccaacgagatcggcaacttcggcagaggcgacgtgctgccccccgtgcccggccagggcgacaagaccgccaccatgctgagcgacggcgccatctacagcagcatcgacttcaccaccaagaccagctacaacagcagcagccagatcacccaggccaccccctacgccaccacccagatcctgcacagcaacagcatccacgagctggccgtggacctgcccgacccccagtggaagagcagcatccagcagaagaccgacctgatgggcttcggctacagcctgcccgaccagaacaagggcaacaacggcgagagcggcagctag

SEQ ID NO: 97865 - DNA, 1713 bp, synthetic construct
  misc_feature 1..1713: note = Description of Artificial Sequence: Synthetic coding sequence
  source 1..1713: mol_type = other DNA
atgagcaccgacgagggcacctacatgtgcatcgccgagaacagagtgggcaagatggaggccagcgccaccctgaccgtgagaggcggcgtgatcgcccccccccagttcgtggtgagacccagagaccagatcgtggcccagggcagaaccgtgaccttcccctgcgagaccaagggcaacccccagcccgccgtgttctggcagaaggagggcagccagaacctgctgttccccaaccagccccagcagcccaacagcagatgcagcgtgagccccaccggcgacctgaccatcaccaacatccagagaagcgacgccggctactacatctgccaggccctgaccgtggccggcagcatcctggccaaggcccagctggaggtgaccgacgtgctgaccgacagacccccccccatcatcctgcagggccccgccaaccagaccctggccgtggacggcaccgccctgctgaagtgcaaggccaccggcgaccccctgcccgtgatcagctggctgaaggagggcttcaccttccccggcagagaccccagagccaccatccaggagcagggcaccctgcagatcaagaacctgagaatcagcgacaccggcacctacacctgcgtggccaccagcagcagcggcgagaccagctggagcgccgtgctggacgtgaccgagagcggcgccaccatcagcaagaactacgacctgagcgacctgcccggcccccccagcaagccccaggtgaccgacgtgaccaagaacagcgtgaccctgagctggcagcccggcacccccggcaccctgcccgccagcgcctacatcatcgaggccttcagccagagcgtgagcaacagctggcagaccgtggccaaccacgtgaagaccaccctgtacaccgtgagaggcctgagacccaacaccatctacctgttcatggtgagagccatcaacccccagggcctgagcgaccccagccccatgagcgaccccgtgagaacccaggacatcagcccccccgcccagggcgtggaccacagacaggtgcagaaggagctgggcgacgtgctggtgagactgcacaaccccgtggtgctgacccccaccaccgtgcaggtgacctggaccgtggacagacagccccagttcatccagggctacagagtgatgtacagacagaccagcggcctgcaggccaccagcagctggcagaacctggacgccaaggtgcccaccgagagaagcgccgtgctggtgaacctgaagaagggcgtgacctacgagatcaaggtgagaccctacttcaacgagttccagggcatggacagcgagagcaagaccgtgagaaccaccgaggaggcccccagcgcccccccccagagcgtgaccgtgctgaccgtgggcagctacaacagcaccagcatcagcgtgagctgggacccccccccccccgaccaccagaacggcatcatccaggagtacaagatctggtgcctgggcaacgagaccagattccacatcaacaagaccgtggacgccgccatcagaagcgtgatcatcggcggcctgttccccggcatccagtacagagtggaggtggccgccagcaccagcgccggcgtgggcgtgaagagcgagccccagcccaacaacaccggctaccccatctgccacgacaccgacctggccttccagcagcacacctag

SEQ ID NO: 97866 - DNA, 4185 bp, synthetic construct
  misc_feature 1..4185: note = Description of Artificial Sequence: Synthetic coding sequence
  source 1..4185: mol_type = other DNA
atggccagaagacacgagagagtgaccagaagaatgtggacctgggcccccggcctgctgatgatgaccgtggtgttctggggccaccagggcaacggccagggccagggcagcagactgagacaggaggacttcccccccagaatcgtggagcaccccagcgacgtgatcgtgagcaagggcgagcccaccaccctgaactgcaaggccgagggcagacccacccccaccatcgagtggtacaaggacggcgagagagtggagaccgacaaggacgaccccagaagccacagaatgctgctgcccagcggcagcctgttcttcctgagaatcgtgcacggcagaagaagcaagcccgacgagggcagctacgtgtgcgtggccagaaactacctgggcgaggccgtgagcagaaacgccagcctggaggtggccctgctgagagacgacttcagacagaaccccaccgacgtggtggtggccgccggcgagcccgccatcctggagtgccagccccccagaggccaccccgagcccaccatctactggaagaaggacaaggtgagaatcgacgacaaggaggagagaatcagcatcagaggcggcaagctgatgatcagcaacaccagaaagagcgacgccggcatgtacacctgcgtgggcaccaacatggtgggcgagagagacagcgaccccgccgagctgaccgtgttcgagagacccaccttcctgagaagacccatcaaccaggtggtgctggaggaggaggccgtggagttcagatgccaggtgcagggcgacccccagcccaccgtgagatggaagaaggacgacgccgacctgcccagaggcagatacgacatcaaggacgactacaccctgagaatcaagaagaccatgagcaccgacgagggcacctacatgtgcatcgccgagaacagagtgggcaagatggaggccagcgccaccctgaccgtgagagcccccccccagttcgtggtgagacccagagaccagatcgtggcccagggcagaaccgtgaccttcccctgcgagaccaagggcaacccccagcccgccgtgttctggcagaaggagggcagccagaacctgctgttccccaaccagccccagcagcccaacagcagatgcagcgtgagccccaccggcgacctgaccatcaccaacatccagagaagcgacgccggctactacatctgccaggccctgaccgtggccggcagcatcctggccaaggcccagctggaggtgaccgacgtgctgaccgacagacccccccccatcatcctgcagggccccgccaaccagaccctggccgtggacggcaccgccctgctgaagtgcaaggccaccggcgaccccctgcccgtgatcagctggctgaaggagggcttcaccttccccggcagagaccccagagccaccatccaggagcagggcaccctgcagatcaagaacctgagaatcagcgacaccggcacctacacctgcgtggccaccagcagcagcggcgagaccagctggagcgccgtgctggacgtgaccgagagcggcgccaccatcagcaagaactacgacctgagcgacctgcccggcccccccagcaagccccaggtgaccgacgtgaccaagaacagcgtgaccctgagctggcagcccggcacccccggcaccctgcccgccagcgcctacatcatcgaggccttcagccagagcgtgagcaacagctggcagaccgtggccaaccacgtgaagaccaccctgtacaccgtgagaggcctgagacccaacaccatctacctgttcatggtgagagccatcaacccccagggcctgagcgaccccagccccatgagcgaccccgtgagaacccaggacatcagcccccccgcccagggcgtggaccacagacaggtgcagaaggagctgggcgacgtgctggtgagactgcacaaccccgtggtgctgacccccaccaccgtgcaggtgacctggaccgtggacagacagccccagttcatccagggctacagagtgatgtacagacagaccagcggcctgcaggccaccagcagctggcagaacctggacgccaaggtgcccaccgagagaagcgccgtgctggtgaacctgaagaagggcgtgacctacgagatcaaggtgagaccctacttcaacgagttccagggcatggacagcgagagcaagaccgtgagaaccaccgaggaggcccccagcgcccccccccagagcgtgaccgtgctgaccgtgggcagctacaacagcaccagcatcagcgtgagctgggacccccccccccccgaccaccagaacggcatcatccaggagtacaagatctggtgcctgggcaacgagaccagattccacatcaacaagaccgtggacgccgccatcagaagcgtgatcatcggcggcctgttccccggcatccagtacagagtggaggtggccgccagcaccagcgccggcgtgggcgtgaagagcgagccccagcccatcatcatcggcagaagaaacgaggtggtgatcaccgagaacaacaacagcatcaccgagcagatcaccgacgtggtgaagcagcccgccttcatcgccggcatcggcggcgcctgctgggtgatcctgatgggcttcagcatctggctgtactggagaagaaagaagagaaagggcctgagcaactacgccgtgaccttccagagaggcgacggcggcctgatgagcaacggcagcagacccggcctgctgaacgccggcgaccccagctacccctggctggccgacagctggcccgccaccagcctgcccgtgaacaacagcaacagcggccccaacgagatcggcaacttcggcagaggcgacgtgctgccccccgtgcccggccagggcgacaagaccgccaccatgctgagcgacggcgccatctacagcagcatcgacttcaccaccaagaccagctacaacagcagcagccagatcacccaggccaccccctacgccaccacccagatcctgcacagcaacagcatccacgagctggccgtggacctgcccgacccccagtggaagagcagcatccagcagaagaccgacctgatgggcttcggctacagcctgcccgaccagaacaagggcaacaacggcggcaagggcggcaagaagaagaagaacaagaacagcagcaagccccagaagaacaacggcagcacctgggccaacgtgcccctgccccccccccccgtgcagcccctgcccggcaccgagctggagcactacgccgtggagcagcaggagaacggctacgacagcgacagctggtgcccccccctgcccgtgcagacctacctgcaccagggcctggaggacgagctggaggaggacgacgacagagtgcccaccccccccgtgagaggcgtggccagcagccccgccatcagcttcggccagcagagcaccgccaccctgacccccagccccagagaggagatgcagcccatgctgcaggcccacctggacgagctgaccagagcctaccagttcgacatcgccaagcagacctggcacatccagagcaacaaccagcccccccagccccccgtgccccccctgggctacgtgagcggcgccctgatcagcgacctggagaccgacgtggccgacgacgacgccgacgacgaggaggaggccctggagatccccagacccctgagagccctggaccagacccccggcagcagcatggacaacctggacagcagcgtgaccggcaaggccttcaccagcagccagagacccagacccaccagccccttcagcaccgacagcaacaccagcgccgccctgagccagagccagagacccagacccaccaagaagcacaagggcggcagaatggaccagcagcccgccctgccccacagaagagagggcatgaccgacgaggaggccctggtgccctacagcaagcccagcttccccagccccggcggccacagcagcagcggcaccgccagcagcaagggcagcaccggccccagaaagaccgaggtgctgagagccggccaccagagaaacgccagcgacctgctggacatcggctacatgggcagcaacagccagggccagttcaccggcgagctgtag

SEQ ID NO: 97867 - DNA, 4137 bp, synthetic construct
  misc_feature 1..4137: note = Description of Artificial Sequence: Synthetic coding sequence
  source 1..4137: mol_type = other DNA
atgagcctgctgatgttcacccagctgctgctgtgcggcttcctgtacgtgagagtggacggcagcagactgagacaggaggacttcccccccagaatcgtggagcaccccagcgacgtgatcgtgagcaagggcgagcccaccaccctgaactgcaaggccgagggcagacccacccccaccatcgagtggtacaaggacggcgagagagtggagaccgacaaggacgaccccagaagccacagaatgctgctgcccagcggcagcctgttcttcctgagaatcgtgcacggcagaagaagcaagcccgacgagggcagctacgtgtgcgtggccagaaactacctgggcgaggccgtgagcagaaacgccagcctggaggtggccctgctgagagacgacttcagacagaaccccaccgacgtggtggtggccgccggcgagcccgccatcctggagtgccagccccccagaggccaccccgagcccaccatctactggaagaaggacaaggtgagaatcgacgacaaggaggagagaatcagcatcagaggcggcaagctgatgatcagcaacaccagaaagagcgacgccggcatgtacacctgcgtgggcaccaacatggtgggcgagagagacagcgaccccgccgagctgaccgtgttcgagagacccaccttcctgagaagacccatcaaccaggtggtgctggaggaggaggccgtggagttcagatgccaggtgcagggcgacccccagcccaccgtgagatggaagaaggacgacgccgacctgcccagaggcagatacgacatcaaggacgactacaccctgagaatcaagaagaccatgagcaccgacgagggcacctacatgtgcatcgccgagaacagagtgggcaagatggaggccagcgccaccctgaccgtgagagcccccccccagttcgtggtgagacccagagaccagatcgtggcccagggcagaaccgtgaccttcccctgcgagaccaagggcaacccccagcccgccgtgttctggcagaaggagggcagccagaacctgctgttccccaaccagccccagcagcccaacagcagatgcagcgtgagccccaccggcgacctgaccatcaccaacatccagagaagcgacgccggctactacatctgccaggccctgaccgtggccggcagcatcctggccaaggcccagctggaggtgaccgacgtgctgaccgacagacccccccccatcatcctgcagggccccgccaaccagaccctggccgtggacggcaccgccctgctgaagtgcaaggccaccggcgaccccctgcccgtgatcagctggctgaaggagggcttcaccttccccggcagagaccccagagccaccatccaggagcagggcaccctgcagatcaagaacctgagaatcagcgacaccggcacctacacctgcgtggccaccagcagcagcggcgagaccagctggagcgccgtgctggacgtgaccgagagcggcgccaccatcagcaagaactacgacctgagcgacctgcccggcccccccagcaagccccaggtgaccgacgtgaccaagaacagcgtgaccctgagctggcagcccggcacccccggcaccctgcccgccagcgcctacatcatcgaggccttcagccagagcgtgagcaacagctggcagaccgtggccaaccacgtgaagaccaccctgtacaccgtgagaggcctgagacccaacaccatctacctgttcatggtgagagccatcaacccccagggcctgagcgaccccagccccatgagcgaccccgtgagaacccaggacatcagcccccccgcccagggcgtggaccacagacaggtgcagaaggagctgggcgacgtgctggtgagactgcacaaccccgtggtgctgacccccaccaccgtgcaggtgacctggaccgtggacagacagccccagttcatccagggctacagagtgatgtacagacagaccagcggcctgcaggccaccagcagctggcagaacctggacgccaaggtgcccaccgagagaagcgccgtgctggtgaacctgaagaagggcgtgacctacgagatcaaggtgagaccctacttcaacgagttccagggcatggacagcgagagcaagaccgtgagaaccaccgaggaggcccccagcgcccccccccagagcgtgaccgtgctgaccgtgggcagctacaacagcaccagcatcagcgtgagctgggacccccccccccccgaccaccagaacggcatcatccaggagtacaagatctggtgcctgggcaacgagaccagattccacatcaacaagaccgtggacgccgccatcagaagcgtgatcatcggcggcctgttccccggcatccagtacagagtggaggtggccgccagcaccagcgccggcgtgggcgtgaagagcgagccccagcccatcatcatcggcagaagaaacgaggtggtgatcaccgagaacaacaacagcatcaccgagcagatcaccgacgtggtgaagcagcccgccttcatcgccggcatcggcggcgcctgctgggtgatcctgatgggcttcagcatctggctgtactggagaagaaagaagagaaagggcctgagcaactacgccgtgaccttccagagaggcgacggcggcctgatgagcaacggcagcagacccggcctgctgaacgccggcgaccccagctacccctggctggccgacagctggcccgccaccagcctgcccgtgaacaacagcaacagcggccccaacgagatcggcaacttcggcagaggcgacgtgctgccccccgtgcccggccagggcgacaagaccgccaccatgctgagcgacggcgccatctacagcagcatcgacttcaccaccaagaccagctacaacagcagcagccagatcacccaggccaccccctacgccaccacccagatcctgcacagcaacagcatccacgagctggccgtggacctgcccgacccccagtggaagagcagcatccagcagaagaccgacctgatgggcttcggctacagcctgcccgaccagaacaagggcaacaacggcggcaagggcggcaagaagaagaagaacaagaacagcagcaagccccagaagaacaacggcagcacctgggccaacgtgcccctgccccccccccccgtgcagcccctgcccggcaccgagctggagcactacgccgtggagcagcaggagaacggctacgacagcgacagctggtgcccccccctgcccgtgcagacctacctgcaccagggcctggaggacgagctggaggaggacgacgacagagtgcccaccccccccgtgagaggcgtggccagcagccccgccatcagcttcggccagcagagcaccgccaccctgacccccagccccagagaggagatgcagcccatgctgcaggcccacctggacgagctgaccagagcctaccagttcgacatcgccaagcagacctggcacatccagagcaacaaccagcccccccagccccccgtgccccccctgggctacgtgagcggcgccctgatcagcgacctggagaccgacgtggccgacgacgacgccgacgacgaggaggaggccctggagatccccagacccctgagagccctggaccagacccccggcagcagcatggacaacctggacagcagcgtgaccggcaaggccttcaccagcagccagagacccagacccaccagccccttcagcaccgacagcaacaccagcgccgccctgagccagagccagagacccagacccaccaagaagcacaagggcggcagaatggaccagcagcccgccctgccccacagaagagagggcatgaccgacgaggaggccctggtgccctacagcaagcccagcttccccagccccggcggccacagcagcagcggcaccgccagcagcaagggcagcaccggccccagaaagaccgaggtgctgagagccggccaccagagaaacgccagcgacctgctggacatcggctacatgggcagcaacagccagggccagttcaccggcgagctgtag

SEQ ID NO: 97868 - DNA, 4185 bp, synthetic construct; identical to SEQ ID NO: 97866
  misc_feature 1..4185: note = Description of Artificial Sequence: Synthetic coding sequence
  source 1..4185: mol_type = other DNA

SEQ ID NO: 97869 - DNA, 4161 bp, synthetic construct
  misc_feature 1..4161: note = Description of Artificial Sequence: Synthetic coding sequence
  source 1..4161: mol_type = other DNA
atgctgagatacctgctgaagaccctgctgcagatgaacctgttcgccgacagcctggccggcgacatcagcaacagcagcgagctgctgctgggcttcaacagcagcctggccgccctgaaccacaccctgctgccccccggcgaccccagcctgaacggcagcagagtgggccccgaggacgccatgcccagaatcgtggagcagccccccgacctgctggtgagcagaggcgagcccgccaccctgccctgcagagccgagggcagacccagacccaacatcgagtggtacaagaacggcgccagagtggccaccgtgagagaggaccccagagcccacagactgctgctgcccagcggcgccctgttcttccccagaatcgtgcacggcagaagagccagacccgacgagggcgtgtacacctgcgtggccagaaactacctgggcgccgccgccagcagaaacgccagcctggaggtggccgtgctgagagacgacttcagacagagccccggcaacgtggtggtggccgtgggcgagcccgccgtgctggagtgcgtgccccccagaggccaccccgagcccagcgtgagctggagaaaggacggcgccagactgaaggaggaggagggcagaatcaccatcagaggcggcaagctgatgatgagccacaccctgaagagcgacgccggcatgtacgtgtgcgtggccagcaacatggccggcgagagagagagcgccgccgccgaggtgatggtgctggagagacccagcttcctgagaagacccgtgaaccaggtggtgctggccgacgcccccgtgaccttcctgtgcgaggtgaagggcgaccccccccccagactgagatggagaaaggaggacggcgagctgcccaccggcagatacgagatcagaagcgaccacagcctgtggatcggccacgtgagcgccgaggacgagggcacctacacctgcgtggccgagaacagcgtgggcagagccgaggccagcggcagcctgagcgtgcacgtgcccccccagctggtgacccagccccaggaccagatggccgcccccggcgagagcgtggccttccagtgcgagaccaagggcaaccccccccccgccatcttctggcagaaggagggcagccaggtgctgctgttccccagccagagcctgcagcccaccggcagattcagcgtgagccccagaggccagctgaacatcaccgccgtgcagagaggcgacgccggctactacgtgtgccaggccgtgagcgtggccggcagcatcctggccaaggccctgctggagatcaagggcgccagcctggacggcctgccccccgtgatcctgcagggccccgccaaccagaccctggtgctgggcagcagcgtgtggctgccctgcagagtgaccggcaacccccagcccagcgtgagatggaagaaggacggccagtggctgcagggcgacgacctgcagttcaagaccatggccaacggcaccctgtacatcgccaacgtgcaggagatggacatgggcttctacagctgcgtggccaagagcagcaccggcgaggccacctggagcggctggctgaagatgagagaggactggggcgtgagccccgacccccccaccgagcccagcagcccccccggcgcccccagccagcccgtggtgaccgagatcaccaagaacagcatcaccctgacctggaagcccaacccccagaccggcgccgccgtgaccagctacgtgatcgaggccttcagccccgccgccggcaacacctggagaaccgtggccgacggcgtgcagctggagacccacaccgtgagcggcctgcagcccaacaccatctacctgttcctggtgagagccgtgggcgcctggggcctgagcgagcccagccccgtgagcgagcccgtgagaacccaggacagcagccccagcagacccgtggaggacccctggagaggccagcagggcctggccgaggtggccgtgagactgcaggagcccatcgtgctgggccccagaaccctgcaggtgagctggaccgtggacggccccgtgcagctggtgcagggcttcagagtgagctggagagtggccggccccgagggcggcagctggaccatgctggacctgcagagccccagccagcagagcaccgtgctgagaggcctgccccccggcacccagatccagatcaaggtgcaggcccagggccaggagggcctgggcgccgagagcctgagcgtgaccagaagcatccccgaggaggcccccagcggccccccccagggcgtggccgtggccctgggcggcgacggcaacagcagcatcaccgtgagctgggagccccccctgcccagccagcagaacggcgtgatcaccgagtaccagatctggtgcctgggcaacgagagcagattccacctgaacagaagcgccgccggctgggccagaagcgccatgctgagaggcctggtgcccggcctgctgtacagaaccctggtggccgccgccaccagcgccggcgtgggcgtgcccagcgcccccgtgctggtgcagctgcccagcccccccgacctggagcccggcctggaggtgggcgccggcctggccgtgagactggccagagtgctgagagagcccgccttcctggccggcagcggcgccgcctgcggcgccctgctgctgggcctgtgcgccgccctgtactggagaagaaagcagagaaaggagctgagccactacaccgccagcttcgcctacacccccgccgtgagcttcccccacagcgagggcctgagcggcgccagcagcagaccccccatgggcctgggccccgccccctacagctggctggccgacagctggccccaccccagcagaagccccagcgcccaggagcccagaggcagctgctgccccagcaaccccgaccccgacgacagatactacaacgaggccggcatcagcctgtacctggcccagaccgccagaggcaccgccgcccccggcgagggccccgtgtacagcaccatcgaccccgccggcgaggagctgcagaccttccacggcggcttcccccagcaccccagcggcgacctgggcccctggagccagtacgccccccccgagtggagccagggcgacagcggcgccaagggcggcaaggtgaagctgctgggcaagcccgtgcagatgcccagcctgaactggcccgaggccctgcccccccccccccccagctgcgagctgagctgcctggagggccccgaggaggagctggagggcagcagcgagcccgaggagtggtgcccccccatgcccgagagaagccacctgaccgagcccagcagcagcggcggctgcctggtgacccccagcagaagagagacccccagccccacccccagctacggccagcagagcaccgccaccctgacccccagcccccccgaccccccccagccccccaccgacatgccccacctgcaccagatgcccagaagagtgcccctgggccccagcagccccctgagcgtgagccagcccatgctgggcatcagagaggccagacccgccggcctgggcgccggccccgccgccagcccccacctgagccccagccccgcccccagcaccgccagcagcgcccccggcagaacctggcagggcaacggcgagatgaccccccccctgcagggccccagagccagattcagaaagaagcccaaggccctgccctacagaagagagaacagccccggcgacctgccccccccccccctgcccccccccgaggaggaggccagctgggccctggagctgagagccgccggcagcatgagcagcctggagagagagagaagcggcgagagaaaggccgtgcaggccgtgcccctggccgcccagagagtgctgcaccccgacgaggaggcctggctgccctacagcagacccagcttcctgagcagaggccagggcaccagcacctgcagcaccgccggcagcaacagcagcagaggcagcagcagcagcagaggcagcagaggccccggcagaagcagaagcagaagccagagcagaagccagagccagagacccggccagaagagaagagaggagcccagatag

SEQ ID NO: 97870 - DNA, 4095 bp, synthetic construct
  misc_feature 1..4095: note = Description of Artificial Sequence: Synthetic coding sequence
  source 1..4095: mol_type = other DNA
atggagagacccgaggacagcctgagcctgtggagcctgaacctgagcccccagttcccctgcctgaacgccctgagacaccccctgagccccggcagcagagtgggccccgaggacgccatgcccagaatcgtggagcagccccccgacctgctggtgagcagaggcgagcccgccaccctgccctgcagagccgagggcagacccagacccaacatcgagtggtacaagaacggcgccagagtggccaccgtgagagaggaccccagagcccacagactgctgctgcccagcggcgccctgttcttccccagaatcgtgcacggcagaagagccagacccgacgagggcgtgtacacctgcgtggccagaaactacctgggcgccgccgccagcagaaacgccagcctggaggtggccgtgctgagagacgacttcagacagagccccggcaacgtggtggtggccgtgggcgagcccgccgtgctggagtgcgtgccccccagaggccaccccgagcccagcgtgagctggagaaaggacggcgccagactgaaggaggaggagggcagaatcaccatcagaggcggcaagctgatgatgagccacaccctgaagagcgacgccggcatgtacgtgtgcgtggccagcaacatggccggcgagagagagagcgccgccgccgaggtgatggtgctggagagacccagcttcctgagaagacccgtgaaccaggtggtgctggccgacgcccccgtgaccttcctgtgcgaggtgaagggcgaccccccccccagactgagatggagaaaggaggacggcgagctgcccaccggcagatacgagatcagaagcgaccacagcctgtggatcggccacgtgagcgccgaggacgagggcacctacacctgcgtggccgagaacagcgtgggcagagccgaggccagcggcagcctgagcgtgcacgtgcccccccagctggtgacccagccccaggaccagatggccgcccccggcgagagcgtggccttccagtgcgagaccaagggcaaccccccccccgccatcttctggcagaaggagggcagccaggtgctgctgttccccagccagagcctgcagcccaccggcagattcagcgtgagccccagaggccagctgaacatcaccgccgtgcagagaggcgacgccggctactacgtgtgccaggccgtgagcgtggccggcagcatcctggccaaggccctgctggagatcaagggcgccagcctggacggcctgccccccgtgatcctgcagggccccgccaaccagaccctggtgctgggcagcagcgtgtggctgccctgcagagtgaccggcaacccccagcccagcgtgagatggaagaaggacggccagtggctgcagggcgacgacctgcagttcaagaccatggccaacggcaccctgtacatcgccaacgtgcaggagatggacatgggcttctacagctgcgtggccaagagcagcaccggcgaggccacctggagcggctggctgaagatgagagaggactggggcgtgagccccgacccccccaccgagcccagcagcccccccggcgcccccagccagcccgtggtgaccgagatcaccaagaacagcatcaccctgacctggaagcccaacccccagaccggcgccgccgtgaccagctacgtgatcgaggccttcagccccgccgccggcaacacctggagaaccgtggccgacggcgtgcagctggagacccacaccgtgagcggcctgcagcccaacaccatctacctgttcctggtgagagccgtgggcgcctggggcctgagcgagcccagccccgtgagcgagcccgtgagaacccaggacagcagccccagcagacccgtggaggacccctggagaggccagcagggcctggccgaggtggccgtgagactgcaggagcccatcgtgctgggccccagaaccctgcaggtgagctggaccgtggacggccccgtgcagctggtgcagggcttcagagtgagctggagagtggccggccccgagggcggcagctggaccatgctggacctgcagagccccagccagcagagcaccgtgctgagaggcctgccccccggcacccagatccagatcaaggtgcaggcccagggccaggagggcctgggcgccgagagcctgagcgtgaccagaagcatccccgaggaggcccccagcggccccccccagggcgtggccgtggccctgggcggcgacggcaacagcagcatcaccgtgagctgggagccccccctgcccagccagcagaacggcgtgatcaccgagtaccagatctggtgcctgggcaacgagagcagattccacctgaacagaagcgccgccggctgggccagaagcgccatgctgagaggcctggtgcccggcctgctgtacagaaccctggtggccgccgccaccagcgccggcgtgggcgtgcccagcgcccccgtgctggtgcagctgcccagcccccccgacctggagcccggcctggaggtgggcgccggcctggccgtgagactggccagagtgctgagagagcccgccttcctggccggcagcggcgccgcctgcggcgccctgctgctgggcctgtgcgccgccctgtactggagaagaaagcagagaaaggagctgagccactacaccgccagcttcgcctacacccccgccgtgagcttcccccacagcgagggcctgagcggcgccagcagcagaccccccatgggcctgggccccgccccctacagctggctggccgacagctggccccaccccagcagaagccccagcgcccaggagcccagaggcagctgctgccccagcaaccccgaccccgacgacagatactacaacgaggccggcatcagcctgtacctggcccagaccgccagaggcaccgccgcccccggcgagggccccgtgtacagcaccatcgaccccgccggcgaggagctgcagaccttccacggcggcttcccccagcaccccagcggcgacctgggcccctggagccagtacgccccccccgagtggagccagggcgacagcggcgccaagggcggcaaggtgaagctgctgggcaagcccgtgcagatgcccagcctgaactggcccgaggccctgcccccccccccccccagctgcgagctgagctgcctggagggccccgaggaggagctggagggcagcagcgagcccgaggagtggtgcccccccatgcccgagagaagccacctgaccgagcccagcagcagcggcggctgcctggtgacccccagcagaagagagacccccagccccacccccagctacggccagcagagcaccgccaccctgacccccagcccccccgaccccccccagccccccaccgacatgccccacctgcaccagatgcccagaagagtgcccctgggccccagcagccccctgagcgtgagccagcccatgctgggcatcagagaggccagacccgccggcctgggcgccggccccgccgccagcccccacctgagccccagccccgcccccagcaccgccagcagcgcccccggcagaacctggcagggcaacggcgagatgaccccccccctgcagggccccagagccagattcagaaagaagcccaaggccctgccctacagaagagagaacagccccggcgacctgccccccccccccctgcccccccccgaggaggaggccagctgggccctggagctgagagccgccggcagcatgagcagcctggagagagagagaagcggcgagagaaaggccgtgcaggccgtgcccctggccgcccagagagtgctgcaccccgacgaggaggcctggctgccctacagcagacccagcttcctgagcagaggccagggcaccagcacctgcagcaccgccggcagcaacagcagcagaggcagcagcagcagcagaggcagcagaggccccggcagaagcagaagcagaagccagagcagaagccagagccagagacccggccagaagagaagagaggagcccagatag

SEQ ID NO: 97871 - DNA, 450 bp, synthetic construct
  misc_feature 1..450: note = Description of Artificial Sequence: Synthetic coding sequence
  source 1..450: mol_type = other DNA
atgaccccccccctgcagggccccagagccagattcagaaagaagcccaaggccctgccctacagaagagagaacagccccggcgacctgccccccccccccctgcccccccccgaggaggaggccagctgggccctggagctgagagccgccggcagcatgagcagcctggagagagagagaagcggcgagagaaaggccgtgcaggccgtgcccctggccgcccagagagtgctgcaccccgacgaggaggcctggctgccctacagcagacccagcttcctgagcagaggccagggcaccagcacctgcagcaccgccggcagcaacagcagcagaggcagcagcagcagcagaggcagcagaggccccggcagaagcagaagcagaagccagagcagaagccagagccagagacccggccagaagagaagagaggagcccagatag

SEQ ID NO: 97872 - DNA, 3024 bp, synthetic construct
  misc_feature 1..3024: note = Description of Artificial Sequence: Synthetic coding sequence
  source 1..3024: mol_type = other DNA
atgggcagcggcggcgacagcctgctgggcggcagaggcagcctgcccctgctgctgctgctgatcatgggcggcatggcccaggacagccccccccagatcctggtgcacccccaggaccagctgttccagggccccggccccgccagaatgagctgccaggccagcggccagcccccccccaccatcagatggctgctgaacggccagcccctgagcatggtgccccccgacccccaccacctgctgcccgacggcaccctgctgctgctgcagccccccgccagaggccacgcccacgacggccaggccctgagcaccgacctgggcgtgtacacctgcgaggccagcaacagactgggcaccgccgtgagcagaggcgccagactgagcgtggccgtgctgagagaggacttccagatccagcccagagacatggtggccgtggtgggcgagcagttcaccctggagtgcggccccccctggggccaccccgagcccaccgtgagctggtggaaggacggcaagcccctggccctgcagcccggcagacacaccgtgagcggcggcagcctgctgatggccagagccgagaagagcgacgagggcacctacatgtgcgtggccaccaacagcgccggccacagagagagcagagccgccagagtgagcatccaggagccccaggactacaccgagcccgtggagctgctggccgtgagaatccagctggagaacgtgaccctgctgaaccccgaccccgccgagggccccaagcccagacccgccgtgtggctgagctggaaggtgagcggccccgccgcccccgcccagagctacaccgccctgttcagaacccagaccgcccccggcggccagggcgccccctgggccgaggagctgctggccggctggcagagcgccgagctgggcggcctgcactggggccaggactacgagttcaaggtgagacccagcagcggcagagccagaggccccgacagcaacgtgctgctgctgagactgcccgagaaggtgcccagcgcccccccccaggaggtgaccctgaagcccggcaacggcaccgtgttcgtgagctgggtgcccccccccgccgagaaccacaacggcatcatcagaggctaccaggtgtggagcctgggcaacaccagcctgccccccgccaactggaccgtggtgggcgagcagacccagctggagatcgccacccacatgcccggcagctactgcgtgcaggtggccgccgtgaccggcgccggcgccggcgagcccagcagacccgtgtgcctgctgctggagcaggccatggagagagccacccaggagcccagcgagcacggcccctggaccctggagcagctgagagccaccctgaagagacccgaggtgatcgccacctgcggcgtggccctgtggctgctgctgctgggcaccgccgtgtgcatccacagaagaagaagagccagagtgcacctgggccccggcctgtacagatacaccagcgaggacgccatcctgaagcacagaatggaccacagcgacagccagtggctggccgacacctggagaagcaccagcggcagcagagacctgagcagcagcagcagcctgagcagcagactgggcgccgacgccagagaccccctggactgcagaagaagcctgctgagctgggacagcagaagccccggcgtgcccctgctgcccgacaccagcaccttctacggcagcctgatcgccgagctgcccagcagcacccccgccagacccagcccccaggtgcccgccgtgagaagactgcccccccagctggcccagctgagcagcccctgcagcagcagcgacagcctgtgcagcagaagaggcctgagcagccccagactgagcctggcccccgccgaggcctggaaggccaagaagaagcaggagctgcagcacgccaacagcagccccctgctgagaggcagccacagcctggagctgagagcctgcgagctgggcaacagaggcagcaagaacctgagccagagccccggcgccgtgccccaggccctggtggcctggagagccctgggccccaagctgctgagcagcagcaacgagctggtgaccagacacctgccccccgcccccctgttcccccacgagaccccccccacccagagccagcagacccagccccccgtggccccccaggcccccagcagcatcctgctgcccgccgcccccatccccatcctgagcccctgcagcccccccagcccccaggccagcagcctgagcggccccagccccgccagcagcagactgagcagcagcagcctgagcagcctgggcgaggaccaggacagcgtgctgacccccgaggaggtggccctgtgcctggagctgagcgagggcgaggagacccccagaaacagcgtgagccccatgcccagagcccccagcccccccaccacctacggctacatcagcgtgcccaccgccagcgagttcaccgacatgggcagaaccggcggcggcgtgggccccaagggcggcgtgctgctgtgcccccccagaccctgcctgacccccacccccagcgagggcagcctggccaacggctggggcagcgccagcgaggacaacgccgccagcgccagagccagcctggtgagcagcagcgacggcagcttcctggccgacgcccacttcgccagagccctggccgtggccgtggacagcttcggcttcggcctggagcccagagaggccgactgcgtgttcatcgacgccagcagcccccccagccccagagacgagatcttcctgacccccaacctgagcctgcccctgtgggagtggagacccgactggctggaggacatggaggtgagccacacccagagactgggcagaggcatgcccccctggccccccgacagccagatcagcagccagagaagccagctgcactgcagaatgcccaaggccggcgccagccccgtggactacagctag

SEQ ID NO: 97873 - DNA, 2106 bp, synthetic construct
  misc_feature 1..2106: note = Description of Artificial Sequence: Synthetic coding sequence
  source 1..2106: mol_type = other DNA
atgggcagcggcggcgacagcctgctgggcggcagaggcagcctgcccctgctgctgctgctgatcatggtgctgagagaggacttccagatccagcccagagacatggtggccgtggtgggcgagcagttcaccctggagtgcggccccccctggggccaccccgagcccaccgtgagctggtggaaggacggcaagcccctggccctgcagcccggcagacacaccgtgagcggcggcagcctgctgatggccagagccgagaagagcgacgagggcacctacatgtgcgtggccaccaacagcgccggccacagagagagcagagccgccagagtgagcatccaggagccccaggactacaccgagcccgtggagctgctggccgtgagaatccagctggagaacgtgaccctgctgaaccccgaccccgccgagggccccaagcccagacccgccgtgtggctgagctggaaggtgagcggccccgccgcccccgcccagagctacaccgccctgttcagaacccagaccgcccccggcggccagggcgccccctgggccgaggagctgctggccggctggcagagcgccgagctgggcggcctgcactggggccaggactacgagttcaaggtgagacccagcagcggcagagccagaggccccgacagcaacgtgctgctgctgagactgcccgagaaggtgcccagcgcccccccccaggaggtgaccctgaagcccggcaacggcaccgtgttcgtgagctgggtgcccccccccgccgagaaccacaacggcatcatcagaggctaccaggtgtggagcctgggcaacaccagcctgccccccgccaactggaccgtggtgggcgagcagacccagctggagatcgccacccacatgcccggcagctactgcgtgcaggtggccgccgtgaccggcgccggcgccggcgagcccagcagacccgtgtgcctgctgctggagcaggccatggagagagccacccaggagcccagcgagcacggcccctggaccctggagcagctgagagccaccctgaagagacccgaggtgatcgccacctgcggcgtggccctgtggctgctgctgctgggcaccgccgtgtgcatccacagaagaagaagagccagagtgcacctgggccccggcctgtacagatacaccagcgaggacgccatcctgaagcacagaatggaccacagcgacagccagtggctggccgacacctggagaagcaccagcggcagcagagacctgagcagcagcagcagcctgagcagcagactgggcgccgacgccagagaccccctggactgcagaagaagcctgctgagctgggacagcagaagccccggcgtgcccctgctgcccgacaccagcaccttctacggcagcctgatcgccgagctgcccagcagcacccccgccagacccagcccccaggtgcccgccgtgagaagactgcccccccagctggcccagctgagcagcccctgcagcagcagcgacagcctgtgcagcagaagaggcctgagcagccccagactgagcctggcccccgccgaggcctggaaggccaagaagaagcaggagctgcagcacgccaacagcagccccctgctgagaggcagccacagcctggagctgagagcctgcgagctgggcaacagaggcagcaagaacctgagccagagccccggcgccgtgccccaggccctggtggcctggagagccctgggccccaagctgctgagcagcagcaacgagctggtgaccagacacctgccccccgcccccctgttcccccacgagaccccccccacccagagccagcagacccagccccccgtggccccccaggcccccagcagcatcctgctgcccgccgcccccatccccatcctgagcccctgcagcccccccagcccccaggccagcagcctgagcggccccagccccgccagcagcagactgagcagcagcagcctgagcagcctgggcgaggaccaggacagcgtgctgacccccgaggaggtggccctgtgcctggagctgagcgagggcgaggagaccccctag

SEQ ID NO: 97874 - DNA, 2589 bp, synthetic construct
  misc_feature 1..2589: note = Description of Artificial Sequence: Synthetic coding sequence
  source 1..2589: mol_type = other DNA
atggtggccgtggtgggcgagcagttcaccctggagtgcggccccccctggggccaccccgagcccaccgtgagctggtggaaggacggcaagcccctggccctgcagcccggcagacacaccgtgagcggcggcagcctgctgatggccagagccgagaagagcgacgagggcacctacatgtgcgtggccaccaacagcgccggccacagagagagcagagccgccagagtgagcatccaggagccccaggactacaccgagcccgtggagctgctggccgtgagaatccagctggagaacgtgaccctgctgaaccccgaccccgccgagggccccaagcccagacccgccgtgtggctgagctggaaggtgagcggccccgccgcccccgcccagagctacaccgccctgttcagaacccagaccgcccccggcggccagggcgccccctgggccgaggagctgctggccggctggcagagcgccgagctgggcggcctgcactggggccaggactacgagttcaaggtgagacccagcagcggcagagccagaggccccgacagcaacgtgctgctgctgagactgcccgagaaggtgcccagcgcccccccccaggaggtgaccctgaagcccggcaacggcaccgtgttcgtgagctgggtgcccccccccgccgagaaccacaacggcatcatcagaggctaccaggtgtggagcctgggcaacaccagcctgccccccgccaactggaccgtggtgggcgagcagacccagctggagatcgccacccacatgcccggcagctactgcgtgcaggtggccgccgtgaccggcgccggcgccggcgagcccagcagacccgtgtgcctgctgctggagcaggccatggagagagccacccaggagcccagcgagcacggcccctggaccctggagcagctgagagccaccctgaagagacccgaggtgatcgccacctgcggcgtggccctgtggctgctgctgctgggcaccgccgtgtgcatccacagaagaagaagagccagagtgcacctgggccccggcctgtacagatacaccagcgaggacgccatcctgaagcacagaatggaccacagcgacagccagtggctggccgacacctggagaagcaccagcggcagcagagacctgagcagcagcagcagcctgagcagcagactgggcgccgacgccagagaccccctggactgcagaagaagcctgctgagctgggacagcagaagccccggcgtgcccctgctgcccgacaccagcaccttctacggcagcctgatcgccgagctgcccagcagcacccccgccagacccagcccccaggtgcccgccgtgagaagactgcccccccagctggcccagctgagcagcccctgcagcagcagcgacagcctgtgcagcagaagaggcctgagcagccccagactgagcctggcccccgccgaggcctggaaggccaagaagaagcaggagctgcagcacgccaacagcagccccctgctgagaggcagccacagcctggagctgagagcctgcgagctgggcaacagaggcagcaagaacctgagccagagccccggcgccgtgccccaggccctggtggcctggagagccctgggccccaagctgctgagcagcagcaacgagctggtgaccagacacctgccccccgcccccctgttcccccacgagaccccccccacccagagccagcagacccagccccccgtggccccccaggcccccagcagcatcctgctgcccgccgcccccatccccatcctgagcccctgcagcccccccagcccccaggccagcagcctgagcggccccagccccgccagcagcagactgagcagcagcagcctgagcagcctgggcgaggaccaggacagcgtgctgacccccgaggaggtggccctgtgcctggagctgagcgagggcgaggagacccccagaaacagcgtgagccccatgcccagagcccccagcccccccaccacctacggctacatcagcgtgcccaccgccagcgagttcaccgacatgggcagaaccggcggcggcgtgggccccaagggcggcgtgctgctgtgcccccccagaccctgcctgacccccacccccagcgagggcagcctggccaacggctggggcagcgccagcgaggacaacgccgccagcgccagagccagcctggtgagcagcagcgacggcagcttcctggccgacgcccacttcgccagagccctggccgtggccgtggacagcttcggcttcggcctggagcccagagaggccgactgcgtgttcatcgacgccagcagcccccccagccccagagacgagatcttcctgacccccaacctgagcctgcccctgtgggagtggagacccgactggctggaggacatggaggtgagccacacccagagactgggcagaggcatgcccccctggccccccgacagccagatcagcagccagagaagccagctgcactgcagaatgcccaaggccggcgccagccccgtggactacagctag

SEQ ID NO: 97875 - DNA, 3708 bp, synthetic construct
  misc_feature 1..3708: note = Description of Artificial Sequence: Synthetic coding sequence
  source 1..3708: mol_type = other DNA
atgagcggccccaccgacgagaccgccggcgacctgcccgtgaaggacaccggcctgaacctgttcggcatgggcggcctgcaggagaccagcaccaccagaaccatgaagagcagacaggccgtgagcagagtgagcagagaggagctggaggacagattcctgagactgcacgacgagaacatcctgctgaagcagcacgccagaaagcaggaggacaagatcaagagaatggccaccaagctgatcagactggtgaacgacaagaagagatacgagagagtgggcggcggccccaagagactgggcagagacgtggagatggaggagatgatcgagcagctgcaggagaaggtgcacgagctggagaagcagaacgagaccctgaagaacagactgatcagcgccaagcagcagctgcagacccagggctacagacagaccccctacaacaacgtgcagagcagaatcaacaccggcagaagaaaggccaacgagaacgccggcctgcaggagtgccccagaaagggcatcaagttccaggacgccgacgtggccgagaccccccaccccatgttcaccaagtacggcaacagcctgctggaggaggccagaggcgagatcagaaacctggagaacgtgatccagagccagagaggccagatcgaggagctggagcacctggccgagatcctgaagacccagctgagaagaaaggagaacgagatcgagctgagcctgctgcagctgagagagcagcaggccaccgaccagagaagcaacatcagagacaacgtggagatgatcaagctgcacaagcagctggtggagaagagcaacgccctgagcgccatggagggcaagttcatccagctgcaggagaagcagagaaccctgagaatcagccacgacgccctgatggccaacggcgacgagctgaacatgcagctgaaggagcagagactgaagtgctgcagcctggagaagcagctgcacagcatgaagttcagcgagagaagaatcgaggagctgcaggacagaatcaacgacctggagaaggagagagagctgctgaaggagaactacgacaagctgtacgacagcgccttcagcgccgcccacgaggagcagtggaagctgaaggagcagcagctgaaggtgcagatcgcccagctggagaccgccctgaagagcgacctgaccgacaagaccgagatcctggacagactgaagaccgagagagaccagaacgagaagctggtgcaggagaacagagagctgcagctgcagtacctggagcagaagcagcagctggacgagctgaagaagagaatcaagctgtacaaccaggagaacgacatcaacgccgacgagctgagcgaggccctgctgctgatcaaggcccagaaggagcagaagaacggcgacctgagcttcctggtgaaggtggacagcgagatcaacaaggacctggagagaagcatgagagagctgcaggccacccacgccgagaccgtgcaggagctggagaagaccagaaacatgctgatcatgcagcacaagatcaacaaggactaccagatggaggtggaggccgtgaccagaaagatggagaacctgcagcaggactacgagctgaaggtggagcagtacgtgcacctgctggacatcagagccgccagaatccacaagctggaggcccagctgaaggacatcgcctacggcaccaagcagtacaagttcaagcccgagatcatgcccgacgacagcgtggacgagttcgacgagaccatccacctggagagaggcgagaacctgttcgagatccacatcaacaaggtgaccttcagcagcgaggtgctgcaggccagcggcgacaaggagcccgtgaccttctgcacctacgccttctacgacttcgagctgcagaccacccccgtggtgagaggcctgcaccccgagtacaacttcaccagccagtacctggtgcacgtgaacgacctgttcctgcagtacatccagaagaacaccatcaccctggaggtgcaccaggcctacagcaccgagtacgagaccatcgccgcctgccagctgaagttccacgagatcctggagaagagcggcagaatcttctgcaccgccagcctgatcggcaccaagggcgacatccccaacttcggcaccgtggagtactggttcagactgagagtgcccatggaccaggccatcagactgtacagagagagagccaaggccctgggctacatcaccagcaacttcaagggccccgagcacatgcagagcctgagccagcaggcccccaagaccgcccagctgagcagcaccgacagcaccgacggcaacctgaacgagctgcacatcaccatcagatgctgcaaccacctgcagagcagagccagccacctgcagccccacccctacgtggtgtacaagttcttcgacttcgccgaccacgacaccgccatcatccccagcagcaacgacccccagttcgacgaccacatgtacttccccgtgcccatgaacatggacctggacagatacctgaagagcgagagcctgagcttctacgtgttcgacgacagcgacacccaggagaacatctacatcggcaaggtgaacgtgcccctgatcagcctggcccacgacagatgcatcagcggcatcttcgagctgaccgaccaccagaagcaccccgccggcaccatccacgtgatcctgaagtggaagttcgcctacctgccccccagcggcagcatcaccaccgaggacctgggcaacttcatcagaagcgaggagcccgaggtggtgcagagactgccccccgccagcagcgtgagcaccctggtgctggcccccagacccaagcccagacagagactgacccccgtggacaagaaggtgagcttcgtggacatcatgccccaccagagcgacgtgagccaggagggcagcgtggacgaggtgaaggagaacaccgagaagatgcagcagggcaaggacgacgtgagcctgctgagcgagggccagctggccgagcagagcctggccagcagcgaggacgagaccgagatcaccgaggacctggagcccgaggtggaggaggacatgagcgccagcgacagcgacgactgcatcatccccggccccatcagcaagaacatcaagcagcccagcgagaagatcagaatcgagatcatcgccctgagcctgaacgacagccaggtgaccatggacgacaccatccagagactgttcgtggagtgcagattctacagcctgcccgccgaggagacccccgtgagcctgcccaagcccaagagcggccagtgggtgtactacaactacagcaacgtgatctacgtggacaaggagaacaacaaggccaagagagacatcctgaaggccatcctgcagaagcaggagatgcccaacagaagcctgagattcaccgtggtgagcgacccccccgaggacgagcaggacctggagtgcgaggacatcggcgtggcccacgtggacctggccgacatgttccaggagggcagagacctgatcgagcagaacatcgacgtgttcgacgccagagccgacggcgagggcatcggcaagctgagagtgaccgtggaggccctgcacgccctgcagagcgtgtacaagcagtacagagacgacctggaggcctag

SEQ ID NO: 97876 - DNA, 3948 bp, synthetic construct
  misc_feature 1..3948: note = Description of Artificial Sequence: Synthetic coding sequence
  source 1..3948: mol_type = other DNA
atgagcggccccaccgacgagaccgccggcgacctgcccgtgaaggacaccggcctgaacctgttcggcatgggcggcctgcaggagaccagcaccaccagaaccatgaagagcagacaggccgtgagcagagtgagcagagaggagctggaggacagattcctgagactgcacgacgagaacatcctgctgaagcagcacgccagaaagcaggaggacaagatcaagagaatggccaccaagctgatcagactggtgaacgacaagaagagatacgagagagtgggcggcggccccaagagactgggcagagacgtggagatggaggagatgatcgagcagctgcaggagaaggtgcacgagctggagaagcagaacgagaccctgaagaacagactgatcagcgccaagcagcagctgcagacccagggctacagacagaccccctacaacaacgtgcagagcagaatcaacaccggcagaagaaaggccaacgagaacgccggcctgcaggagtgccccagaaagggcatcaagttccaggacgccgacgtggccgagaccccccaccccatgttcaccaagtacggcaacagcctgctggaggaggccagaggcgagatcagaaacctggagaacgtgatccagagccagagaggccagatcgaggagctggagcacctggccgagatcctgaagacccagctgagaagaaaggagaacgagatcgagctgagcctgctgcagctgagagagcagcaggccaccgaccagagaagcaacatcagagacaacgtggagatgatcaagctgcacaagcagctggtggagaagagcaacgccctgagcgccatggagggcaagttcatccagctgcaggagaagcagagaaccctgagaatcagccacgacgccctgatggccaacggcgacgagctgaacatgcagctgaaggagcagagactgaagtgctgcagcctggagaagcagctgcacagcatgaagttcagcgagagaagaatcgaggagctgcaggacagaatcaacgacctggagaaggagagagagctgctgaaggagaactacgacaagctgtacgacagcgccttcagcgccgcccacgaggagcagtggaagctgaaggagcagcagctgaaggtgcagatcgcccagctggagaccgccctgaagagcgacctgaccgacaagaccgagatcctggacagactgaagaccgagagagaccagaacgagaagctggtgcaggagaacagagagctgcagctgcagtacctggagcagaagcagcagctggacgagctgaagaagagaatcaagctgtacaaccaggagaacgacatcaacgccgacgagctgagcgaggccctgctgctgatcaaggcccagaaggagcagaagaacggcgacctgagcttcctggtgaaggtggacagcgagatcaacaaggacctggagagaagcatgagagagctgcaggccacccacgccgagaccgtgcaggagctggagaagaccagaaacatgctgatcatgcagcacaagatcaacaaggactaccagatggaggtggaggccgtgaccagaaagatggagaacctgcagcaggactacgagctgaaggtggagcagtacgtgcacctgctggacatcagagccgccagaatccacaagctggaggcccagctgaaggacatcgcctacggcaccaagcagtacaagttcaagcccgagatcatgcccgacgacagcgtggacgagttcgacgagaccatccacctggagagaggcgagaacctgttcgagatccacatcaacaaggtgaccttcagcagcgaggtgctgcaggccagcggcgacaaggagcccgtgaccttctgcacctacgccttctacgacttcgagctgcagaccacccccgtggtgagaggcctgcaccccgagtacaacttcaccagccagtacctggtgcacgtgaacgacctgttcctgcagtacatccagaagaacaccatcaccctggaggtgcaccaggcctacagcaccgagtacgagaccatcgccgcctgccagctgaagttccacgagatcctggagaagagcggcagaatcttctgcaccgccagcctgatcggcaccaagggcgacatccccaacttcggcaccgtggagtactggttcagactgagagtgcccatggaccaggccatcagactgtacagagagagagccaaggccctgggctacatcaccagcaacttcaagggccccgagcacatgcagagcctgagccagcaggcccccaagaccgcccagctgagcagcaccgacagcaccgacggcaacctgaacgagctgcacatcaccatcagatgctgcaaccacctgcagagcagagccagccacctgcagccccacccctacgtggtgtacaagttcttcgacttcgccgaccacgacaccgccatcatccccagcagcaacgacccccagttcgacgaccacatgtacttccccgtgcccatgaacatggacctggacagatacctgaagagcgagagcctgagcttctacgtgttcgacgacagcgacacccaggagaacatctacatcggcaaggtgaacgtgcccctgatcagcctggcccacgacagatgcatcagcggcatcttcgagctgaccgaccaccagaagcaccccgccggcaccatccacgtgatcctgaagtggaagttcgcctacctgccccccagcggcagcatcaccaccgaggacctgggcaacttcatcagaagcgaggagcccgaggtggtgcagagactgccccccgccagcagcgtgagcaccctggtgctggcccccagacccaagcccagacagagactgacccccgtggacaagaaggtgagcttcgtggacatcatgccccaccagagcgacgagaccagccccccccccgaggacagaaaggagatcagccccgaggtggagcacatccccgagatcgagatcaacatgctgaccgtgccccacgtgcccaaggtgagccaggagggcagcgtggacgaggtgaaggagaacaccgagaagatgcagcagggcaaggacgacgtgagcctgctgagcgagggccagctggccgagcagagcctggccagcagcgaggacgagaccgagatcaccgaggacctggagcccgaggtggaggaggacatgagcgccagcgacagcgacgactgcatcatccccggccccatcagcaagaacatcaagcagagcctggccctgagccccggcctgggctgcagcagcgccatcagcgcccactgcaacttcagactgcccggcagcagcgacttccccgccagcgccagccaggtggacggcatcaccggcgcctgccaccacacccagcccagcgagaagatcagaatcgagatcatcgccctgagcctgaacgacagccaggtgaccatggacgacaccatccagagactgttcgtggagtgcagattctacagcctgcccgccgaggagacccccgtgagcctgcccaagcccaagagcggccagtgggtgtactacaactacagcaacgtgatctacgtggacaaggagaacaacaaggccaagagagacatcctgaaggccatcctgcagaagcaggagatgcccaacagaagcctgagattcaccgtggtgagcgacccccccgaggacgagcaggacctggagtgcgaggacatcggcgtggcccacgtggacctggccgacatgttccaggagggcagagacctgatcgagcagaacatcgacgtgttcgacgccagagccgacggcgagggcatcggcaagctgagagtgaccgtggaggccctgcacgccctgcagagcgtgtacaagcagtacagagacgacctggaggcctag

SEQ ID NO: 97877 - DNA, 1956 bp, synthetic construct
  misc_feature 1..1956: note = Description of Artificial Sequence: Synthetic coding sequence
  source 1..1956: mol_type = other DNA
atggccgcccccctgctgcacaccagactgcccggcgacgccgccgccagcagcagcgccgtgaagaagctgggcgccagcagaaccggcatcagcaacatgagagccctggagaacgacttcttcaacagcccccccagaaagaccgtgagattcggcggcaccgtgaccgaggtgctgctgaagtacaagaagggcgagaccaacgacttcgagctgctgaagaaccagctgctggaccccgacatcaaggacgaccagatcatcaactggctgctggagttcagaagcagcatcatgtacctgaccaaggacttcgagcagctgatcagcatcatcctgagactgccctggctgaacagaagccagaccgtggtggaggagtacctggccttcctgggcaacctggtgagcgcccagaccgtgttcctgagaccctgcctgagcatgatcgccagccacttcgtgccccccagagtgatcatcaaggagggcgacgtggacgtgagcgacagcgacgacgaggacgacaacctgcccgccaacttcgacacctgccacagagccctgcagatcatcgccagatacgtgcccagcaccccctggttcctgatgcccatcctggtggagaagttccccttcgtgagaaagagcgagagaaccctggagtgctacgtgcacaacctgctgagaatcagcgtgtacttccccaccctgagacacgagatcctggagctgatcatcgagaagctgctgaagctggacgtgaacgccagcagacagggcatcgaggacgccgaggagaccgccacccagacctgcggcggcaccgacagcaccgagggcctgttcaacatggacgaggacgaggagaccgagcacgagaccaaggccggccccgagagactggaccagatggtgcaccccgtggccgagagactggacatcctgatgagcctggtgctgagctacatgaaggacgtgtgctacgtggacggcaaggtggacaacggcaagaccaaggacctgtacagagacctgatcaacatcttcgacaagctgctgctgcccacccacgccagctgccacgtgcagttcttcatgttctacctgtgcagcttcaagctgggcttcgccgaggccttcctggagcacctgtggaagaagctgcaggaccccagcaaccccgccatcatcagacaggccgccggcaactacatcggcagcttcctggccagagccaagttcatccccctgatcaccgtgaagagctgcctggacctgctggtgaactggctgcacatctacctgaacaaccaggacagcggcaccaaggccttctgcgacgtggccctgcacggccccttctacagcgcctgccaggccgtgttctacaccttcgtgttcagacacaagcagctgctgagcggcaacctgaaggagggcctgcagtacctgcagagcctgaacttcgagagaatcgtgatgagccagctgaaccccctgaagatctgcctgcccagcgtggtgaacttcttcgccgccatcaccaacaagtaccagctggtgttctgctacaccatcatcgagagaaacaacagacagatgctgcccgtgatcagaagcaccgccggcggcgacagcgtgcagatctgcaccaaccccctggacaccttcttccccttcgacccctgcgtgctgaagagaagcaagaagttcatcgaccccatctaccaggtgtgggaggacatgagcgccgaggagctgcaggagttcaagaagcccatgaagaaggacatcgtggaggacgaggacgacgacttcctgaagggcgaggtgccccagaacgacaccgtgatcggcatcacccccagcagcttcgacacccacttcagaagccccagcagcagcgtgggcagcccccccgtgctgtacatgcagcccagccccctgtag

SEQ ID NO: 97878 - DNA, 1857 bp, synthetic construct
  misc_feature 1..1857: note = Description of Artificial Sequence: Synthetic coding sequence
  source 1..1857: mol_type = other DNA
atgagagccctggagaacgacttcttcaacagcccccccagaaagaccgtgagattcggcggcaccgtgaccgaggtgctgctgaagtacaagaagggcgagaccaacgacttcgagctgctgaagaaccagctgctggaccccgacatcaaggacgaccagatcatcaactggctgctggagttcagaagcagcatcatgtacctgaccaaggacttcgagcagctgatcagcatcatcctgagactgccctggctgaacagaagccagaccgtggtggaggagtacctggccttcctgggcaacctggtgagcgcccagaccgtgttcctgagaccctgcctgagcatgatcgccagccacttcgtgccccccagagtgatcatcaaggagggcgacgtggacgtgagcgacagcgacgacgaggacgacaacctgcccgccaacttcgacacctgccacagagccctgcagatcatcgccagatacgtgcccagcaccccctggttcctgatgcccatcctggtggagaagttccccttcgtgagaaagagcgagagaaccctggagtgctacgtgcacaacctgctgagaatcagcgtgtacttccccaccctgagacacgagatcctggagctgatcatcgagaagctgctgaagctggacgtgaacgccagcagacagggcatcgaggacgccgaggagaccgccacccagacctgcggcggcaccgacagcaccgagggcctgttcaacatggacgaggacgaggagaccgagcacgagaccaaggccggccccgagagactggaccagatggtgcaccccgtggccgagagactggacatcctgatgagcctggtgctgagctacatgaaggacgtgtgctacgtggacggcaaggtggacaacggcaagaccaaggacctgtacagagacctgatcaacatcttcgacaagctgctgctgcccacccacgccagctgccacgtgcagttcttcatgttctacctgtgcagcttcaagctgggcttcgccgaggccttcctggagcacctgtggaagaagctgcaggaccccagcaaccccgccatcatcagacaggccgccggcaactacatcggcagcttcctggccagagccaagttcatccccctgatcaccgtgaagagctgcctggacctgctggtgaactggctgcacatctacctgaacaaccaggacagcggcaccaaggccttctgcgacgtggccctgcacggccccttctacagcgcctgccaggccgtgttctacaccttcgtgttcagacacaagcagctgctgagcggcaacctgaaggagggcctgcagtacctgcagagcctgaacttcgagagaatcgtgatgagccagctgaaccccctgaagatctgcctgcccagcgtggtgaacttcttcgccgccatcaccaacaagtaccagctggtgttctgctacaccatcatcgagagaaacaacagacagatgctgcccgtgatcagaagcaccgccggcggcgacagcgtgcagatctgcaccaaccccctggacaccttcttccccttcgacccctgcgtgctgaagagaagcaagaagttcatcgaccccatctaccaggtgtgggaggacatgagcgccgaggagctgcaggagttcaagaagcccatgaagaaggacatcgtggaggacgaggacgacgacttcctgaagggcgaggtgccccagaacgacaccgtgatcggcatcacccccagcagcttcgacacccacttcagaagccccagcagcagcgtgggcagcccccccgtgctgtacatgcagcccagccccctgtag

SEQ ID NO: 97879 - DNA, 1866 bp, synthetic construct
  misc_feature 1..1866: note = Description of Artificial Sequence: Synthetic coding sequence
  source 1..1866: mol_type = other DNA
atggccgcccccctgctgcacaccagactgcccggcgacgccgccgccagcagcagcgccgtgaagaagctgggcgccagcagaaccggcatcagcaacatgagagccctggagaacgacttcttcaacagcccccccagaaagaccgtgagattcggcggcaccgtgaccgaggtgctgctgaagtacaagaagggcgagaccaacgacttcgagctgctgaagaaccagctgctggaccccgacatcaagagactgccctggctgaacagaagccagaccgtggtggaggagtacctggccttcctgggcaacctggtgagcgcccagaccgtgttcctgagaccctgcctgagcatgatcgccagccacttcgtgccccccagagtgatcatcaaggagggcgacgtggacgtgagcgacagcgacgacgaggacgacaacctgcccgccaacttcgacacctgccacagagccctgcagatcatcgccagatacgtgcccagcaccccctggttcctgatgcccatcctggtggagaagttccccttcgtgagaaagagcgagagaaccctggagtgctacgtgcacaacctgctgagaatcagcgtgtacttccccaccctgagacacgagatcctggagctgatcatcgagaagctgctgaagctggacgtgaacgccagcagacagggcatcgaggacgccgaggagaccgccacccagacctgcggcggcaccgacagcaccgagggcctgttcaacatggacgaggacgaggagaccgagcacgagaccaaggccggccccgagagactggaccagatggtgcaccccgtggccgagagactggacatcctgatgagcctggtgctgagctacatgaaggacgtgtgctacgtggacggcaaggtggacaacggcaagaccaaggacctgtacagagacctgatcaacatcttcgacaagctgctgctgcccacccacgccagctgccacgtgcagttcttcatgttctacctgtgcagcttcaagctgggcttcgccgaggccttcctggagcacctgtggaagaagctgcaggaccccagcaaccccgccatcatcagacaggccgccggcaactacatcggcagcttcctggccagagccaagttcatccccctgatcaccgtgaagagctgcctggacctgctggtgaactggctgcacatctacctgaacaaccaggacagcggcaccaaggccttctgcgacgtggccctgcacggccccttctacagcgcctgccaggccgtgttctacaccttcgtgttcagacacaagcagctgctgagcggcaacctgaaggagggcctgcagtacctgcagagcctgaacttcgagagaatcgtgatgagccagctgaaccccctgaagatctgcctgcccagcgtggtgaacttcttcgccgccatcaccaacaagtaccagctggtgttctgctacaccatcatcgagagaaacaacagacagatgctgcccgtgatcagaagcaccgccggcggcgacagcgtgcagatctgcaccaaccccctggacaccttcttccccttcgacccctgcgtgctgaagagaagcaagaagttcatcgaccccatctaccaggtgtgggaggacatgagcgccgaggagctgcaggagttcaagaagcccatgaagaaggacatcgtggaggacgaggacgacgacttcctgaagggcgaggtgccccagaacgacaccgtgatcggcatcacccccagcagcttcgacacccacttcagaagccccagcagcagcgtgggcagcccccccgtgctgtacatgcagcccagccccctgtag

SEQ ID NO: 97880 - DNA, 1410 bp, synthetic construct
  misc_feature 1..1410: note = Description of Artificial Sequence: Synthetic coding sequence
  source 1..1410: mol_type = other DNA
atgatcgccagccacttcgtgccccccagagtgatcatcaaggagggcgacgtggacgtgagcgacagcgacgacgaggacgacaacctgcccgccaacttcgacacctgccacagagccctgcagatcatcgccagatacgtgcccagcaccccctggttcctgatgcccatcctggtggagaagttccccttcgtgagaaagagcgagagaaccctggtgaacgccagcagacagggcatcgaggacgccgaggagaccgccacccagacctgcggcggcaccgacagcaccgagggcctgttcaacatggacgaggacgaggagaccgagcacgagaccaaggccggccccgagagactggaccagatggtgcaccccgtggccgagagactggacatcctgatgagcctggtgctgagctacatgaaggacgtgtgctacgtggacggcaaggtggacaacggcaagaccaaggacctgtacagagacctgatcaacatcttcgacaagctgctgctgcccacccacgccagctgccacgtgcagttcttcatgttctacctgtgcagcttcaagctgggcttcgccgaggccttcctggagcacctgtggaagaagctgcaggaccccagcaaccccgccatcatcagacaggccgccggcaactacatcggcagcttcctggccagagccaagttcatccccctgatcaccgtgaagagctgcctggacctgctggtgaactggctgcacatctacctgaacaaccaggacagcggcaccaaggccttctgcgacgtggccctgcacggccccttctacagcgcctgccaggccgtgttctacaccttcgtgttcagacacaagcagctgctgagcggcaacctgaaggagggcctgcagtacctgcagagcctgaacttcgagagaatcgtgatgagccagctgaaccccctgaagatctgcctgcccagcgtggtgaacttcttcgccgccatcaccaacaagtaccagctggtgttctgctacaccatcatcgagagaaacaacagacagatgctgcccgtgatcagaagcaccgccggcggcgacagcgtgcagatctgcaccaaccccctggacaccttcttccccttcgacccctgcgtgctgaagagaagcaagaagttcatcgaccccatctaccaggtgtgggaggacatgagcgccgaggagctgcaggagttcaagaagcccatgaagaaggacatcgtggaggacgaggacgacgacttcctgaagggcgaggtgccccagaacgacaccgtgatcggcatcacccccagcagcttcgacacccacttcagaagccccagcagcagcgtgggcagcccccccgtgctgtacatgcagcccagccccctgtag

SEQ ID NO: 97881 - DNA, 792 bp, synthetic construct
  misc_feature 1..792: note = Description of Artificial Sequence: Synthetic coding sequence
  source 1..792: mol_type = other DNA
atgagactgggcctgtgcgtggtggccctggtgctgagctggacccacctgaccatcagcagcagaggcatcaagggcaagagacagagaagaatcagcgccgagggcagccaggcctgcgccaagggctgcgagctgtgcagcgaggtgaacggctgcctgaagtgcagccccaagctgttcatcctgctggagagaaacgacatcagacaggtgggcgtgtgcctgcccagctgcccccccggctacttcgacgccagaaaccccgacatgaacaagtgcatcaagtgcaagatcgagcactgcgaggcctgcttcagccacaacttctgcaccaagtgcaaggagggcctgtacctgcacaagggcagatgctaccccgcctgccccgagggcagcagcgccgccaacggcaccatggagtgcagcagccccgcccagtgcgagatgagcgagtggagcccctggggcccctgcagcaagaagcagcagctgtgcggcttcagaagaggcagcgaggagagaaccagaagagtgctgcacgcccccgtgggcgaccacgccgcctgcagcgacaccaaggagaccagaagatgcaccgtgagaagagtgccctgccccgagggccagaagagaagaaagggcggccagggcagaagagagaacgccaacagaaacctggccagaaaggagagcaaggaggccggcgccggcagcagaagaagaaagggccagcagcagcagcagcagcagggcaccgtgggccccctgaccagcgccggccccgcctag

SEQ ID NO: 97882 - DNA, 792 bp, synthetic construct; identical to SEQ ID NO: 97881
  misc_feature 1..792: note = Description of Artificial Sequence: Synthetic coding sequence
  source 1..792: mol_type = other DNA

SEQ ID NO: 97883 - DNA, 792 bp, synthetic construct; identical to SEQ ID NO: 97881
  misc_feature 1..792: note = Description of Artificial Sequence: Synthetic coding sequence
  source 1..792: mol_type = other DNA

SEQ ID NO: 97884 - DNA, 603 bp, synthetic construct
  misc_feature 1..603: note = Description of Artificial Sequence: Synthetic coding sequence
  source 1..603: mol_type = other DNA
atgagactgggcctgtgcgtggtggccctggtgctgagctggacccacctgaccatcagcagcagaggcatcaagggcaagagacagagaagaatcagcgccgagggcagccaggcctgcgccaagggctgcgagctgtgcagcgaggtgaacggctgcctgaagtgcagccccaagctgttcatcctgctggagagaaacgacatcagacaggtgggcgtgtgcctgcccagctgcccccccggctacttcgacgccagaaaccccgacatgaacaagtgcatcaagtgcaagatcgagcactgcgaggcctgcttcagccacaacttctgcaccaagtgcaaggagggcctgtacctgcacaagggcagatgctaccccgcctgccccgagggcagcagcgccgccaacggcaccatggagtgcagcagccccggccagaagagaagaaagggcggccagggcagaagagagaacgccaacagaaacctggccagaaaggagagcaaggaggccggcgccggcagcagaagaagaaagggccagcagcagcagcagcagcagggcaccgtgggccccctgaccagcgccggccccgcctag

SEQ ID NO: 97885 - DNA, 711 bp, synthetic construct
  misc_feature 1..711: note = Description of Artificial Sequence: Synthetic coding sequence
  source 1..711: mol_type = other DNA
atgatcttcagagtgagcgccgagggcagccaggcctgcgccaagggctgcgagctgtgcagcgaggtgaacggctgcctgaagtgcagccccaagctgttcatcctgctggagagaaacgacatcagacaggtgggcgtgtgcctgcccagctgcccccccggctacttcgacgccagaaaccccgacatgaacaagtgcatcaagtgcaagatcgagcactgcgaggcctgcttcagccacaacttctgcaccaagtgcaaggagggcctgtacctgcacaagggcagatgctaccccgcctgccccgagggcagcagcgccgccaacggcaccatggagtgcagcagccccgcccagtgcgagatgagcgagtggagcccctggggcccctgcagcaagaagcagcagctgtgcggcttcagaagaggcagcgaggagagaaccagaagagtgctgcacgcccccgtgggcgaccacgccgcctgcagcgacaccaaggagaccagaagatgcaccgtgagaagagtgccctgccccgagggccagaagagaagaaagggcggccagggcagaagagagaacgccaacagaaacctggccagaaaggagagcaaggaggccggcgccggcagcagaagaagaaagggccagcagcagcagcagcagcagggcaccgtgggccccctgaccagcgccggccccgcctag

SEQ ID NO: 97886 - DNA, 732 bp, synthetic construct
  misc_feature 1..732: note = Description of Artificial Sequence: Synthetic coding sequence
  source 1..732: mol_type = other DNA
atgcagttcagactgttcagcttcgccctgatcatcctgaactgcatggactacagccactgccagggcaacagatggagaagaagcaagagagccagctacgtgagcaaccccatctgcaagggctgcctgagctgcagcaaggacaacggctgcagcagatgccagcagaagctgttcttcttcctgagaagagagggcatgagacagtacggcgagtgcctgcacagctgccccagcggctactacggccacagagcccccgacatgaacagatgcgccagatgcagaatcgagaactgcgacagctgcttcagcaaggacttctgcaccaagtgcaaggtgggcttctacctgcacagaggcagatgcttcgacgagtgccccgacggcttcgcccccctggaggagaccatggagtgcgtggagggctgcgaggtgggccactggagcgagtggggcacctgcagcagaaacaacagaacctgcggcttcaagtggggcctggagaccagaaccagacagatcgtgaagaagcccgtgaaggacaccatcctgtgccccaccatcgccgagagcagaagatgcaagatgaccatgagacactgccccggcggcaagagaacccccaaggccaaggagaagagaaacaagaagaagaagagaaagctgatcgagagagcccaggagcagcacagcgtgttcctggccaccgacagagccaaccagtag

SEQ ID NO: 97887 - DNA, 540 bp, synthetic construct
  misc_feature 1..540: note = Description of Artificial Sequence: Synthetic coding sequence
  source 1..540: mol_type = other DNA
atgcagttcagactgttcagcttcgccctgatcatcctgaactgcatggactacagccactgccagggcaacagatggagaagaagcaagagaggctgcagaatcgagaactgcgacagctgcttcagcaaggacttctgcaccaagtgcaaggtgggcttctacctgcacagaggcagatgcttcgacgagtgccccgacggcttcgcccccctggaggagaccatggagtgcgtgggctgcgaggtgggccactggagcgagtggggcacctgcagcagaaacaacagaacctgcggcttcaagtggggcctggagaccagaaccagacagatcgtgaagaagcccgtgaaggacaccatcctgtgccccaccatcgccgagagcagaagatgcaagatgaccatgagacactgccccggcggcaagagaacccccaaggccaaggagaagagaaacaagaagaagaagagaaagctgatcgagagagcccaggagcagcacagcgtgttcctggccaccgacagagccaaccagtag

SEQ ID NO: 97888 - DNA, 540 bp, synthetic construct; identical to SEQ ID NO: 97887
  misc_feature 1..540: note = Description of Artificial Sequence: Synthetic coding sequence
  source 1..540: mol_type = other DNA

SEQ ID NO: 97889 - DNA, 531 bp, synthetic construct
  misc_feature 1..531: note = Description of Artificial Sequence: Synthetic coding sequence
  source 1..531: mol_type = other DNA
atgagacagtacggcgagtgcctgcacagctgccccagcggctactacggccacagagcccccgacatgaacagatgcgccagatgcagaatcgagaactgcgacagctgcttcagcaaggacttctgcaccaagtgcaaggtgggcttctacctgcacagaggcagatgcttcgacgagtgccccgacggcttcgcccccctggaggagaccatggagtgcgtggagggctgcgaggtgggccactggagcgagtggggcacctgcagcagaaacaacagaacctgcggcttcaagtggggcctggagaccagaaccagacagatcgtgaagaagcccgtgaaggacaccatcctgtgccccaccatcgccgagagcagaagatgcaagatgaccatgagacactgccccggcggcaagagaacccccaaggccaaggagaagagaaacaagaagaagaagagaaagctgatcgagagagcccaggagcagcacagcgtgttcctggccaccgacagagccaaccagtag

SEQ ID NO: 97890 - DNA, 507 bp, synthetic construct
  misc_feature 1..507: note = Description of Artificial Sequence: Synthetic coding sequence
  source 1..507: mol_type = other DNA
atgagacagtacggcgagtgcctgcacagctgccccagcggctactacggccacagagcccccgacatgaacagatgcgccagatgcagaatcgagaactgcgacagctgcttcagcaaggacttctgcaccaagtgcaaggtgggcttctacctgcacagaggcagatgcttcgacgagtgccccgacggcttcgcccccctggaggagaccatggagtgcgtggagggctgcgaggtgggccactggagcgagtggggcacctgcagcagaaacaacagaacctgcggcttcaagtggggcctggagaccagaaccagacagatcgtgaagaagcccgtgaaggacaccatcctgtgccccaccatcgccgagagcagaagatgcaagatgaccatgagacactgccccggcggcaagagaacccccaaggccaaggagaagagaaacaagaagaagaagagaaagctgatcgagagagcccaggagcagcacagcgtgttctag

SEQ ID NO: 97891 - DNA, 270 bp, synthetic construct
  misc_feature 1..270: note = Description of Artificial Sequence: Synthetic coding sequence
  source 1..270: mol_type = other DNA
atgagacagtacggcgagtgcctgcacagctgccccagcggctactacggccacagagcccccgacatgaacagatgcgccagatgcagaatcgagaactgcgacagctgcttcagcaaggacttctgcaccaagtgcaaggtgggcttctacctgcacagaggcagatgcttcgacgagtgccccgacggcttcgcccccctggaggagaccatggagtgcgtggagggctgcgaggtgggccactggagcgagtggggcacctgctag

SEQ ID NO: 97892 - DNA, 366 bp, synthetic construct
  misc_feature 1..366: note = Description of Artificial Sequence: Synthetic coding sequence
  source 1..366: mol_type = other DNA
atgcagttcagactgttcagcttcgccctgatcatcctgaactgcatggactacagccactgccagggcaacagatggagaagaagcaagagagccagctacgtgagcaaccccatctgcaagggctgcctgagctgcagcaaggacaacggctgcagcagatgccagcagaagctgttcttcttcctgagaagagagggcatgagacagtacggcgagtgcctgcacagctgccccagcggctactacggccacagagcccccgacatgaacagatgcgccagatgcagaatcgagaactgcgacagctgcttcagcaaggacttctgcaccaagtgcaaggtgggcttctacctgcacagatag

SEQ ID NO: 97893 - DNA, 234 bp, synthetic construct
  misc_feature 1..234: note = Description of Artificial Sequence: Synthetic coding sequence
  source 1..234: mol_type = other DNA
atgcagttcagactgttcagcttcgccctgatcatcctgaactgcatggactacagccactgccagggcaacagatggagaagaagcaagagagccagctacgtgagcaaccccatctgcaagggctgcctgagctgcagcaaggacaacggctgcagcagatgccagcagaagctgttcttcttcctgagaagagagggcatgagacagtacggcgagtgcctgcacagctag

SEQ ID NO: 97894 - DNA, 1410 bp, synthetic construct
  misc_feature 1..1410: note = Description of Artificial Sequence: Synthetic coding sequence
  source 1..1410: mol_type = other DNA
atggccttcctgatgcacctgctggtgtgcgtgttcggcatgggcagctgggtgaccatcaacggcctgtgggtggagctgcccctgctggtgatggagctgcccgagggctggtacctgcccagctacctgaccgtggtgatccagctggccaacatcggccccctgctggtgaccctgctgcaccacttcagacccagctgcctgagcgaggtgcccatcatcttcaccctgctgggcgtgggcaccgtgacctgcatcatcttcgccttcctgtggaacatgaccagctgggtgctggacggccaccacagcatcgccttcctggtgctgaccttcttcctggccctggtggactgcaccagcagcgtgaccttcctgcccttcatgagcagactgcccacctactacctgaccaccttcttcgtgggcgagggcctgagcggcctgctgcccgccctggtggccctggcccagggcagcggcctgaccacctgcgtgaacgtgaccgagatcagcgacagcgtgcccagccccgtgcccaccagagagaccgacatcgcccagggcgtgcccagagccctggtgagcgccctgcccggcatggaggcccccctgagccacctggagagcagatacctgcccgcccacttcagccccctggtgttcttcctgctgctgagcatcatgatggcctgctgcctggtggccttcttcgtgctgcagagacagcccagatgctgggaggccagcgtggaggacctgctgaacgaccaggtgaccctgcacagcatcagacccagagaggagaacgacctgggccccgccggcaccgtggacagcagccagggccagggctacctggaggagaaggccgccccctgctgccccgcccacctggccttcatctacaccctggtggccttcgtgaacgccctgaccaacggcatgctgcccagcgtgcagacctacagctgcctgagctacggccccgtggcctaccacctggccgccaccctgagcatcgtggccaaccccctggccagcctggtgagcatgttcctgcccaacagaagcctgctgttcctgggcgtgctgagcgtgctgggcacctgcttcggcggctacaacatggccatggccgtgatgagcccctgccccctgctgcagggccactggggcggcgaggtgctgatcgtggccagctgggtgctgttcagcggctgcctgagctacgtgaaggtgatgctgggcgtggtgctgagagacctgagcagaagcgccctgctgtggtgcggcgccgccgtgcagctgggcagcctgctgggcgccctgctgatgttccccctggtgaacgtgctgagactgttcagcagcgccgacttctgcaacctgcactgccccgcctag

SEQ ID NO: 97895 - DNA, 519 bp, synthetic construct
  misc_feature 1..519: note = Description of Artificial Sequence: Synthetic coding sequence
  source 1..519: mol_type = other DNA
atgagagcccccctgtgcctgctgctgctggtggcccacgccgtggacatgctggccctgaacagaagaaagaagcaggtgggcaccggcctgggcggcaactgcaccggctgcatcatctgcagcgaggagaacggctgcagcacctgccagcagagactgttcctgttcatcagaagagagggcatcagacagtacggcaagtgcctgcacgactgcccccccggctacttcggcatcagaggccaggaggtgaacagatgcaagaagtgcggcgccacctgcgagagctgcttcagccaggacttctgcatcagatgcaagagacagttctacctgtacaagggcaagtgcctgcccacctgcccccccggcaccctggcccaccagaacaccagagagtgccaggagagaagccccggccagaagaagggcagaaaggacagaagacccagaaaggacagaaagctggacagaagactggacgtgagacccagacagcccggcctgcagccctag

SEQ ID NO: 97896 - DNA, 2133 bp, synthetic construct
  misc_feature 1..2133: note = Description of Artificial Sequence: Synthetic coding sequence
  source 1..2133: mol_type = other DNA
atgagaggcagactgtgcgtgggcagagccgccgccgccgccgccgccgtggccgtgcccctggccggcggccaggagggcagccccggcggcggcagaagaggcagcagaggcaccaccatggtgaagaagagaaagggcagagtggtgatcgacagcgacaccgaggacagcggcagcgacgagaacctggaccaggagctgctgagcctggccaagagaaagagaagcgacagcgaggagaaggagccccccgtgagccagcccgccgccagcagcgacagcgagaccagcgacagcgacgacgagtggaccttcggcagcaacaagaacaagaagaagggcaaggccagaaagatcgagaagaagggcaccatgaagaagcaggccaacaagaccgccagcagcggcagcagcgacaaggacagcagcgccgagagcagcgcccccgaggagggcgaggtgagcgacagcgacagcaacagcagcagcagcagcagcgacagcgacagcagcagcgaggacgaggagttccacgacggctacggcgaggacctgatgggcgacgaggaggacagagccagactggagcagatgaccgagaaggagagagagcaggagctgttcaacagaatcgagaagagagaggtgctgaagagaagattcgagatcaagaagaagctgaagaccgccaagaagaaggagaagaaggagaagaagaagaagcaggaggaggagcaggagaagaagaagctgacccagatccaggagagccaggtgaccagccacaacaaggagagaagaagcaagagagacgagaagctggacaagaagagccaggccatggaggagctgaaggccgagagagagaagagaaagaacagaaccgccgagctgctggccaagaagcagcccctgaagaccagcgaggtgtacagcgacgacgaggaggaggaggaggacgacaagagcagcgagaagagcgacagaagcagcagaaccagcagcagcgacgaggaggaggagaaggaggagatcccccccaagagccagcccgtgagcctgcccgaggagctgaacagagtgagactgagcagacacaagctggagagatggtgccacatgcccttcttcgccaagaccgtgaccggctgcttcgtgagaatcggcatcggcaaccacaacagcaagcccgtgtacagagtggccgagatcaccggcgtggtggagaccgccaaggtgtaccagctgggcggcaccagaaccaacaagggcctgcagctgagacacggcaacgaccagagagtgttcagactggagttcgtgagcaaccaggagttcaccgagagcgagttcatgaagtggaaggaggccatgttcagcgccggcatgcagctgcccaccctggacgagatcaacaagaaggagctgagcatcaaggaggccctgaactacaagttcaacgaccaggacatcgaggagatcgtgaaggagaaggagagattcagaaaggccccccccaactacgccatgaagaagacccagctgctgaaggagaaggccatggccgaggacctgggcgaccaggacaaggccaagcagatccaggaccagctgaacgagctggaggagagagccgaggccctggacagacagagaaccaagaacatcagcgccatcagctacatcaaccagagaaacagagagtggaacatcgtggagagcgagaaggccctggtggccgagagccacaacatgaagaaccagcagatggaccccttcaccagaagacagtgcaagcccaccatcgtgagcaacagcagagaccccgccgtgcaggccgccatcctggcccagctgaacgccaagtacggcagcggcgtgctgcccgacgcccccaaggagatgagcaagggccagggcaaggacaaggacctgaacagcaagagcgccagcgacctgagcgaggacctgttcaaggtgcacgacttcgacgtgaagatcgacctgcaggtgcccagcagcgagagcaaggccctggccatcaccagcaaggccccccccgccaaggacggcgcccccagaagaagcctgaacctggaggactacaagaagagaagaggcctgatctag

SEQ ID NO: 97897 - DNA, 4551 bp, synthetic construct
  misc_feature 1..4551: note = Description of Artificial Sequence: Synthetic coding sequence
  source 1..4551: mol_type = other DNA
atggacagcccccccaagctgaccggcgagaccctgatcgtgcaccacatccccctggtgcactgccaggtgcccgacagacagtgctgcggcggcgccggcggcggcggcggcagcaccagacccaaccccttctgcccccccgagctgggcatcacccagcccgaccaggacctgggccaggccgacagcctgctgttcagcagcctgcacagcacccccggcggcaccgccagaagcatcgacagcaccaagagcagaagcagagacggcagaggccccggcgcccccaagagacacaaccccttcctgctgcaggagggcgtgggcgagcccggcctgggcgacctgtacgacgacagcatcggcgacagcgccacccagcagagcttccacctgcacggcaccggccagcccaacttccacctgagcagcttccagctgccccccagcggccccagagtgggcagaccctggggcaccaccagaagcagagccggcgtggtggagggccaggagcaggagcccgtgatgaccctggacacccagcagtgcggcaccagccactgctgcagacccgagctggaggccgagaccatggagctggacgagtgcggcggccccggcggcagcggcagcggcggcggcgccagcgacaccagcggcttcagcttcgaccaggagtggaagctgagcagcgacgagagccccagaaaccccggctgcagcggcagcggcgaccagcactgcagatgcagcagcaccagcagccagagcgaggccgccgaccagagcatgggctacgtgagcgacagcagctgcaacagcagcgacggcgtgctggtgaccttcagcaccctgtacaacaagatgcacggcacccccagagccaacctgaacagcgccccccagagctgcagcgacagcagcttctgcagccacagcgaccccggcgccttctacctggacctgcagcccagccccttcgagagcaagatgagctacgagagccaccaccccgagagcggcggcagagagggcggctacggctgcccccacgccagcagccccgagctggacgccaactgcaacagctacagaccccactgcgagccctgccccgccgtggccgacctgaccgcctgcttccagagccaggccagactggtggtggccacccagaactactacaagctggtgacctgcgacctgagcagccagagcagccccagccccgccggcagcagcatcaccagctgcagcgaggagcacaccaagatcagccccccccccggccccggccccgaccccggccccagccagcccagcgagtactacctgttccagaagcccgaggtgcagcccgaggagcaggaggccgtgagcagcagcacccaggccgccgccgccgtgggccccaccgtgctggagggccaggtgtacaccaacaccagcccccccaacctgagcaccggcagacagagaagcagaagctacgacagaagcctgcagagaagcccccccgtgagactgggcagcctggagagaatgctgagctgccccgtgagactgagcgagggccccgccgccatggccggccccggcagcccccccagaagagtgaccagcttcgccgagctggccaagggcagaaagaagaccggcggcagcggcagcccccccctgagagtgagcgtgggcgacagcagccaggagttcagccccatccaggaggcccagcaggacagaggcgcccccctggacgagggcacctgctgcagccacagcctgccccccatgcccctgggccccggcatggacctgctgggccccgaccccagccccccctggagcacccaggtgtgccagggcccccacagcagcgagatgccccccgccggcctgagagccaccggccagggccccctggcccagctgatggaccccggccccgccctgcccggcagccccgccaacagccacacccagagagacgccagagccagagccgacggcggcggcaccgagagcagacccgtgctgagatacagcaaggagcagagacccaccaccctgcccatccagcccttcgtgttccagcaccacttccccaagcagctggccaaggccagagccctgcacagcctgagccagctgtacagcctgagcggctgcagcagaacccagcagcccgcccccctggccgcccccgccgcccaggtgagcgtgcccgcccccagcggcgagccccaggccagcacccccagagccaccggcagaggcgccagaaaggccggcagcgagcccgagaccagcagacccagccccctgggcagctacagccccatcagaagcgtgggccccttcggccccagcaccgacagcagcgccagcaccagctgcagccccccccccgagcagcccaccgccaccgagagcctgcccccctggagccacagctgccccagcgccgtgagacccgccaccagccagcagccccagaaggaggaccagaagatcctgaccctgaccgagtacagactgcacggcaccggcagcctgccccccctgggcagctggagaagcggcctgagcagagccgagagcctggccagaggcggcggcgagggcagcatggccaccagacccagcaacgccaaccacctgagcccccaggccctgaagtggagagagtacagaagaaagaaccccctgggcccccccggcctgagcggcagcctggacagaagaagccaggaggccagactggccagaagaaaccccatcttcgagttccccggcagcctgagcgccgccagccacctgaactgcagactgaacggccaggccgtgaagcccctgcccctgacctgccccgacttccaggaccccttcagcctgaccgagaagccccccgccgagttctgcctgagccccgacggcagcagcgaggccatcagcatcgacctgctgcagaagaagggcctggtgaaggccgtgaacatcgccgtggacctgatcgtggcccacttcggcaccagcagagaccccggcgtgaaggccaagctgggcaacagcagcgtgagccccaacgtgggccacctggtgctgaagtacctgtgccccgccgtgagagccgtgctggaggacggcctgaaggccttcgtgctggacgtgatcatcggccagagaaagaacatgccctggagcgtggtggaggccagcacccagctgggccccagcaccaaggtgctgcacggcctgtacaacaaggtgagccagttccccgagctgaccagccacaccatgagattcaacgccttcatcctgggcctgctgaacatcagaagcctggagttctggttcaaccacctgtacaaccacgaggacatcatccagacccactaccagccctggggcttcctgagcgccgcccacaccgtgtgccccggcctgttcgaggagctgctgctgctgctgcagcccctggccctgctgcccttcagcctggacctgctgttccagcacagactgctgcagagcggccagcagcagagacagcacaaggagctgctgagagtgagccaggacctgctgctgagcgcccacagcaccctgcagctggccagagccagaggccaggagggccccggcgacgtggacagagccgcccagggcgagagagtgaagggcgtgggcgccagcgagggcggcgaggaggaggaggaggaggaggagaccgaggaggtggccgaggccgccggcggcagcggcagagccagatgggccagaggcggccaggccggctggtggtaccagctgatgcagagcagccaggtgtacatcgacggcagcatcgagggcagcagattccccagaggcagcagcaacagcagcagcgagaagaagaagggcgccggcggcggcggccccccccaggcccccccccccagagagggcgtggtggagggcgccgaggcctgccccgccagcgaggaggccctgggcagagagagaggctggcccttctggatgggcagcccccccgacagcgtgctggccgagctgagaagaagcagagagagagagggccccgccgccagccccgccgagaacgaggagggcgccagcgagcccagccccggcggcatcaagtggggccacctgttcggcagcagaaaggcccagagagaggccagacccaccaacagactgcccagcgactggctgagcctggacaagagcatgttccagctggtggcccagaccgtgggcagcagaagagagcccgagcccaaggagagcctgcaggagccccacagccccgccctgcccagcagccccccctgcgaggtgcaggccctgtgccaccacctggccaccggccccggccagctgagcttccacaagggcgacatcctgagagtgctgggcagagccggcggcgactggctgagatgcagcagaggccccgacagcggcctggtgcccctggcctacgtgaccctgacccccacccccagccccacccccggcagcagccagaactag

SEQ ID NO: 97898 - DNA, 4551 bp, synthetic construct; identical to SEQ ID NO: 97897
  misc_feature 1..4551: note = Description of Artificial Sequence: Synthetic coding sequence
  source 1..4551: mol_type = other DNA

SEQ ID NO: 97899 - DNA, 2775 bp, synthetic construct
  misc_feature 1..2775: note = Description of Artificial Sequence: Synthetic coding sequence
  source 1..2775: mol_type = other DNA
atggacagcccccccaagctgaccggcgagaccctgatcgtgcaccacatccccctggtgcactgccaggtgcccgacagacagtgctgcggcggcgccggcggcggcggcggcagcaccagacccaaccccttctgcccccccgagctgggcatcacccagcccgaccaggacctgggccaggccgacagcctgctgttcagcagcctgcacagcacccccggcggcaccgccagaagcatcgacagcaccaagagcagaagcagagacggcagaggccccggcgcccccaagagacacaaccccttcctgctgcaggagggcgtgggcgagcccggcctgggcgacctgtacgacgacagcatcggcgacagcgccacccagcagagcttccacctgcacggcaccggccagcccaacttccacctgagcagcttccagctgccccccagcggccccagagtgggcagaccctggggcaccaccagaagcagagccggcgtggtggagggccaggagcaggagcccgtgatgaccctggacacccagcagtgcggcaccagccactgctgcagacccgagctggaggccgagaccatggagctggacgagtgcggcggccccggcggcagcggcagcggcggcggcgccagcgacaccagcggcttcagcttcgaccaggagtggaagctgagcagcgacgagagccccagaaaccccggctgcagcggcagcggcgaccagcactgcagatgcagcagcaccagcagccagagcgaggccgccgaccagagcatgggctacgtgagcgacagcagctgcaacagcagcgacggcgtgctggtgaccttcagcaccctgtacaacaagatgcacggcacccccagagccaacctgaacagcgccccccagagctgcagcgacagcagcttctgcagccacagcgaccccggcgccttctacctggacctgcagcccagccccttcgagagcaagatgagctacgagagccaccaccccgagagcggcggcagagagggcggctacggctgcccccacgccagcagccccgagctggacgccaactgcaacagctacagaccccactgcgagccctgccccgccgtggccgacctgaccgcctgcttccagagccaggccagactggtggtggccacccagaactactacaagctggtgacctgcgacctgagcagccagagcagccccagccccgccggcagcagcatcaccagctgcagcgaggagcacaccaagatcagccccccccccggccccggccccgaccccggccccagccagcccagcgagtactacctgttccagaagcccgaggtgcagcccgaggagcaggaggccgtgagcagcagcacccaggccgccgccgccgtgggccccaccgtgctggagggccaggtgtacaccaacaccagcccccccaacctgagcaccggcagacagagaagcagaagctacgacagaagcctgcagagaagcccccccgtgagactgggcagcctggagagaatgctgagctgccccgtgagactgagcgagggccccgccgccatggccggccccggcagcccccccagaagagtgaccagcttcgccgagctggccaagggcagaaagaagaccggcggcagcggcagcccccccctgagagtgagcgtgggcgacagcagccaggagttcagccccatccaggaggcccagcaggacagaggcgcccccctggacgagggcacctgctgcagccacagcctgccccccatgcccctgggccccggcatggacctgctgggccccgaccccagccccccctggagcacccaggtgtgccagggcccccacagcagcgagatgccccccgccggcctgagagccaccggccagggccccctggcccagctgatggaccccggccccgccctgcccggcagccccgccaacagccacacccagagagacgccagagccagagccgacggcggcggcaccgagagcagacccgtgctgagatacagcaaggagcagagacccaccaccctgcccatccagcccttcgtgttccagcaccacttccccaagcagctggccaaggccagagccctgcacagcctgagccagctgtacagcctgagcggctgcagcagaacccagcagcccgcccccctggccgcccccgccgcccaggtgagcgtgcccgcccccagcggcgagccccaggccagcacccccagagccaccggcagaggcgccagaaaggccggcagcgagcccgagaccagcagacccagccccctgggcagctacagccccatcagaagcgtgggccccttcggccccagcaccgacagcagcgccagcaccagctgcagccccccccccgagcagcccaccgccaccgagagcctgcccccctggagccacagctgccccagcgccgtgagacccgccaccagccagcagccccagaaggaggaccagaagatcctgaccctgaccgagtacagactgcacggcaccggcagcctgccccccctgggcagctggagaagcggcctgagcagagccgagagcctggccagaggcggcggcgagggcagcatggccaccagacccagcaacgccaaccacctgagcccccaggccctgaagtggagagagtacagaagaaagaaccccctgggcccccccggcctgagcggcagcctggacagaagaagccaggaggccagaaccggctag

SEQ ID NO: 97900 - DNA, 591 bp, synthetic construct
  misc_feature 1..591: note = Description of Artificial Sequence: Synthetic coding sequence
  source 1..591: mol_type = other DNA
atgagcatgctgagactgcagaagagactggccagcagcgtgctgagatgcggcaagaagaaggtgtggctggaccccaacgagaccaacgagatcgccaacgccaacagcagacagcagatcagaaagctgatcaaggacggcctgatcatcagaaagcccgtgaccgtgcacagcagagccagatgcagaaagaacaccctggccagaagaaagggcagacacatgggcatcggcaagagaaagggcaccgccaacgccagaatgcccgagaaggtgacctggatgagaagaatgagaatcctgagaagactgctgagaagatacagagagagcaagaagatcgacagacacatgtaccacagcctgtacctgaaggtgaagggcaacgtgttcaagaacaagagaatcctgatggagcacatccacaagctgaaggccgacaaggccagaaagaagctgctggccgaccaggccgaggccagaagaagcaagaccaaggaggccagaaagagaagagaggagagactgcaggccaagaaggaggagatcatcaagaccctgagcaaggaggaggagaccaagaagtag

SEQ ID NO: 97901 - DNA, 1341 bp, synthetic construct
  misc_feature 1..1341: note = Description of Artificial Sequence: Synthetic coding sequence
  source 1..1341: mol_type = other DNA
atggaggccagcttcgtgcagaccaccatggccctgggcctgagcagcaagaaggccagcagcagaaacgtggccgtggagagaaagaacctgatcaccgtgtgcagattcagcgtgaagaccctgctggagaagtacaccgccgagcccatcgacgacagcagcgaggagttcgtgaacttcgccgccatcctggagcagatcctgagccacagattcaaggcctgcgcccccgccggccccgtgagctggttcagcagcgacggccagagaggcttctgggactacatcagactggcctgcagcaaggtgcccaacaactgcgtgagcagcatcgagaacatggagaacatcagcaccgccagagccaagggcagagcctggatcagagtggccctgatggagaagagaatgagcgagtacatcaccaccgccctgagagacaccagaaccaccagaagattctacgacagcggcgccatcatgctgagagacgaggccaccatcctgaccggcatgctgatcggcctgagcgccatcgacttcagcttctgcctgaagggcgaggtgctggacggcaagacccccgtggtgatcgactacaccccctacctgaagttcacccagagctacgactacctgaccgacgaggaggagagacacagcgccgagagcagcaccagcgaggacaacagccccgagcacccctacctgcccctggtgaccgacgaggacagctggtacagcaagtggcacaagatggagcagaagttcagaatcgtgtacgcccagaagggctacctggaggagctggtgagactgagagagagccagctgaaggacctggaggccgagaacagaagactgcagctgcagctggaggaggccgccgcccagaaccagagagagaagagagagctggagggcgtgatcctggagctgcaggagcagctgaccggcctgatccccagcgaccacgcccccctggcccagggcagcaaggagctgaccacccccctggtgaaccagtggcccagcctgggcaccctgaacggcgccgagggcgccagcaacagcaagctgtacagaagacacagcttcatgagcaccgagcccctgagcgccgaggccagcctgagcagcgacagccagagactgggcgagggcaccagagacgaggagccctggggccccatcggcaaggaccccacccccagcatgctgggcctgtgcggcagcctggccagcatccccagctgcaagagcctggccagcttcaagagcaacgagtgcctggtgagcgacagccccgagggcagccccgccctgagccccagctag

SEQ ID NO: 97902 - DNA, 1371 bp, synthetic construct
  misc_feature 1..1371: note = Description of Artificial Sequence: Synthetic coding sequence
  source 1..1371: mol_type = other DNA
atgaagatcgaggaggtgaagagcaccaccaagacccagagaatcgccagccacagccacgtgaagggcctgggcctggacgagagcggcctggccaagcaggccgccagcggcctggtgggccaggagaacgccagagaggcctgcggcgtgatcgtggagctgatcaagagcaagaagatggccggcagagccgtgctgctggccggcccccccggcaccggcaagaccgccctggccctggccatcgcccaggagctgggcagcaaggtgcccttctgccccatggtgggcagcgaggtgtacagcaccgagatcaagaagaccgaggtgctgatggagaacttcagaagagccatcggcctgagaatcaaggagaccaaggaggtgtacgagggcgaggtgaccgagctgaccccctgcgagaccgagaaccccatgggcggctacggcaagaccatcagccacgtgatcatcggcctgaagaccgccaagggcaccaagcagctgaagctggaccccagcatcttcgagagcctgcagaaggagagagtggaggccggcgacgtgatctacatcgaggccaacagcggcgccgtgaagagacagggcagatgcgacacctacgccaccgagttcgacctggaggccgaggagtacgtgcccctgcccaagggcgacgtgcacaagaagaaggagatcatccaggacgtgaccctgcacgacctggacgtggccaacgccagaccccagggcggccaggacatcctgagcatgatgggccagctgatgaagcccaagaagaccgagatcaccgacaagctgagaggcgagatcaacaaggtggtgaacaagtacatcgaccagggcatcgccgagctggtgcccggcgtgctgttcgtggacgaggtgcacatgctggacatcgagtgcttcacctacctgcacagagccctggagagcagcatcgcccccatcgtgatcttcgccagcaacagaggcaactgcgtgatcagaggcaccgaggacatcaccagcccccacggcatccccctggacctgctggacagagtgatgatcatcagaaccatgctgtacaccccccaggagatgaagcagatcatcaagatcagagcccagaccgagggcatcaacatcagcgaggaggccctgaaccacctgggcgagatcggcaccaagaccaccctgagatacagcgtgcagctgctgacccccgccaacctgctggccaagatcaacggcaaggacagcatcgagaaggagcacgtggaggagatcagcgagctgttctacgacgccaagagcagcgccaagatcctggccgaccagcaggacaagtacatgaagtag

SEQ ID NO: 97903 - DNA, 1161 bp, synthetic construct
  misc_feature 1..1161: note = Description of Artificial Sequence: Synthetic coding sequence
  source 1..1161: mol_type = other DNA
atgaagatcgaggaggtgaagagcaccaccaagacccagagaatcgccagccacagccacgtgaagggcctgggcctggacgagagcggcctggccaagcaggccgccagcggcctggtgggccaggagaacgccagagaggcctgcggcgtgatcgtggagctgatcaagagcaagaagatggccggcagagccgtgctgctggccggcccccccggcaccggcaagaccgccctggccctggccatcgcccaggagctgggcagcaaggtgcccttctgccccatggtgggcagcgaggtgtacagcaccgagatcaagaagaccgaggtgctgatggagaacttcagaagagccatcggcctgagaatcaaggagaccaaggaggtgtacgagggcgaggtgaccgagctgaccccctgcgagaccgagaaccccatgggcggctacggcaagaccatcagccacgtgatcatcggcctgaagaccgccaagggcaccaagcagctgaagctggaccccagcatcttcgagagcctgcagaaggagagagtggaggccggcgacgtgatctacatcgaggccaacagcggcgccgtgaagagacagggcagatgcgacacctacgccaccgagttcgacctggaggccgaggagtacgtgcccctgcccaagggcgacgtgcacaagaagaaggagatcatccaggacgtgaccctgcacgacctggacgtggccaacgccagaccccagggcggccaggacatcctgagcatgatgggccagctgatgaagcccaagaagaccgagatcaccgacaagctgagaggcgagatcaacaaggtggtgaacaagtacatcgaccagggcatcgccgagctggtgcccggcgtgctgttcgtggacgaggtgcacatgctggacatcgagtgcttcacctacctgcacagagccctggagagcagcatcgcccccatcgtgatcttcgccagcaacagaggcaactgcgtgatcagaggcaccgaggacatcaccagcccccacggcatccccctggacctgctggacagagtgatgatcatcagaaccatgctgtacaccccccaggagatgaagcaggtgctgagcgccgccgccgaccccggccagctggcctgctag

SEQ ID NO: 97904 - DNA, 2502 bp, synthetic construct; identical to SEQ ID NO: 89408
  misc_feature 1..2502: note = Description of Artificial Sequence: Synthetic coding sequence
  source 1..2502: mol_type = other DNA

SEQ ID NO: 97905 - DNA, 1257 bp, synthetic construct
  misc_feature 1..1257: note = Description of Artificial Sequence: Synthetic coding sequence
  source 1..1257: mol_type = other DNA
atggtgggccagctggccgccagaagagccgccggcgtggtgctggagatgatcagagagggcaagatcgccggcagagccgtgctgatcgccggccagcccggcaccggcaagaccgccatcgccatgggcatggcccaggccctgggccccgacacccccttcaccgccatcgccggcagcgagatcttcagcctggagatgagcaagaccgaggccctgacccaggccttcagaagaagcatcggcgtgagaatcaaggaggagaccgagatcatcgagggcgaggtggtggagatccagatcgacagacccgccaccggcaccggcagcaaggtgggcaagctgaccctgaagaccaccgagatggagaccatctacgacctgggcaccaagatgatcgagagcctgaccaaggacaaggtgcaggccggcgacgtgatcaccatcgacaaggccaccggcaagatcagcaagctgggcagaagcttcaccagagccagagactacgacgccatgggcagccagaccaagttcgtgcagtgccccgacggcgagctgcagaagagaaaggaggtggtgcacaccgtgagcctgcacgagatcgacgtgatcaacagcagaacccagggcttcctggccctgttcagcggcgacaccggcgagatcaagagcgaggtgagagagcagatcaacgccaaggtggccgagtggagagaggagggcaaggccgagatcatccccggcgtgctgttcatcgacgaggtgcacatgctggacatcgagagcttcagcttcctgaacagagccctggagagcgacatggcccccgtgctgatcatggccaccaacagaggcatcaccagaatcagaggcaccagctaccagagcccccacggcatccccatcgacctgctggacagactgctgatcgtgagcaccaccccctacagcgagaaggacaccaagcagatcctgagaatcagatgcgaggaggaggacgtggagatgagcgaggacgcctacaccgtgctgaccagaatcggcctggagaccagcctgagatacgccatccagctgatcaccgccgccagcctggtgtgcagaaagagaaagggcaccgaggtgcaggtggacgacatcaagagagtgtacagcctgttcctggacgagagcagaagcacccagtacatgaaggagtaccaggacgccttcctgttcaacgagctgaagggcgagaccatggacaccagctag

SEQ ID NO: 97906 - DNA, 1392 bp, synthetic construct; identical to SEQ ID NO: 80441
  misc_feature 1..1392: note = Description of Artificial Sequence: Synthetic coding sequence
  source 1..1392: mol_type = other DNA

SEQ ID NO: 97907 - DNA, 15102 bp, synthetic construct
  misc_feature 1..15102: note = Description of Artificial Sequence: Synthetic coding sequence
  source 1..15102: mol_type = other DNA
atgggcgacgccgagggcgaggacgaggtgcagttcctgagaaccgacgacgaggtggtgctgcagtgcagcgccaccgtgctgaaggagcagctgaagctgtgcctggccgccgagggcttcggcaacagactgtgcttcctggagcccaccagcaacgcccagaacgtgccccccgacctggccatctgctgcttcgtgctggagcagagcctgagcgtgagagccctgcaggagatgctggccaacaccgtggaggccggcgtggagagcagccagggcggcggccacagaaccctgctgtacggccacgccatcctgctgagacacgcccacagcagaatgtacctgagctgcctgaccaccagcagaagcatgaccgacaagctggccttcgacgtgggcctgcaggaggacgccaccggcgaggcctgctggtggaccatgcaccccgccagcaagcagagaagcgagggcgagaaggtgagagtgggcgacgacatcatcctggtgagcgtgagcagcgagagatacctgcacctgagcaccgccagcggcgagctgcaggtggacgccagcttcatgcagaccctgtggaacatgaaccccatctgcagcagatgcgaggagggcttcgtgaccggcggccacgtgctgagactgttccacggccacatggacgagtgcctgaccatcagccccgccgacagcgacgaccagagaagactggtgtactacgagggcggcgccgtgtgcacccacgccagaagcctgtggagactggagcccctgagaatcagctggagcggcagccacctgagatggggccagcccctgagagtgagacacgtgaccaccggccagtacctggccctgaccgaggaccagggcctggtggtggtggacgccagcaaggcccacaccaaggccaccagcttctgcttcagaatcagcaaggagaagctggacgtggcccccaagagagacgtggagggcatgggcccccccgagatcaagtacggcgagagcctgtgcttcgtgcagcacgtggccagcggcctgtggctgacctacgccgcccccgaccccaaggccctgagactgggcgtgctgaagaagaaggccatgctgcaccaggagggccacatggacgacgccctgagcctgaccagatgccagcaggaggagagccaggccgccagaatgatccacagcaccaacggcctgtacaaccagttcatcaagagcctggacagcttcagcggcaagcccagaggcagcggcccccccgccggcaccgccctgcccatcgagggcgtgatcctgagcctgcaggacctgatcatctacttcgagccccccagcgaggacctgcagcacgaggagaagcagagcaagctgagaagcctgagaaacagacagagcctgttccaggaggagggcatgctgagcatggtgctgaactgcatcgacagactgaacgtgtacaccaccgccgcccacttcgccgagttcgccggcgaggaggccgccgagagctggaaggagatcgtgaacctgctgtacgagctgctggccagcctgatcagaggcaacagaagcaactgcgccctgttcagcaccaacctggactggctggtgagcaagctggacagactggaggccagcagcggcatcctggaggtgctgtactgcgtgctgatcgagagccccgaggtgctgaacatcatccaggagaaccacatcaagagcatcatcagcctgctggacaagcacggcagaaaccacaaggtgctggacgtgctgtgcagcctgtgcgtgtgcaacggcgtggccgtgagaagcaaccaggacctgatcaccgagaacctgctgcccggcagagagctgctgctgcagaccaacctgatcaactacgtgaccagcatcagacccaacatcttcgtgggcagagccgagggcaccacccagtacagcaagtggtacttcgaggtgatggtggacgaggtgacccccttcctgaccgcccaggccacccacctgagagtgggctgggccctgaccgagggctacaccccctaccccggcgccggcgagggctggggcggcaacggcgtgggcgacgacctgtacagctacggcttcgacggcctgcacctgtggaccggccacgtggccagacccgtgaccagccccggccagcacctgctggcccccgaggacgtgatcagctgctgcctggacctgagcgtgcccagcatcagcttcagaatcaacggctgccccgtgcagggcgtgttcgagagcttcaacctggacggcctgttcttccccgtggtgagcttcagcgccggcgtgaaggtgagattcctgctgggcggcagacacggcgagttcaagttcctgcccccccccggctacgccccctgccacgaggccgtgctgcccagagagagactgcacctggagcccatcaaggagtacagaagagagggccccagaggcccccacctggtgggccccagcagatgcctgagccacaccgacttcgtgccctgccccgtggacaccgtgcagatcgtgctgcccccccacctggagagaatcagagagaagctggccgagaacatccacgagctgtgggccctgaccagaatcgagcagggctggacctacggccccgtgagagacgacaacaagagactgcacccctgcctggtggacttccacagcctgcccgagcccgagagaaactacaacctgcagatgagcggcgagaccctgaagaccctgctggccctgggctgccacgtgggcatggccgacgagaaggccgaggacaacctgaagaagaccaagctgcccaagacctacatgatgagcaacggctacaagcccgcccccctggacctgagccacgtgagactgacccccgcccagaccaccctggtggacagactggccgagaacggccacaacgtgtgggccagagacagagtgggccagggctggagctacagcgccgtgcaggacatccccgccagaagaaaccccagactggtgccctacagactgctggacgaggccaccaagagaagcaacagagacagcctgtgccaggccgtgagaaccctgctgggctacggctacaacatcgagccccccgaccaggagcccagccaggtggagaaccagagcagatgcgacagagtgagaatcttcagagccgagaagagctacaccgtgcagagcggcagatggtacttcgagttcgaggccgtgaccaccggcgagatgagagtgggctgggccagacccgagctgagacccgacgtggagctgggcgccgacgagctggcctacgtgttcaacggccacagaggccagagatggcacctgggcagcgagcccttcggcagaccctggcagcccggcgacgtggtgggctgcatgatcgacctgaccgagaacaccatcatcttcaccctgaacggcgaggtgctgatgagcgacagcggcagcgagaccgccttcagagagatcgagatcggcgacggcttcctgcccgtgtgcagcctgggccccggccaggtgggccacctgaacctgggccaggacgtgagcagcctgagattcttcgccatctgcggcctgcaggagggcttcgagcccttcgccatcaacatgcagagacccgtgaccacctggttcagcaagggcctgccccagttcgagcccgtgcccctggagcacccccactacgaggtgagcagagtggacggcaccgtggacacccccccctgcctgagactgacccacagaacctggggcagccagaacagcctggtggagatgctgttcctgagactgagcctgcccgtgcagttccaccagcacttcagatgcaccgccggcgccacccccctggccccccccggcctgcagccccccgccgaggacgaggccagagccgccgagcccgaccccgactacgagaacctgagaagaagcgccggcggctggagcgaggccgagaacggcaaggagggcaccgccaaggagggcgcccccggcggcaccccccaggccggcggcgaggcccagcccgccagagccgagaacgagaaggacgccaccaccgagaagaacaagaagagaggcttcctgttcaaggccaagaaggtggccatgatgacccagccccccgccacccccaccctgcccagactgccccacgacgtggtgcccgccgacaacagagacgaccccgagatcatcctgaacaccaccacctactactacagcgtgagagtgttcgccggccaggagcccagctgcgtgtgggccggctgggtgacccccgactaccaccagcacgacatgagcttcgacctgagcaaggtgagagtggtgaccgtgaccatgggcgacgagcagggcaacgtgcacagcagcctgaagtgcagcaactgctacatggtgtggggcggcgacttcgtgagccccggccagcagggcagaatcagccacaccgacctggtgatcggctgcctggtggacctggccaccggcctgatgaccttcaccgccaacggcaaggagagcaacaccttcttccaggtggagcccaacaccaagctgttccccgccgtgttcgtgctgcccacccaccagaacgtgatccagttcgagctgggcaagcagaagaacatcatgcccctgagcgccgccatgttccagagcgagagaaagaaccccgccccccagtgcccccccagactggagatgcagatgctgatgcccgtgagctggagcagaatgcccaaccacttcctgcaggtggagaccagaagagccggcgagagactgggctgggccgtgcagtgccaggagcccctgaccatgatggccctgcacatccccgaggagaacagatgcatggacatcctggagctgagcgagagactggacctgcagagattccacagccacaccctgagactgtacagagccgtgtgcgccctgggcaacaacagagtggcccacgccctgtgcagccacgtggaccaggcccagctgctgcacgccctggaggacgcccacctgcccggccccctgagagccggctactacgacctgctgatcagcatccacctggagagcgcctgcagaagcagaagaagcatgctgagcgagtacatcgtgcccctgacccccgagaccagagccatcaccctgttcccccccggcagaagcaccgagaacggccaccccagacacggcctgcccggcgtgggcgtgaccaccagcctgagacccccccaccacttcagccccccctgcttcgtggccgccctgcccgccgccggcgccgccgaggcccccgccagactgagccccgccatccccctggaggccctgagagacaaggccctgagaatgctgggcgaggccgtgagagacggcggccagcacgccagagaccccgtgggcggcagcgtggagttccagttcgtgcccgtgctgaagctggtgagcaccctgctggtgatgggcatcttcggcgacgaggacgtgaagcagatcctgaagatgatcgagcccgaggtgttcaccgaggaggaggaggaggaggacgaggaggaggagggcgaggaggaggacgaggaggagaaggaggaggacgaggaggagaccgcccaggagaaggaggacgaggagaaggaggaggaggaggccgccgagggcgagaaggaggagggcctggaggagggcctgctgcagatgaagctgcccgagagcgtgaagctgcagatgtgccacctgctggagtacttctgcgaccaggagctgcagcacagagtggagagcctggccgccttcgccgagagatacgtggacaagctgcaggccaaccagagaagcagatacggcctgctgatcaaggccttcagcatgaccgccgccgagaccgccagaagaaccagagagttcagaagccccccccaggagcagatcaacatgctgctgcagttcaaggacggcaccgacgaggaggactgccccctgcccgaggagatcagacaggacctgctggacttccaccaggacctgctggcccactgcggcatccagctggacggcgaggaggaggagcccgaggaggagaccaccctgggcagcagactgatgagcctgctggagaaggtgagactggtgaagaagaaggaggagaagcccgaggaggagagaagcgccgaggagagcaagcccagaagcctgcaggagctggtgagccacatggtggtgagatgggcccaggaggacttcgtgcagagccccgagctggtgagagccatgttcagcctgctgcacagacagtacgacggcctgggcgagctgctgagagccctgcccagagcctacaccatcagccccagcagcgtggaggacaccatgagcctgctggagtgcctgggccagatcagaagcctgctgatcgtgcagatgggcccccaggaggagaacctgatgatccagagcatcggcaacatcatgaacaacaaggtgttctaccagcaccccaacctgatgagagccctgggcatgcacgagaccgtgatggaggtgatggtgaacgtgctgggcggcggcgagagcaaggagatcagattccccaagatggtgaccagctgctgcagattcctgtgctacttctgcagaatcagcagacagaaccagagaagcatgttcgaccacctgagctacctgctggagaacagcggcatcggcctgggcatgcagggcagcacccccctggacgtggccgccgccagcgtgatcgacaacaacgagctggccctggccctgcaggagcaggacctggagaaggtggtgagctacctggccggctgcggcctgcagagctgccccatgctggtggccaagggctaccccgacatcggctggaacccctgcggcggcgagagatacctggacttcctgagattcgccgtgttcgtgaacggcgagagcgtggaggagaacgccaacgtggtggtgagactgctgatcagaaagcccgagtgcttcggccccgccctgagaggcgagggcggcagcggcctgctggccgccatcgaggaggccatcagaatcagcgaggaccccgccagagacggccccggcatcagaagagacagaagaagagagcacttcggcgaggagccccccgaggagaacagagtgcacctgggccacgccatcatgagcttctacgccgccctgatcgacctgctgggcagatgcgcccccgagatgcacctgatccaggccggcaagggcgaggccctgagaatcagagccatcctgagaagcctggtgcccctggaggacctggtgggcatcatcagcctgcccctgcagatccccaccctgggcaaggacggcgccctggtgcagcccaagatgagcgccagcttcgtgcccgaccacaaggccagcatggtgctgttcctggacagagtgtacggcatcgagaaccaggacttcctgctgcacgtgctggacgtgggcttcctgcccgacatgagagccgccgccagcctggacaccgccaccttcagcaccaccgagatggccctggccctgaacagatacctgtgcctggccgtgctgcccctgatcaccaagtgcgcccccctgttcgccggcaccgagcacagagccatcatggtggacagcatgctgcacaccgtgtacagactgagcagaggcagaagcctgaccaaggcccagagagacgtgatcgaggactgcctgatgagcctgtgcagatacatcagacccagcatgctgcagcacctgctgagaagactggtgttcgacgtgcccatcctgaacgagttcgccaagatgcccctgaagctgctgaccaaccactacgagagatgctggaagtactactgcctgcccaccggctgggccaacttcggcgtgaccagcgaggaggagctgcacctgaccagaaagctgttctggggcatcttcgacagcctggcccacaagaagtacgaccccgagctgtacagaatggccatgccctgcctgtgcgccatcgccggcgccctgccccccgactacgtggacgccagctacagcagcaaggccgagaagaaggccaccgtggacgccgagggcaacttcgaccccagacccgtggagaccctgaacgtgatcatccccgagaagctggacagcttcatcaacaagttcgccgagtacacccacgagaagtgggccttcgacaagatccagaacaactggagctacggcgagaacatcgacgaggagctgaagacccaccccatgctgagaccctacaagaccttcagcgagaaggacaaggagatctacagatggcccatcaaggagagcctgaaggccatgatcgcctgggagtggaccatcgagaaggccagagagggcgaggaggagaagaccgagaagaagaagaccagaaagatcagccagagcgcccagacctacgaccccagagagggctacaacccccagccccccgacctgagcgccgtgaccctgagcagagagctgcaggccatggccgagcagctggccgagaactaccacaacacctggggcagaaagaagaagcaggagctggaggccaagggcggcggcacccaccccctgctggtgccctacgacaccctgaccgccaaggagaaggccagagacagagagaaggcccaggagctgctgaagttcctgcagatgaacggctacgccgtgaccagaggcctgaaggacatggagctggacagcagcagcatcgagaagagattcgccttcggcttcctgcagcagctgctgagatggatggacatcagccaggagttcatcgcccacctggaggccgtggtgagcagcggcagagtggagaagagcccccacgagcaggagatcaagttcttcgccaagatcctgctgcccctgatcaaccagtacttcaccaaccactgcctgtacttcctgagcacccccgccaaggtgctgggcagcggcggccacgccagcaacaaggagaaggagatgatcaccagcctgttctgcaagctggccgccctggtgagacacagagtgagcctgttcggcaccgacgcccccgccgtggtgaactgcctgcacatcctggccagaagcctggacgccagaaccgtgatgaagagcggccccgagatcgtgaaggccggcctgagaagcttcttcgagagcgccagcgaggacatcgagaagatggtggagaacctgagactgggcaaggtgagccaggccagaacccaggtgaagggcgtgggccagaacctgacctacaccaccgtggccctgctgcccgtgctgaccaccctgttccagcacatcgcccagcaccagttcggcgacgacgtgatcctggacgacgtgcaggtgagctgctacagaaccctgtgcagcatctacagcctgggcaccaccaagaacacctacgtggagaagctgagacccgccctgggcgagtgcctggccagactggccgccgccatgcccgtggccttcctggagccccagctgaacgagtacaacgcctgcagcgtgtacaccaccaagagccccagagagagagccatcctgggcctgcccaacagcgtggaggagatgtgccccgacatccccgtgctggagagactgatggccgacatcggcggcctggccgagagcggcgccagatacaccgagatgccccacgtgatcgagatcaccctgcccatgctgtgcagctacctgcccagatggtgggagagaggccccgaggccccccccagcgccctgcccgccggcgccccccccccctgcaccgccgtgaccagcgaccacctgaacagcctgctgggcaacatcctgagaatcatcgtgaacaacctgggcatcgacgaggccagctggatgaagagactggccgtgttcgcccagcccatcgtgagcagagccagacccgagctgctgcagagccacttcatccccaccatcggcagactgagaaagagagccggcaaggtggtgagcgaggaggagcagctgagactggaggccaaggccgaggcccaggagggcgagctgctggtgagagacgagttcagcgtgctgtgcagagacctgtacgccctgtaccccctgctgatcagatacgtggacaacaacagagcccagtggctgaccgagcccaaccccagcgccgaggagctgttcagaatggtgggcgagatcttcatctactggagcaagagccacaacttcaagagagaggagcagaacttcgtggtgcagaacgagatcaacaacatgagcttcctgaccgccgacaacaagagcaagatggccaagagcggcggcagcgaccaggagagaaccaagaagaagagaagaggcgacagatacagcgtgcagaccagcctgatcgtggccaccctgaagaagatgctgcccatcggcctgaacatgtgcgcccccaccgaccaggacctgatcaccctggccaagaccagatacgccctgaaggacaccgacgaggaggtgagagagttcctgcacaacaacctgcacctgcagggcaaggtggagggcagccccagcctgagatggcagatggccctgtacagaggcgtgcccggcagagaggaggacgccgacgaccccgagaagatcgtgagaagagtgcaggaggtgagcgccgtgctgtactacctggaccagaccgagcacccctacaagagcaagaaggccgtgtggcacaagctgctgagcaagcagagaagaagagccgtggtggcctgcttcagaatgacccccctgtacaacctgcccacccacagagcctgcaacatgttcctggagagctacaaggccgcctggatcctgaccgaggaccacagcttcgaggacagaatgatcgacgacctgagcaaggccggcgagcaggaggaggaggaggaggaggtggaggagaagaagcccgaccccctgcaccagctggtgctgcacttcagcagaaccgccctgaccgagaagagcaagctggacgaggactacctgtacatggcctacgccgacatcatggccaagagctgccacctggaggagggcggcgagaacggcgaggccgaggaggaggtggaggtgagcttcgaggagaagcagatggagaagcagagactgctgtaccagcaggccagactgcacaccagaggcgccgccgagatggtgctgcagatgatcagcgcctgcaagggcgagaccggcgccatggtgagcagcaccctgaagctgggcatcagcatcctgaacggcggcaacgccgaggtgcagcagaagatgctggactacctgaaggacaagaaggaggtgggcttcttccagagcatccaggccctgatgcagacctgcagcgtgctggacctgaacgccttcgagagacagaacaaggccgagggcctgggcatggtgaacgaggacggcaccgtgatcaacagacagaacggcgagaaggtgatggccgacgacgagttcacccaggacctgttcagattcctgcagctgctgtgcgagggccacaacaacgacttccagaactacctgagaacccagaccggcaacaccaccaccatcaacatcatcatctgcaccgtggactacctgctgagactgcaggagagcatcagcgacttctactggtactacagcggcaaggacgtgatcgaggagcagggcaagagaaacttcagcaaggccatgagcgtggccaagcaggtgttcaacagcctgaccgagtacatccagggcccctgcaccggcaaccagcagagcctggcccacagcagactgtgggacgccgtggtgggcttcctgcacgtgttcgcccacatgatgatgaagctggcccaggacagcagccagatcgagctgctgaaggagctgctggacctgcagaaggacatggtggtgatgctgctgagcctgctggagggcaacgtggtgaacggcatgatcgccagacagatggtggacatgctggtggagagcagcagcaacgtggagatgatcctgaagttcttcgacatgttcctgaagctgaaggacatcgtgggcagcgaggccttccaggactacgtgaccgaccccagaggcctgatcagcaagaaggacttccagaaggccatggacagccagaagcagttcagcggccccgagatccagttcctgctgagctgcagcgaggccgacgagaacgagatgatcaactgcgaggagttcgccaacagattccaggagcccgccagagacatcggcttcaacgtggccgtgctgctgaccaacctgagcgagcacgtgccccacgaccccagactgcacaacttcctggagctggccgagagcatcctggagtacttcagaccctacctgggcagaatcgagatcatgggcgccagcagaagaatcgagagaatctacttcgagatcagcgagaccaacagagcccagtgggagatgccccaggtgaaggagagcaagagacagttcatcttcgacgtggtgaacgagggcggcgaggccgagaagatggagctgttcgtgagcttctgcgaggacaccatcttcgagatgcagatcgccgcccagatcagcgagcccgagggcgagcccgagaccgacgaggacgagggcgccggcgccgccgaggccggcgccgagggcgccgaggagggcgccgccggcctggagggcaccgccgccaccgccgccgccggcgccaccgccagagtggtggccgccgccggcagagccctgagaggcctgagctacagaagcctgagaagaagagtgagaagactgagaagactgaccgccagagaggccgccaccgccgtggccgccctgctgtgggccgccgtgaccagagccggcgccgccggcgccggcgccgccgccggcgccctgggcctgctgtggggcagcctgttcggcggcggcctggtggagggcgccaagaaggtgaccgtgaccgagctgctggccggcatgcccgaccccaccagcgacgaggtgcacggcgagcagcccgccggccccggcggcgacgccgacggcgagggcgccagcgagggcgccggcgacgccgccgagggcgccggcgacgaggaggaggccgtgcacgaggccggccccggcggcgccgacggcgccgtggccgtgaccgacggcggccccttcagacccgagggcgccggcggcctgggcgacatgggcgacaccacccccgccgagccccccacccccgagggcagccccatcctgaagagaaagctgggcgtggacggcgtggaggaggagctgccccccgagcccgagcccgagcccgagcccgagctggagcccgagaaggccgacgccgagaacggcgagaaggaggaggtgcccgagcccacccccgagccccccaagaagcaggccccccccagccccccccccaagaaggaggaggccggcggcgagttctggggcgagctggaggtgcagagagtgaagttcctgaactacctgagcagaaacttctacaccctgagattcctggccctgttcctggccttcgccatcaacttcatcctgctgttctacaaggtgagcgacagcccccccggcgaggacgacatggagggcagcgccgccggcgacgtgagcggcgccggcagcggcggcagcagcggctggggcctgggcgccggcgaggaggccgagggcgacgaggacgagaacatggtgtactacttcctggaggagagcaccggctacatggagcccgccctgagatgcctgagcctgctgcacaccctggtggccttcctgtgcatcatcggctacaactgcctgaaggtgcccctggtgatcttcaagagagagaaggagctggccagaaagctggagttcgacggcctgtacatcaccgagcagcccgaggacgacgacgtgaagggccagtgggacagactggtgctgaacacccccagcttccccagcaactactgggacaagttcgtgaagagaaaggtgctggacaagcacggcgacatctacggcagagagagaatcgccgagctgctgggcatggacctggccaccctggagatcaccgcccacaacgagagaaagcccaaccccccccccggcctgctgacctggctgatgagcatcgacgtgaagtaccagatctggaagttcggcgtgatcttcaccgacaacagcttcctgtacctgggctggtacatggtgatgagcctgctgggccactacaacaacttcttcttcgccgcccacctgctggacatcgccatgggcgtgaagaccctgagaaccatcctgagcagcgtgacccacaacggcaagcagctggtgatgaccgtgggcctgctggccgtggtggtgtacctgtacaccgtggtggccttcaacttcttcagaaagttctacaacaagagcgaggacgaggacgagcccgacatgaagtgcgacgacatgatgacctgctacctgttccacatgtacgtgggcgtgagagccggcggcggcatcggcgacgagatcgaggaccccgccggcgacgagtacgagctgtacagagtggtgttcgacatcaccttcttcttcttcgtgatcgtgatcctgctggccatcatccagggcctgatcatcgacgccttcggcgagctgagagaccagcaggagcaggtgaaggaggacatggagaccaagtgcttcatctgcggcatcggcagcgactacttcgacaccaccccccacggcttcgagacccacaccctggaggagcacaacctggccaactacatgttcttcctgatgtacctgatcaacaaggacgagaccgagcacaccggccaggagagctacgtgtggaagatgtaccaggagagatgctgggacttcttccccgccggcgactgcttcagaaagcagtacgaggaccagctgagctag

SEQ ID NO: 97908 - DNA, 15117 bp, synthetic construct
  misc_feature 1..15117: note = Description of Artificial Sequence: Synthetic coding sequence
  source 1..15117: mol_type = other DNA
atgggcgacgccgagggcgaggacgaggtgcagttcctgagaaccgacgacgaggtggtgctgcagtgcagcgccaccgtgctgaaggagcagctgaagctgtgcctggccgccgagggcttcggcaacagactgtgcttcctggagcccaccagcaacgcccagaacgtgccccccgacctggccatctgctgcttcgtgctggagcagagcctgagcgtgagagccctgcaggagatgctggccaacaccgtggaggccggcgtggagagcagccagggcggcggccacagaaccctgctgtacggccacgccatcctgctgagacacgcccacagcagaatgtacctgagctgcctgaccaccagcagaagcatgaccgacaagctggccttcgacgtgggcctgcaggaggacgccaccggcgaggcctgctggtggaccatgcaccccgccagcaagcagagaagcgagggcgagaaggtgagagtgggcgacgacatcatcctggtgagcgtgagcagcgagagatacctgcacctgagcaccgccagcggcgagctgcaggtggacgccagcttcatgcagaccctgtggaacatgaaccccatctgcagcagatgcgaggagggcttcgtgaccggcggccacgtgctgagactgttccacggccacatggacgagtgcctgaccatcagccccgccgacagcgacgaccagagaagactggtgtactacgagggcggcgccgtgtgcacccacgccagaagcctgtggagactggagcccctgagaatcagctggagcggcagccacctgagatggggccagcccctgagagtgagacacgtgaccaccggccagtacctggccctgaccgaggaccagggcctggtggtggtggacgccagcaaggcccacaccaaggccaccagcttctgcttcagaatcagcaaggagaagctggacgtggcccccaagagagacgtggagggcatgggcccccccgagatcaagtacggcgagagcctgtgcttcgtgcagcacgtggccagcggcctgtggctgacctacgccgcccccgaccccaaggccctgagactgggcgtgctgaagaagaaggccatgctgcaccaggagggccacatggacgacgccctgagcctgaccagatgccagcaggaggagagccaggccgccagaatgatccacagcaccaacggcctgtacaaccagttcatcaagagcctggacagcttcagcggcaagcccagaggcagcggcccccccgccggcaccgccctgcccatcgagggcgtgatcctgagcctgcaggacctgatcatctacttcgagccccccagcgaggacctgcagcacgaggagaagcagagcaagctgagaagcctgagaaacagacagagcctgttccaggaggagggcatgctgagcatggtgctgaactgcatcgacagactgaacgtgtacaccaccgccgcccacttcgccgagttcgccggcgaggaggccgccgagagctggaaggagatcgtgaacctgctgtacgagctgctggccagcctgatcagaggcaacagaagcaactgcgccctgttcagcaccaacctggactggctggtgagcaagctggacagactggaggccagcagcggcatcctggaggtgctgtactgcgtgctgatcgagagccccgaggtgctgaacatcatccaggagaaccacatcaagagcatcatcagcctgctggacaagcacggcagaaaccacaaggtgctggacgtgctgtgcagcctgtgcgtgtgcaacggcgtggccgtgagaagcaaccaggacctgatcaccgagaacctgctgcccggcagagagctgctgctgcagaccaacctgatcaactacgtgaccagcatcagacccaacatcttcgtgggcagagccgagggcaccacccagtacagcaagtggtacttcgaggtgatggtggacgaggtgacccccttcctgaccgcccaggccacccacctgagagtgggctgggccctgaccgagggctacaccccctaccccggcgccggcgagggctggggcggcaacggcgtgggcgacgacctgtacagctacggcttcgacggcctgcacctgtggaccggccacgtggccagacccgtgaccagccccggccagcacctgctggcccccgaggacgtgatcagctgctgcctggacctgagcgtgcccagcatcagcttcagaatcaacggctgccccgtgcagggcgtgttcgagagcttcaacctggacggcctgttcttccccgtggtgagcttcagcgccggcgtgaaggtgagattcctgctgggcggcagacacggcgagttcaagttcctgcccccccccggctacgccccctgccacgaggccgtgctgcccagagagagactgcacctggagcccatcaaggagtacagaagagagggccccagaggcccccacctggtgggccccagcagatgcctgagccacaccgacttcgtgccctgccccgtggacaccgtgcagatcgtgctgcccccccacctggagagaatcagagagaagctggccgagaacatccacgagctgtgggccctgaccagaatcgagcagggctggacctacggccccgtgagagacgacaacaagagactgcacccctgcctggtggacttccacagcctgcccgagcccgagagaaactacaacctgcagatgagcggcgagaccctgaagaccctgctggccctgggctgccacgtgggcatggccgacgagaaggccgaggacaacctgaagaagaccaagctgcccaagacctacatgatgagcaacggctacaagcccgcccccctggacctgagccacgtgagactgacccccgcccagaccaccctggtggacagactggccgagaacggccacaacgtgtgggccagagacagagtgggccagggctggagctacagcgccgtgcaggacatccccgccagaagaaaccccagactggtgccctacagactgctggacgaggccaccaagagaagcaacagagacagcctgtgccaggccgtgagaaccctgctgggctacggctacaacatcgagccccccgaccaggagcccagccaggtggagaaccagagcagatgcgacagagtgagaatcttcagagccgagaagagctacaccgtgcagagcggcagatggtacttcgagttcgaggccgtgaccaccggcgagatgagagtgggctgggccagacccgagctgagacccgacgtggagctgggcgccgacgagctggcctacgtgttcaacggccacagaggccagagatggcacctgggcagcgagcccttcggcagaccctggcagcccggcgacgtggtgggctgcatgatcgacctgaccgagaacaccatcatcttcaccctgaacggcgaggtgctgatgagcgacagcggcagcgagaccgccttcagagagatcgagatcggcgacggcttcctgcccgtgtgcagcctgggccccggccaggtgggccacctgaacctgggccaggacgtgagcagcctgagattcttcgccatctgcggcctgcaggagggcttcgagcccttcgccatcaacatgcagagacccgtgaccacctggttcagcaagggcctgccccagttcgagcccgtgcccctggagcacccccactacgaggtgagcagagtggacggcaccgtggacacccccccctgcctgagactgacccacagaacctggggcagccagaacagcctggtggagatgctgttcctgagactgagcctgcccgtgcagttccaccagcacttcagatgcaccgccggcgccacccccctggccccccccggcctgcagccccccgccgaggacgaggccagagccgccgagcccgaccccgactacgagaacctgagaagaagcgccggcggctggagcgaggccgagaacggcaaggagggcaccgccaaggagggcgcccccggcggcaccccccaggccggcggcgaggcccagcccgccagagccgagaacgagaaggacgccaccaccgagaagaacaagaagagaggcttcctgttcaaggccaagaaggtggccatgatgacccagccccccgccacccccaccctgcccagactgccccacgacgtggtgcccgccgacaacagagacgaccccgagatcatcctgaacaccaccacctactactacagcgtgagagtgttcgccggccaggagcccagctgcgtgtgggccggctgggtgacccccgactaccaccagcacgacatgagcttcgacctgagcaaggtgagagtggtgaccgtgaccatgggcgacgagcagggcaacgtgcacagcagcctgaagtgcagcaactgctacatggtgtggggcggcgacttcgtgagccccggccagcagggcagaatcagccacaccgacctggtgatcggctgcctggtggacctggccaccggcctgatgaccttcaccgccaacggcaaggagagcaacaccttcttccaggtggagcccaacaccaagctgttccccgccgtgttcgtgctgcccacccaccagaacgtgatccagttcgagctgggcaagcagaagaacatcatgcccctgagcgccgccatgttccagagcgagagaaagaaccccgccccccagtgcccccccagactggagatgcagatgctgatgcccgtgagctggagcagaatgcccaaccacttcctgcaggtggagaccagaagagccggcgagagactgggctgggccgtgcagtgccaggagcccctgaccatgatggccctgcacatccccgaggagaacagatgcatggacatcctggagctgagcgagagactggacctgcagagattccacagccacaccctgagactgtacagagccgtgtgcgccctgggcaacaacagagtggcccacgccctgtgcagccacgtggaccaggcccagctgctgcacgccctggaggacgcccacctgcccggccccctgagagccggctactacgacctgctgatcagcatccacctggagagcgcctgcagaagcagaagaagcatgctgagcgagtacatcgtgcccctgacccccgagaccagagccatcaccctgttcccccccggcagaagcaccgagaacggccaccccagacacggcctgcccggcgtgggcgtgaccaccagcctgagacccccccaccacttcagccccccctgcttcgtggccgccctgcccgccgccggcgccgccgaggcccccgccagactgagccccgccatccccctggaggccctgagagacaaggccctgagaatgctgggcgaggccgtgagagacggcggccagcacgccagagaccccgtgggcggcagcgtggagttccagttcgtgcccgtgctgaagctggtgagcaccctgctggtgatgggcatcttcggcgacgaggacgtgaagcagatcctgaagatgatcgagcccgaggtgttcaccgaggaggaggaggaggaggacgaggaggaggagggcgaggaggaggacgaggaggagaaggaggaggacgaggaggagaccgcccaggagaaggaggacgaggagaaggaggaggaggaggccgccgagggcgagaaggaggagggcctggaggagggcctgctgcagatgaagctgcccgagagcgtgaagctgcagatgtgccacctgctggagtacttctgcgaccaggagctgcagcacagagtggagagcctggccgccttcgccgagagatacgtggacaagctgcaggccaaccagagaagcagatacggcctgctgatcaaggccttcagcatgaccgccgccgagaccgccagaagaaccagagagttcagaagccccccccaggagcagatcaacatgctgctgcagttcaaggacggcaccgacgaggaggactgccccctgcccgaggagatcagacaggacctgctggacttccaccaggacctgctggcccactgcggcatccagctggacggcgaggaggaggagcccgaggaggagaccaccctgggcagcagactgatgagcctgctggagaaggtgagactggtgaagaagaaggaggagaagcccgaggaggagagaagcgccgaggagagcaagcccagaagcctgcaggagctggtgagccacatggtggtgagatgggcccaggaggacttcgtgcagagccccgagctggtgagagccatgttcagcctgctgcacagacagtacgacggcctgggcgagctgctgagagccctgcccagagcctacaccatcagccccagcagcgtggaggacaccatgagcctgctggagtgcctgggccagatcagaagcctgctgatcgtgcagatgggcccccaggaggagaacctgatgatccagagcatcggcaacatcatgaacaacaaggtgttctaccagcaccccaacctgatgagagccctgggcatgcacgagaccgtgatggaggtgatggtgaacgtgctgggcggcggcgagagcaaggagatcagattccccaagatggtgaccagctgctgcagattcctgtgctacttctgcagaatcagcagacagaaccagagaagcatgttcgaccacctgagctacctgctggagaacagcggcatcggcctgggcatgcagggcagcacccccctggacgtggccgccgccagcgtgatcgacaacaacgagctggccctggccctgcaggagcaggacctggagaaggtggtgagctacctggccggctgcggcctgcagagctgccccatgctggtggccaagggctaccccgacatcggctggaacccctgcggcggcgagagatacctggacttcctgagattcgccgtgttcgtgaacggcgagagcgtggaggagaacgccaacgtggtggtgagactgctgatcagaaagcccgagtgcttcggccccgccctgagaggcgagggcggcagcggcctgctggccgccatcgaggaggccatcagaatcagcgaggaccccgccagagacggccccggcatcagaagagacagaagaagagagcacttcggcgaggagccccccgaggagaacagagtgcacctgggccacgccatcatgagcttctacgccgccctgatcgacctgctgggcagatgcgcccccgagatgcacctgatccaggccggcaagggcgaggccctgagaatcagagccatcctgagaagcctggtgcccctggaggacctggtgggcatcatcagcctgcccctgcagatccccaccctgggcaaggacggcgccctggtgcagcccaagatgagcgccagcttcgtgcccgaccacaaggccagcatggtgctgttcctggacagagtgtacggcatcgagaaccaggacttcctgctgcacgtgctggacgtgggcttcctgcccgacatgagagccgccgccagcctggacaccgccaccttcagcaccaccgagatggccctggccctgaacagatacctgtgcctggccgtgctgcccctgatcaccaagtgcgcccccctgttcgccggcaccgagcacagagccatcatggtggacagcatgctgcacaccgtgtacagactgagcagaggcagaagcctgaccaaggcccagagagacgtgatcgaggactgcctgatgagcctgtgcagatacatcagacccagcatgctgcagcacctgctgagaagactggtgttcgacgtgcccatcctgaacgagttcgccaagatgcccctgaagctgctgaccaaccactacgagagatgctggaagtactactgcctgcccaccggctgggccaacttcggcgtgaccagcgaggaggagctgcacctgaccagaaagctgttctggggcatcttcgacagcctggcccacaagaagtacgaccccgagctgtacagaatggccatgccctgcctgtgcgccatcgccggcgccctgccccccgactacgtggacgccagctacagcagcaaggccgagaagaaggccaccgtggacgccgagggcaacttcgaccccagacccgtggagaccctgaacgtgatcatccccgagaagctggacagcttcatcaacaagttcgccgagtacacccacgagaagtgggccttcgacaagatccagaacaactggagctacggcgagaacatcgacgaggagctgaagacccaccccatgctgagaccctacaagaccttcagcgagaaggacaaggagatctacagatggcccatcaaggagagcctgaaggccatgatcgcctgggagtggaccatcgagaaggccagagagggcgaggaggagaagaccgagaagaagaagaccagaaagatcagccagagcgcccagacctacgaccccagagagggctacaacccccagccccccgacctgagcgccgtgaccctgagcagagagctgcaggccatggccgagcagctggccgagaactaccacaacacctggggcagaaagaagaagcaggagctggaggccaagggcggcggcacccaccccctgctggtgccctacgacaccctgaccgccaaggagaaggccagagacagagagaaggcccaggagctgctgaagttcctgcagatgaacggctacgccgtgaccagaggcctgaaggacatggagctggacagcagcagcatcgagaagagattcgccttcggcttcctgcagcagctgctgagatggatggacatcagccaggagttcatcgcccacctggaggccgtggtgagcagcggcagagtggagaagagcccccacgagcaggagatcaagttcttcgccaagatcctgctgcccctgatcaaccagtacttcaccaaccactgcctgtacttcctgagcacccccgccaaggtgctgggcagcggcggccacgccagcaacaaggagaaggagatgatcaccagcctgttctgcaagctggccgccctggtgagacacagagtgagcctgttcggcaccgacgcccccgccgtggtgaactgcctgcacatcctggccagaagcctggacgccagaaccgtgatgaagagcggccccgagatcgtgaaggccggcctgagaagcttcttcgagagcgccagcgaggacatcgagaagatggtggagaacctgagactgggcaaggtgagccaggccagaacccaggtgaagggcgtgggccagaacctgacctacaccaccgtggccctgctgcccgtgctgaccaccctgttccagcacatcgcccagcaccagttcggcgacgacgtgatcctggacgacgtgcaggtgagctgctacagaaccctgtgcagcatctacagcctgggcaccaccaagaacacctacgtggagaagctgagacccgccctgggcgagtgcctggccagactggccgccgccatgcccgtggccttcctggagccccagctgaacgagtacaacgcctgcagcgtgtacaccaccaagagccccagagagagagccatcctgggcctgcccaacagcgtggaggagatgtgccccgacatccccgtgctggagagactgatggccgacatcggcggcctggccgagagcggcgccagatacaccgagatgccccacgtgatcgagatcaccctgcccatgctgtgcagctacctgcccagatggtgggagagaggccccgaggccccccccagcgccctgcccgccggcgccccccccccctgcaccgccgtgaccagcgaccacctgaacagcctgctgggcaacatcctgagaatcatcgtgaacaacctgggcatcgacgaggccagctggatgaagagactggccgtgttcgcccagcccatcgtgagcagagccagacccgagctgctgcagagccacttcatccccaccatcggcagactgagaaagagagccggcaaggtggtgagcgaggaggagcagctgagactggaggccaaggccgaggcccaggagggcgagctgctggtgagagacgagttcagcgtgctgtgcagagacctgtacgccctgtaccccctgctgatcagatacgtggacaacaacagagcccagtggctgaccgagcccaaccccagcgccgaggagctgttcagaatggtgggcgagatcttcatctactggagcaagagccacaacttcaagagagaggagcagaacttcgtggtgcagaacgagatcaacaacatgagcttcctgaccgccgacaacaagagcaagatggccaaggccggcgacatccagagcggcggcagcgaccaggagagaaccaagaagaagagaagaggcgacagatacagcgtgcagaccagcctgatcgtggccaccctgaagaagatgctgcccatcggcctgaacatgtgcgcccccaccgaccaggacctgatcaccctggccaagaccagatacgccctgaaggacaccgacgaggaggtgagagagttcctgcacaacaacctgcacctgcagggcaaggtggagggcagccccagcctgagatggcagatggccctgtacagaggcgtgcccggcagagaggaggacgccgacgaccccgagaagatcgtgagaagagtgcaggaggtgagcgccgtgctgtactacctggaccagaccgagcacccctacaagagcaagaaggccgtgtggcacaagctgctgagcaagcagagaagaagagccgtggtggcctgcttcagaatgacccccctgtacaacctgcccacccacagagcctgcaacatgttcctggagagctacaaggccgcctggatcctgaccgaggaccacagcttcgaggacagaatgatcgacgacctgagcaaggccggcgagcaggaggaggaggaggaggaggtggaggagaagaagcccgaccccctgcaccagctggtgctgcacttcagcagaaccgccctgaccgagaagagcaagctggacgaggactacctgtacatggcctacgccgacatcatggccaagagctgccacctggaggagggcggcgagaacggcgaggccgaggaggaggtggaggtgagcttcgaggagaagcagatggagaagcagagactgctgtaccagcaggccagactgcacaccagaggcgccgccgagatggtgctgcagatgatcagcgcctgcaagggcgagaccggcgccatggtgagcagcaccctgaagctgggcatcagcatcctgaacggcggcaacgccgaggtgcagcagaagatgctggactacctgaaggacaagaaggaggtgggcttcttccagagcatccaggccctgatgcagacctgcagcgtgctggacctgaacgccttcgagagacagaacaaggccgagggcctgggcatggtgaacgaggacggcaccgtgatcaacagacagaacggcgagaaggtgatggccgacgacgagttcacccaggacctgttcagattcctgcagctgctgtgcgagggccacaacaacgacttccagaactacctgagaacccagaccggcaacaccaccaccatcaacatcatcatctgcaccgtggactacctgctgagactgcaggagagcatcagcgacttctactggtactacagcggcaaggacgtgatcgaggagcagggcaagagaaacttcagcaaggccatgagcgtggccaagcaggtgttcaacagcctgaccgagtacatccagggcccctgcaccggcaaccagcagagcctggcccacagcagactgtgggacgccgtggtgggcttcctgcacgtgttcgcccacatgatgatgaagctggcccaggacagcagccagatcgagctgctgaaggagctgctggacctgcagaaggacatggtggtgatgctgctgagcctgctggagggcaacgtggtgaacggcatgatcgccagacagatggtggacatgctggtggagagcagcagcaacgtggagatgatcctgaagttcttcgacatgttcctgaagctgaaggacatcgtgggcagcgaggccttccaggactacgtgaccgaccccagaggcctgatcagcaagaaggacttccagaaggccatggacagccagaagcagttcagcggccccgagatccagttcctgctgagctgcagcgaggccgacgagaacgagatgatcaactgcgaggagttcgccaacagattccaggagcccgccagagacatcggcttcaacgtggccgtgctgctgaccaacctgagcgagcacgtgccccacgaccccagactgcacaacttcctggagctggccgagagcatcctggagtacttcagaccctacctgggcagaatcgagatcatgggcgccagcagaagaatcgagagaatctacttcgagatcagcgagaccaacagagcccagtgggagatgccccaggtgaaggagagcaagagacagttcatcttcgacgtggtgaacgagggcggcgaggccgagaagatggagctgttcgtgagcttctgcgaggacaccatcttcgagatgcagatcgccgcccagatcagcgagcccgagggcgagcccgagaccgacgaggacgagggcgccggcgccgccgaggccggcgccgagggcgccgaggagggcgccgccggcctggagggcaccgccgccaccgccgccgccggcgccaccgccagagtggtggccgccgccggcagagccctgagaggcctgagctacagaagcctgagaagaagagtgagaagactgagaagactgaccgccagagaggccgccaccgccgtggccgccctgctgtgggccgccgtgaccagagccggcgccgccggcgccggcgccgccgccggcgccctgggcctgctgtggggcagcctgttcggcggcggcctggtggagggcgccaagaaggtgaccgtgaccgagctgctggccggcatgcccgaccccaccagcgacgaggtgcacggcgagcagcccgccggccccggcggcgacgccgacggcgagggcgccagcgagggcgccggcgacgccgccgagggcgccggcgacgaggaggaggccgtgcacgaggccggccccggcggcgccgacggcgccgtggccgtgaccgacggcggccccttcagacccgagggcgccggcggcctgggcgacatgggcgacaccacccccgccgagccccccacccccgagggcagccccatcctgaagagaaagctgggcgtggacggcgtggaggaggagctgccccccgagcccgagcccgagcccgagcccgagctggagcccgagaaggccgacgccgagaacggcgagaaggaggaggtgcccgagcccacccccgagccccccaagaagcaggccccccccagccccccccccaagaaggaggaggccggcggcgagttctggggcgagctggaggtgcagagagtgaagttcctgaactacctgagcagaaacttctacaccctgagattcctggccctgttcctggccttcgccatcaacttcatcctgctgttctacaaggtgagcgacagcccccccggcgaggacgacatggagggcagcgccgccggcgacgtgagcggcgccggcagcggcggcagcagcggctggggcctgggcgccggcgaggaggccgagggcgacgaggacgagaacatggtgtactacttcctggaggagagcaccggctacatggagcccgccctgagatgcctgagcctgctgcacaccctggtggccttcctgtgcatcatcggctacaactgcctgaaggtgcccctggtgatcttcaagagagagaaggagctggccagaaagctggagttcgacggcctgtacatcaccgagcagcccgaggacgacgacgtgaagggccagtgggacagactggtgctgaacacccccagcttccccagcaactactgggacaagttcgtgaagagaaaggtgctggacaagcacggcgacatctacggcagagagagaatcgccgagctgctgggcatggacctggccaccctggagatcaccgcccacaacgagagaaagcccaaccccccccccggcctgctgacctggctgatgagcatcgacgtgaagtaccagatctggaagttcggcgtgatcttcaccgacaacagcttcctgtacctgggctggtacatggtgatgagcctgctgggccactacaacaacttcttcttcgccgcccacctgctggacatcgccatgggcgtgaagaccctgagaaccatcctgagcagcgtgacccacaacggcaagcagctggtgatgaccgtgggcctgctggccgtggtggtgtacctgtacaccgtggtggccttcaacttcttcagaaagttctacaacaagagcgaggacgaggacgagcccgacatgaagtgcgacgacatgatgacctgctacctgttccacatgtacgtgggcgtgagagccggcggcggcatcggcgacgagatcgaggaccccgccggcgacgagtacgagctgtacagagtggtgttcgacatcaccttcttcttcttcgtgatcgtgatcctgctggccatcatccagggcctgatcatcgacgccttcggcgagctgagagaccagcaggagcaggtgaaggaggacatggagaccaagtgcttcatctgcggcatcggcagcgactacttcgacaccaccccccacggcttcgagacccacaccctggaggagcacaacctggccaactacatgttcttcctgatgtacctgatcaacaaggacgagaccgagcacaccggccaggagagctacgtgtggaagatgtaccaggagagatgctgggacttcttccccgccggcgactgcttcagaaagcagtacgaggaccagctgagctag

SEQ ID NO: 97909 - DNA, 15102 bp, synthetic construct
  misc_feature 1..15102: note = Description of Artificial Sequence: Synthetic coding sequence
  source 1..15102: mol_type = other DNA
atgggcgacgccgagggcgaggacgaggtgcagttcctgagaaccgacgacgaggtggtgctgcagtgcagcgccaccgtgctgaaggagcagctgaagctgtgcctggccgccgagggcttcggcaacagactgtgcttcctggagcccaccagcaacgcccagaacgtgccccccgacctggccatctgctgcttcgtgctggagcagagcctgagcgtgagagccctgcaggagatgctggccaacaccgtggaggccggcgtggagagcagccagggcggcggccacagaaccctgctgtacggccacgccatcctgctgagacacgcccacagcagaatgtacctgagctgcctgaccaccagcagaagcatgaccgacaagctggccttcgacgtgggcctgcaggaggacgccaccggcgaggcctgctggtggaccatgcaccccgccagcaagcagagaagcgagggcgagaaggtgagagtgggcgacgacatcatcctggtgagcgtgagcagcgagagatacctgcacctgagcaccgccagcggcgagctgcaggtggacgccagcttcatgcagaccctgtggaacatgaaccccatctgcagcagatgcgaggagggcttcgtgaccggcggccacgtgctgagactgttccacggccacatggacgagtgcctgaccatcagccccgccgacagcgacgaccagagaagactggtgtactacgagggcggcgccgtgtgcacccacgccagaagcctgtggagactggagcccctgagaatcagctggagcggcagccacctgagatggggccagcccctgagagtgagacacgtgaccaccggccagtacctggccctgaccgaggaccagggcctggtggtggtggacgccagcaaggcccacaccaaggccaccagcttctgcttcagaatcagcaaggagaagctggacgtggcccccaagagagacgtggagggcatgggcccccccgagatcaagtacggcgagagcctgtgcttcgtgcagcacgtggccagcggcctgtggctgacctacgccgcccccgaccccaaggccctgagactgggcgtgctgaagaagaaggccatgctgcaccaggagggccacatggacgacgccctgagcctgaccagatgccagcaggaggagagccaggccgccagaatgatccacagcaccaacggcctgtacaaccagttcatcaagagcctggacagcttcagcggcaagcccagaggcagcggcccccccgccggcaccgccctgcccatcgagggcgtgatcctgagcctgcaggacctgatcatctacttcgagccccccagcgaggacctgcagcacgaggagaagcagagcaagctgagaagcctgagaaacagacagagcctgttccaggaggagggcatgctgagcatggtgctgaactgcatcgacagactgaacgtgtacaccaccgccgcccacttcgccgagttcgccggcgaggaggccgccgagagctggaaggagatcgtgaacctgctgtacgagctgctggccagcctgatcagaggcaacagaagcaactgcgccctgttcagcaccaacctggactggctggtgagcaagctggacagactggaggccagcagcggcatcctggaggtgctgtactgcgtgctgatcgagagccccgaggtgctgaacatcatccaggagaaccacatcaagagcatcatcagcctgctggacaagcacggcagaaaccacaaggtgctggacgtgctgtgcagcctgtgcgtgtgcaacggcgtggccgtgagaagcaaccaggacctgatcaccgagaacctgctgcccggcagagagctgctgctgcagaccaacctgatcaactacgtgaccagcatcagacccaacatcttcgtgggcagagccgagggcaccacccagtacagcaagtggtacttcgaggtgatggtggacgaggtgacccccttcctgaccgcccaggccacccacctgagagtgggctgggccctgaccgagggctacaccccctaccccggcgccggcgagggctggggcggcaacggcgtgggcgacgacctgtacagctacggcttcgacggcctgcacctgtggaccggccacgtggccagacccgtgaccagccccggccagcacctgctggcccccgaggacgtgatcagctgctgcctggacctgagcgtgcccagcatcagcttcagaatcaacggctgccccgtgcagggcgtgttcgagagcttcaacctggacggcctgttcttccccgtggtgagcttcagcgccggcgtgaaggtgagattcctgctgggcggcagacacggcgagttcaagttcctgcccccccccggctacgccccctgccacgaggccgtgctgcccagagagagactgcacctggagcccatcaaggagtacagaagagagggccccagaggcccccacctggtgggccccagcagatgcctgagccacaccgacttcgtgccctgccccgtggacaccgtgcagatcgtgctgcccccccacctggagagaatcagagagaagctggccgagaacatccacgagctgtgggccctgaccagaatcgagcagggctggacctacggccccgtgagagacgacaacaagagactgcacccctgcctggtggacttccacagcctgcccgagcccgagagaaactacaacctgcagatgagcggcgagaccctgaagaccctgctggccctgggctgccacgtgggcatggccgacgagaaggccgaggacaacctgaagaagaccaagctgcccaagacctacatgatgagcaacggctacaagcccgcccccctggacctgagccacgtgagactgacccccgcccagaccaccctggtggacagactggccgagaacggccacaacgtgtgggccagagacagagtgggccagggctggagctacagcgccgtgcaggacatccccgccagaagaaaccccagactggtgccctacagactgctggacgaggccaccaagagaagcaacagagacagcctgtgccaggccgtgagaaccctgctgggctacggctacaacatcgagccccccgaccaggagcccagccaggtggagaaccagagcagatgcgacagagtgagaatcttcagagccgagaagagctacaccgtgcagagcggcagatggtacttcgagttcgaggccgtgaccaccggcgagatgagagtgggctgggccagacccgagctgagacccgacgtggagctgggcgccgacgagctggcctacgtgttcaacggccacagaggccagagatggcacctgggcagcgagcccttcggcagaccctggcagcccggcgacgtggtgggctgcatgatcgacctgaccgagaacaccatcatcttcaccctgaacggcgaggtgctgatgagcgacagcggcagcgagaccgccttcagagagatcgagatcggcgacggcttcctgcccgtgtgcagcctgggccccggccaggtgggccacctgaacctgggccaggacgtgagcagcctgagattcttcgccatctgcggcctgcaggagggcttcgagcccttcgccatcaacatgcagagacccgtgaccacctggttcagcaagggcctgccccagttcgagcccgtgcccctggagcacccccactacgaggtgagcagagtggacggcaccgtggacacccccccctgcctgagactgacccacagaacctggggcagccagaacagcctggtggagatgctgttcctgagactgagcctgcccgtgcagttccaccagcacttcagatgcaccgccggcgccacccccctggccccccccggcctgcagccccccgccgaggacgaggccagagccgccgagcccgaccccgactacgagaacctgagaagaagcgccggcggctggagcgaggccgagaacggcaaggagggcaccgccaaggagggcgcccccggcggcaccccccaggccggcggcgaggcccagcccgccagagccgagaacgagaaggacgccaccaccgagaagaacaagaagagaggcttcctgttcaaggccaagaaggtggccatgatgacccagccccccgccacccccaccctgcccagactgccccacgacgtggtgcccgccgacaacagagacgaccccgagatcatcctgaacaccaccacctactactacagcgtgagagtgttcgccggccaggagcccagctgcgtgtgggccggctgggtgacccccgactaccaccagcacgacatgagcttcgacctgagcaaggtgagagtggtgaccgtgaccatgggcgacgagcagggcaacgtgcacagcagcctgaagtgcagcaactgctacatggtgtggggcggcgacttcgtgagccccggccagcagggcagaatcagccacaccgacctggtgatcggctgcctggtggacctggccaccggcctgatgaccttcaccgccaacggcaaggagagcaacaccttcttccaggtggagcccaacaccaagctgttccccgccgtgttcgtgctgcccacccaccagaacgtgatccagttcgagctgggcaagcagaagaacatcatgcccctgagcgccgccatgttccagagcgagagaaagaaccccgccccccagtgcccccccagactggagatgcagatgctgatgcccgtgagctggagcagaatgcccaaccacttcctgcaggtggagaccagaagagccggcgagagactgggctgggccgtgcagtgccaggagcccctgaccatgatggccctgcacatccccgaggagaacagatgcatggacatcctggagctgagcgagagactggacctgcagagattccacagccacaccctgagactgtacagagccgtgtgcgccctgggcaacaacagagtggcccacgccctgtgcagccacgtggaccaggcccagctgctgcacgccctggaggacgcccacctgcccggccccctgagagccggctactacgacctgctgatcagcatccacctggagagcgcctgcagaagcagaagaagcatgctgagcgagtacatcgtgcccctgacccccgagaccagagccatcaccctgttcccccccggcagaagcaccgagaacggccaccccagacacggcctgcccggcgtgggcgtgaccaccagcctgagacccccccaccacttcagccccccctgcttcgtggccgccctgcccgccgccggcgccgccgaggcccccgccagactgagccccgccatccccctggaggccctgagagacaaggccctgagaatgctgggcgaggccgtgagagacggcggccagcacgccagagaccccgtgggcggcagcgtggagttccagttcgtgcccgtgctgaagctggtgagcaccctgctggtgatgggcatcttcggcgacgaggacgtgaagcagatcctgaagatgatcgagcccgaggtgttcaccgaggaggaggaggaggaggacgaggaggaggagggcgaggaggaggacgaggaggagaaggaggaggacgaggaggagaccgcccaggagaaggaggacgaggagaaggaggaggaggaggccgccgagggcgagaaggaggagggcctggaggagggcctgctgcagatgaagctgcccgagagcgtgaagctgcagatgtgccacctgctggagtacttctgcgaccaggagctgcagcacagagtggagagcctggccgccttcgccgagagatacgtggacaagctgcaggccaaccagagaagcagatacggcctgctgatcaaggccttcagcatgaccgccgccgagaccgccagaagaaccagagagttcagaagccccccccaggagcagatcaacatgctgctgcagttcaaggacggcaccgacgaggaggactgccccctgcccgaggagatcagacaggacctgctggacttccaccaggacctgctggcccactgcggcatccagctggacggcgaggaggaggagcccgaggaggagaccaccctgggcagcagactgatgagcctgctggagaaggtgagactggtgaagaagaaggaggagaagcccgaggaggagagaagcgccgaggagagcaagcccagaagcctgcaggagctggtgagccacatggtggtgagatgggcccaggaggacttcgtgcagagccccgagctggtgagagccatgttcagcctgctgcacagacagtacgacggcctgggcgagctgctgagagccctgcccagagcctacaccatcagccccagcagcgtggaggacaccatgagcctgctggagtgcctgggccagatcagaagcctgctgatcgtgcagatgggcccccaggaggagaacctgatgatccagagcatcggcaacatcatgaacaacaaggtgttctaccagcaccccaacctgatgagagccctgggcatgcacgagaccgtgatggaggtgatggtgaacgtgctgggcggcggcgagagcaaggagatcagattccccaagatggtgaccagctgctgcagattcctgtgctacttctgcagaatcagcagacagaaccagagaagcatgttcgaccacctgagctacctgctggagaacagcggcatcggcctgggcatgcagggcagcacccccctggacgtggccgccgccagcgtgatcgacaacaacgagctggccctggccctgcaggagcaggacctggagaaggtggtgagctacctggccggctgcggcctgcagagctgccccatgctggtggccaagggctaccccgacatcggctggaacccctgcggcggcgagagatacctggacttcctgagattcgccgtgttcgtgaacggcgagagcgtggaggagaacgccaacgtggtggtgagactgctgatcagaaagcccgagtgcttcggccccgccctgagaggcgagggcggcagcggcctgctggccgccatcgaggaggccatcagaatcagcgaggaccccgccagagacggccccggcatcagaagagacagaagaagagagcacttcggcgaggagccccccgaggagaacagagtgcacctgggccacgccatcatgagcttctacgccgccctgatcgacctgctgggcagatgcgcccccgagatgcacctgatccaggccggcaagggcgaggccctgagaatcagagccatcctgagaagcctggtgcccctggaggacctggtgggcatcatcagcctgcccctgcagatccccaccctgggcaaggacggcgccctggtgcagcccaagatgagcgccagcttcgtgcccgaccacaaggccagcatggtgctgttcctggacagagtgtacggcatcgagaaccaggacttcctgctgcacgtgctggacgtgggcttcctgcccgacatgagagccgccgccagcctggacaccgccaccttcagcaccaccgagatggccctggccctgaacagatacctgtgcctggccgtgctgcccctgatcaccaagtgcgcccccctgttcgccggcaccgagcacagagccatcatggtggacagcatgctgcacaccgtgtacagactgagcagaggcagaagcctgaccaaggcccagagagacgtgatcgaggactgcctgatgagcctgtgcagatacatcagacccagcatgctgcagcacctgctgagaagactggtgttcgacgtgcccatcctgaacgagttcgccaagatgcccctgaagctgctgaccaaccactacgagagatgctggaagtactactgcctgcccaccggctgggccaacttcggcgtgaccagcgaggaggagctgcacctgaccagaaagctgttctggggcatcttcgacagcctggcccacaagaagtacgaccccgagctgtacagaatggccatgccctgcctgtgcgccatcgccggcgccctgccccccgactacgtggacgccagctacagcagcaaggccgagaagaaggccaccgtggacgccgagggcaacttcgaccccagacccgtggagaccctgaacgtgatcatccccgagaagctggacagcttcatcaacaagttcgccgagtacacccacgagaagtgggccttcgacaagatccagaacaactggagctacggcgagaacatcgacgaggagctgaagacccaccccatgctgagaccctacaagaccttcagcgagaaggacaaggagatctacagatggcccatcaaggagagcctgaaggccatgatcgcctgggagtggaccatcgagaaggccagagagggcgaggaggagaagaccgagaagaagaagaccagaaagatcagccagagcgcccagacctacgaccccagagagggctacaacccccagccccccgacctgagcgccgtgaccctgagcagagagctgcaggccatggccgagcagctggccgagaactaccacaacacctggggcagaaagaagaagcaggagctggaggccaagggcggcggcacccaccccctgctggtgccctacgacaccctgaccgccaaggagaaggccagagacagagagaaggcccaggagctgctgaagttcctgcagatgaacggctacgccgtgaccagaggcctgaaggacatggagctggacagcagcagcatcgagaagagattcgccttcggcttcctgcagcagctgctgagatggatggacatcagccaggagttcatcgcccacctggaggccgtggtgagcagcggcagagtggagaagagcccccacgagcaggagatcaagttcttcgccaagatcctgctgcccctgatcaaccagtacttcaccaaccactgcctgtacttcctgagcacccccgccaaggtgctgggcagcggcggccacgccagcaacaaggagaaggagatgatcaccagcctgttctgcaagctggccgccctggtgagacacagagtgagcctgttcggcaccgacgcccccgccgtggtgaactgcctgcacatcctggccagaagcctggacgccagaaccgtgatgaagagcggccccgagatcgtgaaggccggcctgagaagcttcttcgagagcgccagcgaggacatcgagaagatggtggagaacctgagactgggcaaggtgagccaggccagaacccaggtgaagggcgtgggccagaacctgacctacaccaccgtggccctgctgcccgtgctgaccaccctgttccagcacatcgcccagcaccagttcggcgacgacgtgatcctggacgacgtgcaggtgagctgctacagaaccctgtgcagcatctacagcctgggcaccaccaagaacacctacgtggagaagctgagacccgccctgggcgagtgcctggccagactggccgccgccatgcccgtggccttcctggagccccagctgaacgagtacaacgcctgcagcgtgtacaccaccaagagccccagagagagagccatcctgggcctgcccaacagcgtggaggagatgtgccccgacatccccgtgctggagagactgatggccgacatcggcggcctggccgagagcggcgccagatacaccgagatgccccacgtgatcgagatcaccctgcccatgctgtgcagctacctgcccagatggtgggagagaggccccgaggccccccccagcgccctgcccgccggcgccccccccccctgcaccgccgtgaccagcgaccacctgaacagcctgctgggcaacatcctgagaatcatcgtgaacaacctgggcatcgacgaggccagctggatgaagagactggccgtgttcgcccagcccatcgtgagcagagccagacccgagctgctgcagagccacttcatccccaccatcggcagactgagaaagagagccggcaaggtggtgagcgaggaggagcagctgagactggaggccaaggccgaggcccaggagggcgagctgctggtgagagacgagttcagcgtgctgtgcagagacctgtacgccctgtaccccctgctgatcagatacgtggacaacaacagagcccagtggctgaccgagcccaaccccagcgccgaggagctgttcagaatggtgggcgagatcttcatctactggagcaagagccacaacttcaagagagaggagcagaacttcgtggtgcagaacgagatcaacaacatgagcttcctgaccgccgacaacaagagcaagatggccaaggccggcgacatccagagcggcggcagcgaccaggagagaaccaagaagaagagaagaggcgacagatacagcgtgcagaccagcctgatcgtggccaccctgaagaagatgctgcccatcggcctgaacatgtgcgcccccaccgaccaggacctgatcaccctggccaagaccagatacgccctgaaggacaccgacgaggaggtgagagagttcctgcacaacaacctgcacctgcagggcaaggtggagggcagccccagcctgagatggcagatggccctgtacagaggcgtgcccggcagagaggaggacgccgacgaccccgagaagatcgtgagaagagtgcaggaggtgagcgccgtgctgtactacctggaccagaccgagcacccctacaagagcaagaaggccgtgtggcacaagctgctgagcaagcagagaagaagagccgtggtggcctgcttcagaatgacccccctgtacaacctgcccacccacagagcctgcaacatgttcctggagagctacaaggccgcctggatcctgaccgaggaccacagcttcgaggacagaatgatcgacgacctgagcaaggccggcgagcaggaggaggaggaggaggaggtggaggagaagaagcccgaccccctgcaccagctggtgctgcacttcagcagaaccgccctgaccgagaagagcaagctggacgaggactacctgtacatggcctacgccgacatcatggccaagagctgccacctggaggagggcggcgagaacggcgaggccgaggaggaggtggaggtgagcttcgaggagaagcagatggagaagcagagactgctgtaccagcaggccagactgcacaccagaggcgccgccgagatggtgctgcagatgatcagcgcctgcaagggcgagaccggcgccatggtgagcagcaccctgaagctgggcatcagcatcctgaacggcggcaacgccgaggtgcagcagaagatgctggactacctgaaggacaagaaggaggtgggcttcttccagagcatccaggccctgatgcagacctgcagcgtgctggacctgaacgccttcgagagacagaacaaggccgagggcctgggcatggtgaacgaggacggcaccgtgggcgagaaggtgatggccgacgacgagttcacccaggacctgttcagattcctgcagctgctgtgcgagggccacaacaacgacttccagaactacctgagaacccagaccggcaacaccaccaccatcaacatcatcatctgcaccgtggactacctgctgagactgcaggagagcatcagcgacttctactggtactacagcggcaaggacgtgatcgaggagcagggcaagagaaacttcagcaaggccatgagcgtggccaagcaggtgttcaacagcctgaccgagtacatccagggcccctgcaccggcaaccagcagagcctggcccacagcagactgtgggacgccgtggtgggcttcctgcacgtgttcgcccacatgatgatgaagctggcccaggacagcagccagatcgagctgctgaaggagctgctggacctgcagaaggacatggtggtgatgctgctgagcctgctggagggcaacgtggtgaacggcatgatcgccagacagatggtggacatgctggtggagagcagcagcaacgtggagatgatcctgaagttcttcgacatgttcctgaagctgaaggacatcgtgggcagcgaggccttccaggactacgtgaccgaccccagaggcctgatcagcaagaaggacttccagaaggccatggacagccagaagcagttcagcggccccgagatccagttcctgctgagctgcagcgaggccgacgagaacgagatgatcaactgcgaggagttcgccaacagattccaggagcccgccagagacatcggcttcaacgtggccgtgctgctgaccaacctgagcgagcacgtgccccacgaccccagactgcacaacttcctggagctggccgagagcatcctggagtacttcagaccctacctgggcagaatcgagatcatgggcgccagcagaagaatcgagagaatctacttcgagatcagcgagaccaacagagcccagtgggagatgccccaggtgaaggagagcaagagacagttcatcttcgacgtggtgaacgagggcggcgaggccgagaagatggagctgttcgtgagcttctgcgaggacaccatcttcgagatgcagatcgccgcccagatcagcgagcccgagggcgagcccgagaccgacgaggacgagggcgccggcgccgccgaggccggcgccgagggcgccgaggagggcgccgccggcctggagggcaccgccgccaccgccgccgccggcgccaccgccagagtggtggccgccgccggcagagccctgagaggcctgagctacagaagcctgagaagaagagtgagaagactgagaagactgaccgccagagaggccgccaccgccgtggccgccctgctgtgggccgccgtgaccagagccggcgccgccggcgccggcgccgccgccggcgccctgggcctgctgtggggcagcctgttcggcggcggcctggtggagggcgccaagaaggtgaccgtgaccgagctgctggccggcatgcccgaccccaccagcgacgaggtgcacggcgagcagcccgccggccccggcggcgacgccgacggcgagggcgccagcgagggcgccggcgacgccgccgagggcgccggcgacgaggaggaggccgtgcacgaggccggccccggcggcgccgacggcgccgtggccgtgaccgacggcggccccttcagacccgagggcgccggcggcctgggcgacatgggcgacaccacccccgccgagccccccacccccgagggcagccccatcctgaagagaaagctgggcgtggacggcgtggaggaggagctgccccccgagcccgagcccgagcccgagcccgagctggagcccgagaaggccgacgccgagaacggcgagaaggaggaggtgcccgagcccacccccgagccccccaagaagcaggccccccccagccccccccccaagaaggaggaggccggcggcgagttctggggcgagctggaggtgcagagagtgaagttcctgaactacctgagcagaaacttctacaccctgagattcctggccctgttcctggccttcgccatcaacttcatcctgctgttctacaaggtgagcgacagcccccccggcgaggacgacatggagggcagcgccgccggcgacgtgagcggcgccggcagcggcggcagcagcggctggggcctgggcgccggcgaggaggccgagggcgacgaggacgagaacatggtgtactacttcctggaggagagcaccggctacatggagcccgccctgagatgcctgagcctgctgcacaccctggtggccttcctgtgcatcatcggctacaactgcctgaaggtgcccctggtgatcttcaagagagagaaggagctggccagaaagctggagttcgacggcctgtacatcaccgagcagcccgaggacgacgacgtgaagggccagtgggacagactggtgctgaacacccccagcttccccagcaactactgggacaagttcgtgaagagaaaggtgctggacaagcacggcgacatctacggcagagagagaatcgccgagctgctgggcatggacctggccaccctggagatcaccgcccacaacgagagaaagcccaaccccccccccggcctgctgacctggctgatgagcatcgacgtgaagtaccagatctggaagttcggcgtgatcttcaccgacaacagcttcctgtacctgggctggtacatggtgatgagcctgctgggccactacaacaacttcttcttcgccgcccacctgctggacatcgccatgggcgtgaagaccctgagaaccatcctgagcagcgtgacccacaacggcaagcagctggtgatgaccgtgggcctgctggccgtggtggtgtacctgtacaccgtggtggccttcaacttcttcagaaagttctacaacaagagcgaggacgaggacgagcccgacatgaagtgcgacgacatgatgacctgctacctgttccacatgtacgtgggcgtgagagccggcggcggcatcggcgacgagatcgaggaccccgccggcgacgagtacgagctgtacagagtggtgttcgacatcaccttcttcttcttcgtgatcgtgatcctgctggccatcatccagggcctgatcatcgacgccttcggcgagctgagagaccagcaggagcaggtgaaggaggacatggagaccaagtgcttcatctgcggcatcggcagcgactacttcgacaccaccccccacggcttcgagacccacaccctggaggagcacaacctggccaactacatgttcttcctgatgtacctgatcaacaaggacgagaccgagcacaccggccaggagagctacgtgtggaagatgtaccaggagagatgctgggacttcttccccgccggcgactgcttcagaaagcagtacgaggaccagctgagctag

SEQ ID NO: 97910 - DNA, 2031 bp, synthetic construct
  misc_feature 1..2031: note = Description of Artificial Sequence: Synthetic coding sequence
  source 1..2031: mol_type = other DNA
atgaagagcggccccgagatcgtgaaggccggcctgagaagcttcttcgagagcgccagcgaggacatcgagaagatggtggagaacctgagactgggcaaggtgagccaggccagaacccaggtgaagggcgtgggccagaacctgacctacaccaccgtggccctgctgcccgtgctgaccaccctgttccagcacatcgcccagcaccagttcggcgacgacgtgatcctggacgacgtgcaggtgagctgctacagaaccctgtgcagcatctacagcctgggcaccaccaagaacacctacgtggagaagctgagacccgccctgggcgagtgcctggccagactggccgccgccatgcccgtggccttcctggagccccagctgaacgagtacaacgcctgcagcgtgtacaccaccaagagccccagagagagagccatcctgggcctgcccaacagcgtggaggagatgtgccccgacatccccgtgctggagagactgatggccgacatcggcggcctggccgagagcggcgccagatacaccgagatgccccacgtgatcgagatcaccctgcccatgctgtgcagctacctgcccagatggtgggagagaggccccgaggccccccccagcgccctgcccgccggcgccccccccccctgcaccgccgtgaccagcgaccacctgaacagcctgctgggcaacatcctgagaatcatcgtgaacaacctgggcatcgacgaggccagctggatgaagagactggccgtgttcgcccagcccatcgtgagcagagccagacccgagctgctgcagagccacttcatccccaccatcggcagactgagaaagagagccggcaaggtggtgagcgaggaggagcagctgagactggaggccaaggccgaggcccaggagggcgagctgctggtgagagacgagttcagcgtgctgtgcagagacctgtacgccctgtaccccctgctgatcagatacgtggacaacaacagagcccagtggctgaccgagcccaaccccagcgccgaggagctgttcagaatggtgggcgagatcttcatctactggagcaagagccacaacttcaagagagaggagcagaacttcgtggtgcagaacgagatcaacaacatgagcttcctgaccgccgacaacaagagcaagatggccaaggccggcgacatccagagcggcggcagcgaccaggagagaaccaagaagaagagaagaggcgacagatacagcgtgcagaccagcctgatcgtggccaccctgaagaagatgctgcccatcggcctgaacatgtgcgcccccaccgaccaggacctgatcaccctggccaagaccagatacgccctgaaggacaccgacgaggaggtgagagagttcctgcacaacaacctgcacctgcagggcaaggtggagggcagccccagcctgagatggcagatggccctgtacagaggcgtgcccggcagagaggaggacgccgacgaccccgagaagatcgtgagaagagtgcaggaggtgagcgccgtgctgtactacctggaccagaccgagcacccctacaagagcaagaaggccgtgtggcacaagctgctgagcaagcagagaagaagagccgtggtggcctgcttcagaatgacccccctgtacaacctgcccacccacagagcctgcaacatgttcctggagagctacaaggccgcctggatcctgaccgaggaccacagcttcgaggacagaatgatcgacgacctgagcaaggccggcgagcaggaggaggaggaggaggaggtggaggagaagaagcccgaccccctgcaccagctggtgctgcacttcagcagaaccgccctgaccgagaagagcaagctggacgaggactacctgtacatggcctacgccgacatcatggccaagagctgccacctggaggagggcggcgagaacggcgaggccgaggaggaggtggaggtgagcttcgaggagaagcagtag

SEQ ID NO: 97911 - DNA, 14922 bp, synthetic construct
  misc_feature 1..14922: note = Description of Artificial Sequence: Synthetic coding sequence
  source 1..14922: mol_type = other DNA
ctgggccccagaagcagcagcaacaagctgagcaacaagaagatgatgaagtggttctgcagcgccccccagcccagcaccaagaacaacagaagctacgcctggcagcagaaggacctggccaccgacttcgtgagctggagccccctgcccatccccagaatgtgcccccagaccagccccagcgcccccctgtgctggagcagccccagcctgagcggcagatgcagaagatgctggctgaccccctggagaaaccagaagggccagctggacatcatcaagtggagcttcggcctgaagaccgcccagggcggcggccacagaaccctgctgtacggccacgccatcctgctgagacacagctacagcggcatgtacctgtgctgcctgagcaccagcagaagcagcaccgacaagctggccttcgacgtgggcctgcaggaggacaccaccggcgaggcctgctggtggaccatccaccccgccagcaagcagagaagcgagggcgagaaggtgagagtgggcgacgacctgatcctggtgagcgtgagcagcgagagatacctgcacctgagctacggcaacggcagcctgcacgtggacgccgccttccagcagaccctgtggagcgtggcccccatcagcagcggcagcgaggccgcccagggctacctgatcggcggcgacgtgctgagactgctgcacggccacatggacgagtgcctgaccgtgcccagcggcgagcacggcgaggagcagagaagaaccgtgcactacgagggcggcgccgtgagcgtgcacgccagaagcctgtggagactggagaccctgagagtggcctggagcggcagccacatcagatggggccagcccttcagactgagacacgtgaccaccggcaagtacctgagcctgatggaggacaagaacctgctgctgatggacaaggagaaggccgacgtgaagagcaccgccttcaccttcagaagcagcaaggagaagctggacgtgggcgtgagaaaggaggtggacggcatgggcaccagcgagatcaagtacggcgacagcgtgtgctacatccagcacgtggacaccggcctgtggctgacctaccagagcgtggacgtgaagagcgtgagaatgggcagcatccagagaaaggccatcatgcaccacgagggccacatggacgacggcatcagcctgagcagaagccagcacgaggagagcagaaccgccagagtgatcagaagcaccgtgttcctgttcaacagattcatcagaggcctggacgccctgagcaagaaggccaaggccagcaccgtggacctgcccatcgagagcgtgagcctgagcctgcaggacctgatcggctacttccacccccccgacgagcacctggagcacgaggacaagcagaacagactgagagccctgaagaacagacagaacctgttccaggaggagggcatgatcaacctggtgctggagtgcatcgacagactgcacgtgtacagcagcgccgcccacttcgccgacgtggccggcagagaggccggcgagagctggaagagcatcctgaacagcctgtacgagctgctggccgccctgatcagaggcaacagaaagaactgcgcccagttcagcggcagcctggactggctgatcagcagactggagagactggaggccagcagcggcatcctggaggtgctgcactgcgtgctggtggagagccccgaggccctgaacatcatcaaggagggccacatcaagagcatcatcagcctgctggacaagcacggcagaaaccacaaggtgctggacgtgctgtgcagcctgtgcgtgtgccacggcgtggccgtgagaagcaaccagcacctgatctgcgacaacctgctgcccggcagagacctgctgctgcagaccagactggtgaaccacgtgagcagcatgagacccaacatcttcctgggcgtgagcgagggcagcgcccagtacaagaagtggtactacgagctgatggtggaccacaccgagcccttcgtgaccgccgaggccacccacctgagagtgggctgggccagcaccgagggctacagcccctaccccggcggcggcgaggagtggggcggcaacggcgtgggcgacgacctgttcagctacggcttcgacggcctgcacctgtggagcggctgcatcgccagaaccgtgagcagccccaaccagcacctgctgagaaccgacgacgtgatcagctgctgcctggacctgagcgcccccagcatcagcttcagaatcaacggccagcccgtgcagggcatgttcgagaacttcaacatcgacggcctgttcttccccgtggtgagcttcagcgccggcatcaaggtgagattcctgctgggcggcagacacggcgagttcaagttcctgcccccccccggctacgccccctgctacgaggccgtgctgcccaaggagaagctgaaggtggagcacagcagagagtacaagcaggagagaacctacaccagagacctgctgggccccaccgtgagcctgacccaggccgccttcacccccatccccgtggacaccagccagatcgtgctgcccccccacctggagagaatcagagagaagctggccgagaacatccacgagctgtgggtgatgaacaagatcgagctgggctggcagtacggccccgtgagagacgacaacaagagacagcacccctgcctggtggagttcagcaagctgcccgagcaggagagaaactacaacctgcagatgagcctggagaccctgaagaccctgctggccctgggctgccacgtgggcatcagcgacgagcacgccgaggacaaggtgaagaagatgaagctgcccaagaactaccagctgaccagcggctacaagcccgcccccatggacctgagcttcatcaagctgacccccagccaggaggccatggtggacaagctggccgagaacgcccacaacgtgtgggccagagacagaatcagacagggctggacctacggcatccagcaggacgtgaagaacagaagaaaccccagactggtgccctacaccctgctggacgacagaaccaagaagagcaacaaggacagcctgagagaggccgtgagaaccctgctgggctacggctacaacctggaggcccccgaccaggaccacgccgccagagccgaggtgtgcagcggcaccggcgagagattcagaatcttcagagccgagaagacctacgccgtgaaggccggcagatggtacttcgagttcgagaccgtgaccgccggcgacatgagagtgggctggagcagacccggctgccagcccgaccaggagctgggcagcgacgagagagccttcgccttcgacggcttcaaggcccagagatggcaccagggcaacgagcactacggcagaagctggcaggccggcgacgtggtgggctgcatggtggacatgaacgagcacaccatgatgttcaccctgaacggcgagatcctgctggacgacagcggcagcgagctggccttcaaggacttcgacgtgggcgacggcttcatccccgtgtgcagcctgggcgtggcccaggtgggcagaatgaacttcggcaaggacgtgagcaccctgaagtacttcaccatctgcggcctgcaggagggctacgagcccttcgccgtgaacaccaacagagacatcaccatgtggctgagcaagagactgccccagttcctgcaggtgcccagcaaccacgagcacatcgaggtgaccagaatcgacggcaccatcgacagcagcccctgcctgaaggtgacccagaagagcttcggcagccagaacagcaacaccgacatcatgttctacagactgagcatgcccatcgagtgcgccgaggtgttcagcaagaccgtggccggcggcctgcccggcgccggcctgttcggccccaagaacgacctggaggactacgacgccgacagcgacttcgaggtgctgatgaagaccgcccacggccacctggtgcccgacagagtggacaaggacaaggaggccaccaagcccgagttcaacaaccacaaggactacgcccaggagaagcccagcagactgaagcagagattcctgctgagaagaaccaagcccgactacagcaccagccacagcgccagactgaccgaggacgtgctggccgacgacagagacgactacgacttcctgatgcagaccagcacctactactacagcgtgagaatcttccccggccaggagcccgccaacgtgtgggtgggctggatcaccagcgacttccaccagtacgacaccggcttcgacctggacagagtgagaaccgtgaccgtgaccctgggcgacgagaagggcaaggtgcacgagagcatcaagagaagcaactgctacatggtgtgcgccggcgagagcatgagccccggccagggcagaaacaacaacggcctggagatcggctgcgtggtggacgccgccagcggcctgctgaccttcatcgccaacggcaaggagctgagcacctactaccaggtggagcccagcaccaagctgttccccgccgtgttcgcccaggccaccagccccaacgtgttccagttcgagctgggcagaatcaagaacgtgatgcccctgagcgccggcctgttcaagagcgagcacaagaaccccgtgccccagtgcccccccagactgcacgtgcagttcctgagccacgtgctgtggagcagaatgcccaaccagttcctgaaggtggacgtgagcagaatcagcgagagacagggctggctggtgcagtgcctggaccccctgcagttcatgagcctgcacatccccgaggagaacagaagcgtggacatcctggagctgaccgagcaggaggagctgctgaagttccactaccacaccctgagactgtacagcgccgtgtgcgccctgggcaaccacagagtggcccacgccctgtgcagccacgtggacgagccccagctgctgtacgccatcgagaacaagtacatgcccggcctgctgagagccggctactacgacctgctgatcgacatccacctgagcagctacgccaccgccagactgatgatgaacaacgagtacatcgtgcccatgaccgaggagaccaagagcatcaccctgttccccgacgagaacaagaagcacggcctgcccggcatcggcctgagcaccagcctgagacccagaatgcagttcagcagccccagcttcgtgagcatcagcaacgagtgctaccagtacagccccgagttccccctggacatcctgaagagcaagaccatccagatgctgaccgaggccgtgaaggagggcagcctgcacgccagagaccccgtgggcggcaccaccgagttcctgttcgtgcccctgatcaagctgttctacaccctgctgatcatgggcatcttccacaacgaggacctgaagcacatcctgcagctgatcgagcccagcgtgttcaaggaggccgccacccccgaggaggagagcgacaccctggagaaggagctgagcgtggacgacgccaagctgcagggcgccggcgaggaggaggccaagggcggcaagagacccaaggagggcctgctgcagatgaagctgcccgagcccgtgaagctgcagatgtgcctgctgctgcagtacctgtgcgactgccaggtgagacacagaatcgaggccatcgtggccttcagcgacgacttcgtggccaagctgcaggacaaccagagattcagatacaacgaggtgatgcaggccctgaacatgagcgccgccctgaccgccagaaagaccaaggagttcagaagccccccccaggagcagatcaacatgctgctgaacttcaaggacgacaagagcgagtgcccctgccccgaggagatcagagaccagctgctggacttccacgaggacctgatgacccactgcggcatcgagctggacgaggacggcagcctggacggcaacagcgacctgaccatcagaggcagactgctgagcctggtggagaaggtgacctacctgaagaagaagcaggccgagaagcccgtggagagcgacagcaagaagagcagcaccctgcagcagctgatcagcgagaccatggtgagatgggcccaggagagcgtgatcgaggaccccgagctggtgagagccatgttcgtgctgctgcacagacagtacgacggcatcggcggcctggtgagagccctgcccaagacctacaccatcaacggcgtgagcgtggaggacaccatcaacctgctggccagcctgggccagatcagaagcctgctgagcgtgagaatgggcaaggaggaggagaagctgatgatcagaggcctgggcgacatcatgaacaacaaggtgttctaccagcaccccaacctgatgagagccctgggcatgcacgagaccgtgatggaggtgatggtgaacgtgctgggcggcggcgagagcaaggagatcaccttccccaagatggtggccaactgctgcagattcctgtgctacttctgcagaatcagcagacagaaccagaaggccatgttcgaccacctgagctacctgctggagaacagcagcgtgggcctggccagccccgccatgagaggcagcacccccctggacgtggccgccgccagcgtgatggacaacaacgagctggccctggccctgagagagcccgacctggagaaggtggtgagatacctggccggctgcggcctgcagagctgccagatgctggtgagcaagggctaccccgacatcggctggaaccccgtggagggcgagagatacctggacttcctgagattcgccgtgttctgcaacggcgagagcgtggaggagaacgccaacgtggtggtgagactgctgatcagaagacccgagtgcttcggccccgccctgagaggcgagggcggcaacggcctgctggccgccatggaggaggccatcaagatcgccgaggaccccagcagagacggccccagccccaacagcggcagcagcaagaccctggacaccgaggaggaggaggacgacaccatccacatgggcaacgccatcatgaccttctacagcgccctgatcgacctgctgggcagatgcgcccccgagatgcacctgatccacgccggcaagggcgaggccatcagaatcagaagcatcctgagaagcctgatccccctgggcgacctggtgggcgtgatcagcatcgccttccagatgcccaccatcgccaaggacggcaacgtggtggagcccgacatgagcgccggcttctgccccgaccacaaggccgccatggtgctgttcctggacagagtgtacggcatcgaggtgcaggacttcctgctgcacctgctggaggtgggcttcctgcccgacctgagagccgccgccagcctggacaccgccgccctgagcgccaccgacatggccctggccctgaacagatacctgtgcaccgccgtgctgcccctgctgaccagatgcgcccccctgttcgccggcaccgagcaccacgccagcctgatcgacagcctgctgcacaccgtgtacagactgagcaagggctgcagcctgaccaaggcccagagagacagcatcgaggtgtgcctgctgagcatctgcggccagctgagacccagcatgatgcagcacctgctgagaagactggtgttcgacgtgcccctgctgaacgagcacgccaagatgcccctgaagctgctgaccaaccactacgagagatgctggaagtactactgcctgcccggcggctggggcaacttcggcgccgccagcgaggaggagctgcacctgagcagaaagctgttctggggcatcttcgacgccctgagccagaagaagtacgagcaggagctgttcaagctggccctgccctgcctgagcgccgtggccggcgccctgccccccgactacatggagagcaactacgtgagcatgatggagaagcagagcagcatggacagcgagggcaacttcaacccccagcccgtggacaccagcaacatcaccatccccgagaagctggagtacttcatcaacaagtacgccgagcacagccacgacaagtggagcatggacaagctggccaacggctggatctacggcgagatctacagcgacagcagcaaggtgcagcccctgatgaagccctacaagctgctgagcgagaaggagaaggagatctacagatggcccatcaaggagagcctgaagaccatgctggcctggggctggagaatcgagagaaccagagagggcgacagcatggccctgtacaacagaaccagaagaatcagccagaccagccaggtgagcgtggacgccgcccacggctacagccccagagccatcgacatgagcaacgtgaccctgagcagagacctgcacgccatggccgagatgatggccgagaactaccacaacatctgggccaagaagaagaagatggagctggagagcaagggcggcggcaaccaccccctgctggtgccctacgacaccctgaccgccaaggagaaggccaaggacagagagaaggcccaggacatcctgaagttcctgcagatcaacggctacgccgtgagcagaggcttcaaggacctggagctggacacccccagcatcgagaagagattcgcctacagcttcctgcagcagctgatcagatacgtggacgaggcccaccagtacatcctggagttcgacggcggcagcagaggcaagggcgagcacttcccctacgagcaggagatcaagttcttcgccaaggtggtgctgcccctgatcgaccagtacttcaagaaccacagactgtacttcctgagcgccgccagcagacccctgtgcagcggcggccacgccagcaacaaggagaaggagatggtgaccagcctgttctgcaagctgggcgtgctggtgagacacagaatcagcctgttcggcaacgacgccaccagcatcgtgaactgcctgcacatcctgggccagaccctggacgccagaaccgtgatgaagaccggcctggagagcgtgaagagcgccctgagagccttcctggacaacgccgccgaggacctggagaagaccatggagaacctgaagcagggccagttcacccacaccagaaaccagcccaagggcgtgacccagatcatcaactacaccaccgtggccctgctgcccatgctgagcagcctgttcgagcacatcggccagcaccagttcggcgaggacctgatcctggaggacgtgcaggtgagctgctacagaatcctgaccagcctgtacgccctgggcaccagcaagagcatctacgtggagagacagagaagcgccctgggcgagtgcctggccgccttcgccggcgccttccccgtggccttcctggagacccacctggacaagcacaacatctacagcatctacaacaccaagagcagcagagagagagccgccctgagcctgcccaccaacgtggaggacgtgtgccccaacatccccagcctggagaagctgatggaggagatcgtggagctggccgagagcggcatcagatacacccagatgccccacgtgatggaggtgatcctgcccatgctgtgcagctacatgagcagatggtgggagcacggccccgagaacaaccccgagagagccgagatgtgctgcaccgccctgaacagcgagcacatgaacaccctgctgggcaacatcctgaagatcatctacaacaacctgggcatcgacgagggcgcctggatgaagagactggccgtgttcagccagcccatcatcaacaaggtgaagccccagctgctgaagacccacttcctgcccctgatggagaagctgaagaagaaggccgccaccgtggtgagcgaggaggaccacctgaaggccgaggccagaggcgacatgagcgaggccgagctgctgatcctggacgagttcaccaccctggccagagacctgtacgccttctaccccctgctgatcagattcgtggactacaacagagccaagtggctgaaggagcccaaccccgaggccgaggagctgttcagaatggtggccgaggtgttcatctactggagcaagagccacaacttcaagagagaggagcagaacttcgtggtgcagaacgagatcaacaacatgagcttcctgatcaccgacaccaagagcaagatgagcaaggccgccgtgagcgaccaggagagaaagaagatgaagagaaagggcgacagatacagcatgcagaccagcctgatcgtggccgccctgaagagactgctgcccatcggcctgaacatctgcgcccccggcgaccaggagctgatcgccctggccaagaacagattcagcctgaaggacaccgaggacgaggtgagagacatcatcagaagcaacatccacctgcagggcaagctggaggaccccgccatcagatggcagatggccctgtacaaggacctgcccaacagaaccgacgacaccagcgaccccgagaagaccgtggagagagtgctggacatcgccaacgtgctgttccacctggagcagaagagcaagagagtgggcagaagacactactgcctggtggagcacccccagagaagcaagaaggccgtgtggcacaagctgctgagcaagcagagaaagagagccgtggtggcctgcttcagaatggcccccctgtacaacctgcccagacacagagccgtgaacctgttcctgcagggctacgagaagagctggatcgagaccgaggagcactacttcgaggacaagctgatcgaggacctggccaagcccggcgccgagccccccgaggaggacgagggcaccaagagagtggaccccctgcaccagctgatcctgctgttcagcagaaccgccctgaccgagaagtgcaagctggaggaggacttcctgtacatggcctacgccgacatcatggccaagagctgccacgacgaggaggacgacgacggcgaggaggaggtgaagagcttcgaggtgaccggcagccagagaagcaaggagaaggagatggagaagcagaagctgctgtaccagcaggccagactgcacgacagaggcgccgccgagatggtgctgcagaccatcagcgccagcaagggcgagaccggccccatggtggccgccaccctgaagctgggcatcgccatcctgaacggcggcaacagcaccgtgcagcagaagatgctggactacctgaaggagaagaaggacgtgggcttcttccagagcctggccggcctgatgcagagctgcagcgtgctggacctgaacgccttcgagagacagaacaaggccgagggcctgggcatggtgaccgaggagggcagcggcgagaaggtgctgcaggacgacgagttcacctgcgacctgttcagattcctgcagctgctgtgcgagggccacaacagcgacttccagaactacctgagaacccagaccggcaacaacaccaccgtgaacatcatcatcagcaccgtggactacctgctgagagtgcaggagagcatcagcgacttctactggtactacagcggcaaggacgtgatcgacgagcagggccagagaaacttcagcaaggccatccaggtggccaagcaggtgttcaacaccctgaccgagtacatccagggcccctgcaccggcaaccagcagagcctggcccacagcagactgtgggacgccgtggtgggcttcctgcacgtgttcgcccacatgcagatgaagctgagccaggacagcagccagatcgagctgctgaaggagctgatggacctgcagaaggacatggtggtgatgctgctgagcatgctggagggcaacgtggtgaacggcaccatcggcaagcagatggtggacatgctggtggagagcagcaacaacgtggagatgatcctgaagttcttcgacatgttcctgaagctgaaggacctgaccagcagcgacaccttcaaggagtacgaccccgacggcaagggcgtgatcagcaagagagacttccacaaggccatggagagccacaagcactacacccagagcgagaccgagttcctgctgagctgcgccgagaccgacgagaacgagaccctggactacgaggagttcgtgaagagattccacgagcccgccaaggacatcggcttcaacgtggccgtgctgctgaccaacctgagcgagcacatgcccaacgacaccagactgcagaccttcctggagctggccgagagcgtgctgaactacttccagcccttcctgggcagaatcgagatcatgggcagcgccaagagaatcgagagagtgtacttcgagatcagcgagagcagcagaacccagtgggagaagccccaggtgaaggagagcaagagacagttcatcttcgacgtggtgaacgagggcggcgagaaggagaagatggagctgttcgtgaacttctgcgaggacaccatcttcgagatgcagctggccgcccagatcagcgagagcgacctgaacgagagaagcgccaacaaggaggagagcgagaaggagagacccgaggagcagggccccagaatggccttcttcagcatcctgaccgtgagaagcgccctgttcgccctgagatacaacatcctgaccctgatgagaatgctgagcctgaagagcctgaagaagcagatgaagaaggtgaagaagatgaccgtgaaggacatggtgaccgccttcttcagcagctactggagcatcttcatgaccctgctgcacttcgtggccagcgtgttcagaggcttcttcagaatcatctgcagcctgctgctgggcggcagcctggtggagggcgccaagaagatcaaggtggccgagctgctggccaacatgcccgaccccacccaggacgaggtgagaggcgacggcgaggagggcgagagaaagcccctggaggccgccctgcccagcgaggacctgaccgacctgaaggagctgaccgaggagagcgacctgctgagcgacatcttcggcctggacctgaagagagagggcggccagtacaagctgatcccccacaaccccaacgccggcctgagcgacctgatgagcaaccccgtgcccatgcccgaggtgcaggagaagttccaggagcagaaggccaaggaggaggagaaggaggagaaggaggagaccaagagcgagcccgagaaggccgagggcgaggacggcgagaaggaggagaaggccaaggaggacaagggcaagcagaagctgagacagctgcacacccacagatacggcgagcccgaggtgcccgagagcgccttctggaagaagatcatcgcctaccagcagaagctgctgaactacttcgccagaaacttctacaacatgagaatgctggccctgttcgtggccttcgccatcaacttcatcctgctgttctacaaggtgagcaccagcagcgtggtggagggcaaggagctgcccaccagaagcagcagcgagaacgccaaggtgaccagcctggacagcagcagccacagaatcatcgccgtgcactacgtgctggaggagagcagcggctacatggagcccaccctgagaatcctggccatcctgcacaccgtgatcagcttcttctgcatcatcggctactactgcctgaaggtgcccctggtgatcttcaagagagagaaggaggtggccagaaagctggagttcgacggcctgtacatcaccgagcagcccagcgaggacgacatcaagggccagtgggacagactggtgatcaacacccagagcttccccaacaactactgggacaagttcgtgaagagaaaggtgatggacaagtacggcgagttctacggcagagacagaatcagcgagctgctgggcatggacaaggccgccctggacttcagcgacgccagagagaagaagaagcccaagaaggacagcagcctgagcgccgtgctgaacagcatcgacgtgaagtaccagatgtggaagctgggcgtggtgttcaccgacaacagcttcctgtacctggcctggtacatgaccatgagcgtgctgggccactacaacaacttcttcttcgccgcccacctgctggacatcgccatgggcttcaagaccctgagaaccatcctgagcagcgtgacccacaacggcaagcagctggtgctgaccgtgggcctgctggccgtggtggtgtacctgtacaccgtggtggccttcaacttcttcagaaagttctacaacaagagcgaggacggcgacacccccgacatgaagtgcgacgacatgctgacctgctacatgttccacatgtacgtgggcgtgagagccggcggcggcatcggcgacgagatcgaggaccccgccggcgacgagtacgagatctacagaatcatcttcgacatcaccttcttcttcttcgtgatcgtgatcctgctggccatcatccagggcctgatcatcgacgccttcggcgagctgagagaccagcaggagcaggtgaaggaggacatggagaccaagtgcttcatctgcggcatcggcaacgactacttcgacaccgtgccccacggcttcgagacccacaccctgcaggagcacaacctggccaactacctgttcttcctgatgtacctgatcaacaaggacgagaccgagcacaccggccaggagagctacgtgtggaagatgtaccaggagagatgctgggagttcttccccgccggcgactgcttcagaaagcagtacgaggaccagctgaactag

SEQ ID NO: 97912 - DNA, 14904 bp, synthetic construct
  misc_feature 1..14904: note = Description of Artificial Sequence: Synthetic coding sequence
  source 1..14904: mol_type = other DNA
atggccgacggcggcgagggcgaggacgagatccagttcctgagaaccgacgacgaggtggtgctgcagtgcaccgccaccatccacaaggagcagcagaagctgtgcctggccgccgagggcttcggcaacagactgtgcttcctggagagcaccagcaacagcaagaacgtgccccccgacctgagcatctgcaccttcgtgctggagcagagcctgagcgtgagagccctgcaggagatgctggccaacaccgtggagaagagcgagggccaggtggacgtggagaagtggaagttcatgatgaagaccgcccagggcggcggccacagaaccctgctgtacggccacgccatcctgctgagacacagctacagcggcatgtacctgtgctgcctgagcaccagcagaagcagcaccgacaagctggccttcgacgtgggcctgcaggaggacaccaccggcgaggcctgctggtggaccatccaccccgccagcaagcagagaagcgagggcgagaaggtgagagtgggcgacgacctgatcctggtgagcgtgagcagcgagagatacctgcacctgagctacggcaacggcagcctgcacgtggacgccgccttccagcagaccctgtggagcgtggcccccatcagcagcggcagcgaggccgcccagggctacctgatcggcggcgacgtgctgagactgctgcacggccacatggacgagtgcctgaccgtgcccagcggcgagcacggcgaggagcagagaagaaccgtgcactacgagggcggcgccgtgagcgtgcacgccagaagcctgtggagactggagaccctgagagtggcctggagcggcagccacatcagatggggccagcccttcagactgagacacgtgaccaccggcaagtacctgagcctgatggaggacaagaacctgctgctgatggacaaggagaaggccgacgtgaagagcaccgccttcaccttcagaagcagcaaggagaagctggacgtgggcgtgagaaaggaggtggacggcatgggcaccagcgagatcaagtacggcgacagcgtgtgctacatccagcacgtggacaccggcctgtggctgacctaccagagcgtggacgtgaagagcgtgagaatgggcagcatccagagaaaggccatcatgcaccacgagggccacatggacgacggcatcagcctgagcagaagccagcacgaggagagcagaaccgccagagtgatcagaagcaccgtgttcctgttcaacagattcatcagaggcctggacgccctgagcaagaaggccaaggccagcaccgtggacctgcccatcgagagcgtgagcctgagcctgcaggacctgatcggctacttccacccccccgacgagcacctggagcacgaggacaagcagaacagactgagagccctgaagaacagacagaacctgttccaggaggagggcatgatcaacctggtgctggagtgcatcgacagactgcacgtgtacagcagcgccgcccacttcgccgacgtggccggcagagaggccggcgagagctggaagagcatcctgaacagcctgtacgagctgctggccgccctgatcagaggcaacagaaagaactgcgcccagttcagcggcagcctggactggctgatcagcagactggagagactggaggccagcagcggcatcctggaggtgctgcactgcgtgctggtggagagccccgaggccctgaacatcatcaaggagggccacatcaagagcatcatcagcctgctggacaagcacggcagaaaccacaaggtgctggacgtgctgtgcagcctgtgcgtgtgccacggcgtggccgtgagaagcaaccagcacctgatctgcgacaacctgctgcccggcagagacctgctgctgcagaccagactggtgaaccacgtgagcagcatgagacccaacatcttcctgggcgtgagcgagggcagcgcccagtacaagaagtggtactacgagctgatggtggaccacaccgagcccttcgtgaccgccgaggccacccacctgagagtgggctgggccagcaccgagggctacagcccctaccccggcggcggcgaggagtggggcggcaacggcgtgggcgacgacctgttcagctacggcttcgacggcctgcacctgtggagcggctgcatcgccagaaccgtgagcagccccaaccagcacctgctgagaaccgacgacgtgatcagctgctgcctggacctgagcgcccccagcatcagcttcagaatcaacggccagcccgtgcagggcatgttcgagaacttcaacatcgacggcctgttcttccccgtggtgagcttcagcgccggcatcaaggtgagattcctgctgggcggcagacacggcgagttcaagttcctgcccccccccggctacgccccctgctacgaggccgtgctgcccaaggagaagctgaaggtggagcacagcagagagtacaagcaggagagaacctacaccagagacctgctgggccccaccgtgagcctgacccaggccgccttcacccccatccccgtggacaccagccagatcgtgctgcccccccacctggagagaatcagagagaagctggccgagaacatccacgagctgtgggtgatgaacaagatcgagctgggctggcagtacggccccgtgagagacgacaacaagagacagcacccctgcctggtggagttcagcaagctgcccgagcaggagagaaactacaacctgcagatgagcctggagaccctgaagaccctgctggccctgggctgccacgtgggcatcagcgacgagcacgccgaggacaaggtgaagaagatgaagctgcccaagaactaccagctgaccagcggctacaagcccgcccccatggacctgagcttcatcaagctgacccccagccaggaggccatggtggacaagctggccgagaacgcccacaacgtgtgggccagagacagaatcagacagggctggacctacggcatccagcaggacgtgaagaacagaagaaaccccagactggtgccctacaccctgctggacgacagaaccaagaagagcaacaaggacagcctgagagaggccgtgagaaccctgctgggctacggctacaacctggaggcccccgaccaggaccacgccgccagagccgaggtgtgcagcggcaccggcgagagattcagaatcttcagagccgagaagacctacgccgtgaaggccggcagatggtacttcgagttcgagaccgtgaccgccggcgacatgagagtgggctggagcagacccggctgccagcccgaccaggagctgggcagcgacgagagagccttcgccttcgacggcttcaaggcccagagatggcaccagggcaacgagcactacggcagaagctggcaggccggcgacgtggtgggctgcatggtggacatgaacgagcacaccatgatgttcaccctgaacggcgagatcctgctggacgacagcggcagcgagctggccttcaaggacttcgacgtgggcgacggcttcatccccgtgtgcagcctgggcgtggcccaggtgggcagaatgaacttcggcaaggacgtgagcaccctgaagtacttcaccatctgcggcctgcaggagggctacgagcccttcgccgtgaacaccaacagagacatcaccatgtggctgagcaagagactgccccagttcctgcaggtgcccagcaaccacgagcacatcgaggtgaccagaatcgacggcaccatcgacagcagcccctgcctgaaggtgacccagaagagcttcggcagccagaacagcaacaccgacatcatgttctacagactgagcatgcccatcgagtgcgccgaggtgttcagcaagaccgtggccggcggcctgcccggcgccggcctgttcggccccaagaacgacctggaggactacgacgccgacagcgacttcgaggtgctgatgaagaccgcccacggccacctggtgcccgacagagtggacaaggacaaggaggccaccaagcccgagttcaacaaccacaaggactacgcccaggagaagcccagcagactgaagcagagattcctgctgagaagaaccaagcccgactacagcaccagccacagcgccagactgaccgaggacgtgctggccgacgacagagacgactacgacttcctgatgcagaccagcacctactactacagcgtgagaatcttccccggccaggagcccgccaacgtgtgggtgggctggatcaccagcgacttccaccagtacgacaccggcttcgacctggacagagtgagaaccgtgaccgtgaccctgggcgacgagaagggcaaggtgcacgagagcatcaagagaagcaactgctacatggtgtgcgccggcgagagcatgagccccggccagggcagaaacaacaacggcctggagatcggctgcgtggtggacgccgccagcggcctgctgaccttcatcgccaacggcaaggagctgagcacctactaccaggtggagcccagcaccaagctgttccccgccgtgttcgcccaggccaccagccccaacgtgttccagttcgagctgggcagaatcaagaacgtgatgcccctgagcgccggcctgttcaagagcgagcacaagaaccccgtgccccagtgcccccccagactgcacgtgcagttcctgagccacgtgctgtggagcagaatgcccaaccagttcctgaaggtggacgtgagcagaatcagcgagagacagggctggctggtgcagtgcctggaccccctgcagttcatgagcctgcacatccccgaggagaacagaagcgtggacatcctggagctgaccgagcaggaggagctgctgaagttccactaccacaccctgagactgtacagcgccgtgtgcgccctgggcaaccacagagtggcccacgccctgtgcagccacgtggacgagccccagctgctgtacgccatcgagaacaagtacatgcccggcctgctgagagccggctactacgacctgctgatcgacatccacctgagcagctacgccaccgccagactgatgatgaacaacgagtacatcgtgcccatgaccgaggagaccaagagcatcaccctgttccccgacgagaacaagaagcacggcctgcccggcatcggcctgagcaccagcctgagacccagaatgcagttcagcagccccagcttcgtgagcatcagcaacgagtgctaccagtacagccccgagttccccctggacatcctgaagagcaagaccatccagatgctgaccgaggccgtgaaggagggcagcctgcacgccagagaccccgtgggcggcaccaccgagttcctgttcgtgcccctgatcaagctgttctacaccctgctgatcatgggcatcttccacaacgaggacctgaagcacatcctgcagctgatcgagcccagcgtgttcaaggaggccgccacccccgaggaggagagcgacaccctggagaaggagctgagcgtggacgacgccaagctgcagggcgccggcgaggaggaggccaagggcggcaagagacccaaggagggcctgctgcagatgaagctgcccgagcccgtgaagctgcagatgtgcctgctgctgcagtacctgtgcgactgccaggtgagacacagaatcgaggccatcgtggccttcagcgacgacttcgtggccaagctgcaggacaaccagagattcagatacaacgaggtgatgcaggccctgaacatgagcgccgccctgaccgccagaaagaccaaggagttcagaagccccccccaggagcagatcaacatgctgctgaacttcaaggacgacaagagcgagtgcccctgccccgaggagatcagagaccagctgctggacttccacgaggacctgatgacccactgcggcatcgagctggacgaggacggcagcctggacggcaacagcgacctgaccatcagaggcagactgctgagcctggtggagaaggtgacctacctgaagaagaagcaggccgagaagcccgtggagagcgacagcaagaagagcagcaccctgcagcagctgatcagcgagaccatggtgagatgggcccaggagagcgtgatcgaggaccccgagctggtgagagccatgttcgtgctgctgcacagacagtacgacggcatcggcggcctggtgagagccctgcccaagacctacaccatcaacggcgtgagcgtggaggacaccatcaacctgctggccagcctgggccagatcagaagcctgctgagcgtgagaatgggcaaggaggaggagaagctgatgatcagaggcctgggcgacatcatgaacaacaaggtgttctaccagcaccccaacctgatgagagccctgggcatgcacgagaccgtgatggaggtgatggtgaacgtgctgggcggcggcgagagcaaggagatcaccttccccaagatggtggccaactgctgcagattcctgtgctacttctgcagaatcagcagacagaaccagaaggccatgttcgaccacctgagctacctgctggagaacagcagcgtgggcctggccagccccgccatgagaggcagcacccccctggacgtggccgccgccagcgtgatggacaacaacgagctggccctggccctgagagagcccgacctggagaaggtggtgagatacctggccggctgcggcctgcagagctgccagatgctggtgagcaagggctaccccgacatcggctggaaccccgtggagggcgagagatacctggacttcctgagattcgccgtgttctgcaacggcgagagcgtggaggagaacgccaacgtggtggtgagactgctgatcagaagacccgagtgcttcggccccgccctgagaggcgagggcggcaacggcctgctggccgccatggaggaggccatcaagatcgccgaggaccccagcagagacggccccagccccaacagcggcagcagcaagaccctggacaccgaggaggaggaggacgacaccatccacatgggcaacgccatcatgaccttctacagcgccctgatcgacctgctgggcagatgcgcccccgagatgcacctgatccacgccggcaagggcgaggccatcagaatcagaagcatcctgagaagcctgatccccctgggcgacctggtgggcgtgatcagcatcgccttccagatgcccaccatcgccaaggacggcaacgtggtggagcccgacatgagcgccggcttctgccccgaccacaaggccgccatggtgctgttcctggacagagtgtacggcatcgaggtgcaggacttcctgctgcacctgctggaggtgggcttcctgcccgacctgagagccgccgccagcctggacaccgccgccctgagcgccaccgacatggccctggccctgaacagatacctgtgcaccgccgtgctgcccctgctgaccagatgcgcccccctgttcgccggcaccgagcaccacgccagcctgatcgacagcctgctgcacaccgtgtacagactgagcaagggctgcagcctgaccaaggcccagagagacagcatcgaggtgtgcctgctgagcatctgcggccagctgagacccagcatgatgcagcacctgctgagaagactggtgttcgacgtgcccctgctgaacgagcacgccaagatgcccctgaagctgctgaccaaccactacgagagatgctggaagtactactgcctgcccggcggctggggcaacttcggcgccgccagcgaggaggagctgcacctgagcagaaagctgttctggggcatcttcgacgccctgagccagaagaagtacgagcaggagctgttcaagctggccctgccctgcctgagcgccgtggccggcgccctgccccccgactacatggagagcaactacgtgagcatgatggagaagcagagcagcatggacagcgagggcaacttcaacccccagcccgtggacaccagcaacatcaccatccccgagaagctggagtacttcatcaacaagtacgccgagcacagccacgacaagtggagcatggacaagctggccaacggctggatctacggcgagatctacagcgacagcagcaaggtgcagcccctgatgaagccctacaagctgctgagcgagaaggagaaggagatctacagatggcccatcaaggagagcctgaagaccatgctggcctggggctggagaatcgagagaaccagagagggcgacagcatggccctgtacaacagaaccagaagaatcagccagaccagccaggtgagcgtggacgccgcccacggctacagccccagagccatcgacatgagcaacgtgaccctgagcagagacctgcacgccatggccgagatgatggccgagaactaccacaacatctgggccaagaagaagaagatggagctggagagcaagggcggcggcaaccaccccctgctggtgccctacgacaccctgaccgccaaggagaaggccaaggacagagagaaggcccaggacatcctgaagttcctgcagatcaacggctacgccgtgagcagaggcttcaaggacctggagctggacacccccagcatcgagaagagattcgcctacagcttcctgcagcagctgatcagatacgtggacgaggcccaccagtacatcctggagttcgacggcggcagcagaggcaagggcgagcacttcccctacgagcaggagatcaagttcttcgccaaggtggtgctgcccctgatcgaccagtacttcaagaaccacagactgtacttcctgagcgccgccagcagacccctgtgcagcggcggccacgccagcaacaaggagaaggagatggtgaccagcctgttctgcaagctgggcgtgctggtgagacacagaatcagcctgttcggcaacgacgccaccagcatcgtgaactgcctgcacatcctgggccagaccctggacgccagaaccgtgatgaagaccggcctggagagcgtgaagagcgccctgagagccttcctggacaacgccgccgaggacctggagaagaccatggagaacctgaagcagggccagttcacccacaccagaaaccagcccaagggcgtgacccagatcatcaactacaccaccgtggccctgctgcccatgctgagcagcctgttcgagcacatcggccagcaccagttcggcgaggacctgatcctggaggacgtgcaggtgagctgctacagaatcctgaccagcctgtacgccctgggcaccagcaagagcatctacgtggagagacagagaagcgccctgggcgagtgcctggccgccttcgccggcgccttccccgtggccttcctggagacccacctggacaagcacaacatctacagcatctacaacaccaagagcagcagagagagagccgccctgagcctgcccaccaacgtggaggacgtgtgccccaacatccccagcctggagaagctgatggaggagatcgtggagctggccgagagcggcatcagatacacccagatgccccacgtgatggaggtgatcctgcccatgctgtgcagctacatgagcagatggtgggagcacggccccgagaacaaccccgagagagccgagatgtgctgcaccgccctgaacagcgagcacatgaacaccctgctgggcaacatcctgaagatcatctacaacaacctgggcatcgacgagggcgcctggatgaagagactggccgtgttcagccagcccatcatcaacaaggtgaagccccagctgctgaagacccacttcctgcccctgatggagaagctgaagaagaaggccgccaccgtggtgagcgaggaggaccacctgaaggccgaggccagaggcgacatgagcgaggccgagctgctgatcctggacgagttcaccaccctggccagagacctgtacgccttctaccccctgctgatcagattcgtggactacaacagagccaagtggctgaaggagcccaaccccgaggccgaggagctgttcagaatggtggccgaggtgttcatctactggagcaagagccacaacttcaagagagaggagcagaacttcgtggtgcagaacgagatcaacaacatgagcttcctgatcaccgacaccaagagcaagatgagcaaggccgccgtgagcgaccaggagagaaagaagatgaagagaaagggcgacagatacagcatgcagaccagcctgatcgtggccgccctgaagagactgctgcccatcggcctgaacatctgcgcccccggcgaccaggagctgatcgccctggccaagaacagattcagcctgaaggacaccgaggacgaggtgagagacatcatcagaagcaacatccacctgcagggcaagctggaggaccccgccatcagatggcagatggccctgtacaaggacctgcccaacagaaccgacgacaccagcgaccccgagaagaccgtggagagagtgctggacatcgccaacgtgctgttccacctggagcagaagagcaagagagtgggcagaagacactactgcctggtggagcacccccagagaagcaagaaggccgtgtggcacaagctgctgagcaagcagagaaagagagccgtggtggcctgcttcagaatggcccccctgtacaacctgcccagacacagagccgtgaacctgttcctgcagggctacgagaagagctggatcgagaccgaggagcactacttcgaggacaagctgatcgaggacctggccaagcccggcgccgagccccccgaggaggacgagggcaccaagagagtggaccccctgcaccagctgatcctgctgttcagcagaaccgccctgaccgagaagtgcaagctggaggaggacttcctgtacatggcctacgccgacatcatggccaagagctgccacgacgaggaggacgacgacggcgaggaggaggtgaagagcttcgaggagaaggagatggagaagcagaagctgctgtaccagcaggccagactgcacgacagaggcgccgccgagatggtgctgcagaccatcagcgccagcaagggcgagaccggccccatggtggccgccaccctgaagctgggcatcgccatcctgaacggcggcaacagcaccgtgcagcagaagatgctggactacctgaaggagaagaaggacgtgggcttcttccagagcctggccggcctgatgcagagctgcagcgtgctggacctgaacgccttcgagagacagaacaaggccgagggcctgggcatggtgaccgaggagggcagcggcgagaaggtgctgcaggacgacgagttcacctgcgacctgttcagattcctgcagctgctgtgcgagggccacaacagcgacttccagaactacctgagaacccagaccggcaacaacaccaccgtgaacatcatcatcagcaccgtggactacctgctgagagtgcaggagagcatcagcgacttctactggtactacagcggcaaggacgtgatcgacgagcagggccagagaaacttcagcaaggccatccaggtggccaagcaggtgttcaacaccctgaccgagtacatccagggcccctgcaccggcaaccagcagagcctggcccacagcagactgtgggacgccgtggtgggcttcctgcacgtgttcgcccacatgcagatgaagctgagccaggacagcagccagatcgagctgctgaaggagctgatggacctgcagaaggacatggtggtgatgctgctgagcatgctggagggcaacgtggtgaacggcaccatcggcaagcagatggtggacatgctggtggagagcagcaacaacgtggagatgatcctgaagttcttcgacatgttcctgaagctgaaggacctgaccagcagcgacaccttcaaggagtacgaccccgacggcaagggcgtgatcagcaagagagacttccacaaggccatggagagccacaagcactacacccagagcgagaccgagttcctgctgagctgcgccgagaccgacgagaacgagaccctggactacgaggagttcgtgaagagattccacgagcccgccaaggacatcggcttcaacgtggccgtgctgctgaccaacctgagcgagcacatgcccaacgacaccagactgcagaccttcctggagctggccgagagcgtgctgaactacttccagcccttcctgggcagaatcgagatcatgggcagcgccaagagaatcgagagagtgtacttcgagatcagcgagagcagcagaacccagtgggagaagccccaggtgaaggagagcaagagacagttcatcttcgacgtggtgaacgagggcggcgagaaggagaagatggagctgttcgtgaacttctgcgaggacaccatcttcgagatgcagctggccgcccagatcagcgagagcgacctgaacgagagaagcgccaacaaggaggagagcgagaaggagagacccgaggagcagggccccagaatggccttcttcagcatcctgaccgtgagaagcgccctgttcgccctgagatacaacatcctgaccctgatgagaatgctgagcctgaagagcctgaagaagcagatgaagaaggtgaagaagatgaccgtgaaggacatggtgaccgccttcttcagcagctactggagcatcttcatgaccctgctgcacttcgtggccagcgtgttcagaggcttcttcagaatcatctgcagcctgctgctgggcggcagcctggtggagggcgccaagaagatcaaggtggccgagctgctggccaacatgcccgaccccacccaggacgaggtgagaggcgacggcgaggagggcgagagaaagcccctggaggccgccctgcccagcgaggacctgaccgacctgaaggagctgaccgaggagagcgacctgctgagcgacatcttcggcctggacctgaagagagagggcggccagtacaagctgatcccccacaaccccaacgccggcctgagcgacctgatgagcaaccccgtgcccatgcccgaggtgcaggagaagttccaggagcagaaggccaaggaggaggagaaggaggagaaggaggagaccaagagcgagcccgagaaggccgagggcgaggacggcgagaaggaggagaaggccaaggaggacaagggcaagcagaagctgagacagctgcacacccacagatacggcgagcccgaggtgcccgagagcgccttctggaagaagatcatcgcctaccagcagaagctgctgaactacttcgccagaaacttctacaacatgagaatgctggccctgttcgtggccttcgccatcaacttcatcctgctgttctacaaggtgagcaccagcagcgtggtggagggcaaggagctgcccaccagaagcagcagcgagaacgccaaggtgaccagcctggacagcagcagccacagaatcatcgccgtgcactacgtgctggaggagagcagcggctacatggagcccaccctgagaatcctggccatcctgcacaccgtgatcagcttcttctgcatcatcggctactactgcctgaaggtgcccctggtgatcttcaagagagagaaggaggtggccagaaagctggagttcgacggcctgtacatcaccgagcagcccagcgaggacgacatcaagggccagtgggacagactggtgatcaacacccagagcttccccaacaactactgggacaagttcgtgaagagaaaggtgatggacaagtacggcgagttctacggcagagacagaatcagcgagctgctgggcatggacaaggccgccctggacttcagcgacgccagagagaagaagaagcccaagaaggacagcagcctgagcgccgtgctgaacagcatcgacgtgaagtaccagatgtggaagctgggcgtggtgttcaccgacaacagcttcctgtacctggcctggtacatgaccatgagcgtgctgggccactacaacaacttcttcttcgccgcccacctgctggacatcgccatgggcttcaagaccctgagaaccatcctgagcagcgtgacccacaacggcaagcagctggtgctgaccgtgggcctgctggccgtggtggtgtacctgtacaccgtggtggccttcaacttcttcagaaagttctacaacaagagcgaggacggcgacacccccgacatgaagtgcgacgacatgctgacctgctacatgttccacatgtacgtgggcgtgagagccggcggcggcatcggcgacgagatcgaggaccccgccggcgacgagtacgagatctacagaatcatcttcgacatcaccttcttcttcttcgtgatcgtgatcctgctggccatcatccagggcctgatcatcgacgccttcggcgagctgagagaccagcaggagcaggtgaaggaggacatggagaccaagtgcttcatctgcggcatcggcaacgactacttcgacaccgtgccccacggcttcgagacccacaccctgcaggagcacaacctggccaactacctgttcttcctgatgtacctgatcaacaaggacgagaccgagcacaccggccaggagagctacgtgtggaagatgtaccaggagagatgctgggagttcttccccgccggcgactgcttcagaaagcagtacgaggaccagctgaactag

SEQ ID NO: 97913 - DNA, 987 bp, synthetic construct
  misc_feature 1..987: note = Description of Artificial Sequence: Synthetic coding sequence
  source 1..987: mol_type = other DNA
atggagcccaccctgagaatcctggccatcctgcacaccgtgatcagcttcttctgcatcatcggctactactgcctgaaggtgcccctggtgatcttcaagagagagaaggaggtggccagaaagctggagttcgacggcctgtacatcaccgagcagcccagcgaggacgacatcaagggccagtgggacagactggtgatcaacacccagagcttccccaacaactactgggacaagttcgtgaagagaaaggtgatggacaagtacggcgagttctacggcagagacagaatcagcgagctgctgggcatggacaaggccgccctggacttcagcgacgccagagagaagaagaagcccaagaaggacagcagcctgagcgccgtgctgaacagcatcgacgtgaagtaccagatgtggaagctgggcgtggtgttcaccgacaacagcttcctgtacctggcctggtacatgaccatgagcgtgctgggccactacaacaacttcttcttcgccgcccacctgctggacatcgccatgggcttcaagaccctgagaaccatcctgagcagcgtgacccacaacggcaagcagctggtgctgaccgtgggcctgctggccgtggtggtgtacctgtacaccgtggtggccttcaacttcttcagaaagttctacaacaagagcgaggacggcgacacccccgacatgaagtgcgacgacatgctgacctgctacatgttccacatgtacgtgggcgtgagagccggcggcggcatcggcgacgagatcgaggaccccgccggcgacgagtacgagatctacagaatcatcttcgacatcaccttcttcttcttcgtgatcgtgatcctgctggccatcatccagggcctgatcatcgacgccttcggcgagctgagagaccagcaggagcaggtgaaggaggacatggaggtgttcagcgacgtgagctacaagcagagatag

SEQ ID NO: 97914 - DNA, 645 bp, synthetic construct
  misc_feature 1..645: note = Description of Artificial Sequence: Synthetic coding sequence
  source 1..645: mol_type = other DNA
agcctgttctgcaagctgggcgtgctggtgagacacagaatcagcctgttcggcaacgacgccaccagcatcgtgaactgcctgcacatcctgggccagaccctggacgccagaaccgtgatgaagaccggcctggagagcgtgaagagcgccctgagagccttcctggacaacgccgccgaggacctggagaagaccatggagaacctgaagcagggccagttcacccacaccagaaaccagcccaagggcgtgacccagatcatcaactacaccaccgtggccctgctgcccatgctgagcagcctgttcgagcacatcggccagcaccagttcggcgaggacctgatcctggaggacgtgcaggtgagctgctacagaatcctgaccagcctgtacgccctgggcaccagcaagagcatctacgtggagagacagagaagcgccctgggcgagtgcctggccgccttcgccggcgccttccccgtggccttcctggagacccacctggacaagcacaacatctacagcatctacaacaccaagagcagcagagagagagccgccctgagcctgcccaccaacgtggaggacgtgtgccccaacatccccagcctggagaagctgatggaggagatcgtgtag

SEQ ID NO: 97915 - DNA, 4266 bp, synthetic construct
  misc_feature 1..4266: note = Description of Artificial Sequence: Synthetic coding sequence
  source 1..4266: mol_type = other DNA
atgaagaccggcctggagagcgtgaagagcgccctgagagccttcctggacaacgccgccgaggacctggagaagaccatggagaacctgaagcagggccagttcacccacaccagaaaccagcccaagggcgtgacccagatcatcaactacaccaccgtggccctgctgcccatgctgagcagcctgttcgagcacatcggccagcaccagttcggcgaggacctgatcctggaggacgtgcaggtgagctgctacagaatcctgaccagcctgtacgccctgggcaccagcaagagcatctacgtggagagacagagaagcgccctgggcgagtgcctggccgccttcgccggcgccttccccgtggccttcctggagacccacctggacaagcacaacatctacagcatctacaacaccaagagcagcagagagagagccgccctgagcctgcccaccaacgtggaggacgtgtgccccaacatccccagcctggagaagctgatggaggagatcgtggagctggccgagagcggcatcagatacacccagatgccccacgtgatggaggtgatcctgcccatgctgtgcagctacatgagcagatggtgggagcacggccccgagaacaaccccgagagagccgagatgtgctgcaccgccctgaacagcgagcacatgaacaccctgctgggcaacatcctgaagatcatctacaacaacctgggcatcgacgagggcgcctggatgaagagactggccgtgttcagccagcccatcatcaacaaggtgaagccccagctgctgaagacccacttcctgcccctgatggagaagctgaagaagaaggccgccaccgtggtgagcgaggaggaccacctgaaggccgaggccagaggcgacatgagcgaggccgagctgctgatcctggacgagttcaccaccctggccagagacctgtacgccttctaccccctgctgatcagattcgtggactacaacagagccaagtggctgaaggagcccaaccccgaggccgaggagctgttcagaatggtggccgaggtgttcatctactggagcaagagccacaacttcaagagagaggagcagaacttcgtggtgcagaacgagatcaacaacatgagcttcctgatcaccgacaccaagagcaagatgagcaaggccgccgtgagcgaccaggagagaaagaagatgaagagaaagggcgacagatacagcatgcagaccagcctgatcgtggccgccctgaagagactgctgcccatcggcctgaacatctgcgcccccggcgaccaggagctgatcgccctggccaagaacagattcagcctgaaggacaccgaggacgaggtgagagacatcatcagaagcaacatccacctgcagggcaagctggaggaccccgccatcagatggcagatggccctgtacaaggacctgcccaacagaaccgacgacaccagcgaccccgagaagaccgtggagagagtgctggacatcgccaacgtgctgttccacctggagcagaagagcaagagagtgggcagaagacactactgcctggtggagcacccccagagaagcaagaaggccgtgtggcacaagctgctgagcaagcagagaaagagagccgtggtggcctgcttcagaatggcccccctgtacaacctgcccagacacagagccgtgaacctgttcctgcagggctacgagaagagctggatcgagaccgaggagcactacttcgaggacaagctgatcgaggacctggccaagcccggcgccgagccccccgaggaggacgagggcaccaagagagtggaccccctgcaccagctgatcctgctgttcagcagaaccgccctgaccgagaagtgcaagctggaggaggacttcctgtacatggcctacgccgacatcatggccaagagctgccacgacgaggaggacgacgacggcgaggaggaggtgaagagcttcgagcacgacatcatcaaggacctgagaaacaagttcgccagcctgggcgagaacagcctggagaaggagatggagaagcagaagctgctgtaccagcaggccagactgcacgacagaggcgccgccgagatggtgctgcagaccatcagcgccagcaagggcgagaccggccccatggtggccgccaccctgaagctgggcatcgccatcctgaacggcggcaacagcaccgtgcagcagaagatgctggactacctgaaggagaagaaggacgtgggcttcttccagagcctggccggcctgatgcagagctgcagcgtgctggacctgaacgccttcgagagacagaacaaggccgagggcctgggcatggtgaccgaggagggcagcggcgagaaggtgctgcaggacgacgagttcacctgcgacctgttcagattcctgcagctgctgtgcgagggccacaacagcgacttccagaactacctgagaacccagaccggcaacaacaccaccgtgaacatcatcatcagcaccgtggactacctgctgagagtgcaggagagcatcagcgacttctactggtactacagcggcaaggacgtgatcgacgagcagggccagagaaacttcagcaaggccatccaggtggccaagcaggtgttcaacaccctgaccgagtacatccagggcccctgcaccggcaaccagcagagcctggcccacagcagactgtgggacgccgtggtgggcttcctgcacgtgttcgcccacatgcagatgaagctgagccaggacagcagccagatcgagctgctgaaggagctgatggacctgcagaaggacatggtggtgatgctgctgagcatgctggagggcaacgtggtgaacggcaccatcggcaagcagatggtggacatgctggtggagagcagcaacaacgtggagatgatcctgaagttcttcgacatgttcctgaagctgaaggacctgaccagcagcgacaccttcaaggagtacgaccccgacggcaagggcgtgatcagcaagagagacttccacaaggccatggagagccacaagcactacacccagagcgagaccgagttcctgctgagctgcgccgagaccgacgagaacgagaccctggactacgaggagttcgtgaagagattccacgagcccgccaaggacatcggcttcaacgtggccgtgctgctgaccaacctgagcgagcacatgcccaacgacaccagactgcagaccttcctggagctggccgagagcgtgctgaactacttccagcccttcctgggcagaatcgagatcatgggcagcgccaagagaatcgagagagtgtacttcgagatcagcgagagcagcagaacccagtgggagaagccccaggtgaaggagagcaagagacagttcatcttcgacgtggtgaacgagggcggcgagaaggagaagatggagctgttcgtgaacttctgcgaggacaccatcttcgagatgcagctggccgcccagatcagcgagagcgacctgaacgagagaagcgccaacaaggaggagagcgagaaggagagacccgaggagcagggccccagaatggccttcttcagcatcctgaccgtgagaagcgccctgttcgccctgagatacaacatcctgaccctgatgagaatgctgagcctgaagagcctgaagaagcagatgaagaaggtgaagaagatgaccgtgaaggacatggtgaccgccttcttcagcagctactggagcatcttcatgaccctgctgcacttcgtggccagcgtgttcagaggcttcttcagaatcatctgcagcctgctgctgggcggcagcctggtggagggcgccaagaagatcaaggtggccgagctgctggccaacatgcccgaccccacccaggacgaggtgagaggcgacggcgaggagggcgagagaaagcccctggaggccgccctgcccagcgaggacctgaccgacctgaaggagctgaccgaggagagcgacctgctgagcgacatcttcggcctggacctgaagagagagggcggccagtacaagctgatcccccacaaccccaacgccggcctgagcgacctgatgagcaaccccgtgcccatgcccgaggtgcaggagaagttccaggagcagaaggccaaggaggaggagaaggaggagaaggaggagaccaagagcgagcccgagaaggccgagggcgaggacggctag

SEQ ID NO: 97916 - DNA, 14856 bp, synthetic construct
  misc_feature 1..14856: note = Description of Artificial Sequence: Synthetic coding sequence
  source 1..14856: mol_type = other DNA
gacgacgaggtggtgctgcagtgcaccgccaccatccacaaggagcagcagaagctgtgcctggccgccgagggcttcggcaacagactgtgcttcctggagagcaccagcaacagcaagaacgtgccccccgacctgagcatctgcaccttcgtgctggagcagagcctgagcgtgagagccctgcaggagatgctggccaacaccgtggagaagagcgagggccaggtggacgtggagaagtggaagttcatgatgaagaccgcccagggcggcggccacagaaccctgctgtacggccacgccatcctgctgagacacagctacagcggcatgtacctgtgctgcctgagcaccagcagaagcagcaccgacaagctggccttcgacgtgggcctgcaggaggacaccaccggcgaggcctgctggtggaccatccaccccgccagcaagcagagaagcgagggcgagaaggtgagagtgggcgacgacctgatcctggtgagcgtgagcagcgagagatacctgcacctgagctacggcaacggcagcctgcacgtggacgccgccttccagcagaccctgtggagcgtggcccccatcagcagcggcagcgaggccgcccagggctacctgatcggcggcgacgtgctgagactgctgcacggccacatggacgagtgcctgaccgtgcccagcggcgagcacggcgaggagcagagaagaaccgtgcactacgagggcggcgccgtgagcgtgcacgccagaagcctgtggagactggagaccctgagagtggcctggagcggcagccacatcagatggggccagcccttcagactgagacacgtgaccaccggcaagtacctgagcctgatggaggacaagaacctgctgctgatggacaaggagaaggccgacgtgaagagcaccgccttcaccttcagaagcagcaaggagaagctggacgtgggcgtgagaaaggaggtggacggcatgggcaccagcgagatcaagtacggcgacagcgtgtgctacatccagcacgtggacaccggcctgtggctgacctaccagagcgtggacgtgaagagcgtgagaatgggcagcatccagagaaaggccatcatgcaccacgagggccacatggacgacggcatcagcctgagcagaagccagcacgaggagagcagaaccgccagagtgatcagaagcaccgtgttcctgttcaacagattcatcagaggcctggacgccctgagcaagaaggccaaggccagcaccgtggacctgcccatcgagagcgtgagcctgagcctgcaggacctgatcggctacttccacccccccgacgagcacctggagcacgaggacaagcagaacagactgagagccctgaagaacagacagaacctgttccaggaggagggcatgatcaacctggtgctggagtgcatcgacagactgcacgtgtacagcagcgccgcccacttcgccgacgtggccggcagagaggccggcgagagctggaagagcatcctgaacagcctgtacgagctgctggccgccctgatcagaggcaacagaaagaactgcgcccagttcagcggcagcctggactggctgatcagcagactggagagactggaggccagcagcggcatcctggaggtgctgcactgcgtgctggtggagagccccgaggccctgaacatcatcaaggagggccacatcaagagcatcatcagcctgctggacaagcacggcagaaaccacaaggtgctggacgtgctgtgcagcctgtgcgtgtgccacggcgtggccgtgagaagcaaccagcacctgatctgcgacaacctgctgcccggcagagacctgctgctgcagaccagactggtgaaccacgtgagcagcatgagacccaacatcttcctgggcgtgagcgagggcagcgcccagtacaagaagtggtactacgagctgatggtggaccacaccgagcccttcgtgaccgccgaggccacccacctgagagtgggctgggccagcaccgagggctacagcccctaccccggcggcggcgaggagtggggcggcaacggcgtgggcgacgacctgttcagctacggcttcgacggcctgcacctgtggagcggctgcatcgccagaaccgtgagcagccccaaccagcacctgctgagaaccgacgacgtgatcagctgctgcctggacctgagcgcccccagcatcagcttcagaatcaacggccagcccgtgcagggcatgttcgagaacttcaacatcgacggcctgttcttccccgtggtgagcttcagcgccggcatcaaggtgagattcctgctgggcggcagacacggcgagttcaagttcctgcccccccccggctacgccccctgctacgaggccgtgctgcccaaggagaagctgaaggtggagcacagcagagagtacaagcaggagagaacctacaccagagacctgctgggccccaccgtgagcctgacccaggccgccttcacccccatccccgtggacaccagccagatcgtgctgcccccccacctggagagaatcagagagaagctggccgagaacatccacgagctgtgggtgatgaacaagatcgagctgggctggcagtacggccccgtgagagacgacaacaagagacagcacccctgcctggtggagttcagcaagctgcccgagcaggagagaaactacaacctgcagatgagcctggagaccctgaagaccctgctggccctgggctgccacgtgggcatcagcgacgagcacgccgaggacaaggtgaagaagatgaagctgcccaagaactaccagctgaccagcggctacaagcccgcccccatggacctgagcttcatcaagctgacccccagccaggaggccatggtggacaagctggccgagaacgcccacaacgtgtgggccagagacagaatcagacagggctggacctacggcatccagcaggacgtgaagaacagaagaaaccccagactggtgccctacaccctgctggacgacagaaccaagaagagcaacaaggacagcctgagagaggccgtgagaaccctgctgggctacggctacaacctggaggcccccgaccaggaccacgccgccagagccgaggtgtgcagcggcaccggcgagagattcagaatcttcagagccgagaagacctacgccgtgaaggccggcagatggtacttcgagttcgagaccgtgaccgccggcgacatgagagtgggctggagcagacccggctgccagcccgaccaggagctgggcagcgacgagagagccttcgccttcgacggcttcaaggcccagagatggcaccagggcaacgagcactacggcagaagctggcaggccggcgacgtggtgggctgcatggtggacatgaacgagcacaccatgatgttcaccctgaacggcgagatcctgctggacgacagcggcagcgagctggccttcaaggacttcgacgtgggcgacggcttcatccccgtgtgcagcctgggcgtggcccaggtgggcagaatgaacttcggcaaggacgtgagcaccctgaagtacttcaccatctgcggcctgcaggagggctacgagcccttcgccgtgaacaccaacagagacatcaccatgtggctgagcaagagactgccccagttcctgcaggtgcccagcaaccacgagcacatcgaggtgaccagaatcgacggcaccatcgacagcagcccctgcctgaaggtgacccagaagagcttcggcagccagaacagcaacaccgacatcatgttctacagactgagcatgcccatcgagtgcgccgaggtgttcagcaagaccgtggccggcggcctgcccggcgccggcctgttcggccccaagaacgacctggaggactacgacgccgacagcgacttcgaggtgctgatgaagaccgcccacggccacctggtgcccgacagagtggacaaggacaaggaggccaccaagcccgagttcaacaaccacaaggactacgcccaggagaagcccagcagactgaagcagagattcctgctgagaagaaccaagcccgactacagcaccagccacagcgccagactgaccgaggacgtgctggccgacgacagagacgactacgacttcctgatgcagaccagcacctactactacagcgtgagaatcttccccggccaggagcccgccaacgtgtgggtgggctggatcaccagcgacttccaccagtacgacaccggcttcgacctggacagagtgagaaccgtgaccgtgaccctgggcgacgagaagggcaaggtgcacgagagcatcaagagaagcaactgctacatggtgtgcgccggcgagagcatgagccccggccagggcagaaacaacaacggcctggagatcggctgcgtggtggacgccgccagcggcctgctgaccttcatcgccaacggcaaggagctgagcacctactaccaggtggagcccagcaccaagctgttccccgccgtgttcgcccaggccaccagccccaacgtgttccagttcgagctgggcagaatcaagaacgtgatgcccctgagcgccggcctgttcaagagcgagcacaagaaccccgtgccccagtgcccccccagactgcacgtgcagttcctgagccacgtgctgtggagcagaatgcccaaccagttcctgaaggtggacgtgagcagaatcagcgagagacagggctggctggtgcagtgcctggaccccctgcagttcatgagcctgcacatccccgaggagaacagaagcgtggacatcctggagctgaccgagcaggaggagctgctgaagttccactaccacaccctgagactgtacagcgccgtgtgcgccctgggcaaccacagagtggcccacgccctgtgcagccacgtggacgagccccagctgctgtacgccatcgagaacaagtacatgcccggcctgctgagagccggctactacgacctgctgatcgacatccacctgagcagctacgccaccgccagactgatgatgaacaacgagtacatcgtgcccatgaccgaggagaccaagagcatcaccctgttccccgacgagaacaagaagcacggcctgcccggcatcggcctgagcaccagcctgagacccagaatgcagttcagcagccccagcttcgtgagcatcagcaacgagtgctaccagtacagccccgagttccccctggacatcctgaagagcaagaccatccagatgctgaccgaggccgtgaaggagggcagcctgcacgccagagaccccgtgggcggcaccaccgagttcctgttcgtgcccctgatcaagctgttctacaccctgctgatcatgggcatcttccacaacgaggacctgaagcacatcctgcagctgatcgagcccagcgtgttcaaggaggccgccacccccgaggaggagagcgacaccctggagaaggagctgagcgtggacgacgccaagctgcagggcgccggcgaggaggaggccaagggcggcaagagacccaaggagggcctgctgcagatgaagctgcccgagcccgtgaagctgcagatgtgcctgctgctgcagtacctgtgcgactgccaggtgagacacagaatcgaggccatcgtggccttcagcgacgacttcgtggccaagctgcaggacaaccagagattcagatacaacgaggtgatgcaggccctgaacatgagcgccgccctgaccgccagaaagaccaaggagttcagaagccccccccaggagcagatcaacatgctgctgaacttcaaggacgacaagagcgagtgcccctgccccgaggagatcagagaccagctgctggacttccacgaggacctgatgacccactgcggcatcgagctggacgaggacggcagcctggacggcaacagcgacctgaccatcagaggcagactgctgagcctggtggagaaggtgacctacctgaagaagaagcaggccgagaagcccgtggagagcgacagcaagaagagcagcaccctgcagcagctgatcagcgagaccatggtgagatgggcccaggagagcgtgatcgaggaccccgagctggtgagagccatgttcgtgctgctgcacagacagtacgacggcatcggcggcctggtgagagccctgcccaagacctacaccatcaacggcgtgagcgtggaggacaccatcaacctgctggccagcctgggccagatcagaagcctgctgagcgtgagaatgggcaaggaggaggagaagctgatgatcagaggcctgggcgacatcatgaacaacaaggtgttctaccagcaccccaacctgatgagagccctgggcatgcacgagaccgtgatggaggtgatggtgaacgtgctgggcggcggcgagagcaaggagatcaccttccccaagatggtggccaactgctgcagattcctgtgctacttctgcagaatcagcagacagaaccagaaggccatgttcgaccacctgagctacctgctggagaacagcagcgtgggcctggccagccccgccatgagaggcagcacccccctggacgtggccgccgccagcgtgatggacaacaacgagctggccctggccctgagagagcccgacctggagaaggtggtgagatacctggccggctgcggcctgcagagctgccagatgctggtgagcaagggctaccccgacatcggctggaaccccgtggagggcgagagatacctggacttcctgagattcgccgtgttctgcaacggcgagagcgtggaggagaacgccaacgtggtggtgagactgctgatcagaagacccgagtgcttcggccccgccctgagaggcgagggcggcaacggcctgctggccgccatggaggaggccatcaagatcgccgaggaccccagcagagacggccccagccccaacagcggcagcagcaagaccctggacaccgaggaggaggaggacgacaccatccacatgggcaacgccatcatgaccttctacagcgccctgatcgacctgctgggcagatgcgcccccgagatgcacctgatccacgccggcaagggcgaggccatcagaatcagaagcatcctgagaagcctgatccccctgggcgacctggtgggcgtgatcagcatcgccttccagatgcccaccatcgccaaggacggcaacgtggtggagcccgacatgagcgccggcttctgccccgaccacaaggccgccatggtgctgttcctggacagagtgtacggcatcgaggtgcaggacttcctgctgcacctgctggaggtgggcttcctgcccgacctgagagccgccgccagcctggacaccgccgccctgagcgccaccgacatggccctggccctgaacagatacctgtgcaccgccgtgctgcccctgctgaccagatgcgcccccctgttcgccggcaccgagcaccacgccagcctgatcgacagcctgctgcacaccgtgtacagactgagcaagggctgcagcctgaccaaggcccagagagacagcatcgaggtgtgcctgctgagcatctgcggccagctgagacccagcatgatgcagcacctgctgagaagactggtgttcgacgtgcccctgctgaacgagcacgccaagatgcccctgaagctgctgaccaaccactacgagagatgctggaagtactactgcctgcccggcggctggggcaacttcggcgccgccagcgaggaggagctgcacctgagcagaaagctgttctggggcatcttcgacgccctgagccagaagaagtacgagcaggagctgttcaagctggccctgccctgcctgagcgccgtggccggcgccctgccccccgactacatggagagcaactacgtgagcatgatggagaagcagagcagcatggacagcgagggcaacttcaacccccagcccgtggacaccagcaacatcaccatccccgagaagctggagtacttcatcaacaagtacgccgagcacagccacgacaagtggagcatggacaagctggccaacggctggatctacggcgagatctacagcgacagcagcaaggtgcagcccctgatgaagccctacaagctgctgagcgagaaggagaaggagatctacagatggcccatcaaggagagcctgaagaccatgctggcctggggctggagaatcgagagaaccagagagggcgacagcatggccctgtacaacagaaccagaagaatcagccagaccagccaggtgagcgtggacgccgcccacggctacagccccagagccatcgacatgagcaacgtgaccctgagcagagacctgcacgccatggccgagatgatggccgagaactaccacaacatctgggccaagaagaagaagatggagctggagagcaagggcggcggcaaccaccccctgctggtgccctacgacaccctgaccgccaaggagaaggccaaggacagagagaaggcccaggacatcctgaagttcctgcagatcaacggctacgccgtgagcagaggcttcaaggacctggagctggacacccccagcatcgagaagagattcgcctacagcttcctgcagcagctgatcagatacgtggacgaggcccaccagtacatcctggagttcgacggcggcagcagaggcaagggcgagcacttcccctacgagcaggagatcaagttcttcgccaaggtggtgctgcccctgatcgaccagtacttcaagaaccacagactgtacttcctgagcgccgccagcagacccctgtgcagcggcggccacgccagcaacaaggagaaggagatggtgaccagcctgttctgcaagctgggcgtgctggtgagacacagaatcagcctgttcggcaacgacgccaccagcatcgtgaactgcctgcacatcctgggccagaccctggacgccagaaccgtgatgaagaccggcctggagagcgtgaagagcgccctgagagccttcctggacaacgccgccgaggacctggagaagaccatggagaacctgaagcagggccagttcacccacaccagaaaccagcccaagggcgtgacccagatcatcaactacaccaccgtggccctgctgcccatgctgagcagcctgttcgagcacatcggccagcaccagttcggcgaggacctgatcctggaggacgtgcaggtgagctgctacagaatcctgaccagcctgtacgccctgggcaccagcaagagcatctacgtggagagacagagaagcgccctgggcgagtgcctggccgccttcgccggcgccttccccgtggccttcctggagacccacctggacaagcacaacatctacagcatctacaacaccaagagcagcagagagagagccgccctgagcctgcccaccaacgtggaggacgtgtgccccaacatccccagcctggagaagctgatggaggagatcgtggagctggccgagagcggcatcagatacacccagatgccccacgtgatggaggtgatcctgcccatgctgtgcagctacatgagcagatggtgggagcacggccccgagaacaaccccgagagagccgagatgtgctgcaccgccctgaacagcgagcacatgaacaccctgctgggcaacatcctgaagatcatctacaacaacctgggcatcgacgagggcgcctggatgaagagactggccgtgttcagccagcccatcatcaacaaggtgaagccccagctgctgaagacccacttcctgcccctgatggagaagctgaagaagaaggccgccaccgtggtgagcgaggaggaccacctgaaggccgaggccagaggcgacatgagcgaggccgagctgctgatcctggacgagttcaccaccctggccagagacctgtacgccttctaccccctgctgatcagattcgtggactacaacagagccaagtggctgaaggagcccaaccccgaggccgaggagctgttcagaatggtggccgaggtgttcatctactggagcaagagccacaacttcaagagagaggagcagaacttcgtggtgcagaacgagatcaacaacatgagcttcctgatcaccgacaccaagagcaagatgagcaaggccgccgtgagcgaccaggagagaaagaagatgaagagaaagggcgacagatacagcatgcagaccagcctgatcgtggccgccctgaagagactgctgcccatcggcctgaacatctgcgcccccggcgaccaggagctgatcgccctggccaagaacagattcagcctgaaggacaccgaggacgaggtgagagacatcatcagaagcaacatccacctgcagggcaagctggaggaccccgccatcagatggcagatggccctgtacaaggacctgcccaacagaaccgacgacaccagcgaccccgagaagaccgtggagagagtgctggacatcgccaacgtgctgttccacctggagcagaagagcaagagagtgggcagaagacactactgcctggtggagcacccccagagaagcaagaaggccgtgtggcacaagctgctgagcaagcagagaaagagagccgtggtggcctgcttcagaatggcccccctgtacaacctgcccagacacagagccgtgaacctgttcctgcagggctacgagaagagctggatcgagaccgaggagcactacttcgaggacaagctgatcgaggacctggccaagcccggcgccgagccccccgaggaggacgagggcaccaagagagtggaccccctgcaccagctgatcctgctgttcagcagaaccgccctgaccgagaagtgcaagctggaggaggacttcctgtacatggcctacgccgacatcatggccaagagctgccacgacgaggaggacgacgacggcgaggaggaggtgaagagcttcgaggagaaggagatggagaagcagaagctgctgtaccagcaggccagactgcacgacagaggcgccgccgagatggtgctgcagaccatcagcgccagcaagggcgagaccggccccatggtggccgccaccctgaagctgggcatcgccatcctgaacggcggcaacagcaccgtgcagcagaagatgctggactacctgaaggagaagaaggacgtgggcttcttccagagcctggccggcctgatgcagagctgcagcgtgctggacctgaacgccttcgagagacagaacaaggccgagggcctgggcatggtgaccgaggagggcagcggcgagaaggtgctgcaggacgacgagttcacctgcgacctgttcagattcctgcagctgctgtgcgagggccacaacagcgacttccagaactacctgagaacccagaccggcaacaacaccaccgtgaacatcatcatcagcaccgtggactacctgctgagagtgcaggagagcatcagcgacttctactggtactacagcggcaaggacgtgatcgacgagcagggccagagaaacttcagcaaggccatccaggtggccaagcaggtgttcaacaccctgaccgagtacatccagggcccctgcaccggcaaccagcagagcctggcccacagcagactgtgggacgccgtggtgggcttcctgcacgtgttcgcccacatgcagatgaagctgagccaggacagcagccagatcgagctgctgaaggagctgatggacctgcagaaggacatggtggtgatgctgctgagcatgctggagggcaacgtggtgaacggcaccatcggcaagcagatggtggacatgctggtggagagcagcaacaacgtggagatgatcctgaagttcttcgacatgttcctgaagctgaaggacctgaccagcagcgacaccttcaaggagtacgaccccgacggcaagggcgtgatcagcaagagagacttccacaaggccatggagagccacaagcactacacccagagcgagaccgagttcctgctgagctgcgccgagaccgacgagaacgagaccctggactacgaggagttcgtgaagagattccacgagcccgccaaggacatcggcttcaacgtggccgtgctgctgaccaacctgagcgagcacatgcccaacgacaccagactgcagaccttcctggagctggccgagagcgtgctgaactacttccagcccttcctgggcagaatcgagatcatgggcagcgccaagagaatcgagagagtgtacttcgagatcagcgagagcagcagaacccagtgggagaagccccaggtgaaggagagcaagagacagttcatcttcgacgtggtgaacgagggcggcgagaaggagaagatggagctgttcgtgaacttctgcgaggacaccatcttcgagatgcagctggccgcccagatcagcgagagcgacctgaacgagagaagcgccaacaaggaggagagcgagaaggagagacccgaggagcagggccccagaatggccttcttcagcatcctgaccgtgagaagcgccctgttcgccctgagatacaacatcctgaccctgatgagaatgctgagcctgaagagcctgaagaagcagatgaagaaggtgaagaagatgaccgtgaaggacatggtgaccgccttcttcagcagctactggagcatcttcatgaccctgctgcacttcgtggccagcgtgttcagaggcttcttcagaatcatctgcagcctgctgctgggcggcagcctggtggagggcgccaagaagatcaaggtggccgagctgctggccaacatgcccgaccccacccaggacgaggtgagaggcgacggcgaggagggcgagagaaagcccctggaggccgccctgcccagcgaggacctgaccgacctgaaggagctgaccgaggagagcgacctgctgagcgacatcttcggcctggacctgaagagagagggcggccagtacaagctgatcccccacaaccccaacgccggcctgagcgacctgatgagcaaccccgtgcccatgcccgaggtgcaggagaagttccaggagcagaaggccaaggaggaggagaaggaggagaaggaggagaccaagagcgagcccgagaaggccgagggcgaggacggcgagaaggaggagaaggccaaggaggacaagggcaagcagaagctgagacagctgcacacccacagatacggcgagcccgaggtgcccgagagcgccttctggaagaagatcatcgcctaccagcagaagctgctgaactacttcgccagaaacttctacaacatgagaatgctggccctgttcgtggccttcgccatcaacttcatcctgctgttctacaaggtgagcaccagcagcgtggtggagggcaaggagctgcccaccagaagcagcagcgagaacgccaaggtgaccagcctggacagcagcagccacagaatcatcgccgtgcactacgtgctggaggagagcagcggctacatggagcccaccctgagaatcctggccatcctgcacaccgtgatcagcttcttctgcatcatcggctactactgcctgaaggtgcccctggtgatcttcaagagagagaaggaggtggccagaaagctggagttcgacggcctgtacatcaccgagcagcccagcgaggacgacatcaagggccagtgggacagactggtgatcaacacccagagcttccccaacaactactgggacaagttcgtgaagagaaaggtgatggacaagtacggcgagttctacggcagagacagaatcagcgagctgctgggcatggacaaggccgccctggacttcagcgacgccagagagaagaagaagcccaagaaggacagcagcctgagcgccgtgctgaacagcatcgacgtgaagtaccagatgtggaagctgggcgtggtgttcaccgacaacagcttcctgtacctggcctggtacatgaccatgagcgtgctgggccactacaacaacttcttcttcgccgcccacctgctggacatcgccatgggcttcaagaccctgagaaccatcctgagcagcgtgacccacaacggcaagcagctggtgctgaccgtgggcctgctggccgtggtggtgtacctgtacaccgtggtggccttcaacttcttcagaaagttctacaacaagagcgaggacggcgacacccccgacatgaagtgcgacgacatgctgacctgctacatgttccacatgtacgtgggcgtgagagccggcggcggcatcggcgacgagatcgaggaccccgccggcgacgagtacgagatctacagaatcatcttcgacatcaccttcttcttcttcgtgatcgtgatcctgctggccatcatccagggcctgatcatcgacgccttcggcgagctgagagaccagcaggagcaggtgaaggaggacatggagaccaagtgcttcatctgcggcatcggcaacgactacttcgacaccgtgccccacggcttcgagacccacaccctgcaggagcacaacctggccaactacctgttcttcctgatgtacctgatcaacaaggacgagaccgagcacaccggccaggagagctacgtgtggaagatgtaccaggagagatgctgggagttcttccccgccggcgactgcttcagaaagcagtacgaggaccagctgaactag

SEQ ID NO: 97917 - DNA, 14601 bp, synthetic construct
  misc_feature 1..14601: note = Description of Artificial Sequence: Synthetic coding sequence
  source 1..14601: mol_type = other DNA
atggccgagctgggcggcggcggcgaggaggacgccagatggtacagaaaggaggacgaggtggtgctgcagtgcatcgccaccatccacaaggagcagagaaagttctgcctggccgccgagggcctgggcaacagactgtgcttcctggagcccaccagcgaggccaagtacatcccccccgacctgtgcgtgtgcaacttcgtgctggagcagagcctgagcgtgagagccctgcaggagatgctggccaacaccggcgagaacggcggcgagggcgccgcccagggcggcggccacagaaccctgctgtacggccacgccgtgctgctgagacacagcttcagcggcatgtacctgacctgcctgaccaccagcagaagccagaccgacaagctggccttcgacgtgggcctgagagagcacgccaccggcgaggcctgctggtggaccatccaccccgccagcaagcagagaagcgagggcgagaaggtgagaatcggcgacgacctgatcctggtgagcgtgagcagcgagagatacctgcacctgagcgtgagcaacggcaacatccaggtggacgccagcttcatgcagaccctgtggaacgtgcaccccacctgcagcggcagcagcatcgaggagggctacctgctgggcggccacgtggtgagactgttccacggccacgacgagtgcctgaccatccccagcaccgaccagaacgacagccagcacagaagaatcttctacgaggccggcggcgccggcaccagagccagaagcctgtggagagtggagcccctgagaatcagctggagcggcagcaacatcagatggggccaggccttcagactgagacacctgaccaccggccactacctggccctgaccgaggaccagggcctgatcctgcaggacagagccaagagcgacaccaagagcaccgccttcagcttcagagccagcaaggagctgaaggagaagctggacagcagccacaagagagacatcgagggcatgggcgtgcccgagatcaagtacggcgacagcgtgtgcttcgtgcagcacatcgccagcggcctgtgggtgacctacaaggcccaggacgccaagaccagcagactgggccccctgaagagaaaggtgatcctgcaccaggagggccacatggacgacggcctgaccctgcagagatgccagagagaggagagccaggccgccagaatcatcagaaacaccaccgccctgttcagccagttcgtgagcggcaacaacagaaccgccgcccccatcaccctgcccatcgaggaggtgctgcagaccctgcaggacctgatcgcctacttccagccccccgaggaggagatgagacacgaggacaagcagaacaagctgagaagcctgaagaacagacagaacctgttcaaggaggagggcatgctggccctggtgctgaactgcatcgacagactgaacgtgtacaacagcgtggcccacttcgccggcatcgccagagaggagagcggcatggcctggaaggagatcctgaacctgctgtacaagctgctggccgccctgatcagaggcaacagaaacaactgcgcccagttcagcaacaacctggactggctgatcagcaagctggacagactggagagcagcagcggcatcctggaggtgctgcactgcatcctgaccgagagccccgaggccctgaacctgatcgccgagggccacatcaagagcatcatcagcctgctggacaagcacggcagaaaccacaaggtgctggacatcctgtgcagcctgtgcctgtgcaacggcgtggccgtgagagccaaccagaacctgatctgcgacaacctgctgcccagaagaaacctgctgctgcagaccagactgatcaacgacgtgaccagcatcagacccaacatcttcctgggcgtggccgagggcagcgcccagtacaagaagtggtacttcgagctgatcatcgaccaggtggaccccttcctgaccgccgagcccacccacctgagagtgggctgggccagcagcagcggctacgccccctaccccggcggcggcgagggctggggcggcaacggcgtgggcgacgacctgtacagctacggcttcgacggcctgcacctgtggagcggcagaatccccagagccgtggccagcatcaaccagcacctgctgagaagcgacgacgtggtgagctgctgcctggacctgggcgtgcccagcatcagcttcagaatcaacggccagcccgtgcagggcatgttcgagaacttcaacaccgacggcctgttcttccccgtgatgagcttcagcgccggcgtgaaggtgagattcctgatgggcggcagacacggcgagttcaagttcctgccccccagcggctacgccccctgctacgaggccctgctgcccaaggagaagatgagactggagcccgtgaaggagtacaagagagacgccgacggcatcagagacctgctgggcaccacccagttcctgagccaggccagcttcatcccctgccccgtggacaccagccaggtgatcctgcccccccacctggagaagatcagagacagactggccgagaacatccacgagctgtggggcatgaacaagatcgagctgggctggaccttcggcaagatcagagacgacaacaagagacagcacccctgcctggtggagttcagcaagctgcccgagaccgagaagaactacaacctgcagatgagcaccgagaccctgaagaccctgctggccctgggctgccacatcgcccacgtgaaccccgccgccgaggaggacctgaagaaggtgaagctgcccaagaactacatgatgagcaacggctacaagcccgcccccctggacctgagcgacgtgaagctgctgcccccccaggagatcctggtggacaagctggccgagaacgcccacaacgtgtgggccaaggacagaatcaagcagggctggacctacggcatccagcaggacctgaagaacaagagaaaccccagactggtgccctacgccctgctggacgagagaaccaagaagagcaacagagacagcctgagagaggccgtgagaaccttcgtgggctacggctacaacatcgagcccagcgaccaggagctggccgacagcgccgtggagaaggtgagcatcgacaagatcagattcttcagagtggagagaagctacgccgtgagaagcggcaagtggtacttcgagttcgaggtggtgaccggcggcgacatgagagtgggctgggccagacccggctgcagacccgacgtggagctgggcgccgacgaccaggccttcgtgttcgagggcaacagaggccagagatggcaccagggcagcggctacttcggcagaacctggcagcccggcgacgtggtgggctgcatgatcaacctggacgacgccagcatgatcttcaccctgaacggcgagctgctgatcaccaacaagggcagcgagctggccttcgccgactacgagatcgagaacggcttcgtgcccatctgctgcctgggcctgagccagatcggcagaatgaacctgggcaccgacgccagcaccttcaagttctacaccatgtgcggcctgcaggagggcttcgagcccttcgccgtgaacatgaacagagacgtggccatgtggttcagcaagagactgcccaccttcgtgaacgtgcccaaggaccacccccacatcgaggtgatgagaatcgacggcaccatggacagccccccctgcctgaaggtgacccacaagaccttcggcacccagaacagcaacgccgacatgatctactgcagactgagcatgcccgtggagtgccacagcagcttcagccacagcccctgcctggacagcgaggccttccagaagagaaagcagatgcaggagatcctgagccacaccaccacccagtgctactacgccatcagaatcttcgccggccaggaccccagctgcgtgtgggtgggctgggtgacccccgactaccacctgtacagcgagaagttcgacctgaacaagaactgcaccgtgaccgtgaccctgggcgacgagagaggcagagtgcacgagagcgtgaagagaagcaactgctacatggtgtggggcggcgacatcgtggccagcagccagagaagcaacagaagcaacgtggacctggagatcggctgcctggtggacctggccatgggcatgctgagcttcagcgccaacggcaaggagctgggcacctgctaccaggtggagcccaacaccaaggtgttccccgccgtgttcctgcagcccaccagcaccagcctgttccagttcgagctgggcaagctgaagaacgccatgcccctgagcgccgccatcttcagaagcgaggagaagaaccccgtgccccagtgcccccccagactggacgtgcagaccatccagcccgtgctgtggagcagaatgcccaacagcttcctgaaggtggagaccgagagagtgagcgagagacacggctgggtggtgcagtgcctggagcccctgcagatgatggccctgcacatccccgaggagaacagatgcgtggacatcctggagctgtgcgagcaggaggacctgatgagattccactaccacaccctgagactgtacagcgccgtgtgcgccctgggcaacagcagagtggcctacgccctgtgcagccacgtggacctgagccagctgttctacgccatcgacaacaagtacctgcccggcctgctgagaagcggcttctacgacctgctgatcagcatccacctggccagcgccaaggagagaaagctgatgatgaagaacgagtacatcatccccatcaccagcaccaccagaaacatcagactgttccccgacgagagcaagagacacggcctgcccggcgtgggcctgagaacctgcctgaagcccggcttcagattcagcaccccctgcttcgtggtgaccggcgaggaccaccagaagcagagccccgagatccccctggagagcctgagaaccaaggccctgagcatgctgaccgaggccgtgcagtgcagcggcgcccacatcagagaccccgtgggcggcagcgtggagttccagttcgtgcccgtgctgaagctgatcggcaccctgctggtgatgggcgtgttcgacgacgacgacgtgagacagatcctgctgctgatcgaccccagcgtgttcggcgagcacagcgccggcaccgaggagggcgccgagaaggaggaggtgacccaggtggaggagaaggccgtggaggccggcgagaaggccggcaaggaggcccccgtgaagggcctgctgcagaccagactgcccgagagcgtgaagctgcagatgtgcgagctgctgagctacctgtgcgactgcgagctgcagcacagagtggaggccatcgtggccttcggcgacatctacgtgagcaagctgcaggccaaccagaagttcagatacaacgagctgatgcaggccctgaacatgagcgccgccctgaccgccagaaagaccaaggagttcagaagccccccccaggagcagatcaacatgctgctgaacttccagctgggcgagaactgcccctgccccgaggagatcagagaggagctgtacgacttccacgaggacctgctgctgcactgcggcgtgcccctggaggaggaggaggaggaggaggaggacaccagctggaccggcaagctgtgcgccctggtgtacaagatcaagggcccccccaagcccgagaaggagcagcccaccgaggaggaggagagatgccccaccaccctgaaggagctgatcagccagaccatgatctgctgggcccaggaggaccagatccaggacagcgagctggtgagaatgatgttcaacctgctgagaagacagtacgacagcatcggcgagctgctgcaggccctgagaaagacctacaccatcagccacaccagcgtgagcgacaccatcaacctgctggccgccctgggccagatcagaagcctgctgagcgtgagaatgggcaaggaggaggagctgctgatgatcaacggcctgggcgacatcatgaacaacaaggtgttctaccagcaccccaacctgatgagagtgctgggcatgcacgagaccgtgatggaggtgatggtgaacgtgctgggcaccgagaagagccagatcgccttccccaagatggtggccagctgctgcagattcctgtgctacttctgcagaatcagcagacagaaccagaaggccatgttcgagcacctgagctacctgctggagaacagcagcgtgggcctggccagccccagcatgagaggcagcacccccctggacgtggccgccagcagcgtgatggacaacaacgagctggccctgagcctggaggagcccgacctggagaaggtggtgacctacctggccggctgcggcctgcagagctgccccatgctgctggccaagggctaccccgacgtgggctggaaccccatcgagggcgagagatacctgagcttcctgagattcgccgtgttcgtgaacagcgagagcgtggaggagaacgccagcgtggtggtgaagctgctgatcagaagacccgagtgcttcggccccgccctgagaggcgagggcggcaacggcctgctggccgccatgcagggcgccatcaagatcagcgagaaccccgccctggacctgcccagccagggctacaagagagaggtgagcaccggcgacgacgaggaggaggaggagatcgtgcacatgggcaacgccatcatgagcttctacagcgccctgatcgacctgctgggcagatgcgcccccgagatgcacctgatccagaccggcaagggcgaggccatcagaatcagaagcatcctgagaagcctggtgcccaccgaggacctggtgggcatcatcagcatccccctgaagctgcccagcctgaacaaggacggcagcgtgagcgagcccgacatggccgccaacttctgccccgaccacaaggcccccatggtgctgttcctggacagagtgtacggcatcaaggaccagaccttcctgctgcacctgctggaggtgggcttcctgcccgacctgagagccagcgccagcctggacaccgtgagcctgagcaccaccgaggccgccctggccctgaacagatacatctgcagcgccgtgctgcccctgctgaccagatgcgcccccctgttcgccggcaccgagcactgcaccagcctgatcgacagcaccctgcagaccatctacagactgagcaagggcagaagcctgaccaaggcccagagagacaccatcgaggagtgcctgctggccatctgcaaccacctgagacccagcatgctgcagcagctgctgagaagactggtgttcgacgtgccccagctgaacgagtactgcaagatgcccctgaagctgctgaccaaccactacgagcagtgctggaagtactactgcctgcccagcggctggggcagctacggcctggccgtggaggaggagctgcacctgaccgagaagctgttctggggcatcttcgacagcctgagccacaagaagtacgaccccgacctgttcagaatggccctgccctgcctgagcgccatcgccggcgccctgccccccgactacctggacaccagaatcaccgccaccctggagaagcagatcagcgtggacgccgacggcaacttcgaccccaagcccatcaacaccatgaacttcagcctgcccgagaagctggagtacatcgtgaccaagtacgccgagcacagccacgacaagtgggcctgcgacaagagccagagcggctggaagtacggcatcagcctggacgagaacgtgaagacccaccccctgatcagacccttcaagaccctgaccgagaaggagaaggagatctacagatggcccgccagagagagcctgaagaccatgctggccgtgggctggaccgtggagagaaccaaggagggcgaggccctggtgcagcagagagagaacgagaagctgagaagcgtgagccaggccaaccagggcaacagctacagccccgcccccctggacctgagcaacgtggtgctgagcagagagctgcagggcatggtggaggtggtggccgagaactaccacaacatctgggccaagaagaagaagctggagctggagagcaagggcggcggcagccaccccctgctggtgccctacgacaccctgaccgccaaggagaagttcaaggacagagagaaggcccaggacctgttcaagttcctgcaggtgaacggcatcatcgtgagcagaggcatgaaggacatggagctggacgccagcagcatggagaagagattcgcctacaagttcctgaagaagatcctgaagtacgtggacagcgcccaggagttcatcgcccacctggaggccatcgtgagcagcggcaagaccgagaagagccccagagaccaggagatcaagttcttcgccaaggtgctgctgcccctggtggaccagtacttcaccagccactgcctgtacttcctgagcagccccctgaagcccctgagcagcagcggctacgccagccacaaggagaaggagatggtggccggcctgttctgcaagctggccgccctggtgagacacagaatcagcctgttcggcagcgacagcaccaccatggtgagctgcctgcacatcctggcccagaccctggacaccagaaccgtgatgaagagcggcagcgagctggtgaaggccggcctgagagccttcttcgagaacgccgccgaggacctggagaagaccagcgagaacctgaagctgggcaagttcacccacagcagaacccagatcaagggcgtgagccagaacatcaactacaccaccgtggccctgctgcccatcctgaccagcatcttcgagcacgtgacccagcaccagttcggcatggacctgctgctgggcgacgtgcagatcagctgctaccacatcctgtgcagcctgtacagcctgggcaccggcaagaacatctacgtggagagacagagacccgccctgggcgagtgcctggccagcctggccgccgccatccccgtggccttcctggagcccaccctgaacagatacaaccccctgagcgtgttcaacaccaagacccccagagagagaagcatcctgggcatgcccgacaccgtggaggacatgtgccccgacatcccccagctggagggcctgatgaaggagatcaacgacctggccgagagcggcgccagatacaccgagatgccccacgtgatcgaggtgatcctgcccatgctgtgcaactacctgagctactggtgggagagaggccccgagaacctgccccccagcaccggcccctgctgcaccaaggtgaccagcgagcacctgagcctgatcctgggcaacatcctgaagatcatcaacaacaacctgggcatcgacgaggccagctggatgaagagaatcgccgtgtacgcccagcccatcatcagcaaggccagacccgacctgctgagaagccacttcatccccaccctggagaagctgaagaagaaggccgtgaagaccgtgcaggaggaggagcagctgaaggccgacggcaagggcgacacccaggaggccgagctgctgatcctggacgagttcgccgtgctgtgcagagacctgtacgccttctaccccatgctgatcagatacgtggacaacaacagaagcaactggctgaagagccccgacgccgacagcgaccagctgttcagaatggtggccgaggtgttcatcctgtggtgcaagagccacaacttcaagagagaggagcagaacttcgtgatccagaacgagatcaacaacctggccttcctgaccggcgacagcaagagcaagatgagcaagagcggcggccaggaccaggagagaaagaagaccaagagaagaggcgacctgtacagcatccagaccagcctgatcgtggccgccctgaagaagatgctgcccatcggcctgaacatgtgcacccccggcgaccaggagctgatcagcctggccaagagcagatacagccacagagacaccgacgaggaggtgagagagcacctgagaaacaacctgcacctgcaggagaagagcgacgaccccgccgtgaagtggcagctgaacctgtacaaggacgtgctgaagagcgaggagcccttcaaccccgagaagaccgtggagagagtgcagagaatcagcgccgccgtgttccacctggagcaggtggagcagcccctgagaagcaagaaggccgtgtggcacaagctgctgagcaagcagagaaagagagccgtggtggcctgcttcagaatggcccccctgtacaacctgcccagacacagaagcatcaacctgttcctgcacggctaccagagattctggatcgagaccgaggagtacagcttcgaggagaagctggtgcaggacctggccaagagccccaaggtggaggaggaggaggaggaggagaccgagaagcagcccgaccccctgcaccagatcatcctgtacttcagcagaaacgccctgaccgagagaagcaagctggaggacgaccccctgtacaccagctacagcagcatgatggccaagagctgccagagcggcgaggacgaggaggaggacgaggacaaggagaagaccttcgaggagaaggagatggagaagcagaagaccctgtaccagcaggccagactgcacgagagaggcgccgccgagatggtgctgcagatgatcagcgccagcaagggcgagatgagccccatggtggtggagaccctgaagctgggcatcgccatcctgaacggcggcaacgccggcgtgcagcagaagatgctggactacctgaaggagaagaaggacgccggcttcttccagagcctgagcggcctgatgcagagctgcagaagcgtgctggacctgaacgccttcgagagacagaacaaggccgagggcctgggcatggtgaccgaggagggcaccctgatcgtgagagagagaggcgagaaggtgctgcagaacgacgagttcaccagagacctgttcagattcctgcagctgctgtgcgagggccacaacagcgacttccagaacttcctgagaacccagatgggcaacaccaccaccgtgaacgtgatcatcagcaccgtggactacctgctgagactgcaggagagcatcagcgacttctactggtactacagcggcaaggacatcatcgacgagagcggccagcacaacttcagcaaggccctggccgtgaccaagcagatcttcaacagcctgaccgagtacatccagggcccctgcatcggcaaccagcagagcctggcccacagcagactgtgggacgccgtggtgggcttcctgcacgtgttcgccaacatgcagatgaagctgagccaggacagcagccagatcgagctgctgaaggagctgctggacctgctgcaggacatggtggtgatgctgctgagcctgctggagggcaacgtggtgaacggcaccatcggcaagcagatggtggacaccctggtggagagcagcaccaacgtggagatgatcctgaagttcttcgacatgttcctgaagctgaaggacctgaccagcagcgacaccttcaaggagtacgaccccgacggcaagggcatcatcagcaagaaggagttccagaaggccatggagggccagaagcagtacacccagagcgagatcgacttcctgctgagctgcgccgaggccgacgagaacgacatgttcaactacgtggacttcgtggacagattccacgagcccgccaaggacatcggcttcaacgtggccgtgctgctgaccaacctgagcgagcacatgcccaacgacagcagactgaagtgcctgctggaccccgccgagagcgtgctgaactacttcgagccctacctgggcagaatcgagatcatgggcggcgccaagaagatcgagagagtgtacttcgagatcagcgagagcagcagaacccagtgggagaagccccaggtgaaggagagcaagagacagttcatcttcgacgtggtgaacgagggcggcgagcaggagaagatggagctgttcgtgaacttctgcgaggacaccatcttcgagatgcagctggccagccagatcagcgagagcgacagcgccgacagacccgaggaggaggaggaggacgaggacagcagctacgtgctggagatcgccggcgaggaggaggaggacggcagcctggagcccgccagcgccttcgccatggcctgcgccagcgtgaagagaaacgtgaccgacttcctgaagagagccaccctgaagaacctgagaaagcagtacagaaacgtgaagaagatgaccgccaaggagctggtgaaggtgctgttcagcttcttctggatgctgttcgtgggcctgttccagctgctgttcaccatcctgggcggcatcttccagatcctgtggagcaccgtgttcggcggcggcctggtggagggcgccaagaacatcagagtgaccaagatcctgggcgacatgcccgaccccacccagttcggcatccacgacgacaccatggaggccgagagagccgaggtgatggagcccggcatcaccaccgagctggtgcacttcatcaagggcgagaagggcgacaccgacatcatgagcgacctgttcggcctgcaccccaagaaggagggcagcctgaagcacggccccgaggtgggcctgggcgacctgagcgagatcatcggcaaggacgagccccccaccctggagagcaccgtgcagaagaagagaaaggcccaggccgccgagatgaaggccgccaacgaggccgagggcaaggtggagagcgagaaggccgacatggaggacggcgagaaggaggacaaggacaaggaggaggagcaggccgagtacctgtggaccgaggtgaccaagaagaagaagagaagatgcggccagaaggtggagaagcccgaggccttcaccgccaacttcttcaagggcctggagatctaccagaccaagctgctgcactacctggccagaaacttctacaacctgagattcctggccctgttcgtggccttcgccatcaacttcatcctgctgttctacaaggtgaccgaggagcccctggaggaggagaccgaggacgtggccaacctgtggaacagcttcaacgacgaggaggaggaggaggccatggtgttcttcgtgctgcaggagagcaccggctacatggcccccaccctgagagccctggccatcatccacaccatcatcagcctggtgtgcgtggtgggctactactgcctgaaggtgcccctggtggtgttcaagagagagaaggagatcgccagaaagctggagttcgacggcctgtacatcaccgagcagcccagcgaggacgacatcaagggccagtgggacagactggtgatcaacacccccagcttccccaacaactactgggacaagttcgtgaagagaaaggtgatcaacaagtacggcgacctgtacggcgccgagagaatcgccgagctgctgggcctggacaagaacgccctggacttcagccccgtggaggagaccaaggccgaggccgccagcctggtgagctggctgagcagcatcgacatgaagtaccacatctggaagctgggcgtggtgttcaccgacaacagcttcctgtacctggcctggtacaccaccatgagcgtgctgggccactacaacaacttcttcttcgccgcccacctgctggacatcgccatgggcttcaagaccctgagaaccatcctgagcagcgtgacccacaacggcaagcagctggtgctgaccgtgggcctgctggccgtggtggtgtacctgtacaccgtggtggccttcaacttcttcagaaagttctacaacaagagcgaggacgacgacgagcccgacatgaagtgcgacgacatgatgacctgctacctgttccacatgtacgtgggcgtgagagccggcggcggcatcggcgacgagatcgaggaccccgccggcgacccctacgagatgtacagaatcgtgttcgacatcaccttcttcttcttcgtgatcgtgatcctgctggccatcatccagggcctgatcatcgacgccttcggcgagctgagagaccagcaggagcaggtgagagaggacatggagaccaagtgcttcatctgcggcatcggcaacgactacttcgacaccaccccccacggcttcgagacccacaccctgcaggagcacaacctggccaactacctgttcttcctgatgtacctgatcaacaaggacgagaccgagcacaccggccaggagagctacgtgtggaagatgtaccaggagagatgctgggacttcttccccgccggcgactgcttcagaaagcagtacgaggaccagctgggctag

SEQ ID NO: 97918 - DNA, 14613 bp, synthetic construct
  misc_feature 1..14613: note = Description of Artificial Sequence: Synthetic coding sequence
  source 1..14613: mol_type = other DNA
atggccgagggcggcgagggcggcgaggacgagatccagttcctgagaaccgaggacgaggtggtgctgcagtgcatcgccaccatccacaaggagcagagaaagttctgcctggccgccgagggcctgggcaacagactgtgcttcctggagcccaccagcgaggccaagtacatcccccccgacctgtgcgtgtgcaacttcgtgctggagcagagcctgagcgtgagagccctgcaggagatgctggccaacaccggcgagaacggcggcgagggcgccgcccagggcggcggccacagaaccctgctgtacggccacgccgtgctgctgagacacagcttcagcggcatgtacctgacctgcctgaccaccagcagaagccagaccgacaagctggccttcgacgtgggcctgagagagcacgccaccggcgaggcctgctggtggaccatccaccccgccagcaagcagagaagcgagggcgagaaggtgagaatcggcgacgacctgatcctggtgagcgtgagcagcgagagatacctgcacctgagcgtgagcaacggcaacatccaggtggacgccagcttcatgcagaccctgtggaacgtgcaccccacctgcagcggcagcagcatcgaggagggctacctgctgggcggccacgtggtgagactgttccacggccacgacgagtgcctgaccatccccagcaccgaccagaacgacagccagcacagaagaatcttctacgaggccggcggcgccggcaccagagccagaagcctgtggagagtggagcccctgagaatcagctggagcggcagcaacatcagatggggccaggccttcagactgagacacctgaccaccggccactacctggccctgaccgaggaccagggcctgatcctgcaggacagagccaagagcgacaccaagagcaccgccttcagcttcagagccagcaaggagctgaaggagaagctggacagcagccacaagagagacatcgagggcatgggcgtgcccgagatcaagtacggcgacagcgtgtgcttcgtgcagcacatcgccagcggcctgtgggtgacctacaaggcccaggacgccaagaccagcagactgggccccctgaagagaaaggtgatcctgcaccaggagggccacatggacgacggcctgaccctgcagagatgccagagagaggagagccaggccgccagaatcatcagaaacaccaccgccctgttcagccagttcgtgagcggcaacaacagaaccgccgcccccatcaccctgcccatcgaggaggtgctgcagaccctgcaggacctgatcgcctacttccagccccccgaggaggagatgagacacgaggacaagcagaacaagctgagaagcctgaagaacagacagaacctgttcaaggaggagggcatgctggccctggtgctgaactgcatcgacagactgaacgtgtacaacagcgtggcccacttcgccggcatcgccagagaggagagcggcatggcctggaaggagatcctgaacctgctgtacaagctgctggccgccctgatcagaggcaacagaaacaactgcgcccagttcagcaacaacctggactggctgatcagcaagctggacagactggagagcagcagcggcatcctggaggtgctgcactgcatcctgaccgagagccccgaggccctgaacctgatcgccgagggccacatcaagagcatcatcagcctgctggacaagcacggcagaaaccacaaggtgctggacatcctgtgcagcctgtgcctgtgcaacggcgtggccgtgagagccaaccagaacctgatctgcgacaacctgctgcccagaagaaacctgctgctgcagaccagactgatcaacgacgtgaccagcatcagacccaacatcttcctgggcgtggccgagggcagcgcccagtacaagaagtggtacttcgagctgatcatcgaccaggtggaccccttcctgaccgccgagcccacccacctgagagtgggctgggccagcagcagcggctacgccccctaccccggcggcggcgagggctggggcggcaacggcgtgggcgacgacctgtacagctacggcttcgacggcctgcacctgtggagcggcagaatccccagagccgtggccagcatcaaccagcacctgctgagaagcgacgacgtggtgagctgctgcctggacctgggcgtgcccagcatcagcttcagaatcaacggccagcccgtgcagggcatgttcgagaacttcaacaccgacggcctgttcttccccgtgatgagcttcagcgccggcgtgaaggtgagattcctgatgggcggcagacacggcgagttcaagttcctgccccccagcggctacgccccctgctacgaggccctgctgcccaaggagaagatgagactggagcccgtgaaggagtacaagagagacgccgacggcatcagagacctgctgggcaccacccagttcctgagccaggccagcttcatcccctgccccgtggacaccagccaggtgatcctgcccccccacctggagaagatcagagacagactggccgagaacatccacgagctgtggggcatgaacaagatcgagctgggctggaccttcggcaagatcagagacgacaacaagagacagcacccctgcctggtggagttcagcaagctgcccgagaccgagaagaactacaacctgcagatgagcaccgagaccctgaagaccctgctggccctgggctgccacatcgcccacgtgaaccccgccgccgaggaggacctgaagaaggtgaagctgcccaagaactacatgatgagcaacggctacaagcccgcccccctggacctgagcgacgtgaagctgctgcccccccaggagatcctggtggacaagctggccgagaacgcccacaacgtgtgggccaaggacagaatcaagcagggctggacctacggcatccagcaggacctgaagaacaagagaaaccccagactggtgccctacgccctgctggacgagagaaccaagaagagcaacagagacagcctgagagaggccgtgagaaccttcgtgggctacggctacaacatcgagcccagcgaccaggagctggccgacagcgccgtggagaaggtgagcatcgacaagatcagattcttcagagtggagagaagctacgccgtgagaagcggcaagtggtacttcgagttcgaggtggtgaccggcggcgacatgagagtgggctgggccagacccggctgcagacccgacgtggagctgggcgccgacgaccaggccttcgtgttcgagggcaacagaggccagagatggcaccagggcagcggctacttcggcagaacctggcagcccggcgacgtggtgggctgcatgatcaacctggacgacgccagcatgatcttcaccctgaacggcgagctgctgatcaccaacaagggcagcgagctggccttcgccgactacgagatcgagaacggcttcgtgcccatctgctgcctgggcctgagccagatcggcagaatgaacctgggcaccgacgccagcaccttcaagttctacaccatgtgcggcctgcaggagggcttcgagcccttcgccgtgaacatgaacagagacgtggccatgtggttcagcaagagactgcccaccttcgtgaacgtgcccaaggaccacccccacatcgaggtgatgagaatcgacggcaccatggacagccccccctgcctgaaggtgacccacaagaccttcggcacccagaacagcaacgccgacatgatctactgcagactgagcatgcccgtggagtgccacagcagcttcagccacagcccctgcctggacagcgaggccttccagaagagaaagcagatgcaggagatcctgagccacaccaccacccagtgctactacgccatcagaatcttcgccggccaggaccccagctgcgtgtgggtgggctgggtgacccccgactaccacctgtacagcgagaagttcgacctgaacaagaactgcaccgtgaccgtgaccctgggcgacgagagaggcagagtgcacgagagcgtgaagagaagcaactgctacatggtgtggggcggcgacatcgtggccagcagccagagaagcaacagaagcaacgtggacctggagatcggctgcctggtggacctggccatgggcatgctgagcttcagcgccaacggcaaggagctgggcacctgctaccaggtggagcccaacaccaaggtgttccccgccgtgttcctgcagcccaccagcaccagcctgttccagttcgagctgggcaagctgaagaacgccatgcccctgagcgccgccatcttcagaagcgaggagaagaaccccgtgccccagtgcccccccagactggacgtgcagaccatccagcccgtgctgtggagcagaatgcccaacagcttcctgaaggtggagaccgagagagtgagcgagagacacggctgggtggtgcagtgcctggagcccctgcagatgatggccctgcacatccccgaggagaacagatgcgtggacatcctggagctgtgcgagcaggaggacctgatgagattccactaccacaccctgagactgtacagcgccgtgtgcgccctgggcaacagcagagtggcctacgccctgtgcagccacgtggacctgagccagctgttctacgccatcgacaacaagtacctgcccggcctgctgagaagcggcttctacgacctgctgatcagcatccacctggccagcgccaaggagagaaagctgatgatgaagaacgagtacatcatccccatcaccagcaccaccagaaacatcagactgttccccgacgagagcaagagacacggcctgcccggcgtgggcctgagaacctgcctgaagcccggcttcagattcagcaccccctgcttcgtggtgaccggcgaggaccaccagaagcagagccccgagatccccctggagagcctgagaaccaaggccctgagcatgctgaccgaggccgtgcagtgcagcggcgcccacatcagagaccccgtgggcggcagcgtggagttccagttcgtgcccgtgctgaagctgatcggcaccctgctggtgatgggcgtgttcgacgacgacgacgtgagacagatcctgctgctgatcgaccccagcgtgttcggcgagcacagcgccggcaccgaggagggcgccgagaaggaggaggtgacccaggtggaggagaaggccgtggaggccggcgagaaggccggcaaggaggcccccgtgaagggcctgctgcagaccagactgcccgagagcgtgaagctgcagatgtgcgagctgctgagctacctgtgcgactgcgagctgcagcacagagtggaggccatcgtggccttcggcgacatctacgtgagcaagctgcaggccaaccagaagttcagatacaacgagctgatgcaggccctgaacatgagcgccgccctgaccgccagaaagaccaaggagttcagaagccccccccaggagcagatcaacatgctgctgaacttccagctgggcgagaactgcccctgccccgaggagatcagagaggagctgtacgacttccacgaggacctgctgctgcactgcggcgtgcccctggaggaggaggaggaggaggaggaggacaccagctggaccggcaagctgtgcgccctggtgtacaagatcaagggcccccccaagcccgagaaggagcagcccaccgaggaggaggagagatgccccaccaccctgaaggagctgatcagccagaccatgatctgctgggcccaggaggaccagatccaggacagcgagctggtgagaatgatgttcaacctgctgagaagacagtacgacagcatcggcgagctgctgcaggccctgagaaagacctacaccatcagccacaccagcgtgagcgacaccatcaacctgctggccgccctgggccagatcagaagcctgctgagcgtgagaatgggcaaggaggaggagctgctgatgatcaacggcctgggcgacatcatgaacaacaaggtgttctaccagcaccccaacctgatgagagtgctgggcatgcacgagaccgtgatggaggtgatggtgaacgtgctgggcaccgagaagagccagatcgccttccccaagatggtggccagctgctgcagattcctgtgctacttctgcagaatcagcagacagaaccagaaggccatgttcgagcacctgagctacctgctggagaacagcagcgtgggcctggccagccccagcatgagaggcagcacccccctggacgtggccgccagcagcgtgatggacaacaacgagctggccctgagcctggaggagcccgacctggagaaggtggtgacctacctggccggctgcggcctgcagagctgccccatgctgctggccaagggctaccccgacgtgggctggaaccccatcgagggcgagagatacctgagcttcctgagattcgccgtgttcgtgaacagcgagagcgtggaggagaacgccagcgtggtggtgaagctgctgatcagaagacccgagtgcttcggccccgccctgagaggcgagggcggcaacggcctgctggccgccatgcagggcgccatcaagatcagcgagaaccccgccctggacctgcccagccagggctacaagagagaggtgagcaccggcgacgacgaggaggaggaggagatcgtgcacatgggcaacgccatcatgagcttctacagcgccctgatcgacctgctgggcagatgcgcccccgagatgcacctgatccagaccggcaagggcgaggccatcagaatcagaagcatcctgagaagcctggtgcccaccgaggacctggtgggcatcatcagcatccccctgaagctgcccagcctgaacaaggacggcagcgtgagcgagcccgacatggccgccaacttctgccccgaccacaaggcccccatggtgctgttcctggacagagtgtacggcatcaaggaccagaccttcctgctgcacctgctggaggtgggcttcctgcccgacctgagagccagcgccagcctggacaccgtgagcctgagcaccaccgaggccgccctggccctgaacagatacatctgcagcgccgtgctgcccctgctgaccagatgcgcccccctgttcgccggcaccgagcactgcaccagcctgatcgacagcaccctgcagaccatctacagactgagcaagggcagaagcctgaccaaggcccagagagacaccatcgaggagtgcctgctggccatctgcaaccacctgagacccagcatgctgcagcagctgctgagaagactggtgttcgacgtgccccagctgaacgagtactgcaagatgcccctgaagctgctgaccaaccactacgagcagtgctggaagtactactgcctgcccagcggctggggcagctacggcctggccgtggaggaggagctgcacctgaccgagaagctgttctggggcatcttcgacagcctgagccacaagaagtacgaccccgacctgttcagaatggccctgccctgcctgagcgccatcgccggcgccctgccccccgactacctggacaccagaatcaccgccaccctggagaagcagatcagcgtggacgccgacggcaacttcgaccccaagcccatcaacaccatgaacttcagcctgcccgagaagctggagtacatcgtgaccaagtacgccgagcacagccacgacaagtgggcctgcgacaagagccagagcggctggaagtacggcatcagcctggacgagaacgtgaagacccaccccctgatcagacccttcaagaccctgaccgagaaggagaaggagatctacagatggcccgccagagagagcctgaagaccatgctggccgtgggctggaccgtggagagaaccaaggagggcgaggccctggtgcagcagagagagaacgagaagctgagaagcgtgagccaggccaaccagggcaacagctacagccccgcccccctggacctgagcaacgtggtgctgagcagagagctgcagggcatggtggaggtggtggccgagaactaccacaacatctgggccaagaagaagaagctggagctggagagcaagggcggcggcagccaccccctgctggtgccctacgacaccctgaccgccaaggagaagttcaaggacagagagaaggcccaggacctgttcaagttcctgcaggtgaacggcatcatcgtgagcagaggcatgaaggacatggagctggacgccagcagcatggagaagagattcgcctacaagttcctgaagaagatcctgaagtacgtggacagcgcccaggagttcatcgcccacctggaggccatcgtgagcagcggcaagaccgagaagagccccagagaccaggagatcaagttcttcgccaaggtgctgctgcccctggtggaccagtacttcaccagccactgcctgtacttcctgagcagccccctgaagcccctgagcagcagcggctacgccagccacaaggagaaggagatggtggccggcctgttctgcaagctggccgccctggtgagacacagaatcagcctgttcggcagcgacagcaccaccatggtgagctgcctgcacatcctggcccagaccctggacaccagaaccgtgatgaagagcggcagcgagctggtgaaggccggcctgagagccttcttcgagaacgccgccgaggacctggagaagaccagcgagaacctgaagctgggcaagttcacccacagcagaacccagatcaagggcgtgagccagaacatcaactacaccaccgtggccctgctgcccatcctgaccagcatcttcgagcacgtgacccagcaccagttcggcatggacctgctgctgggcgacgtgcagatcagctgctaccacatcctgtgcagcctgtacagcctgggcaccggcaagaacatctacgtggagagacagagacccgccctgggcgagtgcctggccagcctggccgccgccatccccgtggccttcctggagcccaccctgaacagatacaaccccctgagcgtgttcaacaccaagacccccagagagagaagcatcctgggcatgcccgacaccgtggaggacatgtgccccgacatcccccagctggagggcctgatgaaggagatcaacgacctggccgagagcggcgccagatacaccgagatgccccacgtgatcgaggtgatcctgcccatgctgtgcaactacctgagctactggtgggagagaggccccgagaacctgccccccagcaccggcccctgctgcaccaaggtgaccagcgagcacctgagcctgatcctgggcaacatcctgaagatcatcaacaacaacctgggcatcgacgaggccagctggatgaagagaatcgccgtgtacgcccagcccatcatcagcaaggccagacccgacctgctgagaagccacttcatccccaccctggagaagctgaagaagaaggccgtgaagaccgtgcaggaggaggagcagctgaaggccgacggcaagggcgacacccaggaggccgagctgctgatcctggacgagttcgccgtgctgtgcagagacctgtacgccttctaccccatgctgatcagatacgtggacaacaacagaagcaactggctgaagagccccgacgccgacagcgaccagctgttcagaatggtggccgaggtgttcatcctgtggtgcaagagccacaacttcaagagagaggagcagaacttcgtgatccagaacgagatcaacaacctggccttcctgaccggcgacagcaagagcaagatgagcaaggccatgcaggtgaagagcggcggccaggaccaggagagaaagaagaccaagagaagaggcgacctgtacagcatccagaccagcctgatcgtggccgccctgaagaagatgctgcccatcggcctgaacatgtgcacccccggcgaccaggagctgatcagcctggccaagagcagatacagccacagagacaccgacgaggaggtgagagagcacctgagaaacaacctgcacctgcaggagaagagcgacgaccccgccgtgaagtggcagctgaacctgtacaaggacgtgctgaagagcgaggagcccttcaaccccgagaagaccgtggagagagtgcagagaatcagcgccgccgtgttccacctggagcaggtggagcagcccctgagaagcaagaaggccgtgtggcacaagctgctgagcaagcagagaaagagagccgtggtggcctgcttcagaatggcccccctgtacaacctgcccagacacagaagcatcaacctgttcctgcacggctaccagagattctggatcgagaccgaggagtacagcttcgaggagaagctggtgcaggacctggccaagagccccaaggtggaggaggaggaggaggaggagaccgagaagcagcccgaccccctgcaccagatcatcctgtacttcagcagaaacgccctgaccgagagaagcaagctggaggacgaccccctgtacaccagctacagcagcatgatggccaagagctgccagagcggcgaggacgaggaggaggacgaggacaaggagaagaccttcgaggagaaggagatggagaagcagaagaccctgtaccagcaggccagactgcacgagagaggcgccgccgagatggtgctgcagatgatcagcgccagcaagggcgagatgagccccatggtggtggagaccctgaagctgggcatcgccatcctgaacggcggcaacgccggcgtgcagcagaagatgctggactacctgaaggagaagaaggacgccggcttcttccagagcctgagcggcctgatgcagagctgcagcgtgctggacctgaacgccttcgagagacagaacaaggccgagggcctgggcatggtgaccgaggagggcaccctgatcgtgagagagagaggcgagaaggtgctgcagaacgacgagttcaccagagacctgttcagattcctgcagctgctgtgcgagggccacaacagcgacttccagaacttcctgagaacccagatgggcaacaccaccaccgtgaacgtgatcatcagcaccgtggactacctgctgagactgcaggagagcatcagcgacttctactggtactacagcggcaaggacatcatcgacgagagcggccagcacaacttcagcaaggccctggccgtgaccaagcagatcttcaacagcctgaccgagtacatccagggcccctgcatcggcaaccagcagagcctggcccacagcagactgtgggacgccgtggtgggcttcctgcacgtgttcgccaacatgcagatgaagctgagccaggacagcagccagatcgagctgctgaaggagctgctggacctgctgcaggacatggtggtgatgctgctgagcctgctggagggcaacgtggtgaacggcaccatcggcaagcagatggtggacaccctggtggagagcagcaccaacgtggagatgatcctgaagttcttcgacatgttcctgaagctgaaggacctgaccagcagcgacaccttcaaggagtacgaccccgacggcaagggcatcatcagcaagaaggagttccagaaggccatggagggccagaagcagtacacccagagcgagatcgacttcctgctgagctgcgccgaggccgacgagaacgacatgttcaactacgtggacttcgtggacagattccacgagcccgccaaggacatcggcttcaacgtggccgtgctgctgaccaacctgagcgagcacatgcccaacgacagcagactgaagtgcctgctggaccccgccgagagcgtgctgaactacttcgagccctacctgggcagaatcgagatcatgggcggcgccaagaagatcgagagagtgtacttcgagatcagcgagagcagcagaacccagtgggagaagccccaggtgaaggagagcaagagacagttcatcttcgacgtggtgaacgagggcggcgagcaggagaagatggagctgttcgtgaacttctgcgaggacaccatcttcgagatgcagctggccagccagatcagcgagagcgacagcgccgacagacccgaggaggaggaggaggacgaggacagcagctacgtgctggagatcgccggcgaggaggaggaggacggcagcctggagcccgccagcgccttcgccatggcctgcgccagcgtgaagagaaacgtgaccgacttcctgaagagagccaccctgaagaacctgagaaagcagtacagaaacgtgaagaagatgaccgccaaggagctggtgaaggtgctgttcagcttcttctggatgctgttcgtgggcctgttccagctgctgttcaccatcctgggcggcatcttccagatcctgtggagcaccgtgttcggcggcggcctggtggagggcgccaagaacatcagagtgaccaagatcctgggcgacatgcccgaccccacccagttcggcatccacgacgacaccatggaggccgagagagccgaggtgatggagcccggcatcaccaccgagctggtgcacttcatcaagggcgagaagggcgacaccgacatcatgagcgacctgttcggcctgcaccccaagaaggagggcagcctgaagcacggccccgaggtgggcctgggcgacctgagcgagatcatcggcaaggacgagccccccaccctggagagcaccgtgcagaagaagagaaaggcccaggccgccgagatgaaggccgccaacgaggccgagggcaaggtggagagcgagaaggccgacatggaggacggcgagaaggaggacaaggacaaggaggaggagcaggccgagtacctgtggaccgaggtgaccaagaagaagaagagaagatgcggccagaaggtggagaagcccgaggccttcaccgccaacttcttcaagggcctggagatctaccagaccaagctgctgcactacctggccagaaacttctacaacctgagattcctggccctgttcgtggccttcgccatcaacttcatcctgctgttctacaaggtgaccgaggagcccctggaggaggagaccgaggacgtggccaacctgtggaacagcttcaacgacgaggaggaggaggaggccatggtgttcttcgtgctgcaggagagcaccggctacatggcccccaccctgagagccctggccatcatccacaccatcatcagcctggtgtgcgtggtgggctactactgcctgaaggtgcccctggtggtgttcaagagagagaaggagatcgccagaaagctggagttcgacggcctgtacatcaccgagcagcccagcgaggacgacatcaagggccagtgggacagactggtgatcaacacccccagcttccccaacaactactgggacaagttcgtgaagagaaaggtgatcaacaagtacggcgacctgtacggcgccgagagaatcgccgagctgctgggcctggacaagaacgccctggacttcagccccgtggaggagaccaaggccgaggccgccagcctggtgagctggctgagcagcatcgacatgaagtaccacatctggaagctgggcgtggtgttcaccgacaacagcttcctgtacctggcctggtacaccaccatgagcgtgctgggccactacaacaacttcttcttcgccgcccacctgctggacatcgccatgggcttcaagaccctgagaaccatcctgagcagcgtgacccacaacggcaagcagctggtgctgaccgtgggcctgctggccgtggtggtgtacctgtacaccgtggtggccttcaacttcttcagaaagttctacaacaagagcgaggacgacgacgagcccgacatgaagtgcgacgacatgatgacctgctacctgttccacatgtacgtgggcgtgagagccggcggcggcatcggcgacgagatcgaggaccccgccggcgacccctacgagatgtacagaatcgtgttcgacatcaccttcttcttcttcgtgatcgtgatcctgctggccatcatccagggcctgatcatcgacgccttcggcgagctgagagaccagcaggagcaggtgagagaggacatggagaccaagtgcttcatctgcggcatcggcaacgactacttcgacaccaccccccacggcttcgagacccacaccctgcaggagcacaacctggccaactacctgttcttcctgatgtacctgatcaacaaggacgagaccgagcacaccggccaggagagctacgtgtggaagatgtaccaggagagatgctgggacttcttccccgccggcgactgcttcagaaagcagtacgaggaccagctgggctag

SEQ ID NO: 97919 - DNA, 14598 bp, synthetic construct
  misc_feature 1..14598: note = Description of Artificial Sequence: Synthetic coding sequence
  source 1..14598: mol_type = other DNA
atggccgagggcggcgagggcggcgaggacgagatccagttcctgagaaccgaggacgaggtggtgctgcagtgcatcgccaccatccacaaggagcagagaaagttctgcctggccgccgagggcctgggcaacagactgtgcttcctggagcccaccagcgaggccaagtacatcccccccgacctgtgcgtgtgcaacttcgtgctggagcagagcctgagcgtgagagccctgcaggagatgctggccaacaccggcgagaacggcggcgagggcgccgcccagggcggcggccacagaaccctgctgtacggccacgccgtgctgctgagacacagcttcagcggcatgtacctgacctgcctgaccaccagcagaagccagaccgacaagctggccttcgacgtgggcctgagagagcacgccaccggcgaggcctgctggtggaccatccaccccgccagcaagcagagaagcgagggcgagaaggtgagaatcggcgacgacctgatcctggtgagcgtgagcagcgagagatacctgcacctgagcgtgagcaacggcaacatccaggtggacgccagcttcatgcagaccctgtggaacgtgcaccccacctgcagcggcagcagcatcgaggagggctacctgctgggcggccacgtggtgagactgttccacggccacgacgagtgcctgaccatccccagcaccgaccagaacgacagccagcacagaagaatcttctacgaggccggcggcgccggcaccagagccagaagcctgtggagagtggagcccctgagaatcagctggagcggcagcaacatcagatggggccaggccttcagactgagacacctgaccaccggccactacctggccctgaccgaggaccagggcctgatcctgcaggacagagccaagagcgacaccaagagcaccgccttcagcttcagagccagcaaggagctgaaggagaagctggacagcagccacaagagagacatcgagggcatgggcgtgcccgagatcaagtacggcgacagcgtgtgcttcgtgcagcacatcgccagcggcctgtgggtgacctacaaggcccaggacgccaagaccagcagactgggccccctgaagagaaaggtgatcctgcaccaggagggccacatggacgacggcctgaccctgcagagatgccagagagaggagagccaggccgccagaatcatcagaaacaccaccgccctgttcagccagttcgtgagcggcaacaacagaaccgccgcccccatcaccctgcccatcgaggaggtgctgcagaccctgcaggacctgatcgcctacttccagccccccgaggaggagatgagacacgaggacaagcagaacaagctgagaagcctgaagaacagacagaacctgttcaaggaggagggcatgctggccctggtgctgaactgcatcgacagactgaacgtgtacaacagcgtggcccacttcgccggcatcgccagagaggagagcggcatggcctggaaggagatcctgaacctgctgtacaagctgctggccgccctgatcagaggcaacagaaacaactgcgcccagttcagcaacaacctggactggctgatcagcaagctggacagactggagagcagcagcggcatcctggaggtgctgcactgcatcctgaccgagagccccgaggccctgaacctgatcgccgagggccacatcaagagcatcatcagcctgctggacaagcacggcagaaaccacaaggtgctggacatcctgtgcagcctgtgcctgtgcaacggcgtggccgtgagagccaaccagaacctgatctgcgacaacctgctgcccagaagaaacctgctgctgcagaccagactgatcaacgacgtgaccagcatcagacccaacatcttcctgggcgtggccgagggcagcgcccagtacaagaagtggtacttcgagctgatcatcgaccaggtggaccccttcctgaccgccgagcccacccacctgagagtgggctgggccagcagcagcggctacgccccctaccccggcggcggcgagggctggggcggcaacggcgtgggcgacgacctgtacagctacggcttcgacggcctgcacctgtggagcggcagaatccccagagccgtggccagcatcaaccagcacctgctgagaagcgacgacgtggtgagctgctgcctggacctgggcgtgcccagcatcagcttcagaatcaacggccagcccgtgcagggcatgttcgagaacttcaacaccgacggcctgttcttccccgtgatgagcttcagcgccggcgtgaaggtgagattcctgatgggcggcagacacggcgagttcaagttcctgccccccagcggctacgccccctgctacgaggccctgctgcccaaggagaagatgagactggagcccgtgaaggagtacaagagagacgccgacggcatcagagacctgctgggcaccacccagttcctgagccaggccagcttcatcccctgccccgtggacaccagccaggtgatcctgcccccccacctggagaagatcagagacagactggccgagaacatccacgagctgtggggcatgaacaagatcgagctgggctggaccttcggcaagatcagagacgacaacaagagacagcacccctgcctggtggagttcagcaagctgcccgagaccgagaagaactacaacctgcagatgagcaccgagaccctgaagaccctgctggccctgggctgccacatcgcccacgtgaaccccgccgccgaggaggacctgaagaaggtgaagctgcccaagaactacatgatgagcaacggctacaagcccgcccccctggacctgagcgacgtgaagctgctgcccccccaggagatcctggtggacaagctggccgagaacgcccacaacgtgtgggccaaggacagaatcaagcagggctggacctacggcatccagcaggacctgaagaacaagagaaaccccagactggtgccctacgccctgctggacgagagaaccaagaagagcaacagagacagcctgagagaggccgtgagaaccttcgtgggctacggctacaacatcgagcccagcgaccaggagctggccgacagcgccgtggagaaggtgagcatcgacaagatcagattcttcagagtggagagaagctacgccgtgagaagcggcaagtggtacttcgagttcgaggtggtgaccggcggcgacatgagagtgggctgggccagacccggctgcagacccgacgtggagctgggcgccgacgaccaggccttcgtgttcgagggcaacagaggccagagatggcaccagggcagcggctacttcggcagaacctggcagcccggcgacgtggtgggctgcatgatcaacctggacgacgccagcatgatcttcaccctgaacggcgagctgctgatcaccaacaagggcagcgagctggccttcgccgactacgagatcgagaacggcttcgtgcccatctgctgcctgggcctgagccagatcggcagaatgaacctgggcaccgacgccagcaccttcaagttctacaccatgtgcggcctgcaggagggcttcgagcccttcgccgtgaacatgaacagagacgtggccatgtggttcagcaagagactgcccaccttcgtgaacgtgcccaaggaccacccccacatcgaggtgatgagaatcgacggcaccatggacagccccccctgcctgaaggtgacccacaagaccttcggcacccagaacagcaacgccgacatgatctactgcagactgagcatgcccgtggagtgccacagcagcttcagccacagcccctgcctggacagcgaggccttccagaagagaaagcagatgcaggagatcctgagccacaccaccacccagtgctactacgccatcagaatcttcgccggccaggaccccagctgcgtgtgggtgggctgggtgacccccgactaccacctgtacagcgagaagttcgacctgaacaagaactgcaccgtgaccgtgaccctgggcgacgagagaggcagagtgcacgagagcgtgaagagaagcaactgctacatggtgtggggcggcgacatcgtggccagcagccagagaagcaacagaagcaacgtggacctggagatcggctgcctggtggacctggccatgggcatgctgagcttcagcgccaacggcaaggagctgggcacctgctaccaggtggagcccaacaccaaggtgttccccgccgtgttcctgcagcccaccagcaccagcctgttccagttcgagctgggcaagctgaagaacgccatgcccctgagcgccgccatcttcagaagcgaggagaagaaccccgtgccccagtgcccccccagactggacgtgcagaccatccagcccgtgctgtggagcagaatgcccaacagcttcctgaaggtggagaccgagagagtgagcgagagacacggctgggtggtgcagtgcctggagcccctgcagatgatggccctgcacatccccgaggagaacagatgcgtggacatcctggagctgtgcgagcaggaggacctgatgagattccactaccacaccctgagactgtacagcgccgtgtgcgccctgggcaacagcagagtggcctacgccctgtgcagccacgtggacctgagccagctgttctacgccatcgacaacaagtacctgcccggcctgctgagaagcggcttctacgacctgctgatcagcatccacctggccagcgccaaggagagaaagctgatgatgaagaacgagtacatcatccccatcaccagcaccaccagaaacatcagactgttccccgacgagagcaagagacacggcctgcccggcgtgggcctgagaacctgcctgaagcccggcttcagattcagcaccccctgcttcgtggtgaccggcgaggaccaccagaagcagagccccgagatccccctggagagcctgagaaccaaggccctgagcatgctgaccgaggccgtgcagtgcagcggcgcccacatcagagaccccgtgggcggcagcgtggagttccagttcgtgcccgtgctgaagctgatcggcaccctgctggtgatgggcgtgttcgacgacgacgacgtgagacagatcctgctgctgatcgaccccagcgtgttcggcgagcacagcgccggcaccgaggagggcgccgagaaggaggaggtgacccaggtggaggagaaggccgtggaggccggcgagaaggccggcaaggaggcccccgtgaagggcctgctgcagaccagactgcccgagagcgtgaagctgcagatgtgcgagctgctgagctacctgtgcgactgcgagctgcagcacagagtggaggccatcgtggccttcggcgacatctacgtgagcaagctgcaggccaaccagaagttcagatacaacgagctgatgcaggccctgaacatgagcgccgccctgaccgccagaaagaccaaggagttcagaagccccccccaggagcagatcaacatgctgctgaacttccagctgggcgagaactgcccctgccccgaggagatcagagaggagctgtacgacttccacgaggacctgctgctgcactgcggcgtgcccctggaggaggaggaggaggaggaggaggacaccagctggaccggcaagctgtgcgccctggtgtacaagatcaagggcccccccaagcccgagaaggagcagcccaccgaggaggaggagagatgccccaccaccctgaaggagctgatcagccagaccatgatctgctgggcccaggaggaccagatccaggacagcgagctggtgagaatgatgttcaacctgctgagaagacagtacgacagcatcggcgagctgctgcaggccctgagaaagacctacaccatcagccacaccagcgtgagcgacaccatcaacctgctggccgccctgggccagatcagaagcctgctgagcgtgagaatgggcaaggaggaggagctgctgatgatcaacggcctgggcgacatcatgaacaacaaggtgttctaccagcaccccaacctgatgagagtgctgggcatgcacgagaccgtgatggaggtgatggtgaacgtgctgggcaccgagaagagccagatcgccttccccaagatggtggccagctgctgcagattcctgtgctacttctgcagaatcagcagacagaaccagaaggccatgttcgagcacctgagctacctgctggagaacagcagcgtgggcctggccagccccagcatgagaggcagcacccccctggacgtggccgccagcagcgtgatggacaacaacgagctggccctgagcctggaggagcccgacctggagaaggtggtgacctacctggccggctgcggcctgcagagctgccccatgctgctggccaagggctaccccgacgtgggctggaaccccatcgagggcgagagatacctgagcttcctgagattcgccgtgttcgtgaacagcgagagcgtggaggagaacgccagcgtggtggtgaagctgctgatcagaagacccgagtgcttcggccccgccctgagaggcgagggcggcaacggcctgctggccgccatgcagggcgccatcaagatcagcgagaaccccgccctggacctgcccagccagggctacaagagagaggtgagcaccggcgacgacgaggaggaggaggagatcgtgcacatgggcaacgccatcatgagcttctacagcgccctgatcgacctgctgggcagatgcgcccccgagatgcacctgatccagaccggcaagggcgaggccatcagaatcagaagcatcctgagaagcctggtgcccaccgaggacctggtgggcatcatcagcatccccctgaagctgcccagcctgaacaaggacggcagcgtgagcgagcccgacatggccgccaacttctgccccgaccacaaggcccccatggtgctgttcctggacagagtgtacggcatcaaggaccagaccttcctgctgcacctgctggaggtgggcttcctgcccgacctgagagccagcgccagcctggacaccgtgagcctgagcaccaccgaggccgccctggccctgaacagatacatctgcagcgccgtgctgcccctgctgaccagatgcgcccccctgttcgccggcaccgagcactgcaccagcctgatcgacagcaccctgcagaccatctacagactgagcaagggcagaagcctgaccaaggcccagagagacaccatcgaggagtgcctgctggccatctgcaaccacctgagacccagcatgctgcagcagctgctgagaagactggtgttcgacgtgccccagctgaacgagtactgcaagatgcccctgaagctgctgaccaaccactacgagcagtgctggaagtactactgcctgcccagcggctggggcagctacggcctggccgtggaggaggagctgcacctgaccgagaagctgttctggggcatcttcgacagcctgagccacaagaagtacgaccccgacctgttcagaatggccctgccctgcctgagcgccatcgccggcgccctgccccccgactacctggacaccagaatcaccgccaccctggagaagcagatcagcgtggacgccgacggcaacttcgaccccaagcccatcaacaccatgaacttcagcctgcccgagaagctggagtacatcgtgaccaagtacgccgagcacagccacgacaagtgggcctgcgacaagagccagagcggctggaagtacggcatcagcctggacgagaacgtgaagacccaccccctgatcagacccttcaagaccctgaccgagaaggagaaggagatctacagatggcccgccagagagagcctgaagaccatgctggccgtgggctggaccgtggagagaaccaaggagggcgaggccctggtgcagcagagagagaacgagaagctgagaagcgtgagccaggccaaccagggcaacagctacagccccgcccccctggacctgagcaacgtggtgctgagcagagagctgcagggcatggtggaggtggtggccgagaactaccacaacatctgggccaagaagaagaagctggagctggagagcaagggcggcggcagccaccccctgctggtgccctacgacaccctgaccgccaaggagaagttcaaggacagagagaaggcccaggacctgttcaagttcctgcaggtgaacggcatcatcgtgagcagaggcatgaaggacatggagctggacgccagcagcatggagaagagattcgcctacaagttcctgaagaagatcctgaagtacgtggacagcgcccaggagttcatcgcccacctggaggccatcgtgagcagcggcaagaccgagaagagccccagagaccaggagatcaagttcttcgccaaggtgctgctgcccctggtggaccagtacttcaccagccactgcctgtacttcctgagcagccccctgaagcccctgagcagcagcggctacgccagccacaaggagaaggagatggtggccggcctgttctgcaagctggccgccctggtgagacacagaatcagcctgttcggcagcgacagcaccaccatggtgagctgcctgcacatcctggcccagaccctggacaccagaaccgtgatgaagagcggcagcgagctggtgaaggccggcctgagagccttcttcgagaacgccgccgaggacctggagaagaccagcgagaacctgaagctgggcaagttcacccacagcagaacccagatcaagggcgtgagccagaacatcaactacaccaccgtggccctgctgcccatcctgaccagcatcttcgagcacgtgacccagcaccagttcggcatggacctgctgctgggcgacgtgcagatcagctgctaccacatcctgtgcagcctgtacagcctgggcaccggcaagaacatctacgtggagagacagagacccgccctgggcgagtgcctggccagcctggccgccgccatccccgtggccttcctggagcccaccctgaacagatacaaccccctgagcgtgttcaacaccaagacccccagagagagaagcatcctgggcatgcccgacaccgtggaggacatgtgccccgacatcccccagctggagggcctgatgaaggagatcaacgacctggccgagagcggcgccagatacaccgagatgccccacgtgatcgaggtgatcctgcccatgctgtgcaactacctgagctactggtgggagagaggccccgagaacctgccccccagcaccggcccctgctgcaccaaggtgaccagcgagcacctgagcctgatcctgggcaacatcctgaagatcatcaacaacaacctgggcatcgacgaggccagctggatgaagagaatcgccgtgtacgcccagcccatcatcagcaaggccagacccgacctgctgagaagccacttcatccccaccctggagaagctgaagaagaaggccgtgaagaccgtgcaggaggaggagcagctgaaggccgacggcaagggcgacacccaggaggccgagctgctgatcctggacgagttcgccgtgctgtgcagagacctgtacgccttctaccccatgctgatcagatacgtggacaacaacagaagcaactggctgaagagccccgacgccgacagcgaccagctgttcagaatggtggccgaggtgttcatcctgtggtgcaagagccacaacttcaagagagaggagcagaacttcgtgatccagaacgagatcaacaacctggccttcctgaccggcgacagcaagagcaagatgagcaagagcggcggccaggaccaggagagaaagaagaccaagagaagaggcgacctgtacagcatccagaccagcctgatcgtggccgccctgaagaagatgctgcccatcggcctgaacatgtgcacccccggcgaccaggagctgatcagcctggccaagagcagatacagccacagagacaccgacgaggaggtgagagagcacctgagaaacaacctgcacctgcaggagaagagcgacgaccccgccgtgaagtggcagctgaacctgtacaaggacgtgctgaagagcgaggagcccttcaaccccgagaagaccgtggagagagtgcagagaatcagcgccgccgtgttccacctggagcaggtggagcagcccctgagaagcaagaaggccgtgtggcacaagctgctgagcaagcagagaaagagagccgtggtggcctgcttcagaatggcccccctgtacaacctgcccagacacagaagcatcaacctgttcctgcacggctaccagagattctggatcgagaccgaggagtacagcttcgaggagaagctggtgcaggacctggccaagagccccaaggtggaggaggaggaggaggaggagaccgagaagcagcccgaccccctgcaccagatcatcctgtacttcagcagaaacgccctgaccgagagaagcaagctggaggacgaccccctgtacaccagctacagcagcatgatggccaagagctgccagagcggcgaggacgaggaggaggacgaggacaaggagaagaccttcgaggagaaggagatggagaagcagaagaccctgtaccagcaggccagactgcacgagagaggcgccgccgagatggtgctgcagatgatcagcgccagcaagggcgagatgagccccatggtggtggagaccctgaagctgggcatcgccatcctgaacggcggcaacgccggcgtgcagcagaagatgctggactacctgaaggagaagaaggacgccggcttcttccagagcctgagcggcctgatgcagagctgcagcgtgctggacctgaacgccttcgagagacagaacaaggccgagggcctgggcatggtgaccgaggagggcaccctgatcgtgagagagagaggcgagaaggtgctgcagaacgacgagttcaccagagacctgttcagattcctgcagctgctgtgcgagggccacaacagcgacttccagaacttcctgagaacccagatgggcaacaccaccaccgtgaacgtgatcatcagcaccgtggactacctgctgagactgcaggagagcatcagcgacttctactggtactacagcggcaaggacatcatcgacgagagcggccagcacaacttcagcaaggccctggccgtgaccaagcagatcttcaacagcctgaccgagtacatccagggcccctgcatcggcaaccagcagagcctggcccacagcagactgtgggacgccgtggtgggcttcctgcacgtgttcgccaacatgcagatgaagctgagccaggacagcagccagatcgagctgctgaaggagctgctggacctgctgcaggacatggtggtgatgctgctgagcctgctggagggcaacgtggtgaacggcaccatcggcaagcagatggtggacaccctggtggagagcagcaccaacgtggagatgatcctgaagttcttcgacatgttcctgaagctgaaggacctgaccagcagcgacaccttcaaggagtacgaccccgacggcaagggcatcatcagcaagaaggagttccagaaggccatggagggccagaagcagtacacccagagcgagatcgacttcctgctgagctgcgccgaggccgacgagaacgacatgttcaactacgtggacttcgtggacagattccacgagcccgccaaggacatcggcttcaacgtggccgtgctgctgaccaacctgagcgagcacatgcccaacgacagcagactgaagtgcctgctggaccccgccgagagcgtgctgaactacttcgagccctacctgggcagaatcgagatcatgggcggcgccaagaagatcgagagagtgtacttcgagatcagcgagagcagcagaacccagtgggagaagccccaggtgaaggagagcaagagacagttcatcttcgacgtggtgaacgagggcggcgagcaggagaagatggagctgttcgtgaacttctgcgaggacaccatcttcgagatgcagctggccagccagatcagcgagagcgacagcgccgacagacccgaggaggaggaggaggacgaggacagcagctacgtgctggagatcgccggcgaggaggaggaggacggcagcctggagcccgccagcgccttcgccatggcctgcgccagcgtgaagagaaacgtgaccgacttcctgaagagagccaccctgaagaacctgagaaagcagtacagaaacgtgaagaagatgaccgccaaggagctggtgaaggtgctgttcagcttcttctggatgctgttcgtgggcctgttccagctgctgttcaccatcctgggcggcatcttccagatcctgtggagcaccgtgttcggcggcggcctggtggagggcgccaagaacatcagagtgaccaagatcctgggcgacatgcccgaccccacccagttcggcatccacgacgacaccatggaggccgagagagccgaggtgatggagcccggcatcaccaccgagctggtgcacttcatcaagggcgagaagggcgacaccgacatcatgagcgacctgttcggcctgcaccccaagaaggagggcagcctgaagcacggccccgaggtgggcctgggcgacctgagcgagatcatcggcaaggacgagccccccaccctggagagcaccgtgcagaagaagagaaaggcccaggccgccgagatgaaggccgccaacgaggccgagggcaaggtggagagcgagaaggccgacatggaggacggcgagaaggaggacaaggacaaggaggaggagcaggccgagtacctgtggaccgaggtgaccaagaagaagaagagaagatgcggccagaaggtggagaagcccgaggccttcaccgccaacttcttcaagggcctggagatctaccagaccaagctgctgcactacctggccagaaacttctacaacctgagattcctggccctgttcgtggccttcgccatcaacttcatcctgctgttctacaaggtgaccgaggagcccctggaggaggagaccgaggacgtggccaacctgtggaacagcttcaacgacgaggaggaggaggaggccatggtgttcttcgtgctgcaggagagcaccggctacatggcccccaccctgagagccctggccatcatccacaccatcatcagcctggtgtgcgtggtgggctactactgcctgaaggtgcccctggtggtgttcaagagagagaaggagatcgccagaaagctggagttcgacggcctgtacatcaccgagcagcccagcgaggacgacatcaagggccagtgggacagactggtgatcaacacccccagcttccccaacaactactgggacaagttcgtgaagagaaaggtgatcaacaagtacggcgacctgtacggcgccgagagaatcgccgagctgctgggcctggacaagaacgccctggacttcagccccgtggaggagaccaaggccgaggccgccagcctggtgagctggctgagcagcatcgacatgaagtaccacatctggaagctgggcgtggtgttcaccgacaacagcttcctgtacctggcctggtacaccaccatgagcgtgctgggccactacaacaacttcttcttcgccgcccacctgctggacatcgccatgggcttcaagaccctgagaaccatcctgagcagcgtgacccacaacggcaagcagctggtgctgaccgtgggcctgctggccgtggtggtgtacctgtacaccgtggtggccttcaacttcttcagaaagttctacaacaagagcgaggacgacgacgagcccgacatgaagtgcgacgacatgatgacctgctacctgttccacatgtacgtgggcgtgagagccggcggcggcatcggcgacgagatcgaggaccccgccggcgacccctacgagatgtacagaatcgtgttcgacatcaccttcttcttcttcgtgatcgtgatcctgctggccatcatccagggcctgatcatcgacgccttcggcgagctgagagaccagcaggagcaggtgagagaggacatggagaccaagtgcttcatctgcggcatcggcaacgactacttcgacaccaccccccacggcttcgagacccacaccctgcaggagcacaacctggccaactacctgttcttcctgatgtacctgatcaacaaggacgagaccgagcacaccggccaggagagctacgtgtggaagatgtaccaggagagatgctgggacttcttccccgccggcgactgcttcagaaagcagtacgaggaccagctgggctag

SEQ ID NO: 97920 - DNA, 285 bp, synthetic construct
  misc_feature 1..285: note = Description of Artificial Sequence: Synthetic coding sequence
  source 1..285: mol_type = other DNA
atgggcagcgagctggagaccgccatggagaccctgatcaacgtgttccacgcccacagcggcaaggagggcgacaagtacaagctgagcaagaaggagctgaaggagctgctgcagaccgagctgagcggcttcctggacgcccagaaggacgtggacgccgtggacaaggtgatgaaggagctggacgagaacggcgacggcgaggtggacttccaggagtacgtggtgctggtggccgccctgaccgtggcctgcaacaacttcttctgggagaacagctag

SEQ ID NO: 97921 - DNA, 162 bp, synthetic construct
  misc_feature 1..162: note = Description of Artificial Sequence: Synthetic coding sequence
  source 1..162: mol_type = other DNA
atgggcagcgagctggagaccgccatggagaccctgatcaacgtgttccacgcccacagcggcaaggagggcgacaagtacaagctgagcaagaaggagctgaaggagctgctgcagaccgagctgagcggcttcctggacgtgaaggagctgatgctgtag

SEQ ID NO: 97922 - DNA, 444 bp, synthetic construct
  misc_feature 1..444: note = Description of Artificial Sequence: Synthetic coding sequence
  source 1..444: mol_type = other DNA
atggaggagccccagaccaagacccccagcgccgagttccccccctacagagcccagcccgcccagcccgccaccgcccccgccgccaccttcgccaccctggccatctgccccgagcccgcccccaccagcggccccggccagccctgcaccgccgccatgggcagcgagctggagaccgccatggagaccctgatcaacgtgttccacgcccacagcggcaaggagggcgacaagtacaagctgagcaagaaggagctgaaggagctgctgcagaccgagctgagcggcttcctggacgcccagaaggacgtggacgccgtggacaaggtgatgaaggagctggacgagaacggcgacggcgaggtggacttccaggagtacgtggtgctggtggccgccctgaccgtggcctgcaacaacttcttctgggagaacagctag

SEQ ID NO: 97923 - DNA, 105 bp, synthetic construct
  misc_feature 1..105: note = Description of Artificial Sequence: Synthetic coding sequence
  source 1..105: mol_type = other DNA
atgggcagcgagctggagaccgccatggagaccctgatcaacgtgttccacgcccacagcggcaaggagggcgacaagtacaagctgagcaagaaggagctgtag

SEQ ID NO: 97924 - DNA, 294 bp, synthetic construct
  misc_feature 1..294: note = Description of Artificial Sequence: Synthetic coding sequence
  source 1..294: mol_type = other DNA
atgcccagccagatggagcacgccatggagaccatgatgttcaccttccacaagttcgccggcgacaagggctacctgaccaaggaggacctgagagtgctgatggagaaggagttccccggcttcctggagaaccagaaggaccccctggccgtggacaagatcatgaaggacctggaccagtgcagagacggcaaggtgggcttccagagcttcttcagcctgatcgccggcctgaccatcgcctgcaacgactacttcgtggtgcacatgaagcagaagggcaagaagtag

SEQ ID NO: 97925 - DNA, 294 bp, synthetic construct; identical to SEQ ID NO: 97924
  misc_feature 1..294: note = Description of Artificial Sequence: Synthetic coding sequence
  source 1..294: mol_type = other DNA

SEQ ID NO: 97926 - DNA, 318 bp, synthetic construct
  misc_feature 1..318: note = Description of Artificial Sequence: Synthetic coding sequence
  source 1..318: mol_type = other DNA
atggccaagatcagcagccccaccgagaccgagagatgcatcgagagcctgatcgccgtgttccagaagtacgccggcaaggacggctacaactacaccctgagcaagaccgagttcctgagcttcatgaacaccgagctggccgccttcaccaagaaccagaaggaccccggcgtgctggacagaatgatgaagaagctggacaccaacagcgacggccagctggacttcagcgagttcctgaacctgatcggcggcctggccatggcctgccacgacagcttcctgaaggccgtgcccagccagaagagaacctag

SEQ ID NO: 97927 - DNA, 252 bp, synthetic construct
  misc_feature 1..252: note = Description of Artificial Sequence: Synthetic coding sequence
  source 1..252: mol_type = other DNA
gccggcaagatgaccaagctggaggagcacctggagggcatcgtgaacatcttccaccagtacagcgtgagaaagggccacttcgacaccctgagcaagggcgagctgaagcagctgctgaccaaggagctggccaacaccatcaagagacccaagaagggcagcagcgtgatcgacgagatcttccagggcctggacgccaaccaggacgagcaggtggacttccaggagttcatcagcctggtggcctag

SEQ ID NO: 97928 - DNA, 279 bp, synthetic construct
  misc_feature 1..279: note = Description of Artificial Sequence: Synthetic coding sequence
  source 1..279: mol_type = other DNA
atgaccaagctggaggagcacctggagggcatcgtgaacatcttccaccagtacagcgtgagaaagggccacttcgacaccctgagcaagggcgagctgaagcagctgctgaccaaggagctggccaacaccatcaagaacatcaaggacaaggccgtgatcgacgagatcttccagggcctggacgccaaccaggacgagcaggtggacttccaggagttcatcagcctggtggccatcgccctgaaggccgcccactaccacacccacaaggagtag

SEQ ID NO: 97929 - DNA, 297 bp, synthetic construct
  misc_feature 1..297: note = Description of Artificial Sequence: Synthetic coding sequence
  source 1..297: mol_type = other DNA
atggccgccgagcccctgaccgagctggaggagagcatcgagaccgtggtgaccaccttcttcaccttcgccagacaggagggcagaaaggacagcctgagcgtgaacgagttcaaggagctggtgacccagcagctgccccacctgctgaaggacgtgggcagcctggacgagaagatgaagagcctggacgtgaaccaggacagcgagctgaagttcaacgagtactggagactgatcggcgagctggccaaggagatcagaaagaagaaggacctgaagatcagaaagaagtag

SEQ ID NO: 97930 - DNA, 297 bp, synthetic construct; identical to SEQ ID NO: 97929
  misc_feature 1..297: note = Description of Artificial Sequence: Synthetic coding sequence
  source 1..297: mol_type = other DNA

SEQ ID NO: 97931 - DNA, 297 bp, synthetic construct; identical to SEQ ID NO: 97929
  misc_feature 1..297: note = Description of Artificial Sequence: Synthetic coding sequence
  source 1..297: mol_type = other DNA

SEQ ID NO: 97932 - DNA, 297 bp, synthetic construct; identical to SEQ ID NO: 97929
  misc_feature 1..297: note = Description of Artificial Sequence: Synthetic coding sequence
  source 1..297: mol_type = other DNA

SEQ ID NO: 97933 - DNA, 297 bp, synthetic construct; identical to SEQ ID NO: 97929
  misc_feature 1..297: note = Description of Artificial Sequence: Synthetic coding sequence
  source 1..297: mol_type = other DNA

SEQ ID NO: 97934 - DNA, 315 bp, synthetic construct
  misc_feature 1..315: note = Description of Artificial Sequence: Synthetic coding sequence
  source 1..315: mol_type = other DNA
atgggccagtgcagaagcgccaacgccgaggacgcccaggagttcagcgacgtggagagagccatcgagaccctgatcaagaacttccaccagtacagcgtggagggcggcaaggagaccctgacccccagcgagctgagagacctggtgacccagcagctgccccacctgatgcccagcaactgcggcctggaggagaagatcgccaacctgggcagctgcaacgacagcaagctggagttcagaagcttctgggagctgatcggcgaggccgccaagagcgtgaagctggagagacccgtgagaggccactag

SEQ ID NO: 97935 - DNA, 315 bp, synthetic construct; identical to SEQ ID NO: 97934
  misc_feature 1..315: note = Description of Artificial Sequence: Synthetic coding sequence
  source 1..315: mol_type = other DNA

SEQ ID NO: 97936 - DNA, 315 bp, synthetic construct; identical to SEQ ID NO: 97934
  misc_feature 1..315: note = Description of Artificial Sequence: Synthetic coding sequence
  source 1..315: mol_type = other DNA

SEQ ID NO: 97937 - DNA, 315 bp, synthetic construct; identical to SEQ ID NO: 97934
  misc_feature 1..315: note = Description of Artificial Sequence: Synthetic coding sequence
  source 1..315: mol_type = other DNA

SEQ ID NO: 97938 - DNA, 417 bp, synthetic construct
  misc_feature 1..417: note = Description of Artificial Sequence: Synthetic coding sequence
  source 1..417: mol_type = other DNA
atgtgcagcagcctggagcaggccctggccgtgctggtgaccaccttccacaagtacagctgccaggagggcgacaagttcaagctgagcaagggcgagatgaaggagctgctgcacaaggagctgcccagcttcgtgggccacagcagagagccctgcgccgtgagagccttcagagtgcacctgttcaaccccgtgatcggcgacctgagaaaccagagccccgagggcaagagcgactgccccaagatcacccagcactgggagaaggtggacgaggagggcctgaagaagctgatgggcagcctggacgagaacagcgaccagcaggtggacttccaggagtacgccgtgttcctggccctgatcaccgtgatgtgcaacgacttcttccagggctgccccgacagaccctag

SEQ ID NO: 97939 - DNA, 294 bp, synthetic construct
  misc_feature 1..294: note = Description of Artificial Sequence: Synthetic coding sequence
  source 1..294: mol_type = other DNA
atgtgcagcagcctggagcaggccctggccgtgctggtgaccaccttccacaagtacagctgccaggagggcgacaagttcaagctgagcaagggcgagatgaaggagctgctgcacaaggagctgcccagcttcgtgggcgagaaggtggacgaggagggcctgaagaagctgatgggcagcctggacgagaacagcgaccagcaggtggacttccaggagtacgccgtgttcctggccctgatcaccgtgatgtgcaacgacttcttccagggctgccccgacagaccctag

SEQ ID NO: 97940 - DNA, 294 bp, synthetic construct; identical to SEQ ID NO: 97939
  misc_feature 1..294: note = Description of Artificial Sequence: Synthetic coding sequence
  source 1..294: mol_type = other DNA

SEQ ID NO: 97941 - DNA, 294 bp, synthetic construct; identical to SEQ ID NO: 97939
  misc_feature 1..294: note = Description of Artificial Sequence: Synthetic coding sequence
  source 1..294: mol_type = other DNA

SEQ ID NO: 97942 - DNA, 306 bp, synthetic construct
  misc_feature 1..306: note = Description of Artificial Sequence: Synthetic coding sequence
  source 1..306: mol_type = other DNA
atggccagacccctggagcaggccgtggccgccatcgtgtgcaccttccaggagtacgccggcagatgcggcgacaagtacaagctgtgccaggccgagctgaaggagctgctgcagaaggagctggccacctggacccccaccgagttcagagagtgcgactacaacaagttcatgagcgtgctggacaccaacaaggactgcgaggtggacttcgtggagtacgtgagaagcctggcctgcctgtgcctgtactgccacgagtacttcaaggactgccccagcgagcccccctgcagccagtag

SEQ ID NO: 97943 - DNA, 306 bp, synthetic construct; identical to SEQ ID NO: 97942
  misc_feature 1..306: note = Description of Artificial Sequence: Synthetic coding sequence
  source 1..306: mol_type = other DNA

SEQ ID NO: 97944 - DNA, 306 bp, synthetic construct
  misc_feature 1..306: note = Description of Artificial Sequence: Synthetic coding sequence
  source 1..306: mol_type = other DNA
atggcctgccccctggagaaggccctggacgtgatggtgagcaccttccacaagtacagcggcaaggagggcgacaagttcaagctgaacaagagcgagctgaaggagctgctgaccagagagctgcccagcttcctgggcaagagaaccgacgaggccgccttccagaagctgatgagcaacctggacagcaacagagacaacgaggtggacttccaggagtactgcgtgttcctgagctgcatcgccatgatgtgcaacgagttcttcgagggcttccccgacaagcagcccagaaagaagtag

SEQ ID NO: 97945 - DNA, 306 bp, synthetic construct; identical to SEQ ID NO: 97944
  misc_feature 1..306: note = Description of Artificial Sequence: Synthetic coding sequence
  source 1..306: mol_type = other DNA

SEQ ID NO: 97946 - DNA, 306 bp, synthetic construct; identical to SEQ ID NO: 97944
  misc_feature 1..306: note = Description of Artificial Sequence: Synthetic coding sequence
  source 1..306: mol_type = other DNA

SEQ ID NO: 97947 - DNA, 306 bp, synthetic construct; identical to SEQ ID NO: 97944
  misc_feature 1..306: note = Description of Artificial Sequence: Synthetic coding sequence
  source 1..306: mol_type = other DNA

SEQ ID NO: 97948 - DNA, 273 bp, synthetic construct
  misc_feature 1..273: note = Description of Artificial Sequence: Synthetic coding sequence
  source 1..273: mol_type = other DNA
atggtgagcaccttccacaagtacagcggcaaggagggcgacaagttcaagctgaacaagagcgagctgaaggagctgctgaccagagagctgcccagcttcctgggcaagagaaccgacgaggccgccttccagaagctgatgagcaacctggacagcaacagagacaacgaggtggacttccaggagtactgcgtgttcctgagctgcatcgccatgatgtgcaacgagttcttcgagggcttccccgacaagcagcccagaaagaagtag

SEQ ID NO: 97949 - DNA, 333 bp, synthetic construct
  misc_feature 1..333: note = Description of Artificial Sequence: Synthetic coding sequence
  source 1..333: mol_type = other DNA
atgcccgccgcctggatcctgtgggcccacagccacagcgagctgcacaccgtgatggagacccccctggagaaggccctgaccaccatggtgaccaccttccacaagtacagcggcagagagggcagcaagctgaccctgagcagaaaggagctgaaggagctgatcaagaaggagctgtgcctgggcgagatgaaggagagcagcatcgacgacctgatgaagagcctggacaagaacagcgaccaggagatcgacttcaaggagtacagcgtgttcctgaccatgctgtgcatggcctacaacgacttcttcctggaggacaacaagtag

SEQ ID NO: 97950 - DNA, 279 bp, synthetic construct
  misc_feature 1..279: note = Description of Artificial Sequence: Synthetic coding sequence
  source 1..279: mol_type = other DNA
atggagacccccctggagaaggccctgaccaccatggtgaccaccttccacaagtacagcggcagagagggcagcaagctgaccctgagcagaaaggagctgaaggagctgatcaagaaggagctgtgcctgggcgagatgaaggagagcagcatcgacgacctgatgaagagcctggacaagaacagcgaccaggagatcgacttcaaggagtacagcgtgttcctgaccatgctgtgcatggcctacaacgacttcttcctggaggacaacaagtag

SEQ ID NO: 97951 - DNA, 279 bp, synthetic construct; identical to SEQ ID NO: 97950
  misc_feature 1..279: note = Description of Artificial Sequence: Synthetic coding sequence
  source 1..279: mol_type = other DNA

SEQ ID NO: 97952 - DNA, 273 bp, synthetic construct
  misc_feature 1..273: note = Description of Artificial Sequence: Synthetic coding sequence
  source 1..273: mol_type = other DNA
atggcctgccccctggaccaggccatcggcctgctggtggccatcttccacaagtacagcggcagagagggcgacaagcacaccctgagcaagaaggagctgaaggagctgatccagaaggagctgaccatcggcagcaagctgcaggacgccgagatcgccagactgatggaggacctggacagaaacaaggaccaggaggtgaacttccaggagtacgtgaccttcctgggcgccctggccctgatctacaacgaggccctgaagggctag

SEQ ID NO: 97953 - DNA, 273 bp, synthetic construct; identical to SEQ ID NO: 97952
  misc_feature 1..273: note = Description of Artificial Sequence: Synthetic coding sequence
  source 1..273: mol_type = other DNA

SEQ ID NO: 97954 - DNA, 306 bp, synthetic construct
  misc_feature 1..306: note = Description of Artificial Sequence: Synthetic coding sequence
  source 1..306: mol_type = other DNA
atgagcaacacccaggccgagagaagcatcatcggcatgatcgacatgttccacaagtacaccagaagagacgacaagatcgagaagcccagcctgctgaccatgatgaaggagaacttccccaacttcctgagcgcctgcgacaagaagggcaccaactacctggccgacgtgttcgagaagaaggacaagaacgaggacaagaagatcgacttcagcgagttcctgagcctgctgggcgacatcgccaccgactaccacaagcagagccacggcgccgccccctgcagcggcggcagccagtag

SEQ ID NO: 97955 - DNA, 306 bp, synthetic construct; identical to SEQ ID NO: 97954
  misc_feature 1..306: note = Description of Artificial Sequence: Synthetic coding sequence
  source 1..306: mol_type = other DNA

SEQ ID NO: 97956 - DNA, 282 bp, synthetic construct
  misc_feature 1..282: note = Description of Artificial Sequence: Synthetic coding sequence
  source 1..282: mol_type = other DNA
atgctgaccgagctggagaaggccctgaacagcatcatcgacgtgtaccacaagtacagcctgatcaagggcaacttccacgccgtgtacagagacgacctgaagaagctgctggagaccgagtgcccccagtacatcagaaagaagggcgccgacgtgtggttcaaggagctggacatcaacaccgacggcgccgtgaacttccaggagttcctgatcctggtgatcaagatgggcgtggccgcccacaagaagagccacgaggagagccacaaggagtag

SEQ ID NO: 97957 - DNA, 282 bp, synthetic construct; identical to SEQ ID NO: 97956
  misc_feature 1..282: note = Description of Artificial Sequence: Synthetic coding sequence
  source 1..282: mol_type = other DNA

SEQ ID NO: 97958 - DNA, 345 bp, synthetic construct
  misc_feature 1..345: note = Description of Artificial Sequence: Synthetic coding sequence
  source 1..345: mol_type = other DNA
atgacctgcaagatgagccagctggagagaaacatcgagaccatcatcaacaccttccaccagtacagcgtgaagctgggccaccccgacaccctgaaccagggcgagttcaaggagctggtgagaaaggacctgcagaacttcctgaagaaggagaacaagaacgagaaggtgatcgagcacatcatggaggacctggacaccaacgccgacaagcagctgagcttcgaggagttcatcatgctgatggccagactgacctgggccagccacgagaagatgcacgagggcgacgagggccccggccaccaccacaagcccggcctgggcgagggcaccccctag

SEQ ID NO: 97959 - DNA, 279 bp, synthetic construct
  misc_feature 1..279: note = Description of Artificial Sequence: Synthetic coding sequence
  source 1..279: mol_type = other DNA
atgagcgagctggagaaggccatggtggccctgatcgacgtgttccaccagtacagcggcagagagggcgacaagcacaagctgaagaagagcgagctgaaggagctgatcaacaacgagctgagccacttcctggaggagatcaaggagcaggaggtggtggacaaggtgatggagaccctggacaacgacggcgacggcgagtgcgacttccaggagttcatggccttcgtggccatggtgaccaccgcctgccacgagttcttcgagcacgagtag

SEQ ID NO: 97960 - DNA, 279 bp, synthetic construct; identical to SEQ ID NO: 97959
  misc_feature 1..279: note = Description of Artificial Sequence: Synthetic coding sequence
  source 1..279: mol_type = other DNA

SEQ ID NO: 97961 - DNA, 288 bp, synthetic construct
  misc_feature 1..288: note = Description of Artificial Sequence: Synthetic coding sequence
  source 1..288: mol_type = other DNA
atgaccgagctggagaccgccatgggcatgatcatcgacgtgttcagcagatacagcggcagcgagggcagcacccagaccctgaccaagggcgagctgaaggtgctgatggagaaggagctgcccggcttcctgcagagcggcaaggacaaggacgccgtggacaagctgctgaaggacctggacgccaacggcgacgcccaggtggacttcagcgagttcatcgtgttcgtggccgccatcaccagcgcctgccacaagtacttcgagaaggccggcctgaagtag

SEQ ID NO: 97962 - DNA, 300 bp, synthetic construct
  misc_feature 1..300: note = Description of Artificial Sequence: Synthetic coding sequence
  source 1..300: mol_type = other DNA
atgcccacccagctggagatggccatggacaccatgatcagaatcttccacagatacagcggcaaggagagaaagagattcaagctgagcaagggcgagctgaagctgctgctgcagagagagctgaccgagttcctgagctgccagaaggagacccagctggtggacaagatcgtgcaggacctggacgccaacaaggacaacgaggtggacttcaacgagttcgtggtgatggtggccgccctgaccgtggcctgcaacgactacttcgtggagcagctgaagaagaagggcaagtag

SEQ ID NO: 97963 - DNA, 300 bp, synthetic construct; identical to SEQ ID NO: 97962
  misc_feature 1..300: note = Description of Artificial Sequence: Synthetic coding sequence
  source 1..300: mol_type = other DNA

SEQ ID NO: 97964 - DNA, 1029 bp, synthetic construct
  misc_feature 1..1029: note = Description of Artificial Sequence: Synthetic coding sequence
  source 1..1029: mol_type = other DNA
atgatgtgcagcagagtgcccagcgagcagagcagcggcaccagcctgctgcccaaggacggcgcccccttcagctgggacagcctggacgaggacggcctggacgacagcctgctggagctgagcgagggcgaggaggacgacggcgacgtgaactacaccgaggaggagatcgacgccctgctgaaggaggacgaccccagctacgagcagagcagcggcgaggacgacggcggccacgtggagaagggcgagagaggcagccagatcctgctggacacccccagagagaagaacagcagctacagcctgggccccgtggccgagacccccgacctgttcaagctgccccagctgagcaccagcagcggccacggccccgcccacaccaagcccctgaacagaagaagcgtgctggagaagaacctgatcaaggtgaccgtggcccccttcaaccccaccgtgtgcgacgccctgctggacaaggacgagaccgacagcagcaaggacaccgagaagctgagcagcctgggcgaggagatgagagaggacggcctgagccccaacgagagcaagctgtgcaccgagagcgagggcatcagccccaacaacagcgcctggaacggcccccagctgagcagcagcaacaacaacttccagcagaccgtgagcgacaagaacatgcccgacagcgagaaccccaccagcgtgttcagcagaatcagcgaccacagcgagacccccaacatggagctgagctgcagaaacggcggcagccacaagagcagctgcgagatgagaagcctggtggtgagcaccagcagcaacaagcaggacgtgctgaacaaggacagcggcaagatgaagggccacgagagaagactgggcaaggtgatccccgtgctgcagaccaagaccagaaccaacgtgcccaccttcagccagagcaacctggagcagcagaagcagctgtacctgagaagcgtgatcgcccacatcgaggaccccgaggacaccaaccagggctag

SEQ ID NO: 97965 - DNA, 1227 bp, synthetic construct
  misc_feature 1..1227: note = Description of Artificial Sequence: Synthetic coding sequence
  source 1..1227: mol_type = other DNA
atgatgtgcagcagagtgcccagcgagcagagcagcggcaccagcctgctgcccaaggacggcgcccccttcagctgggacagcctggacgaggacggcctggacgacagcctgctggagctgagcgagggcgaggaggacgacggcgacgtgaactacaccgaggaggagatcgacgccctgctgaaggaggacgaccccagctacgagcagagcagcggcgaggacgacggcggccacgtggagaagggcgagagaggcagccagatcctgctggacacccccagagagaagaacagcagctacagcctgggccccgtggccgagacccccgacctgttcaagctgccccagctgagcaccagcagcggccacggccccgcccacaccaagcccctgaacagaagaagcgtgctggagaagaacctgatcaaggtgaccgtggcccccttcaaccccaccgtgtgcgacgccctgctggacaaggacgagaccgacagcagcaaggacaccgagaagctgagcagcctgggcgaggagatgagagaggacggcctgagccccaacgagagcaagctgtgcaccgagagcgagggcatcagccccaacaacagcgcctggaacggcccccagctgagcagcagcaacaacaacttccagcagaccgtgagcgacaagaacatgcccgacagcgagaaccccaccagcgtgttcagcagaatcagcgaccacagcgagacccccaacatggagctgagctgcagaaacggcggcagccacaagagcagctgcgagatgagaagcctggtggtgagcaccagcagcaacaagcaggacgtgctgaacaaggacagcggcaagatgaagggccacgagagaagactgggcaaggtgatccccgtgctgcagaccaagaccagaaccaacgtgcccaccttcagccagagcaacctggagcagcagaagcagctgtacctgagaagcgtgatcgcccacatcgaggaccccgaggacaccaaccagggcatcagcggcgagctgtgcgccctgatggaccaggtgcaccacatgcagcacagcaagtggcagcaccccagcgacctgaccaccagaaactacgccagaagacagaagcacctgcagagatacagcctgacccagtgggtggacagaaacatgagaagccaccacagattccagagactgcccgacttcagctacagctag

SEQ ID NO: 97966 - DNA, 1227 bp, synthetic construct; identical to SEQ ID NO: 97965
  misc_feature 1..1227: note = Description of Artificial Sequence: Synthetic coding sequence
  source 1..1227: mol_type = other DNA

SEQ ID NO: 97967 - DNA, 1026 bp, synthetic construct
  misc_feature 1..1026: note = Description of Artificial Sequence: Synthetic coding sequence
  source 1..1026: mol_type = other DNA
atgatgtgcagcagagtgcccagcgagcagagcagcggcaccagcctgctgcccaaggacggcgcccccttcagctgggacagcctggacgaggacggcctggacgacagcctgctggagctgagcgagggcgaggaggacgacggcgacgtgaactacaccgaggaggagatcgacgccctgctgaaggaggacgaccccagctacgagcagagcagcggcgaggacgacggcggccacgtggagaagggcgagagaggcagccagatcctgctggacacccccagagagaagaacagcagctacagcctgggccccgtggccgagacccccgacctgttcaagctgccccagctgagcaccagcagcggccacggccccgcccacaccaagcccctgaacagaagaagcgtgctggagaagaacctgatcaaggtgaccgtggcccccttcaaccccaccgtgtgcgacgccctgctggacaaggacgagaccgacagcagcaaggacaccgagaagctgagcagcctgggcgaggagatgagagaggacggcctgagccccaacgagagcaagctgtgcaccgagagcgagggcatcagccccaacaacagcgcctggaacggcccccagctgagcagcagcaacaacaacttccagcagaccgtgagcgacaagaacatgcccgacagcgagaaccccaccagcgtgttcagcagaatcagcgaccacagcgagacccccaacatggagctgagctgcagaaacggcggcagccacaagagcagctgcgagatgagaagcctggtggtgagcaccagcagcaacaaggacgtgctgaacaaggacagcggcaagatgaagggccacgagagaagactgggcaaggtgatccccgtgctgcagaccaagaccagaaccaacgtgcccaccttcagccagagcaacctggagcagcagaagcagctgtacctgagaagcgtgatcgcccacatcgaggaccccgaggacaccaaccagggctag

SEQ ID NO: 97968 - DNA, 441 bp, synthetic construct
  misc_feature 1..441: note = Description of Artificial Sequence: Synthetic coding sequence
  source 1..441: mol_type = other DNA
atgatgtgcagcagagtgcccagcgagcagagcagcggcaccagcctgctgcccaaggacggcgcccccttcagctgggacagcctggacgaggacggcctggacgacagcctgctggagctgagcgagggcgaggaggacgacggcgacgtgaactacaccgaggaggagatcgacgccctgctgaaggaggacgaccccagctacgagcagagcagcggcgaggacgacggcggccacgtggagaagggcgagagaggcagccagatcctgctggacacccccagagagaagaacagcagctacagcctgggccccgtggccgagacccccgacctgttcaagctgccccagctgagcaccagcagcggccacggccccgcccacaccaagcccctgaacagaagaagcgtgctggagaagaacctgatcaaggtgtag

SEQ ID NO: 97969 - DNA, 363 bp, synthetic construct
  misc_feature 1..363: note = Description of Artificial Sequence: Synthetic coding sequence
  source 1..363: mol_type = other DNA
atgatgtgcagcagagtgcccagcgagcagagcagcggcaccagcctgctgcccaaggacggcgcccccttcagctgggacagcctggacgaggacggcctggacgacagcctgctggagctgagcgagggcgaggaggacgacggcgacgtgaactacaccgaggaggagatcgacgccctgctgaaggaggacgaccccagctacgagcagagcagcggcgaggacgacggcggccacgtggagaagggcgagagaggcagccagatcctgctggacacccccagagagaagaacagcagctacagcctgggccccgtggccgagacccccgacctgttcaagctgccccagctgagctag

SEQ ID NO: 97970 - DNA, 126 bp, synthetic construct
  misc_feature 1..126: note = Description of Artificial Sequence: Synthetic coding sequence
  source 1..126: mol_type = other DNA
atgatgtgcagcagagtgcccagcgagcagagcagcggcaccagcctgctgcccaaggacggcgcccccttcagctgggacagcctggacgaggacggcctggacgacagcctgctggagctgtag

SEQ ID NO: 97971 - DNA, 18 bp, synthetic construct
  misc_feature 1..18: note = Description of Artificial Sequence: Synthetic coding sequence
  source 1..18: mol_type = other DNA
atgatgtgcagcagatag

SEQ ID NO: 97972 - DNA, 393 bp, synthetic construct
  misc_feature 1..393: note = Description of Artificial Sequence: Synthetic coding sequence
  source 1..393: mol_type = other DNA
atgatgtgcagcagagtgcccagcgagcagagcagcggcaccagcctgctgcccaaggacggcgcccccttcagctgggacagcctggacgaggacggcctggacgacagcctgctggagctgagcgagggcgaggaggacgacggcgacgtgaactacaccgaggaggagatcgacgccctgctgaaggaggacgaccccagctacgagcagagcagcggcgaggacgacggcggccacgtggagaagggcgagagaggcagccagatcctgctggacacccccagagagaagaacagcagctacagcctgggccccgtggccgagacccccgacctgttcaagctgccccagctgagcaccagcagcggccacggccccgcccacacctag

SEQ ID NO: 97973 - DNA, 1026 bp, synthetic construct; identical to SEQ ID NO: 97967
  misc_feature 1..1026: note = Description of Artificial Sequence: Synthetic coding sequence
  source 1..1026: mol_type = other DNA

SEQ ID NO: 97974 - DNA, 516 bp, synthetic construct
  misc_feature 1..516: note = Description of Artificial Sequence: Synthetic coding sequence
  source 1..516: mol_type = other DNA
atgatgtgcagcagagtgcccagcgagcagagcagcggcaccagcctgctgcccaaggacggcgcccccttcagctgggacagcctggacgaggacggcctggacgacagcctgctggagctgagcgagggcgaggaggacgacggcgacgtgaactacaccgaggaggagatcgacgccctgctgaaggaggacgaccccagctacgagcagagcagcggcgaggacgacggcggccacgtggagaagggcgagagaggcagccagatcctgctggacacccccagagagaagaacagcagctacagcctgggccccgtggccgagacccccgacctgttcaagctgccccagctgagcaccagcagcggccacggccccgcccacaccaagcccctgaacagaagaagcgtgctggagaagaacctgatcaaggtgaccgtggcccccttcaaccccaccgtgtgcgacgccctgctggacaaggacgagaccgacagcagcaaggacacctag

SEQ ID NO: 97975 - DNA, 1764 bp, synthetic construct
  misc_feature 1..1764: note = Description of Artificial Sequence: Synthetic coding sequence
  source 1..1764: mol_type = other DNA
atggccaccgccgcctacgagcagctgaagctgcacatcacccccgagaagttctacgtggaggcctgcgacgacggcgccgacgacgtgctgaccatcgacagagtgagcaccgaggtgaccctggccgtgaagaaggacgtgccccccagcgccgtgaccagacccatcttcggcatcctgggcaccatccacctggtggccggcaactacctgatcgtgatcaccaagaagatcaaggtgggcgagttcttcagccacgtggtgtggaaggccaccgacttcgacgtgctgagctacaagaagaccatgctgcacctgaccgacatccagctgcaggacaacaagaccttcctggccatgctgaaccacgtgctgaacgtggacggcttctacttcagcaccacctacgacctgacccacaccctgcagagactgagcaacaccagccccgagttccaggagatgagcctgctggagagagccgaccagagattcgtgtggaacggccacctgctgagagagctgagcgcccagcccgaggtgcacagattcgccctgcccgtgctgcacggcttcatcaccatgcacagctgcagcatcaacggcaagtacttcgactggatcctgatcagcagaagaagctgcttcagagccggcgtgagatactacgtgagaggcatcgacagcgagggccacgccgccaacttcgtggagaccgagcagatcgtgcactacaacggcagcaaggccagcttcgtgcagaccagaggcagcatccccgtgttctggagccagagacccaacctgaagtacaagcccctgccccagatcagcaaggtggccaaccacatggacggcttccagagacacttcgacagccaggtgatcatctacggcaagcaggtgatcatcaacctgatcaaccagaagggcagcgagaagcccctggagcagaccttcgccaccatggtgagcagcctgggcagcggcatgatgagatacatcgccttcgacttccacaaggagtgcaagaacatgagatgggacagactgagcatcctgctggaccaggtggccgagatgcaggacgagctgagctacttcctggtggacagcgccggccaggtggtggccaaccaggagggcgtgttcagaagcaactgcatggactgcctggacagaaccaacgtgatccagagcctgctggccagaagaagcctgcaggcccagctgcagagactgggcgtgctgcacgtgggccagaagctggaggagcaggacgagttcgagaagatctacaagaacgcctgggccgacaacgccaacgcctgcgccaagcagtacgccggcaccggcgccctgaagaccgacttcaccagaaccggcaagagaacccacctgggcctgatcatggacggctggaacagcatgatcagatactacaagaacaacttcagcgacggcttcagacaggacagcatcgacctgttcctgggcaactacagcgtggacgagctggagagccacagccccctgagcgtgcccagagactggaagttcctggccctgcccatcatcatggtggtggccttcagcatgtgcatcatctgcctgctgatggccggcgacacctggaccgagaccctggcctacgtgctgttctggggcgtggccagcatcggcaccttcttcatcatcctgtacaacggcaaggacttcgtggacgcccccagactggtgcagaaggagaagatcgactag

SEQ ID NO: 97976 - DNA, 1581 bp, synthetic construct
  misc_feature 1..1581: note = Description of Artificial Sequence: Synthetic coding sequence
  source 1..1581: mol_type = other DNA
atgtggaagctggtgatgatggagcagatgacctacctgcccctgaccgtgtgcccccagagactgcccctgcagagcagaaagatgttcctgctgcagctgagccaggaccagtacctggtgtactgggcccagagcatctggtggcagctgcaggacaacaagaccttcctggccatgctgaaccacgtgctgaacgtggacggcttctacttcagcaccacctacgacctgacccacaccctgcagagactgagcaacaccagccccgagttccaggagatgagcctgctggagagagccgaccagagattcgtgtggaacggccacctgctgagagagctgagcgcccagcccgaggtgcacagattcgccctgcccgtgctgcacggcttcatcaccatgcacagctgcagcatcaacggcaagtacttcgactggatcctgatcagcagaagaagctgcttcagagccggcgtgagatactacgtgagaggcatcgacagcgagggccacgccgccaacttcgtggagaccgagcagatcgtgcactacaacggcagcaaggccagcttcgtgcagaccagaggcagcatccccgtgttctggagccagagacccaacctgaagtacaagcccctgccccagatcagcaaggtggccaaccacatggacggcttccagagacacttcgacagccaggtgatcatctacggcaagcaggtgatcatcaacctgatcaaccagaagggcagcgagaagcccctggagcagaccttcgccaccatggtgagcagcctgggcagcggcatgatgagatacatcgccttcgacttccacaaggagtgcaagaacatgagatgggacagactgagcatcctgctggaccaggtggccgagatgcaggacgagctgagctacttcctggtggacagcgccggccaggtggtggccaaccaggagggcgtgttcagaagcaactgcatggactgcctggacagaaccaacgtgatccagagcctgctggccagaagaagcctgcaggcccagctgcagagactgggcgtgctgcacgtgggccagaagctggaggagcaggacgagttcgagaagatctacaagaacgcctgggccgacaacgccaacgcctgcgccaagcagtacgccggcaccggcgccctgaagaccgacttcaccagaaccggcaagagaacccacctgggcctgatcatggacggctggaacagcatgatcagatactacaagaacaacttcagcgacggcttcagacaggacagcatcgacctgttcctgggcaactacagcgtggacgagctggagagccacagccccctgagcgtgcccagagactggaagttcctggccctgcccatcatcatggtggtggccttcagcatgtgcatcatctgcctgctgatggccggcgacacctggaccgagaccctggcctacgtgctgttctggggcgtggccagcatcggcaccttcttcatcatcctgtacaacggcaaggacttcgtggacgcccccagactggtgcagaaggagaagatcgactag

SEQ ID NO: 97977 - DNA, 2901 bp, synthetic construct
  misc_feature 1..2901: note = Description of Artificial Sequence: Synthetic coding sequence
  source 1..2901: mol_type = other DNA
atgttctggaagttcgacctgaacaccaccagccacgtggacaagctgctggacaaggagcacgtgaccctgcaggagctgatggacgaggacgacatcctgcaggagtgcaaggcccagaaccagaagctgctggacttcctgtgcagacagcagtgcatggaggagctggtgagcctgatcacccaggacccccccctggacatggaggagaaggtgagattcaagtaccccaacaccgcctgcgagctgctgacctgcgacgtgccccagatcagcgacagactgggcggcgacgagagcctgctgagcctgctgtacgacttcctggaccacgagccccccctgaaccccctgctggccagcttcttcagcaagaccatcggcaacctgatcgccagaaagaccgagcaggtgatcaccttcctgaagaagaaggacaagttcatcagcctggtgctgaagcacatcggcaccagcgccctgatggacctgctgctgagactggtgagctgcgtggagcccgccggcctgagacaggacgtgctgcactggctgaacgaggagaaggtgatccagagactggtggagctgatccaccccagccaggacgaggacagacagagcaacgccagccagaccctgtgcgacatcgtgagactgggcagagaccagggcagccagctgcaggaggccctggagcccgaccccctgctgaccgccctggagagccaggactgcgtggagcagctgctgaagaacatgttcgacggcgacagaaccgagagctgcctggtgagcggcacccaggtgctgctgaccctgctggagaccagaagagtgggcaccgagggcctggtggacagcttcagccagggcctggagagaagctacgccgtgagcagcagcgtgctgcacggcatcgagcccagactgaaggacttccaccagctgctgctgaacccccccaagaagaaggccatcctgaccaccatcggcgtgctggaggagcccctgggcaacgccagactgcacggcgccagactgatggccgccctgctgcacaccaacacccccagcatcaaccaggagctgtgcagactgaacaccatggacctgctgctggacctgttcttcaagtacacctggaacaacttcctgcacttccaggtggagctgtgcatcgccgccatcctgagccacgccgccagagaggagagaaccgaggccagcggcagcgagagcagagtggagcccccccacgagaacggcaacagaagcctggagaccccccagcccgccgccagcctgcccgacaacaccatggtgacccacctgttccagaagtgctgcctggtgcagagaatcctggaggcctgggaggccaacgaccacacccaggccgccggcggcatgagaagaggcaacatgggccacctgaccagaatcgccaacgccgtggtgcagaacctggagagaggccccgtgcagacccacatcagcgaggtgatcagaggcctgcccgccgactgcagaggcagatgggagagcttcgtggaggagaccctgaccgagaccaacagaagaaacaccgtggacctggtgagcacccaccacctgcacagcagcagcgaggacgaggacatcgagggcgccttccccaacgagctgagcctgcagcaggccttcagcgactaccagatccagcagatgaccgccaacttcgtggaccagttcggcttcaacgacgaggagttcgccgaccaggacgacaacatcaacgcccccttcgacagaatcgccgagatcaacttcaacatcgacgccgacgaggacagccccagcgccgccctgttcgaggcctgctgcagcgacagaatccagcccttcgacgacgacgaggacgaggacatctgggaggacagcgacaccagatgcgccgccagagtgatggccagacccagattcggcgccccccacgccagcgagagctgcagcaagaacggccccgagagaggcggccaggacggcaaggccagcctggaggcccacagagacgcccccggcgccggcgccccccccgcccccggcaagaaggaggccccccccgtggagggcgacagcgagggcgccatgtggaccgccgtgttcgacgagcccgccaacagcacccccaccgcccccggcgtggtgagagacgtgggcagcagcgtgtgggccgccggcaccagcgcccccgaggagaagggctgggccaagttcaccgacttccagcccttctgctgcagcgagagcggccccagatgcagcagccccgtggacaccgagtgcagccacgccgagggcagcagaagccagggccccgagaaggccagccaggccagctacttcgccgtgagccccgccagcccctgcgcctggaacgtgtgcgtgaccagaaaggcccccctgctggccagcgacagcagcagcagcggcggcagccacagcgaggacggcgaccagaaggccgccagcgccatggacgccgtgagcagaggccccggcagagaggccccccccctgcccaccgtggccagaaccgaggaggccgtgggcagagtgggctgcgccgacagcagactgctgagccccgcctgccccgcccccaaggaggtgaccgccgcccccgccgtggccgtgccccccgaggccaccgtggccatcaccaccgccctgagcaaggccggccccgccatccccacccccgccgtgagcagcgccctggccgtggccgtgcccctgggccccatcatggccgtgaccgccgcccccgccatggtggccaccctgggcaccgtgaccaaggacggcaagaccgacgccccccccgagggcgccgccctgaacggccccgtgtag

SEQ ID NO: 97978 - DNA, 2217 bp, synthetic construct
  misc_feature 1..2217: note = Description of Artificial Sequence: Synthetic coding sequence
  source 1..2217: mol_type = other DNA
atgagcagaagaagccagagactgaccagatacagccagggcgacgacgacggcagcagcagcagcggcggcagcagcgtggccggcagccagagcaccctgttcaaggacagccccctgagaaccctgaagagaaagagcagcaacatgaagagactgagccccgccccccagctgggccccagcagcgacgcccacaccagctactacagcgagagcctggtgcacgagagctggttcccccccagaagcagcctggaggagctgcacggcgacgccaactggggcgaggacctgagagtgagaagaagaagaggcaccggcggcagcgagagcagcagagccagcggcctggtgggcagaaaggccaccgaggacttcctgggcagcagcagcggctacagcagcgaggacgactacgtggaggacagcgagggcagaggcagcaaggtgaccgagaccgagcccgtgagcagcttccccgccggctacagcgacgtggaccagcagagcagcagcagcagactgagaagcgccgtgagcagagccggcagcctgctgtggatggtggccaccagccccggcagactgttcagactgctgtactggtgggccggcaccacctggtacagactgaccaccgccgccagcctgctggacgtgttcgtgctgaccagaagattcagcagcctgaagaccttcctgtggttcctgctgcccctgctgctgctgacctgcctgacctacggcgcctggtacttctacccctacggcctgcagaccttccaccccgccctggtgagctggtgggccgccaaggacagcagaagacccgacgagggctgggaggccagagacagcagcccccacttccaggccgagcagagagtgatgagcagagtgcacagcctggagagaagactggaggccctggccgccgagttcagcagcaactggcagaaggaggccatgagactggagagactggagctgagacagggcgcccccggccagggcggcggcggcggcctgagccacgaggacaccctggccctgctggagggcctggtgagcagaagagaggccgccctgaaggaggacttcagaagagagaccgccgccagaatccaggaggagctgagcgccctgagagccgagcaccagcaggacagcgaggacctgttcaagaagatcgtgagagccagccaggagagcgaggccagaatccagcagctgaagagcgagtggcagagcatgacccaggagagcttccaggagagcagcgtgaaggagctgagaagactggaggaccagctggccggcctgcagcaggagctggccgccctggccctgaagcagagcagcgtggccgaggaggtgggcctgctgccccagcagatccaggccgtgagagacgacgtggagagccagttccccgcctggatcagccagttcctggccagaggcggcggcggcagagtgggcctgctgcagagagaggagatgcaggcccagctgagagagctggagagcaagatcctgacccacgtggccgagatgcagggcaagagcgccagagaggccgccgccagcctgagcctgaccctgcagaaggagggcgtgatcggcgtgaccgaggagcaggtgcaccacatcgtgaagcaggccctgcagagatacagcgaggacagaatcggcctggccgactacgccctggagagcggcggcgccagcgtgatcagcaccagatgcagcgagacctacgagaccaagaccgccctgctgagcctgttcggcatccccctgtggtaccacagccagagccccagagtgatcctgcagcccgacgtgcaccccggcaactgctgggccttccagggcccccagggcttcgccgtggtgagactgagcgccagaatcagacccaccgccgtgaccctggagcacgtgcccaaggccctgagccccaacagcaccatcagcagcgcccccaaggacttcgccatcttcggcttcgacgaggacctgcagcaggagggcaccctgctgggcaagttcacctacgaccaggacggcgagcccatccagaccttccacttccaggcccccaccatggccacctaccaggtggtggagctgagaatcctgaccaactggggccaccccgagtacacctgcatctacagattcagagtgcacggcgagcccgcccactag

SEQ ID NO: 97979 - DNA, 2154 bp, synthetic construct
  misc_feature 1..2154: note = Description of Artificial Sequence: Synthetic coding sequence
  source 1..2154: mol_type = other DNA
atgagcagaagaagccagagactgaccagatacagccagggcgacgacgacggcagcagcagcagcggcggcagcagcgtggccggcagccagagcaccctgttcaaggacagccccctgagaaccctgaagagaaagagcagcaacatgaagagactgagccccgccccccagctgggccccagcagcgacgcccacaccagctactacagcgagagcctggtgcacgagagctggttcccccccagaagcagcctggaggagctgcacggcgacgccaactggggcgaggacctgagagtgagaagaagaagaggcaccggcggcagcgagagcagcagagccagcggcctggtgggcagaaaggccaccgaggacttcctgggcagcagcagcggctacagcagcgaggacgactacgtgggctacagcgacgtggaccagcagagcagcagcagcagactgagaagcgccgtgagcagagccggcagcctgctgtggatggtggccaccagccccggcagactgttcagactgctgtactggtgggccggcaccacctggtacagactgaccaccgccgccagcctgctggacgtgttcgtgctgaccagaagattcagcagcctgaagaccttcctgtggttcctgctgcccctgctgctgctgacctgcctgacctacggcgcctggtacttctacccctacggcctgcagaccttccaccccgccctggtgagctggtgggccgccaaggacagcagaagacccgacgagggctgggaggccagagacagcagcccccacttccaggccgagcagagagtgatgagcagagtgcacagcctggagagaagactggaggccctggccgccgagttcagcagcaactggcagaaggaggccatgagactggagagactggagctgagacagggcgcccccggccagggcggcggcggcggcctgagccacgaggacaccctggccctgctggagggcctggtgagcagaagagaggccgccctgaaggaggacttcagaagagagaccgccgccagaatccaggaggagctgagcgccctgagagccgagcaccagcaggacagcgaggacctgttcaagaagatcgtgagagccagccaggagagcgaggccagaatccagcagctgaagagcgagtggcagagcatgacccaggagagcttccaggagagcagcgtgaaggagctgagaagactggaggaccagctggccggcctgcagcaggagctggccgccctggccctgaagcagagcagcgtggccgaggaggtgggcctgctgccccagcagatccaggccgtgagagacgacgtggagagccagttccccgcctggatcagccagttcctggccagaggcggcggcggcagagtgggcctgctgcagagagaggagatgcaggcccagctgagagagctggagagcaagatcctgacccacgtggccgagatgcagggcaagagcgccagagaggccgccgccagcctgagcctgaccctgcagaaggagggcgtgatcggcgtgaccgaggagcaggtgcaccacatcgtgaagcaggccctgcagagatacagcgaggacagaatcggcctggccgactacgccctggagagcggcggcgccagcgtgatcagcaccagatgcagcgagacctacgagaccaagaccgccctgctgagcctgttcggcatccccctgtggtaccacagccagagccccagagtgatcctgcagcccgacgtgcaccccggcaactgctgggccttccagggcccccagggcttcgccgtggtgagactgagcgccagaatcagacccaccgccgtgaccctggagcacgtgcccaaggccctgagccccaacagcaccatcagcagcgcccccaaggacttcgccatcttcggcttcgacgaggacctgcagcaggagggcaccctgctgggcaagttcacctacgaccaggacggcgagcccatccagaccttccacttccaggcccccaccatggccacctaccaggtggtggagctgagaatcctgaccaactggggccaccccgagtacacctgcatctacagattcagagtgcacggcgagcccgcccactag

SEQ ID NO: 97980 - DNA, 2154 bp, synthetic construct; identical to SEQ ID NO: 97979
  misc_feature 1..2154: note = Description of Artificial Sequence: Synthetic coding sequence
  source 1..2154: mol_type = other DNA

SEQ ID NO: 97981 - DNA, 2121 bp, synthetic construct
  misc_feature 1..2121: note = Description of Artificial Sequence: Synthetic coding sequence
  source 1..2121: mol_type = other DNA
atggtgagcccccccagcgccggccagagactgagaggcgtgcccgtgtgggccgccggcgccttcagattcagcagcggcgaggagagcaccagccacctgatcatgagcagaagaagccagagactgaccagatacagccagggcgacgacgacggcagcagcagcagcggcggcagcagcgtggccggcagccagagcaccctgttcaaggacagccccctgagaaccctgaagagaaagagcagcaacatgaagagactgagccccgccccccagctgggccccagcagcgacgcccacaccagctactacagcgagagcctggtgcacgagagctggttcccccccagaagcagcctggaggagctgcacggcgacgccaactggggctacagcgacgtggaccagcagagcagcagcagcagactgagaagcgccgtgagcagagccggcagcctgctgtggatggtggccaccagccccggcagactgttcagactgctgtactggtgggccggcaccacctggtacagactgaccaccgccgccagcctgctggacgtgttcgtgctgaccagaagattcagcagcctgaagaccttcctgtggttcctgctgcccctgctgctgctgacctgcctgacctacggcgcctggtacttctacccctacggcctgcagaccttccaccccgccctggtgagctggtgggccgccaaggacagcagaagacccgacgagggctgggaggccagagacagcagcccccacttccaggccgagcagagagtgatgagcagagtgcacagcctggagagaagactggaggccctggccgccgagttcagcagcaactggcagaaggaggccatgagactggagagactggagctgagacagggcgcccccggccagggcggcggcggcggcctgagccacgaggacaccctggccctgctggagggcctggtgagcagaagagaggccgccctgaaggaggacttcagaagagagaccgccgccagaatccaggaggagctgagcgccctgagagccgagcaccagcaggacagcgaggacctgttcaagaagatcgtgagagccagccaggagagcgaggccagaatccagcagctgaagagcgagtggcagagcatgacccaggagagcttccaggagagcagcgtgaaggagctgagaagactggaggaccagctggccggcctgcagcaggagctggccgccctggccctgaagcagagcagcgtggccgaggaggtgggcctgctgccccagcagatccaggccgtgagagacgacgtggagagccagttccccgcctggatcagccagttcctggccagaggcggcggcggcagagtgggcctgctgcagagagaggagatgcaggcccagctgagagagctggagagcaagatcctgacccacgtggccgagatgcagggcaagagcgccagagaggccgccgccagcctgagcctgaccctgcagaaggagggcgtgatcggcgtgaccgaggagcaggtgcaccacatcgtgaagcaggccctgcagagatacagcgaggacagaatcggcctggccgactacgccctggagagcggcggcgccagcgtgatcagcaccagatgcagcgagacctacgagaccaagaccgccctgctgagcctgttcggcatccccctgtggtaccacagccagagccccagagtgatcctgcagcccgacgtgcaccccggcaactgctgggccttccagggcccccagggcttcgccgtggtgagactgagcgccagaatcagacccaccgccgtgaccctggagcacgtgcccaaggccctgagccccaacagcaccatcagcagcgcccccaaggacttcgccatcttcggcttcgacgaggacctgcagcaggagggcaccctgctgggcaagttcacctacgaccaggacggcgagcccatccagaccttccacttccaggcccccaccatggccacctaccaggtggtggagctgagaatcctgaccaactggggccaccccgagtacacctgcatctacagattcagagtgcacggcgagcccgcccactag

SEQ ID NO: 97982 - DNA, 375 bp, synthetic construct
  misc_feature 1..375: note = Description of Artificial Sequence: Synthetic coding sequence
  source 1..375: mol_type = other DNA
atgagcagaagaagccagagactgaccagatacagccagggcgacgacgacggcagcagcagcagcggcggcagcagcgtggccggcagccagagcaccctgttcaaggacagccccctgagaaccctgaagagaaagagcagcaacatgaagagactgagccccgccccccagctgggccccagcagcgacgcccacaccagctactacagcgagagcctggtgcacgagagctggttcccccccagaagcagcctggaggagctgcacggcgacgccaactgggaccccaccttccagaagctgctggaggcccagaagagcccctggttcttccccgcccaggtgagaacctgcggctgcggcggcggctag

SEQ ID NO: 97983 - DNA, 384 bp, synthetic construct
  misc_feature 1..384: note = Description of Artificial Sequence: Synthetic coding sequence
  source 1..384: mol_type = other DNA
atgagcagaagaagccagagactgaccagatacagccagggcgacgacgacggcagcagcagcagcggcggcagcagcgtggccggcagccagagcaccctgttcaaggacagccccctgagaaccctgaagagaaagagcagcaacatgaagagactgagccccgccccccagctgggccccagcagcgacgcccacaccagctactacagcgagagcctggtgcacgagagctggttcccccccagaagcagcctggaggagctgcacggcgacgccaactggggctacagcgacgtggaccagcagagcagcagcagcagactgagaagcgccgtgagcagagccggcagcctgctgtggatggtggccaccagcccctag

SEQ ID NO: 97984 - DNA, 333 bp, synthetic construct
  misc_feature 1..333: note = Description of Artificial Sequence: Synthetic coding sequence
  source 1..333: mol_type = other DNA
atgagcagaagaagccagagactgaccagatacagccagggcgacgacgacggcagcagcagcagcggcggcagcagcgtggccggcagccagagcaccctgttcaaggacagccccctgagaaccctgaagagaaagagcagcaacatgaagagactgagccccgccccccagctgggccccagcagcgacgcccacaccagctactacagcgagagcctggtgcacgagagctggttcccccccagaagcagcctggaggagctgcacggcgacgccaactggggcgaggacctgagagtgagaagaagaagaggcaccggcggcagctag

SEQ ID NO: 97985 - DNA, 675 bp, synthetic construct
  misc_feature 1..675: note = Description of Artificial Sequence: Synthetic coding sequence
  source 1..675: mol_type = other DNA
atgagcagaagaagccagagactgaccagatacagccagggcgacgacgacggcagcagcagcagcggcggcagcagcgtggccggcagccagagcaccctgttcaaggacagccccctgagaaccctgaagagaaagagcagcaacatgaagagactgagccccgccccccagctgggccccagcagcgacgcccacaccagctactacagcgagagcctggtgcacgagagctggttcccccccagaagcagcctggaggagctgcacggcgacgccaactggggctacagcgacgtggaccagcagagcagcagcagcagactgagaagcgccgtgagcagagccggcagcctgctgtggatggtggccaccagccccggcagactgttcagactgctgtactggtgggccggcaccacctggtacagactgaccaccgccgccagcctgctggacgtgttcgtgctgaccagaagattcagcagcctgaagaccttcctgtggttcctgctgcccctgctgctgctgacctgcctgacctacggcgcctggtacttctacccctacggcctgcagaccttccaccccgccctggtgagctggtgggccgccaaggacagcagaagacccgacgagggctgggaggccagagacagcagcccccacttctag

SEQ ID NO: 97986 - DNA, 306 bp, synthetic construct
  misc_feature 1..306: note = Description of Artificial Sequence: Synthetic coding sequence
  source 1..306: mol_type = other DNA
atgagcagaagaagccagagactgaccagatacagccagggcgacgacgacggcagcagcagcagcggcggcagcagcgtggccggcagccagagcaccctgttcaaggacagccccctgagaaccctgaagagaaagagcagcaacatgaagagactgagccccgccccccagctgggccccagcagcgacgcccacaccagctactacagcgagagcctggtgcacgagagctggttcccccccagaagcagcctggaggagctgcacggcgacgccaactggggcgaggacctgagagtgtag

SEQ ID NO: 97987 - DNA, 435 bp, synthetic construct
  misc_feature 1..435: note = Description of Artificial Sequence: Synthetic coding sequence
  source 1..435: mol_type = other DNA
atgagcagaagaagccagagactgaccagatacagccagggcgacgacgacggcagcagcagcagcggcggcagcagcgtggccggcagccagagcaccctgttcaaggacagccccctgagaaccctgaagagaaagagcagcaacatgaagagactgagccccgccccccagctgggccccagcagcgacgcccacaccagctactacagcgagagcctggtgcacgagagctggttcccccccagaagcagcctggaggagctgcacggcgacgccaactggggcgaggacctgagagtgagaagaagaagaggcaccggcggcagcgagagcagcagagccagcggcctggtgggcagaaaggccaccgaggacttcctgggcagcagcagcggctacagcagcgaggacgactacgtgggcagaagatag

SEQ ID NO: 97988 - DNA, 618 bp, synthetic construct
  misc_feature 1..618: note = Description of Artificial Sequence: Synthetic coding sequence
  source 1..618: mol_type = other DNA
atgagcagaagaagccagagactgaccagatacagccagggcgacgacgacggcagcagcagcagcggcggcagcagcgtggccggcagccagagcaccctgttcaaggacagccccctgagaaccctgaagagaaagagcagcaacatgaagagactgagccccgccccccagctgggccccagcagcgacgcccacaccagctactacagcgagagcctggtgcacgagagctggttcccccccagaagcagcctggaggagctgcacggcgacgccaactggggcgaggacctgagagtgagaagaagaagaggcaccggcggcagcgagagcagcagagccagcggcctggtgggcagaaaggccaccgaggacttcctgggcagcagcagcggctacagcagcgaggacgactacgtgggctacagcgacgtggaccagcagagcagcagcagcagactgagaagcgccgtgagcagagccggcagcctgctgtggatggtggccaccagccccggcagactgttcagactgctgtactggtgggccggcaccacctggtacagactgaccaccgccgccagcctgctggacgtgttcgtgctgaccagatag

SEQ ID NO: 97989 - DNA, 1140 bp, synthetic construct
  misc_feature 1..1140: note = Description of Artificial Sequence: Synthetic coding sequence
  source 1..1140: mol_type = other DNA
atgcccagaagcagcagaagccccggcgaccccggcgccctgctggaggacgtggcccacaaccccagacccagaagaatcgcccagagaggcagaaacaccagcagaatggccgaggacaccagccccaacatgaacgacaacatcctgctgcccgtgagaaacaacgaccaggccctgggcctgacccagtgcatgctgggctgcgtgagctggttcacctgcttcgcctgcagcctgagaacccaggcccagcaggtgctgttcaacacctgcagatgcaagctgctgtgccagaagctgatggagaagaccggcatcctgctgctgtgcgccttcggcttctggatgttcagcatccacctgcccagcaagatgaaggtgtggcaggacgacagcatcaacggccccctgcagagcctgagactgtaccaggagaaggtgagacaccacagcggcgagatccaggacctgagaggcagcatgaaccagctgatcgccaagctgcaggagatggaggccatgagcgacgagcagaagatggcccagaagatcatgaagatgatccacggcgactacatcgagaagcccgacttcgccctgaagagcatcggcgccagcatcgacttcgagcacaccagcgtgacctacaaccacgagaaggcccacagctactggaactggatccagctgtggaactacgcccagccccccgacgtgatcctggagcccaacgtgacccccggcaactgctgggccttcgagggcgacagaggccaggtgaccatccagctggcccagaaggtgtacctgagcaacctgaccctgcagcacatccccaagaccatcagcctgagcggcagcctggacaccgcccccaaggacttcgtgatctacggcatggagggcagccccaaggaggaggtgttcctgggcgccttccagttccagcccgagaacatcatccagatgttccccctgcagaaccagcccgccagagccttcagcgccgtgaaggtgaagatcagcagcaactggggcaaccccggcttcacctgcctgtacagagtgagagtgcacggcagcgtggccccccccagagagcagccccaccagaacccctaccccaagagagactag

SEQ ID NO: 97990 - DNA, 369 bp, synthetic construct
  misc_feature 1..369: note = Description of Artificial Sequence: Synthetic coding sequence
  source 1..369: mol_type = other DNA
atgcccagaagcagcagaagccccggcgaccccggcgccctgctggaggacgtggcccacaaccccagacccagaagaatcgcccagagaggcagaaacaccagcagaatggccgaggacaccagccccaacatgaacgacaacatcctgctgcccgtgagaaacaacgaccaggccctgggcctgacccagtgcatgctgggctgcgtgtacgccagctgctgcgccagaagcagctggagaagacaggccttctgcagcagcgtgctgagcgtgtgccccagagccctgcccagccccagatggagatacccctgggccctggccctgatcatcggccactgggccagacactgcaccgccacctag

SEQ ID NO: 97991 - DNA, 1065 bp, synthetic construct
  misc_feature 1..1065: note = Description of Artificial Sequence: Synthetic coding sequence
  source 1..1065: mol_type = other DNA
atgcccagaagcagcagaagccccggcgaccccggcgccctgctggaggacgtggcccacaaccccagacccagaagaatcgcccagagaggcagaaacaccagcagaatggccgaggacaccagccccaacatgacctggttcacctgcttcgcctgcagcctgagaacccaggcccagcaggtgctgttcaacacctgcagatgcaagctgctgtgccagaagctgatggagaagaccggcatcctgctgctgtgcgccttcggcttctggatgttcagcatccacctgcccagcaagatgaaggtgtggcaggacgacagcatcaacggccccctgcagagcctgagactgtaccaggagaaggtgagacaccacagcggcgagatccaggacctgagaggcagcatgaaccagctgatcgccaagctgcaggagatggaggccatgagcgacgagcagaagatggcccagaagatcatgaagatgatccacggcgactacatcgagaagcccgacttcgccctgaagagcatcggcgccagcatcgacttcgagcacaccagcgtgacctacaaccacgagaaggcccacagctactggaactggatccagctgtggaactacgcccagccccccgacgtgatcctggagcccaacgtgacccccggcaactgctgggccttcgagggcgacagaggccaggtgaccatccagctggcccagaaggtgtacctgagcaacctgaccctgcagcacatccccaagaccatcagcctgagcggcagcctggacaccgcccccaaggacttcgtgatctacggcatggagggcagccccaaggaggaggtgttcctgggcgccttccagttccagcccgagaacatcatccagatgttccccctgcagaaccagcccgccagagccttcagcgccgtgaaggtgaagatcagcagcaactggggcaaccccggcttcacctgcctgtacagagtgagagtgcacggcagcgtggccccccccagagagcagccccaccagaacccctaccccaagagagactag

SEQ ID NO: 97992 - DNA, 459 bp, synthetic construct
  misc_feature 1..459: note = Description of Artificial Sequence: Synthetic coding sequence
  source 1..459: mol_type = other DNA
ggcgccctgctggaggacgtggcccacaaccccagacccagaagaatcgcccagagaggcagaaacaccagcagaatggccgaggacaccagccccaacatgaacgacaacatcctgctgcccgtgagaaacaacgaccaggccctgggcctgacccagtgcatgctgggctgcgtgagctggttcacctgcttcgcctgcagcctgagaacccaggcccagcaggtgctgttcaacacctgcagatgcaagctgctgtgccagaagctgatggagaagaccggcatcctgctgctgtgcgccttcggcgtgagccagggccccgcccagagccaggtggaggtgagcctgggccccggcaccgactacagaaccctgggcaagaccctgcactgccacgtgacccagttcccccacctgcccgacggctgctgctgcgagaactacgagatgaagtag

SEQ ID NO: 97993 - DNA, 387 bp, synthetic construct
  misc_feature 1..387: note = Description of Artificial Sequence: Synthetic coding sequence
  source 1..387: mol_type = other DNA
atgagcgagggcggcggccaggtgagctgcatcttcgccgcccccaccagactgtgcagatggcccgccctgatcgagtgcggcgtgaacctgacccagcccctgtgcgagtggatgatccaggtggccagagacagaaccctgagcctggcctgggaggtggccagcctgctgaccctgagcagcagcgaggtgggcctggagggcgtgggcaccatctggcccagcagctacagcagcgaggagagcagcagaaacggcgccgagcagggcagacagctgagcatcgagggccccttccagggccagaactgccccagccaccccgccgccgccctgcccctgcccatgagaggcgagagccaggccaccagctgccaggtgtag

SEQ ID NO: 97994 - DNA, 3975 bp, synthetic construct
  misc_feature 1..3975: note = Description of Artificial Sequence: Synthetic coding sequence
  source 1..3975: mol_type = other DNA
atgagcagaagaaagcaggccaagccccagcacttccagagcgaccccgaggtggccagcctgcccagaagagacggcgacaccgagaagggccagcccagcagacccaccaagagcaaggacgcccacgtgtgcggcagatgctgcgccgagttcttcgagctgagcgacctgctgctgcacaagaagaactgcaccaagaaccagctggtgctgatcgtgaacgagaaccccgccagcccccccgagaccttcagccccagccccccccccgacaaccccgacgagcagatgaacgacaccgtgaacaagaccgaccaggtggactgcagcgacctgagcgagcacaacggcctggacagagaggagagcatggaggtggaggcccccgtggccaacaagagcggcagcggcaccagcagcggcagccacagcagcaccgcccccagcagcagcagcagcagcagcagcagcagcggcggcggcggcagcagcagcaccggcaccagcgccatcaccaccagcctgccccagctgggcgacctgaccaccctgggcaacttcagcgtgatcaacagcaacgtgatcatcgagaacctgcagagcaccaaggtggccgtggcccagttcagccaggaggccagatgcggcggcgccagcggcggcaagctggccgtgcccgccctgatggagcagctgctggccctgcagcagcagcagatccaccagctgcagctgatcgagcagatcagacaccagatcctgctgctggccagccagaacgccgacctgcccaccagcagcagccccagccagggcaccctgagaaccagcgccaaccccctgagcaccctgagcagccacctgagccagcagctggccgccgccgccggcctggcccagagcctggccagccagagcgccagcatcagcggcgtgaagcagctgccccccatccagctgccccagagcagcagcggcaacaccatcatccccagcaacagcggcagcagccccaacatgaacatcctggccgccgccgtgaccacccccagcagcgagaaggtggccagcagcgccggcgccagccacgtgagcaaccccgccgtgagcagcagcagcagccccgccttcgccatcagcagcctgctgagccccgccagcaaccccctgctgccccagcaggccagcgccaacagcgtgttccccagccccctgcccaacatcggcaccaccgccgaggacctgaacagcctgagcgccctggcccagcagagaaagagcaagccccccaacgtgaccgccttcgaggccaagagcaccagcgacgaggccttcttcaagcacaagtgcagattctgcgccaaggtgttcggcagcgacagcgccctgcagatccacctgagaagccacaccggcgagagacccttcaagtgcaacatctgcggcaacagattcagcaccaagggcaacctgaaggtgcacttccagagacacaaggagaagtacccccacatccagatgaacccctaccccgtgcccgagcacctggacaacatccccaccagcaccggcatcccctacggcatgagcatcccccccgagaagcccgtgaccagctggctggacaccaagcccgtgctgcccaccctgaccaccagcgtgggcctgcccctgccccccaccctgcccagcctgatccccttcatcaagaccgaggagcccgcccccatccccatcagccacagcgccaccagcccccccggcagcgtgaagagcgacagcggcggccccgagagcgccaccagaaacctgggcggcctgcccgaggaggccgagggcagcaccctgccccccagcggcggcaagagcgaggagagcggcatggtgaccaacagcgtgcccaccgccagcagcagcgtgctgagcagccccgccgccgactgcggccccgccggcagcgccaccaccttcaccaaccccctgctgcccctgatgagcgagcagttcaaggccaagttccccttcggcggcctgctggacagcgcccaggccagcgagaccagcaagctgcagcagctggtggagaacatcgacaagaaggccaccgaccccaacgagtgcatcatctgccacagagtgctgagctgccagagcgccctgaagatgcactacagaacccacaccggcgagagacccttcaagtgcaagatctgcggcagagccttcaccaccaagggcaacctgaagacccactacagcgtgcacagagccatgccccccctgagagtgcagcacagctgccccatctgccagaagaagttcaccaacgccgtggtgctgcagcagcacatcagaatgcacatgggcggccagatccccaacacccccgtgcccgacagctacagcgagagcatggagagcgacaccggcagcttcgacgagaagaacttcgacgacctggacaacttcagcgacgagaacatggaggactgccccgagggcagcatccccgacacccccaagagcgccgacgccagccaggacagcctgagcagcagccccctgcccctggagatgagcagcatcgccgccctggagaaccagatgaagatgatcaacgccggcctggccgagcagctgcaggccagcctgaagagcgtggagaacggcagcatcgagggcgacgtgctgaccaacgacagcagcagcgtgggcggcgacatggagagccagagcgccggcagccccgccatcagcgagagcaccagcagcatgcaggccctgagccccagcaacagcacccaggagttccacaagagccccagcatcgaggagaagccccagagagccgtgcccagcgagttcgccaacggcctgagccccacccccgtgaacggcggcgccctggacctgaccagcagccacgccgagaagatcatcaaggaggacagcctgggcatcctgttccccttcagagacagaggcaagttcaagaacaccgcctgcgacatctgcggcaagaccttcgcctgccagagcgccctggacatccactacagaagccacaccaaggagagacccttcatctgcaccgtgtgcaacagaggcttcagcaccaagggcaacctgaagcagcacatgctgacccaccagatgagagacctgcccagccagctgttcgagcccagcagcaacctgggccccaaccagaacagcgccgtgatccccgccaacagcctgagcagcctgatcaagaccgaggtgaacggcttcgtgcacgtgagcccccaggacagcaaggacacccccaccagccacgtgcccagcggccccctgagcagcagcgccaccagccccgtgctgctgcccgccctgcccagaagaacccccaagcagcactactgcaacacctgcggcaagaccttcagcagcagcagcgccctgcagatccacgagagaacccacaccggcgagaagcccttcgcctgcaccatctgcggcagagccttcaccaccaagggcaacctgaaggtgcacatgggcacccacatgtggaacagcacccccgccagaagaggcagaagactgagcgtggacggccccatgaccttcctgggcggcaaccccgtgaagttccccgagatgttccagaaggacctggccgccagaagcggcagcggcgaccccagcagcttctggaaccagtacgccgccgccctgagcaacggcctggccatgaaggccaacgagatcagcgtgatccagaacggcggcatcccccccatccccggcagcctgggcagcggcaacagcagccccgtgagcggcctgaccggcaacctggagagactgcagaacagcgagcccaacgcccccctggccggcctggagaagatggccagcagcgagaacggcaccaacttcagattcaccagattcgtggaggacagcaaggagatcgtgaccagctag

SEQ ID NO: 97995 - DNA, 3684 bp, synthetic construct
  misc_feature 1..3684: note = Description of Artificial Sequence: Synthetic coding sequence
  source 1..3684: mol_type = other DNA
atgaacgacaccgtgaacaagaccgaccaggtggactgcagcgacctgagcgagcacaacggcctggacagagaggagagcatggaggtggaggcccccgtggccaacaagagcggcagcggcaccagcagcggcagccacagcagcaccgcccccagcagcagcagcagcagcagcagcagcagcggcggcggcggcagcagcagcaccggcaccagcgccatcaccaccagcctgccccagctgggcgacctgaccaccctgggcaacttcagcgtgatcaacagcaacgtgatcatcgagaacctgcagagcaccaaggtggccgtggcccagttcagccaggaggccagatgcggcggcgccagcggcggcaagctggccgtgcccgccctgatggagcagctgctggccctgcagcagcagcagatccaccagctgcagctgatcgagcagatcagacaccagatcctgctgctggccagccagaacgccgacctgcccaccagcagcagccccagccagggcaccctgagaaccagcgccaaccccctgagcaccctgagcagccacctgagccagcagctggccgccgccgccggcctggcccagagcctggccagccagagcgccagcatcagcggcgtgaagcagctgccccccatccagctgccccagagcagcagcggcaacaccatcatccccagcaacagcggcagcagccccaacatgaacatcctggccgccgccgtgaccacccccagcagcgagaaggtggccagcagcgccggcgccagccacgtgagcaaccccgccgtgagcagcagcagcagccccgccttcgccatcagcagcctgctgagccccgccagcaaccccctgctgccccagcaggccagcgccaacagcgtgttccccagccccctgcccaacatcggcaccaccgccgaggacctgaacagcctgagcgccctggcccagcagagaaagagcaagccccccaacgtgaccgccttcgaggccaagagcaccagcgacgaggccttcttcaagcacaagtgcagattctgcgccaaggtgttcggcagcgacagcgccctgcagatccacctgagaagccacaccggcgagagacccttcaagtgcaacatctgcggcaacagattcagcaccaagggcaacctgaaggtgcacttccagagacacaaggagaagtacccccacatccagatgaacccctaccccgtgcccgagcacctggacaacatccccaccagcaccggcatcccctacggcatgagcatcccccccgagaagcccgtgaccagctggctggacaccaagcccgtgctgcccaccctgaccaccagcgtgggcctgcccctgccccccaccctgcccagcctgatccccttcatcaagaccgaggagcccgcccccatccccatcagccacagcgccaccagcccccccggcagcgtgaagagcgacagcggcggccccgagagcgccaccagaaacctgggcggcctgcccgaggaggccgagggcagcaccctgccccccagcggcggcaagagcgaggagagcggcatggtgaccaacagcgtgcccaccgccagcagcagcgtgctgagcagccccgccgccgactgcggccccgccggcagcgccaccaccttcaccaaccccctgctgcccctgatgagcgagcagttcaaggccaagttccccttcggcggcctgctggacagcgcccaggccagcgagaccagcaagctgcagcagctggtggagaacatcgacaagaaggccaccgaccccaacgagtgcatcatctgccacagagtgctgagctgccagagcgccctgaagatgcactacagaacccacaccggcgagagacccttcaagtgcaagatctgcggcagagccttcaccaccaagggcaacctgaagacccactacagcgtgcacagagccatgccccccctgagagtgcagcacagctgccccatctgccagaagaagttcaccaacgccgtggtgctgcagcagcacatcagaatgcacatgggcggccagatccccaacacccccgtgcccgacagctacagcgagagcatggagagcgacaccggcagcttcgacgagaagaacttcgacgacctggacaacttcagcgacgagaacatggaggactgccccgagggcagcatccccgacacccccaagagcgccgacgccagccaggacagcctgagcagcagccccctgcccctggagatgagcagcatcgccgccctggagaaccagatgaagatgatcaacgccggcctggccgagcagctgcaggccagcctgaagagcgtggagaacggcagcatcgagggcgacgtgctgaccaacgacagcagcagcgtgggcggcgacatggagagccagagcgccggcagccccgccatcagcgagagcaccagcagcatgcaggccctgagccccagcaacagcacccaggagttccacaagagccccagcatcgaggagaagccccagagagccgtgcccagcgagttcgccaacggcctgagccccacccccgtgaacggcggcgccctggacctgaccagcagccacgccgagaagatcatcaaggaggacagcctgggcatcctgttccccttcagagacagaggcaagttcaagaacaccgcctgcgacatctgcggcaagaccttcgcctgccagagcgccctggacatccactacagaagccacaccaaggagagacccttcatctgcaccgtgtgcaacagaggcttcagcaccaagggcaacctgaagcagcacatgctgacccaccagatgagagacctgcccagccagctgttcgagcccagcagcaacctgggccccaaccagaacagcgccgtgatccccgccaacagcctgagcagcctgatcaagaccgaggtgaacggcttcgtgcacgtgagcccccaggacagcaaggacacccccaccagccacgtgcccagcggccccctgagcagcagcgccaccagccccgtgctgctgcccgccctgcccagaagaacccccaagcagcactactgcaacacctgcggcaagaccttcagcagcagcagcgccctgcagatccacgagagaacccacaccggcgagaagcccttcgcctgcaccatctgcggcagagccttcaccaccaagggcaacctgaaggtgcacatgggcacccacatgtggaacagcacccccgccagaagaggcagaagactgagcgtggacggccccatgaccttcctgggcggcaaccccgtgaagttccccgagatgttccagaaggacctggccgccagaagcggcagcggcgaccccagcagcttctggaaccagtacgccgccgccctgagcaacggcctggccatgaaggccaacgagatcagcgtgatccagaacggcggcatcccccccatccccggcagcctgggcagcggcaacagcagccccgtgagcggcctgaccggcaacctggagagactgcagaacagcgagcccaacgcccccctggccggcctggagaagatggccagcagcgagaacggcaccaacttcagattcaccagattcgtggaggacagcaaggagatcgtgaccagctag

SEQ ID NO: 97996 - DNA, 3867 bp, synthetic construct
  misc_feature 1..3867: note = Description of Artificial Sequence: Synthetic coding sequence
  source 1..3867: mol_type = other DNA
atgagcagaagaaagcaggccaagccccagcacttccagagcgaccccgaggtggccagcctgcccagaagagacggcgacaccgagaagggccagcccagcagacccaccaagagcaaggacgcccacgtgtgcggcagatgctgcgccgagttcttcgagctgagcgacctgctgctgcacaagaagaactgcaccaagaaccagctggtgctgatcgtgaacgagaaccccgccagcccccccgagaccttcagccccagccccccccccgacaaccccgacgagcagatgaacgacaccgtgaacaagaccggcagccacagcagcaccgcccccagcagcagcagcagcagcagcagcagcagcggcggcggcggcagcagcagcaccggcaccagcgccatcaccaccagcctgccccagctgggcgacctgaccaccctgggcaacttcagcgtgatcaacagcaacgtgatcatcgagaacctgcagagcaccaaggtggccgtggcccagttcagccaggaggccagatgcggcggcgccagcggcggcaagctggccgtgcccgccctgatggagcagctgctggccctgcagcagcagcagatccaccagctgcagctgatcgagcagatcagacaccagatcctgctgctggccagccagaacgccgacctgcccaccagcagcagccccagccagggcaccctgagaaccagcgccaaccccctgagcaccctgagcagccacctgagccagcagctggccgccgccgccggcctggcccagagcctggccagccagagcgccagcatcagcggcgtgaagcagctgccccccatccagctgccccagagcagcagcggcaacaccatcatccccagcaacagcggcagcagccccaacatgaacatcctggccgccgccgtgaccacccccagcagcgagaaggtggccagcagcgccggcgccagccacgtgagcaaccccgccgtgagcagcagcagcagccccgccttcgccatcagcagcctgctgagccccgccagcaaccccctgctgccccagcaggccagcgccaacagcgtgttccccagccccctgcccaacatcggcaccaccgccgaggacctgaacagcctgagcgccctggcccagcagagaaagagcaagccccccaacgtgaccgccttcgaggccaagagcaccagcgacgaggccttcttcaagcacaagtgcagattctgcgccaaggtgttcggcagcgacagcgccctgcagatccacctgagaagccacaccggcgagagacccttcaagtgcaacatctgcggcaacagattcagcaccaagggcaacctgaaggtgcacttccagagacacaaggagaagtacccccacatccagatgaacccctaccccgtgcccgagcacctggacaacatccccaccagcaccggcatcccctacggcatgagcatcccccccgagaagcccgtgaccagctggctggacaccaagcccgtgctgcccaccctgaccaccagcgtgggcctgcccctgccccccaccctgcccagcctgatccccttcatcaagaccgaggagcccgcccccatccccatcagccacagcgccaccagcccccccggcagcgtgaagagcgacagcggcggccccgagagcgccaccagaaacctgggcggcctgcccgaggaggccgagggcagcaccctgccccccagcggcggcaagagcgaggagagcggcatggtgaccaacagcgtgcccaccgccagcagcagcgtgctgagcagccccgccgccgactgcggccccgccggcagcgccaccaccttcaccaaccccctgctgcccctgatgagcgagcagttcaaggccaagttccccttcggcggcctgctggacagcgcccaggccagcgagaccagcaagctgcagcagctggtggagaacatcgacaagaaggccaccgaccccaacgagtgcatcatctgccacagagtgctgagctgccagagcgccctgaagatgcactacagaacccacaccggcgagagacccttcaagtgcaagatctgcggcagagccttcaccaccaagggcaacctgaagacccactacagcgtgcacagagccatgccccccctgagagtgcagcacagctgccccatctgccagaagaagttcaccaacgccgtggtgctgcagcagcacatcagaatgcacatgggcggccagatccccaacacccccgtgcccgacagctacagcgagagcatggagagcgacaccggcagcttcgacgagaagaacttcgacgacctggacaacttcagcgacgagaacatggaggactgccccgagggcagcatccccgacacccccaagagcgccgacgccagccaggacagcctgagcagcagccccctgcccctggagatgagcagcatcgccgccctggagaaccagatgaagatgatcaacgccggcctggccgagcagctgcaggccagcctgaagagcgtggagaacggcagcatcgagggcgacgtgctgaccaacgacagcagcagcgtgggcggcgacatggagagccagagcgccggcagccccgccatcagcgagagcaccagcagcatgcaggccctgagccccagcaacagcacccaggagttccacaagagccccagcatcgaggagaagccccagagagccgtgcccagcgagttcgccaacggcctgagccccacccccgtgaacggcggcgccctggacctgaccagcagccacgccgagaagatcatcaaggaggacagcctgggcatcctgttccccttcagagacagaggcaagttcaagaacaccgcctgcgacatctgcggcaagaccttcgcctgccagagcgccctggacatccactacagaagccacaccaaggagagacccttcatctgcaccgtgtgcaacagaggcttcagcaccaagggcaacctgaagcagcacatgctgacccaccagatgagagacctgcccagccagctgttcgagcccagcagcaacctgggccccaaccagaacagcgccgtgatccccgccaacagcctgagcagcctgatcaagaccgaggtgaacggcttcgtgcacgtgagcccccaggacagcaaggacacccccaccagccacgtgcccagcggccccctgagcagcagcgccaccagccccgtgctgctgcccgccctgcccagaagaacccccaagcagcactactgcaacacctgcggcaagaccttcagcagcagcagcgccctgcagatccacgagagaacccacaccggcgagaagcccttcgcctgcaccatctgcggcagagccttcaccaccaagggcaacctgaaggtgcacatgggcacccacatgtggaacagcacccccgccagaagaggcagaagactgagcgtggacggccccatgaccttcctgggcggcaaccccgtgaagttccccgagatgttccagaaggacctggccgccagaagcggcagcggcgaccccagcagcttctggaaccagtacgccgccgccctgagcaacggcctggccatgaaggccaacgagatcagcgtgatccagaacggcggcatcccccccatccccggcagcctgggcagcggcaacagcagccccgtgagcggcctgaccggcaacctggagagactgcagaacagcgagcccaacgcccccctggccggcctggagaagatggccagcagcgagaacggcaccaacttcagattcaccagattcgtggaggacagcaaggagatcgtgaccagctag

SEQ ID NO: 97997 - DNA, 444 bp, synthetic construct
  misc_feature 1..444: note = Description of Artificial Sequence: Synthetic coding sequence
  source 1..444: mol_type = other DNA
atggtgcacatgggcacccacatgtggaacagcacccccgccagaagaggcagaagactgagcgtggacggccccatgaccttcctgggcggcaaccccgtgaagttccccgagatgttccagaaggacctggccgccagaagcggcagcggcgaccccagcagcttctggaaccagtacgccgccgccctgagcaacggcctggccatgaaggccaacgagatcagcgtgatccagaacggcggcatcccccccatccccggcagcctgggcagcggcaacagcagccccgtgagcggcctgaccggcaacctggagagactgcagaacagcgagcccaacgcccccctggccggcctggagaagatggccagcagcgagaacggcaccaacttcagattcaccagattcgtggaggacagcaaggagatcgtgaccagctag

SEQ ID NO: 97998 - DNA, 3024 bp, synthetic construct
  misc_feature 1..3024: note = Description of Artificial Sequence: Synthetic coding sequence
  source 1..3024: mol_type = other DNA
atgagcagaagaaagcagagaaagccccagcagctgatcagcgactgcgagggccccagcgccagcgagaacggcgacgccagcgaggaggaccacccccaggtgtgcgccaagtgctgcgcccagttcaccgaccccaccgagttcctggcccaccagaacgcctgcagcaccgacccccccgtgatggtgatcatcggcggccaggagaaccccaacaacagcagcgccagcagcgagcccagacccgagggccacaacaacccccaggtgatggacaccgagcacagcaacccccccgacagcggcagcagcgtgcccaccgaccccacctggggccccgagagaagaggcgaggagagccccggccacttcctggtggccgccaccggcaccgccgccggcggcggcggcggcctgatcctggccagccccaagctgggcgccacccccctgccccccgagagcacccccgcccccccccccccccccccccccccccccccccccggcgtgggcagcggccacctgaacatccccctgatcctggaggagctgagagtgctgcagcagagacagatccaccagatgcagatgaccgagcagatctgcagacaggtgctgctgctgggcagcctgggccagaccgtgggcgcccccgccagccccagcgagctgcccggcaccggcaccgccagcagcaccaagcccctgctgcccctgttcagccccatcaagcccgtgcagaccagcaagaccctggccagcagcagcagcagcagcagcagcagcagcggcgccgagacccccaagcaggccttcttccacctgtaccaccccctgggcagccagcaccccttcagcgccggcggcgtgggcagaagccacaagcccacccccgcccccagccccgccctgcccggcagcaccgaccagctgatcgccagcccccacctggccttccccagcaccaccggcctgctggccgcccagtgcctgggcgccgccagaggcctggaggccaccgccagccccggcctgctgaagcccaagaacggcagcggcgagctgagctacggcgaggtgatgggccccctggagaagcccggcggcagacacaagtgcagattctgcgccaaggtgttcggcagcgacagcgccctgcagatccacctgagaagccacaccggcgagagaccctacaagtgcaacgtgtgcggcaacagattcaccaccagaggcaacctgaaggtgcacttccacagacacagagagaagtacccccacgtgcagatgaacccccaccccgtgcccgagcacctggactacgtgatcaccagcagcggcctgccctacggcatgagcgtgccccccgagaaggccgaggaggaggccgccacccccggcggcggcgtggagagaaagcccctggtggccagcaccaccgccctgagcgccaccgagagcctgaccctgctgagcaccagcgccggcaccgccaccgcccccggcctgcccgccttcaacaagttcgtgctgatgaaggccgtggagcccaagaacaaggccgacgagaacaccccccccggcagcgagggcagcgccatcagcggcgtggccgagagcagcaccgccaccagaatgcagctgagcaagctggtgaccagcctgcccagctgggccctgctgaccaaccacttcaagagcaccggcagcttccccttcccctacgtgctggagcccctgggcgccagccccagcgagaccagcaagctgcagcagctggtggagaagatcgacagacagggcgccgtggccgtgaccagcgccgccagcggcgcccccaccaccagcgcccccgcccccagcagcagcgccagcagcggccccaaccagtgcgtgatctgcctgagagtgctgagctgccccagagccctgagactgcactacggccagcacggcggcgagagacccttcaagtgcaaggtgtgcggcagagccttcagcaccagaggcaacctgagagcccacttcgtgggccacaaggccagccccgccgccagagcccagaacagctgccccatctgccagaagaagttcaccaacgccgtgaccctgcagcagcacgtgagaatgcacctgggcggccagatccccaacggcggcaccgccctgcccgagggcggcggcgccgcccaggagaacggcagcgagcagagcaccgtgagcggcgccggcagcttcccccagcagcagagccagcagcccagccccgaggaggagctgagcgaggaggaggaggaggaggacgaggaggaggaggaggacgtgaccgacgaggacagcctggccggcagaggcagcgagagcggcggcgagaaggccatcagcgtgagaggcgacagcgaggaggccagcggcgccgaggaggaggtgggcaccgtggccgccgccgccaccgccggcaaggagatggacagcaacgagaagaccacccagcagagcagcctgccccccccccccccccccgacagcctggaccagccccagcccatggagcagggcagcagcggcgtgctgggcggcaaggaggagggcggcaagcccgagagaagcagcagccccgccagcgccctgacccccgagggcgaggccaccagcgtgaccctggtggaggagctgagcctgcaggaggccatgagaaaggagcccggcgagagcagcagcagaaaggcctgcgaggtgtgcggccaggccttccccagccaggccgccctggaggagcaccagaagacccaccccaaggagggccccctgttcacctgcgtgttctgcagacagggcttcctggagagagccaccctgaagaagcacatgctgctggcccaccaccaggtgcagcccttcgccccccacggcccccagaacatcgccgccctgagcctggtgcccggctgcagccccagcatcaccagcaccggcctgagccccttccccagaaaggacgaccccaccatcccctag

SEQ ID NO: 97999 - DNA, 1827 bp, synthetic construct
  misc_feature 1..1827: note = Description of Artificial Sequence: Synthetic coding sequence
  source 1..1827: mol_type = other DNA
atgagcagaagaaagcagagaaagccccagcagctgatcagcgactgcgagggccccagcgccagcgagaacggcgacgccagcgaggaggaccacccccaggtgtgcgccaagtgctgcgcccagttcaccgaccccaccgagttcctggcccaccagaacgcctgcagcaccgacccccccgtgatggtgatcatcggcggccaggagaaccccaacaacagcagcgccagcagcgagcccagacccgagggccacaacaacccccaggtgatggacaccgagcacagcaacccccccgacagcggcagcagcgtgcccaccgaccccacctggggccccgagagaagaggcgaggagagccccggccacttcctggtggccgccaccggcaccgccgccggcggcggcggcggcctgatcctggccagccccaagctgggcgccacccccctgccccccgagagcacccccgcccccccccccccccccccccccccccccccccccggcgtgggcagcggccacctgaacatccccctgatcctggaggagctgagagtgctgcagcagagacagatccaccagatgcagatgaccgagcagatctgcagacaggtgctgctgctgggcagcctgggccagaccgtgggcgcccccgccagccccagcgagctgcccggcaccggcaccgccagcagcaccaagcccctgctgcccctgttcagccccatcaagcccgtgcagaccagcaagaccctggccagcagcagcagcagcagcagcagcagcagcggcgccgagacccccaagcaggccttcttccacctgtaccaccccctgggcagccagcaccccttcagcgccggcggcgtgggcagaagccacaagcccacccccgcccccagccccgccctgcccggcagcaccgaccagctgatcgccagcccccacctggccttccccagcaccaccggcctgctggccgcccagtgcctgggcgccgccagaggcctggaggccaccgccagccccggcctgctgaagcccaagaacggcagcggcgagctgagctacggcgaggtgatgggccccctggagaagcccggcggcagacacaagtgcagattctgcgccaaggtgttcggcagcgacagcgccctgcagatccacctgagaagccacaccggcgagagaccctacaagtgcaacgtgtgcggcaacagattcaccaccagaggcaacctgaaggtgcacttccacagacacagagagaagtacccccacgtgcagatgaacccccaccccgtgcccgagcacctggactacgtgatcaccagcagcggcctgccctacggcatgagcgtgccccccgagaaggccgaggaggaggccgccacccccggcggcggcgtggagagaaagcccctggtggccagcaccaccgccctgagcgccaccgagagcctgaccctgctgagcaccagcgccggcaccgccaccgcccccggcctgcccgccttcaacaagttcgtgctgatgaaggccgtggagcccaagaacaaggccgacgagaacaccccccccggcagcgagggcagcgccatcagcggcgtggccgagagcagcaccgccaccagaatgcagctgagcaagctggtgaccagcctgcccagctgggccctgctgaccaaccacttcaagagcaccggcagcttccccttcccctacgtgcccgaggaggtgcaccagtgctgccacagcgccgccgcctgccccgacgcccccggcggccccgacccccagagatggtactgcaccccctag

SEQ ID NO: 98000 - DNA, 3687 bp, synthetic construct
  misc_feature 1..3687: note = Description of Artificial Sequence: Synthetic coding sequence
  source 1..3687: mol_type = other DNA
atgagcagaagaaagcaggccaagccccagcacctgaagagcgacgaggagctgctgccccccgacggcgcccccgagcacgccgcccccggcgagggcgccgaggacgccgacagcggccccgagagcagaagcggcggcgaggagaccagcgtgtgcgagaagtgctgcgccgagttcttcaagtgggccgacttcctggagcaccagagaagctgcaccaagctgccccccgtgctgatcgtgcacgaggacgcccccgcccccccccccgaggacttccccgagcccagccccgccagcagccccagcgagagagccgagagcgaggccgccgaggaggccggcgccgagggcgccgagggcgaggccagacccgtggagaaggaggccgagcccatggacgccgagcccgccggcgacaccagagcccccagacccccccccgccgcccccgccccccccacccccgcctacggcgcccccagcaccaacgtgaccctggaggccctgctgagcaccaaggtggccgtggcccagttcagccagggcgccagagccgccggcggcagcggcgccggcggcggcgtggccgccgccgccgtgcccctgatcctggagcagctgatggccctgcagcagcagcagatccaccagctgcagctgatcgagcagatcagaagccaggtggccctgatgcagagacccccccccagacccagcctgagccccgccgccgcccccagcgcccccggccccgcccccagccagctgcccggcctggccgccctgcccctgagcgccggcgcccccgccgccgccatcgccggcagcggccccgccgcccccgccgccttcgagggcgcccagcccctgagcagacccgagagcggcgccagcacccccggcggccccgccgagcccagcgcccccgccgcccccagcgccgcccccgcccccgccgcccccgcccccgcccccgccccccagagcgccgccagcagccagccccagagcgccagcaccccccccgccctggcccccggcagcctgctgggcgccgcccccggcctgcccagccccctgctgccccagaccagcgccagcggcgtgatcttccccaaccccctggtgagcatcgccgccaccgccaacgccctggaccccctgagcgccctgatgaagcacagaaagggcaagccccccaacgtgagcgtgttcgagcccaaggccagcgccgaggaccccttcttcaagcacaagtgcagattctgcgccaaggtgttcggcagcgacagcgccctgcagatccacctgagaagccacaccggcgagagacccttcaagtgcaacatctgcggcaacagattcagcaccaagggcaacctgaaggtgcacttccagagacacaaggagaagtacccccacatccagatgaacccctaccccgtgcccgagtacctggacaacgtgcccacctgcagcggcatcccctacggcatgagcctgccccccgagaagcccgtgaccacctggctggacagcaagcccgtgctgcccaccgtgcccaccagcgtgggcctgcagctgccccccaccgtgcccggcgcccacggctacgccgacagccccagcgccacccccgccagcagaagcccccagagacccagccccgccagcagcgagtgcgccagcctgagccccggcctgaaccacgtggagagcggcgtgagcgccaccgccgagagcccccagagcctgctgggcggcccccccctgaccaaggccgagcccgtgagcctgccctgcaccaacgccagagccggcgacgcccccgtgggcgcccaggccagcgccgcccccaccagcgtggacggcgcccccaccagcctgggcagccccggcctgcccgccgtgagcgagcagttcaaggcccagttccccttcggcggcctgctggacagcatgcagaccagcgagaccagcaagctgcagcagctggtggagaacatcgacaagaagatgaccgaccccaaccagtgcgtgatctgccacagagtgctgagctgccagagcgccctgaagatgcactacagaacccacaccggcgagagacccttcaagtgcaagatctgcggcagagccttcaccaccaagggcaacctgaagacccacttcggcgtgcacagagccaagccccccctgagagtgcagcacagctgccccatctgccagaagaagttcaccaacgccgtggtgctgcagcagcacatcagaatgcacatgggcggccagatccccaacacccccctgcccgagggcttccaggacgccatggacagcgagctggcctacgacgacaagaacgccgagaccctgagcagctacgacgacgacatggacgagaacagcatggaggacgacgccgagctgaaggacgccgccaccgaccccgccaagcccctgctgagctacgccggcagctgcccccccagcccccccagcgtgatcagcagcatcgccgccctggagaaccagatgaagatgatcgacagcgtgatgagctgccagcagctgaccggcctgaagagcgtggagaacggcagcggcgagagcgacagactgagcaacgacagcagcagcgccgtgggcgacctggagagcagaagcgccggcagccccgccctgagcgagagcagcagcagccaggccctgagccccgcccccagcaacggcgagagcttcagaagcaagagccccggcctgggcgcccccgaggagccccaggagatccccctgaagaccgagagacccgacagccccgccgccgcccccggcagcggcggcgcccccggcagagccggcatcaaggaggaggcccccttcagcctgctgttcctgagcagagagagaggccccagccagagcacccccagcctgatcagcagcgccgcccccaccatgatcaagatggaggtgaacggccacggcaaggccatggccctgggcgagggcccccccctgcccgccggcgtgcaggtgcccgccggcccccagaccgtgatgggccccggcctggcccccatgctggcccccccccccagaagaacccccaagcagcacaactgccagagctgcggcaagaccttcagcagcgccagcgccctgcagatccacgagagaacccacaccggcgagaagcccttcggctgcaccatctgcggcagagccttcaccaccaagggcaacctgaaggtgcacatgggcacccacatgtggaacaacgcccccgccagaagaggcagaagactgagcgtggagaaccccatggccctgctgggcggcgacgccctgaagttcagcgagatgttccagaaggacctggccgccagagccatgaacgtggaccccagcttctggaaccagtacgccgccgccatcaccaacggcctggccatgaagaacaacgagatcagcgtgatccagaacggcggcatcccccagctgcccgtgagcctgggcggcagcgccctgccccccctgggcagcatggccagcggcatggacaaggccagaaccggcagcagcccccccatcgtgagcctggacaaggccagcagcgagaccgccgccagcagacccttcaccagattcatcgaggacaacaaggagatcggcatcaactag

SEQ ID NO: 98001 - DNA, 3903 bp, synthetic construct
  misc_feature 1..3903: note = Description of Artificial Sequence: Synthetic coding sequence
  source 1..3903: mol_type = other DNA
atgagcagaagaaagcaggccaagccccagcacctgaagagcgacgaggagctgctgccccccgacggcgcccccgagcacgccgcccccggcgagggcgccgaggacgccgacagcggccccgagagcagaagcggcggcgaggagaccagcgtgtgcgagaagtgctgcgccgagttcttcaagtgggccgacttcctggagcaccagagaagctgcaccaagctgccccccgtgctgatcgtgcacgaggacgcccccgcccccccccccgaggacttccccgagcccagccccgccagcagccccagcgagagagccgagagcgaggccgccgaggaggccggcgccgagggcgccgagggcgaggccagacccgtggagaaggaggccgagcccatggacgccgagcccgccggcgacaccagagcccccagacccccccccgccgcccccgccccccccacccccgcctacggcgcccccagcaccaacgtgaccctggaggccctgctgagcaccaaggtggccgtggcccagttcagccagggcgccagagccgccggcggcagcggcgccggcggcggcgtggccgccgccgccgtgcccctgatcctggagcagctgatggccctgcagcagcagcagatccaccagctgcagctgatcgagcagatcagaagccaggtggccctgatgcagagacccccccccagacccagcctgagccccgccgccgcccccagcgcccccggccccgcccccagccagctgcccggcctggccgccctgcccctgagcgccggcgcccccgccgccgccatcgccggcagcggccccgccgcccccgccgccttcgagggcgcccagcccctgagcagacccgagagcggcgccagcacccccggcggccccgccgagcccagcgcccccgccgcccccagcgccgcccccgcccccgccgcccccgcccccgcccccgccccccagagcgccgccagcagccagccccagagcgccagcaccccccccgccctggcccccggcagcctgctgggcgccgcccccggcctgcccagccccctgctgccccagaccagcgccagcggcgtgatcttccccaaccccctggtgagcatcgccgccaccgccaacgccctggaccccctgagcgccctgatgaagcacagaaagggcaagccccccaacgtgagcgtgttcgagcccaaggccagcgccgaggaccccttcttcaagcacaagtgcagattctgcgccaaggtgttcggcagcgacagcgccctgcagatccacctgagaagccacaccggcgagagacccttcaagtgcaacatctgcggcaacagattcagcaccaagggcaacctgaaggtgcacttccagagacacaaggagaagtacccccacatccagatgaacccctaccccgtgcccgagtacctggacaacgtgcccacctgcagcggcatcccctacggcatgagcctgccccccgagaagcccgtgaccacctggctggacagcaagcccgtgctgcccaccgtgcccaccagcgtgggcctgcagctgccccccaccgtgcccggcgcccacggctacgccgacagccccagcgccacccccgccagcagaagcccccagagacccagccccgccagcagcgagtgcgccagcctgagccccggcctgaaccacgtggagagcggcgtgagcgccaccgccgagagcccccagagcctgctgggcggcccccccctgaccaaggccgagcccgtgagcctgccctgcaccaacgccagagccggcgacgcccccgtgggcgcccaggccagcgccgcccccaccagcgtggacggcgcccccaccagcctgggcagccccggcctgcccgccgtgagcgagcagttcaaggcccagttccccttcggcggcctgctggacagcatgcagaccagcgagaccagcaagctgcagcagctggtggagaacatcgacaagaagatgaccgaccccaaccagtgcgtgatctgccacagagtgctgagctgccagagcgccctgaagatgcactacagaacccacaccggcgagagacccttcaagtgcaagatctgcggcagagccttcaccaccaagggcaacctgaagacccacttcggcgtgcacagagccaagccccccctgagagtgcagcacagctgccccatctgccagaagaagttcaccaacgccgtggtgctgcagcagcacatcagaatgcacatgggcggccagatccccaacacccccctgcccgagggcttccaggacgccatggacagcgagctggcctacgacgacaagaacgccgagaccctgagcagctacgacgacgacatggacgagaacagcatggaggacgacgccgagctgaaggacgccgccaccgaccccgccaagcccctgctgagctacgccggcagctgcccccccagcccccccagcgtgatcagcagcatcgccgccctggagaaccagatgaagatgatcgacagcgtgatgagctgccagcagctgaccggcctgaagagcgtggagaacggcagcggcgagagcgacagactgagcaacgacagcagcagcgccgtgggcgacctggagagcagaagcgccggcagccccgccctgagcgagagcagcagcagccaggccctgagccccgcccccagcaacggcgagagcttcagaagcaagagccccggcctgggcgcccccgaggagccccaggagatccccctgaagaccgagagacccgacagccccgccgccgcccccggcagcggcggcgcccccggcagagccggcatcaaggaggaggcccccttcagcctgctgttcctgagcagagagagaggcaagtgccccagcaccgtgtgcggcgtgtgcggcaagcccttcgcctgcaagagcgccctggagatccactacagaagccacaccaaggagagacccttcgtgtgcgccctgtgcagaagaggctgcagcaccatgggcaacctgaagcagcacctgctgacccacagactgaaggagctgcccagccagctgttcgaccccaacttcgccctgggccccagccagagcacccccagcctgatcagcagcgccgcccccaccatgatcaagatggaggtgaacggccacggcaaggccatggccctgggcgagggcccccccctgcccgccggcgtgcaggtgcccgccggcccccagaccgtgatgggccccggcctggcccccatgctggcccccccccccagaagaacccccaagcagcacaactgccagagctgcggcaagaccttcagcagcgccagcgccctgcagatccacgagagaacccacaccggcgagaagcccttcggctgcaccatctgcggcagagccttcaccaccaagggcaacctgaaggtgcacatgggcacccacatgtggaacaacgcccccgccagaagaggcagaagactgagcgtggagaaccccatggccctgctgggcggcgacgccctgaagttcagcgagatgttccagaaggacctggccgccagagccatgaacgtggaccccagcttctggaaccagtacgccgccgccatcaccaacggcctggccatgaagaacaacgagatcagcgtgatccagaacggcggcatcccccagctgcccgtgagcctgggcggcagcgccctgccccccctgggcagcatggccagcggcatggacaaggccagaaccggcagcagcccccccatcgtgagcctggacaaggccagcagcgagaccgccgccagcagacccttcaccagattcatcgaggacaacaaggagatcggcatcaactag

SEQ ID NO: 98002 - DNA, 2883 bp, synthetic construct
  misc_feature 1..2883: note = Description of Artificial Sequence: Synthetic coding sequence
  source 1..2883: mol_type = other DNA
atgagcagaagaaagcaggccaagccccagcacctgaagagcgacgaggagctgctgccccccgacggcgcccccgagcacgccgcccccggcgagggcgccgaggacgccgacagcggccccgagagcagaagcggcggcgaggagaccagcgtgtgcgagaagtgctgcgccgagttcttcaagtgggccgacttcctggagcaccagagaagctgcaccaagctgccccccgtgctgatcgtgcacgaggacgccccccccggcctgcccagccccctgctgccccagaccagcgccagcggcgtgatcttccccaaccccctggtgagcatcgccgccaccgccaacgccctggaccccctgagcgccctgatgaagcacagaaagggcaagccccccaacgtgagcgtgttcgagcccaaggccagcgccgaggaccccttcttcaagcacaagtgcagattctgcgccaaggtgttcggcagcgacagcgccctgcagatccacctgagaagccacaccggcgagagacccttcaagtgcaacatctgcggcaacagattcagcaccaagggcaacctgaaggtgcacttccagagacacaaggagaagtacccccacatccagatgaacccctaccccgtgcccgagtacctggacaacgtgcccacctgcagcggcatcccctacggcatgagcctgccccccgagaagcccgtgaccacctggctggacagcaagcccgtgctgcccaccgtgcccaccagcgtgggcctgcagctgccccccaccgtgcccggcgcccacggctacgccgacagccccagcgccacccccgccagcagaagcccccagagacccagccccgccagcagcgagtgcgccagcctgagccccggcctgaaccacgtggagagcggcgtgagcgccaccgccgagagcccccagagcctgctgggcggcccccccctgaccaaggccgagcccgtgagcctgccctgcaccaacgccagagccggcgacgcccccgtgggcgcccaggccagcgccgcccccaccagcgtggacggcgcccccaccagcctgggcagccccggcctgcccgccgtgagcgagcagttcaaggcccagttccccttcggcggcctgctggacagcatgcagaccagcgagaccagcaagctgcagcagctggtggagaacatcgacaagaagatgaccgaccccaaccagtgcgtgatctgccacagagtgctgagctgccagagcgccctgaagatgcactacagaacccacaccggcgagagacccttcaagtgcaagatctgcggcagagccttcaccaccaagggcaacctgaagacccacttcggcgtgcacagagccaagccccccctgagagtgcagcacagctgccccatctgccagaagaagttcaccaacgccgtggtgctgcagcagcacatcagaatgcacatgggcggccagatccccaacacccccctgcccgagggcttccaggacgccatggacagcgagctggcctacgacgacaagaacgccgagaccctgagcagctacgacgacgacatggacgagaacagcatggaggacgacgccgagctgaaggacgccgccaccgaccccgccaagcccctgctgagctacgccggcagctgcccccccagcccccccagcgtgatcagcagcatcgccgccctggagaaccagatgaagatgatcgacagcgtgatgagctgccagcagctgaccggcctgaagagcgtggagaacggcagcggcgagagcgacagactgagcaacgacagcagcagcgccgtgggcgacctggagagcagaagcgccggcagccccgccctgagcgagagcagcagcagccaggccctgagccccgcccccagcaacggcgagagcttcagaagcaagagccccggcctgggcgcccccgaggagccccaggagatccccctgaagaccgagagacccgacagccccgccgccgcccccggcagcggcggcgcccccggcagagccggcatcaaggaggaggcccccttcagcctgctgttcctgagcagagagagaggccccagccagagcacccccagcctgatcagcagcgccgcccccaccatgatcaagatggaggtgaacggccacggcaaggccatggccctgggcgagggcccccccctgcccgccggcgtgcaggtgcccgccggcccccagaccgtgatgggccccggcctggcccccatgctggcccccccccccagaagaacccccaagcagcacaactgccagagctgcggcaagaccttcagcagcgccagcgccctgcagatccacgagagaacccacaccggcgagaagcccttcggctgcaccatctgcggcagagccttcaccaccaagggcaacctgaaggtgcacatgggcacccacatgtggaacaacgcccccgccagaagaggcagaagactgagcgtggagaaccccatggccctgctgggcggcgacgccctgaagttcagcgagatgttccagaaggacctggccgccagagccatgaacgtggaccccagcttctggaaccagtacgccgccgccatcaccaacggcctggccatgaagaacaacgagatcagcgtgatccagaacggcggcatcccccagctgcccgtgagcctgggcggcagcgccctgccccccctgggcagcatggccagcggcatggacaaggccagaaccggcagcagcccccccatcgtgagcctggacaaggccagcagcgagaccgccgccagcagacccttcaccagattcatcgaggacaacaaggagatcggcatcaactag

SEQ ID NO: 98003 - DNA, 516 bp, synthetic construct
  misc_feature 1..516: note = Description of Artificial Sequence: Synthetic coding sequence
  source 1..516: mol_type = other DNA
atggtgagaccccccgtggtgcccagaagaccccccgcccacatcagcagcgtgagacaggccagcacccaggtgcccagaaccgtgccccacacccagagagtggccaacatcggcacccagaccaccggccccagcggcgtgggctgctgcacccccggcagacccctgctgccctgcaagtgcagcagcgccgcccacagcacctacagagtgcaggagcccgccgtgcacatccccggccaggagcccctgaccgccagcatgctggccgccgcccccctgcacgagcagaagcagatgatcggcgagagactgtaccccctgatccacgacgtgcacacccagctggccggcaagatcaccggcatgctgctggagatcgacaacagcgagctgctgctgatgctggagagccccgagagcctgcacgccaagaagagaaagagcagcctgccctggctgcccaagggccagtgcttctggctgagcgccctgagaccctgcaagctgtag

SEQ ID NO: 98004 - DNA, 831 bp, synthetic construct
  misc_feature 1..831: note = Description of Artificial Sequence: Synthetic coding sequence
  source 1..831: mol_type = other DNA
atgagcagaagaaagcaggccaagccccagcacatcaacagcgaggaggaccagggcgagcagcagccccagcagcagacccccgagttcgccgacgccgcccccgccgcccccgccgccggcgagctgggcagaagcagcctgcccagcaccttcatcagagccccccccacctacgtgaaggtggaggtgcccggcaccttcgtgggccccagcaccctgagccccggcatgacccccctgctggccgcccagcccagaagacaggccaagcagcacggctgcaccagatgcggcaagaacttcagcagcgccagcgccctgcagatccacgagagaacccacaccggcgagaagcccttcgtgtgcaacatctgcggcagagccttcaccaccaagggcaacctgaaggtgcactacatgacccacggcgccaacaacaacagcgccagaagaggcagaaagctggccatcgagaacaccatggccctgctgggcaccgacggcaagagagtgagcgagatcttccccaaggagatcctggcccccagcgtgaacgtggaccccgtggtgtggaaccagtacaccagcatgctgaacggcggcctggccgtgaagaccaacgagatcagcgtgatccagagcggcggcgtgcccaccctgcccgtgagcctgggcgccaccagcgtggtgaacaacgccaccgtgagcaagatggacggcagccagagcggcatcagcgccgacgtggagaagcccagcgccaccgacggcgtgcccaagcaccagttcccccacttcctggaggagaacaagatcgccgtgagctag

SEQ ID NO: 98005 - DNA, 1851 bp, synthetic construct
  misc_feature 1..1851: note = Description of Artificial Sequence: Synthetic coding sequence
  source 1..1851: mol_type = other DNA
atgagcagaagaaagcaggccaagccccagcacatcaacagcgaggaggaccagggcgagcagcagccccagcagcagacccccgagttcgccgacgccgcccccgccgcccccgccgccggcgagctgggcgcccccgtgaaccaccccggcaacgacgaggtggccagcgaggacgaggccaccgtgaagagactgagaagagaggagacccacgtgtgcgagaagtgctgcgccgagttcttcagcatcagcgagttcctggagcacaagaagaactgcaccaagaacccccccgtgctgatcatgaacgacagcgagggccccgtgcccagcgaggacttcagcggcgccgtgctgagccaccagcccaccagccccggcagcaaggactgccacagagagaacggcggcagcagcgaggacatgaaggagaagcccgacgccgagagcgtggtgtacctgaagaccgagaccgccctgccccccaccccccaggacatcagctacctggccaagggcaaggtggccaacaccaacgtgaccctgcaggccctgagaggcaccaaggtggccgtgaaccagagaagcgccgacgccctgcccgcccccgtgcccggcgccaacagcatcccctgggtgctggagcagatcctgtgcctgcagcagcagcagctgcagcagatccagctgaccgagcagatcagaatccaggtgaacatgtgggccagccacgccctgcacagcagcggcgccggcgccgacaccctgaagaccctgggcagccacatgagccagcaggtgagcgccgccgtggccctgctgagccagaaggccggcagccagggcctgagcctggacgccctgaagcaggccaagctgccccacgccaacatccccagcgccaccagcagcctgagccccggcctggcccccttcaccctgaagcccgacggcaccagagtgctgcccaacgtgatgagcagactgcccagcgccctgctgccccaggcccccggcagcgtgctgttccagagccccttcagcaccgtggccctggacaccagcaagaagggcaagggcaagccccccaacatcagcgccgtggacgtgaagcccaaggacgaggccgccctgtacaagcacaagtgcagaagcagcctgcccagcaccttcatcagagccccccccacctacgtgaaggtggaggtgcccggcaccttcgtgggccccagcaccctgagccccggcatgacccccctgctggccgcccagcccagaagacaggccaagcagcacggctgcaccagatgcggcaagaacttcagcagcgccagcgccctgcagatccacgagagaacccacaccggcgagaagcccttcgtgtgcaacatctgcggcagagccttcaccaccaagggcaacctgaaggtgcactacatgacccacggcgccaacaacaacagcgccagaagaggcagaaagctggccatcgagaacaccatggccctgctgggcaccgacggcaagagagtgagcgagatcttccccaaggagatcctggcccccagcgtgaacgtggaccccgtggtgtggaaccagtacaccagcatgctgaacggcggcctggccgtgaagaccaacgagatcagcgtgatccagagcggcggcgtgcccaccctgcccgtgagcctgggcgccaccagcgtggtgaacaacgccaccgtgagcaagatggacggcagccagagcggcatcagcgccgacgtggagaagcccagcgccaccgacggcgtgcccaagcaccagttcccccacttcctggaggagaacaagatcgccgtgagctag

SEQ ID NO: 98006 - DNA, 2781 bp, synthetic construct
  misc_feature 1..2781: note = Description of Artificial Sequence: Synthetic coding sequence
  source 1..2781: mol_type = other DNA
atggtgatggccgacggccccagacacctgcagagaggccccgtgagagtgggcttctacgacatcgagggcaccctgggcaagggcaacttcgccgtggtgaagctgggcagacacagaatcaccaagaccgaggtggccatcaagatcatcgacaagagccagctggacgccgtgaacctggagaagatctacagagaggtgcagatcatgaagatgctggaccacccccacatcatcaagctgtaccaggtgatggagaccaagagcatgctgtacctggtgaccgagtacgccaagaacggcgagatcttcgactacctggccaaccacggcagactgaacgagagcgaggccagaagaaagttctggcagatcctgagcgccgtggactactgccacggcagaaagatcgtgcacagagacctgaaggccgagaacctgctgctggacaacaacatgaacatcaagatcgccgacttcggcttcggcaacttcttcaagagcggcgagctgctggccacctggtgcggcagccccccctacgccgcccccgaggtgttcgagggccagcagtacgagggcccccagctggacatctggagcatgggcgtggtgctgtacgtgctggtgtgcggcgccctgcccttcgacggccccaccctgcccatcctgagacagagagtgctggagggcagattcagaatcccctacttcatgagcgaggactgcgagcacctgatcagaagaatgctggtgctggaccccagcaagagactgaccatcgcccagatcaaggagcacaagtggatgctgatcgaggtgcccgtgcagagacccgtgctgtacccccaggagcaggagaacgagcccagcatcggcgagttcaacgagcaggtgctgagactgatgcacagcctgggcatcgaccagcagaagaccatcgagagcctgcagaacaagagctacaaccacttcgccgccatctacttcctgctggtggagagactgaagagccacagaagcagcttccccgtggagcagagactggacggcagacagagaagacccagcaccatcgccgagcagaccgtggccaaggcccagaccgtgggcctgcccgtgaccatgcacagccccaacatgagactgctgagaagcgccctgctgccccaggccagcaacgtggaggccttcagcttccccgccagcggctgccaggccgaggccgccttcatggaggaggagtgcgtggacacccccaaggtgaacggctgcctgctggaccccgtgccccccgtgctggtgagaaagggctgccagagcctgcccagcaacatgatggagaccagcatcgacgagggcctggagaccgagggcgaggccgaggaggaccccgcccacgccttcgaggccttccagagcaccagaagcggccagagaagacacaccctgagcgaggtgaccaaccagctggtggtgatgcccggcgccggcaagatcttcagcatgaacgacagccccagcctggacagcgtggacagcgagtacgacatgggcagcgtgcagagagacctgaacttcctggaggacaaccccagcctgaaggacatcatgctggccaaccagcccagccccagaatgaccagccccttcatcagcctgagacccaccaaccccgccatgcaggccctgagcagccagaagagagaggtgcacaacagaagccccgtgagcttcagagagggcagaagagccagcgacaccagcctgacccagggcatcgtggccttcagacagcacctgcagaacctggccagaaccaagggcatcctggagctgaacaaggtgcagctgctgtacgagcagatcggccccgaggccgaccccaacctggcccccgccgccccccagctgcaggacctggccagcagctgcccccaggaggaggtgagccagcagcaggagagcgtgagcaccctgcccgccagcgtgcacccccagctgagccccagacagagcctggagacccagtacctgcagcacagactgcagaagcccagcctgctgagcaaggcccagaacacctgccagctgtactgcaaggagccccccagaagcctggagcagcagctgcaggagcacagactgcagcagaagagactgttcctgcagaagcagagccagctgcaggcctacttcaaccagatgcagatcgccgagagcagctacccccagcccagccagcagctgcccctgcccagacaggagacccccccccccagccagcaggccccccccttcagcctgacccagcccctgagccccgtgctggagcccagcagcgagcagatgcagtacagccccttcctgagccagtaccaggagatgcagctgcagcccctgcccagcaccagcggccccagagccgccccccccctgcccacccagctgcagcagcagcagccccccccccccccccccccccccccccccagacagcccggcgccgcccccgcccccctgcagttcagctaccagacctgcgagctgcccagcgccgccagccccgcccccgactaccccaccccctgccagtaccccgtggacggcgcccagcagagcgacctgaccggccccgactgccccagaagccccggcctgcaggaggcccccagcagctacgaccccctggccctgagcgagctgcccggcctgttcgactgcgagatgctggacgccgtggacccccagcacaacggctacgtgctggtgaactag

SEQ ID NO: 98007 - DNA, 1881 bp, synthetic construct
  misc_feature 1..1881: note = Description of Artificial Sequence: Synthetic coding sequence
  source 1..1881: mol_type = other DNA
atgcagagagccgacagcgagcagcccagcaagagacccagatgcgacgacagccccagaacccccagcaacacccccagcgccgaggccgactggagccccggcctggagctgcaccccgactacaagacctggggccccgagcaggtgtgcagcttcctgagaagaggcggcttcgaggagcccgtgctgctgaagaacatcagagagaacgagatcaccggcgccctgctgccctgcctggacgagagcagattcgagaacctgggcgtgagcagcctgggcgagagaaagaagctgctgagctacatccagagactggtgcagatccacgtggacaccatgaaggtgatcaacgaccccatccacggccacatcgagctgcaccccctgctggtgagaatcatcgacaccccccagttccagagactgagatacatcaagcagctgggcggcggctactacgtgttccccggcgccagccacaacagattcgagcacagcctgggcgtgggctacctggccggctgcctggtgcacgccctgggcgagaagcagcccgagctgcagatcagcgagagagacgtgctgtgcgtgcagatcgccggcctgtgccacgacctgggccacggccccttcagccacatgttcgacggcagattcatccccctggccagacccgaggtgaagtggacccacgagcagggcagcgtgatgatgttcgagcacctgatcaacagcaacggcatcaagcccgtgatggagcagtacggcctgatccccgaggaggacatctgcttcatcaaggagcagatcgtgggccccctggagagccccgtggaggacagcctgtggccctacaagggcagacccgagaacaagagcttcctgtacgagatcgtgagcaacaagagaaacggcatcgacgtggacaagtgggactacttcgccagagactgccaccacctgggcatccagaacaacttcgactacaagagattcatcaagttcgccagagtgtgcgaggtggacaacgagctgagaatctgcgccagagacaaggaggtgggcaacctgtacgacatgttccacaccagaaacagcctgcacagaagagcctaccagcacaaggtgggcaacatcatcgacaccatgatcaccgacgccttcctgaaggccgacgactacatcgagatcaccggcgccggcggcaagaagtacagaatcagcaccgccatcgacgacatggaggcctacaccaagctgaccgacaacatcttcctggagatcctgtacagcaccgaccccaagctgaaggacgccagagagatcctgaagcagatcgagtacagaaacctgttcaagtacgtgggcgagacccagcccaccggccagatcaagatcaagagagaggactacgagagcctgcccaaggaggtggccagcgccaagcccaaggtgctgctggacgtgaagctgaaggccgaggacttcatcgtggacgtgatcaacatggactacggcatgcaggagaagaaccccatcgaccacgtgagcttctactgcaagaccgcccccaacagagccatcagaatcaccaagaaccaggtgagccagctgctgcccgagaagttcgccgagcagctgatcagagtgtactgcaagaaggtggacagaaagagcctgtacgccgccagacagtacttcgtgcagtggtgcgccgacagaaacttcaccaagccccaggacggcgacgtgatcgcccccctgatcaccccccagaagaaggagtggaacgacagcaccagcgtgcagaaccccaccagactgagagaggccagcaagagcagagtgcagctgttcaaggacgaccccatgtag

SEQ ID NO: 98008 - DNA, 513 bp, synthetic construct
  misc_feature 1..513: note = Description of Artificial Sequence: Synthetic coding sequence
  source 1..513: mol_type = other DNA
atgttcgacggcagattcatccccctggccagacccgaggtgaagtggacccacgagcagggcagcgtgatgatgttcgagcacctgatcaacagcaacggcatcaagcccgtgatggagcagtacggcctgatccccgaggaggacatctgcttcatcaaggagcagatcgtgggccccctggagagccccgtggaggacagcctgtggccctacaagggcagacccgagaacaagagcttcctgtacgagatcgtgagcaacaagagaaacggcatcgacgtggacaagtgggactacttcgccagagactgccaccacctgggcatccagaacaacttcgactacaagagattcatcaagttcgccagagtgtgcgaggtggacaacgagctgagaatctgcgccagagacaaggaggtgggcaacctgtacgacatgttccacaccagaaacagcctgcacagaagagcctaccagcacaaggtgggcaacatcatcgacaccatgtag

SEQ ID NO: 98009 - DNA, 1326 bp, synthetic construct
  misc_feature 1..1326: note = Description of Artificial Sequence: Synthetic coding sequence
  source 1..1326: mol_type = other DNA
atggagatcagactggacaccctgagcgccagcctgggcagaagcagcaccctgaacaactgcaacctggaggacaagctggcctggtacgagggcgaggcctacatgtggcaccactggaagcccttccccgagaaccccctgtggacctgcctggacttccagatcgcccaggtgggcccctgggaccactgcagcagctgcatcagacacaccagactgaagagcagctgcagcgacatggacctgctgcacagctggagaagcagcagcttcggcaacttcgacagattcagaaacaacagcctgagcaagcccgacgacagcaccgaggcccacgagggcgaccccaccaacggcagcggcgagcagagcaagaccagcaacaacggcggcggcctgggcaagaagatgagagccatcagctggaccatgaagaagaaggtgggcaagaagtacatcaaggccctgagcgaggagaaggacgaggaggacggcgagaacgcccacccctacagaaacagcgaccccgtgatcggcacccacaccgagaaggtgagcctgaaggccagcgacagcatggacagcctgtacagcggccagagcagcagcagcggcatcaccagctgcagcgacggcaccagcaacagagacagcttcagactggacgacgacggcccctacagcggccccttctgcggcagagccagagtgcacaccgacttcacccccagcccctacgacaccgacagcctgaagatcaagaagggcgacatcatcgacatcatctgcaagacccccatgggcatgtggaccggcatgctgaacaacaaggtgggcaacttcaagttcatctacgtggacgtgatcagcgaggaggaggccgcccccaagaagatcaaggccaacagaagaagcaacagcaagaagagcaagaccctgcaggagttcctggagagaatccacctgcaggagtacaccagcaccctgctgctgaacggctacgagaccctggaggacctgaaggacatcaaggagagccacctgatcgagctgaacatcgagaaccccgacgacagaagaagactgctgagcgccgccgagaacttcctggaggaggagatcatccaggagcaggagaacgagcccgagcccctgagcctgagcagcgacatcagcctgaacaagagccagctggacgactgccccagagacagcggctgctacatcagcagcggcaacagcgacaacggcaaggaggacctggagagcgagaacctgagcgacatggtgcacaagatcatcatcaccgagcccagcgactag

SEQ ID NO: 98010 - DNA, 618 bp, synthetic construct
  misc_feature 1..618: note = Description of Artificial Sequence: Synthetic coding sequence
  source 1..618: mol_type = other DNA
atgctgaagagaaagcccagcaacgtgagcgagaaggagaagcaccagaagcccaagaagggcgacatcatcgacatcatctgcaagacccccatgggcatgtggaccggcatgctgaacaacaaggtgggcaacttcaagttcatctacgtggacgtgatcagcgaggaggaggccgcccccaagaagatcaaggccaacagaagaagcaacagcaagaagagcaagaccctgcaggagttcctggagagaatccacctgcaggagtacaccagcaccctgctgctgaacggctacgagaccctggaggacctgaaggacatcaaggagagccacctgatcgagctgaacatcgagaaccccgacgacagaagaagactgctgagcgccgccgagaacttcctggaggaggagatcatccaggagcaggagaacgagcccgagcccctgagcctgagcagcgacatcagcctgaacaagagccagctggacgactgccccagagacagcggctgctacatcagcagcggcaacagcgacaacggcaaggaggacctggagagcgagaacctgagcgacatggtgcacaagatcatcatcaccgagcccagcgactag

SEQ ID NO: 98011 - DNA, 1122 bp, synthetic construct
  misc_feature 1..1122: note = Description of Artificial Sequence: Synthetic coding sequence
  source 1..1122: mol_type = other DNA
atgctgaagagaaagcccagcaacgtgagcgagaaggagaagcaccagaagcccaagagaagcagcagcttcggcaacttcgacagattcagaaacaacagcctgagcaagcccgacgacagcaccgaggcccacgagggcgaccccaccaacggcagcggcgagcagagcaagaccagcaacaacggcggcggcctgggcaagaagatgagagccatcagctggaccatgaagaagaaggtgggcaagaagtacatcaaggccctgagcgaggagaaggacgaggaggacggcgagaacgcccacccctacagaaacagcgaccccgtgatcggcacccacaccgagaaggtgagcctgaaggccagcgacagcatggacagcctgtacagcggccagagcagcagcagcggcatcaccagctgcagcgacggcaccagcaacagagacagcttcagactggacgacgacggcccctacagcggccccttctgcggcagagccagagtgcacaccgacttcacccccagcccctacgacaccgacagcctgaagatcaagaagggcgacatcatcgacatcatctgcaagacccccatgggcatgtggaccggcatgctgaacaacaaggtgggcaacttcaagttcatctacgtggacgtgatcagcgaggaggaggccgcccccaagaagatcaaggccaacagaagaagcaacagcaagaagagcaagaccctgcaggagttcctggagagaatccacctgcaggagtacaccagcaccctgctgctgaacggctacgagaccctggaggacctgaaggacatcaaggagagccacctgatcgagctgaacatcgagaaccccgacgacagaagaagactgctgagcgccgccgagaacttcctggaggaggagatcatccaggagcaggagaacgagcccgagcccctgagcctgagcagcgacatcagcctgaacaagagccagctggacgactgccccagagacagcggctgctacatcagcagcggcaacagcgacaacggcaaggaggacctggagagcgagaacctgagcgacatggtgcacaagatcatcatcaccgagcccagcgactag

SEQ ID NO: 98012 - DNA, 1008 bp, synthetic construct
  misc_feature 1..1008: note = Description of Artificial Sequence: Synthetic coding sequence
  source 1..1008: mol_type = other DNA
atgggcagcgccagccccggcctgagcagcgtgagccccagccacctgctgctgccccccgacaccgtgagcagaaccggcctggagaaggccgccgccggcgccgtgggcctggagagaagagactggagccccagcccccccgccacccccgagcagggcctgagcgccttctacctgagctacttcgacatgctgtaccccgaggacagcagctgggccgccaaggcccccggcgccagcagcagagaggagccccccgaggagcccgagcagtgccccgtgatcgacagccaggcccccgccggcagcctggacctggtgcccggcggcctgaccctggaggagcacagcctggagcaggtgcagagcatggtggtgggcgaggtgctgaaggacatcgagaccgcctgcaagctgctgaacatcaccgccgaccccatggactggagccccagcaacgtgcagaagtggctgctgtggaccgagcaccagtacagactgccccccatgggcaaggccttccaggagctggccggcaaggagctgtgcgccatgagcgaggagcagttcagacagagaagccccctgggcggcgacgtgctgcacgcccacctggacatctggaagagcgccgcctggatgaaggagagaaccagccccggcgccatccactactgcgccagcaccagcgaggagagctggaccgacagcgaggtggacagcagctgcagcggccagcccatccacctgtggcagttcctgaaggagctgctgctgaagccccacagctacggcagattcatcagatggctgaacaaggagaagggcatcttcaagatcgaggacagcgcccaggtggccagactgtggggcatcagaaagaacagacccgccatgaactacgacaagctgagcagaagcatcagacagtactacaagaagggcatcatcagaaagcccgacatcagccagagactggtgtaccagttcgtgcaccccatctag

SEQ ID NO: 98013 - DNA, 960 bp, synthetic construct
  misc_feature 1..960: note = Description of Artificial Sequence: Synthetic coding sequence
  source 1..960: mol_type = other DNA
atgggcagcgccagccccggcctgagcagcgtgagccccagccacctgctgctgccccccgacaccgtgagcagaaccggcctggagaaggccgccgccggcgccgtgggcctggagagaagagactggagccccagcccccccgccacccccgagcagggcctgagcgccttctacctgagctacttcgacatgctgtaccccgaggacagcagctgggccgccaaggcccccggcgccagcagcagagaggagccccccgaggagcccgagcagtgccccgtgatcgacagccaggcccccgccggcagcctggacctggtgcccggcggcctgaccctggaggagcacagcctggagcaggtgcagagcatggtggtgggcgaggtgctgaaggacatcgagaccgcctgcaagctgctgaacatcaccgccgaccccatggactggagccccagcaacgtgcagaagtggctgctgtggaccgagcaccagtacagactgccccccatgggcaaggccttccaggagctggccggcaaggagctgtgcgccatgagcgaggagcagttcagacagagaagccccctgggcggcgacgtgctgcacgcccacctggacatctggaagagcgccagcaccagcgaggagagctggaccgacagcgaggtggacagcagctgcagcggccagcccatccacctgtggcagttcctgaaggagctgctgctgaagccccacagctacggcagattcatcagatggctgaacaaggagaagggcatcttcaagatcgaggacagcgcccaggtggccagactgtggggcatcagaaagaacagacccgccatgaactacgacaagctgagcagaagcatcagacagtactacaagaagggcatcatcagaaagcccgacatcagccagagactggtgtaccagttcgtgcaccccatctag

SEQ ID NO: 98014 - DNA, 1218 bp, synthetic construct
  misc_feature 1..1218: note = Description of Artificial Sequence: Synthetic coding sequence
  source 1..1218: mol_type = other DNA
atggccgccagcggcaagaccagcaagagcgagcccaaccacgtgatcttcaagaagatcagcagagacaagagcgtgaccatctacctgggcaacagagactacatcgaccacgtgagccaggtgcagcccgtggacggcgtggtgctggtggaccccgacctggtgaagggcaagaaggtgtacgtgaccctgacctgcgccttcagatacggccaggaggacatcgacgtgatcggcctgaccttcagaagagacctgtacttcagcagagtgcaggtgtacccccccgtgggcgccgccagcacccccaccaagctgcaggagagcctgctgaagaagctgggcagcaacacctaccccttcctgctgaccttccccgactacctgccctgcagcgtgatgctgcagcccgccccccaggacagcggcaagagctgcggcgtggacttcgaggtgaaggccttcgccaccgacagcaccgacgccgaggaggacaagatccccaagaagagcagcgtgagactgctgatcagaaaggtgcagcacgcccccctggagatgggcccccagcccagagccgaggccgcctggcagttcttcatgagcgacaagcccctgcacctggccgtgagcctgaacaaggagatctacttccacggcgagcccatccccgtgaccgtgaccgtgaccaacaacaccgagaagaccgtgaagaagatcaaggccttcgtggagcaggtggccaacgtggtgctgtacagcagcgactactacgtgaagcccgtggccatggaggaggcccaggagaaggtgccccccaacagcaccctgaccaagaccctgaccctgctgcccctgctggccaacaacagagagagaagaggcatcgccctggacggcaagatcaagcacgaggacaccaacctggccagcagcaccatcatcaaggagggcatcgacagaaccgtgctgggcatcctggtgagctaccagatcaaggtgaagctgaccgtgagcggcatgaccggcagacagaaggccagcgaggtggccaccgaggtgcccttcagactgatgcacccccagcccgaggaccccggccagttcagctaccaggacgccaacctggtgttcgaggagttcgccagacacaacctgaaggacgccggcgaggccgaggagggcaagagagacaagaacgacgtggacgagtag

SEQ ID NO: 98015 - DNA, 1218 bp, synthetic construct
  misc_feature 1..1218: note = Description of Artificial Sequence: Synthetic coding sequence
  source 1..1218: mol_type = other DNA
atggccgccagcggcaagaccagcaagagcgagcccaaccacgtgatcttcaagaagatcagcagagacaagagcgtgaccatctacctgggcaacagagactacatcgaccacgtgagccaggtgcagcccgtggacggcgtggtgctggtggaccccgacctggtgaagggcaagaaggtgtacgtgaccctgacctgcgccttcagatacggccaggaggacatcgacgtgatcggcctgaccttcagaagagacctgtacttcagcagagtgcaggtgtacccccccgtgggcgccgccagcacccccaccaagctgcaggagagcctgctgaagaagctgggcagcaacacctaccccttcctgctgaccttccccgactacctgccctgcagcgtgatgctgcagcccgccccccaggacagcggcaagagctgcggcgtggacttcgaggtgaaggccttcgccaccgacagcaccgacgccgaggaggacaagatccccaagaagagcagcgtgagactgctgatcagaaaggtgcagcacgcccccctggagatgggcccccagcccagagccgaggccgcctggcagttcttcatgagcgacaagcccctgcacctggccgtgagcctgaacaaggagatctacttccacggcgagcccatccccgtgaccgtgaccgtgaccaacaacaccgagaagaccgtgaagaagatcaaggccttcgtggagcaggtggccaacgtggtgctgtacagcagcgactactacgtgaagcccgtggccatggaggaggcccaggagaaggtgccccccaacagcaccctgaccaagaccctgaccctgctgcccctgctggccaacaacagagagagaagaggcatcgccctggacggcaagatcaagcacgaggacaccaacctggccagcagcaccatcatcaaggagggcatcgacagaaccgtgctgggcatcctggtgagctaccagatcaaggtgaagctgaccgtgagcggcttcctgggcgagctgaccagcagcgaggtggccaccgaggtgcccttcagactgatgcacccccagcccgaggaccccgccaaggagagctaccaggacgccaacctggtgttcgaggagttcgccagacacaacctgaaggacgccggcgaggccgaggagggcaagagagacaagaacgacgtggacgagtag

SEQ ID NO: 98016 - DNA, 510 bp, synthetic construct
  misc_feature 1..510: note = Description of Artificial Sequence: Synthetic coding sequence
  source 1..510: mol_type = other DNA
atggccgccagcggcaagaccagcaagagcgagcccaaccacgtgatcttcaagaagatcagcagagacaagagcgtgaccatctacctgggcaacagagactacatcgaccacgtgagccaggtgcagcccgtggacggcgtggtgctggtggaccccgacctggtgaagggcaagaaggtgtacgtgaccctgacctgcgccttcagatacggccaggaggacatcgacgtgatcggcctgaccttcagaagagacctgtacttcagcagagtgcaggtgtacccccccgtgggcgccgccagcacccccaccaagctgcaggagagcctgctgaagaagctgggcagcaacacctaccccttcctgctgaccttccccgactacctgccctgcagcgtgatgctgcagcccgccccccaggacagcggcaagagctgcggcgtggacttcgaggtgaaggccttcgccaccgacagcaccgacgccgaggaggacaagatcccctag

SEQ ID NO: 98017 - DNA, 708 bp, synthetic construct
  misc_feature 1..708: note = Description of Artificial Sequence: Synthetic coding sequence
  source 1..708: mol_type = other DNA
atgctgcagcccgccccccaggacagcggcaagagctgcggcgtggacttcgaggtgaaggccttcgccaccgacagcaccgacgccgaggaggacaagatccccaagaagagcagcgtgagactgctgatcagaaaggtgcagcacgcccccctggagatgggcccccagcccagagccgaggccgcctggcagttcttcatgagcgacaagcccctgcacctggccgtgagcctgaacaaggagatctacttccacggcgagcccatccccgtgaccgtgaccgtgaccaacaacaccgagaagaccgtgaagaagatcaaggccttcgtggagcaggtggccaacgtggtgctgtacagcagcgactactacgtgaagcccgtggccatggaggaggcccaggagaaggtgccccccaacagcaccctgaccaagaccctgaccctgctgcccctgctggccaacaacagagagagaagaggcatcgccctggacggcaagatcaagcacgaggacaccaacctggccagcagcaccatcatcaaggagggcatcgacagaaccgtgctgggcatcctggtgagctaccagatcaaggtgaagctgaccgtgagcggcttcctgggcgagctgaccagcagcgaggtggccaccgaggtgcccttcagactgatgcacccccagcccgaggaccccggcaagtag

SEQ ID NO: 98018 - DNA, 204 bp, synthetic construct
  misc_feature 1..204: note = Description of Artificial Sequence: Synthetic coding sequence
  source 1..204: mol_type = other DNA
atggccgccagcggcaagaccagcaagagcgagcccaaccacgtgatcttcaagaagatcagcagagacaagagcgtgagcggcgcccaggtgaccatctacctgggcaacagagactacatcgaccacgtgagccaggtgcagcccgtggacggcgtggtgctggtggaccccgacctggtgaagggcaagaaggtgagctag

SEQ ID NO: 98019 - DNA, 633 bp, synthetic construct
  misc_feature 1..633: note = Description of Artificial Sequence: Synthetic coding sequence
  source 1..633: mol_type = other DNA
atggccaccgagaccgtggagctgcacaagctgaagctggccgagctgaagcaggagtgcctggccagaggcctggagaccaagggcatcaagcaggacctgatccacagactgcaggcctacctggaggagcacgccgaggaggaggccaacgaggaggacgtgctgggcgacgagaccgaggaggaggagaccaagcccatcgagctgcccgtgaaggaggaggagccccccgagaagaccgtggacgtggccgccgagaagaaggtggtgaagatcaccagcgagatcccccagaccgagagaatgcagaagagagccgagagattcaacgtgcccgtgagcctggagagcaagaaggccgccagagccgccagattcggcatcagcagcgtgcccaccaagggcctgagcagcgacaacaagcccatggtgaacctggacaagctgaaggagagagcccagagattcggcctgaacgtgagcagcatcagcagaaagagcgaggacgacgagaagctgaagaagagaaaggagagattcggcatcgtgaccagcagcgccggcaccggcaccaccgaggacaccgaggccaagaagagaaagagagccgagagattcggcatcgcctag

SEQ ID NO: 98020 - DNA, 453 bp, synthetic construct
  misc_feature 1..453: note = Description of Artificial Sequence: Synthetic coding sequence
  source 1..453: mol_type = other DNA
atggaggaggagaccaagcccatcgagctgcccgtgaaggaggaggagccccccgagaagaccgtggacgtggccgccgagaagaaggtggtgaagatcaccagcgagatcccccagaccgagagaatgcagaagagagccgagagattcaacgtgcccgtgagcctggagagcaagaaggccgccagagccgccagattcggcatcagcagcgtgcccaccaagggcctgagcagcgacaacaagcccatggtgaacctggacaagctgaaggagagagcccagagattcggcctgaacgtgagcagcatcagcagaaagagcgaggacgacgagaagctgaagaagagaaaggagagattcggcatcgtgaccagcagcgccggcaccggcaccaccgaggacaccgaggccaagaagagaaagagagccgagagattcggcatcgcctag

SEQ ID NO: 98021 - DNA, 633 bp, synthetic construct; identical to SEQ ID NO: 98019
  misc_feature 1..633: note = Description of Artificial Sequence: Synthetic coding sequence
  source 1..633: mol_type = other DNA

SEQ ID NO: 98022 - DNA, 879 bp, synthetic construct
  misc_feature 1..879: note = Description of Artificial Sequence: Synthetic coding sequence
  source 1..879: mol_type = other DNA
atggccggcaagaagaacgtgctgagcagcctggccgtgtacgccgaggacagcgagcccgagagcgacggcgaggccggcatcgaggccgtgggcagcgccgccgaggagaagggcggcctggtgagcgacgcctacggcgaggacgacttcagcagactgggcggcgacgaggacggctacgaggaggaggaggacgagaacagcagacagagcgacaacaccgaggccgagaagagagacccccaggagctggtggccagcttcagcgagagagtgagaaacatgagccccgacgagatcaagatcccccccgagccccccggcagatgcagcaaccacctgcaggacaagatccagaagctgtacgagagaaagatcaaggagggcatggacatgaactacatcatccagagaaagaaggagttcagaaaccccagcatctacgagaagctgatccagttctgcgccatcgacgagctgggcaccaactaccccaaggacatgttcgacccccacggctggagcgaggacagctactacgaggccctggccaaggcccagaagatcgagatggacaagctggagaaggccaagaaggagagaaccaagatcgagttcgtgaccggcaccaagaagggcaccaccaccaacgccaccagcaccaccaccaccaccgccagcaccgccgtggccgacgcccagaagagaaagagcaagtgggacagcgccatccccgtgaccaccatcgcccagcccaccatcctgaccaccaccgccaccctgcccgccgtggtgaccgtgaccaccagcgccagcggcagcaagaccaccgtgatcagcgccgtgggcaccatcgtgaagaaggccaagcagtag

SEQ ID NO: 98023 - DNA, 927 bp, synthetic construct
  misc_feature 1..927: note = Description of Artificial Sequence: Synthetic coding sequence
  source 1..927: mol_type = other DNA
atggccggcaagaagaacgtgctgagcagcctggccgtgtacgccgaggacagcgagcccgagagcgacggcgaggccggcatcgaggccgtgggcagcgccgccgaggagaagggcggcctggtgagcgacgcctacggcgaggacgacttcagcagactgggcggcgacgaggacggctacgaggaggaggaggacgagaacagcagacagagcgaggacgacgacagcgagaccgagaagcccgaggccgacgaccccaaggacaacaccgaggccgagaagagagacccccaggagctggtggccagcttcagcgagagagtgagaaacatgagccccgacgagatcaagatcccccccgagccccccggcagatgcagcaaccacctgcaggacaagatccagaagctgtacgagagaaagatcaaggagggcatggacatgaactacatcatccagagaaagaaggagttcagaaaccccagcatctacgagaagctgatccagttctgcgccatcgacgagctgggcaccaactaccccaaggacatgttcgacccccacggctggagcgaggacagctactacgaggccctggccaaggcccagaagatcgagatggacaagctggagaaggccaagaaggagagaaccaagatcgagttcgtgaccggcaccaagaagggcaccaccaccaacgccaccagcaccaccaccaccaccgccagcaccgccgtggccgacgcccagaagagaaagagcaagtgggacagcgccatccccgtgaccaccatcgcccagcccaccatcctgaccaccaccgccaccctgcccgccgtggtgaccgtgaccaccagcgccagcggcagcaagaccaccgtgatcagcgccgtgggcaccatcgtgaagaaggccaagcagtag

SEQ ID NO: 98024 - DNA, 507 bp, synthetic construct
  misc_feature 1..507: note = Description of Artificial Sequence: Synthetic coding sequence
  source 1..507: mol_type = other DNA
atggccggcaagaagaacgtgctgagcagcctggccgtgtacgccgaggacagcgagcccgagagcgacggcgaggccggcatcgaggccgtgggcagcgccgccgaggagaagggcggcctggtgagcgacgcctacggcgaggacgacttcagcagactgggcggcgacgaggacggctacgaggaggaggaggacgagaacagcagacagagcgaggacgacgacagcgagaccgagaagcccgaggccgacgaccccaaggacaacaccgaggccgagaagagagacccccaggagctggtggccagcttcagcgagagagtgagaaacatgagccccgacgagatcaagatcccccccgagccccccggcagatgcagcaaccacctgcaggacaagatccagaagctgtacgagagaaagatcaaggagggcatggacatgaactacatcatccagagaaagaaggagttcagaaaccccagccagggccccgagaactag

SEQ ID NO: 98025 - DNA, 927 bp, synthetic construct; identical to SEQ ID NO: 98023
  misc_feature 1..927: note = Description of Artificial Sequence: Synthetic coding sequence
  source 1..927: mol_type = other DNA

SEQ ID NO: 98026 - DNA, 366 bp, synthetic construct
  misc_feature 1..366: note = Description of Artificial Sequence: Synthetic coding sequence
  source 1..366: mol_type = other DNA
atgagcttcatcttcgagtggatctacaacggcttcagcagcgtgctgcagttcctgggcctgtacaagaagagcggcaagctggtgttcctgggcctggacaacgccggcaagaccaccctgctgcacatgctgaaggacgacagactgggccagcacgtgcccaccctgcaccccaccagcgaggagctgaccatcgccggcatgaccttcaccaccttcgacctgggcggccacgagcaggccagaagagtgtggaagaactacctgcccgccatcaacggcatcgtgttcctggtggactgcgccgaccacagcagactggtggagagcaaggtggagctgaacgtgtgcttcgtgctgtag

SEQ ID NO: 98027 - DNA, 597 bp, synthetic construct
  misc_feature 1..597: note = Description of Artificial Sequence: Synthetic coding sequence
  source 1..597: mol_type = other DNA
atgagcttcatcttcgagtggatctacaacggcttcagcagcgtgctgcagttcctgggcctgtacaagaagagcggcaagctggtgttcctgggcctggacaacgccggcaagaccaccctgctgcacatgctgaaggacgacagactgggccagcacgtgcccaccctgcaccccaccagcgaggagctgaccatcgccggcatgaccttcaccaccttcgacctgggcggccacgagcaggccagaagagtgtggaagaactacctgcccgccatcaacggcatcgtgttcctggtggactgcgccgaccacagcagactggtggagagcaaggtggagctgaacgccctgatgaccgacgagaccatcagcaacgtgcccatcctgatcctgggcaacaagatcgacagaaccgacgccatcagcgaggagaagctgagagagatcttcggcctgtacggccagaccaccggcaagggcaacgtgaccctgaaggagctgaacgccagacccatggaggtgttcatgtgcagcgtgctgaagagacagggctacggcgagggcttcagatggctgagccagtacatcgactag

SEQ ID NO: 98028 - DNA, 597 bp, synthetic construct; identical to SEQ ID NO: 98027
  misc_feature 1..597: note = Description of Artificial Sequence: Synthetic coding sequence
  source 1..597: mol_type = other DNA

SEQ ID NO: 98029 - DNA, 597 bp, synthetic construct; identical to SEQ ID NO: 98027
  misc_feature 1..597: note = Description of Artificial Sequence: Synthetic coding sequence
  source 1..597: mol_type = other DNA

SEQ ID NO: 98030 - DNA, 597 bp, synthetic construct; identical to SEQ ID NO: 98027
  misc_feature 1..597: note = Description of Artificial Sequence: Synthetic coding sequence
  source 1..597: mol_type = other DNA

SEQ ID NO: 98031 - DNA, 354 bp, synthetic construct
  misc_feature 1..354: note = Description of Artificial Sequence: Synthetic coding sequence
  source 1..354: mol_type = other DNA
atgggcctgagcttctggtggaccgtgcagatcatcctggccagctggaaccccaagctgagcctgatgatctactgcagcagcctgctgaccctggcccccaacgccctgatgaccgacgagaccatcagcaacgtgcccatcctgatcctgggcaacaagatcgacagaaccgacgccatcagcgaggagaagctgagagagatcttcggcctgtacggccagaccaccggcaagggcaacgtgaccctgaaggagctgaacgccagacccatggaggtgttcatgtgcagcgtgctgaagagacagggctacggcgagggcttcagatggctgagccagtacatcgactag

SEQ ID NO: 98032 - DNA, 597 bp, synthetic construct; identical to SEQ ID NO: 98027
  misc_feature 1..597: note = Description of Artificial Sequence: Synthetic coding sequence
  source 1..597: mol_type = other DNA

SEQ ID NO: 98033 - DNA, 348 bp, synthetic construct
  misc_feature 1..348: note = Description of Artificial Sequence: Synthetic coding sequence
  source 1..348: mol_type = other DNA
tgaagcttctggtggaccgtgcagatcatcctggccagctggaaccccaagctgagcctgatgatctactgcagcagcctgctgaccctggcccccaacgccctgatgaccgacgagaccatcagcaacgtgcccatcctgatcctgggcaacaagatcgacagaaccgacgccatcagcgaggagaagctgagagagatcttcggcctgtacggccagaccaccggcaagggcaacgtgaccctgaaggagctgaacgccagacccatggaggtgttcatgtgcagcgtgctgaagagacagggctacggcgagggcttcagatggctgagccagtacatcgactag

SEQ ID NO: 98034 - DNA, 468 bp, synthetic construct
  misc_feature 1..468: note = Description of Artificial Sequence: Synthetic coding sequence
  source 1..468: mol_type = other DNA
atgctgaaggacgacagactgggccagcacgtgcccaccctgcaccccaccagcgaggagctgaccatcgccggcatgaccttcaccaccttcgacctgggcggccacgagcaggccagaagagtgtggaagaactacctgcccgccatcaacggcatcgtgttcctggtggactgcgccgaccacagcagactggtggagagcaaggtggagctgaacgccctgatgaccgacgagaccatcagcaacgtgcccatcctgatcctgggcaacaagatcgacagaaccgacgccatcagcgaggagaagctgagagagatcttcggcctgtacggccagaccaccggcaagggcaacgtgaccctgaaggagctgaacgccagacccatggaggtgttcatgtgcagcgtgctgaagagacagggctacggcgagggcttcagatggctgagccagtacatcgactag
